United States Patent Application Publication US 2016/0281171 A1 - sequence listing, part 8

SEQ ID NO: 168069 - DNA, 70 bp, Homo sapiens
ccaaggttttaagtcaggtcttaatccatgccttctcaaagttcattatcctctaaaactactgtcattt

SEQ ID NO: 168070 - DNA, 76 bp, Homo sapiens
aagtcaggtcttaatccatgccttctcaaagttcattatcctctaaaactactgtcattttattcatgatctggaa

SEQ ID NO: 168071 - DNA, 75 bp, Homo sapiens
gtcttaatccatgccttctcaaagttcattatcctctaaaactactgtcattttattcatgatctggaaaactgg

SEQ ID NO: 168072 - DNA, 78 bp, Homo sapiens
atgccttctcaaagttcattatcctctaaaactactgtcattttattcatgatctggaaaactgggatatgaactgca

SEQ ID NO: 168073 - DNA, 76 bp, Homo sapiens
agttcattatcctctaaaactactgtcattttattcatgatctggaaaactgggatatgaactgcactcagtaaac

SEQ ID NO: 168074 - DNA, 75 bp, Homo sapiens
ctctaaaactactgtcattttattcatgatctggaaaactgggatatgaactgcactcagtaaacgttaaatctg

SEQ ID NO: 168075 - DNA, 76 bp, Homo sapiens
aaactactgtcattttattcatgatctggaaaactgggatatgaactgcactcagtaaacgttaaatctgtagcta

SEQ ID NO: 168076 - DNA, 77 bp, Homo sapiens
ttattcatgatctggaaaactgggatatgaactgcactcagtaaacgttaaatctgtagctagcattacattaaaac

SEQ ID NO: 168077 - DNA, 78 bp, Homo sapiens
atgatctggaaaactgggatatgaactgcactcagtaaacgttaaatctgtagctagcattacattaaaactgcatct

SEQ ID NO: 168078 - DNA, 76 bp, Homo sapiens
aaactgggatatgaactgcactcagtaaacgttaaatctgtagctagcattacattaaaactgcatcttccggctg

SEQ ID NO: 168079 - DNA, 76 bp, Homo sapiens
taaaatttaaaatttcgtttctcagtcacactagctgcatactcaaatttacatgtgcctgatggttactatgtta

SEQ ID NO: 168080 - DNA, 77 bp, Homo sapiens
tttaaaatttcgtttctcagtcacactagctgcatactcaaatttacatgtgcctgatggttactatgttagaaagc

SEQ ID NO: 168081 - DNA, 80 bp, Homo sapiens
ttctcagtcacactagctgcatactcaaatttacatgtgcctgatggttactatgttagaaagctcagttataaaacact

SEQ ID NO: 168082 - DNA, 81 bp, Homo sapiens
acactagctgcatactcaaatttacatgtgcctgatggttactatgttagaaagctcagttataaaacacttctgtcatca

SEQ ID NO: 168083 - DNA, 76 bp, Homo sapiens
actcaaatttacatgtgcctgatggttactatgttagaaagctcagttataaaacacttctgtcatcagaaaagga

SEQ ID NO: 168084 - DNA, 76 bp, Homo sapiens
aatttacatgtgcctgatggttactatgttagaaagctcagttataaaacacttctgtcatcagaaaaggacaatg

SEQ ID NO: 168085 - DNA, 79 bp, Homo sapiens
tgatggttactatgttagaaagctcagttataaaacacttctgtcatcagaaaaggacaatggcatcctagaacaatga

SEQ ID NO: 168086 - DNA, 79 bp, Homo sapiens
tactatgttagaaagctcagttataaaacacttctgtcatcagaaaaggacaatggcatcctagaacaatgactctgaa

SEQ ID NO: 168087 - DNA, 77 bp, Homo sapiens
agaaagctcagttataaaacacttctgtcatcagaaaaggacaatggcatcctagaacaatgactctgaaatgttac

SEQ ID NO: 168088 - DNA, 78 bp, Homo sapiens
acttctgtcatcagaaaaggacaatggcatcctagaacaatgactctgaaatgttaccctagaaataacagctctgtg

SEQ ID NO: 168089 - DNA, 77 bp, Homo sapiens
aaaaggacaatggcatcctagaacaatgactctgaaatgttaccctagaaataacagctctgtggcagaagtccatg

SEQ ID NO: 168090 - DNA, 78 bp, Homo sapiens
aaaggacaatggcatcctagaacaatgactctgaaatgttaccctagaaataacagctctgtggcagaagtccatgga

SEQ ID NO: 168091 - DNA, 79 bp, Homo sapiens
aatggcatcctagaacaatgactctgaaatgttaccctagaaataacagctctgtggcagaagtccatggaggtgacaa

SEQ ID NO: 168092 - DNA, 79 bp, Homo sapiens
atcctagaacaatgactctgaaatgttaccctagaaataacagctctgtggcagaagtccatggaggtgacaaggcagc

SEQ ID NO: 168093 - DNA, 77 bp, Homo sapiens
aacaatgactctgaaatgttaccctagaaataacagctctgtggcagaagtccatggaggtgacaaggcagcccaaa

SEQ ID NO: 168094 - DNA, 76 bp, Homo sapiens
actctgaaatgttaccctagaaataacagctctgtggcagaagtccatggaggtgacaaggcagcccaaagggatg

SEQ ID NO: 168095 - DNA, 75 bp, Homo sapiens
ctgaaatgttaccctagaaataacagctctgtggcagaagtccatggaggtgacaaggcagcccaaagggatggg

SEQ ID NO: 168096 - DNA, 76 bp, Homo sapiens
atgttaccctagaaataacagctctgtggcagaagtccatggaggtgacaaggcagcccaaagggatggggagcag

SEQ ID NO: 168097 - DNA, 81 bp, Homo sapiens
taacagctctgtggcagaagtccatggaggtgacaaggcagcccaaagggatggggagcaggaggattgtctggagcctca

SEQ ID NO: 168098 - DNA, 77 bp, Homo sapiens
agaagtccatggaggtgacaaggcagcccaaagggatggggagcaggaggattgtctggagcctcatcctaaacatc

SEQ ID NO: 168099 - DNA, 78 bp, Homo sapiens
atggaggtgacaaggcagcccaaagggatggggagcaggaggattgtctggagcctcatcctaaacatcttccgctgc

SEQ ID NO: 168100 - DNA, 78 bp, Homo sapiens
acaaggcagcccaaagggatggggagcaggaggattgtctggagcctcatcctaaacatcttccgctgccattcagac

SEQ ID NO: 168101 - DNA, 78 bp, Homo sapiens
attgtctggagcctcatcctaaacatcttccgctgccattcagacctttcagttgctttatatgctgggtttctacat

SEQ ID NO: 168102 - DNA, 82 bp, Homo sapiens
tggagcctcatcctaaacatcttccgctgccattcagacctttcagttgctttatatgctgggtttctacatttgatgatga

SEQ ID NO: 168103 - DNA, 81 bp, Homo sapiens
taaacatcttccgctgccattcagacctttcagttgctttatatgctgggtttctacatttgatgatgatgagataggaaa

SEQ ID NO: 168104 - DNA, 78 bp, Homo sapiens
agttgctttatatgctgggtttctacatttgatgatgatgagataggaaaaacaagtctgaagcccaaagatatgtaa

SEQ ID NO: 168105 - DNA, 80 bp, Homo sapiens
ctttatatgctgggtttctacatttgatgatgatgagataggaaaaacaagtctgaagcccaaagatatgtaagctatga

SEQ ID NO: 168106 - DNA, 81 bp, Homo sapiens
tgggtttctacatttgatgatgatgagataggaaaaacaagtctgaagcccaaagatatgtaagctatgagctctgaagaa

SEQ ID NO: 168107 - DNA, 82 bp, Homo sapiens
atttgatgatgatgagataggaaaaacaagtctgaagcccaaagatatgtaagctatgagctctgaagaagtgccggcacaa

SEQ ID NO: 168108 - DNA, 79 bp, Homo sapiens
agataggaaaaacaagtctgaagcccaaagatatgtaagctatgagctctgaagaagtgccggcacaagacattctcag

SEQ ID NO: 168109 - DNA, 80 bp, Homo sapiens
aaaacaagtctgaagcccaaagatatgtaagctatgagctctgaagaagtgccggcacaagacattctcagttcaggtga

SEQ ID NO: 168110 - DNA, 82 bp, Homo sapiens
aaagatatgtaagctatgagctctgaagaagtgccggcacaagacattctcagttcaggtgatcagtaaacatcaaggtgac

SEQ ID NO: 168111 - DNA, 85 bp, Homo sapiens
taagctatgagctctgaagaagtgccggcacaagacattctcagttcaggtgatcagtaaacatcaaggtgaccatgccagtgag

SEQ ID NO: 168112 - DNA, 83 bp, Homo sapiens
tctgaagaagtgccggcacaagacattctcagttcaggtgatcagtaaacatcaaggtgaccatgccagtgaggacaaggcca

SEQ ID NO: 168113 - DNA, 83 bp, Homo sapiens
agttcaggtgatcagtaaacatcaaggtgaccatgccagtgaggacaaggccacaggctcacagtcctgggatgagccagtca

SEQ ID NO: 168114 - DNA, 85 bp, Homo sapiens
atcagtaaacatcaaggtgaccatgccagtgaggacaaggccacaggctcacagtcctgggatgagccagtcagcagctggccca

SEQ ID NO: 168115 - DNA, 88 bp, Homo sapiens
gacaaggccacaggctcacagtcctgggatgagccagtcagcagctggcccagaatcagagatgactgcagcacatccctatggtctt

SEQ ID NO: 168116 - DNA, 84 bp, Homo sapiens
agtcctgggatgagccagtcagcagctggcccagaatcagagatgactgcagcacatccctatggtctttaatgggagtgaact

SEQ ID NO: 168117 - DNA, 85 bp, Homo sapiens
atgagccagtcagcagctggcccagaatcagagatgactgcagcacatccctatggtctttaatgggagtgaacttggattaaga

SEQ ID NO: 168118 - DNA, 80 bp, Homo sapiens
agcagctggcccagaatcagagatgactgcagcacatccctatggtctttaatgggagtgaacttggattaagagggaaa

SEQ ID NO: 168119 - DNA, 77 bp, Homo sapiens
cagaatcagagatgactgcagcacatccctatggtctttaatgggagtgaacttggattaagagggaaaccaggtaa

SEQ ID NO: 168120 - DNA, 75 bp, Homo sapiens
agagatgactgcagcacatccctatggtctttaatgggagtgaacttggattaagagggaaaccaggtaagagaa

SEQ ID NO: 168121 - DNA, 72 bp, Homo sapiens
agcacatccctatggtctttaatgggagtgaacttggattaagagggaaaccaggtaagagaatgagataaa

SEQ ID NO: 168122 - DNA, 74 bp, Homo sapiens
tatggtctttaatgggagtgaacttggattaagagggaaaccaggtaagagaatgagataaatctatggcaatc

SEQ ID NO: 168123 - DNA, 74 bp, Homo sapiens
taatgggagtgaacttggattaagagggaaaccaggtaagagaatgagataaatctatggcaatcgattactat

SEQ ID NO: 168124 - DNA, 72 bp, Homo sapiens
agtgaacttggattaagagggaaaccaggtaagagaatgagataaatctatggcaatcgattactatttttg

SEQ ID NO: 168125 - DNA, 71 bp, Homo sapiens
gattaagagggaaaccaggtaagagaatgagataaatctatggcaatcgattactatttttggaaaactaa

SEQ ID NO: 168126 - DNA, 70 bp, Homo sapiens
gaaaccaggtaagagaatgagataaatctatggcaatcgattactatttttggaaaactaatttcaaaaa

SEQ ID NO: 168127 - DNA, 73 bp, Homo sapiens
gaatgagataaatctatggcaatcgattactatttttggaaaactaatttcaaaaaaatgtttggctcatctc

SEQ ID NO: 168128 - DNA, 72 bp, Homo sapiens
atctatggcaatcgattactatttttggaaaactaatttcaaaaaaatgtttggctcatctccatacaggga

SEQ ID NO: 168129 - DNA, 71 bp, Homo sapiens
ggcaatcgattactatttttggaaaactaatttcaaaaaaatgtttggctcatctccatacagggacaaca

SEQ ID NO: 168130 - DNA, 67 bp, Homo sapiens
aaaactaatttcaaaaaaatgtttggctcatctccatacagggacaacaggaattccccttcccttc

SEQ ID NO: 168131 - DNA, 71 bp, Homo sapiens
aaaaaaatgtttggctcatctccatacagggacaacaggaattccccttcccttcctctatagcacttatc

SEQ ID NO: 168132 - DNA, 75 bp, Homo sapiens
atgtttggctcatctccatacagggacaacaggaattccccttcccttcctctatagcacttatccggctagcta

SEQ ID NO: 168133 - DNA, 75 bp, Homo sapiens
gacaacaggaattccccttcccttcctctatagcacttatccggctagctatgcatggcacatttatcttatttt

SEQ ID NO: 168134 - DNA, 79 bp, Homo sapiens
ttcccttcctctatagcacttatccggctagctatgcatggcacatttatcttatttttgaatgtgtccccatccataa

SEQ ID NO: 168135 - DNA, 83 bp, Homo sapiens
tatagcacttatccggctagctatgcatggcacatttatcttatttttgaatgtgtccccatccataatgtcagcttcgtgaa

SEQ ID NO: 168136 - DNA, 82 bp, Homo sapiens
ttatccggctagctatgcatggcacatttatcttatttttgaatgtgtccccatccataatgtcagcttcgtgaacagagat

SEQ ID NO: 168137 - DNA, 80 bp, Homo sapiens
tatgcatggcacatttatcttatttttgaatgtgtccccatccataatgtcagcttcgtgaacagagatttttctctgtt

SEQ ID NO: 168138 - DNA, 75 bp, Homo sapiens
cacatttatcttatttttgaatgtgtccccatccataatgtcagcttcgtgaacagagatttttctctgttttgt

SEQ ID NO: 168139 - DNA, 77 bp, Homo sapiens
tcttatttttgaatgtgtccccatccataatgtcagcttcgtgaacagagatttttctctgttttgttagctctgta

SEQ ID NO: 168140 - DNA, 77 bp, Homo sapiens
aatgtgtccccatccataatgtcagcttcgtgaacagagatttttctctgttttgttagctctgtagcatttagaaa

SEQ ID NO: 168141 - DNA, 78 bp, Homo sapiens
tccataatgtcagcttcgtgaacagagatttttctctgttttgttagctctgtagcatttagaaaagtgcctgaaata

SEQ ID NO: 168142 - DNA, 76 bp, Homo sapiens
atgtcagcttcgtgaacagagatttttctctgttttgttagctctgtagcatttagaaaagtgcctgaaatagtag

SEQ ID NO: 168143 - DNA, 75 bp, Homo sapiens
aacagagatttttctctgttttgttagctctgtagcatttagaaaagtgcctgaaatagtaggcattggatggac

SEQ ID NO: 168144 - DNA, 75 bp, Homo sapiens
atttttctctgttttgttagctctgtagcatttagaaaagtgcctgaaatagtaggcattggatggacggacaga

SEQ ID NO: 168145 - DNA, 78 bp, Homo sapiens
tgttttgttagctctgtagcatttagaaaagtgcctgaaatagtaggcattggatggacggacagatggacagacgga

SEQ ID NO: 168146 - DNA, 78 bp, Homo sapiens
ctctgtagcatttagaaaagtgcctgaaatagtaggcattggatggacggacagatggacagacggatggaataaatg

SEQ ID NO: 168147 - DNA, 71 bp, Homo sapiens
ctgaaatagtaggcattggatggacggacagatggacagacggatggaataaatgggggggggggtgggaa

SEQ ID NO: 168148 - DNA, 70 bp, Homo sapiens
tagtaggcattggatggacggacagatggacagacggatggaataaatgggggggggggtgggaaggaag

SEQ ID NO: 168149 - DNA, 67 bp, Homo sapiens
ttttttttcaattttatcactattttaatcaaataacttagctgtttgaaacaaatccttaagacag

SEQ ID NO: 168150 - DNA, 72 bp, Homo sapiens
caattttatcactattttaatcaaataacttagctgtttgaaacaaatccttaagacagttcaatagagcaa

SEQ ID NO: 168151 - DNA, 71 bp, Homo sapiens
ctattttaatcaaataacttagctgtttgaaacaaatccttaagacagttcaatagagcaaatggtggttc

SEQ ID NO: 168152 - DNA, 73 bp, Homo sapiens
aatcaaataacttagctgtttgaaacaaatccttaagacagttcaatagagcaaatggtggttctggacagaa

SEQ ID NO: 168153 - DNA, 73 bp, Homo sapiens
agctgtttgaaacaaatccttaagacagttcaatagagcaaatggtggttctggacagaaaaataatactcat

SEQ ID NO: 168154 - DNA, 74 bp, Homo sapiens
gaaacaaatccttaagacagttcaatagagcaaatggtggttctggacagaaaaataatactcatttcatgaag

SEQ ID NO: 168155 - DNA, 73 bp, Homo sapiens
ccttaagacagttcaatagagcaaatggtggttctggacagaaaaataatactcatttcatgaagtaaggaaa

SEQ ID NO: 168156 - DNA, 77 bp, Homo sapiens
agttcaatagagcaaatggtggttctggacagaaaaataatactcatttcatgaagtaaggaaagatctgctgtcat

SEQ ID NO: 168157 - DNA, 75 bp, Homo sapiens
aaatggtggttctggacagaaaaataatactcatttcatgaagtaaggaaagatctgctgtcattggaatactgg

SEQ ID NO: 168158 - DNA, 81 bp, Homo sapiens
tctggacagaaaaataatactcatttcatgaagtaaggaaagatctgctgtcattggaatactggtggatgccaggcatta

SEQ ID NO: 168159 - DNA, 81 bp, Homo sapiens
aataatactcatttcatgaagtaaggaaagatctgctgtcattggaatactggtggatgccaggcattacttgtatgtcta

SEQ ID NO: 168160 - DNA, 80 bp, Homo sapiens
atttcatgaagtaaggaaagatctgctgtcattggaatactggtggatgccaggcattacttgtatgtctaagtccttca

SEQ ID NO: 168161 - DNA, 79 bp, Homo sapiens
atgaagtaaggaaagatctgctgtcattggaatactggtggatgccaggcattacttgtatgtctaagtccttcagaaa

SEQ ID NO: 168162 - DNA, 80 bp, Homo sapiens
aaagatctgctgtcattggaatactggtggatgccaggcattacttgtatgtctaagtccttcagaaatgtcatccctcc

SEQ ID NO: 168163 - DNA, 78 bp, Homo sapiens
attggaatactggtggatgccaggcattacttgtatgtctaagtccttcagaaatgtcatccctcccacagctgttac

SEQ ID NO: 168164 - DNA, 76 bp, Homo sapiens
atgccaggcattacttgtatgtctaagtccttcagaaatgtcatccctcccacagctgttaccacctttattccag

SEQ ID NO: 168165 - DNA, 74 bp, Homo sapiens
attacttgtatgtctaagtccttcagaaatgtcatccctcccacagctgttaccacctttattccagtgactct

SEQ ID NO: 168166 - DNA, 75 bp, Homo sapiens
taagtccttcagaaatgtcatccctcccacagctgttaccacctttattccagtgactcttgcttcttattctaa

SEQ ID NO: 168167 - DNA, 75 bp, Homo sapiens
gaaatgtcatccctcccacagctgttaccacctttattccagtgactcttgcttcttattctaatcaccacttct

SEQ ID NO: 168168 - DNA, 74 bp, Homo sapiens
tccctcccacagctgttaccacctttattccagtgactcttgcttcttattctaatcaccacttcttggaggta

SEQ ID NO: 168169 - DNA, 72 bp, Homo sapiens
gctgttaccacctttattccagtgactcttgcttcttattctaatcaccacttcttggaggtacctaaggta

SEQ ID NO: 168170 - DNA, 70 bp, Homo sapiens
acctttattccagtgactcttgcttcttattctaatcaccacttcttggaggtacctaaggtaccaaatg

SEQ ID NO: 168171 - DNA, 73 bp, Homo sapiens
ttgcttcttattctaatcaccacttcttggaggtacctaaggtaccaaatggatattaagtggcagcctggga

SEQ ID NO: 168172 - DNA, 71 bp, Homo sapiens
cttcttggaggtacctaaggtaccaaatggatattaagtggcagcctgggatctaacgacttcacttcaaa

SEQ ID NO: 168173 - DNA, 73 bp, Homo sapiens
gtacctaaggtaccaaatggatattaagtggcagcctgggatctaacgacttcacttcaaatagcttcaaata

SEQ ID NO: 168174 - DNA, 75 bp, Homo sapiens
atattaagtggcagcctgggatctaacgacttcacttcaaatagcttcaaataggtgaagtcaatacacttcaaa

SEQ ID NO: 168175 - DNA, 76 bp, Homo sapiens
gcagcctgggatctaacgacttcacttcaaatagcttcaaataggtgaagtcaatacacttcaaataggctagttc

SEQ ID NO: 168176 - DNA, 75 bp, Homo sapiens
ttcacttcaaatagcttcaaataggtgaagtcaatacacttcaaataggctagttccaggttaatctgacttaca

SEQ ID NO: 168177 - DNA, 72 bp, Homo sapiens
aaatagcttcaaataggtgaagtcaatacacttcaaataggctagttccaggttaatctgacttacaccctg

SEQ ID NO: 168178 - DNA, 71 bp, Homo sapiens
aataggtgaagtcaatacacttcaaataggctagttccaggttaatctgacttacaccctggtgttctatt

SEQ ID NO: 168179 - DNA, 74 bp, Homo sapiens
tcaatacacttcaaataggctagttccaggttaatctgacttacaccctggtgttctatttaagatctcattta

SEQ ID NO: 168180 - DNA, 71 bp, Homo sapiens
acacttcaaataggctagttccaggttaatctgacttacaccctggtgttctatttaagatctcatttaaa

SEQ ID NO: 168181 - DNA, 69 bp, Homo sapiens
taggctagttccaggttaatctgacttacaccctggtgttctatttaagatctcatttaaaaataaggg

SEQ ID NO: 168182 - DNA, 64 bp, Homo sapiens
ccctggtgttctatttaagatctcatttaaaaataagggtccttgtttaacaaagaaaagttta

SEQ ID NO: 168183 - DNA, 67 bp, Homo sapiens
taagatctcatttaaaaataagggtccttgtttaacaaagaaaagtttaaagcccctggcacaggca

SEQ ID NO: 168184 - DNA, 67 bp, Homo sapiens
aaataagggtccttgtttaacaaagaaaagtttaaagcccctggcacaggcaaatagcaaatgtcta

SEQ ID NO: 168185 - DNA, 67 bp, Homo sapiens
aaaagtttaaagcccctggcacaggcaaatagcaaatgtctacttaaggttaacaatacttaggaag

SEQ ID NO: 168186 - DNA, 70 bp, Homo sapiens
gcacaggcaaatagcaaatgtctacttaaggttaacaatacttaggaaggaaaactaagttgcccaaata

SEQ ID NO: 168187 - DNA, 68 bp, Homo sapiens
tgtctacttaaggttaacaatacttaggaaggaaaactaagttgcccaaataacagaagtcactcctc

SEQ ID NO: 168188 - DNA, 69 bp, Homo sapiens
ttaacaatacttaggaaggaaaactaagttgcccaaataacagaagtcactcctccttgtccaaagaga

SEQ ID NO: 168189 - DNA, 69 bp, Homo sapiens
atacttaggaaggaaaactaagttgcccaaataacagaagtcactcctccttgtccaaagagaagagaa

SEQ ID NO: 168190 - DNA, 74 bp, Homo sapiens
aaaactaagttgcccaaataacagaagtcactcctccttgtccaaagagaagagaaagatgcatgttatcacaa

SEQ ID NO: 168191 - DNA, 73 bp, Homo sapiens
cccaaataacagaagtcactcctccttgtccaaagagaagagaaagatgcatgttatcacaagggccccaaaa

SEQ ID NO: 168192 - DNA, 76 bp, Homo sapiens
taacagaagtcactcctccttgtccaaagagaagagaaagatgcatgttatcacaagggccccaaaactgaacata

SEQ ID NO: 168193 - DNA, 77 bp, Homo sapiens
tcctccttgtccaaagagaagagaaagatgcatgttatcacaagggccccaaaactgaacataagcatgtatgttaa

SEQ ID NO: 168194 - DNA, 76 bp, Homo sapiens
ttgtccaaagagaagagaaagatgcatgttatcacaagggccccaaaactgaacataagcatgtatgttaacattt

SEQ ID NO: 168195 - DNA, 76 bp, Homo sapiens
agaaagatgcatgttatcacaagggccccaaaactgaacataagcatgtatgttaacattttgttgtcaaactgta

SEQ ID NO: 168196 - DNA, 74 bp, Homo sapiens
atgttatcacaagggccccaaaactgaacataagcatgtatgttaacattttgttgtcaaactgtagttcattc

SEQ ID NO: 168197 - DNA, 72 bp, Homo sapiens
acaagggccccaaaactgaacataagcatgtatgttaacattttgttgtcaaactgtagttcattctggaaa

SEQ ID NO: 168198 - DNA, 71 bp, Homo sapiens
cccaaaactgaacataagcatgtatgttaacattttgttgtcaaactgtagttcattctggaaagtaaaaa

SEQ ID NO: 168199 - DNA, 70 bp, Homo sapiens
gaacataagcatgtatgttaacattttgttgtcaaactgtagttcattctggaaagtaaaaaaaaacaaa

SEQ ID NO: 168200 - DNA, 71 bp, Homo sapiens
aacaaaaacaagtcattagtgatccaaaccttttatcatctaaagaactgacaattattactctaataaca

SEQ ID NO: 168201 - DNA, 72 bp, Homo sapiens
aaacaagtcattagtgatccaaaccttttatcatctaaagaactgacaattattactctaataacatttgtc

SEQ ID NO: 168202 - DNA, 73 bp, Homo sapiens
gtgatccaaaccttttatcatctaaagaactgacaattattactctaataacatttgtcttatttgacaagga

SEQ ID NO: 168203 - DNA, 71 bp, Homo sapiens
ccttttatcatctaaagaactgacaattattactctaataacatttgtcttatttgacaaggataaagaag

SEQ ID NO: 168204 - DNA, 74 bp, Homo sapiens
tcatctaaagaactgacaattattactctaataacatttgtcttatttgacaaggataaagaaggttatagaga

SEQ ID NO: 168205 - DNA, 73 bp, Homo sapiens
gacaattattactctaataacatttgtcttatttgacaaggataaagaaggttatagagaaggttcagagagc

SEQ ID NO: 168206 - DNA, 76 bp, Homo sapiens
attactctaataacatttgtcttatttgacaaggataaagaaggttatagagaaggttcagagagctgctgcagaa

SEQ ID NO: 168207 - DNA, 74 bp, Homo sapiens
taacatttgtcttatttgacaaggataaagaaggttatagagaaggttcagagagctgctgcagaaaaacggta

SEQ ID NO: 168208 - DNA, 78 bp, Homo sapiens
tatttgacaaggataaagaaggttatagagaaggttcagagagctgctgcagaaaaacggtagcacagacactcagta

SEQ ID NO: 168209 - DNA, 79 bp, Homo sapiens
ataaagaaggttatagagaaggttcagagagctgctgcagaaaaacggtagcacagacactcagtagagtcagttatga

SEQ ID NO: 168210 - DNA, 84 bp, Homo sapiens
ttatagagaaggttcagagagctgctgcagaaaaacggtagcacagacactcagtagagtcagttatgatcatccagatagtaa

SEQ ID NO: 168211 - DNA, 84 bp, Homo sapiens
ggtagcacagacactcagtagagtcagttatgatcatccagatagtaattagcaaatcaagagagacaatcaggaaggtgccca

SEQ ID NO: 168212 - DNA, 78 bp, Homo sapiens
atcatccagatagtaattagcaaatcaagagagacaatcaggaaggtgcccagggtatgtacctgtggctaaatcgta

SEQ ID NO: 168213 - DNA, 76 bp, Homo sapiens
agatagtaattagcaaatcaagagagacaatcaggaaggtgcccagggtatgtacctgtggctaaatcgtagacaa

SEQ ID NO: 168214 - DNA, 72 bp, Homo sapiens
aggaaggtgcccagggtatgtacctgtggctaaatcgtagacaagcaaacagcaggagtttaaatgaacatt

SEQ ID NO: 168215 - DNA, 72 bp, Homo sapiens
agggtatgtacctgtggctaaatcgtagacaagcaaacagcaggagtttaaatgaacatttcttgattttaa

SEQ ID NO: 168216 - DNA, 73 bp, Homo sapiens
gctaaatcgtagacaagcaaacagcaggagtttaaatgaacatttcttgattttaattgaatgtactctaggg

SEQ ID NO: 168217 - DNA, 70 bp, Homo sapiens
agacaagcaaacagcaggagtttaaatgaacatttcttgattttaattgaatgtactctagggggaaaaa

SEQ ID NO: 168218 - DNA, 68 bp, Homo sapiens
acagcaggagtttaaatgaacatttcttgattttaattgaatgtactctagggggaaaaaaagtactg

SEQ ID NO: 168219 - DNA, 66 bp, Homo sapiens
atgaacatttcttgattttaattgaatgtactctagggggaaaaaaagtactgttagtttagtctt

SEQ ID NO: 168220 - DNA, 67 bp, Homo sapiens
tcttgattttaattgaatgtactctagggggaaaaaaagtactgttagtttagtctttacattatag

SEQ ID NO: 168221 - DNA, 67 bp, Homo sapiens
attgaatgtactctagggggaaaaaaagtactgttagtttagtctttacattataggcaatgaaaag

SEQ ID NO: 168222 - DNA, 70 bp, Homo sapiens
tgtactctagggggaaaaaaagtactgttagtttagtctttacattataggcaatgaaaaggcactgaga

SEQ ID NO: 168223 - DNA, 71 bp, Homo sapiens
ggaaaaaaagtactgttagtttagtctttacattataggcaatgaaaaggcactgagattttaggcagcca

SEQ ID NO: 168224 - DNA, 76 bp, Homo sapiens
tactgttagtttagtctttacattataggcaatgaaaaggcactgagattttaggcagccaaatgagatgttcatt

SEQ ID NO: 168225 - DNA, 83 bp, Homo sapiens
tgaaaaggcactgagattttaggcagccaaatgagatgttcatttctatagtgtatctgagagcacagtatgaataggataaa

SEQ ID NO: 168226 - DNA, 80 bp, Homo sapiens
attttaggcagccaaatgagatgttcatttctatagtgtatctgagagcacagtatgaataggataaaagtggcaacagg

SEQ ID NO: 168227 - DNA, 82 bp, Homo sapiens
aatgagatgttcatttctatagtgtatctgagagcacagtatgaataggataaaagtggcaacagggcaggagtactggata

SEQ ID NO: 168228 - DNA, 83 bp, Homo sapiens
tatagtgtatctgagagcacagtatgaataggataaaagtggcaacagggcaggagtactggatagcaatagtctaggcaaga

SEQ ID NO: 168229 - DNA, 80 bp, Homo sapiens
agagcacagtatgaataggataaaagtggcaacagggcaggagtactggatagcaatagtctaggcaagatagaacacag

SEQ ID NO: 168230 - DNA, 80 bp, Homo sapiens
agtatgaataggataaaagtggcaacagggcaggagtactggatagcaatagtctaggcaagatagaacacaggcattca

SEQ ID NO: 168231 - DNA, 79 bp, Homo sapiens
ataaaagtggcaacagggcaggagtactggatagcaatagtctaggcaagatagaacacaggcattcagtatggaaatg

SEQ ID NO: 168232 - DNA, 80 bp, Homo sapiens
aacagggcaggagtactggatagcaatagtctaggcaagatagaacacaggcattcagtatggaaatggctgtaagactg

SEQ ID NO: 168233 - DNA, 79 bp, Homo sapiens
aggagtactggatagcaatagtctaggcaagatagaacacaggcattcagtatggaaatggctgtaagactggagaaaa

SEQ ID NO: 168234 - DNA, 76 bp, Homo sapiens
taggcaagatagaacacaggcattcagtatggaaatggctgtaagactggagaaaaggggaaaattcaggagatat

SEQ ID NO: 168235 - DNA, 75 bp, Homo sapiens
aagatagaacacaggcattcagtatggaaatggctgtaagactggagaaaaggggaaaattcaggagatatttca

SEQ ID NO: 168236 - DNA, 75 bp, Homo sapiens
cattcagtatggaaatggctgtaagactggagaaaaggggaaaattcaggagatatttcagaagtattgctcaag

SEQ ID NO: 168237 - DNA, 75 bp, Homo sapiens
tgtaagactggagaaaaggggaaaattcaggagatatttcagaagtattgctcaagttaacacagctcagtaaga

SEQ ID NO: 168238 - DNA, 75 bp, Homo sapiens
aaaattcaggagatatttcagaagtattgctcaagttaacacagctcagtaagatgccctcgaataagtaggaac

SEQ ID NO: 168239 - DNA, 78 bp, Homo sapiens
agatatttcagaagtattgctcaagttaacacagctcagtaagatgccctcgaataagtaggaaccgagaggtgcatg

SEQ ID NO: 168240 - DNA, 78 bp, Homo sapiens
agaagtattgctcaagttaacacagctcagtaagatgccctcgaataagtaggaaccgagaggtgcatggtgatgtta

SEQ ID NO: 168241 - DNA, 76 bp, Homo sapiens
attgctcaagttaacacagctcagtaagatgccctcgaataagtaggaaccgagaggtgcatggtgatgttaaaaa

SEQ ID NO: 168242 - DNA, 76 bp, Homo sapiens
ttaacacagctcagtaagatgccctcgaataagtaggaaccgagaggtgcatggtgatgttaaaaaccaatgccaa

SEQ ID NO: 168243 - DNA, 72 bp, Homo sapiens
agtaagatgccctcgaataagtaggaaccgagaggtgcatggtgatgttaaaaaccaatgccaaaacccagc

SEQ ID NO: 168244 - DNA, 71 bp, Homo sapiens
taggaaccgagaggtgcatggtgatgttaaaaaccaatgccaaaacccagctggaagaagtatttggaaaa

SEQ ID NO: 168245 - DNA, 71 bp, Homo sapiens
aggtgcatggtgatgttaaaaaccaatgccaaaacccagctggaagaagtatttggaaaaaggacaggata

SEQ ID NO: 168246 - DNA, 69 bp, Homo sapiens
tgatgttaaaaaccaatgccaaaacccagctggaagaagtatttggaaaaaggacaggataagttcaac

SEQ ID NO: 168247 - DNA, 71 bp, Homo sapiens
aaaacccagctggaagaagtatttggaaaaaggacaggataagttcaacttcatcaatggtactgtgctgt

SEQ ID NO: 168248 - DNA, 73 bp, Homo sapiens
tggaagaagtatttggaaaaaggacaggataagttcaacttcatcaatggtactgtgctgttcgtgtataaaa

SEQ ID NO: 168249 - DNA, 72 bp, Homo sapiens
atttggaaaaaggacaggataagttcaacttcatcaatggtactgtgctgttcgtgtataaaatatcccaag

SEQ ID NO: 168250 - DNA, 73 bp, Homo sapiens
aaaaaggacaggataagttcaacttcatcaatggtactgtgctgttcgtgtataaaatatcccaagtagcttc

SEQ ID NO: 168251 - DNA, 76 bp, Homo sapiens
ataagttcaacttcatcaatggtactgtgctgttcgtgtataaaatatcccaagtagcttcgtctcccacacttgc

SEQ ID NO: 168252 - DNA, 78 bp, Homo sapiens
tcatcaatggtactgtgctgttcgtgtataaaatatcccaagtagcttcgtctcccacacttgccactatcaaattat

SEQ ID NO: 168253 - DNA, 77 bp, Homo sapiens
atggtactgtgctgttcgtgtataaaatatcccaagtagcttcgtctcccacacttgccactatcaaattattctgc

SEQ ID NO: 168254 - DNA, 76 bp, Homo sapiens
ctgttcgtgtataaaatatcccaagtagcttcgtctcccacacttgccactatcaaattattctgcctcctccatg

SEQ ID NO: 168255 - DNA, 82 bp, Homo sapiens
ttgccactatcaaattattctgcctcctccatgtgcctctccatttccactgccaccactagcatacaagccaccactatct

SEQ ID NO: 168256 - DNA, 81 bp, Homo sapiens
tatcaaattattctgcctcctccatgtgcctctccatttccactgccaccactagcatacaagccaccactatcttccact

SEQ ID NO: 168257 - DNA, 80 bp, Homo sapiens
tgcctcctccatgtgcctctccatttccactgccaccactagcatacaagccaccactatcttccacttggactttacaa

SEQ ID NO: 168258 - DNA, 79 bp, Homo sapiens
catttccactgccaccactagcatacaagccaccactatcttccacttggactttacaacctctcacaccacactgcaa

SEQ ID NO: 168259 - DNA, 80 bp, Homo sapiens
tgccaccactagcatacaagccaccactatcttccacttggactttacaacctctcacaccacactgcaatctgtttaca

SEQ ID NO: 168260 - DNA, 78 bp, Homo sapiens
actagcatacaagccaccactatcttccacttggactttacaacctctcacaccacactgcaatctgtttacatgaaa

SEQ ID NO: 168261 - DNA, 77 bp, Homo sapiens
caccactatcttccacttggactttacaacctctcacaccacactgcaatctgtttacatgaaacaacagatgaaaa

SEQ ID NO: 168262 - DNA, 76 bp, Homo sapiens
tatcttccacttggactttacaacctctcacaccacactgcaatctgtttacatgaaacaacagatgaaaacttct

SEQ ID NO: 168263 - DNA, 73 bp, Homo sapiens
actttacaacctctcacaccacactgcaatctgtttacatgaaacaacagatgaaaacttcttgtaaaaccaa

SEQ ID NO: 168264 - DNA, 73 bp, Homo sapiens
acaacctctcacaccacactgcaatctgtttacatgaaacaacagatgaaaacttcttgtaaaaccaaatgtt

SEQ ID NO: 168265 - DNA, 73 bp, Homo sapiens
acaccacactgcaatctgtttacatgaaacaacagatgaaaacttcttgtaaaaccaaatgtttcactcattt

SEQ ID NO: 168266 - DNA, 70 bp, Homo sapiens
gcaatctgtttacatgaaacaacagatgaaaacttcttgtaaaaccaaatgtttcactcattttttttaa

SEQ ID NO: 168267 - DNA, 72 bp, Homo sapiens
tttaaaaaaagcattcattcaaaaatatttactgagctatataaaatgtgctaggtactgttaaacactatg

SEQ ID NO: 168268 - DNA, 78 bp, Homo sapiens
gcattcattcaaaaatatttactgagctatataaaatgtgctaggtactgttaaacactatggacaggtcagtgaaca

SEQ ID NO: 168269 - DNA, 73 bp, Homo sapiens
caaaaatatttactgagctatataaaatgtgctaggtactgttaaacactatggacaggtcagtgaacaaaaa

SEQ ID NO: 168270 - DNA, 71 bp, Homo sapiens
gctaggtactgttaaacactatggacaggtcagtgaacaaaaattcttaaaaatcactacactcaagaact

SEQ ID NO: 168271 - DNA, 71 bp, Homo sapiens
ctgttaaacactatggacaggtcagtgaacaaaaattcttaaaaatcactacactcaagaactttacattc

SEQ ID NO: 168272 - DNA, 75 bp, Homo sapiens
ctatggacaggtcagtgaacaaaaattcttaaaaatcactacactcaagaactttacattctaatgatccgatca

SEQ ID NO: 168273 - DNA, 73 bp, Homo sapiens
cagtgaacaaaaattcttaaaaatcactacactcaagaactttacattctaatgatccgatcaagtcattccc

SEQ ID NO: 168274 - DNA, 71 bp, Homo sapiens
aattcttaaaaatcactacactcaagaactttacattctaatgatccgatcaagtcattcccctatttaaa

SEQ ID NO: 168275 - DNA, 73 bp, Homo sapiens
aatcactacactcaagaactttacattctaatgatccgatcaagtcattcccctatttaaagtgtttcaatgg

SEQ ID NO: 168276 - DNA, 72 bp, Homo sapiens
cactcaagaactttacattctaatgatccgatcaagtcattcccctatttaaagtgtttcaatggtttacca

SEQ ID NO: 168277 - DNA, 72 bp, Homo sapiens
ttacattctaatgatccgatcaagtcattcccctatttaaagtgtttcaatggtttaccataactcttagta

SEQ ID NO: 168278 - DNA, 68 bp, Homo sapiens
ccgatcaagtcattcccctatttaaagtgtttcaatggtttaccataactcttagtataaaatccaaa

SEQ ID NO: 168279 - DNA, 67 bp, Homo sapiens
ccctatttaaagtgtttcaatggtttaccataactcttagtataaaatccaaaccttcaaatgacca

SEQ ID NO: 168280 - DNA, 68 bp, Homo sapiens
aagtgtttcaatggtttaccataactcttagtataaaatccaaaccttcaaatgaccaacaacctaga

SEQ ID NO: 168281 - DNA, 69 bp, Homo sapiens
caatggtttaccataactcttagtataaaatccaaaccttcaaatgaccaacaacctagatagatttaa

SEQ ID NO: 168282 - DNA, 73 bp, Homo sapiens
cttagtataaaatccaaaccttcaaatgaccaacaacctagatagatttaatatgggcctctcttatctcatc

SEQ ID NO: 168283 - DNA, 76 bp, Homo sapiens
aaaccttcaaatgaccaacaacctagatagatttaatatgggcctctcttatctcatctcatgcctcattggttta

SEQ ID NO: 168284 - DNA, 80 bp, Homo sapiens
aaatgaccaacaacctagatagatttaatatgggcctctcttatctcatctcatgcctcattggtttaatcagctgcaaa

SEQ ID NO: 168285 - DNA, 82 bp, Homo sapiens
aacaacctagatagatttaatatgggcctctcttatctcatctcatgcctcattggtttaatcagctgcaaacttcatctca

SEQ ID NO: 168286 - DNA, 82 bp, Homo sapiens
atagatttaatatgggcctctcttatctcatctcatgcctcattggtttaatcagctgcaaacttcatctcacctcagggcc

SEQ ID NO: 168287 - DNA, 81 bp, Homo sapiens
atatgggcctctcttatctcatctcatgcctcattggtttaatcagctgcaaacttcatctcacctcagggcctttccctc

SEQ ID NO: 168288 - DNA, 79 bp, Homo sapiens
ttatctcatctcatgcctcattggtttaatcagctgcaaacttcatctcacctcagggcctttccctctccctagaaaa

SEQ ID NO: 168289 - DNA, 76 bp, Homo sapiens
attggtttaatcagctgcaaacttcatctcacctcagggcctttccctctccctagaaaatccatctcagctcaaa

SEQ ID NO: 168290 - DNA, 77 bp, Homo sapiens
aatcagctgcaaacttcatctcacctcagggcctttccctctccctagaaaatccatctcagctcaaattcacttac

SEQ ID NO: 168291 - DNA, 74 bp, Homo sapiens
aaacttcatctcacctcagggcctttccctctccctagaaaatccatctcagctcaaattcacttactcaagga

SEQ ID NO: 168292 - DNA, 73 bp, Homo sapiens
tcagggcctttccctctccctagaaaatccatctcagctcaaattcacttactcaaggaaggcgtccttgacc

SEQ ID NO: 168293 - DNA, 72 bp, Homo sapiens
ctttccctctccctagaaaatccatctcagctcaaattcacttactcaaggaaggcgtccttgacctctccc

SEQ ID NO: 168294 - DNA, 74 bp, Homo sapiens
tagaaaatccatctcagctcaaattcacttactcaaggaaggcgtccttgacctctcccctatcctacccactg

SEQ ID NO: 168295 - DNA, 75 bp, Homo sapiens
atctcagctcaaattcacttactcaaggaaggcgtccttgacctctcccctatcctacccactgtattataagca

SEQ ID NO: 168296 - DNA, 71 bp, Homo sapiens
aaattcacttactcaaggaaggcgtccttgacctctcccctatcctacccactgtattataagcaatatcg

SEQ ID NO: 168297 - DNA, 72 bp, Homo sapiens
tactcaaggaaggcgtccttgacctctcccctatcctacccactgtattataagcaatatcgtactacctaa

SEQ ID NO: 168298 - DNA, 70 bp, Homo sapiens
aaggcgtccttgacctctcccctatcctacccactgtattataagcaatatcgtactacctaatctgttt

SEQ ID NO: 168299 - DNA, 73 bp, Homo sapiens
ttgacctctcccctatcctacccactgtattataagcaatatcgtactacctaatctgtttttgtagagctta

SEQ ID NO: 168300 - DNA, 74 bp, Homo sapiens
tatcctacccactgtattataagcaatatcgtactacctaatctgtttttgtagagcttaccacaactgttgta

SEQ ID NO: 168301 - DNA, 73 bp, Homo sapiens
attataagcaatatcgtactacctaatctgtttttgtagagcttaccacaactgttgtatataattgtataat

SEQ ID NO: 168302 - DNA, 73 bp, Homo sapiens
tcgtactacctaatctgtttttgtagagcttaccacaactgttgtatataattgtataattatttgtctaaca

SEQ ID NO: 168303 - DNA, 75 bp, Homo sapiens
atctgtttttgtagagcttaccacaactgttgtatataattgtataattatttgtctaacacctcctgccagaga

SEQ ID NO: 168304 - DNA, 75 bp, Homo sapiens
ttttgtagagcttaccacaactgttgtatataattgtataattatttgtctaacacctcctgccagagagtagtg

SEQ ID NO: 168305 - DNA, 75 bp, Homo sapiens
ttaccacaactgttgtatataattgtataattatttgtctaacacctcctgccagagagtagtgtcccataagga

SEQ ID NO: 168306 - DNA, 73 bp, Homo sapiens
actgttgtatataattgtataattatttgtctaacacctcctgccagagagtagtgtcccataaggaaatggg

SEQ ID NO: 168307 - DNA, 75 bp, Homo sapiens
ttgtataattatttgtctaacacctcctgccagagagtagtgtcccataaggaaatggggacatatcaattctta

SEQ ID NO: 168308 - DNA, 77 bp, Homo sapiens
attatttgtctaacacctcctgccagagagtagtgtcccataaggaaatggggacatatcaattcttatcatatcaa

SEQ ID NO: 168309 - DNA, 79 bp, Homo sapiens
taacacctcctgccagagagtagtgtcccataaggaaatggggacatatcaattcttatcatatcaactcagtcccaga

SEQ ID NO: 168310 - DNA, 79 bp, Homo sapiens
tagtgtcccataaggaaatggggacatatcaattcttatcatatcaactcagtcccagaacgtatcacattgccaagta

SEQ ID NO: 168311 - DNA, 77 bp, Homo sapiens
ataaggaaatggggacatatcaattcttatcatatcaactcagtcccagaacgtatcacattgccaagtacttagta

SEQ ID NO: 168312 - DNA, 80 bp, Homo sapiens
acatatcaattcttatcatatcaactcagtcccagaacgtatcacattgccaagtacttagtatgagtaaacagtggata

SEQ ID NO: 168313 - DNA, 78 bp, Homo sapiens
aattcttatcatatcaactcagtcccagaacgtatcacattgccaagtacttagtatgagtaaacagtggatatataa

SEQ ID NO: 168314 - DNA, 76 bp, Homo sapiens
atatcaactcagtcccagaacgtatcacattgccaagtacttagtatgagtaaacagtggatatataagaaatttc

SEQ ID NO: 168315 - DNA, 74 bp, Homo sapiens
cagtcccagaacgtatcacattgccaagtacttagtatgagtaaacagtggatatataagaaatttcctattta

SEQ ID NO: 168316 - DNA, 72 bp, Homo sapiens
acgtatcacattgccaagtacttagtatgagtaaacagtggatatataagaaatttcctatttaaaaatata

SEQ ID NO: 168317 - DNA, 70 bp, Homo sapiens
gccaagtacttagtatgagtaaacagtggatatataagaaatttcctatttaaaaatatagatttgaagg

SEQ ID NO: 168318 - DNA, 70 bp, Homo sapiens
gatatataagaaatttcctatttaaaaatatagatttgaaggtacaggtagagcaaaacaattggactcc

SEQ ID NO: 168319 - DNA, 70 bp, Homo sapiens
tcctatttaaaaatatagatttgaaggtacaggtagagcaaaacaattggactccttattctctttagaa

SEQ ID NO: 168320 - DNA, 68 bp, Homo sapiens
tttaaaaatatagatttgaaggtacaggtagagcaaaacaattggactccttattctctttagaaggg

SEQ ID NO: 168321 - DNA, 69 bp, Homo sapiens
tacaggtagagcaaaacaattggactccttattctctttagaaggggttccgaagtttcttcagtaata

SEQ ID NO: 168322 - DNA, 67 bp, Homo sapiens
ttggactccttattctctttagaaggggttccgaagtttcttcagtaatagaaagaataaaataaca

SEQ ID NO: 168323 - DNA, 69 bp, Homo sapiens
gaaggggttccgaagtttcttcagtaatagaaagaataaaataacaactgacgataataatgaaatcac

SEQ ID NO: 168324 - DNA, 72 bp, Homo sapiens
tccgaagtttcttcagtaatagaaagaataaaataacaactgacgataataatgaaatcactttctcatatt

SEQ ID NO: 168325 - DNA, 73 bp, Homo sapiens
gtaatagaaagaataaaataacaactgacgataataatgaaatcactttctcatatttcaacctcattcccac

SEQ ID NO: 168326 - DNA, 74 bp, Homo sapiens
aagaataaaataacaactgacgataataatgaaatcactttctcatatttcaacctcattcccactgcaatggg

SEQ ID NO: 168327 - DNA, 77 bp, Homo sapiens
aaataacaactgacgataataatgaaatcactttctcatatttcaacctcattcccactgcaatggggcttctatca

SEQ ID NO: 168328 - DNA, 77 bp, Homo sapiens
ataataatgaaatcactttctcatatttcaacctcattcccactgcaatggggcttctatcactactgttccaccta

SEQ ID NO: 168329 - DNA, 75 bp, Homo sapiens
aatgaaatcactttctcatatttcaacctcattcccactgcaatggggcttctatcactactgttccacctaaac

SEQ ID NO: 168330 - DNA, 71 bp, Homo sapiens
tttcaacctcattcccactgcaatggggcttctatcactactgttccacctaaaccaccccggtgaaaaga

SEQ ID NO: 168331 - DNA, 70 bp, Homo sapiens
cactgcaatggggcttctatcactactgttccacctaaaccaccccggtgaaaagaccaactcttttgtg

SEQ ID NO: 168332 - DNA, 66 bp, Homo sapiens
gggcttctatcactactgttccacctaaaccaccccggtgaaaagaccaactcttttgtggttaac

SEQ ID NO: 168333 - DNA, 65 bp, Homo sapiens
tatcactactgttccacctaaaccaccccggtgaaaagaccaactcttttgtggttaacccaaaa

SEQ ID NO: 168334 - DNA, 63 bp, Homo sapiens
taaaccaccccggtgaaaagaccaactcttttgtggttaacccaaaacatacctttcagtctt

SEQ ID NO: 168335 - DNA, 66 bp, Homo sapiens
aaaagaccaactcttttgtggttaacccaaaacatacctttcagtctttatcttacctgtcctctg

SEQ ID NO: 168336 - DNA, 72 bp, Homo sapiens
aaacatacctttcagtctttatcttacctgtcctctgggtgccctttgatctgtttagccacttctcattct

SEQ ID NO: 168337 - DNA, 75 bp, Homo sapiens
acctttcagtctttatcttacctgtcctctgggtgccctttgatctgtttagccacttctcattcttcttctgca

SEQ ID NO: 168338 - DNA, 78 bp, Homo sapiens
tttatcttacctgtcctctgggtgccctttgatctgtttagccacttctcattcttcttctgcagtggcatccttctc

SEQ ID NO: 168339 - DNA, 81 bp, Homo sapiens
tcctctgggtgccctttgatctgtttagccacttctcattcttcttctgcagtggcatccttctcctagctatctctagga

SEQ ID NO: 168340 - DNA, 81 bp, Homo sapiens
ccctttgatctgtttagccacttctcattcttcttctgcagtggcatccttctcctagctatctctaggagtgcaatggaa

SEQ ID NO: 168341 - DNA, 82 bp, Homo sapiens
atctgtttagccacttctcattcttcttctgcagtggcatccttctcctagctatctctaggagtgcaatggaattctcttg

SEQ ID NO: 168342 - DNA, 81 bp, Homo sapiens
agccacttctcattcttcttctgcagtggcatccttctcctagctatctctaggagtgcaatggaattctcttggaccctg

SEQ ID NO: 168343 - DNA, 78 bp, Homo sapiens
attcttcttctgcagtggcatccttctcctagctatctctaggagtgcaatggaattctcttggaccctggcccttcc

SEQ ID NO: 168344 - DNA, 79 bp, Homo sapiens
agtggcatccttctcctagctatctctaggagtgcaatggaattctcttggaccctggcccttcctcatctcctcatct

SEQ ID NO: 168345 - DNA, 79 bp, Homo sapiens
atccttctcctagctatctctaggagtgcaatggaattctcttggaccctggcccttcctcatctcctcatcttctgaa

SEQ ID NO: 168346 - DNA, 80 bp, Homo sapiens
tagctatctctaggagtgcaatggaattctcttggaccctggcccttcctcatctcctcatcttctgaactggcttcaac

SEQ ID NO: 168347 - DNA, 80 bp, Homo sapiens
gtgcaatggaattctcttggaccctggcccttcctcatctcctcatcttctgaactggcttcaacctgtctggcgtctga

SEQ ID NO: 168348 - DNA, 79 bp, Homo sapiens
atggaattctcttggaccctggcccttcctcatctcctcatcttctgaactggcttcaacctgtctggcgtctgacaca

SEQ ID NO: 168349 - DNA, 83 bp, Homo sapiens
accctggcccttcctcatctcctcatcttctgaactggcttcaacctgtctggcgtctgacacaggccttcacatctcatgca

SEQ ID NO: 168350 - DNA, 86 bp, Homo sapiens
ttcctcatctcctcatcttctgaactggcttcaacctgtctggcgtctgacacaggccttcacatctcatgcaacaaattctgcca

SEQ ID NO: 168351 - DNA, 83 bp, Homo sapiens
ttcaacctgtctggcgtctgacacaggccttcacatctcatgcaacaaattctgccaggtgtccatatctccaaggaaggata

SEQ ID NO: 168352 - DNA, 83 bp, Homo sapiens
tctggcgtctgacacaggccttcacatctcatgcaacaaattctgccaggtgtccatatctccaaggaaggatactttcctga

SEQ ID NO: 168353 - DNA, 80 bp, Homo sapiens
acacaggccttcacatctcatgcaacaaattctgccaggtgtccatatctccaaggaaggatactttcctgagggccaga

SEQ ID NO: 168354 - DNA, 79 bp, Homo sapiens
cttcacatctcatgcaacaaattctgccaggtgtccatatctccaaggaaggatactttcctgagggccagaccaagag

SEQ ID NO: 168355 - DNA, 75 bp, Homo sapiens
gtgtccatatctccaaggaaggatactttcctgagggccagaccaagaggtctcactgctttcttaacaactcta

SEQ ID NO: 168356 - DNA, 75 bp, Homo sapiens
atctccaaggaaggatactttcctgagggccagaccaagaggtctcactgctttcttaacaactctagctggata

SEQ ID NO: 168357 - DNA, 77 bp, Homo sapiens
tactttcctgagggccagaccaagaggtctcactgctttcttaacaactctagctggatatcccattgatagttata

SEQ ID NO: 168358 - DNA, 76 bp, Homo sapiens
caagaggtctcactgctttcttaacaactctagctggatatcccattgatagttatatgtggaaccaaacctaaca

SEQ ID NO: 168359 - DNA, 75 bp, Homo sapiens
tcactgctttcttaacaactctagctggatatcccattgatagttatatgtggaaccaaacctaacatagtcctt

SEQ ID NO: 168360 - DNA, 73 bp, Homo sapiens
ttcttaacaactctagctggatatcccattgatagttatatgtggaaccaaacctaacatagtcctttggaaa

SEQ ID NO: 168361 - DNA, 73 bp, Homo sapiens
atatcccattgatagttatatgtggaaccaaacctaacatagtcctttggaaatgtgtgcctcctcctatatt

SEQ ID NO: 168362 - DNA, 75 bp, Homo sapiens
ttgatagttatatgtggaaccaaacctaacatagtcctttggaaatgtgtgcctcctcctatatttcaatctctg

SEQ ID NO: 168363 - DNA, 75 bp, Homo sapiens
tggaaccaaacctaacatagtcctttggaaatgtgtgcctcctcctatatttcaatctctgggcatagcattatt

SEQ ID NO: 168364 - DNA, 74 bp, Homo sapiens
aaacctaacatagtcctttggaaatgtgtgcctcctcctatatttcaatctctgggcatagcattattttccac

SEQ ID NO: 168365 - DNA, 77 bp, Homo sapiens
atagtcctttggaaatgtgtgcctcctcctatatttcaatctctgggcatagcattattttccactgagctaaccaa

SEQ ID NO: 168366 - DNA, 77 bp, Homo sapiens
aaatgtgtgcctcctcctatatttcaatctctgggcatagcattattttccactgagctaaccaagccaaaatacca

SEQ ID NO: 168367 - DNA, 78 bp, Homo sapiens
ctcctatatttcaatctctgggcatagcattattttccactgagctaaccaagccaaaataccacaatcatcctaaga

SEQ ID NO: 168368 - DNA, 78 bp, Homo sapiens
ctctgggcatagcattattttccactgagctaaccaagccaaaataccacaatcatcctaagacttcctctggctaca

SEQ ID NO: 168369 - DNA, 77 bp, Homo sapiens
actgagctaaccaagccaaaataccacaatcatcctaagacttcctctggctacagtccatcccaatattctgtcaa

SEQ ID NO: 168370 - DNA, 76 bp, Homo sapiens
aagccaaaataccacaatcatcctaagacttcctctggctacagtccatcccaatattctgtcaattccacttcta

SEQ ID NO: 168371 - DNA, 75 bp, Homo sapiens
aaataccacaatcatcctaagacttcctctggctacagtccatcccaatattctgtcaattccacttctaaataa

SEQ ID NO: 168372 - DNA, 75 bp, Homo sapiens
aatcatcctaagacttcctctggctacagtccatcccaatattctgtcaattccacttctaaataacctttgcga

SEQ ID NO: 168373 - DNA, 77 bp, Homo sapiens
ttcctctggctacagtccatcccaatattctgtcaattccacttctaaataacctttgcgatccaggatgccttatc

SEQ ID NO: 168374 - DNA, 77 bp, Homo sapiens
atcccaatattctgtcaattccacttctaaataacctttgcgatccaggatgccttatcttttcaatgctgtatctc

SEQ ID NO: 168375 - DNA, 76 bp, Homo sapiens
tgtcaattccacttctaaataacctttgcgatccaggatgccttatcttttcaatgctgtatctccggtgtctaaa

SEQ ID NO: 168376 - DNA, 76 bp, Homo sapiens
cttctaaataacctttgcgatccaggatgccttatcttttcaatgctgtatctccggtgtctaaacataagcatct

SEQ ID NO: 168377 - DNA, 79 bp, Homo sapiens
aaataacctttgcgatccaggatgccttatcttttcaatgctgtatctccggtgtctaaacataagcatcttgcacata

SEQ ID NO: 168378 - DNA, 78 bp, Homo sapiens
atccaggatgccttatcttttcaatgctgtatctccggtgtctaaacataagcatcttgcacatagtaggcccttagt

SEQ ID NO: 168379 - DNA, 75 bp, Homo sapiens
atgccttatcttttcaatgctgtatctccggtgtctaaacataagcatcttgcacatagtaggcccttagttttt

SEQ ID NO: 168380 - DNA, 74 bp, Homo sapiens
ttttcaatgctgtatctccggtgtctaaacataagcatcttgcacatagtaggcccttagttttttgtactaaa

SEQ ID NO: 168381 - DNA, 72 bp, Homo sapiens
tatctccggtgtctaaacataagcatcttgcacatagtaggcccttagttttttgtactaaaccatctaaaa

SEQ ID NO: 168382 - DNA, 68 bp, Homo sapiens
agcatcttgcacatagtaggcccttagttttttgtactaaaccatctaaaaaagttaacatagtcggg

SEQ ID NO: 168383 - DNA, 67 bp, Homo sapiens
catagtaggcccttagttttttgtactaaaccatctaaaaaagttaacatagtcgggtgtccattca

SEQ ID NO: 168384 - DNA, 64 bp, Homo sapiens
aggcccttagttttttgtactaaaccatctaaaaaagttaacatagtcgggtgtccattcaacc

SEQ ID NO: 168385 - DNA, 68 bp, Homo sapiens
ttttgtactaaaccatctaaaaaagttaacatagtcgggtgtccattcaacccctattgtgtgtgtac

SEQ ID NO: 168386 - DNA, 70 bp, Homo sapiens
aaaccatctaaaaaagttaacatagtcgggtgtccattcaacccctattgtgtgtgtactcaaatcatta

SEQ ID NO: 168387 - DNA, 70 bp, Homo sapiens
aaagttaacatagtcgggtgtccattcaacccctattgtgtgtgtactcaaatcattacaaacaaaatac

SEQ ID NO: 168388 - DNA, 71 bp, Homo sapiens
atagtcgggtgtccattcaacccctattgtgtgtgtactcaaatcattacaaacaaaataccagtagattt

SEQ ID NO: 168389 - DNA, 71 bp, Homo sapiens
ggtgtccattcaacccctattgtgtgtgtactcaaatcattacaaacaaaataccagtagatttttttcta

SEQ ID NO: 168390 - DNA, 69 bp, Homo sapiens
ccctattgtgtgtgtactcaaatcattacaaacaaaataccagtagatttttttctagaattttacaaa

SEQ ID NO: 168391 - DNA, 70 bp, Homo sapiens
tgtgtgtgtactcaaatcattacaaacaaaataccagtagatttttttctagaattttacaaatgtttta

SEQ ID NO: 168392 - DNA, 65 bp, Homo sapiens
ctcaaatcattacaaacaaaataccagtagatttttttctagaattttacaaatgttttaaaagt

SEQ ID NO: 168393 - DNA, 65 bp, Homo sapiens
caaacaaaataccagtagatttttttctagaattttacaaatgttttaaaagttaatctgaaata

SEQ ID NO: 168394 - DNA, 65 bp, Homo sapiens
ataccagtagatttttttctagaattttacaaatgttttaaaagttaatctgaaataaaaatgaa

SEQ ID NO: 168395 - DNA, 71 bp, Homo sapiens
taaaaatgaaaataaccaggaaacactttgaaaataaagtgtgacaagatttagcctaatgtatgtatgta

SEQ ID NO: 168396 - DNA, 71 bp, Homo sapiens
ggattataggcataaaccagtgcccagcagcctaaagtttatttaaagcatgacaaggccgggcgtttatt

SEQ ID NO: 168397 - DNA, 70 bp, Homo sapiens
ataggcataaaccagtgcccagcagcctaaagtttatttaaagcatgacaaggccgggcgtttatttaaa

SEQ ID NO: 168398 - DNA, 73 bp, Homo sapiens
agtgcccagcagcctaaagtttatttaaagcatgacaaggccgggcgtttatttaaagcaagacatggctcac

SEQ ID NO: 168399 - DNA, 79 bp, Homo sapiens
aaaaaaaaaagcatgacaaaactataatgatttcaacagtgtgctgctagtacatgaatagatggccaacacagcagaa

SEQ ID NO: 168400 - DNA, 80 bp, Homo sapiens
aaaaagcatgacaaaactataatgatttcaacagtgtgctgctagtacatgaatagatggccaacacagcagaataaaaa

SEQ ID NO: 168401 - DNA, 77 bp, Homo sapiens
acaaaactataatgatttcaacagtgtgctgctagtacatgaatagatggccaacacagcagaataaaaaaaaaata

SEQ ID NO: 168402 - DNA, 66 bp, Homo sapiens
aaaaatagaaaaaatactaagttcagaaatggatatacctttaagaatttagtatacaataatttc

SEQ ID NO: 168403 - DNA, 71 bp, Homo sapiens
aaaatactaagttcagaaatggatatacctttaagaatttagtatacaataatttctcatagtagtgagaa

SEQ ID NO: 168404 - DNA, 72 bp, Homo sapiens
ctaagttcagaaatggatatacctttaagaatttagtatacaataatttctcatagtagtgagaaaaagaca

SEQ ID NO: 168405 - DNA, 70 bp, Homo sapiens
gaaatggatatacctttaagaatttagtatacaataatttctcatagtagtgagaaaaagacaaagtaat

SEQ ID NO: 168406 - DNA, 70 bp, Homo sapiens
cctttaagaatttagtatacaataatttctcatagtagtgagaaaaagacaaagtaattcaataattcag

SEQ ID NO: 168407 - DNA, 72 bp, Homo sapiens
agtatacaataatttctcatagtagtgagaaaaagacaaagtaattcaataattcagtaattcccaagcaac

SEQ ID NO: 168408 - DNA, 74 bp, Homo sapiens
taatttctcatagtagtgagaaaaagacaaagtaattcaataattcagtaattcccaagcaactactagacaga

SEQ ID NO: 168409 - DNA, 74 bp, Homo sapiens
ctcatagtagtgagaaaaagacaaagtaattcaataattcagtaattcccaagcaactactagacagacaacaa

SEQ ID NO: 168410 - DNA, 72 bp, Homo sapiens
gagaaaaagacaaagtaattcaataattcagtaattcccaagcaactactagacagacaacaattcataaaa

SEQ ID NO: 168411 - DNA, 72 bp, Homo sapiens
gtaattcaataattcagtaattcccaagcaactactagacagacaacaattcataaaaataaacccgtctca

SEQ ID NO: 168412 - DNA, 75 bp, Homo sapiens
aattcagtaattcccaagcaactactagacagacaacaattcataaaaataaacccgtctcatgccatatattca

SEQ ID NO: 168413 - DNA, 76 bp, Homo sapiens
attcccaagcaactactagacagacaacaattcataaaaataaacccgtctcatgccatatattcaaattcactca

SEQ ID NO: 168414 - DNA, 79 bp, Homo sapiens
agcaactactagacagacaacaattcataaaaataaacccgtctcatgccatatattcaaattcactcattctgtatga

SEQ ID NO: 168415 - DNA, 78 bp, Homo sapiens
cagacaacaattcataaaaataaacccgtctcatgccatatattcaaattcactcattctgtatgaataaaaactgca

SEQ ID NO: 168416 - DNA, 75 bp, Homo sapiens
ttcataaaaataaacccgtctcatgccatatattcaaattcactcattctgtatgaataaaaactgcagtaaaaa

SEQ ID NO: 168417 - DNA, 73 bp, Homo sapiens
aaaataaacccgtctcatgccatatattcaaattcactcattctgtatgaataaaaactgcagtaaaaaatta

SEQ ID NO: 168418 - DNA, 79 bp, Homo sapiens
cgtctcatgccatatattcaaattcactcattctgtatgaataaaaactgcagtaaaaaattaaatatgtaagtgcata

SEQ ID NO: 168419 - DNA, 75 bp, Homo sapiens
catatattcaaattcactcattctgtatgaataaaaactgcagtaaaaaattaaatatgtaagtgcatatttatt

SEQ ID NO: 168420 - DNA, 78 bp, Homo sapiens
tcactcattctgtatgaataaaaactgcagtaaaaaattaaatatgtaagtgcatatttatttaatcatagaatgaga

SEQ ID NO: 168421 - DNA, 75 bp, Homo sapiens
aactgcagtaaaaaattaaatatgtaagtgcatatttatttaatcatagaatgagaaaagagacaataaccatga

SEQ ID NO: 168422 - DNA, 76 bp, Homo sapiens
aaaaattaaatatgtaagtgcatatttatttaatcatagaatgagaaaagagacaataaccatgatgagccaagac

SEQ ID NO: 168423 - DNA, 80 bp, Homo sapiens
atatgtaagtgcatatttatttaatcatagaatgagaaaagagacaataaccatgatgagccaagaccaataatggcact

SEQ ID NO: 168424 - DNA, 79 bp, Homo sapiens
gcatatttatttaatcatagaatgagaaaagagacaataaccatgatgagccaagaccaataatggcacttactaataa

SEQ ID NO: 168425 - DNA, 80 bp, Homo sapiens
ttaatcatagaatgagaaaagagacaataaccatgatgagccaagaccaataatggcacttactaataaacatgagtaca

SEQ ID NO: 168426 - DNA, 78 bp, Homo sapiens
aaagagacaataaccatgatgagccaagaccaataatggcacttactaataaacatgagtacagcaaaatgtaccata

SEQ ID NO: 168427 - DNA, 73 bp, Homo sapiens
gagccaagaccaataatggcacttactaataaacatgagtacagcaaaatgtaccataaataaagtaaaagga

SEQ ID NO: 168428 - DNA, 70 bp, Homo sapiens
ccaataatggcacttactaataaacatgagtacagcaaaatgtaccataaataaagtaaaaggaaagtaa

SEQ ID NO: 168429 - DNA, 69 bp, Homo sapiens
acatgagtacagcaaaatgtaccataaataaagtaaaaggaaagtaaaaaggcaagtaacaaatgaaga

SEQ ID NO: 168430 - DNA, 68 bp, Homo sapiens
cagcaaaatgtaccataaataaagtaaaaggaaagtaaaaaggcaagtaacaaatgaagaaaatatga

SEQ ID NO: 168431 - DNA, 66 bp, Homo sapiens
cataaataaagtaaaaggaaagtaaaaaggcaagtaacaaatgaagaaaatatgattggtatacgg

SEQ ID NO: 168432 - DNA, 68 bp, Homo sapiens
gtaaaaggaaagtaaaaaggcaagtaacaaatgaagaaaatatgattggtatacgggcaacaatggat

SEQ ID NO: 168433 - DNA, 71 bp, Homo sapiens
ggaaagtaaaaaggcaagtaacaaatgaagaaaatatgattggtatacgggcaacaatggattgatagcct

SEQ ID NO: 168434 - DNA, 74 bp, Homo sapiens
aggcaagtaacaaatgaagaaaatatgattggtatacgggcaacaatggattgatagccttaatatagaaatag

SEQ ID NO: 168435 - DNA, 77 bp, Homo sapiens
aatgaagaaaatatgattggtatacgggcaacaatggattgatagccttaatatagaaatagttccatcaggccaga

SEQ ID NO: 168436 - DNA, 79 bp, Homo sapiens
aaaatatgattggtatacgggcaacaatggattgatagccttaatatagaaatagttccatcaggccagatgcagtggc

SEQ ID NO: 168437 - DNA, 71 bp, Homo sapiens
gtctctaaaaaatgaaatagctccatcaagtcaataattaaaagttcaacagcccaacagaacaaaaattg

SEQ ID NO: 168438 - DNA, 72 bp, Homo sapiens
atgaaatagctccatcaagtcaataattaaaagttcaacagcccaacagaacaaaaattgtaaaagaacaca

SEQ ID NO: 168439 - DNA, 71 bp, Homo sapiens
gctccatcaagtcaataattaaaagttcaacagcccaacagaacaaaaattgtaaaagaacacaaatagaa

SEQ ID NO: 168440 - DNA, 68 bp, Homo sapiens
caagtcaataattaaaagttcaacagcccaacagaacaaaaattgtaaaagaacacaaatagaaaatg

SEQ ID NO: 168441 - DNA, 67 bp, Homo sapiens
attaaaagttcaacagcccaacagaacaaaaattgtaaaagaacacaaatagaaaatgtacaaaata

SEQ ID NO: 168442 - DNA, 69 bp, Homo sapiens
cagcccaacagaacaaaaattgtaaaagaacacaaatagaaaatgtacaaaataaatattaatgaccca

SEQ ID NO: 168443 - DNA, 67 bp, Homo sapiens
cagaacaaaaattgtaaaagaacacaaatagaaaatgtacaaaataaatattaatgacccataaccc

SEQ ID NO: 168444 - DNA, 66 bp, Homo sapiens
gtaaaagaacacaaatagaaaatgtacaaaataaatattaatgacccataaccctataagggaaag

SEQ ID NO: 168445 - DNA, 66 bp, Homo sapiens
caaatagaaaatgtacaaaataaatattaatgacccataaccctataagggaaagtttaacctctc

SEQ ID NO: 168446 - DNA, 65 bp, Homo sapiens
atgtacaaaataaatattaatgacccataaccctataagggaaagtttaacctctctagtatttt

SEQ ID NO: 168447 - DNA, 63 bp, Homo sapiens
aaataaatattaatgacccataaccctataagggaaagtttaacctctctagtatttttttaa

SEQ ID NO: 168448 - DNA, 66 bp, Homo sapiens
tttaaattaaaacaagatctttttttcatccaacaaaatgatagttttttaattataatatggtat

SEQ ID NO: 168449 - DNA, 68 bp, Homo sapiens
attaaaacaagatctttttttcatccaacaaaatgatagttttttaattataatatggtattagagta

SEQ ID NO: 168450 - DNA, 68 bp, Homo sapiens
aacaagatctttttttcatccaacaaaatgatagttttttaattataatatggtattagagtataaat

SEQ ID NO: 168451 - DNA, 70 bp, Homo sapiens
gatctttttttcatccaacaaaatgatagttttttaattataatatggtattagagtataaattggcact

SEQ ID NO: 168452 - DNA, 70 bp, Homo sapiens
ttttttcatccaacaaaatgatagttttttaattataatatggtattagagtataaattggcacttcaat

SEQ ID NO: 168453 - DNA, 73 bp, Homo sapiens
tcatccaacaaaatgatagttttttaattataatatggtattagagtataaattggcacttcaattaatatac

SEQ ID NO: 168454 - DNA, 70 bp, Homo sapiens
caacaaaatgatagttttttaattataatatggtattagagtataaattggcacttcaattaatatactt

SEQ ID NO: 168455 - DNA, 70 bp, Homo sapiens
aatgatagttttttaattataatatggtattagagtataaattggcacttcaattaatatacttttctaa

SEQ ID NO: 168456 - DNA, 69 bp, Homo sapiens
tttttaattataatatggtattagagtataaattggcacttcaattaatatacttttctaaaataataa

SEQ ID NO: 168457 - DNA, 70 bp, Homo sapiens
taatatggtattagagtataaattggcacttcaattaatatacttttctaaaataataattttcctgtag

SEQ ID NO: 168458 - DNA, 74 bp, Homo sapiens
tacttttctaaaataataattttcctgtaggacaattaggcaatacatatcatcaattgcctctaaattataca

SEQ ID NO: 168459 - DNA, 74 bp, Homo sapiens
aaataataattttcctgtaggacaattaggcaatacatatcatcaattgcctctaaattatacatatcctttaa

SEQ ID NO: 168460 - DNA, 77 bp, Homo sapiens
tttcctgtaggacaattaggcaatacatatcatcaattgcctctaaattatacatatcctttaatacacaaattcca

SEQ ID NO: 168461 - DNA, 76 bp, Homo sapiens
ggcaatacatatcatcaattgcctctaaattatacatatcctttaatacacaaattccactctttggaaattattc

SEQ ID NO: 168462 - DNA, 76 bp, Homo sapiens
catatcatcaattgcctctaaattatacatatcctttaatacacaaattccactctttggaaattattccacataa

SEQ ID NO: 168463 - DNA, 74 bp, Homo sapiens
ttgcctctaaattatacatatcctttaatacacaaattccactctttggaaattattccacataaataatatca

SEQ ID NO: 168464 - DNA, 74 bp, Homo sapiens
tatacatatcctttaatacacaaattccactctttggaaattattccacataaataatatcaagtatacaaaga

SEQ ID NO: 168465 - DNA, 72 bp, Homo sapiens
tcctttaatacacaaattccactctttggaaattattccacataaataatatcaagtatacaaagaaattca

SEQ ID NO: 168466 - DNA, 73 bp, Homo sapiens
acacaaattccactctttggaaattattccacataaataatatcaagtatacaaagaaattcataatgaggaa

SEQ ID NO: 168467 - DNA, 73 bp, Homo sapiens
ctctttggaaattattccacataaataatatcaagtatacaaagaaattcataatgaggaaactggaaacagc

SEQ ID NO: 168468 - DNA, 75 bp, Homo sapiens
tattccacataaataatatcaagtatacaaagaaattcataatgaggaaactggaaacagcctaactattcaaca

SEQ ID NO: 168469 - DNA, 73 bp, Homo sapiens
aataatatcaagtatacaaagaaattcataatgaggaaactggaaacagcctaactattcaacaataggcatt

SEQ ID NO: 168470 - DNA, 75 bp, Homo sapiens
caagtatacaaagaaattcataatgaggaaactggaaacagcctaactattcaacaataggcatttggcaattca

SEQ ID NO: 168471 - DNA, 73 bp, Homo sapiens
acaaagaaattcataatgaggaaactggaaacagcctaactattcaacaataggcatttggcaattcaaattc

SEQ ID NO: 168472 - DNA, 75 bp, Homo sapiens
ataatgaggaaactggaaacagcctaactattcaacaataggcatttggcaattcaaattctaatacatccacag

SEQ ID NO: 168473 - DNA, 75 bp, Homo sapiens
aactggaaacagcctaactattcaacaataggcatttggcaattcaaattctaatacatccacagtggaatacaa

SEQ ID NO: 168474 - DNA, 78 bp, Homo sapiens
acagcctaactattcaacaataggcatttggcaattcaaattctaatacatccacagtggaatacaatgttgtgtata

SEQ ID NO: 168475 - DNA, 77 bp, Homo sapiens
attcaacaataggcatttggcaattcaaattctaatacatccacagtggaatacaatgttgtgtatatttacttgga

SEQ ID NO: 168476 - DNA, 75 bp, Homo sapiens
aggcatttggcaattcaaattctaatacatccacagtggaatacaatgttgtgtatatttacttggaaagatctt

SEQ ID NO: 168477 - DNA, 75 bp, Homo sapiens
gcaattcaaattctaatacatccacagtggaatacaatgttgtgtatatttacttggaaagatctttaaaatata

SEQ ID NO: 168478 - DNA, 74 bp, Homo sapiens
atacatccacagtggaatacaatgttgtgtatatttacttggaaagatctttaaaatatactactaccacatgg

SEQ ID NO: 168479 - DNA, 70 bp, Homo sapiens
gtgtatatttacttggaaagatctttaaaatatactactaccacatggggggaagttacaaagcagtatg

SEQ ID NO: 168480 - DNA, 70 bp, Homo sapiens
tggaaagatctttaaaatatactactaccacatggggggaagttacaaagcagtatgttttacaagatcc

SEQ ID NO: 168481 - DNA, 67 bp, Homo sapiens
ctttaaaatatactactaccacatggggggaagttacaaagcagtatgttttacaagatcctgtttt

SEQ ID NO: 168482 - DNA, 68 bp, Homo sapiens
atatactactaccacatggggggaagttacaaagcagtatgttttacaagatcctgttttttaagaaa

SEQ ID NO: 168483 - DNA, 65 bp, Homo sapiens
accacatggggggaagttacaaagcagtatgttttacaagatcctgttttttaagaaaactattt

SEQ ID NO: 168484 - DNA, 69 bp, Homo sapiens
gttacaaagcagtatgttttacaagatcctgttttttaagaaaactattttaagacaattagatggatg

SEQ ID NO: 168485 - DNA, 71 bp, Homo sapiens
aagcagtatgttttacaagatcctgttttttaagaaaactattttaagacaattagatggatgtgtatgtg

SEQ ID NO: 168486 - DNA, 69 bp, Homo sapiens
gttttacaagatcctgttttttaagaaaactattttaagacaattagatggatgtgtatgtgtttgtaa

SEQ ID NO: 168487 - DNA, 67 bp, Homo sapiens
gttttttaagaaaactattttaagacaattagatggatgtgtatgtgtttgtaaaaagactagaagg

SEQ ID NO: 168488 - DNA, 70 bp, Homo sapiens
gaaaactattttaagacaattagatggatgtgtatgtgtttgtaaaaagactagaagggtacgtataata

SEQ ID NO: 168489 - DNA, 75 bp, Homo sapiens
ttaagacaattagatggatgtgtatgtgtttgtaaaaagactagaagggtacgtataataatgatctctattaga

SEQ ID NO: 168490 - DNA, 76 bp, Homo sapiens
agatggatgtgtatgtgtttgtaaaaagactagaagggtacgtataataatgatctctattagaatactgagtagc

SEQ ID NO: 168491 - DNA, 73 bp, Homo sapiens
gtatgtgtttgtaaaaagactagaagggtacgtataataatgatctctattagaatactgagtagctatttct

SEQ ID NO: 168492 - DNA, 71 bp, Homo sapiens
gtaaaaagactagaagggtacgtataataatgatctctattagaatactgagtagctatttcttaagttcg

SEQ ID NO: 168493 - DNA, 75 bp, Homo sapiens
ctagaagggtacgtataataatgatctctattagaatactgagtagctatttcttaagttcgtgattcagaatgg

SEQ ID NO: 168494 - DNA, 76 bp, Homo sapiens
gtacgtataataatgatctctattagaatactgagtagctatttcttaagttcgtgattcagaatggggcagaact

SEQ ID NO: 168495 - DNA, 76 bp, Homo sapiens
aataatgatctctattagaatactgagtagctatttcttaagttcgtgattcagaatggggcagaactttcaaata

SEQ ID NO: 168496 - DNA, 77 bp, Homo sapiens
tctattagaatactgagtagctatttcttaagttcgtgattcagaatggggcagaactttcaaatatattgtcaggc

SEQ ID NO: 168497 - DNA, 68 bp, Homo sapiens
tttttttaaatttggaactctaccaaggctattcagctttggagtgaaggggtaaaaagcaggattca

SEQ ID NO: 168498 - DNA, 70 bp, Homo sapiens
ttaaatttggaactctaccaaggctattcagctttggagtgaaggggtaaaaagcaggattcaagacaac

SEQ ID NO: 168499 - DNA, 69 bp, Homo sapiens
aactctaccaaggctattcagctttggagtgaaggggtaaaaagcaggattcaagacaaccaaaaggga

SEQ ID NO: 168500 - DNA, 68 bp, Homo sapiens
aggctattcagctttggagtgaaggggtaaaaagcaggattcaagacaaccaaaagggaagagaaggg

SEQ ID NO: 168501 - DNA, 65 bp, Homo sapiens
ctttggagtgaaggggtaaaaagcaggattcaagacaaccaaaagggaagagaaggggttaaaga

SEQ ID NO: 168502 - DNA, 67 bp, Homo sapiens
ggtaaaaagcaggattcaagacaaccaaaagggaagagaaggggttaaagaggcggagttatctata

SEQ ID NO: 168503 - DNA, 67 bp, Homo sapiens
aaagcaggattcaagacaaccaaaagggaagagaaggggttaaagaggcggagttatctatagcggt

SEQ ID NO: 168504 - DNA, 68 bp, Homo sapiens
agacaaccaaaagggaagagaaggggttaaagaggcggagttatctatagcggttggagcacaagaaa

SEQ ID NO: 168505 - DNA, 71 bp, Homo sapiens
gggaagagaaggggttaaagaggcggagttatctatagcggttggagcacaagaaagcccgtgaacacaca

SEQ ID NO: 168506 - DNA, 71 bp, Homo sapiens
ggggttaaagaggcggagttatctatagcggttggagcacaagaaagcccgtgaacacacacgagtagaaa

SEQ ID NO: 168507 - DNA, 73 bp, Homo sapiens
taaagaggcggagttatctatagcggttggagcacaagaaagcccgtgaacacacacgagtagaaaaagtgcc

SEQ ID NO: 168508 - DNA, 72 bp, Homo sapiens
agttatctatagcggttggagcacaagaaagcccgtgaacacacacgagtagaaaaagtgccttattcacct

SEQ ID NO: 168509 - DNA, 74 bp, Homo sapiens
gttggagcacaagaaagcccgtgaacacacacgagtagaaaaagtgccttattcacctttgtatcccattcata

SEQ ID NO: 168510 - DNA, 72 bp, Homo sapiens
acaagaaagcccgtgaacacacacgagtagaaaaagtgccttattcacctttgtatcccattcatataacag

SEQ ID NO: 168511 - DNA, 79 bp, Homo sapiens
gtgaacacacacgagtagaaaaagtgccttattcacctttgtatcccattcatataacagtgcctagcatcaatgttca

SEQ ID NO: 168512 - DNA, 77 bp, Homo sapiens
acgagtagaaaaagtgccttattcacctttgtatcccattcatataacagtgcctagcatcaatgttcactgaataa

SEQ ID NO: 168513 - DNA, 76 bp, Homo sapiens
agaaaaagtgccttattcacctttgtatcccattcatataacagtgcctagcatcaatgttcactgaataaaagaa

SEQ ID NO: 168514 - DNA, 78 bp, Homo sapiens
gccttattcacctttgtatcccattcatataacagtgcctagcatcaatgttcactgaataaaagaatgaatattatt

SEQ ID NO: 168515 - DNA, 77 bp, Homo sapiens
cctttgtatcccattcatataacagtgcctagcatcaatgttcactgaataaaagaatgaatattattttagtaaga

SEQ ID NO: 168516 - DNA, 76 bp, Homo sapiens
ttcatataacagtgcctagcatcaatgttcactgaataaaagaatgaatattattttagtaagaaaaaggtccaca

SEQ ID NO: 168517 - DNA, 76 bp, Homo sapiens
gcatcaatgttcactgaataaaagaatgaatattattttagtaagaaaaaggtccacaaacactagctgactgaga

SEQ ID NO: 168518 - DNA, 71 bp, Homo sapiens
tgaataaaagaatgaatattattttagtaagaaaaaggtccacaaacactagctgactgagaggaaaagac

SEQ ID NO: 168519 - DNA, 72 bp, Homo sapiens
aatgaatattattttagtaagaaaaaggtccacaaacactagctgactgagaggaaaagactagagatcacc

SEQ ID NO: 168520 - DNA, 71 bp, Homo sapiens
atattattttagtaagaaaaaggtccacaaacactagctgactgagaggaaaagactagagatcaccttgg

SEQ ID NO: 168521 - DNA, 71 bp, Homo sapiens
taagaaaaaggtccacaaacactagctgactgagaggaaaagactagagatcaccttggggaaaaatccaa

SEQ ID NO: 168522 - DNA, 75 bp, Homo sapiens
tagctgactgagaggaaaagactagagatcaccttggggaaaaatccaaaagtacactagagcaccataagaata

SEQ ID NO: 168523 - DNA, 71 bp, Homo sapiens
agaggaaaagactagagatcaccttggggaaaaatccaaaagtacactagagcaccataagaatacaatcc

SEQ ID NO: 168524 - DNA, 69 bp, Homo sapiens
accttggggaaaaatccaaaagtacactagagcaccataagaatacaatcccccaaaaaatgatcagat

SEQ ID NO: 168525 - DNA, 73 bp, Homo sapiens
aaaatccaaaagtacactagagcaccataagaatacaatcccccaaaaaatgatcagattcttcagaaagcat

SEQ ID NO: 168526 - DNA, 73 bp, Homo sapiens
aaagtacactagagcaccataagaatacaatcccccaaaaaatgatcagattcttcagaaagcatttagtaag

SEQ ID NO: 168527 - DNA, 76 bp, Homo sapiens
agcaccataagaatacaatcccccaaaaaatgatcagattcttcagaaagcatttagtaagtgccatgtgacaaaa

SEQ ID NO: 168528 - DNA, 75 bp, Homo sapiens
taagaatacaatcccccaaaaaatgatcagattcttcagaaagcatttagtaagtgccatgtgacaaaatggaac

SEQ ID NO: 168529 - DNA, 73 bp, Homo sapiens
cccaaaaaatgatcagattcttcagaaagcatttagtaagtgccatgtgacaaaatggaacccaccccataaa

SEQ ID NO: 168530 - DNA, 74 bp, Homo sapiens
aaaatgatcagattcttcagaaagcatttagtaagtgccatgtgacaaaatggaacccaccccataaagcagtt

SEQ ID NO: 168531 - DNA, 72 bp, Homo sapiens
attcttcagaaagcatttagtaagtgccatgtgacaaaatggaacccaccccataaagcagtttcactaaaa

SEQ ID NO: 168532 - DNA, 71 bp, Homo sapiens
aaagcatttagtaagtgccatgtgacaaaatggaacccaccccataaagcagtttcactaaaagttgaggc

SEQ ID NO: 168533 - DNA, 71 bp, Homo sapiens
gtaagtgccatgtgacaaaatggaacccaccccataaagcagtttcactaaaagttgaggcctctggaagg

SEQ ID NO: 168534 - DNA, 68 bp, Homo sapiens
acaaaatggaacccaccccataaagcagtttcactaaaagttgaggcctctggaagggctcccaaaga

SEQ ID NO: 168535 - DNA, 68 bp, Homo sapiens
aacccaccccataaagcagtttcactaaaagttgaggcctctggaagggctcccaaagacaaatttga

SEQ ID NO: 168536 - DNA, 72 bp, Homo sapiens
taaagcagtttcactaaaagttgaggcctctggaagggctcccaaagacaaatttgaacagcctgtgactta

SEQ ID NO: 168537 - DNA, 71 bp, Homo sapiens
agtttcactaaaagttgaggcctctggaagggctcccaaagacaaatttgaacagcctgtgacttatatta

SEQ ID NO: 168538 - DNA, 71 bp, Homo sapiens
aaagttgaggcctctggaagggctcccaaagacaaatttgaacagcctgtgacttatattagcaaattctt

SEQ ID NO: 168539 - DNA, 77 bp, Homo sapiens
ggctcccaaagacaaatttgaacagcctgtgacttatattagcaaattctttacatataattatattgatgcattaa

SEQ ID NO: 168540 - DNA, 78 bp, Homo sapiens
gacaaatttgaacagcctgtgacttatattagcaaattctttacatataattatattgatgcattaattgagaacgaa

SEQ ID NO: 168541 - DNA, 79 bp, Homo sapiens
aacagcctgtgacttatattagcaaattctttacatataattatattgatgcattaattgagaacgaaagatatgcatt

SEQ ID NO: 168542 - DNA, 78 bp, Homo sapiens
gacttatattagcaaattctttacatataattatattgatgcattaattgagaacgaaagatatgcatttaacggaga

SEQ ID NO: 168543 - DNA, 76 bp, Homo sapiens
gcaaattctttacatataattatattgatgcattaattgagaacgaaagatatgcatttaacggagatttccttct

SEQ ID NO: 168544 - DNA, 77 bp, Homo sapiens
catataattatattgatgcattaattgagaacgaaagatatgcatttaacggagatttccttcttatatcaaaaaga

SEQ ID NO: 168545 - DNA, 77 bp, Homo sapiens
ttgatgcattaattgagaacgaaagatatgcatttaacggagatttccttcttatatcaaaaagatacctgcactcc

SEQ ID NO: 168546 - DNA, 75 bp, Homo sapiens
gcattaattgagaacgaaagatatgcatttaacggagatttccttcttatatcaaaaagatacctgcactcctag

SEQ ID NO: 168547 - DNA, 74 bp, Homo sapiens
agaacgaaagatatgcatttaacggagatttccttcttatatcaaaaagatacctgcactcctagtttattgca

SEQ ID NO: 168548 - DNA, 79 bp, Homo sapiens
ctattcacaacagcaacacaaggaatcaaactaagtatccatcaacagacgactaaagaaaatggcatatatatatgtg

SEQ ID NO: 168549 - DNA, 74 bp, Homo sapiens
acaccatggaataccacccagccattaaaaacaatcaaatcatgtattttgcagcaacccggatggaactggag

SEQ ID NO: 168550 - DNA, 66 bp, Homo sapiens
aaaaaaataagagtgggataataggtatcccactggagactccaaaaagtgggagggtgggaggga

SEQ ID NO: 168551 - DNA, 69 bp, Homo sapiens
aataagagtgggataataggtatcccactggagactccaaaaagtgggagggtgggagggaggtgagag

SEQ ID NO: 168552 - DNA, 68 bp, Homo sapiens
ataataggtatcccactggagactccaaaaagtgggagggtgggagggaggtgagagttgaaaaatta

SEQ ID NO: 168553 - DNA, 67 bp, Homo sapiens
tatcccactggagactccaaaaagtgggagggtgggagggaggtgagagttgaaaaattacctttta

SEQ ID NO: 168554 - DNA, 68 bp, Homo sapiens
tccaaaaagtgggagggtgggagggaggtgagagttgaaaaattaccttttaggtataatgatcacat

SEQ ID NO: 168555 - DNA, 69 bp, Homo sapiens
gggagggtgggagggaggtgagagttgaaaaattaccttttaggtataatgatcacatttggtacacta

SEQ ID NO: 168556 - DNA, 69 bp, Homo sapiens
ggagggaggtgagagttgaaaaattaccttttaggtataatgatcacatttggtacactaaaagcctcg

SEQ ID NO: 168557 - DNA, 69 bp, Homo sapiens
gagagttgaaaaattaccttttaggtataatgatcacatttggtacactaaaagcctcggctttaccac

SEQ ID NO: 168558 - DNA, 73 bp, Homo sapiens
aattaccttttaggtataatgatcacatttggtacactaaaagcctcggctttaccaccacacaatatatgca

SEQ ID NO: 168559 - DNA, 75 bp, Homo sapiens
ttttaggtataatgatcacatttggtacactaaaagcctcggctttaccaccacacaatatatgcatgtaagaaa

SEQ ID NO: 168560 - DNA, 81 bp, Homo sapiens
ataatgatcacatttggtacactaaaagcctcggctttaccaccacacaatatatgcatgtaagaaatgcatctgcacttg

SEQ ID NO: 168561 - DNA, 80 bp, Homo sapiens
tggtacactaaaagcctcggctttaccaccacacaatatatgcatgtaagaaatgcatctgcacttgtacactctaaata

SEQ ID NO: 168562 - DNA, 79 bp, Homo sapiens
actaaaagcctcggctttaccaccacacaatatatgcatgtaagaaatgcatctgcacttgtacactctaaatacataa

SEQ ID NO: 168563 - DNA, 76 bp, Homo sapiens
cggctttaccaccacacaatatatgcatgtaagaaatgcatctgcacttgtacactctaaatacataaaaaaaaat

SEQ ID NO: 168564 - DNA, 69 bp, Homo sapiens
aaaaaattttaaaggcgattttctcttggcttaatatggtcaatataaagggagatcaactccatatat

SEQ ID NO: 168565 - DNA, 71 bp, Homo sapiens
aaaggcgattttctcttggcttaatatggtcaatataaagggagatcaactccatatattttatacggttg

SEQ ID NO: 168566 - DNA, 72 bp, Homo sapiens
cgattttctcttggcttaatatggtcaatataaagggagatcaactccatatattttatacggttgtttcaa

SEQ ID NO: 168567 - DNA, 75 bp, Homo sapiens
tggcttaatatggtcaatataaagggagatcaactccatatattttatacggttgtttcaatttcatatttatca

SEQ ID NO: 168568 - DNA, 74 bp, Homo sapiens
taatatggtcaatataaagggagatcaactccatatattttatacggttgtttcaatttcatatttatcatttc

SEQ ID NO: 168569 - DNA, 73 bp, Homo sapiens
atggtcaatataaagggagatcaactccatatattttatacggttgtttcaatttcatatttatcatttctta

SEQ ID NO: 168570 - DNA, 73 bp, Homo sapiens
caatataaagggagatcaactccatatattttatacggttgtttcaatttcatatttatcatttcttaataga

SEQ ID NO: 168571 - DNA, 73 bp, Homo sapiens
gggagatcaactccatatattttatacggttgtttcaatttcatatttatcatttcttaatagagtttctaca

SEQ ID NO: 168572 - DNA, 74 bp, Homo sapiens
ctccatatattttatacggttgtttcaatttcatatttatcatttcttaatagagtttctacatcagtgaatac

SEQ ID NO: 168573 - DNA, 74 bp, Homo sapiens
atattttatacggttgtttcaatttcatatttatcatttcttaatagagtttctacatcagtgaatactttgca

SEQ ID NO: 168574 - DNA, 76 bp, Homo sapiens
ttatacggttgtttcaatttcatatttatcatttcttaatagagtttctacatcagtgaatactttgcataataca

SEQ ID NO: 168575 - DNA, 74 bp, Homo sapiens
acggttgtttcaatttcatatttatcatttcttaatagagtttctacatcagtgaatactttgcataatacaac

SEQ ID NO: 168576 - DNA, 77 bp, Homo sapiens
tgtttcaatttcatatttatcatttcttaatagagtttctacatcagtgaatactttgcataatacaacttttcatg

SEQ ID NO: 168577 - DNA, 76 bp, Homo sapiens
caatttcatatttatcatttcttaatagagtttctacatcagtgaatactttgcataatacaacttttcatggaaa

SEQ ID NO: 168578 - DNA, 75 bp, Homo sapiens
ttatcatttcttaatagagtttctacatcagtgaatactttgcataatacaacttttcatggaaacccatgacct

SEQ ID NO: 168579 - DNA, 73 bp, Homo sapiens
cttaatagagtttctacatcagtgaatactttgcataatacaacttttcatggaaacccatgaccttacttaa

SEQ ID NO: 168580 - DNA, 72 bp, Homo sapiens
agagtttctacatcagtgaatactttgcataatacaacttttcatggaaacccatgaccttacttaataaag

SEQ ID NO: 168581 - DNA, 72 bp, Homo sapiens
cagtgaatactttgcataatacaacttttcatggaaacccatgaccttacttaataaagtaattcagagaag

SEQ ID NO: 168582 - DNA, 69 bp, Homo sapiens
ctttgcataatacaacttttcatggaaacccatgaccttacttaataaagtaattcagagaagttaccc

SEQ ID NO: 168583 - DNA, 67 bp, Homo sapiens
tacaacttttcatggaaacccatgaccttacttaataaagtaattcagagaagttaccctaaataat

SEQ ID NO: 168584 - DNA, 68 bp, Homo sapiens
cccatgaccttacttaataaagtaattcagagaagttaccctaaataattaattgctaataaatattc

SEQ ID NO: 168585 - DNA, 70 bp, Homo sapiens
ttcagagaagttaccctaaataattaattgctaataaatattccctaaggacagaaaatcaagattgcct

SEQ ID NO: 168586 - DNA, 70 bp, Homo sapiens
gttaccctaaataattaattgctaataaatattccctaaggacagaaaatcaagattgccttagcaggaa

SEQ ID NO: 168587 - DNA, 75 bp, Homo sapiens
ctaaataattaattgctaataaatattccctaaggacagaaaatcaagattgccttagcaggaaatatctgcata

SEQ ID NO: 168588 - DNA, 77 bp, Homo sapiens
tatatatatattcaaaagcatctaagtaagtctactttcaccttccatatttccagacaatgtaaaagcaagcatac

SEQ ID NO: 168589 - DNA, 76 bp, Homo sapiens
atatatatattcaaaagcatctaagtaagtctactttcaccttccatatttccagacaatgtaaaagcaagcatac

SEQ ID NO: 168590 - DNA, 73 bp, Homo sapiens
ttcaaaagcatctaagtaagtctactttcaccttccatatttccagacaatgtaaaagcaagcatacctttta

SEQ ID NO: 168591 - DNA, 71 bp, Homo sapiens
ctaagtaagtctactttcaccttccatatttccagacaatgtaaaagcaagcataccttttaataccagga

SEQ ID NO: 168592 - DNA, 70 bp, Homo sapiens
ctactttcaccttccatatttccagacaatgtaaaagcaagcataccttttaataccaggaaaaccattg

SEQ ID NO: 168593 - DNA, 69 bp, Homo sapiens
cttccatatttccagacaatgtaaaagcaagcataccttttaataccaggaaaaccattggggaaccta

SEQ ID NO: 168594 - DNA, 68 bp, Homo sapiens
atatttccagacaatgtaaaagcaagcataccttttaataccaggaaaaccattggggaacctagaac

SEQ ID NO: 168595 - DNA, 67 bp, Homo sapiens
caatgtaaaagcaagcataccttttaataccaggaaaaccattggggaacctagaaccataaaattc

SEQ ID NO: 168596 - DNA, 67 bp, Homo sapiens
gcataccttttaataccaggaaaaccattggggaacctagaaccataaaattctggctagttacaat

SEQ ID NO: 168597 - DNA, 70 bp, Homo sapiens
ttaataccaggaaaaccattggggaacctagaaccataaaattctggctagttacaatttgaatgacaca

SEQ ID NO: 168598 - DNA, 71 bp, Homo sapiens
gggaacctagaaccataaaattctggctagttacaatttgaatgacacatttttacaattcagacaccacc

SEQ ID NO: 168599 - DNA, 72 bp, Homo sapiens
gaaccataaaattctggctagttacaatttgaatgacacatttttacaattcagacaccaccttaagttcca

SEQ ID NO: 168600 - DNA, 70 bp, Homo sapiens
aaattctggctagttacaatttgaatgacacatttttacaattcagacaccaccttaagttccagggaag

SEQ ID NO: 168601 - DNA, 73 bp, Homo sapiens
tagttacaatttgaatgacacatttttacaattcagacaccaccttaagttccagggaagtgtctcaagtgaa

SEQ ID NO: 168602 - DNA, 73 bp, Homo sapiens
aatgacacatttttacaattcagacaccaccttaagttccagggaagtgtctcaagtgaacacatacataaat

SEQ ID NO: 168603 - DNA, 72 bp, Homo sapiens
cacatttttacaattcagacaccaccttaagttccagggaagtgtctcaagtgaacacatacataaatttaa

SEQ ID NO: 168604 - DNA, 72 bp, Homo sapiens
tttacaattcagacaccaccttaagttccagggaagtgtctcaagtgaacacatacataaatttaatgttag

SEQ ID NO: 168605 - DNA, 71 bp, Homo sapiens
aattcagacaccaccttaagttccagggaagtgtctcaagtgaacacatacataaatttaatgttagtaag

SEQ ID NO: 168606 - DNA, 70 bp, Homo sapiens
agacaccaccttaagttccagggaagtgtctcaagtgaacacatacataaatttaatgttagtaagttct

SEQ ID NO: 168607 - DNA, 70 bp, Homo sapiens
ccaccttaagttccagggaagtgtctcaagtgaacacatacataaatttaatgttagtaagttcttaatg

SEQ ID NO: 168608 - DNA, 73 bp, Homo sapiens
gttccagggaagtgtctcaagtgaacacatacataaatttaatgttagtaagttcttaatgtagcctcatttc

SEQ ID NO: 168609 - DNA, 72 bp, Homo sapiens
agggaagtgtctcaagtgaacacatacataaatttaatgttagtaagttcttaatgtagcctcatttctatt

SEQ ID NO: 168610 - DNA, 74 bp, Homo sapiens
agtgtctcaagtgaacacatacataaatttaatgttagtaagttcttaatgtagcctcatttctatttatactg

SEQ ID NO: 168611 - DNA, 73 bp, Homo sapiens
ctcaagtgaacacatacataaatttaatgttagtaagttcttaatgtagcctcatttctatttatactgtaaa

SEQ ID NO: 168612 - DNA, 72 bp, Homo sapiens
gaacacatacataaatttaatgttagtaagttcttaatgtagcctcatttctatttatactgtaaatatggg

SEQ ID NO: 168613 - DNA, 74 bp, Homo sapiens
gtagcctcatttctatttatactgtaaatatgggtatatatgttattaaattaagatgacagtctaaattccca

SEQ ID NO: 168614 - DNA, 74 bp, Homo sapiens
ctcatttctatttatactgtaaatatgggtatatatgttattaaattaagatgacagtctaaattcccatccac

SEQ ID NO: 168615 - DNA, 73 bp, Homo sapiens
actgtaaatatgggtatatatgttattaaattaagatgacagtctaaattcccatccacttactaggaatcat

SEQ ID NO: 168616 - DNA, 74 bp, Homo sapiens
atgggtatatatgttattaaattaagatgacagtctaaattcccatccacttactaggaatcatttatatttca

SEQ ID NO: 168617 - DNA, 80 bp, Homo sapiens
attaagatgacagtctaaattcccatccacttactaggaatcatttatatttcatatagcactagagatgtcttctctga

SEQ ID NO: 168618 - DNA, 80 bp, Homo sapiens
acagtctaaattcccatccacttactaggaatcatttatatttcatatagcactagagatgtcttctctgagcttatgaa

SEQ ID NO: 168619 - DNA, 81 bp, Homo sapiens
ttcccatccacttactaggaatcatttatatttcatatagcactagagatgtcttctctgagcttatgaagaattataatg

SEQ ID NO: 168620 - DNA, 83 bp, Homo sapiens
cacttactaggaatcatttatatttcatatagcactagagatgtcttctctgagcttatgaagaattataatggcgagaatca

SEQ ID NO: 168621 - DNA, 82 bp, Homo sapiens
catttatatttcatatagcactagagatgtcttctctgagcttatgaagaattataatggcgagaatcaaaccaaacattga

SEQ ID NO: 168622 - DNA, 83 bp, Homo sapiens
tatttcatatagcactagagatgtcttctctgagcttatgaagaattataatggcgagaatcaaaccaaacattgatggacaa

SEQ ID NO: 168623 - DNA, 83 bp, Homo sapiens
tagcactagagatgtcttctctgagcttatgaagaattataatggcgagaatcaaaccaaacattgatggacaactgcaaaga

SEQ ID NO: 168624 - DNA, 83 bp, Homo sapiens
tcttctctgagcttatgaagaattataatggcgagaatcaaaccaaacattgatggacaactgcaaagagcattccacatata

SEQ ID NO: 168625 - DNA, 78 bp, Homo sapiens
gaagaattataatggcgagaatcaaaccaaacattgatggacaactgcaaagagcattccacatataaatgaaaaatg

SEQ ID NO: 168626 - DNA, 79 bp, Homo sapiens
aatggcgagaatcaaaccaaacattgatggacaactgcaaagagcattccacatataaatgaaaaatgttgcttgctaa

SEQ ID NO: 168627 - DNA, 77 bp, Homo sapiens
accaaacattgatggacaactgcaaagagcattccacatataaatgaaaaatgttgcttgctaaagatctataaggt

SEQ ID NO: 168628 - DNA, 78 bp, Homo sapiens
gatggacaactgcaaagagcattccacatataaatgaaaaatgttgcttgctaaagatctataaggttgttttcagaa

SEQ ID NO: 168629 - DNA, 77 bp, Homo sapiens
caactgcaaagagcattccacatataaatgaaaaatgttgcttgctaaagatctataaggttgttttcagaaacaca

SEQ ID NO: 168630 - DNA, 72 bp, Homo sapiens
taaatgaaaaatgttgcttgctaaagatctataaggttgttttcagaaacacaaccttcttgatattatttg

SEQ ID NO: 168631 - DNA, 74 bp, Homo sapiens
gaaaaatgttgcttgctaaagatctataaggttgttttcagaaacacaaccttcttgatattatttgtcagata

SEQ ID NO: 168632 - DNA, 73 bp, Homo sapiens
gcttgctaaagatctataaggttgttttcagaaacacaaccttcttgatattatttgtcagataaattaatta

SEQ ID NO: 168633 - DNA, 73 bp, Homo sapiens
gttgttttcagaaacacaaccttcttgatattatttgtcagataaattaattatgaaagcaataaatgtctaa

SEQ ID NO: 168634 - DNA, 74 bp, Homo sapiens
cacaaccttcttgatattatttgtcagataaattaattatgaaagcaataaatgtctaaatatacaggaaagtg

SEQ ID NO: 168635 - DNA, 71 bp, Homo sapiens
gaaagcaataaatgtctaaatatacaggaaagtgttctcaattttctaagttcattgtgttattaacttgt

SEQ ID NO: 168636 - DNA, 70 bp, Homo sapiens
aatgtctaaatatacaggaaagtgttctcaattttctaagttcattgtgttattaacttgttactaacaa

SEQ ID NO: 168637 - DNA, 70 bp, Homo sapiens
tatacaggaaagtgttctcaattttctaagttcattgtgttattaacttgttactaacaataactcaagt

SEQ ID NO: 168638 - DNA, 72 bp, Homo sapiens
gtgttctcaattttctaagttcattgtgttattaacttgttactaacaataactcaagttaggatatatcca

SEQ ID NO: 168639 - DNA, 69 bp, Homo sapiens
ttttctaagttcattgtgttattaacttgttactaacaataactcaagttaggatatatccaaaaccat

SEQ ID NO: 168640 - DNA, 72 bp, Homo sapiens
agttcattgtgttattaacttgttactaacaataactcaagttaggatatatccaaaaccattcctatgata

SEQ ID NO: 168641 - DNA, 72 bp, Homo sapiens
attaacttgttactaacaataactcaagttaggatatatccaaaaccattcctatgataatatcactagtac

SEQ ID NO: 168642 - DNA, 72 bp, Homo sapiens
cttgttactaacaataactcaagttaggatatatccaaaaccattcctatgataatatcactagtacttccc

SEQ ID NO: 168643 - DNA, 70 bp, Homo sapiens
aactcaagttaggatatatccaaaaccattcctatgataatatcactagtacttccctaaaaggcaaagg

SEQ ID NO: 168644 - DNA, 71 bp, Homo sapiens
aagttaggatatatccaaaaccattcctatgataatatcactagtacttccctaaaaggcaaagggataga

SEQ ID NO: 168645 - DNA, 69 bp, Homo sapiens
ccaaaaccattcctatgataatatcactagtacttccctaaaaggcaaagggatagaatttttggaatg

SEQ ID NO: 168646 - DNA, 76 bp, Homo sapiens
tcctatgataatatcactagtacttccctaaaaggcaaagggatagaatttttggaatgtgatcaacactatcaca

SEQ ID NO: 168647 - DNA, 75 bp, Homo sapiens
tagtacttccctaaaaggcaaagggatagaatttttggaatgtgatcaacactatcacagaagaccactgtgatc

SEQ ID NO: 168648 - DNA, 78 bp, Homo sapiens
taaaaggcaaagggatagaatttttggaatgtgatcaacactatcacagaagaccactgtgatcgtcaatgtcaacat

SEQ ID NO: 168649 - DNA, 81 bp, Homo sapiens
aatttttggaatgtgatcaacactatcacagaagaccactgtgatcgtcaatgtcaacattccttgagtgacagcaagaaa

SEQ ID NO: 168650 - DNA, 79 bp, Homo sapiens
atcaacactatcacagaagaccactgtgatcgtcaatgtcaacattccttgagtgacagcaagaaaaactgttgggaac

SEQ ID NO: 168651 - DNA, 78 bp, Homo sapiens
tatcacagaagaccactgtgatcgtcaatgtcaacattccttgagtgacagcaagaaaaactgttgggaacttctgtt

SEQ ID NO: 168652 - DNA, 75 bp, Homo sapiens
aagaccactgtgatcgtcaatgtcaacattccttgagtgacagcaagaaaaactgttgggaacttctgttttgag

SEQ ID NO: 168653 - DNA, 77 bp, Homo sapiens
gtgatcgtcaatgtcaacattccttgagtgacagcaagaaaaactgttgggaacttctgttttgagggatcaacaca

SEQ ID NO: 168654 - DNA, 73 bp, Homo sapiens
ttgagtgacagcaagaaaaactgttgggaacttctgttttgagggatcaacacagcacctttgaatacctttc

SEQ ID NO: 168655 - DNA, 68 bp, Homo sapiens
aagaaaaactgttgggaacttctgttttgagggatcaacacagcacctttgaatacctttccttttca

SEQ ID NO: 168656 - DNA, 69 bp, Homo sapiens
aaactgttgggaacttctgttttgagggatcaacacagcacctttgaatacctttccttttcaggagaa

SEQ ID NO: 168657 - DNA, 72 bp, Homo sapiens
aacttctgttttgagggatcaacacagcacctttgaatacctttccttttcaggagaacttgccaggatgcc

SEQ ID NO: 168658 - DNA, 70 bp, Homo sapiens
agggatcaacacagcacctttgaatacctttccttttcaggagaacttgccaggatgcctccggaaggtt

SEQ ID NO: 168659 - DNA, 71 bp, Homo sapiens
aacacagcacctttgaatacctttccttttcaggagaacttgccaggatgcctccggaaggtttctgaagc

SEQ ID NO: 168660 - DNA, 69 bp, Homo sapiens
tttgaatacctttccttttcaggagaacttgccaggatgcctccggaaggtttctgaagcctaataaac

SEQ ID NO: 168661 - DNA, 70 bp, Homo sapiens
ttccttttcaggagaacttgccaggatgcctccggaaggtttctgaagcctaataaaccattacacaaat

SEQ ID NO: 168662 - DNA, 68 bp, Homo sapiens
aggatgcctccggaaggtttctgaagcctaataaaccattacacaaattctactctttatctcctttt

SEQ ID NO: 168663 - DNA, 68 bp, Homo sapiens
gcctccggaaggtttctgaagcctaataaaccattacacaaattctactctttatctccttttttcta

SEQ ID NO: 168664 - DNA, 67 bp, Homo sapiens
gcctaataaaccattacacaaattctactctttatctccttttttctaaagaacaataacttacttg

SEQ ID NO: 168665 - DNA, 67 bp, Homo sapiens
tacacaaattctactctttatctccttttttctaaagaacaataacttacttgtacaagtttgggct

SEQ ID NO: 168666 - DNA, 65 bp, Homo sapiens
ctccttttttctaaagaacaataacttacttgtacaagtttgggcttcaagaaaacactagattt

SEQ ID NO: 168667 - DNA, 67 bp, Homo sapiens
ctaaagaacaataacttacttgtacaagtttgggcttcaagaaaacactagattttgccctggaaaa

SEQ ID NO: 168668 - DNA, 68 bp, Homo sapiens
gaacaataacttacttgtacaagtttgggcttcaagaaaacactagattttgccctggaaaatgtggt

SEQ ID NO: 168669 - DNA, 70 bp, Homo sapiens
tacttgtacaagtttgggcttcaagaaaacactagattttgccctggaaaatgtggttatgtcaacttat

SEQ ID NO: 168670 - DNA, 71 bp, Homo sapiens
aagtttgggcttcaagaaaacactagattttgccctggaaaatgtggttatgtcaacttatttgagctgac

SEQ ID NO: 168671 - DNA, 77 bp, Homo sapiens
actagattttgccctggaaaatgtggttatgtcaacttatttgagctgactctagacaaaattatgaggtcagcaca

SEQ ID NO: 168672 - DNA, 77 bp, Homo sapiens
tggaaaatgtggttatgtcaacttatttgagctgactctagacaaaattatgaggtcagcacagttaaccttcagtg

SEQ ID NO: 168673 - DNA, 76 bp, Homo sapiens
aatgtggttatgtcaacttatttgagctgactctagacaaaattatgaggtcagcacagttaaccttcagtgtttc

SEQ ID NO: 168674 - DNA, 76 bp, Homo sapiens
tttgagctgactctagacaaaattatgaggtcagcacagttaaccttcagtgtttccttgttctcctttgcttagc

SEQ ID NO: 168675 - DNA, 73 bp, Homo sapiens
gacaaaattatgaggtcagcacagttaaccttcagtgtttccttgttctcctttgcttagcttcctttcagta

SEQ ID NO: 168676 - DNA, 72 bp, Homo sapiens
aattatgaggtcagcacagttaaccttcagtgtttccttgttctcctttgcttagcttcctttcagtacctc

SEQ ID NO: 168677 - DNA, 68 bp, Homo sapiens
acagttaaccttcagtgtttccttgttctcctttgcttagcttcctttcagtacctccctctaactcc

SEQ ID NO: 168678 - DNA, 71 bp, Homo sapiens
ttcagtgtttccttgttctcctttgcttagcttcctttcagtacctccctctaactccgatctccaagaaa

SEQ ID NO: 168679 - DNA, 72 bp, Homo sapiens
ctttgcttagcttcctttcagtacctccctctaactccgatctccaagaaatctggaactcttatattgttc

SEQ ID NO: 168680 - DNA, 71 bp, Homo sapiens
cttcctttcagtacctccctctaactccgatctccaagaaatctggaactcttatattgttccctagctaa

SEQ ID NO: 168681 - DNA, 71 bp, Homo sapiens
agtacctccctctaactccgatctccaagaaatctggaactcttatattgttccctagctaaagatactaa

SEQ ID NO: 168682 - DNA, 74 bp, Homo sapiens
tccctctaactccgatctccaagaaatctggaactcttatattgttccctagctaaagatactaaatagtgaca

SEQ ID NO: 168683 - DNA, 75 bp, Homo sapiens
atctccaagaaatctggaactcttatattgttccctagctaaagatactaaatagtgacacccatctaggctcaa

SEQ ID NO: 168684 - DNA, 74 bp, Homo sapiens
aagaaatctggaactcttatattgttccctagctaaagatactaaatagtgacacccatctaggctcaatgtcc

SEQ ID NO: 168685 - DNA, 76 bp, Homo sapiens
attgttccctagctaaagatactaaatagtgacacccatctaggctcaatgtcctgagcttcagatttgtcccaaa

SEQ ID NO: 168686 - DNA, 77 bp, Homo sapiens
aaagatactaaatagtgacacccatctaggctcaatgtcctgagcttcagatttgtcccaaatgtctacttctggga

SEQ ID NO: 168687 - DNA, 78 bp, Homo sapiens
taaatagtgacacccatctaggctcaatgtcctgagcttcagatttgtcccaaatgtctacttctgggactgaagttc

SEQ ID NO: 168688 - DNA, 79 bp, Homo sapiens
ccatctaggctcaatgtcctgagcttcagatttgtcccaaatgtctacttctgggactgaagttccaatagtcatttca

SEQ ID NO: 168689 - DNA, 78 bp, Homo sapiens
tcaatgtcctgagcttcagatttgtcccaaatgtctacttctgggactgaagttccaatagtcatttcaactaattca

SEQ ID NO: 168690 - DNA, 77 bp, Homo sapiens
tgagcttcagatttgtcccaaatgtctacttctgggactgaagttccaatagtcatttcaactaattcatataatgg

SEQ ID NO: 168691 - DNA, 78 bp, Homo sapiens
aaatgtctacttctgggactgaagttccaatagtcatttcaactaattcatataatggtgatgggctaatgatggcaa

SEQ ID NO: 168692 - DNA, 80 bp, Homo sapiens
actgaagttccaatagtcatttcaactaattcatataatggtgatgggctaatgatggcaacttcatatacatacctaca

SEQ ID NO: 168693 - DNA, 82 bp, Homo sapiens
atagtcatttcaactaattcatataatggtgatgggctaatgatggcaacttcatatacatacctacaccctcatcgcctca

SEQ ID NO: 168694 - DNA, 80 bp, Homo sapiens
aactaattcatataatggtgatgggctaatgatggcaacttcatatacatacctacaccctcatcgcctcatgaaataaa

SEQ ID NO: 168695 - DNA, 79 bp, Homo sapiens
atgggctaatgatggcaacttcatatacatacctacaccctcatcgcctcatgaaataaaaattgatgattttcaactg

SEQ ID NO: 168696 - DNA, 77 bp, Homo sapiens
aatgatggcaacttcatatacatacctacaccctcatcgcctcatgaaataaaaattgatgattttcaactgggttg

SEQ ID NO: 168697 - DNA, 75 bp, Homo sapiens
acttcatatacatacctacaccctcatcgcctcatgaaataaaaattgatgattttcaactgggttgggagaatg

SEQ ID NO: 168698 - DNA, 74 bp, Homo sapiens
atacctacaccctcatcgcctcatgaaataaaaattgatgattttcaactgggttgggagaatgggctactgaa

SEQ ID NO: 168699 - DNA, 76 bp, Homo sapiens
atcgcctcatgaaataaaaattgatgattttcaactgggttgggagaatgggctactgaatcagaattacctgaga

SEQ ID NO: 168700 - DNA, 74 bp, Homo sapiens
gaaataaaaattgatgattttcaactgggttgggagaatgggctactgaatcagaattacctgagaaattctga

SEQ ID NO: 168701 - DNA, 72 bp, Homo sapiens
attttcaactgggttgggagaatgggctactgaatcagaattacctgagaaattctgaaataaactttctca

SEQ ID NO: 168702 - DNA, 74 bp, Homo sapiens
ggttgggagaatgggctactgaatcagaattacctgagaaattctgaaataaactttctcatcaatgtgtaaat

SEQ ID NO: 168703 - DNA, 73 bp, Homo sapiens
atgggctactgaatcagaattacctgagaaattctgaaataaactttctcatcaatgtgtaaatttataaccc

SEQ ID NO: 168704 - DNA, 73 bp, Homo sapiens
tcagaattacctgagaaattctgaaataaactttctcatcaatgtgtaaatttataaccccgtgtcctgtgga

SEQ ID NO: 168705 - DNA, 72 bp, Homo sapiens
attacctgagaaattctgaaataaactttctcatcaatgtgtaaatttataaccccgtgtcctgtggatgac

SEQ ID NO: 168706 - DNA, 74 bp, Homo sapiens
attctgaaataaactttctcatcaatgtgtaaatttataaccccgtgtcctgtggatgaccaatgccttgagaa

SEQ ID NO: 168707 - DNA, 77 bp, Homo sapiens
ataaactttctcatcaatgtgtaaatttataaccccgtgtcctgtggatgaccaatgccttgagaagccacagatgc

SEQ ID NO: 168708 - DNA, 80 bp, Homo sapiens
atcaatgtgtaaatttataaccccgtgtcctgtggatgaccaatgccttgagaagccacagatgctgatgttgagaagga

SEQ ID NO: 168709 - DNA, 77 bp, Homo sapiens
gtaaatttataaccccgtgtcctgtggatgaccaatgccttgagaagccacagatgctgatgttgagaaggagggag

SEQ ID NO: 168710 - DNA, 83 bp, Homo sapiens
cgtgtcctgtggatgaccaatgccttgagaagccacagatgctgatgttgagaaggagggagggcagaaacatcatccaacta

SEQ ID NO: 168711 - DNA, 83 bp, Homo sapiens
tgtggatgaccaatgccttgagaagccacagatgctgatgttgagaaggagggagggcagaaacatcatccaactaagtgaaa

SEQ ID NO: 168712 - DNA, 79 bp, Homo sapiens
aatgccttgagaagccacagatgctgatgttgagaaggagggagggcagaaacatcatccaactaagtgaaagaaatgt

SEQ ID NO: 168713 - DNA, 78 bp, Homo sapiens
aagccacagatgctgatgttgagaaggagggagggcagaaacatcatccaactaagtgaaagaaatgttcaggtgcct

SEQ ID NO: 168714 - DNA, 77 bp, Homo sapiens
atgctgatgttgagaaggagggagggcagaaacatcatccaactaagtgaaagaaatgttcaggtgccttgttcttc

SEQ ID NO: 168715 - DNA, 73 bp, Homo sapiens
agaaggagggagggcagaaacatcatccaactaagtgaaagaaatgttcaggtgccttgttcttccctctgcc

SEQ ID NO: 168716 - DNA, 75 bp, Homo sapiens
agggcagaaacatcatccaactaagtgaaagaaatgttcaggtgccttgttcttccctctgcccataaatacata

SEQ ID NO: 168717 - DNA, 74 bp, Homo sapiens
agaaacatcatccaactaagtgaaagaaatgttcaggtgccttgttcttccctctgcccataaatacatagtag

SEQ ID NO: 168718 - DNA, 72 bp, Homo sapiens
aactaagtgaaagaaatgttcaggtgccttgttcttccctctgcccataaatacatagtaggtattcagtaa

SEQ ID NO: 168719 - DNA, 75 bp, Homo sapiens
aaagaaatgttcaggtgccttgttcttccctctgcccataaatacatagtaggtattcagtaacagctgcatttc

SEQ ID NO: 168720 - DNA, 75 bp, Homo sapiens
aggtgccttgttcttccctctgcccataaatacatagtaggtattcagtaacagctgcatttccagtcaatattt

SEQ ID NO: 168721 - DNA, 74 bp, Homo sapiens
cttgttcttccctctgcccataaatacatagtaggtattcagtaacagctgcatttccagtcaatattttttta

SEQ ID NO: 168722 - DNA, 71 bp, Homo sapiens
aaagtaaaaaaaatcctctgctttaaaagcagaggagtataatctgttacaggtcttctatggagctttca

SEQ ID NO: 168723 - DNA, 72 bp, Homo sapiens
aaaaatcctctgctttaaaagcagaggagtataatctgttacaggtcttctatggagctttcaggaaccaag

SEQ ID NO: 168724 - DNA, 72 bp, Homo sapiens
ctttaaaagcagaggagtataatctgttacaggtcttctatggagctttcaggaaccaaggaaagaccagta

SEQ ID NO: 168725 - DNA, 72 bp, Homo sapiens
aaagcagaggagtataatctgttacaggtcttctatggagctttcaggaaccaaggaaagaccagtagggaa

SEQ ID NO: 168726 - DNA, 72 bp, Homo sapiens
tataatctgttacaggtcttctatggagctttcaggaaccaaggaaagaccagtagggaagacccaagagta

SEQ ID NO: 168727 - DNA, 70 bp, Homo sapiens
ttacaggtcttctatggagctttcaggaaccaaggaaagaccagtagggaagacccaagagtaccacaaa

SEQ ID NO: 168728 - DNA, 73 bp, Homo sapiens
ttctatggagctttcaggaaccaaggaaagaccagtagggaagacccaagagtaccacaaacagctccaggca

SEQ ID NO: 168729 - DNA, 70 bp, Homo sapiens
aggaaccaaggaaagaccagtagggaagacccaagagtaccacaaacagctccaggcagttaatccaata

SEQ ID NO: 168730 - DNA, 71 bp, Homo sapiens
aggaaagaccagtagggaagacccaagagtaccacaaacagctccaggcagttaatccaatacttatggaa

SEQ ID NO: 168731 - DNA, 74 bp, Homo sapiens
tagggaagacccaagagtaccacaaacagctccaggcagttaatccaatacttatggaatgtctatttatgaaa

SEQ ID NO: 168732 - DNA, 73 bp, Homo sapiens
aagacccaagagtaccacaaacagctccaggcagttaatccaatacttatggaatgtctatttatgaaaacaa

SEQ ID NO: 168733 - DNA, 72 bp, Homo sapiens
agtaccacaaacagctccaggcagttaatccaatacttatggaatgtctatttatgaaaacaataaatattt

SEQ ID NO: 168734 - DNA, 71 bp, Homo sapiens
acagctccaggcagttaatccaatacttatggaatgtctatttatgaaaacaataaatattttttaagact

SEQ ID NO: 168735 - DNA, 70 bp, Homo sapiens
gcagttaatccaatacttatggaatgtctatttatgaaaacaataaatattttttaagacttactatttc

SEQ ID NO: 168736 - DNA, 68 bp, Homo sapiens
caatacttatggaatgtctatttatgaaaacaataaatattttttaagacttactatttcccttctcc

SEQ ID NO: 168737 - DNA, 67 bp, Homo sapiens
gaaaacaataaatattttttaagacttactatttcccttctcccttctgcaaatggttagctcattt

SEQ ID NO: 168738 - DNA, 68 bp, Homo sapiens
aatattttttaagacttactatttcccttctcccttctgcaaatggttagctcattttcacctttatc

SEQ ID NO: 168739 - DNA, 72 bp, Homo sapiens
ttaagacttactatttcccttctcccttctgcaaatggttagctcattttcacctttatctttcaacatcaa

SEQ ID NO: 168740 - DNA, 73 bp, Homo sapiens
ttactatttcccttctcccttctgcaaatggttagctcattttcacctttatctttcaacatcaatgtcacct

SEQ ID NO: 168741 - DNA, 78 bp, Homo sapiens
ttctcccttctgcaaatggttagctcattttcacctttatctttcaacatcaatgtcaccttctcatggaatcaatcc

SEQ ID NO: 168742 - DNA, 78 bp, Homo sapiens
aaatggttagctcattttcacctttatctttcaacatcaatgtcaccttctcatggaatcaatcctctcctgaccatc

SEQ ID NO: 168743 - DNA, 82 bp, Homo sapiens
ttagctcattttcacctttatctttcaacatcaatgtcaccttctcatggaatcaatcctctcctgaccatcctatctcatg

SEQ ID NO: 168744 - DNA, 80 bp, Homo sapiens
acctttatctttcaacatcaatgtcaccttctcatggaatcaatcctctcctgaccatcctatctcatggagaattttca

SEQ ID NO: 168745 - DNA, 79 bp, Homo sapiens
tctttcaacatcaatgtcaccttctcatggaatcaatcctctcctgaccatcctatctcatggagaattttcacccctt

SEQ ID NO: 168746 - DNA, 76 bp, Homo sapiens
atgtcaccttctcatggaatcaatcctctcctgaccatcctatctcatggagaattttcacccctttgtttccttc

SEQ ID NO: 168747 - DNA, 75 bp, Homo sapiens
tcatggaatcaatcctctcctgaccatcctatctcatggagaattttcacccctttgtttccttcccaatactta

SEQ ID NO: 168748 - DNA, 73 bp, Homo sapiens
atcaatcctctcctgaccatcctatctcatggagaattttcacccctttgtttccttcccaatacttacacaa

SEQ ID NO: 168749 - DNA, 71 bp, Homo sapiens
tgaccatcctatctcatggagaattttcacccctttgtttccttcccaatacttacacaactcaaaattct

SEQ ID NO: 168750 - DNA, 69 bp, Homo sapiens
atcctatctcatggagaattttcacccctttgtttccttcccaatacttacacaactcaaaattcttct

SEQ ID NO: 168751 - DNA, 66 bp, Homo sapiens
atggagaattttcacccctttgtttccttcccaatacttacacaactcaaaattcttctttattta

SEQ ID NO: 168752 - DNA, 73 bp, Homo sapiens
cacacccagctaatcaaaattcttttatatccttttaattggagtttaatctctctcccagagcactgttata

SEQ ID NO: 168753 - DNA, 73 bp, Homo sapiens
gctaatcaaaattcttttatatccttttaattggagtttaatctctctcccagagcactgttatatcccagtc

SEQ ID NO: 168754 - DNA, 72 bp, Homo sapiens
aattcttttatatccttttaattggagtttaatctctctcccagagcactgttatatcccagtcctagtaca

SEQ ID NO: 168755 - DNA, 78 bp, Homo sapiens
tatatccttttaattggagtttaatctctctcccagagcactgttatatcccagtcctagtacagtgtctggcataga

SEQ ID NO: 168756 - DNA, 77 bp, Homo sapiens
taattggagtttaatctctctcccagagcactgttatatcccagtcctagtacagtgtctggcatagaagtattaaa

SEQ ID NO: 168757 - DNA, 75 bp, Homo sapiens
ttaatctctctcccagagcactgttatatcccagtcctagtacagtgtctggcatagaagtattaaaaaaaactg

SEQ ID NO: 168758 - DNA, 73 bp, Homo sapiens
tcccagagcactgttatatcccagtcctagtacagtgtctggcatagaagtattaaaaaaaactgtataaaaa

SEQ ID NO: 168759 - DNA, 71 bp, Homo sapiens
ctgttatatcccagtcctagtacagtgtctggcatagaagtattaaaaaaaactgtataaaaaagcataaa

SEQ ID NO: 168760 - DNA, 70 bp, Homo sapiens
ccagtcctagtacagtgtctggcatagaagtattaaaaaaaactgtataaaaaagcataaaaaatcctga

SEQ ID NO: 168761 - DNA, 71 bp, Homo sapiens
cagtgtctggcatagaagtattaaaaaaaactgtataaaaaagcataaaaaatcctgaaggcaggattcta

SEQ ID NO: 168762 - DNA, 67 bp, Homo sapiens
ggcatagaagtattaaaaaaaactgtataaaaaagcataaaaaatcctgaaggcaggattctaactt

SEQ ID NO: 168763 - DNA, 64 bp, Homo sapiens
aaaaaaactgtataaaaaagcataaaaaatcctgaaggcaggattctaacttttaaaaggacaa

SEQ ID NO: 168764 - DNA, 69 bp, Homo sapiens
tataaaaaagcataaaaaatcctgaaggcaggattctaacttttaaaaggacaatggagagtgaattgg

SEQ ID NO: 168765 - DNA, 69 bp, Homo sapiens
gcataaaaaatcctgaaggcaggattctaacttttaaaaggacaatggagagtgaattggttataaacc

SEQ ID NO: 168766 - DNA, 69 bp, Homo sapiens
aatcctgaaggcaggattctaacttttaaaaggacaatggagagtgaattggttataaacccagtaaga

SEQ ID NO: 168767 - DNA, 67 bp, Homo sapiens
aggcaggattctaacttttaaaaggacaatggagagtgaattggttataaacccagtaagaaaagaa

SEQ ID NO: 168768 - DNA, 68 bp, Homo sapiens
cttttaaaaggacaatggagagtgaattggttataaacccagtaagaaaagaaacaaggagatgtcat

SEQ ID NO: 168769 - DNA, 68 bp, Homo sapiens
aaaggacaatggagagtgaattggttataaacccagtaagaaaagaaacaaggagatgtcattaaaaa

SEQ ID NO: 168770 - DNA, 69 bp, Homo sapiens
ggagagtgaattggttataaacccagtaagaaaagaaacaaggagatgtcattaaaaaacagaaacaca

SEQ ID NO: 168771 - DNA, 65 bp, Homo sapiens
ggttataaacccagtaagaaaagaaacaaggagatgtcattaaaaaacagaaacacaaagggagg

SEQ ID NO: 168772 - DNA, 67 bp, Homo sapiens
gtaagaaaagaaacaaggagatgtcattaaaaaacagaaacacaaagggagggtgaatagttacgag

SEQ ID NO: 168773 - DNA, 69 bp, Homo sapiens
aaaagaaacaaggagatgtcattaaaaaacagaaacacaaagggagggtgaatagttacgagttcatgc

SEQ ID NO: 168774 - DNA, 73 bp, Homo sapiens
aaacacaaagggagggtgaatagttacgagttcatgctgtggtcaaggttagatgtgaggtgggataaagcaa

SEQ ID NO: 168775 - DNA, 76 bp, Homo sapiens
ttcatgctgtggtcaaggttagatgtgaggtgggataaagcaaagaggaaaagccaaacaggacacaggaaatgaa

SEQ ID NO: 168776 - DNA, 72 bp, Homo sapiens
tgggataaagcaaagaggaaaagccaaacaggacacaggaaatgaagaacgaaggctttcgagattaaatga

SEQ ID NO: 168777 - DNA, 72 bp, Homo sapiens
aaagaggaaaagccaaacaggacacaggaaatgaagaacgaaggctttcgagattaaatgagcccaagcata

SEQ ID NO: 168778 - DNA, 74 bp, Homo sapiens
aaaagccaaacaggacacaggaaatgaagaacgaaggctttcgagattaaatgagcccaagcatatccaacatg

SEQ ID NO: 168779 - DNA, 75 bp, Homo sapiens
cacaggaaatgaagaacgaaggctttcgagattaaatgagcccaagcatatccaacatggtacagccccggacaa

SEQ ID NO: 168780 - DNA, 74 bp, Homo sapiens
aaatgaagaacgaaggctttcgagattaaatgagcccaagcatatccaacatggtacagccccggacaaggtga

SEQ ID NO: 168781 - DNA, 74 bp, Homo sapiens
acgaaggctttcgagattaaatgagcccaagcatatccaacatggtacagccccggacaaggtgaggcaagaaa

SEQ ID NO: 168782 - DNA, 74 bp, Homo sapiens
attaaatgagcccaagcatatccaacatggtacagccccggacaaggtgaggcaagaaagtcatccagtaaaaa

SEQ ID NO: 168783 - DNA, 74 bp, Homo sapiens
atgagcccaagcatatccaacatggtacagccccggacaaggtgaggcaagaaagtcatccagtaaaaaaacca

SEQ ID NO: 168784 - DNA, 73 bp, Homo sapiens
atatccaacatggtacagccccggacaaggtgaggcaagaaagtcatccagtaaaaaaaccaggttgcattca

SEQ ID NO: 168785 - DNA, 73 bp, Homo sapiens
atggtacagccccggacaaggtgaggcaagaaagtcatccagtaaaaaaaccaggttgcattcatctcaaaga

SEQ ID NO: 168786 - DNA, 78 bp, Homo sapiens
gacaaggtgaggcaagaaagtcatccagtaaaaaaaccaggttgcattcatctcaaagacactgactcatctcaattc

SEQ ID NO: 168787 - DNA, 78 bp, Homo sapiens
aggcaagaaagtcatccagtaaaaaaaccaggttgcattcatctcaaagacactgactcatctcaattctccagccaa

SEQ ID NO: 168788 - DNA, 79 bp, Homo sapiens
aagtcatccagtaaaaaaaccaggttgcattcatctcaaagacactgactcatctcaattctccagccaaactctgcta

SEQ ID NO: 168789 - DNA, 82 bp, Homo sapiens
aaaaaaccaggttgcattcatctcaaagacactgactcatctcaattctccagccaaactctgctactctcctctgcagata

SEQ ID NO: 168790 - DNA, 86 bp, Homo sapiens
gttgcattcatctcaaagacactgactcatctcaattctccagccaaactctgctactctcctctgcagataacctcatagtctac

SEQ ID NO: 168791 - DNA, 82 bp, Homo sapiens
actgactcatctcaattctccagccaaactctgctactctcctctgcagataacctcatagtctacttaatatagcaaagta

SEQ ID NO: 168792 - DNA, 80 bp, Homo sapiens
actctcctctgcagataacctcatagtctacttaatatagcaaagtaaggtcatgggtcctacatctctgcaaactctgc

SEQ ID NO: 168793 - DNA, 76 bp, Homo sapiens
agataacctcatagtctacttaatatagcaaagtaaggtcatgggtcctacatctctgcaaactctgccctcgaaa

SEQ ID NO: 168794 - DNA, 76 bp, Homo sapiens
atagtctacttaatatagcaaagtaaggtcatgggtcctacatctctgcaaactctgccctcgaaactcctctgta

SEQ ID NO: 168795 - DNA, 78 bp, Homo sapiens
cttaatatagcaaagtaaggtcatgggtcctacatctctgcaaactctgccctcgaaactcctctgtatctgcaccta

SEQ ID NO: 168796 - DNA, 78 bp, Homo sapiens
aaagtaaggtcatgggtcctacatctctgcaaactctgccctcgaaactcctctgtatctgcacctatgcctctaggc

SEQ ID NO: 168797 - DNA, 81 bp, Homo sapiens
atgggtcctacatctctgcaaactctgccctcgaaactcctctgtatctgcacctatgcctctaggctcagaagaggcacc

SEQ ID NO: 168798 - DNA, 82 bp, Homo sapiens
atctctgcaaactctgccctcgaaactcctctgtatctgcacctatgcctctaggctcagaagaggcacccttctgcctcta

SEQ ID NO: 168799 - DNA, 77 bp, Homo sapiens
aaactctgccctcgaaactcctctgtatctgcacctatgcctctaggctcagaagaggcacccttctgcctctaggg

SEQ ID NO: 168800 - DNA, 79 bp, Homo sapiens
aaactcctctgtatctgcacctatgcctctaggctcagaagaggcacccttctgcctctaggggcttcactctcccaga

SEQ ID NO: 168801 - DNA, 78 bp, Homo sapiens
ctatgcctctaggctcagaagaggcacccttctgcctctaggggcttcactctcccagaaattactctctctcttatc

SEQ ID NO: 168802 - DNA, 76 bp, Homo sapiens
taggctcagaagaggcacccttctgcctctaggggcttcactctcccagaaattactctctctcttatcttcaact

SEQ ID NO: 168803 - DNA, 73 bp, Homo sapiens
ttctgcctctaggggcttcactctcccagaaattactctctctcttatcttcaacttgtttggccctaaccac

SEQ ID NO: 168804 - DNA, 73 bp, Homo sapiens
taggggcttcactctcccagaaattactctctctcttatcttcaacttgtttggccctaaccactccttctca

SEQ ID NO: 168805 - DNA, 71 bp, Homo sapiens
aaattactctctctcttatcttcaacttgtttggccctaaccactccttctcaaaacctaggcttgctgga

SEQ ID NO: 168806 - DNA, 73 bp, Homo sapiens
tcaacttgtttggccctaaccactccttctcaaaacctaggcttgctggagtctctctcatccagaaaaatta

SEQ ID NO: 168807 - DNA, 72 bp, Homo sapiens
tgtttggccctaaccactccttctcaaaacctaggcttgctggagtctctctcatccagaaaaattaacacc

SEQ ID NO: 168808 - DNA, 69 bp, Homo sapiens
actccttctcaaaacctaggcttgctggagtctctctcatccagaaaaattaacacccctcccctttat

SEQ ID NO: 168809 - DNA, 70 bp, Homo sapiens
aaaacctaggcttgctggagtctctctcatccagaaaaattaacacccctcccctttattgtagactata

SEQ ID NO: 168810 - DNA, 75 bp, Homo sapiens
cttgctggagtctctctcatccagaaaaattaacacccctcccctttattgtagactatactggcacatcctcca

SEQ ID NO: 168811 - DNA, 73 bp, Homo sapiens
agtctctctcatccagaaaaattaacacccctcccctttattgtagactatactggcacatcctccattctcc

SEQ ID NO: 168812 - DNA, 72 bp, Homo sapiens
atccagaaaaattaacacccctcccctttattgtagactatactggcacatcctccattctcccactgcctg

SEQ ID NO: 168813 - DNA, 72 bp, Homo sapiens
aaattaacacccctcccctttattgtagactatactggcacatcctccattctcccactgcctggcttctta

SEQ ID NO: 168814 - DNA, 75 bp, Homo sapiens
ccctcccctttattgtagactatactggcacatcctccattctcccactgcctggcttcttaagggcagacctca

SEQ ID NO: 168815 - DNA, 79 bp, Homo sapiens
ttattgtagactatactggcacatcctccattctcccactgcctggcttcttaagggcagacctcaggggctccatcca

SEQ ID NO: 168816 - DNA, 80 bp, Homo sapiens
tatactggcacatcctccattctcccactgcctggcttcttaagggcagacctcaggggctccatccactttgcaatcca

SEQ ID NO: 168817 - DNA, 75 bp, Homo sapiens
ctccattctcccactgcctggcttcttaagggcagacctcaggggctccatccactttgcaatccaccacaaaaa

SEQ ID NO: 168818 - DNA, 73 bp, Homo sapiens
ccactgcctggcttcttaagggcagacctcaggggctccatccactttgcaatccaccacaaaaaagttccaa

SEQ ID NO: 168819 - DNA, 71 bp, Homo sapiens
ctggcttcttaagggcagacctcaggggctccatccactttgcaatccaccacaaaaaagttccaacaaaa

SEQ ID NO: 168820 - DNA, 70 bp, Homo sapiens
ttaagggcagacctcaggggctccatccactttgcaatccaccacaaaaaagttccaacaaaaggacaaa

SEQ ID NO: 168821 - DNA, 68 bp, Homo sapiens
aggggctccatccactttgcaatccaccacaaaaaagttccaacaaaaggacaaagttacctgctact

SEQ ID NO: 168822 - DNA, 68 bp, Homo sapiens
atccactttgcaatccaccacaaaaaagttccaacaaaaggacaaagttacctgctactttccttcca

SEQ ID NO: 168823 - DNA, 68 bp, Homo sapiens
tttgcaatccaccacaaaaaagttccaacaaaaggacaaagttacctgctactttccttccaggtggc

SEQ ID NO: 168824 - DNA, 64 bp, Homo sapiens
aaaaaagttccaacaaaaggacaaagttacctgctactttccttccaggtggccaaatccaaaa

SEQ ID NO: 168825 - DNA, 66 bp, Homo sapiens
ttccaacaaaaggacaaagttacctgctactttccttccaggtggccaaatccaaaaggcaatttt

SEQ ID NO: 168826 - DNA, 66 bp, Homo sapiens
aaaggacaaagttacctgctactttccttccaggtggccaaatccaaaaggcaatttttgttgttg

SEQ ID NO: 168827 - DNA, 69 bp, Homo sapiens
accacgcctggcccaaaaggctatcttgacccctcttctgttcctggtccctttgtagtgcttcacccc

SEQ ID NO: 168828 - DNA, 70 bp, Homo sapiens
gcccaaaaggctatcttgacccctcttctgttcctggtccctttgtagtgcttcaccccgtacaccactc

SEQ ID NO: 168829 - DNA, 70 bp, Homo sapiens
ctatcttgacccctcttctgttcctggtccctttgtagtgcttcaccccgtacaccactccctttgtgaa

SEQ ID NO: 168830 - DNA, 68 bp, Homo sapiens
ccctcttctgttcctggtccctttgtagtgcttcaccccgtacaccactccctttgtgaaactctttg

SEQ ID NO: 168831 - DNA, 68 bp, Homo sapiens
ttctgttcctggtccctttgtagtgcttcaccccgtacaccactccctttgtgaaactctttgttgtt

SEQ ID NO: 168832 - DNA, 67 bp, Homo sapiens
ggtccctttgtagtgcttcaccccgtacaccactccctttgtgaaactctttgttgttttaacaata

SEQ ID NO: 168833 - DNA, 68 bp, Homo sapiens
cttcaccccgtacaccactccctttgtgaaactctttgttgttttaacaatacctgactctctcaaaa

SEQ ID NO: 168834 - DNA, 69 bp, Homo sapiens
tccctttgtgaaactctttgttgttttaacaatacctgactctctcaaaacctccataacagttccttc

SEQ ID NO: 168835 - DNA, 70 bp, Homo sapiens
gtgaaactctttgttgttttaacaatacctgactctctcaaaacctccataacagttccttctcctctct

SEQ ID NO: 168836 - DNA, 72 bp, Homo sapiens
tctcaaaacctccataacagttccttctcctctcttcatcttttctggtgccctggtattcccatattcttt

SEQ ID NO: 168837 - DNA, 71 bp, Homo sapiens
aaacctccataacagttccttctcctctcttcatcttttctggtgccctggtattcccatattcttttcaa

SEQ ID NO: 168838 - DNA, 72 bp, Homo sapiens
tctcttcatcttttctggtgccctggtattcccatattcttttcaagcctttcctctctttataccacttgt

SEQ ID NO: 168839 - DNA, 69 bp, Homo sapiens
atcttttctggtgccctggtattcccatattcttttcaagcctttcctctctttataccacttgttttc

SEQ ID NO: 168840 - DNA, 70 bp, Homo sapiens
ttttcaagcctttcctctctttataccacttgttttcttcctgaatgagcaactcaaaaggttttagcta

SEQ ID NO: 168841 - DNA, 73 bp, Homo sapiens
tttcctctctttataccacttgttttcttcctgaatgagcaactcaaaaggttttagctatcgccagtgactc

SEQ ID NO: 168842 - DNA, 75 bp, Homo sapiens
ttataccacttgttttcttcctgaatgagcaactcaaaaggttttagctatcgccagtgactccaaatgatgatt

SEQ ID NO: 168843 - DNA, 76 bp, Homo sapiens
gttttcttcctgaatgagcaactcaaaaggttttagctatcgccagtgactccaaatgatgatttttcactgtata

SEQ ID NO: 168844 - DNA, 79 bp, Homo sapiens
cttcctgaatgagcaactcaaaaggttttagctatcgccagtgactccaaatgatgatttttcactgtatacatctgta

SEQ ID NO: 168845 - DNA, 75 bp, Homo sapiens
aactcaaaaggttttagctatcgccagtgactccaaatgatgatttttcactgtatacatctgtacctcacaaac

SEQ ID NO: 168846 - DNA, 77 bp, Homo sapiens
aaaggttttagctatcgccagtgactccaaatgatgatttttcactgtatacatctgtacctcacaaacctgtgatc

SEQ ID NO: 168847 - DNA, 82 bp, Homo sapiens
tatcgccagtgactccaaatgatgatttttcactgtatacatctgtacctcacaaacctgtgatccaccttgccattgagta

SEQ ID NO: 168848 - DNA, 83 bp, Homo sapiens
tccaaatgatgatttttcactgtatacatctgtacctcacaaacctgtgatccaccttgccattgagtatctctgcactaata

SEQ ID NO: 168849 - DNA, 80 bp, Homo sapiens
gatttttcactgtatacatctgtacctcacaaacctgtgatccaccttgccattgagtatctctgcactaatacaccaaa

SEQ ID NO: 168850 - DNA, 80 bp, Homo sapiens
ttcactgtatacatctgtacctcacaaacctgtgatccaccttgccattgagtatctctgcactaatacaccaaataaaa

SEQ ID NO: 168851 - DNA, 74 bp, Homo sapiens
aaacctgtgatccaccttgccattgagtatctctgcactaatacaccaaataaaactgaaagttaacatttcaa

SEQ ID NO: 168852 - DNA, 76 bp, Homo sapiens
gtatctctgcactaatacaccaaataaaactgaaagttaacatttcaaagtgaactcactgtcttctctcgatgta

SEQ ID NO: 168853 - DNA, 74 bp, Homo sapiens
taaaactgaaagttaacatttcaaagtgaactcactgtcttctctcgatgtattattccccattctggttgatg

SEQ ID NO: 168854 - DNA, 74 bp, Homo sapiens
aagttaacatttcaaagtgaactcactgtcttctctcgatgtattattccccattctggttgatggcaaccaat

SEQ ID NO: 168855 - DNA, 80 bp, Homo sapiens
atttcaaagtgaactcactgtcttctctcgatgtattattccccattctggttgatggcaaccaattgctcatatcagaa

SEQ ID NO: 168856 - DNA, 83 bp, Homo sapiens
actcactgtcttctctcgatgtattattccccattctggttgatggcaaccaattgctcatatcagaatccagagtcactcta

SEQ ID NO: 168857 - DNA, 84 bp, Homo sapiens
tgtcttctctcgatgtattattccccattctggttgatggcaaccaattgctcatatcagaatccagagtcactctagacacca

SEQ ID NO: 168858 - DNA, 84 bp, Homo sapiens
atgtattattccccattctggttgatggcaaccaattgctcatatcagaatccagagtcactctagacaccactgctcaccata

SEQ ID NO: 168859 - DNA, 83 bp, Homo sapiens
atatcagaatccagagtcactctagacaccactgctcaccatacctggctccataccaactgatcattggagcccctcagttc

SEQ ID NO: 168860 - DNA, 79 bp, Homo sapiens
agagtcactctagacaccactgctcaccatacctggctccataccaactgatcattggagcccctcagttctgtttatt

SEQ ID NO: 168861 - DNA, 78 bp, Homo sapiens
actctagacaccactgctcaccatacctggctccataccaactgatcattggagcccctcagttctgtttatttggta

SEQ ID NO: 168862 - DNA, 77 bp, Homo sapiens
accactgctcaccatacctggctccataccaactgatcattggagcccctcagttctgtttatttggtacttctaga

SEQ ID NO: 168863 - DNA, 72 bp, Homo sapiens
ataccaactgatcattggagcccctcagttctgtttatttggtacttctagagcctgtaccttcctcccttc

SEQ ID NO: 168864 - DNA, 72 bp, Homo sapiens
agcccctcagttctgtttatttggtacttctagagcctgtaccttcctcccttcccttcttgctcattgaca

SEQ ID NO: 168865 - DNA, 75 bp, Homo sapiens
ttctgtttatttggtacttctagagcctgtaccttcctcccttcccttcttgctcattgacactgtggcccatca

SEQ ID NO: 168866 - DNA, 76 bp, Homo sapiens
tatttggtacttctagagcctgtaccttcctcccttcccttcttgctcattgacactgtggcccatcaggtcctca

SEQ ID NO: 168867 - DNA, 77 bp, Homo sapiens
cttcctcccttcccttcttgctcattgacactgtggcccatcaggtcctcatgttctctcacctagcgtactacaaa

SEQ ID NO: 168868 - DNA, 76 bp, Homo sapiens
actgtggcccatcaggtcctcatgttctctcacctagcgtactacaaatctcatcttcttcaatctacccttccct

SEQ ID NO: 168869 - DNA, 77 bp, Homo sapiens
atcaggtcctcatgttctctcacctagcgtactacaaatctcatcttcttcaatctacccttcccttcactcctaga

SEQ ID NO: 168870 - DNA, 76 bp, Homo sapiens
atgttctctcacctagcgtactacaaatctcatcttcttcaatctacccttcccttcactcctagagtgatgttaa

SEQ ID NO: 168871 - DNA, 73 bp, Homo sapiens
acctagcgtactacaaatctcatcttcttcaatctacccttcccttcactcctagagtgatgttaacgttcaa

SEQ ID NO: 168872 - DNA, 74 bp, Homo sapiens
tactacaaatctcatcttcttcaatctacccttcccttcactcctagagtgatgttaacgttcaaacccagcaa

SEQ ID NO: 168873 - DNA, 75 bp, Homo sapiens
aatctcatcttcttcaatctacccttcccttcactcctagagtgatgttaacgttcaaacccagcaatgtgactc

SEQ ID NO: 168874 - DNA, 75 bp, Homo sapiens
tcttcaatctacccttcccttcactcctagagtgatgttaacgttcaaacccagcaatgtgactcctctgcttaa

SEQ ID NO: 168875 - DNA, 74 bp, Homo sapiens
acccttcccttcactcctagagtgatgttaacgttcaaacccagcaatgtgactcctctgcttaaaagcatcca

SEQ ID NO: 168876 - DNA, 76 bp, Homo sapiens
tcctagagtgatgttaacgttcaaacccagcaatgtgactcctctgcttaaaagcatccagtggcttccctttcta

SEQ ID NO: 168877 - DNA, 73 bp, Homo sapiens
atgttaacgttcaaacccagcaatgtgactcctctgcttaaaagcatccagtggcttccctttctaccacttc

SEQ ID NO: 168878 - DNA, 75 bp, Homo sapiens
ttcaaacccagcaatgtgactcctctgcttaaaagcatccagtggcttccctttctaccacttctacttataaga

SEQ ID NO: 168879 - DNA, 73 bp, Homo sapiens
ctctgcttaaaagcatccagtggcttccctttctaccacttctacttataagacttgacatttccctctgtta

SEQ ID NO: 168880 - DNA, 70 bp, Homo sapiens
ttaaaagcatccagtggcttccctttctaccacttctacttataagacttgacatttccctctgttactt

SEQ ID NO: 168881 - DNA, 75 bp, Homo sapiens
agtggcttccctttctaccacttctacttataagacttgacatttccctctgttactttctcacagcatatgctc

SEQ ID NO: 168882 - DNA, 79 bp, Homo sapiens
atttccctctgttactttctcacagcatatgctccagccctggcaattcataccaggtcatggtcttccctgattttga

SEQ ID NO: 168883 - DNA, 77 bp, Homo sapiens
ctccagccctggcaattcataccaggtcatggtcttccctgattttgaaatgtaccttgactacaacaagcttatga

SEQ ID NO: 168884 - DNA, 78 bp, Homo sapiens
tggcaattcataccaggtcatggtcttccctgattttgaaatgtaccttgactacaacaagcttatgatctttcaaga

SEQ ID NO: 168885 - DNA, 76 bp, Homo sapiens
ataccaggtcatggtcttccctgattttgaaatgtaccttgactacaacaagcttatgatctttcaagacacagaa

SEQ ID NO: 168886 - DNA, 76 bp, Homo sapiens
atggtcttccctgattttgaaatgtaccttgactacaacaagcttatgatctttcaagacacagaacaagtgccac

SEQ ID NO: 168887 - DNA, 77 bp, Homo sapiens
gattttgaaatgtaccttgactacaacaagcttatgatctttcaagacacagaacaagtgccacctctcccatgaag

SEQ ID NO: 168888 - DNA, 76 bp, Homo sapiens
aaatgtaccttgactacaacaagcttatgatctttcaagacacagaacaagtgccacctctcccatgaaggcttcc

SEQ ID NO: 168889 - DNA, 76 bp, Homo sapiens
ttgactacaacaagcttatgatctttcaagacacagaacaagtgccacctctcccatgaaggcttcccaaattacc

SEQ ID NO: 168890 - DNA, 74 bp, Homo sapiens
acaagcttatgatctttcaagacacagaacaagtgccacctctcccatgaaggcttcccaaattacccctgccc

SEQ ID NO: 168891 - DNA, 75 bp, Homo sapiens
tttcaagacacagaacaagtgccacctctcccatgaaggcttcccaaattacccctgccccatattcagagcaaa

SEQ ID NO: 168892 - DNA, 75 bp, Homo sapiens
agaacaagtgccacctctcccatgaaggcttcccaaattacccctgccccatattcagagcaaagagttgatcat

SEQ ID NO: 168893 - DNA, 73 bp, Homo sapiens
ccacctctcccatgaaggcttcccaaattacccctgccccatattcagagcaaagagttgatcattaccttct

SEQ ID NO: 168894 - DNA, 74 bp, Homo sapiens
catgaaggcttcccaaattacccctgccccatattcagagcaaagagttgatcattaccttctttgggctctat

SEQ ID NO: 168895 - DNA, 73 bp, Homo sapiens
ttcccaaattacccctgccccatattcagagcaaagagttgatcattaccttctttgggctctattttacata

SEQ ID NO: 168896 - DNA, 73 bp, Homo sapiens
aattacccctgccccatattcagagcaaagagttgatcattaccttctttgggctctattttacatacattta

SEQ ID NO: 168897 - DNA, 76 bp, Homo sapiens
cccatattcagagcaaagagttgatcattaccttctttgggctctattttacatacatttattagcaaacttagca

SEQ ID NO: 168898 - DNA, 76 bp, Homo sapiens
cagagcaaagagttgatcattaccttctttgggctctattttacatacatttattagcaaacttagcatcacttat

SEQ ID NO: 168899 - DNA, 76 bp, Homo sapiens
tctttgggctctattttacatacatttattagcaaacttagcatcacttattacaactattatatttgcaggtgtg

SEQ ID NO: 168900 - DNA, 76 bp, Homo sapiens
gctctattttacatacatttattagcaaacttagcatcacttattacaactattatatttgcaggtgtgtgtcccg

SEQ ID NO: 168901 - DNA, 78 bp, Homo sapiens
catacatttattagcaaacttagcatcacttattacaactattatatttgcaggtgtgtgtcccgtgtgtatactata

SEQ ID NO: 168902 - DNA, 79 bp, Homo sapiens
attagcaaacttagcatcacttattacaactattatatttgcaggtgtgtgtcccgtgtgtatactatatacacataca

SEQ ID NO: 168903 - DNA, 77 bp, Homo sapiens
atacacatacacacggacacacatgttccttaaaaggccgagtctacatcctattgattattccatccccagcattc

SEQ ID NO: 168904 - DNA, 78 bp, Homo sapiens
acacggacacacatgttccttaaaaggccgagtctacatcctattgattattccatccccagcattctgcacaatgct

SEQ ID NO: 168905 - DNA, 81 bp, Homo sapiens
acacacatgttccttaaaaggccgagtctacatcctattgattattccatccccagcattctgcacaatgcttagcacaca

SEQ ID NO: 168906 - DNA, 82 bp, Homo sapiens
ttaaaaggccgagtctacatcctattgattattccatccccagcattctgcacaatgcttagcacacagctaattctgaata

SEQ ID NO: 168907 - DNA, 84 bp, Homo sapiens
cgagtctacatcctattgattattccatccccagcattctgcacaatgcttagcacacagctaattctgaataaatacactgtg

SEQ ID NO: 168908 - DNA, 83 bp, Homo sapiens
acatcctattgattattccatccccagcattctgcacaatgcttagcacacagctaattctgaataaatacactgtggcaaac

SEQ ID NO: 168909 - DNA, 82 bp, Homo sapiens
attattccatccccagcattctgcacaatgcttagcacacagctaattctgaataaatacactgtggcaaactgctgttaag

SEQ ID NO: 168910 - DNA, 82 bp, Homo sapiens
agcattctgcacaatgcttagcacacagctaattctgaataaatacactgtggcaaactgctgttaagtcaaagaacaccag

SEQ ID NO: 168911 - DNA, 78 bp, Homo sapiens
acaatgcttagcacacagctaattctgaataaatacactgtggcaaactgctgttaagtcaaagaacaccaggattta

SEQ ID NO: 168912 - DNA, 73 bp, Homo sapiens
aattctgaataaatacactgtggcaaactgctgttaagtcaaagaacaccaggatttagggcatcaaataagt

SEQ ID NO: 168913 - DNA, 73 bp, Homo sapiens
taaatacactgtggcaaactgctgttaagtcaaagaacaccaggatttagggcatcaaataagttatcaagtt

SEQ ID NO: 168914 - DNA, 71 bp, Homo sapiens
actgtggcaaactgctgttaagtcaaagaacaccaggatttagggcatcaaataagttatcaagttttaaa

SEQ ID NO: 168915 - DNA, 68 bp, Homo sapiens
aactgctgttaagtcaaagaacaccaggatttagggcatcaaataagttatcaagttttaaaaaaaca

SEQ ID NO: 168916 - DNA, 65 bp, Homo sapiens
aaaaaacaaaaaaggtgaaaaggaaaacagtgttgctgcaccagaaccttccctgaaccaactgg

SEQ ID NO: 168917 - DNA, 67 bp, Homo sapiens
aaaaaggtgaaaaggaaaacagtgttgctgcaccagaaccttccctgaaccaactgggagttaggtc

SEQ ID NO: 168918 - DNA, 72 bp, Homo sapiens
aaggaaaacagtgttgctgcaccagaaccttccctgaaccaactgggagttaggtctggctctactgtgctt

SEQ ID NO: 168919 - DNA, 74 bp, Homo sapiens
aacagtgttgctgcaccagaaccttccctgaaccaactgggagttaggtctggctctactgtgctttcaaagcc

SEQ ID NO: 168920 - DNA, 70 bp, Homo sapiens
accagaaccttccctgaaccaactgggagttaggtctggctctactgtgctttcaaagccctccatttct

SEQ ID NO: 168921 - DNA, 74 bp, Homo sapiens
tccctgaaccaactgggagttaggtctggctctactgtgctttcaaagccctccatttcttccccatcatacaa

SEQ ID NO: 168922 - DNA, 75 bp, Homo sapiens
aactgggagttaggtctggctctactgtgctttcaaagccctccatttcttccccatcatacaactcacatctta

SEQ ID NO: 168923 - DNA, 75 bp, Homo sapiens
ttaggtctggctctactgtgctttcaaagccctccatttcttccccatcatacaactcacatcttattgtaaaaa

SEQ ID NO: 168924 - DNA, 75 bp, Homo sapiens
ctctactgtgctttcaaagccctccatttcttccccatcatacaactcacatcttattgtaaaaatctttgtaca

SEQ ID NO: 168925 - DNA, 74 bp, Homo sapiens
tttcaaagccctccatttcttccccatcatacaactcacatcttattgtaaaaatctttgtacatgccttcctc

SEQ ID NO: 168926 - DNA, 75 bp, Homo sapiens
tccatttcttccccatcatacaactcacatcttattgtaaaaatctttgtacatgccttcctcgtcagggtgaaa

SEQ ID NO: 168927 - DNA, 75 bp, Homo sapiens
ttccccatcatacaactcacatcttattgtaaaaatctttgtacatgccttcctcgtcagggtgaaatacaatta

SEQ ID NO: 168928 - DNA, 75 bp, Homo sapiens
atacaactcacatcttattgtaaaaatctttgtacatgccttcctcgtcagggtgaaatacaattactgctagaa

SEQ ID NO: 168929 - DNA, 74 bp, Homo sapiens
cacatcttattgtaaaaatctttgtacatgccttcctcgtcagggtgaaatacaattactgctagaaatattta

SEQ ID NO: 168930 - DNA, 72 bp, Homo sapiens
gtaaaaatctttgtacatgccttcctcgtcagggtgaaatacaattactgctagaaatatttataatgtaat

SEQ ID NO: 168931 - DNA, 72 bp, Homo sapiens
tgtacatgccttcctcgtcagggtgaaatacaattactgctagaaatatttataatgtaattttttttagcc

SEQ ID NO: 168932 - DNA, 72 bp, Homo sapiens
cctcgtcagggtgaaatacaattactgctagaaatatttataatgtaattttttttagcctgtgtaatggca

SEQ ID NO: 168933 - DNA, 74 bp, Homo sapiens
cagggtgaaatacaattactgctagaaatatttataatgtaattttttttagcctgtgtaatggcatgtgccta

SEQ ID NO: 168934 - DNA, 77 bp, Homo sapiens
tacaattactgctagaaatatttataatgtaattttttttagcctgtgtaatggcatgtgcctacagtcacagctat

SEQ ID NO: 168935 - DNA, 75 bp, Homo sapiens
gaaatatttataatgtaattttttttagcctgtgtaatggcatgtgcctacagtcacagctatttaagaggctgg

SEQ ID NO: 168936 - DNA, 76 bp, Homo sapiens
ccactgcacccaggctatttctaattatcttaatagcagttaatactcaccgagcatttaccaagtgccagttatc

SEQ ID NO: 168937 - DNA, 75 bp, Homo sapiens
ccaggctatttctaattatcttaatagcagttaatactcaccgagcatttaccaagtgccagttatcttgctaag

SEQ ID NO: 168938 - DNA, 75 bp, Homo sapiens
atttctaattatcttaatagcagttaatactcaccgagcatttaccaagtgccagttatcttgctaagtgcttta

SEQ ID NO: 168939 - DNA, 77 bp, Homo sapiens
taatagcagttaatactcaccgagcatttaccaagtgccagttatcttgctaagtgctttacatgagttaactcatt

SEQ ID NO: 168940 - DNA, 74 bp, Homo sapiens
agttaatactcaccgagcatttaccaagtgccagttatcttgctaagtgctttacatgagttaactcatttaat

SEQ ID NO: 168941 - DNA, 76 bp, Homo sapiens
tcaccgagcatttaccaagtgccagttatcttgctaagtgctttacatgagttaactcatttaattttcactataa

SEQ ID NO: 168942 - DNA, 78 bp, Homo sapiens
ccaagtgccagttatcttgctaagtgctttacatgagttaactcatttaattttcactataagacaatgcaatagatc

SEQ ID NO: 168943 - DNA, 79 bp, Homo sapiens
gccagttatcttgctaagtgctttacatgagttaactcatttaattttcactataagacaatgcaatagatcttattca

SEQ ID NO: 168944 - DNA, 78 bp, Homo sapiens
cttgctaagtgctttacatgagttaactcatttaattttcactataagacaatgcaatagatcttattcatattacca

SEQ ID NO: 168945 - DNA, 73 bp, Homo sapiens
agttaactcatttaattttcactataagacaatgcaatagatcttattcatattaccattttcaggtgaaaaa

SEQ ID NO: 168946 - DNA, 74 bp, Homo sapiens
ttaattttcactataagacaatgcaatagatcttattcatattaccattttcaggtgaaaaaactgagctttaa

SEQ ID NO: 168947 - DNA, 73 bp, Homo sapiens
actataagacaatgcaatagatcttattcatattaccattttcaggtgaaaaaactgagctttaaaaagaata

SEQ ID NO: 168948 - DNA, 72 bp, Homo sapiens
tgcaatagatcttattcatattaccattttcaggtgaaaaaactgagctttaaaaagaataaataatttgtc

SEQ ID NO: 168949 - DNA, 70 bp, Homo sapiens
tattcatattaccattttcaggtgaaaaaactgagctttaaaaagaataaataatttgtccattgtccca

SEQ ID NO: 168950 - DNA, 71 bp, Homo sapiens
taccattttcaggtgaaaaaactgagctttaaaaagaataaataatttgtccattgtcccacagcaaatga

SEQ ID NO: 168951 - DNA, 75 bp, Homo sapiens
gtgaaaaaactgagctttaaaaagaataaataatttgtccattgtcccacagcaaatgaacagcatgcaaagcca

SEQ ID NO: 168952 - DNA, 73 bp, Homo sapiens
aaaactgagctttaaaaagaataaataatttgtccattgtcccacagcaaatgaacagcatgcaaagccaagg

SEQ ID NO: 168953 - DNA, 79 bp, Homo sapiens
aaaagaataaataatttgtccattgtcccacagcaaatgaacagcatgcaaagccaaggggcatgcatgatttcacggc

SEQ ID NO: 168954 - DNA, 81 bp, Homo sapiens
aaataatttgtccattgtcccacagcaaatgaacagcatgcaaagccaaggggcatgcatgatttcacggcccatgctccg

SEQ ID NO: 168955 - DNA, 79 bp, Homo sapiens
agcaaatgaacagcatgcaaagccaaggggcatgcatgatttcacggcccatgctccgggtttaactactatactattc

SEQ ID NO: 168956 - DNA, 77 bp, Homo sapiens
aacagcatgcaaagccaaggggcatgcatgatttcacggcccatgctccgggtttaactactatactattcgactaa

SEQ ID NO: 168957 - DNA, 73 bp, Homo sapiens
aaagccaaggggcatgcatgatttcacggcccatgctccgggtttaactactatactattcgactaacacctc

SEQ ID NO: 168958 - DNA, 73 bp, Homo sapiens
catgcatgatttcacggcccatgctccgggtttaactactatactattcgactaacacctcccaccaataacc

SEQ ID NO: 168959 - DNA, 70 bp, Homo sapiens
atgatttcacggcccatgctccgggtttaactactatactattcgactaacacctcccaccaataaccca

SEQ ID NO: 168960 - DNA, 71 bp, Homo sapiens
atgctccgggtttaactactatactattcgactaacacctcccaccaataacccaccatcaaatacatgac

SEQ ID NO: 168961 - DNA, 75 bp, Homo sapiens
tactatactattcgactaacacctcccaccaataacccaccatcaaatacatgactaaaggccagcaggatttca

SEQ ID NO: 168962 - DNA, 73 bp, Homo sapiens
attcgactaacacctcccaccaataacccaccatcaaatacatgactaaaggccagcaggatttcacaaaggc

SEQ ID NO: 168963 - DNA, 71 bp, Homo sapiens
tcccaccaataacccaccatcaaatacatgactaaaggccagcaggatttcacaaaggccggggctttgtt

SEQ ID NO: 168964 - DNA, 71 bp, Homo sapiens
aataacccaccatcaaatacatgactaaaggccagcaggatttcacaaaggccggggctttgtttggctta

SEQ ID NO: 168965 - DNA, 73 bp, Homo sapiens
aaatacatgactaaaggccagcaggatttcacaaaggccggggctttgtttggcttacttgctacttggcaca

SEQ ID NO: 168966 - DNA, 74 bp, Homo sapiens
atgactaaaggccagcaggatttcacaaaggccggggctttgtttggcttacttgctacttggcacatagtaga

SEQ ID NO: 168967 - DNA, 74 bp, Homo sapiens
agcaggatttcacaaaggccggggctttgtttggcttacttgctacttggcacatagtagatactcagtaaata

SEQ ID NO: 168968 - DNA, 73 bp, Homo sapiens
atttcacaaaggccggggctttgtttggcttacttgctacttggcacatagtagatactcagtaaatatttga

SEQ ID NO: 168969 - DNA, 78 bp, Homo sapiens
gggctttgtttggcttacttgctacttggcacatagtagatactcagtaaatatttgatggttgattggctggctgaa

SEQ ID NO: 168970 - DNA, 79 bp, Homo sapiens
ttgtttggcttacttgctacttggcacatagtagatactcagtaaatatttgatggttgattggctggctgaatgaaaa

SEQ ID NO: 168971 - DNA, 75 bp, Homo sapiens
ttggcacatagtagatactcagtaaatatttgatggttgattggctggctgaatgaaaaactgtttaaaactttg

SEQ ID NO: 168972 - DNA, 73 bp, Homo sapiens
gtagatactcagtaaatatttgatggttgattggctggctgaatgaaaaactgtttaaaactttgggtatggc

SEQ ID NO: 168973 - DNA, 72 bp, Homo sapiens
agtaaatatttgatggttgattggctggctgaatgaaaaactgtttaaaactttgggtatggctgggcactg

SEQ ID NO: 168974 - DNA, 74 bp, Homo sapiens
attacaggtgtgatctgtgcctggcctgaaggggtggttctttatctctttcatatgtaaacattctctggttt

SEQ ID NO: 168975 - DNA, 75 bp, Homo sapiens
tgatctgtgcctggcctgaaggggtggttctttatctctttcatatgtaaacattctctggttttattatttgaa

SEQ ID NO: 168976 - DNA, 70 bp, Homo sapiens
ctggcctgaaggggtggttctttatctctttcatatgtaaacattctctggttttattatttgaaggtaa

SEQ ID NO: 168977 - DNA, 70 bp, Homo sapiens
aggggtggttctttatctctttcatatgtaaacattctctggttttattatttgaaggtaaagtgcctgc

SEQ ID NO: 168978 - DNA, 80 bp, Homo sapiens
ctttatctctttcatatgtaaacattctctggttttattatttgaaggtaaagtgcctgctgcctatgatatcatgatga

SEQ ID NO: 168979 - DNA, 81 bp, Homo sapiens
tttcatatgtaaacattctctggttttattatttgaaggtaaagtgcctgctgcctatgatatcatgatgatacgcagaaa

SEQ ID NO: 168980 - DNA, 81 bp, Homo sapiens
aacattctctggttttattatttgaaggtaaagtgcctgctgcctatgatatcatgatgatacgcagaaacagtccagata

SEQ ID NO: 168981 - DNA, 79 bp, Homo sapiens
gttttattatttgaaggtaaagtgcctgctgcctatgatatcatgatgatacgcagaaacagtccagataggttgttaa

SEQ ID NO: 168982 - DNA, 83 bp, Homo sapiens
tatttgaaggtaaagtgcctgctgcctatgatatcatgatgatacgcagaaacagtccagataggttgttaagagcatgagtt

SEQ ID NO: 168983 - DNA, 86 bp, Homo sapiens
taaagtgcctgctgcctatgatatcatgatgatacgcagaaacagtccagataggttgttaagagcatgagtttgagatcactaaa

SEQ ID NO: 168984 - DNA, 80 bp, Homo sapiens
atatcatgatgatacgcagaaacagtccagataggttgttaagagcatgagtttgagatcactaaactttaaatggaatc

SEQ ID NO: 168985 - DNA, 77 bp, Homo sapiens
atgatacgcagaaacagtccagataggttgttaagagcatgagtttgagatcactaaactttaaatggaatcccaga

SEQ ID NO: 168986 - DNA, 73 bp, Homo sapiens
agtccagataggttgttaagagcatgagtttgagatcactaaactttaaatggaatcccagaccaacttctta

SEQ ID NO: 168987 - DNA, 71 bp, Homo sapiens
agataggttgttaagagcatgagtttgagatcactaaactttaaatggaatcccagaccaacttcttaaac

SEQ ID NO: 168988 - DNA, 72 bp, Homo sapiens
ttaagagcatgagtttgagatcactaaactttaaatggaatcccagaccaacttcttaaactgggcaaatta

SEQ ID NO: 168989 - DNA, 69 bp, Homo sapiens
gagtttgagatcactaaactttaaatggaatcccagaccaacttcttaaactgggcaaattactggatt

SEQ ID NO: 168990 - DNA, 65 bp, Homo sapiens
cactaaactttaaatggaatcccagaccaacttcttaaactgggcaaattactggatttcttttt

SEQ ID NO: 168991 - DNA, 72 bp, Homo sapiens
aattacaggcatggggcaccatgcccacccacttgatctgctttccctcaccttaaagtaagggtggtcctg

SEQ ID NO: 168992 - DNA, 74 bp, Homo sapiens
aggcatggggcaccatgcccacccacttgatctgctttccctcaccttaaagtaagggtggtcctggcaactgc

SEQ ID NO: 168993 - DNA, 73 bp, Homo sapiens
atgcccacccacttgatctgctttccctcaccttaaagtaagggtggtcctggcaactgcctctgtaagtgat

SEQ ID NO: 168994 - DNA, 72 bp, Homo sapiens
acttgatctgctttccctcaccttaaagtaagggtggtcctggcaactgcctctgtaagtgatttctaaaga

SEQ ID NO: 168995 - DNA, 72 bp, Homo sapiens
accttaaagtaagggtggtcctggcaactgcctctgtaagtgatttctaaagattaaatgagagaatatgga

SEQ ID NO: 168996 - DNA, 74 bp, Homo sapiens
taagggtggtcctggcaactgcctctgtaagtgatttctaaagattaaatgagagaatatggatgtgaaaaatt

SEQ ID NO: 168997 - DNA, 80 bp, Homo sapiens
tggcaactgcctctgtaagtgatttctaaagattaaatgagagaatatggatgtgaaaaatttatgcaacagctggaaca

SEQ ID NO: 168998 - DNA, 79 bp, Homo sapiens
ctgcctctgtaagtgatttctaaagattaaatgagagaatatggatgtgaaaaatttatgcaacagctggaacataata

SEQ ID NO: 168999 - DNA, 79 bp, Homo sapiens
aagattaaatgagagaatatggatgtgaaaaatttatgcaacagctggaacataataaagcactaataaatggcagcta

SEQ ID NO: 169000 - DNA, 81 bp, Homo sapiens
gagaatatggatgtgaaaaatttatgcaacagctggaacataataaagcactaataaatggcagctattactgtaatctga

SEQ ID NO: 169001 - DNA, 82 bp, Homo sapiens
tggatgtgaaaaatttatgcaacagctggaacataataaagcactaataaatggcagctattactgtaatctgagaatctga

SEQ ID NO: 169002 - DNA, 83 bp, Homo sapiens
tttatgcaacagctggaacataataaagcactaataaatggcagctattactgtaatctgagaatctgaacagaaatgataca

SEQ ID NO: 169003 - DNA, 82 bp, Homo sapiens
aacagctggaacataataaagcactaataaatggcagctattactgtaatctgagaatctgaacagaaatgatacacgcaca

SEQ ID NO: 169004 - DNA, 80 bp, Homo sapiens
aacataataaagcactaataaatggcagctattactgtaatctgagaatctgaacagaaatgatacacgcacacacaaag

SEQ ID NO: 169005 - DNA, 79 bp, Homo sapiens
aataaagcactaataaatggcagctattactgtaatctgagaatctgaacagaaatgatacacgcacacacaaaggaaa

SEQ ID NO: 169006 - DNA, 80 bp, Homo sapiens
agcactaataaatggcagctattactgtaatctgagaatctgaacagaaatgatacacgcacacacaaaggaaaagataa

SEQ ID NO: 169007 - DNA, 80 bp, Homo sapiens
cagctattactgtaatctgagaatctgaacagaaatgatacacgcacacacaaaggaaaagataagcatccactgtttaa

SEQ ID NO: 169008 - DNA, 78 bp, Homo sapiens
attactgtaatctgagaatctgaacagaaatgatacacgcacacacaaaggaaaagataagcatccactgtttaaata

SEQ ID NO: 169009 - DNA, 79 bp, Homo sapiens
tgtaatctgagaatctgaacagaaatgatacacgcacacacaaaggaaaagataagcatccactgtttaaataaacaca

SEQ ID NO: 169010 - DNA, 75 bp, Homo sapiens
agaatctgaacagaaatgatacacgcacacacaaaggaaaagataagcatccactgtttaaataaacacagcttt

SEQ ID NO: 169011 - DNA, 75 bp, Homo sapiens
aatctgaacagaaatgatacacgcacacacaaaggaaaagataagcatccactgtttaaataaacacagcttttc

SEQ ID NO: 169012 - DNA, 72 bp, Homo sapiens
acacacaaaggaaaagataagcatccactgtttaaataaacacagcttttccttgggaagactatgtgccat

SEQ ID NO: 169013 - DNA, 73 bp, Homo sapiens
ataagcatccactgtttaaataaacacagcttttccttgggaagactatgtgccatttcattattttagtgcc

SEQ ID NO: 169014 - DNA, 73 bp, Homo sapiens
tttaaataaacacagcttttccttgggaagactatgtgccatttcattattttagtgccctgagctgtgtttg

SEQ ID NO: 169015 - DNA, 75 bp, Homo sapiens
ataaacacagcttttccttgggaagactatgtgccatttcattattttagtgccctgagctgtgtttggattcaa

SEQ ID NO: 169016 - DNA, 77 bp, Homo sapiens
ttttccttgggaagactatgtgccatttcattattttagtgccctgagctgtgtttggattcaagcatgtcagttac

SEQ ID NO: 169017 - DNA, 72 bp, Homo sapiens
atttcattattttagtgccctgagctgtgtttggattcaagcatgtcagttacccaaaaaagacttgaaaaa

SEQ ID NO: 169018 - DNA, 73 bp, Homo sapiens
ttggattcaagcatgtcagttacccaaaaaagacttgaaaaaacaaccacatttttattcaagcatgtgagct

SEQ ID NO: 169019 - DNA, 75 bp, Homo sapiens
tcaagcatgtcagttacccaaaaaagacttgaaaaaacaaccacatttttattcaagcatgtgagctttctcaca

SEQ ID NO: 169020 - DNA, 70 bp, Homo sapiens
tacccaaaaaagacttgaaaaaacaaccacatttttattcaagcatgtgagctttctcacacctttctcc

SEQ ID NO: 169021 - DNA, 72 bp, Homo sapiens
agacttgaaaaaacaaccacatttttattcaagcatgtgagctttctcacacctttctcctgtgtccctaat

SEQ ID NO: 169022 - DNA, 73 bp, Homo sapiens
aaaaacaaccacatttttattcaagcatgtgagctttctcacacctttctcctgtgtccctaatttgttcata

SEQ ID NO: 169023 - DNA, 76 bp, Homo sapiens
atttttattcaagcatgtgagctttctcacacctttctcctgtgtccctaatttgttcatatccagacaattcacc

SEQ ID NO: 169024 - DNA, 80 bp, Homo sapiens
tattcaagcatgtgagctttctcacacctttctcctgtgtccctaatttgttcatatccagacaattcacctggacctca

SEQ ID NO: 169025 - DNA, 76 bp, Homo sapiens
agctttctcacacctttctcctgtgtccctaatttgttcatatccagacaattcacctggacctcagtctctccta

SEQ ID NO: 169026 - DNA, 74 bp, Homo sapiens
acctttctcctgtgtccctaatttgttcatatccagacaattcacctggacctcagtctctcctatttctcatt

SEQ ID NO: 169027 - DNA, 80 bp, Homo sapiens
tcctgtgtccctaatttgttcatatccagacaattcacctggacctcagtctctcctatttctcatttctctcacatgaa

SEQ ID NO: 169028 - DNA, 82 bp, Homo sapiens
taatttgttcatatccagacaattcacctggacctcagtctctcctatttctcatttctctcacatgaaggcatatgtctta

SEQ ID NO: 169029 - DNA, 81 bp, Homo sapiens
atatccagacaattcacctggacctcagtctctcctatttctcatttctctcacatgaaggcatatgtcttattggttata

SEQ ID NO: 169030 - DNA, 77 bp, Homo sapiens
aattcacctggacctcagtctctcctatttctcatttctctcacatgaaggcatatgtcttattggttataaagtta

SEQ ID NO: 169031 - DNA, 77 bp, Homo sapiens
acctcagtctctcctatttctcatttctctcacatgaaggcatatgtcttattggttataaagttaatgggtgaatg

SEQ ID NO: 169032 - DNA, 78 bp, Homo sapiens
tctctcctatttctcatttctctcacatgaaggcatatgtcttattggttataaagttaatgggtgaatgtggagaaa

SEQ ID NO: 169033 - DNA, 77 bp, Homo sapiens
tcatttctctcacatgaaggcatatgtcttattggttataaagttaatgggtgaatgtggagaaagaggtgttctaa

SEQ ID NO: 169034 - DNA, 72 bp, Homo sapiens
tcttattggttataaagttaatgggtgaatgtggagaaagaggtgttctaaggaagaatttcaatctataca

SEQ ID NO: 169035 - DNA, 78 bp, Homo sapiens
tgaatgtggagaaagaggtgttctaaggaagaatttcaatctatacatatttctcagacctctttgctagtgactata

SEQ ID NO: 169036 - DNA, 77 bp, Homo sapiens
agaaagaggtgttctaaggaagaatttcaatctatacatatttctcagacctctttgctagtgactatatagcattc

SEQ ID NO: 169037 - DNA, 77 bp, Homo sapiens
aggtgttctaaggaagaatttcaatctatacatatttctcagacctctttgctagtgactatatagcattctgcccc

SEQ ID NO: 169038 - DNA, 76 bp, Homo sapiens
aggaagaatttcaatctatacatatttctcagacctctttgctagtgactatatagcattctgccccctccaaaaa

SEQ ID NO: 169039 - DNA, 75 bp, Homo sapiens
tcaatctatacatatttctcagacctctttgctagtgactatatagcattctgccccctccaaaaaaataaagtt

SEQ ID NO: 169040 - DNA, 72 bp, Homo sapiens
atatttctcagacctctttgctagtgactatatagcattctgccccctccaaaaaaataaagtttccacaaa

SEQ ID NO: 169041 - DNA, 69 bp, Homo sapiens
agacctctttgctagtgactatatagcattctgccccctccaaaaaaataaagtttccacaaaaagtta

SEQ ID NO: 169042 - DNA, 69 bp, Homo sapiens
gctagtgactatatagcattctgccccctccaaaaaaataaagtttccacaaaaagttaattttattca

SEQ ID NO: 169043 - DNA, 65 bp, Homo sapiens
atatagcattctgccccctccaaaaaaataaagtttccacaaaaagttaattttattcaatttaa

SEQ ID NO: 169044 - DNA, 71 bp, Homo sapiens
aaattattttaagaaaactgacatccattttccaagattagatgagatatcctcaagtgtccccaaattaa

SEQ ID NO: 169045 - DNA, 73 bp, Homo sapiens
aagaaaactgacatccattttccaagattagatgagatatcctcaagtgtccccaaattaagtttgtgaaatc

SEQ ID NO: 169046 - DNA, 72 bp, Homo sapiens
acatccattttccaagattagatgagatatcctcaagtgtccccaaattaagtttgtgaaatcccttaccaa

SEQ ID NO: 169047 - DNA, 72 bp, Homo sapiens
tccaagattagatgagatatcctcaagtgtccccaaattaagtttgtgaaatcccttaccaaaaatgaaaca

SEQ ID NO: 169048 - DNA, 67 bp, Homo sapiens
tcctcaagtgtccccaaattaagtttgtgaaatcccttaccaaaaatgaaacagagttcttttcctc

SEQ ID NO: 169049 - DNA, 67 bp, Homo sapiens
agtgtccccaaattaagtttgtgaaatcccttaccaaaaatgaaacagagttcttttcctctctgag

SEQ ID NO: 169050 - DNA, 69 bp, Homo sapiens
taagtttgtgaaatcccttaccaaaaatgaaacagagttcttttcctctctgagtcccagtcttaacaa

SEQ ID NO: 169051 - DNA, 68 bp, Homo sapiens
tgaaatcccttaccaaaaatgaaacagagttcttttcctctctgagtcccagtcttaacaaccaaaaa

SEQ ID NO: 169052 - DNA, 69 bp, Homo sapiens
taccaaaaatgaaacagagttcttttcctctctgagtcccagtcttaacaaccaaaaaagtatatatac

SEQ ID NO: 169053 - DNA, 70 bp, Homo sapiens
tgaaacagagttcttttcctctctgagtcccagtcttaacaaccaaaaaagtatatatactaaggaagga

SEQ ID NO: 169054 - DNA, 66 bp, Homo sapiens
ttcttttcctctctgagtcccagtcttaacaaccaaaaaagtatatatactaaggaaggaaaaaaa

SEQ ID NO: 169055 - DNA, 66 bp, Homo sapiens
acaaccaaaaaagtatatatactaaggaaggaaaaaaaaactaactagttctagcaaactatcaca

SEQ ID NO: 169056 - DNA, 71 bp, Homo sapiens
gcaaactatcacaaaagtagagaaaactttattaaaagtcattatacattatcatttcataaaatttaata

SEQ ID NO: 169057 - DNA, 68 bp, Homo sapiens
cacaaaagtagagaaaactttattaaaagtcattatacattatcatttcataaaatttaatataaatt

SEQ ID NO: 169058 - DNA, 68 bp, Homo sapiens
gagaaaactttattaaaagtcattatacattatcatttcataaaatttaatataaatttacataaaat

SEQ ID NO: 169059 - DNA, 71 bp, Homo sapiens
taaatgaaataataaaaagtatgattattttatatcttttatagtaacaaacatacagagtgttacactaa

SEQ ID NO: 169060 - DNA, 72 bp, Homo sapiens
taataaaaagtatgattattttatatcttttatagtaacaaacatacagagtgttacactaaagatggtata

SEQ ID NO: 169061 - DNA, 72 bp, Homo sapiens
gtatgattattttatatcttttatagtaacaaacatacagagtgttacactaaagatggtatacataaaatt

SEQ ID NO: 169062 - DNA, 73 bp, Homo sapiens
ttatatcttttatagtaacaaacatacagagtgttacactaaagatggtatacataaaattttcagctgtaat

SEQ ID NO: 169063 - DNA, 72 bp, Homo sapiens
atagtaacaaacatacagagtgttacactaaagatggtatacataaaattttcagctgtaatttccttggaa

SEQ ID NO: 169064 - DNA, 73 bp, Homo sapiens
acatacagagtgttacactaaagatggtatacataaaattttcagctgtaatttccttggaattttggagtga

SEQ ID NO: 169065 - DNA, 73 bp, Homo sapiens
cagagtgttacactaaagatggtatacataaaattttcagctgtaatttccttggaattttggagtgacagta

SEQ ID NO: 169066 - DNA, 72 bp, Homo sapiens
cactaaagatggtatacataaaattttcagctgtaatttccttggaattttggagtgacagtattaaaatca

SEQ ID NO: 169067 - DNA, 70 bp, Homo sapiens
ggtatacataaaattttcagctgtaatttccttggaattttggagtgacagtattaaaatcacaatttaa

SEQ ID NO: 169068 - DNA, 67 bp, Homo sapiens
aaattttcagctgtaatttccttggaattttggagtgacagtattaaaatcacaatttaaaaaataa

SEQ ID NO: 169069 - DNA, 67 bp, Homo sapiens
aaaaaaaaaccttaagctgaatttatgccaaagtttctaaattctttatcagatagtgcttatttgg

SEQ ID NO: 169070 - DNA, 76 bp, Homo sapiens
gctgaatttatgccaaagtttctaaattctttatcagatagtgcttatttggtttatcttactatccatgataaca

SEQ ID NO: 169071 - DNA, 75 bp, Homo sapiens
tgccaaagtttctaaattctttatcagatagtgcttatttggtttatcttactatccatgataacaggagtcagg

SEQ ID NO: 169072 - DNA, 79 bp, Homo sapiens
attctttatcagatagtgcttatttggtttatcttactatccatgataacaggagtcaggggaacagcatagatgtatg

SEQ ID NO: 169073 - DNA, 82 bp, Homo sapiens
ttatcagatagtgcttatttggtttatcttactatccatgataacaggagtcaggggaacagcatagatgtatggatagaca

SEQ ID NO: 169074 - DNA, 78 bp, Homo sapiens
ttatttggtttatcttactatccatgataacaggagtcaggggaacagcatagatgtatggatagacagacaaaacaa

SEQ ID NO: 169075 - DNA, 78 bp, Homo sapiens
ggtttatcttactatccatgataacaggagtcaggggaacagcatagatgtatggatagacagacaaaacaaaactca

SEQ ID NO: 169076 - DNA, 78 bp, Homo sapiens
actatccatgataacaggagtcaggggaacagcatagatgtatggatagacagacaaaacaaaactcagaaaagccca

SEQ ID NO: 169077 - DNA, 76 bp, Homo sapiens
taacaggagtcaggggaacagcatagatgtatggatagacagacaaaacaaaactcagaaaagcccatggtaaata

SEQ ID NO: 169078 - DNA, 77 bp, Homo sapiens
ggaacagcatagatgtatggatagacagacaaaacaaaactcagaaaagcccatggtaaataatgcaccttcgctac

SEQ ID NO: 169079 - DNA, 77 bp, Homo sapiens
tagatgtatggatagacagacaaaacaaaactcagaaaagcccatggtaaataatgcaccttcgctacctgctctta

SEQ ID NO: 169080 - DNA, 72 bp, Homo sapiens
atagacagacaaaacaaaactcagaaaagcccatggtaaataatgcaccttcgctacctgctcttaaaaatc

SEQ ID NO: 169081 - DNA, 70 bp, Homo sapiens
aaaacaaaactcagaaaagcccatggtaaataatgcaccttcgctacctgctcttaaaaatccttgataa

SEQ ID NO: 169082 - DNA, 72 bp, Homo sapiens
actcagaaaagcccatggtaaataatgcaccttcgctacctgctcttaaaaatccttgataagtagctaaaa

SEQ ID NO: 169083 - DNA, 72 bp, Homo sapiens
agaaaagcccatggtaaataatgcaccttcgctacctgctcttaaaaatccttgataagtagctaaaatgaa

SEQ ID NO: 169084 - DNA, 72 bp, Homo sapiens
aaagcccatggtaaataatgcaccttcgctacctgctcttaaaaatccttgataagtagctaaaatgaacca

SEQ ID NO: 169085 - DNA, 75 bp, Homo sapiens
atggtaaataatgcaccttcgctacctgctcttaaaaatccttgataagtagctaaaatgaaccaatatgcactc

SEQ ID NO: 169086 - DNA, 76 bp, Homo sapiens
taaataatgcaccttcgctacctgctcttaaaaatccttgataagtagctaaaatgaaccaatatgcactcgctta

SEQ ID NO: 169087 - DNA, 74 bp, Homo sapiens
caccttcgctacctgctcttaaaaatccttgataagtagctaaaatgaaccaatatgcactcgcttacacaaaa

SEQ ID NO: 169088 - DNA, 73 bp, Homo sapiens
cttcgctacctgctcttaaaaatccttgataagtagctaaaatgaaccaatatgcactcgcttacacaaaaat

SEQ ID NO: 169089 - DNA, 75 bp, Homo sapiens
tcgctacctgctcttaaaaatccttgataagtagctaaaatgaaccaatatgcactcgcttacacaaaaattcaa

SEQ ID NO: 169090 - DNA, 75 bp, Homo sapiens
gctcttaaaaatccttgataagtagctaaaatgaaccaatatgcactcgcttacacaaaaattcaatagtagcga

SEQ ID NO: 169091 - DNA, 74 bp, Homo sapiens
aaaaatccttgataagtagctaaaatgaaccaatatgcactcgcttacacaaaaattcaatagtagcgatatgg

SEQ ID NO: 169092 - DNA, 76 bp, Homo sapiens
aaaatccttgataagtagctaaaatgaaccaatatgcactcgcttacacaaaaattcaatagtagcgatatgggca

SEQ ID NO: 169093 - DNA, 79 bp, Homo sapiens
tccttgataagtagctaaaatgaaccaatatgcactcgcttacacaaaaattcaatagtagcgatatgggcagaagaca

SEQ ID NO: 169094 - DNA, 80 bp, Homo sapiens
tagctaaaatgaaccaatatgcactcgcttacacaaaaattcaatagtagcgatatgggcagaagacaggcagcaggaaa

SEQ ID NO: 169095 - DNA, 77 bp, Homo sapiens
aaccaatatgcactcgcttacacaaaaattcaatagtagcgatatgggcagaagacaggcagcaggaaagaaaaagc

SEQ ID NO: 169096 - DNA, 73 bp, Homo sapiens
actcgcttacacaaaaattcaatagtagcgatatgggcagaagacaggcagcaggaaagaaaaagccaaaatt

SEQ ID NO: 169097 - DNA, 74 bp, Homo sapiens
aaaaattcaatagtagcgatatgggcagaagacaggcagcaggaaagaaaaagccaaaatttagtcactctgaa

SEQ ID NO: 169098 - DNA, 76 bp, Homo sapiens
atatgggcagaagacaggcagcaggaaagaaaaagccaaaatttagtcactctgaataaacaagctgtaactgaca

SEQ ID NO: 169099 - DNA, 75 bp, Homo sapiens
gacaggcagcaggaaagaaaaagccaaaatttagtcactctgaataaacaagctgtaactgacagttggctgtat

SEQ ID NO: 169100 - DNA, 72 bp, Homo sapiens
aggaaagaaaaagccaaaatttagtcactctgaataaacaagctgtaactgacagttggctgtattcatgtt

SEQ ID NO: 169101 - DNA, 76 bp, Homo sapiens
aagccaaaatttagtcactctgaataaacaagctgtaactgacagttggctgtattcatgttttgtgaatgagtaa

SEQ ID NO: 169102 - DNA, 76 bp, Homo sapiens
aatttagtcactctgaataaacaagctgtaactgacagttggctgtattcatgttttgtgaatgagtaaaccaatg

SEQ ID NO: 169103 - DNA, 79 bp, Homo sapiens
tgaataaacaagctgtaactgacagttggctgtattcatgttttgtgaatgagtaaaccaatgtgacttctgcaagttc

SEQ ID NO: 169104 - DNA, 79 bp, Homo sapiens
aaacaagctgtaactgacagttggctgtattcatgttttgtgaatgagtaaaccaatgtgacttctgcaagttctcaca

SEQ ID NO: 169105 - DNA, 78 bp, Homo sapiens
taactgacagttggctgtattcatgttttgtgaatgagtaaaccaatgtgacttctgcaagttctcacagaaaggtag

SEQ ID NO: 169106 - DNA, 77 bp, Homo sapiens
tgtattcatgttttgtgaatgagtaaaccaatgtgacttctgcaagttctcacagaaaggtaggtgtgaaaaagtca

SEQ ID NO: 169107 - DNA, 74 bp, Homo sapiens
atgttttgtgaatgagtaaaccaatgtgacttctgcaagttctcacagaaaggtaggtgtgaaaaagtcaattc

SEQ ID NO: 169108 - DNA, 74 bp, Homo sapiens
aatgagtaaaccaatgtgacttctgcaagttctcacagaaaggtaggtgtgaaaaagtcaattccagacttgga

SEQ ID NO: 169109 - DNA, 77 bp, Homo sapiens
atgtgacttctgcaagttctcacagaaaggtaggtgtgaaaaagtcaattccagacttggaggtgcatctatggtaa

SEQ ID NO: 169110 - DNA, 74 bp, Homo sapiens
acttctgcaagttctcacagaaaggtaggtgtgaaaaagtcaattccagacttggaggtgcatctatggtaaaa

SEQ ID NO: 169111 - DNA, 74 bp, Homo sapiens
gttctcacagaaaggtaggtgtgaaaaagtcaattccagacttggaggtgcatctatggtaaaaaatgagtgaa

SEQ ID NO: 169112 - DNA, 72 bp, Homo sapiens
aaaggtaggtgtgaaaaagtcaattccagacttggaggtgcatctatggtaaaaaatgagtgaagaagacca

SEQ ID NO: 169113 - DNA, 74 bp, Homo sapiens
aattccagacttggaggtgcatctatggtaaaaaatgagtgaagaagaccaagagggtataagtctgttgtgtc

SEQ ID NO: 169114 - DNA, 77 bp, Homo sapiens
aggtgcatctatggtaaaaaatgagtgaagaagaccaagagggtataagtctgttgtgtctcaatcagtctatccaa

SEQ ID NO: 169115 - DNA, 77 bp, Homo sapiens
atctatggtaaaaaatgagtgaagaagaccaagagggtataagtctgttgtgtctcaatcagtctatccaagagatg

SEQ ID NO: 169116 - DNA, 76 bp, Homo sapiens
aaaaatgagtgaagaagaccaagagggtataagtctgttgtgtctcaatcagtctatccaagagatggcaaaaaga

SEQ ID NO: 169117 - DNA, 81 bp, Homo sapiens
aagaccaagagggtataagtctgttgtgtctcaatcagtctatccaagagatggcaaaaagagcacagagcaccatgaaga

SEQ ID NO: 169118 - DNA, 84 bp, Homo sapiens
tctgttgtgtctcaatcagtctatccaagagatggcaaaaagagcacagagcaccatgaagaggtgggctgagcaaccactaaa

SEQ ID NO: 169119 - DNA, 84 bp, Homo sapiens
tgtctcaatcagtctatccaagagatggcaaaaagagcacagagcaccatgaagaggtgggctgagcaaccactaaactcatgt

SEQ ID NO: 169120 - DNA, 82 bp, Homo sapiens
agtctatccaagagatggcaaaaagagcacagagcaccatgaagaggtgggctgagcaaccactaaactcatgttccattgc

SEQ ID NO: 169121 - DNA, 80 bp, Homo sapiens
atggcaaaaagagcacagagcaccatgaagaggtgggctgagcaaccactaaactcatgttccattgcgggactctattc

SEQ ID NO: 169122 - DNA, 78 bp, Homo sapiens
aaaagagcacagagcaccatgaagaggtgggctgagcaaccactaaactcatgttccattgcgggactctattctact

SEQ ID NO: 169123 - DNA, 82 bp, Homo sapiens
agagcaccatgaagaggtgggctgagcaaccactaaactcatgttccattgcgggactctattctacttcacatctccatgc

SEQ ID NO: 169124 - DNA, 83 bp, Homo sapiens
aggtgggctgagcaaccactaaactcatgttccattgcgggactctattctacttcacatctccatgcctgcaatatgcagaa

SEQ ID NO: 169125 - DNA, 84 bp, Homo sapiens
agcaaccactaaactcatgttccattgcgggactctattctacttcacatctccatgcctgcaatatgcagaagcatggataaa

SEQ ID NO: 169126 - DNA, 82 bp, Homo sapiens
actaaactcatgttccattgcgggactctattctacttcacatctccatgcctgcaatatgcagaagcatggataaacctaa

SEQ ID NO: 169127 - DNA, 82 bp, Homo sapiens
atgttccattgcgggactctattctacttcacatctccatgcctgcaatatgcagaagcatggataaacctaatgagttttg

SEQ ID NO: 169128 - DNA, 81 bp, Homo sapiens
gactctattctacttcacatctccatgcctgcaatatgcagaagcatggataaacctaatgagttttggaataaatattat

SEQ ID NO: 169129 - DNA, 81 bp, Homo sapiens
tattctacttcacatctccatgcctgcaatatgcagaagcatggataaacctaatgagttttggaataaatattattactg

SEQ ID NO: 169130 - DNA, 81 bp, Homo sapiens
tgcaatatgcagaagcatggataaacctaatgagttttggaataaatattattactgtcattctcatcaccactactgcct

SEQ ID NO: 169131 - DNA, 75 bp, Homo sapiens
tggataaacctaatgagttttggaataaatattattactgtcattctcatcaccactactgcctttcaccaacca

SEQ ID NO: 169132 - DNA, 76 bp, Homo sapiens
taatgagttttggaataaatattattactgtcattctcatcaccactactgcctttcaccaaccacttattgagga

SEQ ID NO: 169133 - DNA, 76 bp, Homo sapiens
ataaatattattactgtcattctcatcaccactactgcctttcaccaaccacttattgaggaccaacatgtatggt

SEQ ID NO: 169134 - DNA, 77 bp, Homo sapiens
tattactgtcattctcatcaccactactgcctttcaccaaccacttattgaggaccaacatgtatggttttccatta

SEQ ID NO: 169135 - DNA, 74 bp, Homo sapiens
attctcatcaccactactgcctttcaccaaccacttattgaggaccaacatgtatggttttccattatttcatt

SEQ ID NO: 169136 - DNA, 71 bp, Homo sapiens
accactactgcctttcaccaaccacttattgaggaccaacatgtatggttttccattatttcatttaatcc

SEQ ID NO: 169137 - DNA, 75 bp, Homo sapiens
ttcaccaaccacttattgaggaccaacatgtatggttttccattatttcatttaatcctcaagagaatcaggtga

SEQ ID NO: 169138 - DNA, 74 bp, Homo sapiens
tttcatttaatcctcaagagaatcaggtgagaaaattcaggcacaaaaagcaagtaaaaggagggaagatgaga

SEQ ID NO: 169139 - DNA, 72 bp, Homo sapiens
tttaatcctcaagagaatcaggtgagaaaattcaggcacaaaaagcaagtaaaaggagggaagatgagaaaa

SEQ ID NO: 169140 - DNA, 72 bp, Homo sapiens
aagagaatcaggtgagaaaattcaggcacaaaaagcaagtaaaaggagggaagatgagaaaatcatacctag

SEQ ID NO: 169141 - DNA, 70 bp, Homo sapiens
aatcaggtgagaaaattcaggcacaaaaagcaagtaaaaggagggaagatgagaaaatcatacctagttt

SEQ ID NO: 169142 - DNA, 70 bp, Homo sapiens
gagaaaattcaggcacaaaaagcaagtaaaaggagggaagatgagaaaatcatacctagttttgtttgac

SEQ ID NO: 169143 - DNA, 71 bp, Homo sapiens
aattcaggcacaaaaagcaagtaaaaggagggaagatgagaaaatcatacctagttttgtttgactgcaaa

SEQ ID NO: 169144 - DNA, 72 bp, Homo sapiens
ttcaggcacaaaaagcaagtaaaaggagggaagatgagaaaatcatacctagttttgtttgactgcaaagtc

SEQ ID NO: 169145 - DNA, 69 bp, Homo sapiens
aaaagcaagtaaaaggagggaagatgagaaaatcatacctagttttgtttgactgcaaagtccaacttc

SEQ ID NO: 169146 - DNA, 70 bp, Homo sapiens
agcaagtaaaaggagggaagatgagaaaatcatacctagttttgtttgactgcaaagtccaacttcttaa

SEQ ID NO: 169147 - DNA, 70 bp, Homo sapiens
taaaaggagggaagatgagaaaatcatacctagttttgtttgactgcaaagtccaacttcttaaccacta

SEQ ID NO: 169148 - DNA, 70 bp, Homo sapiens
aaaggagggaagatgagaaaatcatacctagttttgtttgactgcaaagtccaacttcttaaccactata

SEQ ID NO: 169149 - DNA, 71 bp, Homo sapiens
aagatgagaaaatcatacctagttttgtttgactgcaaagtccaacttcttaaccactatattaccctcca

SEQ ID NO: 169150 - DNA, 70 bp, Homo sapiens
tagttttgtttgactgcaaagtccaacttcttaaccactatattaccctccacctggaaaccatgttgat

SEQ ID NO: 169151 - DNA, 74 bp, Homo sapiens
ttgactgcaaagtccaacttcttaaccactatattaccctccacctggaaaccatgttgattcaagcaaggata

SEQ ID NO: 169152 - DNA, 71 bp, Homo sapiens
aaagtccaacttcttaaccactatattaccctccacctggaaaccatgttgattcaagcaaggatactcag

SEQ ID NO: 169153 - DNA, 74 bp, Homo sapiens
ttaaccactatattaccctccacctggaaaccatgttgattcaagcaaggatactcaggagtcaattaattcca

SEQ ID NO: 169154 - DNA, 76 bp, Homo sapiens
tatattaccctccacctggaaaccatgttgattcaagcaaggatactcaggagtcaattaattccactatgaggaa

SEQ ID NO: 169155 - DNA, 78 bp, Homo sapiens
acctggaaaccatgttgattcaagcaaggatactcaggagtcaattaattccactatgaggaagctatgcacaagtaa

SEQ ID NO: 169156 - DNA, 78 bp, Homo sapiens
aaaccatgttgattcaagcaaggatactcaggagtcaattaattccactatgaggaagctatgcacaagtaacagaaa

SEQ ID NO: 169157 - DNA, 76 bp, Homo sapiens
attcaagcaaggatactcaggagtcaattaattccactatgaggaagctatgcacaagtaacagaaagtaataaaa

SEQ ID NO: 169158 - DNA, 74 bp, Homo sapiens
aggagtcaattaattccactatgaggaagctatgcacaagtaacagaaagtaataaaatagaccaggtgcaggg

SEQ ID NO: 169159 - DNA, 75 bp, Homo sapiens
ttccactatgaggaagctatgcacaagtaacagaaagtaataaaatagaccaggtgcaggggcctaagcctgtaa

SEQ ID NO: 169160 - DNA, 69 bp, Homo sapiens
ttatacatatattttattttccatatggaaaataaaagtatagaacacaaataggaaggatataaaagt

SEQ ID NO: 169161 - DNA, 66 bp, Homo sapiens
attttattttccatatggaaaataaaagtatagaacacaaataggaaggatataaaagttaattac

SEQ ID NO: 169162 - DNA, 67 bp, Homo sapiens
ccatatggaaaataaaagtatagaacacaaataggaaggatataaaagttaattaccaagtgggaat

SEQ ID NO: 169163 - DNA, 68 bp, Homo sapiens
aataaaagtatagaacacaaataggaaggatataaaagttaattaccaagtgggaatttatgcaccgc

SEQ ID NO: 169164 - DNA, 68 bp, Homo sapiens
aagtatagaacacaaataggaaggatataaaagttaattaccaagtgggaatttatgcaccgccaaaa

SEQ ID NO: 169165 - DNA, 68 bp, Homo sapiens
tagaacacaaataggaaggatataaaagttaattaccaagtgggaatttatgcaccgccaaaataaac

SEQ ID NO: 169166 - DNA, 68 bp, Homo sapiens
gaacacaaataggaaggatataaaagttaattaccaagtgggaatttatgcaccgccaaaataaacca

SEQ ID NO: 169167 - DNA, 68 bp, Homo sapiens
cacaaataggaaggatataaaagttaattaccaagtgggaatttatgcaccgccaaaataaaccataa

SEQ ID NO: 169168 - DNA, 70 bp, Homo sapiens
ggaaggatataaaagttaattaccaagtgggaatttatgcaccgccaaaataaaccataatataattgca

SEQ ID NO: 169169 - DNA, 71 bp, Homo sapiens
ggatataaaagttaattaccaagtgggaatttatgcaccgccaaaataaaccataatataattgcaatgga

SEQ ID NO: 169170 - DNA, 71 bp, Homo sapiens
gttaattaccaagtgggaatttatgcaccgccaaaataaaccataatataattgcaatggaatttcaaagc

SEQ ID NO: 169171 - DNA, 74 bp, Homo sapiens
ccaagtgggaatttatgcaccgccaaaataaaccataatataattgcaatggaatttcaaagcttcgataatga

SEQ ID NO: 169172 - DNA, 75 bp, Homo sapiens
caagtgggaatttatgcaccgccaaaataaaccataatataattgcaatggaatttcaaagcttcgataatgaga

SEQ ID NO: 169173 - DNA, 75 bp, Homo sapiens
tgggaatttatgcaccgccaaaataaaccataatataattgcaatggaatttcaaagcttcgataatgagattaa

SEQ ID NO: 169174 - DNA, 75 bp, Homo sapiens
tgcaccgccaaaataaaccataatataattgcaatggaatttcaaagcttcgataatgagattaaggataacacc

SEQ ID NO: 169175 - DNA, 72 bp, Homo sapiens
aatataattgcaatggaatttcaaagcttcgataatgagattaaggataacacccatttagtattttccatt

SEQ ID NO: 169176 - DNA, 72 bp, Homo sapiens
gcaatggaatttcaaagcttcgataatgagattaaggataacacccatttagtattttccattttctcaaaa

SEQ ID NO: 169177 - DNA, 74 bp, Homo sapiens
cgataatgagattaaggataacacccatttagtattttccattttctcaaaattgtctatccatcacataaatg

SEQ ID NO: 169178 - DNA, 70 bp, Homo sapiens
acacccatttagtattttccattttctcaaaattgtctatccatcacataaatgtacaattttttccact

SEQ ID NO: 169179 - DNA, 75 bp, Homo sapiens
ctcaaaattgtctatccatcacataaatgtacaattttttccactttagtttatatctcaggactcaattcctca

SEQ ID NO: 169180 - DNA, 73 bp, Homo sapiens
gtctatccatcacataaatgtacaattttttccactttagtttatatctcaggactcaattcctcacccaaac

SEQ ID NO: 169181 - DNA, 72 bp, Homo sapiens
ccatcacataaatgtacaattttttccactttagtttatatctcaggactcaattcctcacccaaactacca

SEQ ID NO: 169182 - DNA, 71 bp, Homo sapiens
acaattttttccactttagtttatatctcaggactcaattcctcacccaaactaccatgatacattcccaa

SEQ ID NO: 169183 - DNA, 72 bp, Homo sapiens
tttttccactttagtttatatctcaggactcaattcctcacccaaactaccatgatacattcccaactgtag

SEQ ID NO: 169184 - DNA, 77 bp, Homo sapiens
tttatatctcaggactcaattcctcacccaaactaccatgatacattcccaactgtaggcaagatggatcctactat

SEQ ID NO: 169185 - DNA, 75 bp, Homo sapiens
aggactcaattcctcacccaaactaccatgatacattcccaactgtaggcaagatggatcctactattgtaagag

SEQ ID NO: 169186 - DNA, 75 bp, Homo sapiens
attcctcacccaaactaccatgatacattcccaactgtaggcaagatggatcctactattgtaagagtctccaat

SEQ ID NO: 169187 - DNA, 76 bp, Homo sapiens
aaactaccatgatacattcccaactgtaggcaagatggatcctactattgtaagagtctccaattcaacctatcag

SEQ ID NO: 169188 - DNA, 77 bp, Homo sapiens
atacattcccaactgtaggcaagatggatcctactattgtaagagtctccaattcaacctatcagtgagattattct

SEQ ID NO: 169189 - DNA, 77 bp, Homo sapiens
aactgtaggcaagatggatcctactattgtaagagtctccaattcaacctatcagtgagattattctttctgcaaaa

SEQ ID NO: 169190 - DNA, 75 bp, Homo sapiens
aagatggatcctactattgtaagagtctccaattcaacctatcagtgagattattctttctgcaaaacgagttct

SEQ ID NO: 169191 - DNA, 75 bp, Homo sapiens
atcctactattgtaagagtctccaattcaacctatcagtgagattattctttctgcaaaacgagttcttcctgct

SEQ ID NO: 169192 - DNA, 75 bp, Homo sapiens
aattcaacctatcagtgagattattctttctgcaaaacgagttcttcctgctttcttatttccactgaggcaaga

SEQ ID NO: 169193 - DNA, 75 bp, Homo sapiens
acctatcagtgagattattctttctgcaaaacgagttcttcctgctttcttatttccactgaggcaagaccactc

SEQ ID NO: 169194 - DNA, 77 bp, Homo sapiens
tgcaaaacgagttcttcctgctttcttatttccactgaggcaagaccactctgccaattacgcaggctcaaaattca

SEQ ID NO: 169195 - DNA, 75 bp, Homo sapiens
agttcttcctgctttcttatttccactgaggcaagaccactctgccaattacgcaggctcaaaattcaaacagta

SEQ ID NO: 169196 - DNA, 75 bp, Homo sapiens
tttcttatttccactgaggcaagaccactctgccaattacgcaggctcaaaattcaaacagtacccttgattcca

SEQ ID NO: 169197 - DNA, 77 bp, Homo sapiens
tatttccactgaggcaagaccactctgccaattacgcaggctcaaaattcaaacagtacccttgattccactctcac

SEQ ID NO: 169198 - DNA, 73 bp, Homo sapiens
aagaccactctgccaattacgcaggctcaaaattcaaacagtacccttgattccactctcaccttttctccca

SEQ ID NO: 169199 - DNA, 72 bp, Homo sapiens
actctgccaattacgcaggctcaaaattcaaacagtacccttgattccactctcaccttttctcccaaataa

SEQ ID NO: 169200 - DNA, 73 bp, Homo sapiens
attacgcaggctcaaaattcaaacagtacccttgattccactctcaccttttctcccaaataatgacactcat

SEQ ID NO: 169201 - DNA, 75 bp, Homo sapiens
aattcaaacagtacccttgattccactctcaccttttctcccaaataatgacactcattcaatgaatttcaatca

SEQ ID NO: 169202 - DNA, 76 bp, Homo sapiens
agtacccttgattccactctcaccttttctcccaaataatgacactcattcaatgaatttcaatcatggacttcaa

SEQ ID NO: 169203 - DNA, 79 bp, Homo sapiens
ttccactctcaccttttctcccaaataatgacactcattcaatgaatttcaatcatggacttcaactcaatgctttcaa

SEQ ID NO: 169204 - DNA, 76 bp, Homo sapiens
accttttctcccaaataatgacactcattcaatgaatttcaatcatggacttcaactcaatgctttcaaaatcctc

SEQ ID NO: 169205 - DNA, 81 bp, Homo sapiens
tctcccaaataatgacactcattcaatgaatttcaatcatggacttcaactcaatgctttcaaaatcctctcatgttgatt

SEQ ID NO: 169206 - DNA, 82 bp, Homo sapiens
taatgacactcattcaatgaatttcaatcatggacttcaactcaatgctttcaaaatcctctcatgttgatttggaacctgc

SEQ ID NO: 169207 - DNA, 78 bp, Homo sapiens
aatgaatttcaatcatggacttcaactcaatgctttcaaaatcctctcatgttgatttggaacctgcgctacctcttg

SEQ ID NO: 169208 - DNA, 77 bp, Homo sapiens
atttcaatcatggacttcaactcaatgctttcaaaatcctctcatgttgatttggaacctgcgctacctcttgtaat

SEQ ID NO: 169209 - DNA, 74 bp, Homo sapiens
acttcaactcaatgctttcaaaatcctctcatgttgatttggaacctgcgctacctcttgtaatttctccctaa

SEQ ID NO: 169210 - DNA, 75 bp, Homo sapiens
tgctttcaaaatcctctcatgttgatttggaacctgcgctacctcttgtaatttctccctaatcagtctccactt

SEQ ID NO: 169211 - DNA, 74 bp, Homo sapiens
atgttgatttggaacctgcgctacctcttgtaatttctccctaatcagtctccacttttctgcctctcaatcct

SEQ ID NO: 169212 - DNA, 75 bp, Homo sapiens
tttggaacctgcgctacctcttgtaatttctccctaatcagtctccacttttctgcctctcaatccttcaatctc

SEQ ID NO: 169213 - DNA, 74 bp, Homo sapiens
ctacctcttgtaatttctccctaatcagtctccacttttctgcctctcaatccttcaatctccttctatatccc

SEQ ID NO: 169214 - DNA, 73 bp, Homo sapiens
cacttttctgcctctcaatccttcaatctccttctatatcccctactacacttaagttccttaagtgccagga

SEQ ID NO: 169215 - DNA, 73 bp, Homo sapiens
cctctcaatccttcaatctccttctatatcccctactacacttaagttccttaagtgccaggactgtgtcttc

SEQ ID NO: 169216 - DNA, 72 bp, Homo sapiens
cttcaatctccttctatatcccctactacacttaagttccttaagtgccaggactgtgtcttcctctcttta

SEQ ID NO: 169217 - DNA, 68 bp, Homo sapiens
ccctactacacttaagttccttaagtgccaggactgtgtcttcctctctttaaaacccctgctacgct

SEQ ID NO: 169218 - DNA, 68 bp, Homo sapiens
acttaagttccttaagtgccaggactgtgtcttcctctctttaaaacccctgctacgcttagtagaaa

SEQ ID NO: 169219 - DNA, 70 bp, Homo sapiens
ttaagtgccaggactgtgtcttcctctctttaaaacccctgctacgcttagtagaaagtcgttcccagaa

SEQ ID NO: 169220 - DNA, 68 bp, Homo sapiens
ttcctctctttaaaacccctgctacgcttagtagaaagtcgttcccagaatcagtactcaaatatttt

SEQ ID NO: 169221 - DNA, 68 bp, Homo sapiens
ctctttaaaacccctgctacgcttagtagaaagtcgttcccagaatcagtactcaaatatttttatat

SEQ ID NO: 169222 - DNA, 72 bp, Homo sapiens
cctgctacgcttagtagaaagtcgttcccagaatcagtactcaaatatttttatattgaattgaatcctgtt

SEQ ID NO: 169223 - DNA, 75 bp, Homo sapiens
gcttagtagaaagtcgttcccagaatcagtactcaaatatttttatattgaattgaatcctgtttattgtgcagc

SEQ ID NO: 169224 - DNA, 75 bp, Homo sapiens
gtcgttcccagaatcagtactcaaatatttttatattgaattgaatcctgtttattgtgcagccactaaaactca

SEQ ID NO: 169225 - DNA, 76 bp, Homo sapiens
tattgaattgaatcctgtttattgtgcagccactaaaactcaaaagttatactttgagaggatacctatatagcca

SEQ ID NO: 169226 - DNA, 72 bp, Homo sapiens
aatcctgtttattgtgcagccactaaaactcaaaagttatactttgagaggatacctatatagccacttaag

SEQ ID NO: 169227 - DNA, 72 bp, Homo sapiens
gcagccactaaaactcaaaagttatactttgagaggatacctatatagccacttaagttcagtagattttat

SEQ ID NO: 169228 - DNA, 67 bp, Homo sapiens
aaactcaaaagttatactttgagaggatacctatatagccacttaagttcagtagattttatttttt

SEQ ID NO: 169229 - DNA, 69 bp, Homo sapiens
tactttgagaggatacctatatagccacttaagttcagtagattttatttttttcaggtacttttagac

SEQ ID NO: 169230 - DNA, 70 bp, Homo sapiens
ggatacctatatagccacttaagttcagtagattttatttttttcaggtacttttagacggtgcagcaac

SEQ ID NO: 169231 - DNA, 67 bp, Homo sapiens
attttatttttttcaggtacttttagacggtgcagcaacttcatggaggtcagaaaatttaagtggg

SEQ ID NO: 169232 - DNA, 70 bp, Homo sapiens
tttcaggtacttttagacggtgcagcaacttcatggaggtcagaaaatttaagtgggtccaaggaaatta

SEQ ID NO: 169233 - DNA, 71 bp, Homo sapiens
tacttttagacggtgcagcaacttcatggaggtcagaaaatttaagtgggtccaaggaaattactcaaata

SEQ ID NO: 169234 - DNA, 69 bp, Homo sapiens
acggtgcagcaacttcatggaggtcagaaaatttaagtgggtccaaggaaattactcaaataatttaaa

SEQ ID NO: 169235 - DNA, 70 bp, Homo sapiens
cttcatggaggtcagaaaatttaagtgggtccaaggaaattactcaaataatttaaactgaacatgcctg

SEQ ID NO: 169236 - DNA, 70 bp, Homo sapiens
gaggtcagaaaatttaagtgggtccaaggaaattactcaaataatttaaactgaacatgcctgtattaca

SEQ ID NO: 169237 - DNA, 70 bp, Homo sapiens
ttaagtgggtccaaggaaattactcaaataatttaaactgaacatgcctgtattacataggaagcctacc

SEQ ID NO: 169238 - DNA, 73 bp, Homo sapiens
aaggaaattactcaaataatttaaactgaacatgcctgtattacataggaagcctaccccatggcctgtgctc

SEQ ID NO: 169239 - DNA, 74 bp, Homo sapiens
attactcaaataatttaaactgaacatgcctgtattacataggaagcctaccccatggcctgtgctctcctaaa

SEQ ID NO: 169240 - DNA, 76 bp, Homo sapiens
taatttaaactgaacatgcctgtattacataggaagcctaccccatggcctgtgctctcctaaagaacacagatat

SEQ ID NO: 169241 - DNA, 75 bp, Homo sapiens
aacatgcctgtattacataggaagcctaccccatggcctgtgctctcctaaagaacacagatatttcacccctac

SEQ ID NO: 169242 - DNA, 76 bp, Homo sapiens
tattacataggaagcctaccccatggcctgtgctctcctaaagaacacagatatttcacccctacctgccgactca

SEQ ID NO: 169243 - DNA, 77 bp, Homo sapiens
aagcctaccccatggcctgtgctctcctaaagaacacagatatttcacccctacctgccgactcatgtatcatttca

SEQ ID NO: 169244 - DNA, 79 bp, Homo sapiens
atggcctgtgctctcctaaagaacacagatatttcacccctacctgccgactcatgtatcatttcagactgtcaccacc

SEQ ID NO: 169245 - DNA, 77 bp, Homo sapiens
ctctcctaaagaacacagatatttcacccctacctgccgactcatgtatcatttcagactgtcaccaccttgaaaga

SEQ ID NO: 169246 - DNA, 75 bp, Homo sapiens
ctaaagaacacagatatttcacccctacctgccgactcatgtatcatttcagactgtcaccaccttgaaagaaaa

SEQ ID NO: 169247 - DNA, 78 bp, Homo sapiens
tacctgccgactcatgtatcatttcagactgtcaccaccttgaaagaaaagaatgatttgtatcacacatttgacttt

SEQ ID NO: 169248 - DNA, 77 bp, Homo sapiens
ccgactcatgtatcatttcagactgtcaccaccttgaaagaaaagaatgatttgtatcacacatttgacttttaata

SEQ ID NO: 169249 - DNA, 76 bp, Homo sapiens
agactgtcaccaccttgaaagaaaagaatgatttgtatcacacatttgacttttaatatgttcatggatactagtg

SEQ ID NO: 169250 - DNA, 76 bp, Homo sapiens
tgaaagaaaagaatgatttgtatcacacatttgacttttaatatgttcatggatactagtgtaacttgtaccagct

SEQ ID NO: 169251 - DNA, 79 bp, Homo sapiens
agaatgatttgtatcacacatttgacttttaatatgttcatggatactagtgtaacttgtaccagcttaactcactgca

SEQ ID NO: 169252 - DNA, 74 bp, Homo sapiens
atttgacttttaatatgttcatggatactagtgtaacttgtaccagcttaactcactgcaggggaatgaggaaa

SEQ ID NO: 169253 - DNA, 77 bp, Homo sapiens
ttttaatatgttcatggatactagtgtaacttgtaccagcttaactcactgcaggggaatgaggaaagctgacaaga

SEQ ID NO: 169254 - DNA, 77 bp, Homo sapiens
ttcatggatactagtgtaacttgtaccagcttaactcactgcaggggaatgaggaaagctgacaagacaagtcttcg

SEQ ID NO: 169255 - DNA, 79 bp, Homo sapiens
ttgtaccagcttaactcactgcaggggaatgaggaaagctgacaagacaagtcttcggtatgtgtgctgcttactaaga

SEQ ID NO: 169256 - DNA, 79 bp, Homo sapiens
ttaactcactgcaggggaatgaggaaagctgacaagacaagtcttcggtatgtgtgctgcttactaagagaaatgtgga

SEQ ID NO: 169257 - DNA, 79 bp, Homo sapiens
aagctgacaagacaagtcttcggtatgtgtgctgcttactaagagaaatgtggaagcagattctagatcacggtttata

SEQ ID NO: 169258 - DNA, 77 bp, Homo sapiens
aagacaagtcttcggtatgtgtgctgcttactaagagaaatgtggaagcagattctagatcacggtttataataaga

SEQ ID NO: 169259 - DNA, 78 bp, Homo sapiens
ttcggtatgtgtgctgcttactaagagaaatgtggaagcagattctagatcacggtttataataagactctcaaataa

SEQ ID NO: 169260 - DNA, 78 bp, Homo sapiens
tgtgctgcttactaagagaaatgtggaagcagattctagatcacggtttataataagactctcaaataatgcccctta

SEQ ID NO: 169261 - DNA, 76 bp, Homo sapiens
tactaagagaaatgtggaagcagattctagatcacggtttataataagactctcaaataatgccccttagtatgaa

SEQ ID NO: 169262 - DNA, 78 bp, Homo sapiens
tggaagcagattctagatcacggtttataataagactctcaaataatgccccttagtatgaacacatgattaatacaa

SEQ ID NO: 169263 - DNA, 77 bp, Homo sapiens
gcagattctagatcacggtttataataagactctcaaataatgccccttagtatgaacacatgattaatacaaagat

SEQ ID NO: 169264 - DNA, 73 bp, Homo sapiens
gatcacggtttataataagactctcaaataatgccccttagtatgaacacatgattaatacaaagattaaaaa

SEQ ID NO: 169265 - DNA, 71 bp, Homo sapiens
taataagactctcaaataatgccccttagtatgaacacatgattaatacaaagattaaaaaaaatttaaga

SEQ ID NO: 169266 - DNA, 75 bp, Homo sapiens
ccacagtgcctggccaagatttttaatattactgcagcctgactgttagtttaccttcagcaaatgcctgttttg

SEQ ID NO: 169267 - DNA, 74 bp, Homo sapiens
tggccaagatttttaatattactgcagcctgactgttagtttaccttcagcaaatgcctgttttgggtatctta

SEQ ID NO: 169268 - DNA, 73 bp, Homo sapiens
ttttaatattactgcagcctgactgttagtttaccttcagcaaatgcctgttttgggtatcttatatctaaaa

SEQ ID NO: 169269 - DNA, 74 bp, Homo sapiens
atattactgcagcctgactgttagtttaccttcagcaaatgcctgttttgggtatcttatatctaaaatgagtt

SEQ ID NO: 169270 - DNA, 71 bp, Homo sapiens
cctgactgttagtttaccttcagcaaatgcctgttttgggtatcttatatctaaaatgagtttaaaagcac

SEQ ID NO: 169271 - DNA, 74 bp, Homo sapiens
ttaccttcagcaaatgcctgttttgggtatcttatatctaaaatgagtttaaaagcactaaaacatagcagtca

SEQ ID NO: 169272 - DNA, 73 bp, Homo sapiens
cagcaaatgcctgttttgggtatcttatatctaaaatgagtttaaaagcactaaaacatagcagtcaaaacca

SEQ ID NO: 169273 - DNA, 70 bp, Homo sapiens
gcctgttttgggtatcttatatctaaaatgagtttaaaagcactaaaacatagcagtcaaaaccaagaaa

SEQ ID NO: 169274 - DNA, 72 bp, Homo sapiens
cttatatctaaaatgagtttaaaagcactaaaacatagcagtcaaaaccaagaaagacttaacatgcagcct

SEQ ID NO: 169275 - DNA, 73 bp, Homo sapiens
atctaaaatgagtttaaaagcactaaaacatagcagtcaaaaccaagaaagacttaacatgcagccttgacta

SEQ ID NO: 169276 - DNA, 74 bp, Homo sapiens
aaatgagtttaaaagcactaaaacatagcagtcaaaaccaagaaagacttaacatgcagccttgactagcacta

SEQ ID NO: 169277 - DNA, 75 bp, Homo sapiens
agtttaaaagcactaaaacatagcagtcaaaaccaagaaagacttaacatgcagccttgactagcactacataga

SEQ ID NO: 169278 - DNA, 76 bp, Homo sapiens
tttaaaagcactaaaacatagcagtcaaaaccaagaaagacttaacatgcagccttgactagcactacatagaaca

SEQ ID NO: 169279 - DNA, 77 bp, Homo sapiens
agcactaaaacatagcagtcaaaaccaagaaagacttaacatgcagccttgactagcactacatagaacagtgttta

SEQ ID NO: 169280 - DNA, 75 bp, Homo sapiens
aaacatagcagtcaaaaccaagaaagacttaacatgcagccttgactagcactacatagaacagtgtttaggtta

SEQ ID NO: 169281 - DNA, 75 bp, Homo sapiens
tagcagtcaaaaccaagaaagacttaacatgcagccttgactagcactacatagaacagtgtttaggttaaagaa

SEQ ID NO: 169282 - DNA, 76 bp, Homo sapiens
aaaaccaagaaagacttaacatgcagccttgactagcactacatagaacagtgtttaggttaaagaatgcagctgc

SEQ ID NO: 169283 - DNA, 79 bp, Homo sapiens
aagaaagacttaacatgcagccttgactagcactacatagaacagtgtttaggttaaagaatgcagctgccatacaaca

SEQ ID NO: 169284 - DNA, 79 bp, Homo sapiens
agacttaacatgcagccttgactagcactacatagaacagtgtttaggttaaagaatgcagctgccatacaacaacaaa

SEQ ID NO: 169285 - DNA, 78 bp, Homo sapiens
aacatgcagccttgactagcactacatagaacagtgtttaggttaaagaatgcagctgccatacaacaacaaataaaa

SEQ ID NO: 169286 - DNA, 75 bp, Homo sapiens
cttgactagcactacatagaacagtgtttaggttaaagaatgcagctgccatacaacaacaaataaaacagaaaa

SEQ ID NO: 169287 - DNA, 73 bp, Homo sapiens
ctacatagaacagtgtttaggttaaagaatgcagctgccatacaacaacaaataaaacagaaaacacaaattg

SEQ ID NO: 169288 - DNA, 75 bp, Homo sapiens
cagtgtttaggttaaagaatgcagctgccatacaacaacaaataaaacagaaaacacaaattggattggatgaca

SEQ ID NO: 169289 - DNA, 76 bp, Homo sapiens
aaagaatgcagctgccatacaacaacaaataaaacagaaaacacaaattggattggatgacagtaaatatctggag

SEQ ID NO: 169290 - DNA, 76 bp, Homo sapiens
ctgccatacaacaacaaataaaacagaaaacacaaattggattggatgacagtaaatatctggaggcatggaataa

SEQ ID NO: 169291 - DNA, 73 bp, Homo sapiens
aaacagaaaacacaaattggattggatgacagtaaatatctggaggcatggaataataaatgacgggagtaac

SEQ ID NO: 169292 - DNA, 75 bp, Homo sapiens
aaaacacaaattggattggatgacagtaaatatctggaggcatggaataataaatgacgggagtaaccatgaggc

SEQ ID NO: 169293 - DNA, 78 bp, Homo sapiens
attggatgacagtaaatatctggaggcatggaataataaatgacgggagtaaccatgaggcccagtgaggtcttcaga

SEQ ID NO: 169294 - DNA, 79 bp, Homo sapiens
acagtaaatatctggaggcatggaataataaatgacgggagtaaccatgaggcccagtgaggtcttcagaatgatatga

SEQ ID NO: 169295 - DNA, 79 bp, Homo sapiens
atatctggaggcatggaataataaatgacgggagtaaccatgaggcccagtgaggtcttcagaatgatatgatgtttaa

SEQ ID NO: 169296 - DNA, 80 bp, Homo sapiens
gaataataaatgacgggagtaaccatgaggcccagtgaggtcttcagaatgatatgatgtttaagcatctgattttatga

SEQ ID NO: 169297 - DNA, 80 bp, Homo sapiens
ataaatgacgggagtaaccatgaggcccagtgaggtcttcagaatgatatgatgtttaagcatctgattttatgacatta

SEQ ID NO: 169298 - DNA, 83 bp, Homo sapiens
taaccatgaggcccagtgaggtcttcagaatgatatgatgtttaagcatctgattttatgacattatgcagggaagaataaga

SEQ ID NO: 169299 - DNA, 82 bp, Homo sapiens
cccagtgaggtcttcagaatgatatgatgtttaagcatctgattttatgacattatgcagggaagaataagaatatactcaa

SEQ ID NO: 169300 - DNA, 81 bp, Homo sapiens
aggtcttcagaatgatatgatgtttaagcatctgattttatgacattatgcagggaagaataagaatatactcaaccaagc

SEQ ID NO: 169301 - DNA, 83 bp, Homo sapiens
agaatgatatgatgtttaagcatctgattttatgacattatgcagggaagaataagaatatactcaaccaagcgctgggcagc

SEQ ID NO: 169302 - DNA, 79 bp, Homo sapiens
atgtttaagcatctgattttatgacattatgcagggaagaataagaatatactcaaccaagcgctgggcagcgggtatg

SEQ ID NO: 169303 - DNA, 80 bp, Homo sapiens
tatgacattatgcagggaagaataagaatatactcaaccaagcgctgggcagcgggtatgtgggatggatgttaaatgga

SEQ ID NO: 169304 - DNA, 75 bp, Homo sapiens
agggaagaataagaatatactcaaccaagcgctgggcagcgggtatgtgggatggatgttaaatggattggacag

SEQ ID NO: 169305 - DNA, 75 bp, Homo sapiens
aataagaatatactcaaccaagcgctgggcagcgggtatgtgggatggatgttaaatggattggacagggaagtc

SEQ ID NO: 169306 - DNA, 76 bp, Homo sapiens
aaccaagcgctgggcagcgggtatgtgggatggatgttaaatggattggacagggaagtcctgacaatggccttca

SEQ ID NO: 169307 - DNA, 75 bp, Homo sapiens
tgggcagcgggtatgtgggatggatgttaaatggattggacagggaagtcctgacaatggccttcaagaaccctc

SEQ ID NO: 169308 - DNA, 77 bp, Homo sapiens
ggtatgtgggatggatgttaaatggattggacagggaagtcctgacaatggccttcaagaaccctccatgagctatc

SEQ ID NO: 169309 - DNA, 76 bp, Homo sapiens
ttaaatggattggacagggaagtcctgacaatggccttcaagaaccctccatgagctatctgcccctcacgctccc

SEQ ID NO: 169310 - DNA, 79 bp, Homo sapiens
ttggacagggaagtcctgacaatggccttcaagaaccctccatgagctatctgcccctcacgctccctgctactctctg

SEQ ID NO: 169311 - DNA, 81 bp, Homo sapiens
aagtcctgacaatggccttcaagaaccctccatgagctatctgcccctcacgctccctgctactctctggtctcatctcca

SEQ ID NO: 169312 - DNA, 81 bp, Homo sapiens
aagaaccctccatgagctatctgcccctcacgctccctgctactctctggtctcatctccaggtgttctttcatcctcata

SEQ ID NO: 169313 - DNA, 81 bp, Homo sapiens
atgagctatctgcccctcacgctccctgctactctctggtctcatctccaggtgttctttcatcctcataccagtctaacc

SEQ ID NO: 169314 - DNA, 78 bp, Homo sapiens
cctcacgctccctgctactctctggtctcatctccaggtgttctttcatcctcataccagtctaacctggccacgttg

SEQ ID NO: 169315 - DNA, 77 bp, Homo sapiens
cctgctactctctggtctcatctccaggtgttctttcatcctcataccagtctaacctggccacgttgtctttcttc

SEQ ID NO: 169316 - DNA, 76 bp, Homo sapiens
tactctctggtctcatctccaggtgttctttcatcctcataccagtctaacctggccacgttgtctttcttcccat

SEQ ID NO: 169317 - DNA, 73 bp, Homo sapiens
atctccaggtgttctttcatcctcataccagtctaacctggccacgttgtctttcttcccattcctcaaacaa

SEQ ID NO: 169318 - DNA, 73 bp, Homo sapiens
aggtgttctttcatcctcataccagtctaacctggccacgttgtctttcttcccattcctcaaacaatccaca

SEQ ID NO: 169319 - DNA, 73 bp, Homo sapiens
atcctcataccagtctaacctggccacgttgtctttcttcccattcctcaaacaatccacaccacactctacc

SEQ ID NO: 169320 - DNA, 72 bp, Homo sapiens
accagtctaacctggccacgttgtctttcttcccattcctcaaacaatccacaccacactctaccctctgcc

SEQ ID NO: 169321 - DNA, 73 bp, Homo sapiens
ccacgttgtctttcttcccattcctcaaacaatccacaccacactctaccctctgcctggaaggtgcttctcc

SEQ ID NO: 169322 - DNA, 77 bp, Homo sapiens
tttcttcccattcctcaaacaatccacaccacactctaccctctgcctggaaggtgcttctcccatatatctctaca

SEQ ID NO: 169323 - DNA, 78 bp, Homo sapiens
attcctcaaacaatccacaccacactctaccctctgcctggaaggtgcttctcccatatatctctacatggccgcttc

SEQ ID NO: 169324 - DNA, 78 bp, Homo sapiens
aaacaatccacaccacactctaccctctgcctggaaggtgcttctcccatatatctctacatggccgcttccctcatc

SEQ ID NO: 169325 - DNA, 79 bp, Homo sapiens
tatatctctacatggccgcttccctcatctccctcaaatctctgctcaaaagtcccttctcaaagaggtgcatttcaat

SEQ ID NO: 169326 - DNA, 73 bp, Homo sapiens
ccgcttccctcatctccctcaaatctctgctcaaaagtcccttctcaaagaggtgcatttcaattacccaaat

SEQ ID NO: 169327 - DNA, 74 bp, Homo sapiens
tcatctccctcaaatctctgctcaaaagtcccttctcaaagaggtgcatttcaattacccaaatttaaactgta

SEQ ID NO: 169328 - DNA, 69 bp, Homo sapiens
ctcaaaagtcccttctcaaagaggtgcatttcaattacccaaatttaaactgtaacctgacccctgctc

SEQ ID NO: 169329 - DNA, 71 bp, Homo sapiens
cttctcaaagaggtgcatttcaattacccaaatttaaactgtaacctgacccctgctccaacagccctaca

SEQ ID NO: 169330 - DNA, 69 bp, Homo sapiens
aaagaggtgcatttcaattacccaaatttaaactgtaacctgacccctgctccaacagccctacagacc

SEQ ID NO: 169331 - DNA, 68 bp, Homo sapiens
atttcaattacccaaatttaaactgtaacctgacccctgctccaacagccctacagaccctccttatc

SEQ ID NO: 169332 - DNA, 69 bp, Homo sapiens
aatttaaactgtaacctgacccctgctccaacagccctacagaccctccttatcctgattttccataat

SEQ ID NO: 169333 - DNA, 72 bp, Homo sapiens
aaactgtaacctgacccctgctccaacagccctacagaccctccttatcctgattttccataattatcacca

SEQ ID NO: 169334 - DNA, 74 bp, Homo sapiens
ccctgctccaacagccctacagaccctccttatcctgattttccataattatcaccatccaacaaaccacagaa

SEQ ID NO: 169335 - DNA, 74 bp, Homo sapiens
acagccctacagaccctccttatcctgattttccataattatcaccatccaacaaaccacagaactcacttata

SEQ ID NO: 169336 - DNA, 73 bp, Homo sapiens
ctacagaccctccttatcctgattttccataattatcaccatccaacaaaccacagaactcacttatatttta

SEQ ID NO: 169337 - DNA, 76 bp, Homo sapiens
ttccataattatcaccatccaacaaaccacagaactcacttatattttatgtttatcatttattgtctgctcctgt

SEQ ID NO: 169338 - DNA, 74 bp, Homo sapiens
atccaacaaaccacagaactcacttatattttatgtttatcatttattgtctgctcctgttcactcccacaccc

SEQ ID NO: 169339 - DNA, 75 bp, Homo sapiens
agaactcacttatattttatgtttatcatttattgtctgctcctgttcactcccacaccccacccacctcacata

SEQ ID NO: 169340 - DNA, 77 bp, Homo sapiens
tatattttatgtttatcatttattgtctgctcctgttcactcccacaccccacccacctcacatacactagaatgta

SEQ ID NO: 169341 - DNA, 75 bp, Homo sapiens
tttatgtttatcatttattgtctgctcctgttcactcccacaccccacccacctcacatacactagaatgtaagt

SEQ ID NO: 169342 - DNA, 76 bp, Homo sapiens
tattgtctgctcctgttcactcccacaccccacccacctcacatacactagaatgtaagttctatgagggcaaaaa

SEQ ID NO: 169343 - DNA, 75 bp, Homo sapiens
tctgctcctgttcactcccacaccccacccacctcacatacactagaatgtaagttctatgagggcaaaaaatgt

SEQ ID NO: 169344 - DNA, 72 bp, Homo sapiens
tcccacaccccacccacctcacatacactagaatgtaagttctatgagggcaaaaaatgttgcctgttttat

SEQ ID NO: 169345 - DNA, 76 bp, Homo sapiens
ccacccacctcacatacactagaatgtaagttctatgagggcaaaaaatgttgcctgttttattcactgattcatc

SEQ ID NO: 169346 - DNA, 75 bp, Homo sapiens
acatacactagaatgtaagttctatgagggcaaaaaatgttgcctgttttattcactgattcatcccagtaacta

SEQ ID NO: 169347 - DNA, 73 bp, Homo sapiens
ctagaatgtaagttctatgagggcaaaaaatgttgcctgttttattcactgattcatcccagtaactagaaaa

SEQ ID NO: 169348 - DNA, 74 bp, Homo sapiens
gttctatgagggcaaaaaatgttgcctgttttattcactgattcatcccagtaactagaaaaaagtatagcatg

SEQ ID NO: 169349 - DNA, 73 bp, Homo sapiens
ggcaaaaaatgttgcctgttttattcactgattcatcccagtaactagaaaaaagtatagcatgtattaagag

SEQ ID NO: 169350 - DNA, 74 bp, Homo sapiens
aatgttgcctgttttattcactgattcatcccagtaactagaaaaaagtatagcatgtattaagagttcaataa

SEQ ID NO: 169351 - DNA, 79 bp, Homo sapiens
attcactgattcatcccagtaactagaaaaaagtatagcatgtattaagagttcaataaatacttgctgcatgactgat

SEQ ID NO: 169352 - DNA, 78 bp, Homo sapiens
ctgattcatcccagtaactagaaaaaagtatagcatgtattaagagttcaataaatacttgctgcatgactgattaaa

SEQ ID NO: 169353 - DNA, 79 bp, Homo sapiens
ccagtaactagaaaaaagtatagcatgtattaagagttcaataaatacttgctgcatgactgattaaatgaatatatga

SEQ ID NO: 169354 - DNA, 82 bp, Homo sapiens
aagtatagcatgtattaagagttcaataaatacttgctgcatgactgattaaatgaatatatgacttacagacctatcataa

SEQ ID NO: 169355 - DNA, 81 bp, Homo sapiens
atacttgctgcatgactgattaaatgaatatatgacttacagacctatcataactgagctacagggtatttttatgaaaca

SEQ ID NO: 169356 - DNA, 84 bp, Homo sapiens
catgactgattaaatgaatatatgacttacagacctatcataactgagctacagggtatttttatgaaacatgcatcatccata

SEQ ID NO: 169357 - DNA, 82 bp, Homo sapiens
aaatgaatatatgacttacagacctatcataactgagctacagggtatttttatgaaacatgcatcatccatattatgtgta

SEQ ID NO: 169358 - DNA, 80 bp, Homo sapiens
atatgacttacagacctatcataactgagctacagggtatttttatgaaacatgcatcatccatattatgtgtaaaacac

SEQ ID NO: 169359 - DNA, 79 bp, Homo sapiens
taactgagctacagggtatttttatgaaacatgcatcatccatattatgtgtaaaacactgtactaggcactatggatt

SEQ ID NO: 169360 - DNA, 66 bp, Homo sapiens
aaaaaaaagatacaaaggaagaaaagacaagagtccttaacctcaaacaatttgctccaaaattgc

SEQ ID NO: 169361 - DNA, 69 bp, Homo sapiens
gatacaaaggaagaaaagacaagagtccttaacctcaaacaatttgctccaaaattgcctcttaggtta

SEQ ID NO: 169362 - DNA, 68 bp, Homo sapiens
gaaaagacaagagtccttaacctcaaacaatttgctccaaaattgcctcttaggttattttaggacac

SEQ ID NO: 169363 - DNA, 68 bp, Homo sapiens
acaagagtccttaacctcaaacaatttgctccaaaattgcctcttaggttattttaggacaccacacc

SEQ ID NO: 169364 - DNA, 69 bp, Homo sapiens
taacctcaaacaatttgctccaaaattgcctcttaggttattttaggacaccacacccacttaatctta

SEQ ID NO: 169365 - DNA, 68 bp, Homo sapiens
aatttgctccaaaattgcctcttaggttattttaggacaccacacccacttaatcttatctacccact

SEQ ID NO: 169366 - DNA, 68 bp, Homo sapiens
aaaattgcctcttaggttattttaggacaccacacccacttaatcttatctacccacttcctccaaca

SEQ ID NO: 169367 - DNA, 71 bp, Homo sapiens
taggttattttaggacaccacacccacttaatcttatctacccacttcctccaacatctgctacagacctt

SEQ ID NO: 169368 - DNA, 73 bp, Homo sapiens
acacccacttaatcttatctacccacttcctccaacatctgctacagacctttgtaaactgcacaagtttaca

SEQ ID NO: 169369 - DNA, 79 bp, Homo sapiens
ttcctccaacatctgctacagacctttgtaaactgcacaagtttacaatggaaaggatgcatgtcagggatctgagctt

SEQ ID NO: 169370 - DNA, 80 bp, Homo sapiens
ttgtaaactgcacaagtttacaatggaaaggatgcatgtcagggatctgagctttgagcagctgagtagtcctttaagaa

SEQ ID NO: 169371 - DNA, 78 bp, Homo sapiens
aactgcacaagtttacaatggaaaggatgcatgtcagggatctgagctttgagcagctgagtagtcctttaagaaaag

SEQ ID NO: 169372 - DNA, 76 bp, Homo sapiens
aaaggatgcatgtcagggatctgagctttgagcagctgagtagtcctttaagaaaagttctcacataattttttta

SEQ ID NO: 169373 - DNA, 75 bp, Homo sapiens
atgtcagggatctgagctttgagcagctgagtagtcctttaagaaaagttctcacataatttttttacaactcca

SEQ ID NO: 169374 - DNA, 77 bp, Homo sapiens
tctgagctttgagcagctgagtagtcctttaagaaaagttctcacataatttttttacaactccattgcactgctta

SEQ ID NO: 169375 - DNA, 76 bp, Homo sapiens
gctttgagcagctgagtagtcctttaagaaaagttctcacataatttttttacaactccattgcactgcttatcaa

SEQ ID NO: 169376 - DNA, 74 bp, Homo sapiens
agcagctgagtagtcctttaagaaaagttctcacataatttttttacaactccattgcactgcttatcaagaag

SEQ ID NO: 169377 - DNA, 72 bp, Homo sapiens
gtagtcctttaagaaaagttctcacataatttttttacaactccattgcactgcttatcaagaaggaccaca

SEQ ID NO: 169378 - DNA, 71 bp, Homo sapiens
cctttaagaaaagttctcacataatttttttacaactccattgcactgcttatcaagaaggaccacataaa

SEQ ID NO: 169379 - DNA, 71 bp, Homo sapiens
aagaaaagttctcacataatttttttacaactccattgcactgcttatcaagaaggaccacataaaaagta

SEQ ID NO: 169380 - DNA, 75 bp, Homo sapiens
ctcacataatttttttacaactccattgcactgcttatcaagaaggaccacataaaaagtataacttgtgtatgc

SEQ ID NO: 169381 - DNA, 79 bp, Homo sapiens
aactccattgcactgcttatcaagaaggaccacataaaaagtataacttgtgtatgctcaatatctgctgttatcaaaa

SEQ ID NO: 169382 - DNA, 81 bp, Homo sapiens
ttgcactgcttatcaagaaggaccacataaaaagtataacttgtgtatgctcaatatctgctgttatcaaaatgttgtcaa

SEQ ID NO: 169383 - DNA, 77 bp, Homo sapiens
gaccacataaaaagtataacttgtgtatgctcaatatctgctgttatcaaaatgttgtcaaacgtttagctcaccaa

SEQ ID NO: 169384 - DNA, 78 bp, Homo sapiens
agtataacttgtgtatgctcaatatctgctgttatcaaaatgttgtcaaacgtttagctcaccaaatgaactaattca

SEQ ID NO: 169385 - DNA, 79 bp, Homo sapiens
gtgtatgctcaatatctgctgttatcaaaatgttgtcaaacgtttagctcaccaaatgaactaattcaaatgatccatt

SEQ ID NO: 169386 - DNA, 77 bp, Homo sapiens
caatatctgctgttatcaaaatgttgtcaaacgtttagctcaccaaatgaactaattcaaatgatccattttcaata

SEQ ID NO: 169387 - DNA, 73 bp, Homo sapiens
ctgttatcaaaatgttgtcaaacgtttagctcaccaaatgaactaattcaaatgatccattttcaataaacaa

SEQ ID NO: 169388 - DNA, 70 bp, Homo sapiens
aatgttgtcaaacgtttagctcaccaaatgaactaattcaaatgatccattttcaataaacaattaactt

SEQ ID NO: 169389 - DNA, 70 bp, Homo sapiens
aactttaaatgtaaacatttacaactgatagactgcttaaatgaacattcaatacacttgttttagacgt

SEQ ID NO: 169390 - DNA, 71 bp, Homo sapiens
gtaaacatttacaactgatagactgcttaaatgaacattcaatacacttgttttagacgtttaaggacttc

SEQ ID NO: 169391 - DNA, 73 bp, Homo sapiens
tacaactgatagactgcttaaatgaacattcaatacacttgttttagacgtttaaggacttctagtttcctca

SEQ ID NO: 169392 - DNA, 71 bp, Homo sapiens
gatagactgcttaaatgaacattcaatacacttgttttagacgtttaaggacttctagtttcctcaaaata

SEQ ID NO: 169393 - DNA, 71 bp, Homo sapiens
atgaacattcaatacacttgttttagacgtttaaggacttctagtttcctcaaaatataaatgaggtgtca

SEQ ID NO: 169394 - DNA, 70 bp, Homo sapiens
cattcaatacacttgttttagacgtttaaggacttctagtttcctcaaaatataaatgaggtgtcagtaa

SEQ ID NO: 169395 - DNA, 69 bp, Homo sapiens
gacgtttaaggacttctagtttcctcaaaatataaatgaggtgtcagtaaataacatataggccctatt

SEQ ID NO: 169396 - DNA, 70 bp, Homo sapiens
gacttctagtttcctcaaaatataaatgaggtgtcagtaaataacatataggccctatttcctttcaatt

SEQ ID NO: 169397 - DNA, 73 bp, Homo sapiens
aatgaggtgtcagtaaataacatataggccctatttcctttcaattttatcaaggaaaaagtgtgtcagatca

SEQ ID NO: 169398 - DNA, 73 bp, Homo sapiens
gtgtcagtaaataacatataggccctatttcctttcaattttatcaaggaaaaagtgtgtcagatcattatta

SEQ ID NO: 169399 - DNA, 72 bp, Homo sapiens
ccctatttcctttcaattttatcaaggaaaaagtgtgtcagatcattattaaaccctgtgtatgcaacgtga

SEQ ID NO: 169400 - DNA, 75 bp, Homo sapiens
caattttatcaaggaaaaagtgtgtcagatcattattaaaccctgtgtatgcaacgtgatttgacaatgaccaaa

SEQ ID NO: 169401 - DNA, 74 bp, Homo sapiens
aaggaaaaagtgtgtcagatcattattaaaccctgtgtatgcaacgtgatttgacaatgaccaaagcttgttac

SEQ ID NO: 169402 - DNA, 76 bp, Homo sapiens
tgtgtcagatcattattaaaccctgtgtatgcaacgtgatttgacaatgaccaaagcttgttacggattttaattc

SEQ ID NO: 169403 - DNA, 74 bp, Homo sapiens
cagatcattattaaaccctgtgtatgcaacgtgatttgacaatgaccaaagcttgttacggattttaattccta

SEQ ID NO: 169404 - DNA, 70 bp, Homo sapiens
ttaaaccctgtgtatgcaacgtgatttgacaatgaccaaagcttgttacggattttaattcctaaaaata

SEQ ID NO: 169405 - DNA, 70 bp, Homo sapiens
atgcaacgtgatttgacaatgaccaaagcttgttacggattttaattcctaaaaatattacaactggcgg

SEQ ID NO: 169406 - DNA, 68 bp, Homo sapiens
tttgacaatgaccaaagcttgttacggattttaattcctaaaaatattacaactggcggggtatggtg

SEQ ID NO: 169407 - DNA, 64 bp, Homo sapiens
aaatttttaaatatatagtacaacatctgttttaaagtttattgtgggaggaagaaagggaggg

SEQ ID NO: 169408 - DNA, 65 bp, Homo sapiens
aaatatatagtacaacatctgttttaaagtttattgtgggaggaagaaagggaggggtggggaaa

SEQ ID NO: 169409 - DNA, 64 bp, Homo sapiens
aacatctgttttaaagtttattgtgggaggaagaaagggaggggtggggaaaagtaagaagata

SEQ ID NO: 169410 - DNA, 64 bp, Homo sapiens
ttttaaagtttattgtgggaggaagaaagggaggggtggggaaaagtaagaagatagaaagaca

SEQ ID NO: 169411 - DNA, 69 bp, Homo sapiens
tattgtgggaggaagaaagggaggggtggggaaaagtaagaagatagaaagacagacagaaccatatat

SEQ ID NO: 169412 - DNA, 69 bp, Homo sapiens
aagaaagggaggggtggggaaaagtaagaagatagaaagacagacagaaccatatatttgacactcaac

SEQ ID NO: 169413 - DNA, 70 bp, Homo sapiens
aggggtggggaaaagtaagaagatagaaagacagacagaaccatatatttgacactcaacctggtctttg

SEQ ID NO: 169414 - DNA, 75 bp, Homo sapiens
aaaagtaagaagatagaaagacagacagaaccatatatttgacactcaacctggtctttggagggtgagatgatg

SEQ ID NO: 169415 - DNA, 77 bp, Homo sapiens
gatagaaagacagacagaaccatatatttgacactcaacctggtctttggagggtgagatgatggtcattttactta

SEQ ID NO: 169416 - DNA, 75 bp, Homo sapiens
acagacagaaccatatatttgacactcaacctggtctttggagggtgagatgatggtcattttacttaagtacat

SEQ ID NO: 169417 - DNA, 77 bp, Homo sapiens
catatatttgacactcaacctggtctttggagggtgagatgatggtcattttacttaagtacattgtatctcgtata

SEQ ID NO: 169418 - DNA, 74 bp, Homo sapiens
acactcaacctggtctttggagggtgagatgatggtcattttacttaagtacattgtatctcgtatatccttta

SEQ ID NO: 169419 - DNA, 75 bp, Homo sapiens
tggagggtgagatgatggtcattttacttaagtacattgtatctcgtatatcctttaatatcctaagaaagcaag

SEQ ID NO: 169420 - DNA, 72 bp, Homo sapiens
ttacttaagtacattgtatctcgtatatcctttaatatcctaagaaagcaagttttgtgagggtgacaaaga

SEQ ID NO: 169421 - DNA, 73 bp, Homo sapiens
gtatctcgtatatcctttaatatcctaagaaagcaagttttgtgagggtgacaaagagctctttctattattg

SEQ ID NO: 169422 - DNA, 71 bp, Homo sapiens
cctttaatatcctaagaaagcaagttttgtgagggtgacaaagagctctttctattattggaatctgaaaa

SEQ ID NO: 169423 - DNA, 75 bp, Homo sapiens
taagaaagcaagttttgtgagggtgacaaagagctctttctattattggaatctgaaaaacatgtgagagaaatg

SEQ ID NO: 169424 - DNA, 74 bp, Homo sapiens
agggtgacaaagagctctttctattattggaatctgaaaaacatgtgagagaaatggtcaaaataaaggccaca

SEQ ID NO: 169425 - DNA, 74 bp, Homo sapiens
aaagagctctttctattattggaatctgaaaaacatgtgagagaaatggtcaaaataaaggccacattggccaa

SEQ ID NO: 169426 - DNA, 74 bp, Homo sapiens
ctttctattattggaatctgaaaaacatgtgagagaaatggtcaaaataaaggccacattggccaagtaactga

SEQ ID NO: 169427 - DNA, 73 bp, Homo sapiens
ttggaatctgaaaaacatgtgagagaaatggtcaaaataaaggccacattggccaagtaactgaaattgaaaa

SEQ ID NO: 169428 - DNA, 71 bp, Homo sapiens
aaaaacatgtgagagaaatggtcaaaataaaggccacattggccaagtaactgaaattgaaaataattaca

SEQ ID NO: 169429 - DNA, 70 bp, Homo sapiens
gtcaaaataaaggccacattggccaagtaactgaaattgaaaataattacaaattgggtattatacaaga

SEQ ID NO: 169430 - DNA, 71 bp, Homo sapiens
ggccaagtaactgaaattgaaaataattacaaattgggtattatacaagataatggtcattgtccttaaga

SEQ ID NO: 169431 - DNA, 73 bp, Homo sapiens
gaaattgaaaataattacaaattgggtattatacaagataatggtcattgtccttaagagacaagagaggaga

SEQ ID NO: 169432 - DNA, 75 bp, Homo sapiens
attacaaattgggtattatacaagataatggtcattgtccttaagagacaagagaggagaaatctagcagtgtag

SEQ ID NO: 169433 - DNA, 78 bp, Homo sapiens
tgggtattatacaagataatggtcattgtccttaagagacaagagaggagaaatctagcagtgtagtttgcaatatta

SEQ ID NO: 169434 - DNA, 80 bp, Homo sapiens
tatacaagataatggtcattgtccttaagagacaagagaggagaaatctagcagtgtagtttgcaatattatagcgccta

SEQ ID NO: 169435 - DNA, 74 bp, Homo sapiens
cttaagagacaagagaggagaaatctagcagtgtagtttgcaatattatagcgcctaagccaaacaaattaaaa

SEQ ID NO: 169436 - DNA, 74 bp, Homo sapiens
aagagaggagaaatctagcagtgtagtttgcaatattatagcgcctaagccaaacaaattaaaatgaggaggta

SEQ ID NO: 169437 - DNA, 75 bp, Homo sapiens
agaaatctagcagtgtagtttgcaatattatagcgcctaagccaaacaaattaaaatgaggaggtatggtggcta

SEQ ID NO: 169438 - DNA, 76 bp, Homo sapiens
agtgtagtttgcaatattatagcgcctaagccaaacaaattaaaatgaggaggtatggtggctacgtcacatgcga

SEQ ID NO: 169439 - DNA, 79 bp, Homo sapiens
tttgcaatattatagcgcctaagccaaacaaattaaaatgaggaggtatggtggctacgtcacatgcgactctgtatca

SEQ ID NO: 169440 - DNA, 80 bp, Homo sapiens
tatagcgcctaagccaaacaaattaaaatgaggaggtatggtggctacgtcacatgcgactctgtatcatgcaggtctct

SEQ ID NO: 169441 - DNA, 79 bp, Homo sapiens
aaacaaattaaaatgaggaggtatggtggctacgtcacatgcgactctgtatcatgcaggtctcttctggaggcctgtg

SEQ ID NO: 169442 - DNA, 82 bp, Homo sapiens
aattaaaatgaggaggtatggtggctacgtcacatgcgactctgtatcatgcaggtctcttctggaggcctgtggcccagca

SEQ ID NO: 169443 - DNA, 85 bp, Homo sapiens
aggtatggtggctacgtcacatgcgactctgtatcatgcaggtctcttctggaggcctgtggcccagcacacctagcacagatta

SEQ ID NO: 169444 - DNA, 86 bp, Homo sapiens
acatgcgactctgtatcatgcaggtctcttctggaggcctgtggcccagcacacctagcacagattagcaaaatgtacctatctca

SEQ ID NO: 169445 - DNA, 87 bp, Homo sapiens
tctgtatcatgcaggtctcttctggaggcctgtggcccagcacacctagcacagattagcaaaatgtacctatctcacctgatcagc

SEQ ID NO: 169446 - DNA, 81 bp, Homo sapiens
tctcttctggaggcctgtggcccagcacacctagcacagattagcaaaatgtacctatctcacctgatcagctggtttttc

SEQ ID NO: 169447 - DNA, 77 bp, Homo sapiens
aggcctgtggcccagcacacctagcacagattagcaaaatgtacctatctcacctgatcagctggtttttctttccc

SEQ ID NO: 169448 - DNA, 78 bp, Homo sapiens
tgtggcccagcacacctagcacagattagcaaaatgtacctatctcacctgatcagctggtttttctttccctctctt

SEQ ID NO: 169449 - DNA, 75 bp, Homo sapiens
acctagcacagattagcaaaatgtacctatctcacctgatcagctggtttttctttccctctctttctagtggaa

SEQ ID NO: 169450 - DNA, 72 bp, Homo sapiens
aaatgtacctatctcacctgatcagctggtttttctttccctctctttctagtggaacacaaatactaccta

SEQ ID NO: 169451 - DNA, 73 bp, Homo sapiens
atcagctggtttttctttccctctctttctagtggaacacaaatactacctaagtctctgtatttgcggcatc

SEQ ID NO: 169452 - DNA, 76 bp, Homo sapiens
ctttccctctctttctagtggaacacaaatactacctaagtctctgtatttgcggcatcctgcagaagagaatgaa

SEQ ID NO: 169453 - DNA, 78 bp, Homo sapiens
aaatactacctaagtctctgtatttgcggcatcctgcagaagagaatgaaaatacatataaggtgtggacagacaata

SEQ ID NO: 169454 - DNA, 84 bp, Homo sapiens
taagtctctgtatttgcggcatcctgcagaagagaatgaaaatacatataaggtgtggacagacaatatctgtgatggcctaca

SEQ ID NO: 169455 - DNA, 82 bp, Homo sapiens
tatttgcggcatcctgcagaagagaatgaaaatacatataaggtgtggacagacaatatctgtgatggcctacaaagtttca

SEQ ID NO: 169456 - DNA, 79 bp, Homo sapiens
tgcagaagagaatgaaaatacatataaggtgtggacagacaatatctgtgatggcctacaaagtttcacaaaggctgtt

SEQ ID NO: 169457 - DNA, 78 bp, Homo sapiens
aatgaaaatacatataaggtgtggacagacaatatctgtgatggcctacaaagtttcacaaaggctgtttctcagcaa

SEQ ID NO: 169458 - DNA, 78 bp, Homo sapiens
aaatacatataaggtgtggacagacaatatctgtgatggcctacaaagtttcacaaaggctgtttctcagcaaggcaa

SEQ ID NO: 169459 - DNA, 78 bp, Homo sapiens
tgtggacagacaatatctgtgatggcctacaaagtttcacaaaggctgtttctcagcaaggcaactatctttttcgaa

SEQ ID NO: 169460 - DNA, 75 bp, Homo sapiens
agacaatatctgtgatggcctacaaagtttcacaaaggctgtttctcagcaaggcaactatctttttcgaattac

SEQ ID NO: 169461 - DNA, 70 bp, Homo sapiens
atggcctacaaagtttcacaaaggctgtttctcagcaaggcaactatctttttcgaattaccctcaaacc

SEQ ID NO: 169462 - DNA, 71 bp, Homo sapiens
ctacaaagtttcacaaaggctgtttctcagcaaggcaactatctttttcgaattaccctcaaacctcacaa

SEQ ID NO: 169463 - DNA, 74 bp, Homo sapiens
ctcagcaaggcaactatctttttcgaattaccctcaaacctcacaagcctatcactcttctaagatggtgttaa

SEQ ID NO: 169464 - DNA, 71 bp, Homo sapiens
atctttttcgaattaccctcaaacctcacaagcctatcactcttctaagatggtgttaagaattcaattgg

SEQ ID NO: 169465 - DNA, 71 bp, Homo sapiens
aaacctcacaagcctatcactcttctaagatggtgttaagaattcaattggggcttacctaaagaaaatga

SEQ ID NO: 169466 - DNA, 73 bp, Homo sapiens
cctatcactcttctaagatggtgttaagaattcaattggggcttacctaaagaaaatgatacatcttaggatg

SEQ ID NO: 169467 - DNA, 75 bp, Homo sapiens
tctaagatggtgttaagaattcaattggggcttacctaaagaaaatgatacatcttaggatgtaaagtcagatgc

SEQ ID NO: 169468 - DNA, 75 bp, Homo sapiens
aattcaattggggcttacctaaagaaaatgatacatcttaggatgtaaagtcagatgccttattctgaactgtga

SEQ ID NO: 169469 - DNA, 77 bp, Homo sapiens
tacctaaagaaaatgatacatcttaggatgtaaagtcagatgccttattctgaactgtgatgcccacctcccaatct

SEQ ID NO: 169470 - DNA, 78 bp, Homo sapiens
aaagaaaatgatacatcttaggatgtaaagtcagatgccttattctgaactgtgatgcccacctcccaatcttctgtg

SEQ ID NO: 169471 - DNA, 77 bp, Homo sapiens
atacatcttaggatgtaaagtcagatgccttattctgaactgtgatgcccacctcccaatcttctgtggcctttttc

SEQ ID NO: 169472 - DNA, 76 bp, Homo sapiens
atgtaaagtcagatgccttattctgaactgtgatgcccacctcccaatcttctgtggcctttttctgtggctttcc

SEQ ID NO: 169473 - DNA, 73 bp, Homo sapiens
agatgccttattctgaactgtgatgcccacctcccaatcttctgtggcctttttctgtggctttccctctttt

SEQ ID NO: 169474 - DNA, 75 bp, Homo sapiens
tattctgaactgtgatgcccacctcccaatcttctgtggcctttttctgtggctttccctctttttctgacattc

SEQ ID NO: 169475 - DNA, 76 bp, Homo sapiens
tcccaatcttctgtggcctttttctgtggctttccctctttttctgacattccagcaagaatacagcagccataaa

SEQ ID NO: 169476 - DNA, 77 bp, Homo sapiens
ttctgtggcctttttctgtggctttccctctttttctgacattccagcaagaatacagcagccataaatgtgacttc

SEQ ID NO: 169477 - DNA, 79 bp, Homo sapiens
tttttctgtggctttccctctttttctgacattccagcaagaatacagcagccataaatgtgacttctctcacagaaca

SEQ ID NO: 169478 - DNA, 85 bp, Homo sapiens
tccctctttttctgacattccagcaagaatacagcagccataaatgtgacttctctcacagaacatgcagatgttaacagctctc

SEQ ID NO: 169479 - DNA, 85 bp, Homo sapiens
tttttctgacattccagcaagaatacagcagccataaatgtgacttctctcacagaacatgcagatgttaacagctctctacagt

SEQ ID NO: 169480 - DNA, 88 bp, Homo sapiens
cagcaagaatacagcagccataaatgtgacttctctcacagaacatgcagatgttaacagctctctacagttctgcaggacatcaaaa

SEQ ID NO: 169481 - DNA, 85 bp, Homo sapiens
agaatacagcagccataaatgtgacttctctcacagaacatgcagatgttaacagctctctacagttctgcaggacatcaaaaaa

SEQ ID NO: 169482 - DNA, 82 bp, Homo sapiens
acttctctcacagaacatgcagatgttaacagctctctacagttctgcaggacatcaaaaaacatttcaagaatctcataag

SEQ ID NO: 169483 - DNA, 82 bp, Homo sapiens
agaacatgcagatgttaacagctctctacagttctgcaggacatcaaaaaacatttcaagaatctcataagtgctgactaaa

SEQ ID NO: 169484 - DNA, 79 bp, Homo sapiens
aacagctctctacagttctgcaggacatcaaaaaacatttcaagaatctcataagtgctgactaaacttgcctgaatta

SEQ ID NO: 169485 - DNA, 75 bp, Homo sapiens
catcaaaaaacatttcaagaatctcataagtgctgactaaacttgcctgaattacccacactacctcctccacat

SEQ ID NO: 169486 - DNA, 74 bp, Homo sapiens
aacatttcaagaatctcataagtgctgactaaacttgcctgaattacccacactacctcctccacattccttaa

SEQ ID NO: 169487 - DNA, 74 bp, Homo sapiens
aagaatctcataagtgctgactaaacttgcctgaattacccacactacctcctccacattccttaagcattatt

SEQ ID NO: 169488 - DNA, 72 bp, Homo sapiens
ataagtgctgactaaacttgcctgaattacccacactacctcctccacattccttaagcattatttgttttc

SEQ ID NO: 169489 - DNA, 73 bp, Homo sapiens
taaacttgcctgaattacccacactacctcctccacattccttaagcattatttgttttcctgaatatctgta

SEQ ID NO: 169490 - DNA, 72 bp, Homo sapiens
aattacccacactacctcctccacattccttaagcattatttgttttcctgaatatctgtaggcaaaacaca

SEQ ID NO: 169491 - DNA, 72 bp, Homo sapiens
actacctcctccacattccttaagcattatttgttttcctgaatatctgtaggcaaaacacaaaacaatcta

SEQ ID NO: 169492 - DNA, 74 bp, Homo sapiens
tccacattccttaagcattatttgttttcctgaatatctgtaggcaaaacacaaaacaatctaccaactgagga

SEQ ID NO: 169493 - DNA, 72 bp, Homo sapiens
ttaagcattatttgttttcctgaatatctgtaggcaaaacacaaaacaatctaccaactgaggaggggaaga

SEQ ID NO: 169494 - DNA, 68 bp, Homo sapiens
aatatctgtaggcaaaacacaaaacaatctaccaactgaggaggggaagaacctctaccccaaaacaa

SEQ ID NO: 169495 - DNA, 67 bp, Homo sapiens
taggcaaaacacaaaacaatctaccaactgaggaggggaagaacctctaccccaaaacaaataccaa

SEQ ID NO: 169496 - DNA, 65 bp, Homo sapiens
aaaacaatctaccaactgaggaggggaagaacctctaccccaaaacaaataccaaataacttatc

SEQ ID NO: 169497 - DNA, 66 bp, Homo sapiens
gaggaggggaagaacctctaccccaaaacaaataccaaataacttatccaacctatatattcaaaa

SEQ ID NO: 169498 - DNA, 67 bp, Homo sapiens
gaagaacctctaccccaaaacaaataccaaataacttatccaacctatatattcaaaaaattatgcc

SEQ ID NO: 169499 - DNA, 69 bp, Homo sapiens
ccaaaacaaataccaaataacttatccaacctatatattcaaaaaattatgcctaacacaataagtcga

SEQ ID NO: 169500 - DNA, 72 bp, Homo sapiens
cttatccaacctatatattcaaaaaattatgcctaacacaataagtcgaactctatttagatattcaatccc

SEQ ID NO: 169501 - DNA, 76 bp, Homo sapiens
tatatattcaaaaaattatgcctaacacaataagtcgaactctatttagatattcaatccccaacactatctgctc

SEQ ID NO: 169502 - DNA, 75 bp, Homo sapiens
aaaaattatgcctaacacaataagtcgaactctatttagatattcaatccccaacactatctgctcctactcata

SEQ ID NO: 169503 - DNA, 78 bp, Homo sapiens
ttatgcctaacacaataagtcgaactctatttagatattcaatccccaacactatctgctcctactcataatcccaca

SEQ ID NO: 169504 - DNA, 76 bp, Homo sapiens
acaataagtcgaactctatttagatattcaatccccaacactatctgctcctactcataatcccacaatccttcta

SEQ ID NO: 169505 - DNA, 74 bp, Homo sapiens
aactctatttagatattcaatccccaacactatctgctcctactcataatcccacaatccttctacagaaagtt

SEQ ID NO: 169506 - DNA, 77 bp, Homo sapiens
ttagatattcaatccccaacactatctgctcctactcataatcccacaatccttctacagaaagtttgagaagctaa

SEQ ID NO: 169507 - DNA, 77 bp, Homo sapiens
ccaacactatctgctcctactcataatcccacaatccttctacagaaagtttgagaagctaaacattacctcataga

SEQ ID NO: 169508 - DNA, 78 bp, Homo sapiens
tatctgctcctactcataatcccacaatccttctacagaaagtttgagaagctaaacattacctcatagactatgaaa

SEQ ID NO: 169509 - DNA, 74 bp, Homo sapiens
cctactcataatcccacaatccttctacagaaagtttgagaagctaaacattacctcatagactatgaaaatag

SEQ ID NO: 169510 - DNA, 74 bp, Homo sapiens
ccttctacagaaagtttgagaagctaaacattacctcatagactatgaaaatagttgaaggactgttcttgcta

SEQ ID NO: 169511 - DNA, 75 bp, Homo sapiens
aagtttgagaagctaaacattacctcatagactatgaaaatagttgaaggactgttcttgctattaagtgcataa

SEQ ID NO: 169512 - DNA, 75 bp, Homo sapiens
aagctaaacattacctcatagactatgaaaatagttgaaggactgttcttgctattaagtgcataatttaggcaa

SEQ ID NO: 169513 - DNA, 71 bp, Homo sapiens
gactatgaaaatagttgaaggactgttcttgctattaagtgcataatttaggcaaaaactaagaaactcct

SEQ ID NO: 169514 - DNA, 66 bp, Homo sapiens
gcataatttaggcaaaaactaagaaactccttattttgtccattacggtatatttaaaaaattatc

SEQ ID NO: 169515 - DNA, 65 bp, Homo sapiens
gcaaaaactaagaaactccttattttgtccattacggtatatttaaaaaattatctttgaaaggc

SEQ ID NO: 169516 - DNA, 70 bp, Homo sapiens
ttgtccattacggtatatttaaaaaattatctttgaaaggcttatgtctaataactatgcaactaataag

SEQ ID NO: 169517 - DNA, 69 bp, Homo sapiens
cattacggtatatttaaaaaattatctttgaaaggcttatgtctaataactatgcaactaataaggtta

SEQ ID NO: 169518 - DNA, 69 bp, Homo sapiens
aaaaaattatctttgaaaggcttatgtctaataactatgcaactaataaggttactattttatgaatta

SEQ ID NO: 169519 - DNA, 72 bp, Homo sapiens
ctttgaaaggcttatgtctaataactatgcaactaataaggttactattttatgaattaaaattctgcattg

SEQ ID NO: 169520 - DNA, 73 bp, Homo sapiens
ggcttatgtctaataactatgcaactaataaggttactattttatgaattaaaattctgcattgtaaccttca

SEQ ID NO: 169521 - DNA, 74 bp, Homo sapiens
gtctaataactatgcaactaataaggttactattttatgaattaaaattctgcattgtaaccttcatatatata

SEQ ID NO: 169522 - DNA, 73 bp, Homo sapiens
tatgcaactaataaggttactattttatgaattaaaattctgcattgtaaccttcatatatataaccacaatt

SEQ ID NO: 169523 - DNA, 71 bp, Homo sapiens
aaggttactattttatgaattaaaattctgcattgtaaccttcatatatataaccacaattttcattccaa

SEQ ID NO: 169524 - DNA, 74 bp, Homo sapiens
aattctgcattgtaaccttcatatatataaccacaattttcattccaattaataaggcagtttggcttcttcaa

SEQ ID NO: 169525 - DNA, 75 bp, Homo sapiens
catatatataaccacaattttcattccaattaataaggcagtttggcttcttcaatgttaaacatgtcttgagga

SEQ ID NO: 169526 - DNA, 71 bp, Homo sapiens
ataaccacaattttcattccaattaataaggcagtttggcttcttcaatgttaaacatgtcttgaggaaaa

SEQ ID NO: 169527 - DNA, 69 bp, Homo sapiens
attttcattccaattaataaggcagtttggcttcttcaatgttaaacatgtcttgaggaaaaaaaaaga

SEQ ID NO: 169528 - DNA, 69 bp, Homo sapiens
aagaaaatatatttaaagtaaatgatagactgttattcgtaaaagaaatcaaattcactgaaatacatt

SEQ ID NO: 169529 - DNA, 69 bp, Homo sapiens
atttaaagtaaatgatagactgttattcgtaaaagaaatcaaattcactgaaatacatttttgttaaga

SEQ ID NO: 169530 - DNA, 71 bp, Homo sapiens
aatgatagactgttattcgtaaaagaaatcaaattcactgaaatacatttttgttaagaagaagaaatcag

SEQ ID NO: 169531 - DNA, 69 bp, Homo sapiens
tagactgttattcgtaaaagaaatcaaattcactgaaatacatttttgttaagaagaagaaatcagggg

SEQ ID NO: 169532 - DNA, 67 bp, Homo sapiens
cgtaaaagaaatcaaattcactgaaatacatttttgttaagaagaagaaatcagggggaggaaaatc

SEQ ID NO: 169533 - DNA, 69 bp, Homo sapiens
tcaaattcactgaaatacatttttgttaagaagaagaaatcagggggaggaaaatctaggttgtttcac

SEQ ID NO: 169534 - DNA, 70 bp, Homo sapiens
tgaaatacatttttgttaagaagaagaaatcagggggaggaaaatctaggttgtttcactgggcatagat

SEQ ID NO: 169535 - DNA, 71 bp, Homo sapiens
tttgttaagaagaagaaatcagggggaggaaaatctaggttgtttcactgggcatagattttgccatataa

SEQ ID NO: 169536 - DNA, 72 bp, Homo sapiens
gaagaaatcagggggaggaaaatctaggttgtttcactgggcatagattttgccatataattccttgagtat

SEQ ID NO: 169537 - DNA, 70 bp, Homo sapiens
aatcagggggaggaaaatctaggttgtttcactgggcatagattttgccatataattccttgagtatttt

SEQ ID NO: 169538 - DNA, 70 bp, Homo sapiens
aggaaaatctaggttgtttcactgggcatagattttgccatataattccttgagtattttttcttaaata

SEQ ID NO: 169539 - DNA, 74 bp, Homo sapiens
gggcatagattttgccatataattccttgagtattttttcttaaataattctagatcaagagcaacaaactaca

SEQ ID NO: 169540 - DNA, 76 bp, Homo sapiens
tgccatataattccttgagtattttttcttaaataattctagatcaagagcaacaaactacagatgttaagtgcta

SEQ ID NO: 169541 - DNA, 75 bp, Homo sapiens
ttccttgagtattttttcttaaataattctagatcaagagcaacaaactacagatgttaagtgctactatcatgg

SEQ ID NO: 169542 - DNA, 75 bp, Homo sapiens
gcaacaaactacagatgttaagtgctactatcatggtaatatttgaagtgttttattaagaagataacagtacca

SEQ ID NO: 169543 - DNA, 75 bp, Homo sapiens
ctacagatgttaagtgctactatcatggtaatatttgaagtgttttattaagaagataacagtaccagaaacaga

SEQ ID NO: 169544 - DNA, 74 bp, Homo sapiens
gtgctactatcatggtaatatttgaagtgttttattaagaagataacagtaccagaaacagatttccaactgga

SEQ ID NO: 169545 - DNA, 73 bp, Homo sapiens
catggtaatatttgaagtgttttattaagaagataacagtaccagaaacagatttccaactggacactgccaa

SEQ ID NO: 169546 - DNA, 71 bp, Homo sapiens
tttgaagtgttttattaagaagataacagtaccagaaacagatttccaactggacactgccaactgtttaa

SEQ ID NO: 169547 - DNA, 70 bp, Homo sapiens
gttttattaagaagataacagtaccagaaacagatttccaactggacactgccaactgtttaaatgttcc

SEQ ID NO: 169548 - DNA, 72 bp, Homo sapiens
taagaagataacagtaccagaaacagatttccaactggacactgccaactgtttaaatgttccttgaaacta

SEQ ID NO: 169549 - DNA, 69 bp, Homo sapiens
taccagaaacagatttccaactggacactgccaactgtttaaatgttccttgaaactatcccaaaagtt

SEQ ID NO: 169550 - DNA, 70 bp, Homo sapiens
gatttccaactggacactgccaactgtttaaatgttccttgaaactatcccaaaagttttattatgatcc

SEQ ID NO: 169551 - DNA, 74 bp, Homo sapiens
tggacactgccaactgtttaaatgttccttgaaactatcccaaaagttttattatgatccctatgtcagtgata

SEQ ID NO: 169552 - DNA, 74 bp, Homo sapiens
tgccaactgtttaaatgttccttgaaactatcccaaaagttttattatgatccctatgtcagtgatagatcagg

SEQ ID NO: 169553 - DNA, 72 bp, Homo sapiens
aatgttccttgaaactatcccaaaagttttattatgatccctatgtcagtgatagatcaggtacctattaaa

SEQ ID NO: 169554 - DNA, 74 bp, Homo sapiens
gaaactatcccaaaagttttattatgatccctatgtcagtgatagatcaggtacctattaaaaactgagcactg

SEQ ID NO: 169555 - DNA, 76 bp, Homo sapiens
tatcccaaaagttttattatgatccctatgtcagtgatagatcaggtacctattaaaaactgagcactgtgctggg

SEQ ID NO: 169556 - DNA, 78 bp, Homo sapiens
ttattatgatccctatgtcagtgatagatcaggtacctattaaaaactgagcactgtgctgggtctcctaacaaatta

SEQ ID NO: 169557 - DNA, 77 bp, Homo sapiens
atccctatgtcagtgatagatcaggtacctattaaaaactgagcactgtgctgggtctcctaacaaattatctcatt

SEQ ID NO: 169558 - DNA, 71 bp, Homo sapiens
atctcatttaattttcacaataatgccatggccttaaggtattaattttccctttcaacggatgagaaaca

SEQ ID NO: 169559 - DNA, 70 bp, Homo sapiens
attttcacaataatgccatggccttaaggtattaattttccctttcaacggatgagaaacatacgctaaa

SEQ ID NO: 169560 - DNA, 70 bp, Homo sapiens
acaataatgccatggccttaaggtattaattttccctttcaacggatgagaaacatacgctaaataactg

SEQ ID NO: 169561 - DNA, 67 bp, Homo sapiens
ccatggccttaaggtattaattttccctttcaacggatgagaaacatacgctaaataactggttaaa

SEQ ID NO: 169562 - DNA, 68 bp, Homo sapiens
aggtattaattttccctttcaacggatgagaaacatacgctaaataactggttaaataactgctcaaa

SEQ ID NO: 169563 - DNA, 69 bp, Homo sapiens
aattttccctttcaacggatgagaaacatacgctaaataactggttaaataactgctcaaaatcaaaca

SEQ ID NO: 169564 - DNA, 72 bp, Homo sapiens
ttccctttcaacggatgagaaacatacgctaaataactggttaaataactgctcaaaatcaaacataaagca

SEQ ID NO: 169565 - DNA, 74 bp, Homo sapiens
tcaacggatgagaaacatacgctaaataactggttaaataactgctcaaaatcaaacataaagcaaatggccag

SEQ ID NO: 169566 - DNA, 72 bp, Homo sapiens
aacggatgagaaacatacgctaaataactggttaaataactgctcaaaatcaaacataaagcaaatggccag

SEQ ID NO: 169567 - DNA, 73 bp, Homo sapiens
aaacatacgctaaataactggttaaataactgctcaaaatcaaacataaagcaaatggccaggccagaatcca

SEQ ID NO: 169568 - DNA, 73 bp, Homo sapiens
ctaaataactggttaaataactgctcaaaatcaaacataaagcaaatggccaggccagaatccaacagacatt

SEQ ID NO: 169569 - DNA, 76 bp, Homo sapiens
tggttaaataactgctcaaaatcaaacataaagcaaatggccaggccagaatccaacagacattttactgatctta

SEQ ID NO: 169570 - DNA, 75 bp, Homo sapiens
gttaaataactgctcaaaatcaaacataaagcaaatggccaggccagaatccaacagacattttactgatcttaa

SEQ ID NO: 169571 - DNA, 74 bp, Homo sapiens
aataactgctcaaaatcaaacataaagcaaatggccaggccagaatccaacagacattttactgatcttaaaac

SEQ ID NO: 169572 - DNA, 77 bp, Homo sapiens
tcaaacataaagcaaatggccaggccagaatccaacagacattttactgatcttaaaactcatgctaattccaatta

SEQ ID NO: 169573 - DNA, 75 bp, Homo sapiens
ataaagcaaatggccaggccagaatccaacagacattttactgatcttaaaactcatgctaattccaattaaaca

SEQ ID NO: 169574 - DNA, 75 bp, Homo sapiens
tccaacagacattttactgatcttaaaactcatgctaattccaattaaacatggtgcgtcaatggatttaaaggc

SEQ ID NO: 169575 - DNA, 77 bp, Homo sapiens
actgatcttaaaactcatgctaattccaattaaacatggtgcgtcaatggatttaaaggctcatctcattctttcca

SEQ ID NO: 169576 - DNA, 74 bp, Homo sapiens
tccaattaaacatggtgcgtcaatggatttaaaggctcatctcattctttccagggttagttagtgactactaa

SEQ ID NO: 169577 - DNA, 76 bp, Homo sapiens
aatggatttaaaggctcatctcattctttccagggttagttagtgactactaagtgcaagacacacaacagctcaa

SEQ ID NO: 169578 - DNA, 75 bp, Homo sapiens
atttaaaggctcatctcattctttccagggttagttagtgactactaagtgcaagacacacaacagctcaagtta

SEQ ID NO: 169579 - DNA, 73 bp, Homo sapiens
atctcattctttccagggttagttagtgactactaagtgcaagacacacaacagctcaagttatccttttaaa

SEQ ID NO: 169580 - DNA, 69 bp, Homo sapiens
ctttccagggttagttagtgactactaagtgcaagacacacaacagctcaagttatccttttaaagggg

SEQ ID NO: 169581 - DNA, 74 bp, Homo sapiens
ttagttagtgactactaagtgcaagacacacaacagctcaagttatccttttaaagggggcaatttagatcatg

SEQ ID NO: 169582 - DNA, 74 bp, Homo sapiens
actactaagtgcaagacacacaacagctcaagttatccttttaaagggggcaatttagatcatgtcacttccta

SEQ ID NO: 169583 - DNA, 71 bp, Homo sapiens
aagacacacaacagctcaagttatccttttaaagggggcaatttagatcatgtcacttcctagcttaaccc

SEQ ID NO: 169584 - DNA, 72 bp, Homo sapiens
aacagctcaagttatccttttaaagggggcaatttagatcatgtcacttcctagcttaaccctctgatggct

SEQ ID NO: 169585 - DNA, 75 bp, Homo sapiens
ttatccttttaaagggggcaatttagatcatgtcacttcctagcttaaccctctgatggcttccagacatgctta

SEQ ID NO: 169586 - DNA, 76 bp, Homo sapiens
ttaaagggggcaatttagatcatgtcacttcctagcttaaccctctgatggcttccagacatgcttagaataaatc

SEQ ID NO: 169587 - DNA, 76 bp, Homo sapiens
aatttagatcatgtcacttcctagcttaaccctctgatggcttccagacatgcttagaataaatccccaacttcta

SEQ ID NO: 169588 - DNA, 77 bp, Homo sapiens
atgtcacttcctagcttaaccctctgatggcttccagacatgcttagaataaatccccaacttctagcaatggactg

SEQ ID NO: 169589 - DNA, 74 bp, Homo sapiens
cttaaccctctgatggcttccagacatgcttagaataaatccccaacttctagcaatggactggcccctgaact

SEQ ID NO: 169590 - DNA, 79 bp, Homo sapiens
tctgatggcttccagacatgcttagaataaatccccaacttctagcaatggactggcccctgaacttggctcaagctac

SEQ ID NO: 169591 - DNA, 76 bp, Homo sapiens
ttccagacatgcttagaataaatccccaacttctagcaatggactggcccctgaacttggctcaagctaccctgac

SEQ ID NO: 169592 - DNA, 73 bp, Homo sapiens
taaatccccaacttctagcaatggactggcccctgaacttggctcaagctaccctgacctttgaaaatggcaa

SEQ ID NO: 169593 - DNA, 76 bp, Homo sapiens
ttctagcaatggactggcccctgaacttggctcaagctaccctgacctttgaaaatggcaatcgttttcatctcaa

SEQ ID NO: 169594 - DNA, 72 bp, Homo sapiens
actggcccctgaacttggctcaagctaccctgacctttgaaaatggcaatcgttttcatctcaaggctttac

SEQ ID NO: 169595 - DNA, 72 bp, Homo sapiens
aacttggctcaagctaccctgacctttgaaaatggcaatcgttttcatctcaaggctttacggttgctattc

SEQ ID NO: 169596 - DNA, 73 bp, Homo sapiens
aagctaccctgacctttgaaaatggcaatcgttttcatctcaaggctttacggttgctattcctctgtcacta

SEQ ID NO: 169597 - DNA, 73 bp, Homo sapiens
gacctttgaaaatggcaatcgttttcatctcaaggctttacggttgctattcctctgtcactaaatcttccca

SEQ ID NO: 169598 - DNA, 77 bp, Homo sapiens
ttgaaaatggcaatcgttttcatctcaaggctttacggttgctattcctctgtcactaaatcttcccatcactcagc

SEQ ID NO: 169599 - DNA, 78 bp, Homo sapiens
tcaaggctttacggttgctattcctctgtcactaaatcttcccatcactcagctctcagcaaaaatctcacctattta

SEQ ID NO: 169600 - DNA, 75 bp, Homo sapiens
ctttacggttgctattcctctgtcactaaatcttcccatcactcagctctcagcaaaaatctcacctatttaaag

SEQ ID NO: 169601 - DNA, 78 bp, Homo sapiens
tattcctctgtcactaaatcttcccatcactcagctctcagcaaaaatctcacctatttaaaggtgtcttccttgaca

SEQ ID NO: 169602 - DNA, 76 bp, Homo sapiens
ctaaatcttcccatcactcagctctcagcaaaaatctcacctatttaaaggtgtcttccttgacaatctaatctaa

SEQ ID NO: 169603 - DNA, 78 bp, Homo sapiens
ttcccatcactcagctctcagcaaaaatctcacctatttaaaggtgtcttccttgacaatctaatctaaatgagctcc

SEQ ID NO: 169604 - DNA, 75 bp, Homo sapiens
gctctcagcaaaaatctcacctatttaaaggtgtcttccttgacaatctaatctaaatgagctccccacctagta

SEQ ID NO: 169605 - DNA, 71 bp, Homo sapiens
aaaaatctcacctatttaaaggtgtcttccttgacaatctaatctaaatgagctccccacctagtaagtca

SEQ ID NO: 169606 - DNA, 72 bp, Homo sapiens
ctatttaaaggtgtcttccttgacaatctaatctaaatgagctccccacctagtaagtcactctccagcctt

SEQ ID NO: 169607 - DNA, 71 bp, Homo sapiens
taaaggtgtcttccttgacaatctaatctaaatgagctccccacctagtaagtcactctccagcctttttt

SEQ ID NO: 169608 - DNA, 72 bp, Homo sapiens
ttgacaatctaatctaaatgagctccccacctagtaagtcactctccagcctttttttttattgtacttatc

SEQ ID NO: 169609 - DNA, 70 bp, Homo sapiens
atctaatctaaatgagctccccacctagtaagtcactctccagcctttttttttattgtacttatcccta

SEQ ID NO: 169610 - DNA, 70 bp, Homo sapiens
agctccccacctagtaagtcactctccagcctttttttttattgtacttatccctatctgaaatcatctt

SEQ ID NO: 169611 - DNA, 70 bp, Homo sapiens
ccacctagtaagtcactctccagcctttttttttattgtacttatccctatctgaaatcatctttttcat

SEQ ID NO: 169612 - DNA, 72 bp, Homo sapiens
tctttttcatttttctgtttctttgtttactgtctgtctcctcccagttccaatacaaatgcctggagagga

SEQ ID NO: 169613 - DNA, 73 bp, Homo sapiens
ttttctgtttctttgtttactgtctgtctcctcccagttccaatacaaatgcctggagaggagggactcacca

SEQ ID NO: 169614 - DNA, 78 bp, Homo sapiens
tttactgtctgtctcctcccagttccaatacaaatgcctggagaggagggactcaccagtcttgctcactattgattc

SEQ ID NO: 169615 - DNA, 82 bp, Homo sapiens
tgtctcctcccagttccaatacaaatgcctggagaggagggactcaccagtcttgctcactattgattcctcagcatctata

SEQ ID NO: 169616 - DNA, 81 bp, Homo sapiens
tcctcccagttccaatacaaatgcctggagaggagggactcaccagtcttgctcactattgattcctcagcatctataaca

SEQ ID NO: 169617 - DNA, 82 bp, Homo sapiens
agttccaatacaaatgcctggagaggagggactcaccagtcttgctcactattgattcctcagcatctataacagtgtcaga

SEQ ID NO: 169618 - DNA, 82 bp, Homo sapiens
aatacaaatgcctggagaggagggactcaccagtcttgctcactattgattcctcagcatctataacagtgtcagacccata

SEQ ID NO: 169619 - DNA, 83 bp, Homo sapiens
aaatgcctggagaggagggactcaccagtcttgctcactattgattcctcagcatctataacagtgtcagacccatagtgtga

SEQ ID NO: 169620 - DNA, 84 bp, Homo sapiens
gagaggagggactcaccagtcttgctcactattgattcctcagcatctataacagtgtcagacccatagtgtgagctcaataaa

SEQ ID NO: 169621 - DNA, 82 bp, Homo sapiens
agggactcaccagtcttgctcactattgattcctcagcatctataacagtgtcagacccatagtgtgagctcaataaataaa

SEQ ID NO: 169622 - DNA, 82 bp, Homo sapiens
actcaccagtcttgctcactattgattcctcagcatctataacagtgtcagacccatagtgtgagctcaataaataaatatt

SEQ ID NO: 169623 - DNA, 74 bp, Homo sapiens
tgttaaatggatgactgaactctaggtgccatggagacacaaacataattaggtaccagcccaaccctcgaaaa

SEQ ID NO: 169624 - DNA, 73 bp, Homo sapiens
actgaactctaggtgccatggagacacaaacataattaggtaccagcccaaccctcgaaaagtgttcaatcta

SEQ ID NO: 169625 - DNA, 73 bp, Homo sapiens
actctaggtgccatggagacacaaacataattaggtaccagcccaaccctcgaaaagtgttcaatctatagga

SEQ ID NO: 169626 - DNA, 72 bp, Homo sapiens
gagacacaaacataattaggtaccagcccaaccctcgaaaagtgttcaatctataggaggacaaccatacaa

SEQ ID NO: 169627 - DNA, 70 bp, Homo sapiens
aaacataattaggtaccagcccaaccctcgaaaagtgttcaatctataggaggacaaccatacaaatgat

SEQ ID NO: 169628 - DNA, 73 bp, Homo sapiens
taccagcccaaccctcgaaaagtgttcaatctataggaggacaaccatacaaatgattccacaaggcaaaatg

SEQ ID NO: 169629 - DNA, 70 bp, Homo sapiens
aaccctcgaaaagtgttcaatctataggaggacaaccatacaaatgattccacaaggcaaaatgttttaa

SEQ ID NO: 169630 - DNA, 71 bp, Homo sapiens
aaaagtgttcaatctataggaggacaaccatacaaatgattccacaaggcaaaatgttttaagtgccgtac

SEQ ID NO: 169631 - DNA, 73 bp, Homo sapiens
ttcaatctataggaggacaaccatacaaatgattccacaaggcaaaatgttttaagtgccgtacgtgaaataa

SEQ ID NO: 169632 - DNA, 72 bp, Homo sapiens
aatctataggaggacaaccatacaaatgattccacaaggcaaaatgttttaagtgccgtacgtgaaataaca

SEQ ID NO: 169633 - DNA, 71 bp, Homo sapiens
ctataggaggacaaccatacaaatgattccacaaggcaaaatgttttaagtgccgtacgtgaaataacaaa

SEQ ID NO: 169634 - DNA, 70 bp, Homo sapiens
aggacaaccatacaaatgattccacaaggcaaaatgttttaagtgccgtacgtgaaataacaaagtagta

SEQ ID NO: 169635 - DNA, 72 bp, Homo sapiens
catacaaatgattccacaaggcaaaatgttttaagtgccgtacgtgaaataacaaagtagtacatggtttca

SEQ ID NO: 169636 - DNA, 70 bp, Homo sapiens
gattccacaaggcaaaatgttttaagtgccgtacgtgaaataacaaagtagtacatggtttcaaataaga

SEQ ID NO: 169637 - DNA, 69 bp, Homo sapiens
attccacaaggcaaaatgttttaagtgccgtacgtgaaataacaaagtagtacatggtttcaaataaga

SEQ ID NO: 169638 - DNA, 67 bp, Homo sapiens
acaaggcaaaatgttttaagtgccgtacgtgaaataacaaagtagtacatggtttcaaataagaaaa

SEQ ID NO: 169639 - DNA, 66 bp, Homo sapiens
gcaaaatgttttaagtgccgtacgtgaaataacaaagtagtacatggtttcaaataagaaaaaaaa

SEQ ID NO: 169640 - DNA, 65 bp, Homo sapiens
atgttttaagtgccgtacgtgaaataacaaagtagtacatggtttcaaataagaaaaaaaattta

SEQ ID NO: 169641 - DNA, 67 bp, Homo sapiens
atttaaaaattatataccaacataatattaaaaactacttaatttcatcacaaaaaagagaggaaga

SEQ ID NO: 169642 - DNA, 71 bp, Homo sapiens
tatataccaacataatattaaaaactacttaatttcatcacaaaaaagagaggaagataaattaatggaga

SEQ ID NO: 169643 - DNA, 72 bp, Homo sapiens
cataatattaaaaactacttaatttcatcacaaaaaagagaggaagataaattaatggagagaatacataca

SEQ ID NO: 169644 - DNA, 73 bp, Homo sapiens
aaaactacttaatttcatcacaaaaaagagaggaagataaattaatggagagaatacatacacatacattctc

SEQ ID NO: 169645 - DNA, 81 bp, Homo sapiens
tctctctctcaagttattcctcagagcggaaatgctcagttcagacgcggcttggaagatataaacatcattgaaattcaa

SEQ ID NO: 169646 - DNA, 78 bp, Homo sapiens
ctctcaagttattcctcagagcggaaatgctcagttcagacgcggcttggaagatataaacatcattgaaattcaaaa

SEQ ID NO: 169647 - DNA, 79 bp, Homo sapiens
attcctcagagcggaaatgctcagttcagacgcggcttggaagatataaacatcattgaaattcaaaagcagttctgaa

SEQ ID NO: 169648 - DNA, 80 bp, Homo sapiens
aatgctcagttcagacgcggcttggaagatataaacatcattgaaattcaaaagcagttctgaaagagaggatgcctcaa

SEQ ID NO: 169649 - DNA, 78 bp, Homo sapiens
gttcagacgcggcttggaagatataaacatcattgaaattcaaaagcagttctgaaagagaggatgcctcaattggta

SEQ ID NO: 169650 - DNA, 78 bp, Homo sapiens
cttggaagatataaacatcattgaaattcaaaagcagttctgaaagagaggatgcctcaattggtatgcaagggatgt

SEQ ID NO: 169651 - DNA, 77 bp, Homo sapiens
aagatataaacatcattgaaattcaaaagcagttctgaaagagaggatgcctcaattggtatgcaagggatgtttcc

SEQ ID NO: 169652 - DNA, 75 bp, Homo sapiens
attgaaattcaaaagcagttctgaaagagaggatgcctcaattggtatgcaagggatgtttcctccccctgaata

SEQ ID NO: 169653 - DNA, 77 bp, Homo sapiens
attcaaaagcagttctgaaagagaggatgcctcaattggtatgcaagggatgtttcctccccctgaatacattatga

SEQ ID NO: 169654 - DNA, 82 bp, Homo sapiens
tctgaaagagaggatgcctcaattggtatgcaagggatgtttcctccccctgaatacattatgaacttgcagcatgctaata

SEQ ID NO: 169655 - DNA, 86 bp, Homo sapiens
gatgcctcaattggtatgcaagggatgtttcctccccctgaatacattatgaacttgcagcatgctaatatgccatgctatcataa

SEQ ID NO: 169656 - DNA, 84 bp, Homo sapiens
aattggtatgcaagggatgtttcctccccctgaatacattatgaacttgcagcatgctaatatgccatgctatcataagcacca

SEQ ID NO: 169657 - DNA, 84 bp, Homo sapiens
agggatgtttcctccccctgaatacattatgaacttgcagcatgctaatatgccatgctatcataagcaccagatggggcagta

SEQ ID NO: 169658 - DNA, 86 bp, Homo sapiens
tttcctccccctgaatacattatgaacttgcagcatgctaatatgccatgctatcataagcaccagatggggcagtaggcagtaca

SEQ ID NO: 169659 - DNA, 87 bp, Homo sapiens
aatacattatgaacttgcagcatgctaatatgccatgctatcataagcaccagatggggcagtaggcagtacatgtcccatcaaacc

SEQ ID NO: 169660 - DNA, 86 bp, Homo sapiens
agcatgctaatatgccatgctatcataagcaccagatggggcagtaggcagtacatgtcccatcaaacctcaagaagatgtattaa

SEQ ID NO: 169661 - DNA, 85 bp, Homo sapiens
taatatgccatgctatcataagcaccagatggggcagtaggcagtacatgtcccatcaaacctcaagaagatgtattaatgttca

SEQ ID NO: 169662 - DNA, 82 bp, Homo sapiens
tatcataagcaccagatggggcagtaggcagtacatgtcccatcaaacctcaagaagatgtattaatgttcatgctctttaa

SEQ ID NO: 169663 - DNA, 78 bp, Homo sapiens
agcaccagatggggcagtaggcagtacatgtcccatcaaacctcaagaagatgtattaatgttcatgctctttaaaaa

SEQ ID NO: 169664 - DNA, 73 bp, Homo sapiens
aaaaaaaatcctttgcctgtgtccctagacttccacatttcttagcattcagtcactttctctcaaagcacag

SEQ ID NO: 169665 - DNA, 76 bp, Homo sapiens
aaatcctttgcctgtgtccctagacttccacatttcttagcattcagtcactttctctcaaagcacagtcctccag

SEQ ID NO: 169666 - DNA, 82 bp, Homo sapiens
tagacttccacatttcttagcattcagtcactttctctcaaagcacagtcctccagggctgctcctcttcaccagatggtgc

SEQ ID NO: 169667 - DNA, 82 bp, Homo sapiens
catttcttagcattcagtcactttctctcaaagcacagtcctccagggctgctcctcttcaccagatggtgccaggaatcat

SEQ ID NO: 169668 - DNA, 81 bp, Homo sapiens
tttcttagcattcagtcactttctctcaaagcacagtcctccagggctgctcctcttcaccagatggtgccaggaatcatt

SEQ ID NO: 169669 - DNA, 82 bp, Homo sapiens
cattcagtcactttctctcaaagcacagtcctccagggctgctcctcttcaccagatggtgccaggaatcatttcaatctat

SEQ ID NO: 169670 - DNA, 79 bp, Homo sapiens
agtcactttctctcaaagcacagtcctccagggctgctcctcttcaccagatggtgccaggaatcatttcaatctattt

SEQ ID NO: 169671 - DNA, 81 bp, Homo sapiens
tttctctcaaagcacagtcctccagggctgctcctcttcaccagatggtgccaggaatcatttcaatctattttatcacag

SEQ ID NO: 169672 - DNA, 81 bp, Homo sapiens
aaagcacagtcctccagggctgctcctcttcaccagatggtgccaggaatcatttcaatctattttatcacaggaggcaga

SEQ ID NO: 169673 - DNA, 81 bp, Homo sapiens
tcctccagggctgctcctcttcaccagatggtgccaggaatcatttcaatctattttatcacaggaggcagaggccacaaa

SEQ ID NO: 169674 - DNA, 80 bp, Homo sapiens
agggctgctcctcttcaccagatggtgccaggaatcatttcaatctattttatcacaggaggcagaggccacaaagcgtg

SEQ ID NO: 169675 - DNA, 81 bp, Homo sapiens
ttcaccagatggtgccaggaatcatttcaatctattttatcacaggaggcagaggccacaaagcgtgtcagactacactta

SEQ ID NO: 169676 - DNA, 77 bp, Homo sapiens
aatcatttcaatctattttatcacaggaggcagaggccacaaagcgtgtcagactacacttactgaaggcctaccaa

SEQ ID NO: 169677 - DNA, 76 bp, Homo sapiens
aggaggcagaggccacaaagcgtgtcagactacacttactgaaggcctaccaagcacaaaagagaacaacagaaga

SEQ ID NO: 169678 - DNA, 76 bp, Homo sapiens
agaggccacaaagcgtgtcagactacacttactgaaggcctaccaagcacaaaagagaacaacagaagatatggga

SEQ ID NO: 169679 - DNA, 75 bp, Homo sapiens
agactacacttactgaaggcctaccaagcacaaaagagaacaacagaagatatgggagacatcagaaataaatct

SEQ ID NO: 169680 - DNA, 78 bp, Homo sapiens
tactgaaggcctaccaagcacaaaagagaacaacagaagatatgggagacatcagaaataaatcttctcaaggcatta

SEQ ID NO: 169681 - DNA, 77 bp, Homo sapiens
caagcacaaaagagaacaacagaagatatgggagacatcagaaataaatcttctcaaggcattaccaatgaaacatt

SEQ ID NO: 169682 - DNA, 74 bp, Homo sapiens
acaaaagagaacaacagaagatatgggagacatcagaaataaatcttctcaaggcattaccaatgaaacatttt

SEQ ID NO: 169683 - DNA, 77 bp, Homo sapiens
cagaagatatgggagacatcagaaataaatcttctcaaggcattaccaatgaaacattttttaattacattgaatgc

SEQ ID NO: 169684 - DNA, 75 bp, Homo sapiens
atatgggagacatcagaaataaatcttctcaaggcattaccaatgaaacattttttaattacattgaatgcttat

SEQ ID NO: 169685 - DNA, 74 bp, Homo sapiens
gaaataaatcttctcaaggcattaccaatgaaacattttttaattacattgaatgcttatttatgttgaacaga

SEQ ID NO: 169686 - DNA, 73 bp, Homo sapiens
aaatcttctcaaggcattaccaatgaaacattttttaattacattgaatgcttatttatgttgaacagagaaa

SEQ ID NO: 169687 - DNA, 71 bp, Homo sapiens
aggcattaccaatgaaacattttttaattacattgaatgcttatttatgttgaacagagaaaaataaaaga

SEQ ID NO: 169688 - DNA, 70 bp, Homo sapiens
gaaaaataaaagaaaatctttgtatatccaaacttccaagactaactgatattactgtgaaattgaagtc

SEQ ID NO: 169689 - DNA, 72 bp, Homo sapiens
gaaaatctttgtatatccaaacttccaagactaactgatattactgtgaaattgaagtctacctaaatattc

SEQ ID NO: 169690 - DNA, 73 bp, Homo sapiens
ctttgtatatccaaacttccaagactaactgatattactgtgaaattgaagtctacctaaatattctactcat

SEQ ID NO: 169691 - DNA, 72 bp, Homo sapiens
ccaaacttccaagactaactgatattactgtgaaattgaagtctacctaaatattctactcatttgtttaca

SEQ ID NO: 169692 - DNA, 74 bp, Homo sapiens
caagactaactgatattactgtgaaattgaagtctacctaaatattctactcatttgtttacaagtaactatca

SEQ ID NO: 169693 - DNA, 72 bp, Homo sapiens
ttactgtgaaattgaagtctacctaaatattctactcatttgtttacaagtaactatcagaacaaaccaaca

SEQ ID NO: 169694 - DNA, 70 bp, Homo sapiens
gtgaaattgaagtctacctaaatattctactcatttgtttacaagtaactatcagaacaaaccaacaaac

SEQ ID NO: 169695 - DNA, 71 bp, Homo sapiens
tacctaaatattctactcatttgtttacaagtaactatcagaacaaaccaacaaaccagaattcaagtcga

SEQ ID NO: 169696 - DNA, 70 bp, Homo sapiens
ttctactcatttgtttacaagtaactatcagaacaaaccaacaaaccagaattcaagtcgaaaagcaccc

SEQ ID NO: 169697 - DNA, 67 bp, Homo sapiens
atttgtttacaagtaactatcagaacaaaccaacaaaccagaattcaagtcgaaaagcaccctccct

SEQ ID NO: 169698 - DNA, 72 bp, Homo sapiens
taactatcagaacaaaccaacaaaccagaattcaagtcgaaaagcaccctcccttgattctcagtcaactta

SEQ ID NO: 169699 - DNA, 73 bp, Homo sapiens
atcagaacaaaccaacaaaccagaattcaagtcgaaaagcaccctcccttgattctcagtcaacttagctgtg

SEQ ID NO: 169700 - DNA, 76 bp, Homo sapiens
aacaaaccagaattcaagtcgaaaagcaccctcccttgattctcagtcaacttagctgtgtgggcatctgaataca

SEQ ID NO: 169701 - DNA, 78 bp, Homo sapiens
ttcaagtcgaaaagcaccctcccttgattctcagtcaacttagctgtgtgggcatctgaatacactgtcagaaaccaa

SEQ ID NO: 169702 - DNA, 78 bp, Homo sapiens
aaagcaccctcccttgattctcagtcaacttagctgtgtgggcatctgaatacactgtcagaaaccaaggcataatta

SEQ ID NO: 169703 - DNA, 77 bp, Homo sapiens
accctcccttgattctcagtcaacttagctgtgtgggcatctgaatacactgtcagaaaccaaggcataattaaaca

SEQ ID NO: 169704 - DNA, 78 bp, Homo sapiens
ctcccttgattctcagtcaacttagctgtgtgggcatctgaatacactgtcagaaaccaaggcataattaaacaaata

SEQ ID NO: 169705 - DNA, 79 bp, Homo sapiens
ttgattctcagtcaacttagctgtgtgggcatctgaatacactgtcagaaaccaaggcataattaaacaaatacataat

SEQ ID NO: 169706 - DNA, 76 bp, Homo sapiens
agtcaacttagctgtgtgggcatctgaatacactgtcagaaaccaaggcataattaaacaaatacataatttgtaa

SEQ ID NO: 169707 - DNA, 76 bp, Homo sapiens
aacttagctgtgtgggcatctgaatacactgtcagaaaccaaggcataattaaacaaatacataatttgtaatctc

SEQ ID NO: 169708 - DNA, 77 bp, Homo sapiens
ctgtgtgggcatctgaatacactgtcagaaaccaaggcataattaaacaaatacataatttgtaatctctcaagtat

SEQ ID NO: 169709 - DNA, 76 bp, Homo sapiens
gtgtgggcatctgaatacactgtcagaaaccaaggcataattaaacaaatacataatttgtaatctctcaagtatt

SEQ ID NO: 169710 - DNA, 75 bp, Homo sapiens
ggcatctgaatacactgtcagaaaccaaggcataattaaacaaatacataatttgtaatctctcaagtattttta

SEQ ID NO: 169711 - DNA, 71 bp, Homo sapiens
tacactgtcagaaaccaaggcataattaaacaaatacataatttgtaatctctcaagtatttttaaaaata

SEQ ID NO: 169712 - DNA, 67 bp, Homo sapiens
aagaaaaaataagattaaatgaacaatattgatttccatacttttaggacctaacctggcttattta

SEQ ID NO: 169713 - DNA, 68 bp, Homo sapiens
aagattaaatgaacaatattgatttccatacttttaggacctaacctggcttatttatgaccaaaaag

SEQ ID NO: 169714 - DNA, 70 bp, Homo sapiens
gaacaatattgatttccatacttttaggacctaacctggcttatttatgaccaaaaaggggcattatcta

SEQ ID NO: 169715 - DNA, 71 bp, Homo sapiens
caatattgatttccatacttttaggacctaacctggcttatttatgaccaaaaaggggcattatctataga

SEQ ID NO: 169716 - DNA, 70 bp, Homo sapiens
atattgatttccatacttttaggacctaacctggcttatttatgaccaaaaaggggcattatctatagaa

SEQ ID NO: 169717 - DNA, 70 bp, Homo sapiens
gatttccatacttttaggacctaacctggcttatttatgaccaaaaaggggcattatctatagaatataa

SEQ ID NO: 169718 - DNA, 69 bp, Homo sapiens
cttttaggacctaacctggcttatttatgaccaaaaaggggcattatctatagaatataaaaggacaca

SEQ ID NO: 169719 - DNA, 68 bp, Homo sapiens
aggacctaacctggcttatttatgaccaaaaaggggcattatctatagaatataaaaggacacaaaaa

SEQ ID NO: 169720 - DNA, 69 bp, Homo sapiens
ctaacctggcttatttatgaccaaaaaggggcattatctatagaatataaaaggacacaaaaaatataa

SEQ ID NO: 169721 - DNA, 70 bp, Homo sapiens
ctggcttatttatgaccaaaaaggggcattatctatagaatataaaaggacacaaaaaatataatttaca

SEQ ID NO: 169722 - DNA, 67 bp, Homo sapiens
gaccaaaaaggggcattatctatagaatataaaaggacacaaaaaatataatttacaaaagtggttc

SEQ ID NO: 169723 - DNA, 69 bp, Homo sapiens
aaggggcattatctatagaatataaaaggacacaaaaaatataatttacaaaagtggttctccacttga

SEQ ID NO: 169724 - DNA, 73 bp, Homo sapiens
gcattatctatagaatataaaaggacacaaaaaatataatttacaaaagtggttctccacttgaatatgctta

SEQ ID NO: 169725 - DNA, 71 bp, Homo sapiens
tataaaaggacacaaaaaatataatttacaaaagtggttctccacttgaatatgcttaagaatcctctgag

SEQ ID NO: 169726 - DNA, 71 bp, Homo sapiens
ggacacaaaaaatataatttacaaaagtggttctccacttgaatatgcttaagaatcctctgagggcttgt

SEQ ID NO: 169727 - DNA, 72 bp, Homo sapiens
aaatataatttacaaaagtggttctccacttgaatatgcttaagaatcctctgagggcttgttcaaacacac

SEQ ID NO: 169728 - DNA, 72 bp, Homo sapiens
aaaagtggttctccacttgaatatgcttaagaatcctctgagggcttgttcaaacacacgttactgggtcta

SEQ ID NO: 169729 - DNA, 76 bp, Homo sapiens
ttgaatatgcttaagaatcctctgagggcttgttcaaacacacgttactgggtctacccacagagtttctgactca

SEQ ID NO: 169730 - DNA, 73 bp, Homo sapiens
ttaagaatcctctgagggcttgttcaaacacacgttactgggtctacccacagagtttctgactcagtaggct

SEQ ID NO: 169731 - DNA, 72 bp, Homo sapiens
tctgagggcttgttcaaacacacgttactgggtctacccacagagtttctgactcagtaggcttgggagggg

SEQ ID NO: 169732 - DNA, 71 bp, Homo sapiens
aaacacacgttactgggtctacccacagagtttctgactcagtaggcttgggagggggcagagaatttgta

SEQ ID NO: 169733 - DNA, 74 bp, Homo sapiens
tacccacagagtttctgactcagtaggcttgggagggggcagagaatttgtatttccaacaaattctctggtga

SEQ ID NO: 169734 - DNA, 75 bp, Homo sapiens
tttctgactcagtaggcttgggagggggcagagaatttgtatttccaacaaattctctggtgaggcagacactgt

SEQ ID NO: 169735 - DNA, 74 bp, Homo sapiens
actcagtaggcttgggagggggcagagaatttgtatttccaacaaattctctggtgaggcagacactgttggtc

SEQ ID NO: 169736 - DNA, 72 bp, Homo sapiens
ttgggagggggcagagaatttgtatttccaacaaattctctggtgaggcagacactgttggtccccttgacc

SEQ ID NO: 169737 - DNA, 73 bp, Homo sapiens
agagaatttgtatttccaacaaattctctggtgaggcagacactgttggtccccttgaccccatgttgagaac

SEQ ID NO: 169738 - DNA, 77 bp, Homo sapiens
tggtgaggcagacactgttggtccccttgaccccatgttgagaacgtggctacaccatcctgtaccatgcttccaaa

SEQ ID NO: 169739 - DNA, 76 bp, Homo sapiens
agacactgttggtccccttgaccccatgttgagaacgtggctacaccatcctgtaccatgcttccaaagtgcttga

SEQ ID NO: 169740 - DNA, 79 bp, Homo sapiens
catgttgagaacgtggctacaccatcctgtaccatgcttccaaagtgcttgactgaccctgtgagagtctttaatctgt

SEQ ID NO: 169741 - DNA, 76 bp, Homo sapiens
aacgtggctacaccatcctgtaccatgcttccaaagtgcttgactgaccctgtgagagtctttaatctgtttagaa

SEQ ID NO: 169742 - DNA, 77 bp, Homo sapiens
accatcctgtaccatgcttccaaagtgcttgactgaccctgtgagagtctttaatctgtttagaaaatcagcaacat

SEQ ID NO: 169743 - DNA, 78 bp, Homo sapiens
taccatgcttccaaagtgcttgactgaccctgtgagagtctttaatctgtttagaaaatcagcaacattcttgtatta

SEQ ID NO: 169744 - DNA, 77 bp, Homo sapiens
cttgactgaccctgtgagagtctttaatctgtttagaaaatcagcaacattcttgtattaggaaactcaacagatga

SEQ ID NO: 169745 - DNA, 75 bp, Homo sapiens
tttaatctgtttagaaaatcagcaacattcttgtattaggaaactcaacagatgagctaaactgaccttccaaga

SEQ ID NO: 169746 - DNA, 76 bp, Homo sapiens
ttgtattaggaaactcaacagatgagctaaactgaccttccaagaatttttataatgcatgaattaagagaaatgc

SEQ ID NO: 169747 - DNA, 75 bp, Homo sapiens
aggaaactcaacagatgagctaaactgaccttccaagaatttttataatgcatgaattaagagaaatgcttacaa

SEQ ID NO: 169748 - DNA, 77 bp, Homo sapiens
cagatgagctaaactgaccttccaagaatttttataatgcatgaattaagagaaatgcttacaaagtatctgccgaa

SEQ ID NO: 169749 - DNA, 75 bp, Homo sapiens
ctgaccttccaagaatttttataatgcatgaattaagagaaatgcttacaaagtatctgccgaattagcaaagat

SEQ ID NO: 169750 - DNA, 75 bp, Homo sapiens
cttccaagaatttttataatgcatgaattaagagaaatgcttacaaagtatctgccgaattagcaaagattattc

SEQ ID NO: 169751 - DNA, 78 bp, Homo sapiens
tataatgcatgaattaagagaaatgcttacaaagtatctgccgaattagcaaagattattcttttaagagatactgaa

SEQ ID NO: 169752 - DNA, 77 bp, Homo sapiens
gcatgaattaagagaaatgcttacaaagtatctgccgaattagcaaagattattcttttaagagatactgaaactca

SEQ ID NO: 169753 - DNA, 73 bp, Homo sapiens
gagaaatgcttacaaagtatctgccgaattagcaaagattattcttttaagagatactgaaactcaaaagtct

SEQ ID NO: 169754 - DNA, 70 bp, Homo sapiens
aagtatctgccgaattagcaaagattattcttttaagagatactgaaactcaaaagtcttaccctattcc

SEQ ID NO: 169755 - DNA, 70 bp, Homo sapiens
ctgccgaattagcaaagattattcttttaagagatactgaaactcaaaagtcttaccctattcctttcaa

SEQ ID NO: 169756 - DNA, 73 bp, Homo sapiens
gcaaagattattcttttaagagatactgaaactcaaaagtcttaccctattcctttcaaatgatccaatgcaa

SEQ ID NO: 169757 - DNA, 73 bp, Homo sapiens
agagatactgaaactcaaaagtcttaccctattcctttcaaatgatccaatgcaaatgttgaaaaaatgataa

SEQ ID NO: 169758 - DNA, 71 bp, Homo sapiens
aactcaaaagtcttaccctattcctttcaaatgatccaatgcaaatgttgaaaaaatgataaaagggcaga

SEQ ID NO: 169759 - DNA, 75 bp, Homo sapiens
taccctattcctttcaaatgatccaatgcaaatgttgaaaaaatgataaaagggcagaaacattcaaagagagca

SEQ ID NO: 169760 - DNA, 75 bp, Homo sapiens
cctttcaaatgatccaatgcaaatgttgaaaaaatgataaaagggcagaaacattcaaagagagcagcaattaaa

SEQ ID NO: 169761 - DNA, 77 bp, Homo sapiens
aatgatccaatgcaaatgttgaaaaaatgataaaagggcagaaacattcaaagagagcagcaattaaaatcattcaa

SEQ ID NO: 169762 - DNA, 74 bp, Homo sapiens
tgcaaatgttgaaaaaatgataaaagggcagaaacattcaaagagagcagcaattaaaatcattcaaattttta

SEQ ID NO: 169763 - DNA, 69 bp, Homo sapiens
aaaaatgataaaagggcagaaacattcaaagagagcagcaattaaaatcattcaaatttttaaagaaaa

SEQ ID NO: 169764 - DNA, 76 bp, Homo sapiens
tattatatatagaatgaattattctagcaatcgctctagagtctttaagataaattttacctgtctatcaaattgt

SEQ ID NO: 169765 - DNA, 73 bp, Homo sapiens
agaatgaattattctagcaatcgctctagagtctttaagataaattttacctgtctatcaaattgttacttac

SEQ ID NO: 169766 - DNA, 72 bp, Homo sapiens
ttattctagcaatcgctctagagtctttaagataaattttacctgtctatcaaattgttacttacctaggat

SEQ ID NO: 169767 - DNA, 73 bp, Homo sapiens
agcaatcgctctagagtctttaagataaattttacctgtctatcaaattgttacttacctaggattattgata

SEQ ID NO: 169768 - DNA, 70 bp, Homo sapiens
ctagagtctttaagataaattttacctgtctatcaaattgttacttacctaggattattgatataagaaa

SEQ ID NO: 169769 - DNA, 70 bp, Homo sapiens
gataaattttacctgtctatcaaattgttacttacctaggattattgatataagaaactattggctaaat

SEQ ID NO: 169770 - DNA, 73 bp, Homo sapiens
tttacctgtctatcaaattgttacttacctaggattattgatataagaaactattggctaaatttatcatgta

SEQ ID NO: 169771 - DNA, 72 bp, Homo sapiens
tatcaaattgttacttacctaggattattgatataagaaactattggctaaatttatcatgtaaaagataaa

SEQ ID NO: 169772 - DNA, 71 bp, Homo sapiens
ttacttacctaggattattgatataagaaactattggctaaatttatcatgtaaaagataaaaatatttca

SEQ ID NO: 169773 - DNA, 70 bp, Homo sapiens
agaaactattggctaaatttatcatgtaaaagataaaaatatttcattaatacttctctttgctaaaatc

SEQ ID NO: 169774 - DNA, 71 bp, Homo sapiens
tggctaaatttatcatgtaaaagataaaaatatttcattaatacttctctttgctaaaatcttacccagta

SEQ ID NO: 169775 - DNA, 74 bp, Homo sapiens
atcatgtaaaagataaaaatatttcattaatacttctctttgctaaaatcttacccagtatgcctgatgggaga

SEQ ID NO: 169776 - DNA, 73 bp, Homo sapiens
agataaaaatatttcattaatacttctctttgctaaaatcttacccagtatgcctgatgggagactgaaacat

SEQ ID NO: 169777 - DNA, 75 bp, Homo sapiens
ttaatacttctctttgctaaaatcttacccagtatgcctgatgggagactgaaacattatacccatcctccacta

SEQ ID NO: 169778 - DNA, 77 bp, Homo sapiens
tttgctaaaatcttacccagtatgcctgatgggagactgaaacattatacccatcctccactaggtgacaagaatga

SEQ ID NO: 169779 - DNA, 74 bp, Homo sapiens
aaatcttacccagtatgcctgatgggagactgaaacattatacccatcctccactaggtgacaagaatgaaaaa

SEQ ID NO: 169780 - DNA, 78 bp, Homo sapiens
tatgcctgatgggagactgaaacattatacccatcctccactaggtgacaagaatgaaaaatggccaaactacatgaa

SEQ ID NO: 169781 - DNA, 75 bp, Homo sapiens
atgggagactgaaacattatacccatcctccactaggtgacaagaatgaaaaatggccaaactacatgaaaatgc

SEQ ID NO: 169782 - DNA, 73 bp, Homo sapiens
aaacattatacccatcctccactaggtgacaagaatgaaaaatggccaaactacatgaaaatgcccaggtgga

SEQ ID NO: 169783 - DNA, 73 bp, Homo sapiens
atcctccactaggtgacaagaatgaaaaatggccaaactacatgaaaatgcccaggtggagggagagtccatt

SEQ ID NO: 169784 - DNA, 73 bp, Homo sapiens
taggtgacaagaatgaaaaatggccaaactacatgaaaatgcccaggtggagggagagtccatttccaaaata

SEQ ID NO: 169785 - DNA, 74 bp, Homo sapiens
aagaatgaaaaatggccaaactacatgaaaatgcccaggtggagggagagtccatttccaaaatatcacacaca

SEQ ID NO: 169786 - DNA, 74 bp, Homo sapiens
tacatgaaaatgcccaggtggagggagagtccatttccaaaatatcacacacactgtcaaaagccctttgtttc

SEQ ID NO: 169787 - DNA, 70 bp, Homo sapiens
ggagggagagtccatttccaaaatatcacacacactgtcaaaagccctttgtttctaattttagtaatta

SEQ ID NO: 169788 - DNA, 71 bp, Homo sapiens
tatcacacacactgtcaaaagccctttgtttctaattttagtaattatgccagaaagttttaagtgttgta

SEQ ID NO: 169789 - DNA, 70 bp, Homo sapiens
gccctttgtttctaattttagtaattatgccagaaagttttaagtgttgtatgttgcattatactttcag

SEQ ID NO: 169790 - DNA, 73 bp, Homo sapiens
tctaattttagtaattatgccagaaagttttaagtgttgtatgttgcattatactttcagtaagtataatcag

SEQ ID NO: 169791 - DNA, 74 bp, Homo sapiens
gtaattatgccagaaagttttaagtgttgtatgttgcattatactttcagtaagtataatcaggataaattaca

SEQ ID NO: 169792 - DNA, 74 bp, Homo sapiens
atgccagaaagttttaagtgttgtatgttgcattatactttcagtaagtataatcaggataaattacattgaat

SEQ ID NO: 169793 - DNA, 79 bp, Homo sapiens
taagtgttgtatgttgcattatactttcagtaagtataatcaggataaattacattgaattttaacatgcagctagcca

SEQ ID NO: 169794 - DNA, 78 bp, Homo sapiens
gttgtatgttgcattatactttcagtaagtataatcaggataaattacattgaattttaacatgcagctagccaccaa

SEQ ID NO: 169795 - DNA, 76 bp, Homo sapiens
tcagtaagtataatcaggataaattacattgaattttaacatgcagctagccaccaataaagttgtgggccacaaa

SEQ ID NO: 169796 - DNA, 76 bp, Homo sapiens
ataatcaggataaattacattgaattttaacatgcagctagccaccaataaagttgtgggccacaaaatatatgta

SEQ ID NO: 169797 - DNA, 74 bp, Homo sapiens
tacattgaattttaacatgcagctagccaccaataaagttgtgggccacaaaatatatgtattttccttaactc

SEQ ID NO: 169798 - DNA, 73 bp, Homo sapiens
tttaacatgcagctagccaccaataaagttgtgggccacaaaatatatgtattttccttaactctgaaagaaa

SEQ ID NO: 169799 - DNA, 74 bp, Homo sapiens
atgcagctagccaccaataaagttgtgggccacaaaatatatgtattttccttaactctgaaagaaaattctca

SEQ ID NO: 169800 - DNA, 71 bp, Homo sapiens
gccaccaataaagttgtgggccacaaaatatatgtattttccttaactctgaaagaaaattctcattcgta

SEQ ID NO: 169801 - DNA, 71 bp, Homo sapiens
gtgggccacaaaatatatgtattttccttaactctgaaagaaaattctcattcgtaaagaccacttactga

SEQ ID NO: 169802 - DNA, 67 bp, Homo sapiens
gtattttccttaactctgaaagaaaattctcattcgtaaagaccacttactgaaaatttttataaga

SEQ ID NO: 169803 - DNA, 68 bp, Homo sapiens
ccttaactctgaaagaaaattctcattcgtaaagaccacttactgaaaatttttataagattcatttc

SEQ ID NO: 169804 - DNA, 66 bp, Homo sapiens
gaaaattctcattcgtaaagaccacttactgaaaatttttataagattcatttcttaatttttccc

SEQ ID NO: 169805 - DNA, 67 bp, Homo sapiens
tctcattcgtaaagaccacttactgaaaatttttataagattcatttcttaatttttccccttgtta

SEQ ID NO: 169806 - DNA, 66 bp, Homo sapiens
aagaccacttactgaaaatttttataagattcatttcttaatttttccccttgttaattaacatgc

SEQ ID NO: 169807 - DNA, 67 bp, Homo sapiens
ctgaaaatttttataagattcatttcttaatttttccccttgttaattaacatgctttgtgtattat

SEQ ID NO: 169808 - DNA, 67 bp, Homo sapiens
ttttataagattcatttcttaatttttccccttgttaattaacatgctttgtgtattatttctttct

SEQ ID NO: 169809 - DNA, 69 bp, Homo sapiens
ttcttaatttttccccttgttaattaacatgctttgtgtattatttctttcttttgaaatctctgtgag

SEQ ID NO: 169810 - DNA, 71 bp, Homo sapiens
ttccccttgttaattaacatgctttgtgtattatttctttcttttgaaatctctgtgagtcccagtctacc

SEQ ID NO: 169811 - DNA, 75 bp, Homo sapiens
ttgttaattaacatgctttgtgtattatttctttcttttgaaatctctgtgagtcccagtctacctctcatccac

SEQ ID NO: 169812 - DNA, 77 bp, Homo sapiens
atgctttgtgtattatttctttcttttgaaatctctgtgagtcccagtctacctctcatccactcacttattcatta

SEQ ID NO: 169813 - DNA, 75 bp, Homo sapiens
ttatttctttcttttgaaatctctgtgagtcccagtctacctctcatccactcacttattcattaagcaaatatt

SEQ ID NO: 169814 - DNA, 81 bp, Homo sapiens
tttcttttgaaatctctgtgagtcccagtctacctctcatccactcacttattcattaagcaaatatttgctgattgcata

SEQ ID NO: 169815 - DNA, 83 bp, Homo sapiens
aaatctctgtgagtcccagtctacctctcatccactcacttattcattaagcaaatatttgctgattgcatactctatgccag

SEQ ID NO: 169816 - DNA, 83 bp, Homo sapiens
agtcccagtctacctctcatccactcacttattcattaagcaaatatttgctgattgcatactctatgccaggctcacaggta

SEQ ID NO: 169817 - DNA, 84 bp, Homo sapiens
ctctcatccactcacttattcattaagcaaatatttgctgattgcatactctatgccaggctcacaggtagcctggaatggaat

SEQ ID NO: 169818 - DNA, 82 bp, Homo sapiens
ctcacttattcattaagcaaatatttgctgattgcatactctatgccaggctcacaggtagcctggaatggaattattagaa

SEQ ID NO: 169819 - DNA, 82 bp, Homo sapiens
atatttgctgattgcatactctatgccaggctcacaggtagcctggaatggaattattagaactagaaaatcaagatctgaa

SEQ ID NO: 169820 - DNA, 80 bp, Homo sapiens
attgcatactctatgccaggctcacaggtagcctggaatggaattattagaactagaaaatcaagatctgaacataaatg

SEQ ID NO: 169821 - DNA, 80 bp, Homo sapiens
tctatgccaggctcacaggtagcctggaatggaattattagaactagaaaatcaagatctgaacataaatggcagcttta

SEQ ID NO: 169822 - DNA, 76 bp, Homo sapiens
attagaactagaaaatcaagatctgaacataaatggcagctttatcaaggggagttgatgatgtttaaaatgtcta

SEQ ID NO: 169823 - DNA, 77 bp, Homo sapiens
tcaagatctgaacataaatggcagctttatcaaggggagttgatgatgtttaaaatgtctattttaaacagtgaaga

SEQ ID NO: 169824 - DNA, 74 bp, Homo sapiens
atctgaacataaatggcagctttatcaaggggagttgatgatgtttaaaatgtctattttaaacagtgaagaaa

SEQ ID NO: 169825 - DNA, 73 bp, Homo sapiens
tcaaggggagttgatgatgtttaaaatgtctattttaaacagtgaagaaaagaagctgtatcttgggataaca

SEQ ID NO: 169826 - DNA, 73 bp, Homo sapiens
ggagttgatgatgtttaaaatgtctattttaaacagtgaagaaaagaagctgtatcttgggataacacagaag

SEQ ID NO: 169827 - DNA, 70 bp, Homo sapiens
taaaatgtctattttaaacagtgaagaaaagaagctgtatcttgggataacacagaagtggagtaaaagg

SEQ ID NO: 169828 - DNA, 71 bp, Homo sapiens
ctattttaaacagtgaagaaaagaagctgtatcttgggataacacagaagtggagtaaaaggttatacaga

SEQ ID NO: 169829 - DNA, 73 bp, Homo sapiens
aaacagtgaagaaaagaagctgtatcttgggataacacagaagtggagtaaaaggttatacagaattcagctc

SEQ ID NO: 169830 - DNA, 73 bp, Homo sapiens
aaaagaagctgtatcttgggataacacagaagtggagtaaaaggttatacagaattcagctctccagcaaaac

SEQ ID NO: 169831 - DNA, 74 bp, Homo sapiens
tgtatcttgggataacacagaagtggagtaaaaggttatacagaattcagctctccagcaaaaccacctacaaa

SEQ ID NO: 169832 - DNA, 73 bp, Homo sapiens
ataacacagaagtggagtaaaaggttatacagaattcagctctccagcaaaaccacctacaaagaaacatgaa

SEQ ID NO: 169833 - DNA, 72 bp, Homo sapiens
aagtggagtaaaaggttatacagaattcagctctccagcaaaaccacctacaaagaaacatgaaaatcagta

SEQ ID NO: 169834 - DNA, 67 bp, Homo sapiens
ctctccagcaaaaccacctacaaagaaacatgaaaatcagtaggggtggggtggggaagaagtgggg

SEQ ID NO: 169835 - DNA, 70 bp, Homo sapiens
aaagaaacatgaaaatcagtaggggtggggtggggaagaagtgggggacagactcagtgatgtaaattga

SEQ ID NO: 169836 - DNA, 71 bp, Homo sapiens
aaaatcagtaggggtggggtggggaagaagtgggggacagactcagtgatgtaaattgatgccacaaatta

SEQ ID NO: 169837 - DNA, 74 bp, Homo sapiens
gaagaagtgggggacagactcagtgatgtaaattgatgccacaaattaaaagtgccacttattagtacctggaa

SEQ ID NO: 169838 - DNA, 71 bp, Homo sapiens
gggacagactcagtgatgtaaattgatgccacaaattaaaagtgccacttattagtacctggaaaaaaaaa

SEQ ID NO: 169839 - DNA, 72 bp, Homo sapiens
aaaaaaaagacaggcttttcaggctctcacttaagcatgtgttttattatgtgatcaccattctaagtttgg

SEQ ID NO: 169840 - DNA, 75 bp, Homo sapiens
agacaggcttttcaggctctcacttaagcatgtgttttattatgtgatcaccattctaagtttggttatctggtt

SEQ ID NO: 169841 - DNA, 75 bp, Homo sapiens
ttttcaggctctcacttaagcatgtgttttattatgtgatcaccattctaagtttggttatctggtttccacatt

SEQ ID NO: 169842 - DNA, 75 bp, Homo sapiens
ctcacttaagcatgtgttttattatgtgatcaccattctaagtttggttatctggtttccacatttgcaaataac

SEQ ID NO: 169843 - DNA, 76 bp, Homo sapiens
catgtgttttattatgtgatcaccattctaagtttggttatctggtttccacatttgcaaataactgggatgtgta

SEQ ID NO: 169844 - DNA, 74 bp, Homo sapiens
tttccacatttgcaaataactgggatgtgtaaaagggtggcacactgatagagaaggggtaaaccgctgacata

SEQ ID NO: 169845 - DNA, 74 bp, Homo sapiens
atttgcaaataactgggatgtgtaaaagggtggcacactgatagagaaggggtaaaccgctgacataaagatga

SEQ ID NO: 169846 - DNA, 78 bp, Homo sapiens
cacactgatagagaaggggtaaaccgctgacataaagatgaggcagaaaatcctatcaagcataggcaaaactcagaa

SEQ ID NO: 169847 - DNA, 77 bp, Homo sapiens
taaaccgctgacataaagatgaggcagaaaatcctatcaagcataggcaaaactcagaaaatttcatctaacctaga

SEQ ID NO: 169848 - DNA, 80 bp, Homo sapiens
acataaagatgaggcagaaaatcctatcaagcataggcaaaactcagaaaatttcatctaacctagacaatgtgcatcaa

SEQ ID NO: 169849 - DNA, 79 bp, Homo sapiens
aggcagaaaatcctatcaagcataggcaaaactcagaaaatttcatctaacctagacaatgtgcatcaagcataacact

SEQ ID NO: 169850 - DNA, 79 bp, Homo sapiens
aaaatcctatcaagcataggcaaaactcagaaaatttcatctaacctagacaatgtgcatcaagcataacacttggcac

SEQ ID NO: 169851 - DNA, 78 bp, Homo sapiens
aagcataggcaaaactcagaaaatttcatctaacctagacaatgtgcatcaagcataacacttggcactgttttgtgg

SEQ ID NO: 169852 - DNA, 74 bp, Homo sapiens
actcagaaaatttcatctaacctagacaatgtgcatcaagcataacacttggcactgttttgtggggggttaaa

SEQ ID NO: 169853 - DNA, 73 bp, Homo sapiens
aaaatttcatctaacctagacaatgtgcatcaagcataacacttggcactgttttgtggggggttaaacactg

SEQ ID NO: 169854 - DNA, 73 bp, Homo sapiens
taacctagacaatgtgcatcaagcataacacttggcactgttttgtggggggttaaacactgtctcctatttt

SEQ ID NO: 169855 - DNA, 72 bp, Homo sapiens
acaatgtgcatcaagcataacacttggcactgttttgtggggggttaaacactgtctcctattttttaactc

SEQ ID NO: 169856 - DNA, 71 bp, Homo sapiens
aagcataacacttggcactgttttgtggggggttaaacactgtctcctattttttaactccagacagcatc

SEQ ID NO: 169857 - DNA, 72 bp, Homo sapiens
ttggcactgttttgtggggggttaaacactgtctcctattttttaactccagacagcatcgctgtctataaa

SEQ ID NO: 169858 - DNA, 70 bp, Homo sapiens
tttgtggggggttaaacactgtctcctattttttaactccagacagcatcgctgtctataaagaggttta

SEQ ID NO: 169859 - DNA, 70 bp, Homo sapiens
gttaaacactgtctcctattttttaactccagacagcatcgctgtctataaagaggtttaataacctctt

SEQ ID NO: 169860 - DNA, 73 bp, Homo sapiens
tctcctattttttaactccagacagcatcgctgtctataaagaggtttaataacctctttatacaggtacaca

SEQ ID NO: 169861 - DNA, 76 bp, Homo sapiens
ttttaactccagacagcatcgctgtctataaagaggtttaataacctctttatacaggtacacagcatatctacaa

SEQ ID NO: 169862 - DNA, 80 bp, Homo sapiens
agacagcatcgctgtctataaagaggtttaataacctctttatacaggtacacagcatatctacaatcactattgccatc

SEQ ID NO: 169863 - DNA, 77 bp, Homo sapiens
ctgtctataaagaggtttaataacctctttatacaggtacacagcatatctacaatcactattgccatcctgtgaaa

SEQ ID NO: 169864 - DNA, 76 bp, Homo sapiens
aagaggtttaataacctctttatacaggtacacagcatatctacaatcactattgccatcctgtgaaagttagcaa

SEQ ID NO: 169865 - DNA, 79 bp, Homo sapiens
ttaataacctctttatacaggtacacagcatatctacaatcactattgccatcctgtgaaagttagcaaggcagaataa

SEQ ID NO: 169866 - DNA, 79 bp, Homo sapiens
tttatacaggtacacagcatatctacaatcactattgccatcctgtgaaagttagcaaggcagaataactgtttctact

SEQ ID NO: 169867 - DNA, 77 bp, Homo sapiens
acagcatatctacaatcactattgccatcctgtgaaagttagcaaggcagaataactgtttctacttttaagacaaa

SEQ ID NO: 169868 - DNA, 76 bp, Homo sapiens
tatctacaatcactattgccatcctgtgaaagttagcaaggcagaataactgtttctacttttaagacaaagagag

SEQ ID NO: 169869 - DNA, 73 bp, Homo sapiens
actattgccatcctgtgaaagttagcaaggcagaataactgtttctacttttaagacaaagagagtgaaactc

SEQ ID NO: 169870 - DNA, 74 bp, Homo sapiens
tgtgaaagttagcaaggcagaataactgtttctacttttaagacaaagagagtgaaactctggcagactgtaaa

SEQ ID NO: 169871 - DNA, 73 bp, Homo sapiens
agttagcaaggcagaataactgtttctacttttaagacaaagagagtgaaactctggcagactgtaaatggaa

SEQ ID NO: 169872 - DNA, 75 bp, Homo sapiens
aataactgtttctacttttaagacaaagagagtgaaactctggcagactgtaaatggaagagcactgattcacaa

SEQ ID NO: 169873 - DNA, 80 bp, Homo sapiens
ttctacttttaagacaaagagagtgaaactctggcagactgtaaatggaagagcactgattcacaatcaggcattgacat

SEQ ID NO: 169874 - DNA, 84 bp, Homo sapiens
tttaagacaaagagagtgaaactctggcagactgtaaatggaagagcactgattcacaatcaggcattgacattctcgatgctc

SEQ ID NO: 169875 - DNA, 85 bp, Homo sapiens
agagtgaaactctggcagactgtaaatggaagagcactgattcacaatcaggcattgacattctcgatgctctgtgtttttgata

SEQ ID NO: 169876 - DNA, 87 bp, Homo sapiens
tggcagactgtaaatggaagagcactgattcacaatcaggcattgacattctcgatgctctgtgtttttgatagatggcctcataaa

SEQ ID NO: 169877 - DNA, 85 bp, Homo sapiens
taaatggaagagcactgattcacaatcaggcattgacattctcgatgctctgtgtttttgatagatggcctcataaaatataata

SEQ ID NO: 169878 - DNA, 84 bp, Homo sapiens
aagagcactgattcacaatcaggcattgacattctcgatgctctgtgtttttgatagatggcctcataaaatataatatattaa

SEQ ID NO: 169879 - DNA, 85 bp, Homo sapiens
gattcacaatcaggcattgacattctcgatgctctgtgtttttgatagatggcctcataaaatataatatattaattgctcataa

SEQ ID NO: 169880 - DNA, 82 bp, Homo sapiens
caggcattgacattctcgatgctctgtgtttttgatagatggcctcataaaatataatatattaattgctcataatataaac

SEQ ID NO: 169881 - DNA, 79 bp, Homo sapiens
ctcgatgctctgtgtttttgatagatggcctcataaaatataatatattaattgctcataatataaacccaagtcacaa

SEQ ID NO: 169882 - DNA, 78 bp, Homo sapiens
gctctgtgtttttgatagatggcctcataaaatataatatattaattgctcataatataaacccaagtcacaaagcta

SEQ ID NO: 169883 - DNA, 76 bp, Homo sapiens
tttgatagatggcctcataaaatataatatattaattgctcataatataaacccaagtcacaaagctaaagataaa

SEQ ID NO: 169884 - DNA, 77 bp, Homo sapiens
gcctcataaaatataatatattaattgctcataatataaacccaagtcacaaagctaaagataaaatacattcagca

SEQ ID NO: 169885 - DNA, 76 bp, Homo sapiens
ataatatattaattgctcataatataaacccaagtcacaaagctaaagataaaatacattcagcacagggccaggc

SEQ ID NO: 169886 - DNA, 75 bp, Homo sapiens
attaattgctcataatataaacccaagtcacaaagctaaagataaaatacattcagcacagggccaggcgcggcg

SEQ ID NO: 169887 - DNA, 77 bp, Homo sapiens
ataatataaacccaagtcacaaagctaaagataaaatacattcagcacagggccaggcgcggcggctcatgcctata

SEQ ID NO: 169888 - DNA, 74 bp, Homo sapiens
ataaaaaaatacactcagcacaaactgatcagcttgtgattagtaagtacaacaattttaaacagtgaatgaaa

SEQ ID NO: 169889 - DNA, 76 bp, Homo sapiens
acactcagcacaaactgatcagcttgtgattagtaagtacaacaattttaaacagtgaatgaaagtaactatggct

SEQ ID NO: 169890 - DNA, 75 bp, Homo sapiens
cagcacaaactgatcagcttgtgattagtaagtacaacaattttaaacagtgaatgaaagtaactatggcttaaa

SEQ ID NO: 169891 - DNA, 75 bp, Homo sapiens
tcagcttgtgattagtaagtacaacaattttaaacagtgaatgaaagtaactatggcttaaagagataatcttgc

SEQ ID NO: 169892 - DNA, 74 bp, Homo sapiens
gtgattagtaagtacaacaattttaaacagtgaatgaaagtaactatggcttaaagagataatcttgctcttga

SEQ ID NO: 169893 - DNA, 74 bp, Homo sapiens
gtacaacaattttaaacagtgaatgaaagtaactatggcttaaagagataatcttgctcttgagaaacactaca

SEQ ID NO: 169894 - DNA, 76 bp, Homo sapiens
aacagtgaatgaaagtaactatggcttaaagagataatcttgctcttgagaaacactacaaaatgattcaattctc

SEQ ID NO: 169895 - DNA, 77 bp, Homo sapiens
gaatgaaagtaactatggcttaaagagataatcttgctcttgagaaacactacaaaatgattcaattctccaagatg

SEQ ID NO: 169896 - DNA, 75 bp, Homo sapiens
aactatggcttaaagagataatcttgctcttgagaaacactacaaaatgattcaattctccaagatgttttggga

SEQ ID NO: 169897 - DNA, 71 bp, Homo sapiens
aaagagataatcttgctcttgagaaacactacaaaatgattcaattctccaagatgttttgggaaaaagtt

SEQ ID NO: 169898 - DNA, 71 bp, Homo sapiens
cttgctcttgagaaacactacaaaatgattcaattctccaagatgttttgggaaaaagtttattaacttca

SEQ ID NO: 169899 - DNA, 71 bp, Homo sapiens
gctcttgagaaacactacaaaatgattcaattctccaagatgttttgggaaaaagtttattaacttcacaa

SEQ ID NO: 169900 - DNA, 71 bp, Homo sapiens
gaaacactacaaaatgattcaattctccaagatgttttgggaaaaagtttattaacttcacaatgacatgg

SEQ ID NO: 169901 - DNA, 72 bp, Homo sapiens
cactacaaaatgattcaattctccaagatgttttgggaaaaagtttattaacttcacaatgacatggtacca

SEQ ID NO: 169902 - DNA, 71 bp, Homo sapiens
caaaatgattcaattctccaagatgttttgggaaaaagtttattaacttcacaatgacatggtaccaaatg

SEQ ID NO: 169903 - DNA, 71 bp, Homo sapiens
tgattcaattctccaagatgttttgggaaaaagtttattaacttcacaatgacatggtaccaaatgtttta

SEQ ID NO: 169904 - DNA, 70 bp, Homo sapiens
ctccaagatgttttgggaaaaagtttattaacttcacaatgacatggtaccaaatgttttacactcagaa

SEQ ID NO: 169905 - DNA, 69 bp, Homo sapiens
ccaagatgttttgggaaaaagtttattaacttcacaatgacatggtaccaaatgttttacactcagaaa

SEQ ID NO: 169906 - DNA, 71 bp, Homo sapiens
gttttgggaaaaagtttattaacttcacaatgacatggtaccaaatgttttacactcagaaaatatgatca

SEQ ID NO: 169907 - DNA, 71 bp, Homo sapiens
ttgggaaaaagtttattaacttcacaatgacatggtaccaaatgttttacactcagaaaatatgatcaaaa

SEQ ID NO: 169908 - DNA, 74 bp, Homo sapiens
ttaacttcacaatgacatggtaccaaatgttttacactcagaaaatatgatcaaaatatagataaagataaaaa

SEQ ID NO: 169909 - DNA, 73 bp, Homo sapiens
atgacatggtaccaaatgttttacactcagaaaatatgatcaaaatatagataaagataaaaaaccaaatgga

SEQ ID NO: 169910 - DNA, 71 bp, Homo sapiens
aatgttttacactcagaaaatatgatcaaaatatagataaagataaaaaaccaaatggaaacacactcctc

SEQ ID NO: 169911 - DNA, 73 bp, Homo sapiens
cactcagaaaatatgatcaaaatatagataaagataaaaaaccaaatggaaacacactcctctatgtagtaag

SEQ ID NO: 169912 - DNA, 72 bp, Homo sapiens
tatgatcaaaatatagataaagataaaaaaccaaatggaaacacactcctctatgtagtaagtagttaaaca

SEQ ID NO: 169913 - DNA, 71 bp, Homo sapiens
atatagataaagataaaaaaccaaatggaaacacactcctctatgtagtaagtagttaaacaatgtcaaca

SEQ ID NO: 169914 - DNA, 69 bp, Homo sapiens
agataaaaaaccaaatggaaacacactcctctatgtagtaagtagttaaacaatgtcaacaacaggtaa

SEQ ID NO: 169915 - DNA, 69 bp, Homo sapiens
ccaaatggaaacacactcctctatgtagtaagtagttaaacaatgtcaacaacaggtaactcttccttt

SEQ ID NO: 169916 - DNA, 69 bp, Homo sapiens
ggaaacacactcctctatgtagtaagtagttaaacaatgtcaacaacaggtaactcttccttttaaaga

SEQ ID NO: 169917 - DNA, 67 bp, Homo sapiens
gtaagtagttaaacaatgtcaacaacaggtaactcttccttttaaagatgttctttagaaagattcc

SEQ ID NO: 169918 - DNA, 68 bp, Homo sapiens
acaatgtcaacaacaggtaactcttccttttaaagatgttctttagaaagattcctaaattgtacaaa

SEQ ID NO: 169919 - DNA, 67 bp, Homo sapiens
caacaacaggtaactcttccttttaaagatgttctttagaaagattcctaaattgtacaaaatagaa

SEQ ID NO: 169920 - DNA, 65 bp, Homo sapiens
gtaactcttccttttaaagatgttctttagaaagattcctaaattgtacaaaatagaaaacattt

SEQ ID NO: 169921 - DNA, 68 bp, Homo sapiens
aaagatgttctttagaaagattcctaaattgtacaaaatagaaaacattttgaaaacctagtcatgcc

SEQ ID NO: 169922 - DNA, 69 bp, Homo sapiens
tttagaaagattcctaaattgtacaaaatagaaaacattttgaaaacctagtcatgcctaggcttacca

SEQ ID NO: 169923 - DNA, 68 bp, Homo sapiens
gattcctaaattgtacaaaatagaaaacattttgaaaacctagtcatgcctaggcttaccaactttgg

SEQ ID NO: 169924 - DNA, 68 bp, Homo sapiens
aattgtacaaaatagaaaacattttgaaaacctagtcatgcctaggcttaccaactttgggaggcact

SEQ ID NO: 169925 - DNA, 69 bp, Homo sapiens
gaaaacattttgaaaacctagtcatgcctaggcttaccaactttgggaggcacttcgcgtttgtattaa

SEQ ID NO: 169926 - DNA, 68 bp, Homo sapiens
attttgaaaacctagtcatgcctaggcttaccaactttgggaggcacttcgcgtttgtattaatttat

SEQ ID NO: 169927 - DNA, 67 bp, Homo sapiens
acctagtcatgcctaggcttaccaactttgggaggcacttcgcgtttgtattaatttattaattttt

SEQ ID NO: 169928 - DNA, 72 bp, Homo sapiens
accacgcctggcttccactttatgtttagcaagcaaacactggtatataaagaatgcctggataactaaaaa

SEQ ID NO: 169929 - DNA, 70 bp, Homo sapiens
gcttccactttatgtttagcaagcaaacactggtatataaagaatgcctggataactaaaaagttgggtt

SEQ ID NO: 169930 - DNA, 70 bp, Homo sapiens
ctttatgtttagcaagcaaacactggtatataaagaatgcctggataactaaaaagttgggttttgcctc

SEQ ID NO: 169931 - DNA, 71 bp, Homo sapiens
aagcaaacactggtatataaagaatgcctggataactaaaaagttgggttttgcctctgacttctatcatt

SEQ ID NO: 169932 - DNA, 71 bp, Homo sapiens
aacactggtatataaagaatgcctggataactaaaaagttgggttttgcctctgacttctatcattttcta

SEQ ID NO: 169933 - DNA, 71 bp, Homo sapiens
aagaatgcctggataactaaaaagttgggttttgcctctgacttctatcattttctatattttctaaatca

SEQ ID NO: 169934 - DNA, 71 bp, Homo sapiens
gcctggataactaaaaagttgggttttgcctctgacttctatcattttctatattttctaaatcaactatg

SEQ ID NO: 169935 - DNA, 71 bp, Homo sapiens
aaagttgggttttgcctctgacttctatcattttctatattttctaaatcaactatgtatttggaatattc

SEQ ID NO: 169936 - DNA, 72 bp, Homo sapiens
gggttttgcctctgacttctatcattttctatattttctaaatcaactatgtatttggaatattctaggaag

SEQ ID NO: 169937 - DNA, 73 bp, Homo sapiens
tctgacttctatcattttctatattttctaaatcaactatgtatttggaatattctaggaagttagaagaaaa

SEQ ID NO: 169938 - DNA, 71 bp, Homo sapiens
cattttctatattttctaaatcaactatgtatttggaatattctaggaagttagaagaaaataaatattga

SEQ ID NO: 169939 - DNA, 70 bp, Homo sapiens
ttctaaatcaactatgtatttggaatattctaggaagttagaagaaaataaatattgaatagaaagttta

SEQ ID NO: 169940 - DNA, 70 bp, Homo sapiens
tcaactatgtatttggaatattctaggaagttagaagaaaataaatattgaatagaaagtttaacaagtg

SEQ ID NO: 169941 - DNA, 70 bp, Homo sapiens
tggaatattctaggaagttagaagaaaataaatattgaatagaaagtttaacaagtgttttctatagaca

SEQ ID NO: 169942 - DNA, 68 bp, Homo sapiens
tattctaggaagttagaagaaaataaatattgaatagaaagtttaacaagtgttttctatagacaaaa

SEQ ID NO: 169943 - DNA, 67 bp, Homo sapiens
gaagaaaataaatattgaatagaaagtttaacaagtgttttctatagacaaaaatatttgttttgat

SEQ ID NO: 169944 - DNA, 67 bp, Homo sapiens
aatattgaatagaaagtttaacaagtgttttctatagacaaaaatatttgttttgatttcctctacg

SEQ ID NO: 169945 - DNA, 66 bp, Homo sapiens
agaaagtttaacaagtgttttctatagacaaaaatatttgttttgatttcctctacgtattttgtc

SEQ ID NO: 169946 - DNA, 71 bp, Homo sapiens
taacaagtgttttctatagacaaaaatatttgttttgatttcctctacgtattttgtctgtaggctataca

SEQ ID NO: 169947 - DNA, 72 bp, Homo sapiens
ttttctatagacaaaaatatttgttttgatttcctctacgtattttgtctgtaggctatacaaatataatgc

SEQ ID NO: 169948 - DNA, 72 bp, Homo sapiens
gacaaaaatatttgttttgatttcctctacgtattttgtctgtaggctatacaaatataatgctaaagcaaa

SEQ ID NO: 169949 - DNA, 71 bp, Homo sapiens
atttgttttgatttcctctacgtattttgtctgtaggctatacaaatataatgctaaagcaaaaagaaaga

SEQ ID NO: 169950 - DNA, 75 bp, Homo sapiens
tgttactgtaactgctaagtatataggttcagatacaaccataacaactaagaaacaatgtccatttcacaggga

SEQ ID NO: 169951 - DNA, 74 bp, Homo sapiens
actgctaagtatataggttcagatacaaccataacaactaagaaacaatgtccatttcacagggaaaatgtcag

SEQ ID NO: 169952 - DNA, 76 bp, Homo sapiens
tatataggttcagatacaaccataacaactaagaaacaatgtccatttcacagggaaaatgtcaggatcacagcct

SEQ ID NO: 169953 - DNA, 73 bp, Homo sapiens
agatacaaccataacaactaagaaacaatgtccatttcacagggaaaatgtcaggatcacagcctttcttcct

SEQ ID NO: 169954 - DNA, 73 bp, Homo sapiens
ataacaactaagaaacaatgtccatttcacagggaaaatgtcaggatcacagcctttcttccttccagtctta

SEQ ID NO: 169955 - DNA, 75 bp, Homo sapiens
taagaaacaatgtccatttcacagggaaaatgtcaggatcacagcctttcttccttccagtcttatcctcattag

SEQ ID NO: 169956 - DNA, 73 bp, Homo sapiens
atttcacagggaaaatgtcaggatcacagcctttcttccttccagtcttatcctcattaggacatatttaaat

SEQ ID NO: 169957 - DNA, 75 bp, Homo sapiens
aggatcacagcctttcttccttccagtcttatcctcattaggacatatttaaatttcaaatgcaggagtatataa

SEQ ID NO: 169958 - DNA, 75 bp, Homo sapiens
tccagtcttatcctcattaggacatatttaaatttcaaatgcaggagtatataaattgttacctcaggaccctca

SEQ ID NO: 169959 - DNA, 71 bp, Homo sapiens
ttaggacatatttaaatttcaaatgcaggagtatataaattgttacctcaggaccctcaaattttactatg

SEQ ID NO: 169960 - DNA, 69 bp, Homo sapiens
aaatttcaaatgcaggagtatataaattgttacctcaggaccctcaaattttactatgtattttcctcc

SEQ ID NO: 169961 - DNA, 71 bp, Homo sapiens
gcaggagtatataaattgttacctcaggaccctcaaattttactatgtattttcctcctaataacctgaga

SEQ ID NO: 169962 - DNA, 70 bp, Homo sapiens
gtatataaattgttacctcaggaccctcaaattttactatgtattttcctcctaataacctgagaatcat

SEQ ID NO: 169963 - DNA, 70 bp, Homo sapiens
gttacctcaggaccctcaaattttactatgtattttcctcctaataacctgagaatcattaaagcaaaca

SEQ ID NO: 169964 - DNA, 72 bp, Homo sapiens
tactatgtattttcctcctaataacctgagaatcattaaagcaaacaagtcctgaggaaggtggtgaagtta

SEQ ID NO: 169965 - DNA, 72 bp, Homo sapiens
tgtattttcctcctaataacctgagaatcattaaagcaaacaagtcctgaggaaggtggtgaagttaaatga

SEQ ID NO: 169966 - DNA, 71 bp, Homo sapiens
taataacctgagaatcattaaagcaaacaagtcctgaggaaggtggtgaagttaaatgagggaaagttcaa

SEQ ID NO: 169967 - DNA, 68 bp, Homo sapiens
gaatcattaaagcaaacaagtcctgaggaaggtggtgaagttaaatgagggaaagttcaaacgtaaaa

SEQ ID NO: 169968 - DNA, 67 bp, Homo sapiens
taaagcaaacaagtcctgaggaaggtggtgaagttaaatgagggaaagttcaaacgtaaaataacga

SEQ ID NO: 169969 - DNA, 67 bp, Homo sapiens
agtcctgaggaaggtggtgaagttaaatgagggaaagttcaaacgtaaaataacgagactctcaaaa

SEQ ID NO: 169970 - DNA, 70 bp, Homo sapiens
gtggtgaagttaaatgagggaaagttcaaacgtaaaataacgagactctcaaaagcacagcaattgtctt

SEQ ID NO: 169971 - DNA, 68 bp, Homo sapiens
gaagttaaatgagggaaagttcaaacgtaaaataacgagactctcaaaagcacagcaattgtcttttt

SEQ ID NO: 169972 - DNA, 69 bp, Homo sapiens
gagggaaagttcaaacgtaaaataacgagactctcaaaagcacagcaattgtcttttttaaagttagca

SEQ ID NO: 169973 - DNA, 70 bp, Homo sapiens
tcaaacgtaaaataacgagactctcaaaagcacagcaattgtcttttttaaagttagcacccccatcaaa

SEQ ID NO: 169974 - DNA, 72 bp, Homo sapiens
aataacgagactctcaaaagcacagcaattgtcttttttaaagttagcacccccatcaaaatcatcccagat

SEQ ID NO: 169975 - DNA, 73 bp, Homo sapiens
aaaagcacagcaattgtcttttttaaagttagcacccccatcaaaatcatcccagattgtgaaaaatgctcag

SEQ ID NO: 169976 - DNA, 71 bp, Homo sapiens
gcaattgtcttttttaaagttagcacccccatcaaaatcatcccagattgtgaaaaatgctcagtttactt

SEQ ID NO: 169977 - DNA, 71 bp, Homo sapiens
ttttaaagttagcacccccatcaaaatcatcccagattgtgaaaaatgctcagtttactttgtcaaactct

SEQ ID NO: 169978 - DNA, 72 bp, Homo sapiens
gaaaaatgctcagtttactttgtcaaactctttaagactcttgttaaagtcataaacacatgataaagacac

SEQ ID NO: 169979 - DNA, 72 bp, Homo sapiens
gctcagtttactttgtcaaactctttaagactcttgttaaagtcataaacacatgataaagacaccctccta

SEQ ID NO: 169980 - DNA, 70 bp, Homo sapiens
actttgtcaaactctttaagactcttgttaaagtcataaacacatgataaagacaccctcctacatccct

SEQ ID NO: 169981 - DNA, 70 bp, Homo sapiens
aactctttaagactcttgttaaagtcataaacacatgataaagacaccctcctacatcccttcttcctaa

SEQ ID NO: 169982 - DNA, 72 bp, Homo sapiens
tcttgttaaagtcataaacacatgataaagacaccctcctacatcccttcttcctaaaaagcatttcaccta

SEQ ID NO: 169983 - DNA, 75 bp, Homo sapiens
agtcataaacacatgataaagacaccctcctacatcccttcttcctaaaaagcatttcacctagctgattatata

SEQ ID NO: 169984 - DNA, 73 bp, Homo sapiens
atgataaagacaccctcctacatcccttcttcctaaaaagcatttcacctagctgattatatagctcttaaag

SEQ ID NO: 169985 - DNA, 72 bp, Homo sapiens
aagacaccctcctacatcccttcttcctaaaaagcatttcacctagctgattatatagctcttaaagtgaaa

SEQ ID NO: 169986 - DNA, 74 bp, Homo sapiens
atcccttcttcctaaaaagcatttcacctagctgattatatagctcttaaagtgaaactcttcccagtatcatg

SEQ ID NO: 169987 - DNA, 77 bp, Homo sapiens
ttcttcctaaaaagcatttcacctagctgattatatagctcttaaagtgaaactcttcccagtatcatgttctcata

SEQ ID NO: 169988 - DNA, 76 bp, Homo sapiens
aagcatttcacctagctgattatatagctcttaaagtgaaactcttcccagtatcatgttctcataggtactttta

SEQ ID NO: 169989 - DNA, 73 bp, Homo sapiens
acctagctgattatatagctcttaaagtgaaactcttcccagtatcatgttctcataggtacttttaaaatta

SEQ ID NO: 169990 - DNA, 70 bp, Homo sapiens
taaaattattttcttccatgagtgtcaagtactctgtataatgttaataaaccacataaaattaaaagaa

SEQ ID NO: 169991 - DNA, 72 bp, Homo sapiens
ttcttccatgagtgtcaagtactctgtataatgttaataaaccacataaaattaaaagaatccctctaataa

SEQ ID NO: 169992 - DNA, 72 bp, Homo sapiens
gagtgtcaagtactctgtataatgttaataaaccacataaaattaaaagaatccctctaataaagtgagcca

SEQ ID NO: 169993 - DNA, 71 bp, Homo sapiens
gtactctgtataatgttaataaaccacataaaattaaaagaatccctctaataaagtgagccagactacac

SEQ ID NO: 169994 - DNA, 71 bp, Homo sapiens
atgttaataaaccacataaaattaaaagaatccctctaataaagtgagccagactacacttatcacttagc

SEQ ID NO: 169995 - DNA, 69 bp, Homo sapiens
aaccacataaaattaaaagaatccctctaataaagtgagccagactacacttatcacttagcctttaaa

SEQ ID NO: 169996 - DNA, 71 bp, Homo sapiens
aagaatccctctaataaagtgagccagactacacttatcacttagcctttaaaagcgaaatgtggaaaaca

SEQ ID NO: 169997 - DNA, 70 bp, Homo sapiens
aataaagtgagccagactacacttatcacttagcctttaaaagcgaaatgtggaaaacaaaatcaagcct

SEQ ID NO: 169998 - DNA, 71 bp, Homo sapiens
agccagactacacttatcacttagcctttaaaagcgaaatgtggaaaacaaaatcaagccttctagagaaa

SEQ ID NO: 169999 - DNA, 71 bp, Homo sapiens
tatcacttagcctttaaaagcgaaatgtggaaaacaaaatcaagccttctagagaaagcatcccacaattt

SEQ ID NO: 170000 - DNA, 69 bp, Homo sapiens
cttagcctttaaaagcgaaatgtggaaaacaaaatcaagccttctagagaaagcatcccacaattttaa

SEQ ID NO: 170001 - DNA, 70 bp, Homo sapiens
aaaagcgaaatgtggaaaacaaaatcaagccttctagagaaagcatcccacaattttaaaaatcaactgc

SEQ ID NO: 170002 - DNA, 67 bp, Homo sapiens
gtggaaaacaaaatcaagccttctagagaaagcatcccacaattttaaaaatcaactgctttttttt

SEQ ID NO: 170003 - DNA, 72 bp, Homo sapiens
tttttttctttgcaggaggtgggggatggcaaaaaaagatatctgctttcttaagaatgtactcatctactg

SEQ ID NO: 170004 - DNA, 77 bp, Homo sapiens
tgggggatggcaaaaaaagatatctgctttcttaagaatgtactcatctactggaaacactgtgcctgcttgtctag

SEQ ID NO: 170005 - DNA, 80 bp, Homo sapiens
aagatatctgctttcttaagaatgtactcatctactggaaacactgtgcctgcttgtctaggagctcctgggggcagagc

SEQ ID NO: 170006 - DNA, 81 bp, Homo sapiens
aatgtactcatctactggaaacactgtgcctgcttgtctaggagctcctgggggcagagccatggatacccaccagtctca

SEQ ID NO: 170007 - DNA, 78 bp, Homo sapiens
tactggaaacactgtgcctgcttgtctaggagctcctgggggcagagccatggatacccaccagtctcaccaccaaaa

SEQ ID NO: 170008 - DNA, 76 bp, Homo sapiens
tgtgcctgcttgtctaggagctcctgggggcagagccatggatacccaccagtctcaccaccaaaaaacgtgcttt

SEQ ID NO: 170009 - DNA, 71 bp, Homo sapiens
cttgtctaggagctcctgggggcagagccatggatacccaccagtctcaccaccaaaaaacgtgctttttt

SEQ ID NO: 170010 - DNA, 71 bp, Homo sapiens
tcctgggggcagagccatggatacccaccagtctcaccaccaaaaaacgtgcttttttttagctacacaat

SEQ ID NO: 170011 - DNA, 69 bp, Homo sapiens
agagccatggatacccaccagtctcaccaccaaaaaacgtgcttttttttagctacacaatttttaaca

SEQ ID NO: 170012 - DNA, 67 bp, Homo sapiens
catggatacccaccagtctcaccaccaaaaaacgtgcttttttttagctacacaatttttaacaatt

SEQ ID NO: 170013 - DNA, 67 bp, Homo sapiens
ccagtctcaccaccaaaaaacgtgcttttttttagctacacaatttttaacaattttgtctgccaag

SEQ ID NO: 170014 - DNA, 66 bp, Homo sapiens
accaccaaaaaacgtgcttttttttagctacacaatttttaacaattttgtctgccaaggtgttga

SEQ ID NO: 170015 - DNA, 69 bp, Homo sapiens
aacgtgcttttttttagctacacaatttttaacaattttgtctgccaaggtgttgaatatattatttgc

SEQ ID NO: 170016 - DNA, 71 bp, Homo sapiens
ttagctacacaatttttaacaattttgtctgccaaggtgttgaatatattatttgctttctaattttctac

SEQ ID NO: 170017 - DNA, 71 bp, Homo sapiens
ttttgtctgccaaggtgttgaatatattatttgctttctaattttctactaatccaaaacacagaaaacca

SEQ ID NO: 170018 - DNA, 73 bp, Homo sapiens
gccaaggtgttgaatatattatttgctttctaattttctactaatccaaaacacagaaaaccatccatctgac

SEQ ID NO: 170019 - DNA, 71 bp, Homo sapiens
ttgctttctaattttctactaatccaaaacacagaaaaccatccatctgaccttccgattaacaaaagata

SEQ ID NO: 170020 - DNA, 73 bp, Homo sapiens
taattttctactaatccaaaacacagaaaaccatccatctgaccttccgattaacaaaagatagccaggatga

SEQ ID NO: 170021 - DNA, 74 bp, Homo sapiens
taatccaaaacacagaaaaccatccatctgaccttccgattaacaaaagatagccaggatgaccacattccaaa

SEQ ID NO: 170022 - DNA, 74 bp, Homo sapiens
accatccatctgaccttccgattaacaaaagatagccaggatgaccacattccaaaagccaagaaaggtgatat

SEQ ID NO: 170023 - DNA, 71 bp, Homo sapiens
accttccgattaacaaaagatagccaggatgaccacattccaaaagccaagaaaggtgatatttcagttaa

SEQ ID NO: 170024 - DNA, 73 bp, Homo sapiens
attaacaaaagatagccaggatgaccacattccaaaagccaagaaaggtgatatttcagttaacctgtatagc

SEQ ID NO: 170025 - DNA, 76 bp, Homo sapiens
aagatagccaggatgaccacattccaaaagccaagaaaggtgatatttcagttaacctgtatagctctgtcaggga

SEQ ID NO: 170026 - DNA, 73 bp, Homo sapiens
accacattccaaaagccaagaaaggtgatatttcagttaacctgtatagctctgtcagggagtaaatttatga

SEQ ID NO: 170027 - DNA, 72 bp, Homo sapiens
attccaaaagccaagaaaggtgatatttcagttaacctgtatagctctgtcagggagtaaatttatgatttc

SEQ ID NO: 170028 - DNA, 70 bp, Homo sapiens
ccaagaaaggtgatatttcagttaacctgtatagctctgtcagggagtaaatttatgatttcttttttgt

SEQ ID NO: 170029 - DNA, 73 bp, Homo sapiens
tttcagttaacctgtatagctctgtcagggagtaaatttatgatttcttttttgttcctgtatcttaatgtgc

SEQ ID NO: 170030 - DNA, 74 bp, Homo sapiens
cctgtatagctctgtcagggagtaaatttatgatttcttttttgttcctgtatcttaatgtgccctatgatttc

SEQ ID NO: 170031 - DNA, 74 bp, Homo sapiens
gctctgtcagggagtaaatttatgatttcttttttgttcctgtatcttaatgtgccctatgatttctattaggc

SEQ ID NO: 170032 - DNA, 71 bp, Homo sapiens
gggagtaaatttatgatttcttttttgttcctgtatcttaatgtgccctatgatttctattaggcttttca

SEQ ID NO: 170033 - DNA, 71 bp, Homo sapiens
atgatttcttttttgttcctgtatcttaatgtgccctatgatttctattaggcttttcaaaataataacat

SEQ ID NO: 170034 - DNA, 75 bp, Homo sapiens
tttgttcctgtatcttaatgtgccctatgatttctattaggcttttcaaaataataacattaagtctcctgatgc

SEQ ID NO: 170035 - DNA, 75 bp, Homo sapiens
cctgtatcttaatgtgccctatgatttctattaggcttttcaaaataataacattaagtctcctgatgcctatta

SEQ ID NO: 170036 - DNA, 74 bp, Homo sapiens
gtgccctatgatttctattaggcttttcaaaataataacattaagtctcctgatgcctattaattccattgttc

SEQ ID NO: 170037 - DNA, 75 bp, Homo sapiens
tatgatttctattaggcttttcaaaataataacattaagtctcctgatgcctattaattccattgttctctttca

SEQ ID NO: 170038 - DNA, 75 bp, Homo sapiens
ataataacattaagtctcctgatgcctattaattccattgttctctttcaagaggaatagtaatacacagagaaa

SEQ ID NO: 170039 - DNA, 76 bp, Homo sapiens
attaagtctcctgatgcctattaattccattgttctctttcaagaggaatagtaatacacagagaaataaccagca

SEQ ID NO: 170040 - DNA, 79 bp, Homo sapiens
tttcaagaggaatagtaatacacagagaaataaccagcatgctaacctgttttatccaagatcattcttgatgatgaag

SEQ ID NO: 170041 - DNA, 79 bp, Homo sapiens
tagtaatacacagagaaataaccagcatgctaacctgttttatccaagatcattcttgatgatgaaggctaatgctttt

SEQ ID NO: 170042 - DNA, 74 bp, Homo sapiens
aaccagcatgctaacctgttttatccaagatcattcttgatgatgaaggctaatgctttttctgtttttatttt

SEQ ID NO: 170043 - DNA, 74 bp, Homo sapiens
gctaacctgttttatccaagatcattcttgatgatgaaggctaatgctttttctgtttttatttttcagcaaaa

SEQ ID NO: 170044 - DNA, 73 bp, Homo sapiens
ccaagatcattcttgatgatgaaggctaatgctttttctgtttttatttttcagcaaaaagaactctaccttc

SEQ ID NO: 170045 - DNA, 74 bp, Homo sapiens
cattcttgatgatgaaggctaatgctttttctgtttttatttttcagcaaaaagaactctaccttctatgctac

SEQ ID NO: 170046 - DNA, 74 bp, Homo sapiens
tgatgaaggctaatgctttttctgtttttatttttcagcaaaaagaactctaccttctatgctactataattca

SEQ ID NO: 170047 - DNA, 71 bp, Homo sapiens
gctttttctgtttttatttttcagcaaaaagaactctaccttctatgctactataattcagattcaaacat

SEQ ID NO: 170048 - DNA, 69 bp, Homo sapiens
gtttttatttttcagcaaaaagaactctaccttctatgctactataattcagattcaaacattcccctt

SEQ ID NO: 170049 - DNA, 75 bp, Homo sapiens
tcagcaaaaagaactctaccttctatgctactataattcagattcaaacattcccctttaaatgttccatctagc

SEQ ID NO: 170050 - DNA, 75 bp, Homo sapiens
gaactctaccttctatgctactataattcagattcaaacattcccctttaaatgttccatctagccttcattaca

SEQ ID NO: 170051 - DNA, 75 bp, Homo sapiens
ctactataattcagattcaaacattcccctttaaatgttccatctagccttcattacaaaagatcctgccatcaa

SEQ ID NO: 170052 - DNA, 77 bp, Homo sapiens
ttcagattcaaacattcccctttaaatgttccatctagccttcattacaaaagatcctgccatcaagccacaacata

SEQ ID NO: 170053 - DNA, 75 bp, Homo sapiens
taaatgttccatctagccttcattacaaaagatcctgccatcaagccacaacatacccaacccctctcaaaaata

SEQ ID NO: 170054 - DNA, 66 bp, Homo sapiens
caaaaataaaataaggaaacaaaaagagaattcaaagtccagggaatcccatctctaccatttaac

SEQ ID NO: 170055 - DNA, 68 bp, Homo sapiens
ataaggaaacaaaaagagaattcaaagtccagggaatcccatctctaccatttaactttacctatgtc

SEQ ID NO: 170056 - DNA, 67 bp, Homo sapiens
aaacaaaaagagaattcaaagtccagggaatcccatctctaccatttaactttacctatgtccttgg

SEQ ID NO: 170057 - DNA, 68 bp, Homo sapiens
aaaaagagaattcaaagtccagggaatcccatctctaccatttaactttacctatgtccttgggcaaa

SEQ ID NO: 170058 - DNA, 70 bp, Homo sapiens
ttcaaagtccagggaatcccatctctaccatttaactttacctatgtccttgggcaaactgcttaattta

SEQ ID NO: 170059 - DNA, 72 bp, Homo sapiens
agggaatcccatctctaccatttaactttacctatgtccttgggcaaactgcttaatttatctgatcttcag

SEQ ID NO: 170060 - DNA, 74 bp, Homo sapiens
atcccatctctaccatttaactttacctatgtccttgggcaaactgcttaatttatctgatcttcaggcttcaa

SEQ ID NO: 170061 - DNA, 74 bp, Homo sapiens
atctctaccatttaactttacctatgtccttgggcaaactgcttaatttatctgatcttcaggcttcaaataga

SEQ ID NO: 170062 - DNA, 75 bp, Homo sapiens
atttaactttacctatgtccttgggcaaactgcttaatttatctgatcttcaggcttcaaatagatcacatggta

SEQ ID NO: 170063 - DNA, 77 bp, Homo sapiens
tttacctatgtccttgggcaaactgcttaatttatctgatcttcaggcttcaaatagatcacatggtaacagaaaca

SEQ ID NO: 170064 - DNA, 80 bp, Homo sapiens
gcttaatttatctgatcttcaggcttcaaatagatcacatggtaacagaaacaatttgcaaagctgtagtgaaaatcaga

SEQ ID NO: 170065 - DNA, 78 bp, Homo sapiens
atcttcaggcttcaaatagatcacatggtaacagaaacaatttgcaaagctgtagtgaaaatcagaaagtatacacag

SEQ ID NO: 170066 - DNA, 78 bp, Homo sapiens
aggcttcaaatagatcacatggtaacagaaacaatttgcaaagctgtagtgaaaatcagaaagtatacacagtgccta

SEQ ID NO: 170067 - DNA, 79 bp, Homo sapiens
ggtaacagaaacaatttgcaaagctgtagtgaaaatcagaaagtatacacagtgcctagcccacagcctggcatatata

SEQ ID NO: 170068 - DNA, 79 bp, Homo sapiens
aatttgcaaagctgtagtgaaaatcagaaagtatacacagtgcctagcccacagcctggcatatataggctttcaataa

SEQ ID NO: 170069 - DNA, 80 bp, Homo sapiens
tgtagtgaaaatcagaaagtatacacagtgcctagcccacagcctggcatatataggctttcaataaaaggctgctctta

SEQ ID NO: 170070 - DNA, 78 bp, Homo sapiens
aaaatcagaaagtatacacagtgcctagcccacagcctggcatatataggctttcaataaaaggctgctcttagtata

SEQ ID NO: 170071 - DNA, 81 bp, Homo sapiens
tatacacagtgcctagcccacagcctggcatatataggctttcaataaaaggctgctcttagtatactatcagagatttat

SEQ ID NO: 170072 - DNA, 79 bp, Homo sapiens
ctagcccacagcctggcatatataggctttcaataaaaggctgctcttagtatactatcagagatttattccgttcaga

SEQ ID NO: 170073 - DNA, 80 bp, Homo sapiens
gcctggcatatataggctttcaataaaaggctgctcttagtatactatcagagatttattccgttcagagacagcagtta

SEQ ID NO: 170074 - DNA, 78 bp, Homo sapiens
atataggctttcaataaaaggctgctcttagtatactatcagagatttattccgttcagagacagcagttatatattc

SEQ ID NO: 170075 - DNA, 75 bp, Homo sapiens
ctttcaataaaaggctgctcttagtatactatcagagatttattccgttcagagacagcagttatatattccctt

SEQ ID NO: 170076 - DNA, 77 bp, Homo sapiens
aaaggctgctcttagtatactatcagagatttattccgttcagagacagcagttatatattccctttgagattaaga

SEQ ID NO: 170077 - DNA, 75 bp, Homo sapiens
cttagtatactatcagagatttattccgttcagagacagcagttatatattccctttgagattaagaggattttc

SEQ ID NO: 170078 - DNA, 76 bp, Homo sapiens
atcagagatttattccgttcagagacagcagttatatattccctttgagattaagaggattttctgattcctttga

SEQ ID NO: 170079 - DNA, 74 bp, Homo sapiens
ttattccgttcagagacagcagttatatattccctttgagattaagaggattttctgattcctttgattggaac

SEQ ID NO: 170080 - DNA, 70 bp, Homo sapiens
agttatatattccctttgagattaagaggattttctgattcctttgattggaactctatgggttgaaaaa

SEQ ID NO: 170081 - DNA, 72 bp, Homo sapiens
agaggattttctgattcctttgattggaactctatgggttgaaaaatataattaagctagaccttctcagaa

SEQ ID NO: 170082 - DNA, 72 bp, Homo sapiens
ttctgattcctttgattggaactctatgggttgaaaaatataattaagctagaccttctcagaaagtacatt

SEQ ID NO: 170083 - DNA, 71 bp, Homo sapiens
cctttgattggaactctatgggttgaaaaatataattaagctagaccttctcagaaagtacatttacatta

SEQ ID NO: 170084 - DNA, 71 bp, Homo sapiens
gaactctatgggttgaaaaatataattaagctagaccttctcagaaagtacatttacattaatattaatta

SEQ ID NO: 170085 - DNA, 74 bp, Homo sapiens
cagaaagtacatttacattaatattaattaatgcaaacagctgtttgagaaagccagcacgataaacctgtttc

SEQ ID NO: 170086 - DNA, 74 bp, Homo sapiens
tttacattaatattaattaatgcaaacagctgtttgagaaagccagcacgataaacctgtttcttggtcaggtg

SEQ ID NO: 170087 - DNA, 75 bp, Homo sapiens
tattaattaatgcaaacagctgtttgagaaagccagcacgataaacctgtttcttggtcaggtgtgaaatcctat

SEQ ID NO: 170088 - DNA, 73 bp, Homo sapiens
aaacagctgtttgagaaagccagcacgataaacctgtttcttggtcaggtgtgaaatcctattgttctcaagt

SEQ ID NO: 170089 - DNA, 76 bp, Homo sapiens
ttgagaaagccagcacgataaacctgtttcttggtcaggtgtgaaatcctattgttctcaagttatgagtcattta

SEQ ID NO: 170090 - DNA, 73 bp, Homo sapiens
ccagcacgataaacctgtttcttggtcaggtgtgaaatcctattgttctcaagttatgagtcatttaagttaa

SEQ ID NO: 170091 - DNA, 72 bp, Homo sapiens
cgataaacctgtttcttggtcaggtgtgaaatcctattgttctcaagttatgagtcatttaagttaatgatt

SEQ ID NO: 170092 - DNA, 75 bp, Homo sapiens
cttggtcaggtgtgaaatcctattgttctcaagttatgagtcatttaagttaatgatttattcctctagatatgg

SEQ ID NO: 170093 - DNA, 77 bp, Homo sapiens
ggtgtgaaatcctattgttctcaagttatgagtcatttaagttaatgatttattcctctagatatggttagctatca

SEQ ID NO: 170094 - DNA, 77 bp, Homo sapiens
cctattgttctcaagttatgagtcatttaagttaatgatttattcctctagatatggttagctatcaaagaactgca

SEQ ID NO: 170095 - DNA, 79 bp, Homo sapiens
tctcaagttatgagtcatttaagttaatgatttattcctctagatatggttagctatcaaagaactgcaactgtacaca

SEQ ID NO: 170096 - DNA, 76 bp, Homo sapiens
gttaatgatttattcctctagatatggttagctatcaaagaactgcaactgtacacaaagaaatagctttcaagaa

SEQ ID NO: 170097 - DNA, 78 bp, Homo sapiens
tagatatggttagctatcaaagaactgcaactgtacacaaagaaatagctttcaagaaatactacacccactgccaca

SEQ ID NO: 170098 - DNA, 74 bp, Homo sapiens
aactgcaactgtacacaaagaaatagctttcaagaaatactacacccactgccacacacagaaattaaaatcta

SEQ ID NO: 170099 - DNA, 71 bp, Homo sapiens
caagaaatactacacccactgccacacacagaaattaaaatctaataaaaaccaaaatgaatgccctatcc

SEQ ID NO: 170100 - DNA, 71 bp, Homo sapiens
ctgccacacacagaaattaaaatctaataaaaaccaaaatgaatgccctatccttagtataagaagaacaa

SEQ ID NO: 170101 - DNA, 67 bp, Homo sapiens
aataaaaaccaaaatgaatgccctatccttagtataagaagaacaaaccaaaaaatgctaagttaca

SEQ ID NO: 170102 - DNA, 73 bp, Homo sapiens
ccaaaatgaatgccctatccttagtataagaagaacaaaccaaaaaatgctaagttacatgaactgagatcca

SEQ ID NO: 170103 - DNA, 76 bp, Homo sapiens
aatgccctatccttagtataagaagaacaaaccaaaaaatgctaagttacatgaactgagatccaatctgcagcaa

SEQ ID NO: 170104 - DNA, 76 bp, Homo sapiens
tccttagtataagaagaacaaaccaaaaaatgctaagttacatgaactgagatccaatctgcagcaagtagaagga

SEQ ID NO: 170105 - DNA, 76 bp, Homo sapiens
aagaagaacaaaccaaaaaatgctaagttacatgaactgagatccaatctgcagcaagtagaaggagccaggcaag

SEQ ID NO: 170106 - DNA, 79 bp, Homo sapiens
aaaaatgctaagttacatgaactgagatccaatctgcagcaagtagaaggagccaggcaaggcattccaataggcgttc

SEQ ID NO: 170107 - DNA, 81 bp, Homo sapiens
taagttacatgaactgagatccaatctgcagcaagtagaaggagccaggcaaggcattccaataggcgttcgtgtagccca

SEQ ID NO: 170108 - DNA, 81 bp, Homo sapiens
aactgagatccaatctgcagcaagtagaaggagccaggcaaggcattccaataggcgttcgtgtagcccattgtgcatcct

SEQ ID NO: 170109 - DNA, 76 bp, Homo sapiens
aagtagaaggagccaggcaaggcattccaataggcgttcgtgtagcccattgtgcatccttcccctatgtccctga

SEQ ID NO: 170110 - DNA, 74 bp, Homo sapiens
aaggcattccaataggcgttcgtgtagcccattgtgcatccttcccctatgtccctgactcctaatccaggtgg

SEQ ID NO: 170111 - DNA, 73 bp, Homo sapiens
aataggcgttcgtgtagcccattgtgcatccttcccctatgtccctgactcctaatccaggtgggtatctacc

SEQ ID NO: 170112 - DNA, 73 bp, Homo sapiens
gttcgtgtagcccattgtgcatccttcccctatgtccctgactcctaatccaggtgggtatctacccctctgg

SEQ ID NO: 170113 - DNA, 78 bp, Homo sapiens
ttgtgcatccttcccctatgtccctgactcctaatccaggtgggtatctacccctctgggctcctgcatgatctacta

SEQ ID NO: 170114 - DNA, 75 bp, Homo sapiens
atccttcccctatgtccctgactcctaatccaggtgggtatctacccctctgggctcctgcatgatctactatgt

SEQ ID NO: 170115 - DNA, 77 bp, Homo sapiens
tgtccctgactcctaatccaggtgggtatctacccctctgggctcctgcatgatctactatgttcaggccctgttta

SEQ ID NO: 170116 - DNA, 75 bp, Homo sapiens
actcctaatccaggtgggtatctacccctctgggctcctgcatgatctactatgttcaggccctgtttacttctc

SEQ ID NO: 170117 - DNA, 78 bp, Homo sapiens
tgggtatctacccctctgggctcctgcatgatctactatgttcaggccctgtttacttctctgctgggaacactagaa

SEQ ID NO: 170118 - DNA, 76 bp, Homo sapiens
ccctctgggctcctgcatgatctactatgttcaggccctgtttacttctctgctgggaacactagaactccaaact

SEQ ID NO: 170119 - DNA, 75 bp, Homo sapiens
ctcctgcatgatctactatgttcaggccctgtttacttctctgctgggaacactagaactccaaacttttggagg

SEQ ID NO: 170120 - DNA, 74 bp, Homo sapiens
ttcaggccctgtttacttctctgctgggaacactagaactccaaacttttggagggcatggagggactgaatca

SEQ ID NO: 170121 - DNA, 74 bp, Homo sapiens
tttacttctctgctgggaacactagaactccaaacttttggagggcatggagggactgaatcatggttatctgg

SEQ ID NO: 170122 - DNA, 77 bp, Homo sapiens
tgctgggaacactagaactccaaacttttggagggcatggagggactgaatcatggttatctggtatctggcacatt

SEQ ID NO: 170123 - DNA, 77 bp, Homo sapiens
aacactagaactccaaacttttggagggcatggagggactgaatcatggttatctggtatctggcacattttgagca

SEQ ID NO: 170124 - DNA, 77 bp, Homo sapiens
caaacttttggagggcatggagggactgaatcatggttatctggtatctggcacattttgagcaacctacaaatgtc

SEQ ID NO: 170125 - DNA, 78 bp, Homo sapiens
ttttggagggcatggagggactgaatcatggttatctggtatctggcacattttgagcaacctacaaatgtctactac

SEQ ID NO: 170126 - DNA, 74 bp, Homo sapiens
ttatctggtatctggcacattttgagcaacctacaaatgtctactacccaactttcctcattacagtaactttc

SEQ ID NO: 170127 - DNA, 74 bp, Homo sapiens
tctggcacattttgagcaacctacaaatgtctactacccaactttcctcattacagtaactttctgttgtcgta

SEQ ID NO: 170128 - DNA, 70 bp, Homo sapiens
ctttcctcattacagtaactttctgttgtcgtagccttacatttttggttctgcttaatactctcttaat

SEQ ID NO: 170129 - DNA, 70 bp, Homo sapiens
ctttctgttgtcgtagccttacatttttggttctgcttaatactctcttaattaactatatataggttcc

SEQ ID NO: 170130 - DNA, 68 bp, Homo sapiens
acatttttggttctgcttaatactctcttaattaactatatataggttccctaattcccaaacaatta

SEQ ID NO: 170131 - DNA, 68 bp, Homo sapiens
ttctgcttaatactctcttaattaactatatataggttccctaattcccaaacaattataaaataaat

SEQ ID NO: 170132 - DNA, 68 bp, Homo sapiens
tctcttaattaactatatataggttccctaattcccaaacaattataaaataaatttaataggcacac

SEQ ID NO: 170133 - DNA, 69 bp, Homo sapiens
ctatatataggttccctaattcccaaacaattataaaataaatttaataggcacacttttgccataggc

SEQ ID NO: 170134 - DNA, 69 bp, Homo sapiens
taggttccctaattcccaaacaattataaaataaatttaataggcacacttttgccataggccaagtga

SEQ ID NO: 170135 - DNA, 72 bp, Homo sapiens
attcccaaacaattataaaataaatttaataggcacacttttgccataggccaagtgattattgtcacagaa

SEQ ID NO: 170136 - DNA, 72 bp, Homo sapiens
ttataaaataaatttaataggcacacttttgccataggccaagtgattattgtcacagaattttctcccagg

SEQ ID NO: 170137 - DNA, 73 bp, Homo sapiens
aaataaatttaataggcacacttttgccataggccaagtgattattgtcacagaattttctcccaggtagctc

SEQ ID NO: 170138 - DNA, 78 bp, Homo sapiens
aataggcacacttttgccataggccaagtgattattgtcacagaattttctcccaggtagctctgcaatcctagagtg

SEQ ID NO: 170139 - DNA, 78 bp, Homo sapiens
aagtgattattgtcacagaattttctcccaggtagctctgcaatcctagagtgggaggggagaaagcatacgatgaga

SEQ ID NO: 170140 - DNA, 79 bp, Homo sapiens
ttttctcccaggtagctctgcaatcctagagtgggaggggagaaagcatacgatgagagcgatccaggactgaagataa

SEQ ID NO: 170141 - DNA, 76 bp, Homo sapiens
caatcctagagtgggaggggagaaagcatacgatgagagcgatccaggactgaagataaaagacaacaaagtaaga

SEQ ID NO: 170142 - DNA, 77 bp, Homo sapiens
agagcgatccaggactgaagataaaagacaacaaagtaagactgacactaatatgctaacatgatttaatgtacatt

SEQ ID NO: 170143 - DNA, 77 bp, Homo sapiens
agacaacaaagtaagactgacactaatatgctaacatgatttaatgtacatttgagatttacaaacagcacagttaa

SEQ ID NO: 170144 - DNA, 77 bp, Homo sapiens
gtaagactgacactaatatgctaacatgatttaatgtacatttgagatttacaaacagcacagttaagaaaatgtcc

SEQ ID NO: 170145 - DNA, 77 bp, Homo sapiens
actgacactaatatgctaacatgatttaatgtacatttgagatttacaaacagcacagttaagaaaatgtcctcaaa

SEQ ID NO: 170146 - DNA, 75 bp, Homo sapiens
gctaacatgatttaatgtacatttgagatttacaaacagcacagttaagaaaatgtcctcaaaagatcttcttac

SEQ ID NO: 170147 - DNA, 74 bp, Homo sapiens
gatttaatgtacatttgagatttacaaacagcacagttaagaaaatgtcctcaaaagatcttcttactttcata

SEQ ID NO: 170148 - DNA, 73 bp, Homo sapiens
catttgagatttacaaacagcacagttaagaaaatgtcctcaaaagatcttcttactttcataaactacctga

SEQ ID NO: 170149 - DNA, 70 bp, Homo sapiens
acaaacagcacagttaagaaaatgtcctcaaaagatcttcttactttcataaactacctgaacaagtccc

SEQ ID NO: 170150 - DNA, 71 bp, Homo sapiens
cagcacagttaagaaaatgtcctcaaaagatcttcttactttcataaactacctgaacaagtcccttaatc

SEQ ID NO: 170151 - DNA, 70 bp, Homo sapiens
aagaaaatgtcctcaaaagatcttcttactttcataaactacctgaacaagtcccttaatctctaggagc

SEQ ID NO: 170152 - DNA, 73 bp, Homo sapiens
ttcttactttcataaactacctgaacaagtcccttaatctctaggagcctcagtttcaacatctgtaaactga

SEQ ID NO: 170153 - DNA, 74 bp, Homo sapiens
aacaagtcccttaatctctaggagcctcagtttcaacatctgtaaactgaaggtgctcgcaagataaaccttca

SEQ ID NO: 170154 - DNA, 76 bp, Homo sapiens
ttaatctctaggagcctcagtttcaacatctgtaaactgaaggtgctcgcaagataaaccttcaagctctaaaata

SEQ ID NO: 170155 - DNA, 77 bp, Homo sapiens
ctctaggagcctcagtttcaacatctgtaaactgaaggtgctcgcaagataaaccttcaagctctaaaatatatata

SEQ ID NO: 170156 - DNA, 76 bp, Homo sapiens
ctcagtttcaacatctgtaaactgaaggtgctcgcaagataaaccttcaagctctaaaatatatatatctgttccc

SEQ ID NO: 170157 - DNA, 78 bp, Homo sapiens
ttcaagctctaaaatatatatatctgttcccctgatggctcagaaggcttttcagaaaattataattacagcatcttc

SEQ ID NO: 170158 - DNA, 76 bp, Homo sapiens
aaaatatatatatctgttcccctgatggctcagaaggcttttcagaaaattataattacagcatcttctttgcaaa

SEQ ID NO: 170159 - DNA, 79 bp, Homo sapiens
tatatatctgttcccctgatggctcagaaggcttttcagaaaattataattacagcatcttctttgcaaacatccatta

SEQ ID NO: 170160 - DNA, 79 bp, Homo sapiens
cctgatggctcagaaggcttttcagaaaattataattacagcatcttctttgcaaacatccattaacaatgtagtgata

SEQ ID NO: 170161 - DNA, 79 bp, Homo sapiens
tggctcagaaggcttttcagaaaattataattacagcatcttctttgcaaacatccattaacaatgtagtgataagata

SEQ ID NO: 170162 - DNA, 76 bp, Homo sapiens
ggcttttcagaaaattataattacagcatcttctttgcaaacatccattaacaatgtagtgataagatagttaata

SEQ ID NO: 170163 - DNA, 77 bp, Homo sapiens
ttataattacagcatcttctttgcaaacatccattaacaatgtagtgataagatagttaataaacatttctaggcta

SEQ ID NO: 170164 - DNA, 78 bp, Homo sapiens
gcatcttctttgcaaacatccattaacaatgtagtgataagatagttaataaacatttctaggctatataatgtctac

SEQ ID NO: 170165 - DNA, 78 bp, Homo sapiens
tctttgcaaacatccattaacaatgtagtgataagatagttaataaacatttctaggctatataatgtctactaagca

SEQ ID NO: 170166 - DNA, 75 bp, Homo sapiens
acatccattaacaatgtagtgataagatagttaataaacatttctaggctatataatgtctactaagcaaatgtt

SEQ ID NO: 170167 - DNA, 74 bp, Homo sapiens
caatgtagtgataagatagttaataaacatttctaggctatataatgtctactaagcaaatgtttactttaaga

SEQ ID NO: 170168 - DNA, 71 bp, Homo sapiens
gataagatagttaataaacatttctaggctatataatgtctactaagcaaatgtttactttaagaaataaa

SEQ ID NO: 170169 - DNA, 70 bp, Homo sapiens
aaataaacaagtagttgtcttatgaaagcttaagatgtcataaccatcacccccttcaagaaaaagatta

SEQ ID NO: 170170 - DNA, 72 bp, Homo sapiens
gtagttgtcttatgaaagcttaagatgtcataaccatcacccccttcaagaaaaagattaaacaattatcat

SEQ ID NO: 170171 - DNA, 72 bp, Homo sapiens
gaaagcttaagatgtcataaccatcacccccttcaagaaaaagattaaacaattatcattttcaatagacca

SEQ ID NO: 170172 - DNA, 74 bp, Homo sapiens
tgtcataaccatcacccccttcaagaaaaagattaaacaattatcattttcaatagaccattaactgcacagga

SEQ ID NO: 170173 - DNA, 73 bp, Homo sapiens
ccttcaagaaaaagattaaacaattatcattttcaatagaccattaactgcacaggaagatggcctgtgaaag

SEQ ID NO: 170174 - DNA, 75 bp, Homo sapiens
agattaaacaattatcattttcaatagaccattaactgcacaggaagatggcctgtgaaagtttccaaatatcat

SEQ ID NO: 170175 - DNA, 78 bp, Homo sapiens
ttatcattttcaatagaccattaactgcacaggaagatggcctgtgaaagtttccaaatatcattttacatacacaga

SEQ ID NO: 170176 - DNA, 76 bp, Homo sapiens
ttttcaatagaccattaactgcacaggaagatggcctgtgaaagtttccaaatatcattttacatacacagaacta

SEQ ID NO: 170177 - DNA, 74 bp, Homo sapiens
ttaactgcacaggaagatggcctgtgaaagtttccaaatatcattttacatacacagaactaaaaggccaagta

SEQ ID NO: 170178 - DNA, 72 bp, Homo sapiens
aggaagatggcctgtgaaagtttccaaatatcattttacatacacagaactaaaaggccaagtactctgaaa

SEQ ID NO: 170179 - DNA, 73 bp, Homo sapiens
gatggcctgtgaaagtttccaaatatcattttacatacacagaactaaaaggccaagtactctgaaatattaa

SEQ ID NO: 170180 - DNA, 70 bp, Homo sapiens
acatacacagaactaaaaggccaagtactctgaaatattaacagaaaagaatgtaaagagaagggagagg

SEQ ID NO: 170181 - DNA, 68 bp, Homo sapiens
gaactaaaaggccaagtactctgaaatattaacagaaaagaatgtaaagagaagggagagggtttcag

SEQ ID NO: 170182 - DNA, 67 bp, Homo sapiens
aagtactctgaaatattaacagaaaagaatgtaaagagaagggagagggtttcagggtttgaaggga

SEQ ID NO: 170183 - DNA, 69 bp, Homo sapiens
taacagaaaagaatgtaaagagaagggagagggtttcagggtttgaagggaagctggactgtctacatt

SEQ ID NO: 170184 - DNA, 70 bp, Homo sapiens
aatgtaaagagaagggagagggtttcagggtttgaagggaagctggactgtctacatttctgctacaaaa

SEQ ID NO: 170185 - DNA, 74 bp, Homo sapiens
ggagagggtttcagggtttgaagggaagctggactgtctacatttctgctacaaaaaagtaatgctgcataatc

SEQ ID NO: 170186 - DNA, 76 bp, Homo sapiens
tttcagggtttgaagggaagctggactgtctacatttctgctacaaaaaagtaatgctgcataatctacatttata

SEQ ID NO: 170187 - DNA, 76 bp, Homo sapiens
tttgaagggaagctggactgtctacatttctgctacaaaaaagtaatgctgcataatctacatttataattgggta

SEQ ID NO: 170188 - DNA, 75 bp, Homo sapiens
aagctggactgtctacatttctgctacaaaaaagtaatgctgcataatctacatttataattgggtatttacaac

SEQ ID NO: 170189 - DNA, 74 bp, Homo sapiens
gtctacatttctgctacaaaaaagtaatgctgcataatctacatttataattgggtatttacaacttacatagt

SEQ ID NO: 170190 - DNA, 73 bp, Homo sapiens
ctgctacaaaaaagtaatgctgcataatctacatttataattgggtatttacaacttacatagttttcttcta

SEQ ID NO: 170191 - DNA, 73 bp, Homo sapiens
aatgctgcataatctacatttataattgggtatttacaacttacatagttttcttctatagttggcacaaggg

SEQ ID NO: 170192 - DNA, 71 bp, Homo sapiens
gcataatctacatttataattgggtatttacaacttacatagttttcttctatagttggcacaagggttgt

SEQ ID NO: 170193 - DNA, 72 bp, Homo sapiens
tataattgggtatttacaacttacatagttttcttctatagttggcacaagggttgtttgatacagcaaaga

SEQ ID NO: 170194 - DNA, 72 bp, Homo sapiens
ggtatttacaacttacatagttttcttctatagttggcacaagggttgtttgatacagcaaagagcctaata

SEQ ID NO: 170195 - DNA, 74 bp, Homo sapiens
acaacttacatagttttcttctatagttggcacaagggttgtttgatacagcaaagagcctaatataatggcaa

SEQ ID NO: 170196 - DNA, 75 bp, Homo sapiens
ttcttctatagttggcacaagggttgtttgatacagcaaagagcctaatataatggcaaaccaacttgcaaagta

SEQ ID NO: 170197 - DNA, 74 bp, Homo sapiens
tatagttggcacaagggttgtttgatacagcaaagagcctaatataatggcaaaccaacttgcaaagtaaaata

SEQ ID NO: 170198 - DNA, 74 bp, Homo sapiens
agggttgtttgatacagcaaagagcctaatataatggcaaaccaacttgcaaagtaaaatagagtgtcagtgaa

SEQ ID NO: 170199 - DNA, 80 bp, Homo sapiens
tttgatacagcaaagagcctaatataatggcaaaccaacttgcaaagtaaaatagagtgtcagtgaatggactgctgtga

SEQ ID NO: 170200 - DNA, 78 bp, Homo sapiens
taatataatggcaaaccaacttgcaaagtaaaatagagtgtcagtgaatggactgctgtgagtgtttttattcttgca

SEQ ID NO: 170201 - DNA, 76 bp, Homo sapiens
aaaccaacttgcaaagtaaaatagagtgtcagtgaatggactgctgtgagtgtttttattcttgcataatagcatt

SEQ ID NO: 170202 - DNA, 83 bp, Homo sapiens
tgcaaagtaaaatagagtgtcagtgaatggactgctgtgagtgtttttattcttgcataatagcatttagatgcatctattaa

SEQ ID NO: 170203 - DNA, 73 bp, Homo sapiens
ttaaaaaaaaatccaagtgcattatccaaatgttcagttactagggatactaacagttgtctgtccatggcaa

SEQ ID NO: 170204 - DNA, 74 bp, Homo sapiens
aaaaatccaagtgcattatccaaatgttcagttactagggatactaacagttgtctgtccatggcaatttcatt

SEQ ID NO: 170205 - DNA, 76 bp, Homo sapiens
atccaagtgcattatccaaatgttcagttactagggatactaacagttgtctgtccatggcaatttcatttctgtt

SEQ ID NO: 170206 - DNA, 74 bp, Homo sapiens
agtgcattatccaaatgttcagttactagggatactaacagttgtctgtccatggcaatttcatttctgttttt

SEQ ID NO: 170207 - DNA, 72 bp, Homo sapiens
ccaaatgttcagttactagggatactaacagttgtctgtccatggcaatttcatttctgtttttttacacaa

SEQ ID NO: 170208 - DNA, 74 bp, Homo sapiens
ttcagttactagggatactaacagttgtctgtccatggcaatttcatttctgtttttttacacaaatcatcgct

SEQ ID NO: 170209 - DNA, 79 bp, Homo sapiens
gatactaacagttgtctgtccatggcaatttcatttctgtttttttacacaaatcatcgcttgcaagcattgatgttaa

SEQ ID NO: 170210 - DNA, 78 bp, Homo sapiens
atactaacagttgtctgtccatggcaatttcatttctgtttttttacacaaatcatcgcttgcaagcattgatgttaa

SEQ ID NO: 170211 - DNA, 77 bp, Homo sapiens
acagttgtctgtccatggcaatttcatttctgtttttttacacaaatcatcgcttgcaagcattgatgttaaaaaca

SEQ ID NO: 170212 - DNA, 77 bp, Homo sapiens
gttgtctgtccatggcaatttcatttctgtttttttacacaaatcatcgcttgcaagcattgatgttaaaaacagaa

SEQ ID NO: 170213 - DNA, 75 bp, Homo sapiens
ctgtccatggcaatttcatttctgtttttttacacaaatcatcgcttgcaagcattgatgttaaaaacagaaaaa

SEQ ID NO: 170214 - DNA, 75 bp, Homo sapiens
tcatttctgtttttttacacaaatcatcgcttgcaagcattgatgttaaaaacagaaaaatagtctagtacacag

SEQ ID NO: 170215 - DNA, 80 bp, Homo sapiens
tacacaaatcatcgcttgcaagcattgatgttaaaaacagaaaaatagtctagtacacagtggctataaatgccaaatca

SEQ ID NO: 170216 - DNA, 78 bp, Homo sapiens
gcttgcaagcattgatgttaaaaacagaaaaatagtctagtacacagtggctataaatgccaaatcaattttcagcaa

SEQ ID NO: 170217 - DNA, 80 bp, Homo sapiens
tagtctagtacacagtggctataaatgccaaatcaattttcagcaaataataaagtccatgttttacaatcagcaatgca

SEQ ID NO: 170218 - DNA, 78 bp, Homo sapiens
agtacacagtggctataaatgccaaatcaattttcagcaaataataaagtccatgttttacaatcagcaatgcactgt

SEQ ID NO: 170219 - DNA, 77 bp, Homo sapiens
tggctataaatgccaaatcaattttcagcaaataataaagtccatgttttacaatcagcaatgcactgttttactac

SEQ ID NO: 170220 - DNA, 73 bp, Homo sapiens
gccaaatcaattttcagcaaataataaagtccatgttttacaatcagcaatgcactgttttactacccaaaaa

SEQ ID NO: 170221 - DNA, 74 bp, Homo sapiens
cagcaaataataaagtccatgttttacaatcagcaatgcactgttttactacccaaaaatgtaagctaataata

SEQ ID NO: 170222 - DNA, 74 bp, Homo sapiens
gttttacaatcagcaatgcactgttttactacccaaaaatgtaagctaataatatatagctctactaaatggaa

SEQ ID NO: 170223 - DNA, 79 bp, Homo sapiens
cagcaatgcactgttttactacccaaaaatgtaagctaataatatatagctctactaaatggaaaatgcagatatgctg

SEQ ID NO: 170224 - DNA, 77 bp, Homo sapiens
tgcactgttttactacccaaaaatgtaagctaataatatatagctctactaaatggaaaatgcagatatgctgttaa

SEQ ID NO: 170225 - DNA, 73 bp, Homo sapiens
acccaaaaatgtaagctaataatatatagctctactaaatggaaaatgcagatatgctgttaaaaaatgggcc

SEQ ID NO: 170226 - DNA, 77 bp, Homo sapiens
aaatgtaagctaataatatatagctctactaaatggaaaatgcagatatgctgttaaaaaatgggccggctgtgaga

SEQ ID NO: 170227 - DNA, 79 bp, Homo sapiens
taataatatatagctctactaaatggaaaatgcagatatgctgttaaaaaatgggccggctgtgagaggatggatcatt

SEQ ID NO: 170228 - DNA, 80 bp, Homo sapiens
atagctctactaaatggaaaatgcagatatgctgttaaaaaatgggccggctgtgagaggatggatcatttctgcaggga

SEQ ID NO: 170229 - DNA, 77 bp, Homo sapiens
atggaaaatgcagatatgctgttaaaaaatgggccggctgtgagaggatggatcatttctgcagggaccttcttaaa

SEQ ID NO: 170230 - DNA, 77 bp, Homo sapiens
agatatgctgttaaaaaatgggccggctgtgagaggatggatcatttctgcagggaccttcttaaagctatgtgtaa

SEQ ID NO: 170231 - DNA, 73 bp, Homo sapiens
ttaaaaaatgggccggctgtgagaggatggatcatttctgcagggaccttcttaaagctatgtgtaagtgttt

SEQ ID NO: 170232 - DNA, 75 bp, Homo sapiens
aatgggccggctgtgagaggatggatcatttctgcagggaccttcttaaagctatgtgtaagtgttttgaaaata

SEQ ID NO: 170233 - DNA, 77 bp, Homo sapiens
atcatttctgcagggaccttcttaaagctatgtgtaagtgttttgaaaatatcacatgatgtggccatgtgttaaaa

SEQ ID NO: 170234 - DNA, 75 bp, Homo sapiens
ccttcttaaagctatgtgtaagtgttttgaaaatatcacatgatgtggccatgtgttaaaaattacagccagtta

SEQ ID NO: 170235 - DNA, 76 bp, Homo sapiens
atgtgtaagtgttttgaaaatatcacatgatgtggccatgtgttaaaaattacagccagttaagttctctgctaag

SEQ ID NO: 170236 - DNA, 76 bp, Homo sapiens
atgtggccatgtgttaaaaattacagccagttaagttctctgctaaggaaaatatgtgggcaatttatgaaatgca

SEQ ID NO: 170237 - DNA, 74 bp, Homo sapiens
atgtgttaaaaattacagccagttaagttctctgctaaggaaaatatgtgggcaatttatgaaatgcactccag

SEQ ID NO: 170238 - DNA, 78 bp, Homo sapiens
attacagccagttaagttctctgctaaggaaaatatgtgggcaatttatgaaatgcactccaggatggagatgtctta

SEQ ID NO: 170239 - DNA, 75 bp, Homo sapiens
agttaagttctctgctaaggaaaatatgtgggcaatttatgaaatgcactccaggatggagatgtcttaagtaaa

SEQ ID NO: 170240 - DNA, 74 bp, Homo sapiens
ctaaggaaaatatgtgggcaatttatgaaatgcactccaggatggagatgtcttaagtaaaaccagattttgaa

SEQ ID NO: 170241 - DNA, 73 bp, Homo sapiens
aatatgtgggcaatttatgaaatgcactccaggatggagatgtcttaagtaaaaccagattttgaaaacaaac

SEQ ID NO: 170242 - DNA, 70 bp, Homo sapiens
ggcaatttatgaaatgcactccaggatggagatgtcttaagtaaaaccagattttgaaaacaaacctttt

SEQ ID NO: 170243 - DNA, 69 bp, Homo sapiens
gaaatgcactccaggatggagatgtcttaagtaaaaccagattttgaaaacaaaccttttttttctctc

SEQ ID NO: 170244 - DNA, 70 bp, Homo sapiens
tcttttggaaacttgaacttaaaaaaaagttccaggcacatctggagagcaggaccattgagaaagggtg

SEQ ID NO: 170245 - DNA, 75 bp, Homo sapiens
aaaaagttccaggcacatctggagagcaggaccattgagaaagggtggtctgacctaatactagccatcttctaa

SEQ ID NO: 170246 - DNA, 76 bp, Homo sapiens
ttccaggcacatctggagagcaggaccattgagaaagggtggtctgacctaatactagccatcttctaaaagaaaa

SEQ ID NO: 170247 - DNA, 72 bp, Homo sapiens
accattgagaaagggtggtctgacctaatactagccatcttctaaaagaaaaagcactatttctgggctaca

SEQ ID NO: 170248 - DNA, 76 bp, Homo sapiens
tctgacctaatactagccatcttctaaaagaaaaagcactatttctgggctacagggactgtgctcacttattgtc

SEQ ID NO: 170249 - DNA, 73 bp, Homo sapiens
taatactagccatcttctaaaagaaaaagcactatttctgggctacagggactgtgctcacttattgtccttt

SEQ ID NO: 170250 - DNA, 70 bp, Homo sapiens
ttctaaaagaaaaagcactatttctgggctacagggactgtgctcacttattgtccttttaaggaaatag

SEQ ID NO: 170251 - DNA, 71 bp, Homo sapiens
agaaaaagcactatttctgggctacagggactgtgctcacttattgtccttttaaggaaatagtcctgaaa

SEQ ID NO: 170252 - DNA, 72 bp, Homo sapiens
actatttctgggctacagggactgtgctcacttattgtccttttaaggaaatagtcctgaaagcattttgta

SEQ ID NO: 170253 - DNA, 74 bp, Homo sapiens
actgtgctcacttattgtccttttaaggaaatagtcctgaaagcattttgtaggtcaacatatgttctttgata

SEQ ID NO: 170254 - DNA, 73 bp, Homo sapiens
gctcacttattgtccttttaaggaaatagtcctgaaagcattttgtaggtcaacatatgttctttgataatat

SEQ ID NO: 170255 - DNA, 73 bp, Homo sapiens
tgtccttttaaggaaatagtcctgaaagcattttgtaggtcaacatatgttctttgataatattatacaaaga

SEQ ID NO: 170256 - DNA, 72 bp, Homo sapiens
gtccttttaaggaaatagtcctgaaagcattttgtaggtcaacatatgttctttgataatattatacaaaga

SEQ ID NO: 170257 - DNA, 74 bp, Homo sapiens
tttaaggaaatagtcctgaaagcattttgtaggtcaacatatgttctttgataatattatacaaagattcataa

SEQ ID NO: 170258 - DNA, 73 bp, Homo sapiens
aggaaatagtcctgaaagcattttgtaggtcaacatatgttctttgataatattatacaaagattcataaaaa

SEQ ID NO: 170259 - DNA, 75 bp, Homo sapiens
gaaagcattttgtaggtcaacatatgttctttgataatattatacaaagattcataaaaatataagtgtttcaga

SEQ ID NO: 170260 - DNA, 74 bp, Homo sapiens
gtaggtcaacatatgttctttgataatattatacaaagattcataaaaatataagtgtttcagaaagcttggag

SEQ ID NO: 170261 - DNA, 77 bp, Homo sapiens
tatgttctttgataatattatacaaagattcataaaaatataagtgtttcagaaagcttggagtcactgcctcctga

SEQ ID NO: 170262 - DNA, 75 bp, Homo sapiens
ctttgataatattatacaaagattcataaaaatataagtgtttcagaaagcttggagtcactgcctcctgaaaca

SEQ ID NO: 170263 - DNA, 74 bp, Homo sapiens
attcataaaaatataagtgtttcagaaagcttggagtcactgcctcctgaaacaatataatgcccaaggtctcc

SEQ ID NO: 170264 - DNA, 74 bp, Homo sapiens
aaatataagtgtttcagaaagcttggagtcactgcctcctgaaacaatataatgcccaaggtctcccagccttc

SEQ ID NO: 170265 - DNA, 74 bp, Homo sapiens
agaaagcttggagtcactgcctcctgaaacaatataatgcccaaggtctcccagccttctcataagaaaacatt

SEQ ID NO: 170266 - DNA, 73 bp, Homo sapiens
ttggagtcactgcctcctgaaacaatataatgcccaaggtctcccagccttctcataagaaaacattttcctt

SEQ ID NO: 170267 - DNA, 69 bp, Homo sapiens
ccaaggtctcccagccttctcataagaaaacattttccttttcttaaacacaaggatctagttgttaca

SEQ ID NO: 170268 - DNA, 69 bp, Homo sapiens
ccagccttctcataagaaaacattttccttttcttaaacacaaggatctagttgttacaaaagtgacag

SEQ ID NO: 170269 - DNA, 68 bp, Homo sapiens
cttctcataagaaaacattttccttttcttaaacacaaggatctagttgttacaaaagtgacaggtag

SEQ ID NO: 170270 - DNA, 68 bp, Homo sapiens
cattttccttttcttaaacacaaggatctagttgttacaaaagtgacaggtagtaaaatgatatttct

SEQ ID NO: 170271 - DNA, 68 bp, Homo sapiens
ccttttcttaaacacaaggatctagttgttacaaaagtgacaggtagtaaaatgatatttctttataa

SEQ ID NO: 170272 - DNA, 70 bp, Homo sapiens
aaacacaaggatctagttgttacaaaagtgacaggtagtaaaatgatatttctttataatgagttaaaca

SEQ ID NO: 170273 - DNA, 70 bp, Homo sapiens
tacaaaagtgacaggtagtaaaatgatatttctttataatgagttaaacaattttgaaataatctatttc

SEQ ID NO: 170274 - DNA, 70 bp, Homo sapiens
caggtagtaaaatgatatttctttataatgagttaaacaattttgaaataatctatttctttaaagcatc

SEQ ID NO: 170275 - DNA, 69 bp, Homo sapiens
gatatttctttataatgagttaaacaattttgaaataatctatttctttaaagcatccttagcctcttt

SEQ ID NO: 170276 - DNA, 70 bp, Homo sapiens
gagttaaacaattttgaaataatctatttctttaaagcatccttagcctcttttgacttatatagttcat

SEQ ID NO: 170277 - DNA, 75 bp, Homo sapiens
gaaataatctatttctttaaagcatccttagcctcttttgacttatatagttcattttgaaacaatatgctagca

SEQ ID NO: 170278 - DNA, 74 bp, Homo sapiens
ctatttctttaaagcatccttagcctcttttgacttatatagttcattttgaaacaatatgctagcaacatctt

SEQ ID NO: 170279 - DNA, 74 bp, Homo sapiens
aaagcatccttagcctcttttgacttatatagttcattttgaaacaatatgctagcaacatctttaaaaacatg

SEQ ID NO: 170280 - DNA, 71 bp, Homo sapiens
ccttagcctcttttgacttatatagttcattttgaaacaatatgctagcaacatctttaaaaacatgtttt

SEQ ID NO: 170281 - DNA, 70 bp, Homo sapiens
ttttgacttatatagttcattttgaaacaatatgctagcaacatctttaaaaacatgttttttaaaacca

SEQ ID NO: 170282 - DNA, 69 bp, Homo sapiens
gttcattttgaaacaatatgctagcaacatctttaaaaacatgttttttaaaaccaaaatagttctaga

SEQ ID NO: 170283 - DNA, 67 bp, Homo sapiens
tttgaaacaatatgctagcaacatctttaaaaacatgttttttaaaaccaaaatagttctagaaccc

SEQ ID NO: 170284 - DNA, 66 bp, Homo sapiens
tatgctagcaacatctttaaaaacatgttttttaaaaccaaaatagttctagaaccccttaaacta

SEQ ID NO: 170285 - DNA, 61 bp, Homo sapiens
catctttaaaaacatgttttttaaaaccaaaatagttctagaaccccttaaactaagactt

SEQ ID NO: 170286 - DNA, 60 bp, Homo sapiens
tgttttttaaaaccaaaatagttctagaaccccttaaactaagacttttttacttaccca

SEQ ID NO: 170287 - DNA, 59 bp, Homo sapiens
tttaaaaccaaaatagttctagaaccccttaaactaagacttttttacttacccacccc

SEQ ID NO: 170288 - DNA, 62 bp, Homo sapiens
aatagttctagaaccccttaaactaagacttttttacttacccacccccaaagattgggatg

SEQ ID NO: 170289 - DNA, 65 bp, Homo sapiens
cccttaaactaagacttttttacttacccacccccaaagattgggatgtctgaataagatcagtt

SEQ ID NO: 170290 - DNA, 70 bp, Homo sapiens
aaactaagacttttttacttacccacccccaaagattgggatgtctgaataagatcagtttgtgcacatc

SEQ ID NO: 170291 - DNA, 73 bp, Homo sapiens
tttttacttacccacccccaaagattgggatgtctgaataagatcagtttgtgcacatctgtttccagggatc

SEQ ID NO: 170292 - DNA, 74 bp, Homo sapiens
acccccaaagattgggatgtctgaataagatcagtttgtgcacatctgtttccagggatcctcaattttataaa

SEQ ID NO: 170293 - DNA, 73 bp, Homo sapiens
aaagattgggatgtctgaataagatcagtttgtgcacatctgtttccagggatcctcaattttataaaaaaag

SEQ ID NO: 170294 - DNA, 75 bp, Homo sapiens
tgaataagatcagtttgtgcacatctgtttccagggatcctcaattttataaaaaaaggccctagatatggcaat

SEQ ID NO: 170295 - DNA, 74 bp, Homo sapiens
agatcagtttgtgcacatctgtttccagggatcctcaattttataaaaaaaggccctagatatggcaattgtta

SEQ ID NO: 170296 - DNA, 76 bp, Homo sapiens
acatctgtttccagggatcctcaattttataaaaaaaggccctagatatggcaattgttacatcatgtctgagaca

SEQ ID NO: 170297 - DNA, 75 bp, Homo sapiens
tgtttccagggatcctcaattttataaaaaaaggccctagatatggcaattgttacatcatgtctgagacaacca

SEQ ID NO: 170298 - DNA, 75 bp, Homo sapiens
ctcaattttataaaaaaaggccctagatatggcaattgttacatcatgtctgagacaaccaggaattagttctga

SEQ ID NO: 170299 - DNA, 76 bp, Homo sapiens
ttataaaaaaaggccctagatatggcaattgttacatcatgtctgagacaaccaggaattagttctgatacttcaa

SEQ ID NO: 170300 - DNA, 77 bp, Homo sapiens
aaggccctagatatggcaattgttacatcatgtctgagacaaccaggaattagttctgatacttcaactaccaaata

SEQ ID NO: 170301 - DNA, 85 bp, Homo sapiens
tgtgtgtgtatgttgatatatagtcatttaagcagtagatgatatcagagtgcatagaacacaaccttttaatcttctacacata

SEQ ID NO: 170302 - DNA, 84 bp, Homo sapiens
gtgtgtgtatgttgatatatagtcatttaagcagtagatgatatcagagtgcatagaacacaaccttttaatcttctacacata

SEQ ID NO: 170303 - DNA, 79 bp, Homo sapiens
atagtcatttaagcagtagatgatatcagagtgcatagaacacaaccttttaatcttctacacataatgtcttacttaa

SEQ ID NO: 170304 - DNA, 77 bp, Homo sapiens
tttaagcagtagatgatatcagagtgcatagaacacaaccttttaatcttctacacataatgtcttacttaaaaata

SEQ ID NO: 170305 - DNA, 76 bp, Homo sapiens
gatgatatcagagtgcatagaacacaaccttttaatcttctacacataatgtcttacttaaaaatataaaacctgc

SEQ ID NO: 170306 - DNA, 73 bp, Homo sapiens
tgcatagaacacaaccttttaatcttctacacataatgtcttacttaaaaatataaaacctgcccaagatggc

SEQ ID NO: 170307 - DNA, 70 bp, Homo sapiens
gaacacaaccttttaatcttctacacataatgtcttacttaaaaatataaaacctgcccaagatggctaa

SEQ ID NO: 170308 - DNA, 73 bp, Homo sapiens
atcttctacacataatgtcttacttaaaaatataaaacctgcccaagatggctaaaatcatccattaaaatga

SEQ ID NO: 170309 - DNA, 71 bp, Homo sapiens
ctacacataatgtcttacttaaaaatataaaacctgcccaagatggctaaaatcatccattaaaatgaacc

SEQ ID NO: 170310 - DNA, 71 bp, Homo sapiens
cttacttaaaaatataaaacctgcccaagatggctaaaatcatccattaaaatgaacctatatatatggac

SEQ ID NO: 170311 - DNA, 72 bp, Homo sapiens
agatggctaaaatcatccattaaaatgaacctatatatatggactaaaataagctaaaaacatatttagagg

SEQ ID NO: 170312 - DNA, 72 bp, Homo sapiens
tccattaaaatgaacctatatatatggactaaaataagctaaaaacatatttagaggtagtccatccaatag

SEQ ID NO: 170313 - DNA, 72 bp, Homo sapiens
atgaacctatatatatggactaaaataagctaaaaacatatttagaggtagtccatccaatagtagaattta

SEQ ID NO: 170314 - DNA, 70 bp, Homo sapiens
ctatatatatggactaaaataagctaaaaacatatttagaggtagtccatccaatagtagaatttaaaaa

SEQ ID NO: 170315 - DNA, 69 bp, Homo sapiens
ggactaaaataagctaaaaacatatttagaggtagtccatccaatagtagaatttaaaaactacagatg

SEQ ID NO: 170316 - DNA, 68 bp, Homo sapiens
aaaataagctaaaaacatatttagaggtagtccatccaatagtagaatttaaaaactacagatgggtg

SEQ ID NO: 170317 - DNA, 69 bp, Homo sapiens
aagctaaaaacatatttagaggtagtccatccaatagtagaatttaaaaactacagatgggtgtcaaaa

SEQ ID NO: 170318 - DNA, 69 bp, Homo sapiens
aaaaacatatttagaggtagtccatccaatagtagaatttaaaaactacagatgggtgtcaaaaatagc

SEQ ID NO: 170319 - DNA, 73 bp, Homo sapiens
catatttagaggtagtccatccaatagtagaatttaaaaactacagatgggtgtcaaaaatagccaagtgtca

SEQ ID NO: 170320 - DNA, 72 bp, Homo sapiens
ttagaggtagtccatccaatagtagaatttaaaaactacagatgggtgtcaaaaatagccaagtgtcaaatc

SEQ ID NO: 170321 - DNA, 75 bp, Homo sapiens
tccaatagtagaatttaaaaactacagatgggtgtcaaaaatagccaagtgtcaaatctgctcaagtatcgccat

SEQ ID NO: 170322 - DNA, 76 bp, Homo sapiens
agtagaatttaaaaactacagatgggtgtcaaaaatagccaagtgtcaaatctgctcaagtatcgccattctggca

SEQ ID NO: 170323 - DNA, 82 bp, Homo sapiens
aaaaactacagatgggtgtcaaaaatagccaagtgtcaaatctgctcaagtatcgccattctggcacatgctcatagtcaca

SEQ ID NO: 170324 - DNA, 84 bp, Homo sapiens
atgggtgtcaaaaatagccaagtgtcaaatctgctcaagtatcgccattctggcacatgctcatagtcacagctgttaatatat

SEQ ID NO: 170325 - DNA, 86 bp, Homo sapiens
aaatagccaagtgtcaaatctgctcaagtatcgccattctggcacatgctcatagtcacagctgttaatatattctatgtatccaa

SEQ ID NO: 170326 - DNA, 83 bp, Homo sapiens
tcaagtatcgccattctggcacatgctcatagtcacagctgttaatatattctatgtatccaagtacaaggttttctaacaca

SEQ ID NO: 170327 - DNA, 84 bp, Homo sapiens
ctggcacatgctcatagtcacagctgttaatatattctatgtatccaagtacaaggttttctaacacagttgatgagagagaga

SEQ ID NO: 170328 - DNA, 78 bp, Homo sapiens
gagagagagagaagcagtgcccacacttcaggctattgctgtagaaccagatgtattaacaacaacactaaaacaaac

SEQ ID NO: 170329 - DNA, 76 bp, Homo sapiens
agaagcagtgcccacacttcaggctattgctgtagaaccagatgtattaacaacaacactaaaacaaacttatcaa

SEQ ID NO: 170330 - DNA, 75 bp, Homo sapiens
ccacacttcaggctattgctgtagaaccagatgtattaacaacaacactaaaacaaacttatcaatgactctaaa

SEQ ID NO: 170331 - DNA, 74 bp, Homo sapiens
cttcaggctattgctgtagaaccagatgtattaacaacaacactaaaacaaacttatcaatgactctaaatccc

SEQ ID NO: 170332 - DNA, 72 bp, Homo sapiens
gctgtagaaccagatgtattaacaacaacactaaaacaaacttatcaatgactctaaatccctaaatatagt

SEQ ID NO: 170333 - DNA, 72 bp, Homo sapiens
accagatgtattaacaacaacactaaaacaaacttatcaatgactctaaatccctaaatatagttcaatgct

SEQ ID NO: 170334 - DNA, 69 bp, Homo sapiens
ttaacaacaacactaaaacaaacttatcaatgactctaaatccctaaatatagttcaatgctttttaaa

SEQ ID NO: 170335 - DNA, 69 bp, Homo sapiens
cactaaaacaaacttatcaatgactctaaatccctaaatatagttcaatgctttttaaataagggtgct

SEQ ID NO: 170336 - DNA, 71 bp, Homo sapiens
ctctaaatccctaaatatagttcaatgctttttaaataagggtgctttgaagcttagtttaaaatgatgca

SEQ ID NO: 170337 - DNA, 71 bp, Homo sapiens
ccctaaatatagttcaatgctttttaaataagggtgctttgaagcttagtttaaaatgatgcaattagcta

SEQ ID NO: 170338 - DNA, 72 bp, Homo sapiens
taaataagggtgctttgaagcttagtttaaaatgatgcaattagctagaagtagcaagggtcctaactaatc

SEQ ID NO: 170339 - DNA, 74 bp, Homo sapiens
gcttagtttaaaatgatgcaattagctagaagtagcaagggtcctaactaatctcgttcacctattataattca

SEQ ID NO: 170340 - DNA, 74 bp, Homo sapiens
aaatgatgcaattagctagaagtagcaagggtcctaactaatctcgttcacctattataattcacaaatggctt

SEQ ID NO: 170341 - DNA, 70 bp, Homo sapiens
aattagctagaagtagcaagggtcctaactaatctcgttcacctattataattcacaaatggctttggtt

SEQ ID NO: 170342 - DNA, 70 bp, Homo sapiens
agaagtagcaagggtcctaactaatctcgttcacctattataattcacaaatggctttggtttattatgg

SEQ ID NO: 170343 - DNA, 67 bp, Homo sapiens
agggtcctaactaatctcgttcacctattataattcacaaatggctttggtttattatggggttttg

SEQ ID NO: 170344 - DNA, 67 bp, Homo sapiens
tctcgttcacctattataattcacaaatggctttggtttattatggggttttgttttacaaaattaa

SEQ ID NO: 170345 - DNA, 67 bp, Homo sapiens
cctattataattcacaaatggctttggtttattatggggttttgttttacaaaattaacatatagac

SEQ ID NO: 170346 - DNA, 69 bp, Homo sapiens
tataattcacaaatggctttggtttattatggggttttgttttacaaaattaacatatagactcttcaa

SEQ ID NO: 170347 - DNA, 71 bp, Homo sapiens
tcacaaatggctttggtttattatggggttttgttttacaaaattaacatatagactcttcaaaatgctga

SEQ ID NO: 170348 - DNA, 71 bp, Homo sapiens
gctttggtttattatggggttttgttttacaaaattaacatatagactcttcaaaatgctgataaatcaga

SEQ ID NO: 170349 - DNA, 70 bp, Homo sapiens
ctttggtttattatggggttttgttttacaaaattaacatatagactcttcaaaatgctgataaatcaga

SEQ ID NO: 170350 - DNA, 72 bp, Homo sapiens
ttatggggttttgttttacaaaattaacatatagactcttcaaaatgctgataaatcagatcatttaacacg

SEQ ID NO: 170351 - DNA, 71 bp, Homo sapiens
gggttttgttttacaaaattaacatatagactcttcaaaatgctgataaatcagatcatttaacacgttta

SEQ ID NO: 170352 - DNA, 75 bp, Homo sapiens
gttttacaaaattaacatatagactcttcaaaatgctgataaatcagatcatttaacacgtttattaacagcata

SEQ ID NO: 170353 - DNA, 77 bp, Homo sapiens
attaacatatagactcttcaaaatgctgataaatcagatcatttaacacgtttattaacagcataaaaaagatctga

SEQ ID NO: 170354 - DNA, 77 bp, Homo sapiens
aaatgctgataaatcagatcatttaacacgtttattaacagcataaaaaagatctgaattatgacataaaaatcaga

SEQ ID NO: 170355 - DNA, 78 bp, Homo sapiens
atcagatcatttaacacgtttattaacagcataaaaaagatctgaattatgacataaaaatcagataaatgtgctcaa

SEQ ID NO: 170356 - DNA, 78 bp, Homo sapiens
taacacgtttattaacagcataaaaaagatctgaattatgacataaaaatcagataaatgtgctcaatattctggtga

SEQ ID NO: 170357 - DNA, 77 bp, Homo sapiens
cgtttattaacagcataaaaaagatctgaattatgacataaaaatcagataaatgtgctcaatattctggtgaaata

SEQ ID NO: 170358 - DNA, 78 bp, Homo sapiens
gcataaaaaagatctgaattatgacataaaaatcagataaatgtgctcaatattctggtgaaataaaaaacacaggca

SEQ ID NO: 170359 - DNA, 80 bp, Homo sapiens
gatctgaattatgacataaaaatcagataaatgtgctcaatattctggtgaaataaaaaacacaggcactttcacactga

SEQ ID NO: 170360 - DNA, 78 bp, Homo sapiens
atgtgctcaatattctggtgaaataaaaaacacaggcactttcacactgattctgtattatatacccagggcacatta

SEQ ID NO: 170361 - DNA, 76 bp, Homo sapiens
tattctggtgaaataaaaaacacaggcactttcacactgattctgtattatatacccagggcacattacatcttta

SEQ ID NO: 170362 - DNA, 80 bp, Homo sapiens
taaaaaacacaggcactttcacactgattctgtattatatacccagggcacattacatctttagttgcatggtgcatata

SEQ ID NO: 170363 - DNA, 81 bp, Homo sapiens
aacacaggcactttcacactgattctgtattatatacccagggcacattacatctttagttgcatggtgcatataaatcaa

SEQ ID NO: 170364 - DNA, 80 bp, Homo sapiens
acactgattctgtattatatacccagggcacattacatctttagttgcatggtgcatataaatcaagatgaaagcttaaa

SEQ ID NO: 170365 - DNA, 78 bp, Homo sapiens
ctgtattatatacccagggcacattacatctttagttgcatggtgcatataaatcaagatgaaagcttaaagagttaa

SEQ ID NO: 170366 - DNA, 78 bp, Homo sapiens
tatatacccagggcacattacatctttagttgcatggtgcatataaatcaagatgaaagcttaaagagttaaaatgac

SEQ ID NO: 170367 - DNA, 76 bp, Homo sapiens
gggcacattacatctttagttgcatggtgcatataaatcaagatgaaagcttaaagagttaaaatgacctttcaaa

SEQ ID NO: 170368 - DNA, 77 bp, Homo sapiens
catctttagttgcatggtgcatataaatcaagatgaaagcttaaagagttaaaatgacctttcaaagacctcagtca

SEQ ID NO: 170369 - DNA, 75 bp, Homo sapiens
gcatggtgcatataaatcaagatgaaagcttaaagagttaaaatgacctttcaaagacctcagtcattgtctttt

SEQ ID NO: 170370 - DNA, 71 bp, Homo sapiens
aatcaagatgaaagcttaaagagttaaaatgacctttcaaagacctcagtcattgtctttttgtaaattga

SEQ ID NO: 170371 - DNA, 69 bp, Homo sapiens
tgaaagcttaaagagttaaaatgacctttcaaagacctcagtcattgtctttttgtaaattgattttcc

SEQ ID NO: 170372 - DNA, 70 bp, Homo sapiens
agagttaaaatgacctttcaaagacctcagtcattgtctttttgtaaattgattttccccataattcagc

SEQ ID NO: 170373 - DNA, 73 bp, Homo sapiens
gacctttcaaagacctcagtcattgtctttttgtaaattgattttccccataattcagctacatacattccta

SEQ ID NO: 170374 - DNA, 74 bp, Homo sapiens
cattgtctttttgtaaattgattttccccataattcagctacatacattcctagtctactaatgaaaaagtgca

SEQ ID NO: 170375 - DNA, 76 bp, Homo sapiens
ttgtaaattgattttccccataattcagctacatacattcctagtctactaatgaaaaagtgcaattctgccacaa

SEQ ID NO: 170376 - DNA, 78 bp, Homo sapiens
aattgattttccccataattcagctacatacattcctagtctactaatgaaaaagtgcaattctgccacaaatgcatc

SEQ ID NO: 170377 - DNA, 83 bp, Homo sapiens
ataattcagctacatacattcctagtctactaatgaaaaagtgcaattctgccacaaatgcatcctttctgcatatatatcaa

SEQ ID NO: 170378 - DNA, 82 bp, Homo sapiens
attcctagtctactaatgaaaaagtgcaattctgccacaaatgcatcctttctgcatatatatcaataatgattaggatgga

SEQ ID NO: 170379 - DNA, 84 bp, Homo sapiens
taatgaaaaagtgcaattctgccacaaatgcatcctttctgcatatatatcaataatgattaggatggacgagacacatcctaa

SEQ ID NO: 170380 - DNA, 80 bp, Homo sapiens
ttctgccacaaatgcatcctttctgcatatatatcaataatgattaggatggacgagacacatcctaaagggaaaaacat

SEQ ID NO: 170381 - DNA, 78 bp, Homo sapiens
aatgcatcctttctgcatatatatcaataatgattaggatggacgagacacatcctaaagggaaaaacattcttcaaa

SEQ ID NO: 170382 - DNA, 76 bp, Homo sapiens
catatatatcaataatgattaggatggacgagacacatcctaaagggaaaaacattcttcaaacaactggcaatac

SEQ ID NO: 170383 - DNA, 74 bp, Homo sapiens
atatcaataatgattaggatggacgagacacatcctaaagggaaaaacattcttcaaacaactggcaataccta

SEQ ID NO: 170384 - DNA, 72 bp, Homo sapiens
attaggatggacgagacacatcctaaagggaaaaacattcttcaaacaactggcaatacctacacacaactg

SEQ ID NO: 170385 - DNA, 72 bp, Homo sapiens
agacacatcctaaagggaaaaacattcttcaaacaactggcaatacctacacacaactgtggttgcagaaaa

SEQ ID NO: 170386 - DNA, 73 bp, Homo sapiens
taaagggaaaaacattcttcaaacaactggcaatacctacacacaactgtggttgcagaaaactggcagataa

SEQ ID NO: 170387 - DNA, 74 bp, Homo sapiens
aaacattcttcaaacaactggcaatacctacacacaactgtggttgcagaaaactggcagataatgtttcaaaa

SEQ ID NO: 170388 - DNA, 77 bp, Homo sapiens
tcttcaaacaactggcaatacctacacacaactgtggttgcagaaaactggcagataatgtttcaaaacaccatctg

SEQ ID NO: 170389 - DNA, 76 bp, Homo sapiens
caatacctacacacaactgtggttgcagaaaactggcagataatgtttcaaaacaccatctgtgaggtgtacaaac

SEQ ID NO: 170390 - DNA, 77 bp, Homo sapiens
acacaactgtggttgcagaaaactggcagataatgtttcaaaacaccatctgtgaggtgtacaaactctgtgaccaa

SEQ ID NO: 170391 - DNA, 79 bp, Homo sapiens
tggttgcagaaaactggcagataatgtttcaaaacaccatctgtgaggtgtacaaactctgtgaccaagcacagcctct

SEQ ID NO: 170392 - DNA, 77 bp, Homo sapiens
taatgtttcaaaacaccatctgtgaggtgtacaaactctgtgaccaagcacagcctcttctgcctgtcctacccaaa

SEQ ID NO: 170393 - DNA, 82 bp, Homo sapiens
tctgtgaccaagcacagcctcttctgcctgtcctacccaaataatccacataaatcggccagctggaggatctctatctgcc

SEQ ID NO: 170394 - DNA, 77 bp, Homo sapiens
cagcctcttctgcctgtcctacccaaataatccacataaatcggccagctggaggatctctatctgccctgtctttt

SEQ ID NO: 170395 - DNA, 77 bp, Homo sapiens
tcttctgcctgtcctacccaaataatccacataaatcggccagctggaggatctctatctgccctgtcttttttatc

SEQ ID NO: 170396 - DNA, 76 bp, Homo sapiens
ctacccaaataatccacataaatcggccagctggaggatctctatctgccctgtcttttttatctgaagataggaa

SEQ ID NO: 170397 - DNA, 78 bp, Homo sapiens
taatccacataaatcggccagctggaggatctctatctgccctgtcttttttatctgaagataggaagctccaaatta

SEQ ID NO: 170398 - DNA, 77 bp, Homo sapiens
ataaatcggccagctggaggatctctatctgccctgtcttttttatctgaagataggaagctccaaattaggcacag

SEQ ID NO: 170399 - DNA, 77 bp, Homo sapiens
tggaggatctctatctgccctgtcttttttatctgaagataggaagctccaaattaggcacagggcaatttagacag

SEQ ID NO: 170400 - DNA, 76 bp, Homo sapiens
tatctgccctgtcttttttatctgaagataggaagctccaaattaggcacagggcaatttagacagttcttgagaa

SEQ ID NO: 170401 - DNA, 75 bp, Homo sapiens
tgtcttttttatctgaagataggaagctccaaattaggcacagggcaatttagacagttcttgagaacagccgaa

SEQ ID NO: 170402 - DNA, 74 bp, Homo sapiens
tttatctgaagataggaagctccaaattaggcacagggcaatttagacagttcttgagaacagccgaaacaacc

SEQ ID NO: 170403 - DNA, 71 bp, Homo sapiens
agataggaagctccaaattaggcacagggcaatttagacagttcttgagaacagccgaaacaaccctttcc

SEQ ID NO: 170404 - DNA, 68 bp, Homo sapiens
aaattaggcacagggcaatttagacagttcttgagaacagccgaaacaaccctttccccggccagcct

SEQ ID NO: 170405 - DNA, 71 bp, Homo sapiens
acagggcaatttagacagttcttgagaacagccgaaacaaccctttccccggccagccttctccacaagca

SEQ ID NO: 170406 - DNA, 70 bp, Homo sapiens
aatttagacagttcttgagaacagccgaaacaaccctttccccggccagccttctccacaagcagagcct

SEQ ID NO: 170407 - DNA, 75 bp, Homo sapiens
ttcttgagaacagccgaaacaaccctttccccggccagccttctccacaagcagagccttcactggcaacgatca

SEQ ID NO: 170408 - DNA, 74 bp, Homo sapiens
acagccgaaacaaccctttccccggccagccttctccacaagcagagccttcactggcaacgatcacagaaaca

SEQ ID NO: 170409 - DNA, 75 bp, Homo sapiens
ctttccccggccagccttctccacaagcagagccttcactggcaacgatcacagaaacactccaggctccaaaaa

SEQ ID NO: 170410 - DNA, 76 bp, Homo sapiens
cggccagccttctccacaagcagagccttcactggcaacgatcacagaaacactccaggctccaaaaataatattt

SEQ ID NO: 170411 - DNA, 77 bp, Homo sapiens
ttctccacaagcagagccttcactggcaacgatcacagaaacactccaggctccaaaaataatatttttcagaggaa

SEQ ID NO: 170412 - DNA, 74 bp, Homo sapiens
actggcaacgatcacagaaacactccaggctccaaaaataatatttttcagaggaaactgacatgcactaaatt

SEQ ID NO: 170413 - DNA, 74 bp, Homo sapiens
atcacagaaacactccaggctccaaaaataatatttttcagaggaaactgacatgcactaaatttccaggacaa

SEQ ID NO: 170414 - DNA, 74 bp, Homo sapiens
tccaggctccaaaaataatatttttcagaggaaactgacatgcactaaatttccaggacaagagcttcactaat

SEQ ID NO: 170415 - DNA, 74 bp, Homo sapiens
aaaaataatatttttcagaggaaactgacatgcactaaatttccaggacaagagcttcactaattcagcaggct

SEQ ID NO: 170416 - DNA, 73 bp, Homo sapiens
atttttcagaggaaactgacatgcactaaatttccaggacaagagcttcactaattcagcaggctttttattt

SEQ ID NO: 170417 - DNA, 74 bp, Homo sapiens
cagaggaaactgacatgcactaaatttccaggacaagagcttcactaattcagcaggctttttattttaattaa

SEQ ID NO: 170418 - DNA, 74 bp, Homo sapiens
gacatgcactaaatttccaggacaagagcttcactaattcagcaggctttttattttaattaactgatttcaat

SEQ ID NO: 170419 - DNA, 76 bp, Homo sapiens
ttccaggacaagagcttcactaattcagcaggctttttattttaattaactgatttcaattatttgtctgatgaca

SEQ ID NO: 170420 - DNA, 75 bp, Homo sapiens
agagcttcactaattcagcaggctttttattttaattaactgatttcaattatttgtctgatgacatctaagggc

SEQ ID NO: 170421 - DNA, 75 bp, Homo sapiens
cactaattcagcaggctttttattttaattaactgatttcaattatttgtctgatgacatctaagggctgtgatt

SEQ ID NO: 170422 - DNA, 75 bp, Homo sapiens
tttaattaactgatttcaattatttgtctgatgacatctaagggctgtgatttaggacaagactgaaattccttg

SEQ ID NO: 170423 - DNA, 76 bp, Homo sapiens
ttaactgatttcaattatttgtctgatgacatctaagggctgtgatttaggacaagactgaaattccttgtagttc

SEQ ID NO: 170424 - DNA, 74 bp, Homo sapiens
attatttgtctgatgacatctaagggctgtgatttaggacaagactgaaattccttgtagttccaaagcttcct

SEQ ID NO: 170425 - DNA, 75 bp, Homo sapiens
gtctgatgacatctaagggctgtgatttaggacaagactgaaattccttgtagttccaaagcttccttcactttc

SEQ ID NO: 170426 - DNA, 70 bp, Homo sapiens
atttaggacaagactgaaattccttgtagttccaaagcttccttcactttctctgacataaacagctttt

SEQ ID NO: 170427 - DNA, 71 bp, Homo sapiens
acaagactgaaattccttgtagttccaaagcttccttcactttctctgacataaacagctttttaaagaga

SEQ ID NO: 170428 - DNA, 71 bp, Homo sapiens
attccttgtagttccaaagcttccttcactttctctgacataaacagctttttaaagagatcttattccag

SEQ ID NO: 170429 - DNA, 75 bp, Homo sapiens
ttccttcactttctctgacataaacagctttttaaagagatcttattccaggattctgccataatctgaaaactc

SEQ ID NO: 170430 - DNA, 78 bp, Homo sapiens
tctgacataaacagctttttaaagagatcttattccaggattctgccataatctgaaaactctctccacagatgaaat

SEQ ID NO: 170431 - DNA, 75 bp, Homo sapiens
aaacagctttttaaagagatcttattccaggattctgccataatctgaaaactctctccacagatgaaatttcca

SEQ ID NO: 170432 - DNA, 76 bp, Homo sapiens
ttttaaagagatcttattccaggattctgccataatctgaaaactctctccacagatgaaatttccaggacaccaa

SEQ ID NO: 170433 - DNA, 79 bp, Homo sapiens
atcttattccaggattctgccataatctgaaaactctctccacagatgaaatttccaggacaccaagtacagatgatag

SEQ ID NO: 170434 - DNA, 80 bp, Homo sapiens
attctgccataatctgaaaactctctccacagatgaaatttccaggacaccaagtacagatgatagtcacaaaattctga

SEQ ID NO: 170435 - DNA, 76 bp, Homo sapiens
aaaactctctccacagatgaaatttccaggacaccaagtacagatgatagtcacaaaattctgaacagaaacaata

SEQ ID NO: 170436 - DNA, 76 bp, Homo sapiens
acagatgaaatttccaggacaccaagtacagatgatagtcacaaaattctgaacagaaacaatacttcttacttga

SEQ ID NO: 170437 - DNA, 74 bp, Homo sapiens
tttccaggacaccaagtacagatgatagtcacaaaattctgaacagaaacaatacttcttacttgagctaaaac

SEQ ID NO: 170438 - DNA, 74 bp, Homo sapiens
caccaagtacagatgatagtcacaaaattctgaacagaaacaatacttcttacttgagctaaaaccctcaagta

SEQ ID NO: 170439 - DNA, 71 bp, Homo sapiens
gatagtcacaaaattctgaacagaaacaatacttcttacttgagctaaaaccctcaagtaaattactccga

SEQ ID NO: 170440 - DNA, 69 bp, Homo sapiens
aaattctgaacagaaacaatacttcttacttgagctaaaaccctcaagtaaattactccgacaaacatc

SEQ ID NO: 170441 - DNA, 68 bp, Homo sapiens
aatacttcttacttgagctaaaaccctcaagtaaattactccgacaaacatccgtggctgtacgaccc

SEQ ID NO: 170442 - DNA, 68 bp, Homo sapiens
ttgagctaaaaccctcaagtaaattactccgacaaacatccgtggctgtacgaccccctcaaccttta

SEQ ID NO: 170443 - DNA, 65 bp, Homo sapiens
taaaaccctcaagtaaattactccgacaaacatccgtggctgtacgaccccctcaacctttaaaa

SEQ ID NO: 170444 - DNA, 67 bp, Homo sapiens
taaattactccgacaaacatccgtggctgtacgaccccctcaacctttaaaatacatctcccaaatt

SEQ ID NO: 170445 - DNA, 66 bp, Homo sapiens
ctccgacaaacatccgtggctgtacgaccccctcaacctttaaaatacatctcccaaattttaaaa

SEQ ID NO: 170446 - DNA, 68 bp, Homo sapiens
acctttaaaatacatctcccaaattttaaaagcaagggctccacaccctgtacccctccatgtatcaa

SEQ ID NO: 170447 - DNA, 71 bp, Homo sapiens
taaaatacatctcccaaattttaaaagcaagggctccacaccctgtacccctccatgtatcaagatctttg

SEQ ID NO: 170448 - DNA, 73 bp, Homo sapiens
ttaaaagcaagggctccacaccctgtacccctccatgtatcaagatctttgtggttctctttatgctaccttc

SEQ ID NO: 170449 - DNA, 77 bp, Homo sapiens
ctccacaccctgtacccctccatgtatcaagatctttgtggttctctttatgctaccttccaatcacacctctgtca

SEQ ID NO: 170450 - DNA, 78 bp, Homo sapiens
ctccatgtatcaagatctttgtggttctctttatgctaccttccaatcacacctctgtcacccccagcctcttcctgc

SEQ ID NO: 170451 - DNA, 78 bp, Homo sapiens
tctttgtggttctctttatgctaccttccaatcacacctctgtcacccccagcctcttcctgcccacatcagatacaa

SEQ ID NO: 170452 - DNA, 79 bp, Homo sapiens
ttctctttatgctaccttccaatcacacctctgtcacccccagcctcttcctgcccacatcagatacaacacgctgtgg

SEQ ID NO: 170453 - DNA, 80 bp, Homo sapiens
ttatgctaccttccaatcacacctctgtcacccccagcctcttcctgcccacatcagatacaacacgctgtggggcagaa

SEQ ID NO: 170454 - DNA, 77 bp, Homo sapiens
ttccaatcacacctctgtcacccccagcctcttcctgcccacatcagatacaacacgctgtggggcagaaggtattt

SEQ ID NO: 170455 - DNA, 79 bp, Homo sapiens
tgtcacccccagcctcttcctgcccacatcagatacaacacgctgtggggcagaaggtattttccatgcataatagaaa

SEQ ID NO: 170456 - DNA, 77 bp, Homo sapiens
agcctcttcctgcccacatcagatacaacacgctgtggggcagaaggtattttccatgcataatagaaagtaagctt

SEQ ID NO: 170457 - DNA, 78 bp, Homo sapiens
ttcctgcccacatcagatacaacacgctgtggggcagaaggtattttccatgcataatagaaagtaagctttcttcat

SEQ ID NO: 170458 - DNA, 75 bp, Homo sapiens
atcagatacaacacgctgtggggcagaaggtattttccatgcataatagaaagtaagctttcttcattggaaaaa

SEQ ID NO: 170459 - DNA, 74 bp, Homo sapiens
aacacgctgtggggcagaaggtattttccatgcataatagaaagtaagctttcttcattggaaaaacagagaga

SEQ ID NO: 170460 - DNA, 74 bp, Homo sapiens
gggcagaaggtattttccatgcataatagaaagtaagctttcttcattggaaaaacagagagaacacagaacag

SEQ ID NO: 170461 - DNA, 74 bp, Homo sapiens
aaagtaagctttcttcattggaaaaacagagagaacacagaacagggctaactcaccaggcatccttgaatcca

SEQ ID NO: 170462 - DNA, 77 bp, Homo sapiens
ttcattggaaaaacagagagaacacagaacagggctaactcaccaggcatccttgaatccagcgtaccacacagaaa

SEQ ID NO: 170463 - DNA, 76 bp, Homo sapiens
aaaaacagagagaacacagaacagggctaactcaccaggcatccttgaatccagcgtaccacacagaaagtggctg

SEQ ID NO: 170464 - DNA, 76 bp, Homo sapiens
agaacacagaacagggctaactcaccaggcatccttgaatccagcgtaccacacagaaagtggctgtctcctaaaa

SEQ ID NO: 170465 - DNA, 75 bp, Homo sapiens
aactcaccaggcatccttgaatccagcgtaccacacagaaagtggctgtctcctaaaagcaagcgcgttccgggc

SEQ ID NO: 170466 - DNA, 76 bp, Homo sapiens
atccttgaatccagcgtaccacacagaaagtggctgtctcctaaaagcaagcgcgttccgggctcatgcctcctgt

SEQ ID NO: 170467 - DNA, 78 bp, Homo sapiens
atccagcgtaccacacagaaagtggctgtctcctaaaagcaagcgcgttccgggctcatgcctcctgttctggaatga

SEQ ID NO: 170468 - DNA, 80 bp, Homo sapiens
acacagaaagtggctgtctcctaaaagcaagcgcgttccgggctcatgcctcctgttctggaatgagtggcagcagagag

SEQ ID NO: 170469 - DNA, 81 bp, Homo sapiens
ctgtctcctaaaagcaagcgcgttccgggctcatgcctcctgttctggaatgagtggcagcagagaggagggccatcagag

SEQ ID NO: 170470 - DNA, 80 bp, Homo sapiens
tcctaaaagcaagcgcgttccgggctcatgcctcctgttctggaatgagtggcagcagagaggagggccatcagaggggc

SEQ ID NO: 170471 - DNA, 80 bp, Homo sapiens
aagcgcgttccgggctcatgcctcctgttctggaatgagtggcagcagagaggagggccatcagaggggctggggcggca

SEQ ID NO: 170472 - DNA, 83 bp, Homo sapiens
tcatgcctcctgttctggaatgagtggcagcagagaggagggccatcagaggggctggggcggcatcgccggaggcagggtgc

SEQ ID NO: 170473 - DNA, 82 bp, Homo sapiens
agcagagaggagggccatcagaggggctggggcggcatcgccggaggcagggtgctgggcgcgtgcgcctgccaggcagaga

SEQ ID NO: 170474 - DNA, 81 bp, Homo sapiens
aggagggccatcagaggggctggggcggcatcgccggaggcagggtgctgggcgcgtgcgcctgccaggcagagacagatg

SEQ ID NO: 170475 - DNA, 85 bp, Homo sapiens
cggcatcgccggaggcagggtgctgggcgcgtgcgcctgccaggcagagacagatggagagctgacactccggattgcacttgga

SEQ ID NO: 170476 - DNA, 89 bp, Homo sapiens
tgctgggcgcgtgcgcctgccaggcagagacagatggagagctgacactccggattgcacttggagcagaaatgtggaggatgacagga

SEQ ID NO: 170477 - DNA, 89 bp, Homo sapiens
cgtgcgcctgccaggcagagacagatggagagctgacactccggattgcacttggagcagaaatgtggaggatgacaggagcacatgtg

SEQ ID NO: 170478 - DNA, 87 bp, Homo sapiens
caggcagagacagatggagagctgacactccggattgcacttggagcagaaatgtggaggatgacaggagcacatgtggccttgaac

SEQ ID NO: 170479 - DNA, 85 bp, Homo sapiens
agacagatggagagctgacactccggattgcacttggagcagaaatgtggaggatgacaggagcacatgtggccttgaacccagc

SEQ ID NO: 170480 - DNA, 83 bp, Homo sapiens
agagctgacactccggattgcacttggagcagaaatgtggaggatgacaggagcacatgtggccttgaacccagccctgtctc

SEQ ID NO: 170481 - DNA, 79 bp, Homo sapiens
actccggattgcacttggagcagaaatgtggaggatgacaggagcacatgtggccttgaacccagccctgtctctttag

SEQ ID NO: 170482 - DNA, 81 bp, Homo sapiens
acttggagcagaaatgtggaggatgacaggagcacatgtggccttgaacccagccctgtctctttaggcagaacaatgaca

SEQ ID NO: 170483 - DNA, 80 bp, Homo sapiens
aaatgtggaggatgacaggagcacatgtggccttgaacccagccctgtctctttaggcagaacaatgacagggatgtgtg

SEQ ID NO: 170484 - DNA, 83 bp, Homo sapiens
atgacaggagcacatgtggccttgaacccagccctgtctctttaggcagaacaatgacagggatgtgtgtgcaaagtatcaca

SEQ ID NO: 170485 - DNA, 80 bp, Homo sapiens
aggagcacatgtggccttgaacccagccctgtctctttaggcagaacaatgacagggatgtgtgtgcaaagtatcacaac

SEQ ID NO: 170486 - DNA, 75 bp, Homo sapiens
cttgaacccagccctgtctctttaggcagaacaatgacagggatgtgtgtgcaaagtatcacaacccctaccctc

SEQ ID NO: 170487 - DNA, 75 bp, Homo sapiens
agccctgtctctttaggcagaacaatgacagggatgtgtgtgcaaagtatcacaacccctaccctccccttagca

SEQ ID NO: 170488 - DNA, 75 bp, Homo sapiens
acaatgacagggatgtgtgtgcaaagtatcacaacccctaccctccccttagcactccacctctctctgcaagtt

SEQ ID NO: 170489 - DNA, 75 bp, Homo sapiens
taccctccccttagcactccacctctctctgcaagtttcagagcaccaaaaagcaaaaagtgaaattcagaatga

SEQ ID NO: 170490 - DNA, 76 bp, Homo sapiens
ccttagcactccacctctctctgcaagtttcagagcaccaaaaagcaaaaagtgaaattcagaatgataagctaaa

SEQ ID NO: 170491 - DNA, 75 bp, Homo sapiens
ctgcaagtttcagagcaccaaaaagcaaaaagtgaaattcagaatgataagctaaatgccgaataatttattcac

SEQ ID NO: 170492 - DNA, 72 bp, Homo sapiens
agagcaccaaaaagcaaaaagtgaaattcagaatgataagctaaatgccgaataatttattcaccaccaccc

SEQ ID NO: 170493 - DNA, 70 bp, Homo sapiens
aaaaagcaaaaagtgaaattcagaatgataagctaaatgccgaataatttattcaccaccacccccatcc

SEQ ID NO: 170494 - DNA, 70 bp, Homo sapiens
aaattcagaatgataagctaaatgccgaataatttattcaccaccacccccatcctgttcaaggttaacc

SEQ ID NO: 170495 - DNA, 68 bp, Homo sapiens
atgataagctaaatgccgaataatttattcaccaccacccccatcctgttcaaggttaacccttattt

SEQ ID NO: 170496 - DNA, 67 bp, Homo sapiens
taaatgccgaataatttattcaccaccacccccatcctgttcaaggttaacccttattttgccaaaa

SEQ ID NO: 170497 - DNA, 67 bp, Homo sapiens
gaataatttattcaccaccacccccatcctgttcaaggttaacccttattttgccaaaagatagaaa

SEQ ID NO: 170498 - DNA, 68 bp, Homo sapiens
attcaccaccacccccatcctgttcaaggttaacccttattttgccaaaagatagaaatgtagacctg

SEQ ID NO: 170499 - DNA, 67 bp, Homo sapiens
catcctgttcaaggttaacccttattttgccaaaagatagaaatgtagacctggccccctaccaccc

SEQ ID NO: 170500 - DNA, 67 bp, Homo sapiens
taacccttattttgccaaaagatagaaatgtagacctggccccctaccacccctcacaataaaaggc

SEQ ID NO: 170501 - DNA, 69 bp, Homo sapiens
tttgccaaaagatagaaatgtagacctggccccctaccacccctcacaataaaaggcttcccttcatct

SEQ ID NO: 170502 - DNA, 71 bp, Homo sapiens
atagaaatgtagacctggccccctaccacccctcacaataaaaggcttcccttcatcttctcattttcata

SEQ ID NO: 170503 - DNA, 72 bp, Homo sapiens
tagacctggccccctaccacccctcacaataaaaggcttcccttcatcttctcattttcatagccataattg

SEQ ID NO: 170504 - DNA, 72 bp, Homo sapiens
taccacccctcacaataaaaggcttcccttcatcttctcattttcatagccataattgggaactgtattaaa

SEQ ID NO: 170505 - DNA, 70 bp, Homo sapiens
ccctcacaataaaaggcttcccttcatcttctcattttcatagccataattgggaactgtattaaaaaaa

SEQ ID NO: 170506 - DNA, 66 bp, Homo sapiens
aaaaaaaaaggtacagaactcaaagcctgtttattcaactggaaatcccaaacagcctacaaacat

SEQ ID NO: 170507 - DNA, 69 bp, Homo sapiens
aggtacagaactcaaagcctgtttattcaactggaaatcccaaacagcctacaaacatttttataagac

SEQ ID NO: 170508 - DNA, 71 bp, Homo sapiens
caaagcctgtttattcaactggaaatcccaaacagcctacaaacatttttataagactttgtatattgtgc

SEQ ID NO: 170509 - DNA, 70 bp, Homo sapiens
cctgtttattcaactggaaatcccaaacagcctacaaacatttttataagactttgtatattgtgccagt

SEQ ID NO: 170510 - DNA, 74 bp, Homo sapiens
actggaaatcccaaacagcctacaaacatttttataagactttgtatattgtgccagtttatcatcctgcacaa

SEQ ID NO: 170511 - DNA, 76 bp, Homo sapiens
tcccaaacagcctacaaacatttttataagactttgtatattgtgccagtttatcatcctgcacaaagtatcagaa

SEQ ID NO: 170512 - DNA, 77 bp, Homo sapiens
caaacatttttataagactttgtatattgtgccagtttatcatcctgcacaaagtatcagaatcattccttttgtca

SEQ ID NO: 170513 - DNA, 81 bp, Homo sapiens
ttgtatattgtgccagtttatcatcctgcacaaagtatcagaatcattccttttgtcagcttctcagtagtatgtgtaaaa

SEQ ID NO: 170514 - DNA, 78 bp, Homo sapiens
ccagtttatcatcctgcacaaagtatcagaatcattccttttgtcagcttctcagtagtatgtgtaaaatagaacact

SEQ ID NO: 170515 - DNA, 78 bp, Homo sapiens
atcatcctgcacaaagtatcagaatcattccttttgtcagcttctcagtagtatgtgtaaaatagaacactttttaga

SEQ ID NO: 170516 - DNA, 76 bp, Homo sapiens
acaaagtatcagaatcattccttttgtcagcttctcagtagtatgtgtaaaatagaacactttttagaagctgagc

SEQ ID NO: 170517 - DNA, 72 bp, Homo sapiens
tctcagtagtatgtgtaaaatagaacactttttagaagctgagccgaccacttttattttactcgagtgctt

SEQ ID NO: 170518 - DNA, 68 bp, Homo sapiens
tgtgtaaaatagaacactttttagaagctgagccgaccacttttattttactcgagtgcttttaaccc

SEQ ID NO: 170519 - DNA, 65 bp, Homo sapiens
aaaatagaacactttttagaagctgagccgaccacttttattttactcgagtgcttttaaccccc

SEQ ID NO: 170520 - DNA, 65 bp, Homo sapiens
actttttagaagctgagccgaccacttttattttactcgagtgcttttaaccccctgggatcccc

SEQ ID NO: 170521 - DNA, 67 bp, Homo sapiens
agccgaccacttttattttactcgagtgcttttaaccccctgggatccccgggttgatatgctccaa

SEQ ID NO: 170522 - DNA, 68 bp, Homo sapiens
ttttactcgagtgcttttaaccccctgggatccccgggttgatatgctccaaacattttcagcttact

SEQ ID NO: 170523 - DNA, 66 bp, Homo sapiens
cttttaaccccctgggatccccgggttgatatgctccaaacattttcagcttactttcctctacct

SEQ ID NO: 170524 - DNA, 77 bp, Homo sapiens
tgggatccccgggttgatatgctccaaacattttcagcttactttcctctaccttgcatagagatccatgggagata

SEQ ID NO: 170525 - DNA, 75 bp, Homo sapiens
gggttgatatgctccaaacattttcagcttactttcctctaccttgcatagagatccatgggagataaaaacaaa

SEQ ID NO: 170526 - DNA, 76 bp, Homo sapiens
atatgctccaaacattttcagcttactttcctctaccttgcatagagatccatgggagataaaaacaaaatcttca

SEQ ID NO: 170527 - DNA, 74 bp, Homo sapiens
acattttcagcttactttcctctaccttgcatagagatccatgggagataaaaacaaaatcttcattgtaaagc

SEQ ID NO: 170528 - DNA, 72 bp, Homo sapiens
cttactttcctctaccttgcatagagatccatgggagataaaaacaaaatcttcattgtaaagccttttcaa

SEQ ID NO: 170529 - DNA, 76 bp, Homo sapiens
tctaccttgcatagagatccatgggagataaaaacaaaatcttcattgtaaagccttttcaaaagctgaacaatca

SEQ ID NO: 170530 - DNA, 74 bp, Homo sapiens
atagagatccatgggagataaaaacaaaatcttcattgtaaagccttttcaaaagctgaacaatcatgtcctcc

SEQ ID NO: 170531 - DNA, 74 bp, Homo sapiens
atgggagataaaaacaaaatcttcattgtaaagccttttcaaaagctgaacaatcatgtcctcctgattcctga

SEQ ID NO: 170532 - DNA, 75 bp, Homo sapiens
ttcattgtaaagccttttcaaaagctgaacaatcatgtcctcctgattcctgatttctttgcacacccctaaatg

SEQ ID NO: 170533 - DNA, 75 bp, Homo sapiens
aaagctgaacaatcatgtcctcctgattcctgatttctttgcacacccctaaatgtttatccttcccatgaataa

SEQ ID NO: 170534 - DNA, 74 bp, Homo sapiens
ctgattcctgatttctttgcacacccctaaatgtttatccttcccatgaataacacatacccagccaggttcaa

SEQ ID NO: 170535 - DNA, 71 bp, Homo sapiens
acacccctaaatgtttatccttcccatgaataacacatacccagccaggttcaatggactcttccctatta

SEQ ID NO: 170536 - DNA, 77 bp, Homo sapiens
ttcccatgaataacacatacccagccaggttcaatggactcttccctattaagctttaatggacaccatgatatata

SEQ ID NO: 170537 - DNA, 75 bp, Homo sapiens
atgaataacacatacccagccaggttcaatggactcttccctattaagctttaatggacaccatgatatataaaa

SEQ ID NO: 170538 - DNA, 73 bp, Homo sapiens
atacccagccaggttcaatggactcttccctattaagctttaatggacaccatgatatataaaactagaagcc

SEQ ID NO: 170539 - DNA, 74 bp, Homo sapiens
gttcaatggactcttccctattaagctttaatggacaccatgatatataaaactagaagcctttgttatagtgc

SEQ ID NO: 170540 - DNA, 73 bp, Homo sapiens
ggactcttccctattaagctttaatggacaccatgatatataaaactagaagcctttgttatagtgctttatc

SEQ ID NO: 170541 - DNA, 75 bp, Homo sapiens
ctattaagctttaatggacaccatgatatataaaactagaagcctttgttatagtgctttatctaaagctggcta

SEQ ID NO: 170542 - DNA, 78 bp, Homo sapiens
taatggacaccatgatatataaaactagaagcctttgttatagtgctttatctaaagctggctattttcttctcagca

SEQ ID NO: 170543 - DNA, 75 bp, Homo sapiens
tgatatataaaactagaagcctttgttatagtgctttatctaaagctggctattttcttctcagcagtccctctt

SEQ ID NO: 170544 - DNA, 73 bp, Homo sapiens
taaaactagaagcctttgttatagtgctttatctaaagctggctattttcttctcagcagtccctctttagtc

SEQ ID NO: 170545 - DNA, 72 bp, Homo sapiens
ctttgttatagtgctttatctaaagctggctattttcttctcagcagtccctctttagtcctttgtaaaaca

SEQ ID NO: 170546 - DNA, 73 bp, Homo sapiens
atagtgctttatctaaagctggctattttcttctcagcagtccctctttagtcctttgtaaaacatccctgcc

SEQ ID NO: 170547 - DNA, 74 bp, Homo sapiens
atctaaagctggctattttcttctcagcagtccctctttagtcctttgtaaaacatccctgcctcataggagaa

SEQ ID NO: 170548 - DNA, 74 bp, Homo sapiens
tattttcttctcagcagtccctctttagtcctttgtaaaacatccctgcctcataggagaaacacacgcctgcc

SEQ ID NO: 170549 - DNA, 79 bp, Homo sapiens
ttctcagcagtccctctttagtcctttgtaaaacatccctgcctcataggagaaacacacgcctgcctgccttgcatgc

SEQ ID NO: 170550 - DNA, 81 bp, Homo sapiens
aaacatccctgcctcataggagaaacacacgcctgcctgccttgcatgcctcttctaaacacacaacaatgccaggcagaa

SEQ ID NO: 170551 - DNA, 78 bp, Homo sapiens
ataggagaaacacacgcctgcctgccttgcatgcctcttctaaacacacaacaatgccaggcagaaggaaaatactgt

SEQ ID NO: 170552 - DNA, 73 bp, Homo sapiens
atgcctcttctaaacacacaacaatgccaggcagaaggaaaatactgttctctcctaaaactctttctcagtt

SEQ ID NO: 170553 - DNA, 73 bp, Homo sapiens
tcttctaaacacacaacaatgccaggcagaaggaaaatactgttctctcctaaaactctttctcagttttaca

SEQ ID NO: 170554 - DNA, 71 bp, Homo sapiens
aacaatgccaggcagaaggaaaatactgttctctcctaaaactctttctcagttttacacttgcaaatctt

SEQ ID NO: 170555 - DNA, 71 bp, Homo sapiens
gcagaaggaaaatactgttctctcctaaaactctttctcagttttacacttgcaaatctttcctaggtctg

SEQ ID NO: 170556 - DNA, 70 bp, Homo sapiens
gaaaatactgttctctcctaaaactctttctcagttttacacttgcaaatctttcctaggtctgtgtttg

SEQ ID NO: 170557 - DNA, 70 bp, Homo sapiens
gttctctcctaaaactctttctcagttttacacttgcaaatctttcctaggtctgtgtttgtttcaacaa

SEQ ID NO: 170558 - DNA, 73 bp, Homo sapiens
taaaactctttctcagttttacacttgcaaatctttcctaggtctgtgtttgtttcaacaacagggcacatga

SEQ ID NO: 170559 - DNA, 76 bp, Homo sapiens
agttttacacttgcaaatctttcctaggtctgtgtttgtttcaacaacagggcacatgatgaggtagctgcctcag

SEQ ID NO: 170560 - DNA, 76 bp, Homo sapiens
ttgcaaatctttcctaggtctgtgtttgtttcaacaacagggcacatgatgaggtagctgcctcaggctttacctt

SEQ ID NO: 170561 - DNA, 76 bp, Homo sapiens
tttcctaggtctgtgtttgtttcaacaacagggcacatgatgaggtagctgcctcaggctttacctttccatcgta

SEQ ID NO: 170562 - DNA, 78 bp, Homo sapiens
atgaggtagctgcctcaggctttacctttccatcgtatgcacaatccactatcaacacagaaacaattccactcaggg

SEQ ID NO: 170563 - DNA, 80 bp, Homo sapiens
ctgcctcaggctttacctttccatcgtatgcacaatccactatcaacacagaaacaattccactcagggtcctctgatca

SEQ ID NO: 170564 - DNA, 82 bp, Homo sapiens
tttacctttccatcgtatgcacaatccactatcaacacagaaacaattccactcagggtcctctgatcagcctgcaagctca

SEQ ID NO: 170565 - DNA, 87 bp, Homo sapiens
atcgtatgcacaatccactatcaacacagaaacaattccactcagggtcctctgatcagcctgcaagctcaatgaacatgatagaca

SEQ ID NO: 170566 - DNA, 85 bp, Homo sapiens
acaatccactatcaacacagaaacaattccactcagggtcctctgatcagcctgcaagctcaatgaacatgatagacaggagcat

SEQ ID NO: 170567 - DNA, 81 bp, Homo sapiens
aacacagaaacaattccactcagggtcctctgatcagcctgcaagctcaatgaacatgatagacaggagcattcccgttaa

SEQ ID NO: 170568 - DNA, 82 bp, Homo sapiens
aacaattccactcagggtcctctgatcagcctgcaagctcaatgaacatgatagacaggagcattcccgttaactcttgcta

SEQ ID NO: 170569 - DNA, 82 bp, Homo sapiens
actcagggtcctctgatcagcctgcaagctcaatgaacatgatagacaggagcattcccgttaactcttgctattccttcag

SEQ ID NO: 170570 - DNA, 80 bp, Homo sapiens
tgcaagctcaatgaacatgatagacaggagcattcccgttaactcttgctattccttcagtcctcaacatgtcctttact

SEQ ID NO: 170571 - DNA, 77 bp, Homo sapiens
atgaacatgatagacaggagcattcccgttaactcttgctattccttcagtcctcaacatgtcctttacttactcta

SEQ ID NO: 170572 - DNA, 73 bp, Homo sapiens
atagacaggagcattcccgttaactcttgctattccttcagtcctcaacatgtcctttacttactctacactt

SEQ ID NO: 170573 - DNA, 72 bp, Homo sapiens
attcccgttaactcttgctattccttcagtcctcaacatgtcctttacttactctacactttccatatgctt

SEQ ID NO: 170574 - DNA, 73 bp, Homo sapiens
ttaactcttgctattccttcagtcctcaacatgtcctttacttactctacactttccatatgcttttagccct

SEQ ID NO: 170575 - DNA, 75 bp, Homo sapiens
tattccttcagtcctcaacatgtcctttacttactctacactttccatatgcttttagcccttgtcagatggatt

SEQ ID NO: 170576 - DNA, 75 bp, Homo sapiens
tcctcaacatgtcctttacttactctacactttccatatgcttttagcccttgtcagatggatttccacactact

SEQ ID NO: 170577 - DNA, 74 bp, Homo sapiens
acactttccatatgcttttagcccttgtcagatggatttccacactacttgctatctccaaaaatttctgaaaa

SEQ ID NO: 170578 - DNA, 76 bp, Homo sapiens
tatgcttttagcccttgtcagatggatttccacactacttgctatctccaaaaatttctgaaaacagaggcaataa

SEQ ID NO: 170579 - DNA, 74 bp, Homo sapiens
atttccacactacttgctatctccaaaaatttctgaaaacagaggcaataactctgacttctacctactcaatc

SEQ ID NO: 170580 - DNA, 74 bp, Homo sapiens
acactacttgctatctccaaaaatttctgaaaacagaggcaataactctgacttctacctactcaatcttccta

SEQ ID NO: 170581 - DNA, 75 bp, Homo sapiens
agaggcaataactctgacttctacctactcaatcttcctacacctcttcccaagagtgcacacaacctgtttcaa

SEQ ID NO: 170582 - DNA, 75 bp, Homo sapiens
aataactctgacttctacctactcaatcttcctacacctcttcccaagagtgcacacaacctgtttcaaagcata

SEQ ID NO: 170583 - DNA, 75 bp, Homo sapiens
tacacctcttcccaagagtgcacacaacctgtttcaaagcatacccacacacactctccgcacaaactaaaaata

SEQ ID NO: 170584 - DNA, 77 bp, Homo sapiens
caagagtgcacacaacctgtttcaaagcatacccacacacactctccgcacaaactaaaaatatattctcttgataa

SEQ ID NO: 170585 - DNA, 74 bp, Homo sapiens
acacaacctgtttcaaagcatacccacacacactctccgcacaaactaaaaatatattctcttgataaacagtg

SEQ ID NO: 170586 - DNA, 76 bp, Homo sapiens
gtttcaaagcatacccacacacactctccgcacaaactaaaaatatattctcttgataaacagtgtcaatcaataa

SEQ ID NO: 170587 - DNA, 76 bp, Homo sapiens
tacccacacacactctccgcacaaactaaaaatatattctcttgataaacagtgtcaatcaataagaacttctaca

SEQ ID NO: 170588 - DNA, 74 bp, Homo sapiens
acactctccgcacaaactaaaaatatattctcttgataaacagtgtcaatcaataagaacttctacagccccta

SEQ ID NO: 170589 - DNA, 73 bp, Homo sapiens
cgcacaaactaaaaatatattctcttgataaacagtgtcaatcaataagaacttctacagcccctaaatactg

SEQ ID NO: 170590 - DNA, 72 bp, Homo sapiens
aatatattctcttgataaacagtgtcaatcaataagaacttctacagcccctaaatactgtacccaagaagg

SEQ ID NO: 170591 - DNA, 74 bp, Homo sapiens
ttgataaacagtgtcaatcaataagaacttctacagcccctaaatactgtacccaagaagggctgctttatcca

SEQ ID NO: 170592 - DNA, 73 bp, Homo sapiens
aacagtgtcaatcaataagaacttctacagcccctaaatactgtacccaagaagggctgctttatccagcgaa

SEQ ID NO: 170593 - DNA, 69 bp, Homo sapiens
aacttctacagcccctaaatactgtacccaagaagggctgctttatccagcgaacccctcaaaaatcca

SEQ ID NO: 170594 - DNA, 73 bp, Homo sapiens
tgtacccaagaagggctgctttatccagcgaacccctcaaaaatccatcattgtcagagacaacttgtaaaaa

SEQ ID NO: 170595 - DNA, 75 bp, Homo sapiens
ggctgctttatccagcgaacccctcaaaaatccatcattgtcagagacaacttgtaaaaagaccacaattcataa

SEQ ID NO: 170596 - DNA, 75 bp, Homo sapiens
ccctcaaaaatccatcattgtcagagacaacttgtaaaaagaccacaattcataacgattactctgttctgtcac

SEQ ID NO: 170597 - DNA, 77 bp, Homo sapiens
atccatcattgtcagagacaacttgtaaaaagaccacaattcataacgattactctgttctgtcactaatagtatac

SEQ ID NO: 170598 - DNA, 76 bp, Homo sapiens
tcagagacaacttgtaaaaagaccacaattcataacgattactctgttctgtcactaatagtatactgcaccctat

SEQ ID NO: 170599 - DNA, 74 bp, Homo sapiens
acttgtaaaaagaccacaattcataacgattactctgttctgtcactaatagtatactgcaccctatttatgag

SEQ ID NO: 170600 - DNA, 76 bp, Homo sapiens
aattcataacgattactctgttctgtcactaatagtatactgcaccctatttatgaggccaatctttttgttcatc

SEQ ID NO: 170601 - DNA, 76 bp, Homo sapiens
attactctgttctgtcactaatagtatactgcaccctatttatgaggccaatctttttgttcatcttagttagatg

SEQ ID NO: 170602 - DNA, 77 bp, Homo sapiens
ttctgtcactaatagtatactgcaccctatttatgaggccaatctttttgttcatcttagttagatgtcacttgtaa

SEQ ID NO: 170603 - DNA, 76 bp, Homo sapiens
taatagtatactgcaccctatttatgaggccaatctttttgttcatcttagttagatgtcacttgtaatgaggttc

SEQ ID NO: 170604 - DNA, 74 bp, Homo sapiens
accctatttatgaggccaatctttttgttcatcttagttagatgtcacttgtaatgaggttctctgtaatggat

SEQ ID NO: 170605 - DNA, 77 bp, Homo sapiens
tttatgaggccaatctttttgttcatcttagttagatgtcacttgtaatgaggttctctgtaatggatttcagtaca

SEQ ID NO: 170606 - DNA, 75 bp, Homo sapiens
ctttttgttcatcttagttagatgtcacttgtaatgaggttctctgtaatggatttcagtacagttaagcaccaa

SEQ ID NO: 170607 - DNA, 78 bp, Homo sapiens
ttcatcttagttagatgtcacttgtaatgaggttctctgtaatggatttcagtacagttaagcaccaagctcaaacat

SEQ ID NO: 170608 - DNA, 78 bp, Homo sapiens
atgtcacttgtaatgaggttctctgtaatggatttcagtacagttaagcaccaagctcaaacattcttatgatagaaa

SEQ ID NO: 170609 - DNA, 78 bp, Homo sapiens
aggttctctgtaatggatttcagtacagttaagcaccaagctcaaacattcttatgatagaaagctttatagcaggca

SEQ ID NO: 170610 - DNA, 82 bp, Homo sapiens
gatttcagtacagttaagcaccaagctcaaacattcttatgatagaaagctttatagcaggcatgagtgtgataatcaatta

SEQ ID NO: 170611 - DNA, 80 bp, Homo sapiens
agtacagttaagcaccaagctcaaacattcttatgatagaaagctttatagcaggcatgagtgtgataatcaattaagtc

SEQ ID NO: 170612 - DNA, 81 bp, Homo sapiens
aagcaccaagctcaaacattcttatgatagaaagctttatagcaggcatgagtgtgataatcaattaagtcctgctataag

SEQ ID NO: 170613 - DNA, 78 bp, Homo sapiens
aaacattcttatgatagaaagctttatagcaggcatgagtgtgataatcaattaagtcctgctataagggcctttatg

SEQ ID NO: 170614 - DNA, 82 bp, Homo sapiens
ttatgatagaaagctttatagcaggcatgagtgtgataatcaattaagtcctgctataagggcctttatggaatccagcatc

SEQ ID NO: 170615 - DNA, 79 bp, Homo sapiens
tttatagcaggcatgagtgtgataatcaattaagtcctgctataagggcctttatggaatccagcatcctaaattagta

SEQ ID NO: 170616 - DNA, 76 bp, Homo sapiens
aggcatgagtgtgataatcaattaagtcctgctataagggcctttatggaatccagcatcctaaattagtagactt

SEQ ID NO: 170617 - DNA, 71 bp, Homo sapiens
caattaagtcctgctataagggcctttatggaatccagcatcctaaattagtagactttcatttttaaaga

SEQ ID NO: 170618 - DNA, 69 bp, Homo sapiens
gggcctttatggaatccagcatcctaaattagtagactttcatttttaaagagagtatttttgaaaagc

SEQ ID NO: 170619 - DNA, 73 bp, Homo sapiens
ccagcatcctaaattagtagactttcatttttaaagagagtatttttgaaaagccacttaatgctacatgcca

SEQ ID NO: 170620 - DNA, 71 bp, Homo sapiens
cctaaattagtagactttcatttttaaagagagtatttttgaaaagccacttaatgctacatgccactgat

SEQ ID NO: 170621 - DNA, 69 bp, Homo sapiens
agtagactttcatttttaaagagagtatttttgaaaagccacttaatgctacatgccactgattttttt

SEQ ID NO: 170622 - DNA, 64 bp, Homo sapiens
gattttttttttagtactatacttatgttagaaagaaaacattttcacagtgggaaacccaacc

SEQ ID NO: 170623 - DNA, 72 bp, Homo sapiens
ttagtactatacttatgttagaaagaaaacattttcacagtgggaaacccaacctttcatcaatatgcatgg

SEQ ID NO: 170624 - DNA, 74 bp, Homo sapiens
tacttatgttagaaagaaaacattttcacagtgggaaacccaacctttcatcaatatgcatggtgaatcacttc

SEQ ID NO: 170625 - DNA, 73 bp, Homo sapiens
gaaagaaaacattttcacagtgggaaacccaacctttcatcaatatgcatggtgaatcacttctaaaatagaa

SEQ ID NO: 170626 - DNA, 77 bp, Homo sapiens
acattttcacagtgggaaacccaacctttcatcaatatgcatggtgaatcacttctaaaatagaaaatcatatgaca

SEQ ID NO: 170627 - DNA, 77 bp, Homo sapiens
acagtgggaaacccaacctttcatcaatatgcatggtgaatcacttctaaaatagaaaatcatatgacaaaatgcaa

SEQ ID NO: 170628 - DNA, 82 bp, Homo sapiens
ttcatcaatatgcatggtgaatcacttctaaaatagaaaatcatatgacaaaatgcaatacacttttgagaaaactggatga

SEQ ID NO: 170629 - DNA, 78 bp, Homo sapiens
catggtgaatcacttctaaaatagaaaatcatatgacaaaatgcaatacacttttgagaaaactggatgatatccggc

SEQ ID NO: 170630 - DNA, 74 bp, Homo sapiens
cacttctaaaatagaaaatcatatgacaaaatgcaatacacttttgagaaaactggatgatatccggctttaaa

SEQ ID NO: 170631 - DNA, 73 bp, Homo sapiens
gaaaatcatatgacaaaatgcaatacacttttgagaaaactggatgatatccggctttaaaatggggtcttaa

SEQ ID NO: 170632 - DNA, 73 bp, Homo sapiens
tgacaaaatgcaatacacttttgagaaaactggatgatatccggctttaaaatggggtcttaatatcggtaca

SEQ ID NO: 170633 - DNA, 70 bp, Homo sapiens
aaaatgcaatacacttttgagaaaactggatgatatccggctttaaaatggggtcttaatatcggtacac

SEQ ID NO: 170634 - DNA, 73 bp, Homo sapiens
aatgcaatacacttttgagaaaactggatgatatccggctttaaaatggggtcttaatatcggtacactgcaa

SEQ ID NO: 170635 - DNA, 71 bp, Homo sapiens
aatacacttttgagaaaactggatgatatccggctttaaaatggggtcttaatatcggtacactgcaagtc

SEQ ID NO: 170636 - DNA, 70 bp, Homo sapiens
ttttgagaaaactggatgatatccggctttaaaatggggtcttaatatcggtacactgcaagtccctaaa

SEQ ID NO: 170637 - DNA, 70 bp, Homo sapiens
aaaactggatgatatccggctttaaaatggggtcttaatatcggtacactgcaagtccctaaaccgcagc

SEQ ID NO: 170638 - DNA, 72 bp, Homo sapiens
aaactggatgatatccggctttaaaatggggtcttaatatcggtacactgcaagtccctaaaccgcagctca

SEQ ID NO: 170639 - DNA, 72 bp, Homo sapiens
ctttaaaatggggtcttaatatcggtacactgcaagtccctaaaccgcagctcagacaattgaacttccata

SEQ ID NO: 170640 - DNA, 79 bp, Homo sapiens
gggtcttaatatcggtacactgcaagtccctaaaccgcagctcagacaattgaacttccatatgctgtgtgattatgta

SEQ ID NO: 170641 - DNA, 78 bp, Homo sapiens
cagctcagacaattgaacttccatatgctgtgtgattatgtatcttttctatgtgtaaaaaggctttttaagctgtta

SEQ ID NO: 170642 - DNA, 77 bp, Homo sapiens
gaacttccatatgctgtgtgattatgtatcttttctatgtgtaaaaaggctttttaagctgttatctgactacagta

SEQ ID NO: 170643 - DNA, 74 bp, Homo sapiens
gtgtgattatgtatcttttctatgtgtaaaaaggctttttaagctgttatctgactacagtaattgccacttta

SEQ ID NO: 170644 - DNA, 72 bp, Homo sapiens
cttttctatgtgtaaaaaggctttttaagctgttatctgactacagtaattgccactttaaattgatccaca

SEQ ID NO: 170645 - DNA, 72 bp, Homo sapiens
gtgtaaaaaggctttttaagctgttatctgactacagtaattgccactttaaattgatccacatcaacaaaa

SEQ ID NO: 170646 - DNA, 77 bp, Homo sapiens
aagctgttatctgactacagtaattgccactttaaattgatccacatcaacaaaacctggatccctggagattctca

SEQ ID NO: 170647 - DNA, 74 bp, Homo sapiens
actacagtaattgccactttaaattgatccacatcaacaaaacctggatccctggagattctcacctagaagtc

SEQ ID NO: 170648 - DNA, 78 bp, Homo sapiens
taattgccactttaaattgatccacatcaacaaaacctggatccctggagattctcacctagaagtctgactgcagcg

SEQ ID NO: 170649 - DNA, 77 bp, Homo sapiens
tttaaattgatccacatcaacaaaacctggatccctggagattctcacctagaagtctgactgcagcggggcctagc

SEQ ID NO: 170650 - DNA, 83 bp, Homo sapiens
acatcaacaaaacctggatccctggagattctcacctagaagtctgactgcagcggggcctagctgaatgtgtgtgcatctga

SEQ ID NO: 170651 - DNA, 81 bp, Homo sapiens
aaacctggatccctggagattctcacctagaagtctgactgcagcggggcctagctgaatgtgtgtgcatctgagactagt

SEQ ID NO: 170652 - DNA, 86 bp, Homo sapiens
tggagattctcacctagaagtctgactgcagcggggcctagctgaatgtgtgtgcatctgagactagttcagcattttctcaagaa

SEQ ID NO: 170653 - DNA, 83 bp, Homo sapiens
attctcacctagaagtctgactgcagcggggcctagctgaatgtgtgtgcatctgagactagttcagcattttctcaagaaac

SEQ ID NO: 170654 - DNA, 81 bp, Homo sapiens
agaagtctgactgcagcggggcctagctgaatgtgtgtgcatctgagactagttcagcattttctcaagaaaccagtttcc

SEQ ID NO: 170655 - DNA, 78 bp, Homo sapiens
agcggggcctagctgaatgtgtgtgcatctgagactagttcagcattttctcaagaaaccagtttcctcctcttattc

SEQ ID NO: 170656 - DNA, 78 bp, Homo sapiens
tgtgcatctgagactagttcagcattttctcaagaaaccagtttcctcctcttattctttaatccatggaggcaagaa

SEQ ID NO: 170657 - DNA, 72 bp, Homo sapiens
agttcagcattttctcaagaaaccagtttcctcctcttattctttaatccatggaggcaagaaaagcagaac

SEQ ID NO: 170658 - DNA, 70 bp, Homo sapiens
tttctcaagaaaccagtttcctcctcttattctttaatccatggaggcaagaaaagcagaaccccatttg

SEQ ID NO: 170659 - DNA, 72 bp, Homo sapiens
gtttcctcctcttattctttaatccatggaggcaagaaaagcagaaccccatttggcagttctccctgaata

SEQ ID NO: 170660 - DNA, 71 bp, Homo sapiens
tcttattctttaatccatggaggcaagaaaagcagaaccccatttggcagttctccctgaatagggaaacc

SEQ ID NO: 170661 - DNA, 73 bp, Homo sapiens
tttaatccatggaggcaagaaaagcagaaccccatttggcagttctccctgaatagggaaacctggatatgta

SEQ ID NO: 170662 - DNA, 72 bp, Homo sapiens
ggcaagaaaagcagaaccccatttggcagttctccctgaatagggaaacctggatatgtagttctacacagt

SEQ ID NO: 170663 - DNA, 72 bp, Homo sapiens
aaaagcagaaccccatttggcagttctccctgaatagggaaacctggatatgtagttctacacagttactca

SEQ ID NO: 170664 - DNA, 72 bp, Homo sapiens
atttggcagttctccctgaatagggaaacctggatatgtagttctacacagttactcagacagaataacttt

SEQ ID NO: 170665 - DNA, 73 bp, Homo sapiens
tctccctgaatagggaaacctggatatgtagttctacacagttactcagacagaataacttttcgttcataaa

SEQ ID NO: 170666 - DNA, 72 bp, Homo sapiens
ctgaatagggaaacctggatatgtagttctacacagttactcagacagaataacttttcgttcataaaaata

SEQ ID NO: 170667 - DNA, 73 bp, Homo sapiens
aataaataaaaggaggatatggagccaagatctctaacatccaaattgtataataaaaatagacaatcaataa

SEQ ID NO: 170668 - DNA, 79 bp, Homo sapiens
aaaaggaggatatggagccaagatctctaacatccaaattgtataataaaaatagacaatcaataacatgatgaatgca

SEQ ID NO: 170669 - DNA, 82 bp, Homo sapiens
ggagccaagatctctaacatccaaattgtataataaaaatagacaatcaataacatgatgaatgcatttatgcaagtgaatg

SEQ ID NO: 170670 - DNA, 80 bp, Homo sapiens
atagacaatcaataacatgatgaatgcatttatgcaagtgaatggagaaaaacaatacatattgcaaaagttttctccag

SEQ ID NO: 170671 - DNA, 78 bp, Homo sapiens
taacatgatgaatgcatttatgcaagtgaatggagaaaaacaatacatattgcaaaagttttctccagtacaaaacac

SEQ ID NO: 170672 - DNA, 79 bp, Homo sapiens
gatgaatgcatttatgcaagtgaatggagaaaaacaatacatattgcaaaagttttctccagtacaaaacactgtcata

SEQ ID NO: 170673 - DNA, 74 bp, Homo sapiens
atgcaagtgaatggagaaaaacaatacatattgcaaaagttttctccagtacaaaacactgtcataaggaaaca

SEQ ID NO: 170674 - DNA, 72 bp, Homo sapiens
gtgaatggagaaaaacaatacatattgcaaaagttttctccagtacaaaacactgtcataaggaaacatatt

SEQ ID NO: 170675 - DNA, 69 bp, Homo sapiens
aaacaatacatattgcaaaagttttctccagtacaaaacactgtcataaggaaacatattttataaaac

SEQ ID NO: 170676 - DNA, 70 bp, Homo sapiens
tgcaaaagttttctccagtacaaaacactgtcataaggaaacatattttataaaactaaaatatatccca

SEQ ID NO: 170677 - DNA, 70 bp, Homo sapiens
ttctccagtacaaaacactgtcataaggaaacatattttataaaactaaaatatatcccaataacaaaga

SEQ ID NO: 170678 - DNA, 70 bp, Homo sapiens
cagtacaaaacactgtcataaggaaacatattttataaaactaaaatatatcccaataacaaagaataca

SEQ ID NO: 170679 - DNA, 71 bp, Homo sapiens
cactgtcataaggaaacatattttataaaactaaaatatatcccaataacaaagaatacattactcaccaa

SEQ ID NO: 170680 - DNA, 68 bp, Homo sapiens
aggaaacatattttataaaactaaaatatatcccaataacaaagaatacattactcaccaattaagta

SEQ ID NO: 170681 - DNA, 68 bp, Homo sapiens
acatattttataaaactaaaatatatcccaataacaaagaatacattactcaccaattaagtacttcc

SEQ ID NO: 170682 - DNA, 69 bp, Homo sapiens
ttttataaaactaaaatatatcccaataacaaagaatacattactcaccaattaagtacttcctcagga

SEQ ID NO: 170683 - DNA, 71 bp, Homo sapiens
ctaaaatatatcccaataacaaagaatacattactcaccaattaagtacttcctcaggagaacctcatcgg

SEQ ID NO: 170684 - DNA, 75 bp, Homo sapiens
atacattactcaccaattaagtacttcctcaggagaacctcatcggttaatgtatgtcactgaattaagaacaca

SEQ ID NO: 170685 - DNA, 72 bp, Homo sapiens
aattaagtacttcctcaggagaacctcatcggttaatgtatgtcactgaattaagaacacagtccattttta

SEQ ID NO: 170686 - DNA, 73 bp, Homo sapiens
tacttcctcaggagaacctcatcggttaatgtatgtcactgaattaagaacacagtccatttttaaggcaatt

SEQ ID NO: 170687 - DNA, 73 bp, Homo sapiens
gtcactgaattaagaacacagtccatttttaaggcaattttttagagagagtcatctaaatcaacactttcca

SEQ ID NO: 170688 - DNA, 70 bp, Homo sapiens
ttaagaacacagtccatttttaaggcaattttttagagagagtcatctaaatcaacactttccaaaccag

SEQ ID NO: 170689 - DNA, 69 bp, Homo sapiens
cacagtccatttttaaggcaattttttagagagagtcatctaaatcaacactttccaaaccagtaagtt

SEQ ID NO: 170690 - DNA, 69 bp, Homo sapiens
aaggcaattttttagagagagtcatctaaatcaacactttccaaaccagtaagtttagtcaacaacaaa

SEQ ID NO: 170691 - DNA, 69 bp, Homo sapiens
ttccaaaccagtaagtttagtcaacaacaaaatgctgggctcccacaaaagcaaatacataagttgttt

SEQ ID NO: 170692 - DNA, 70 bp, Homo sapiens
agtaagtttagtcaacaacaaaatgctgggctcccacaaaagcaaatacataagttgttttctgacaact

SEQ ID NO: 170693 - DNA, 76 bp, Homo sapiens
tcaacaacaaaatgctgggctcccacaaaagcaaatacataagttgttttctgacaactttagatcattcattaga

SEQ ID NO: 170694 - DNA, 75 bp, Homo sapiens
aatgctgggctcccacaaaagcaaatacataagttgttttctgacaactttagatcattcattagaaaggcatta

SEQ ID NO: 170695 - DNA, 75 bp, Homo sapiens
gctcccacaaaagcaaatacataagttgttttctgacaactttagatcattcattagaaaggcattatggtattg

SEQ ID NO: 170696 - DNA, 76 bp, Homo sapiens
gcaaatacataagttgttttctgacaactttagatcattcattagaaaggcattatggtattgtatgattccaagg

SEQ ID NO: 170697 - DNA, 74 bp, Homo sapiens
gttgttttctgacaactttagatcattcattagaaaggcattatggtattgtatgattccaaggtatttttcac

SEQ ID NO: 170698 - DNA, 76 bp, Homo sapiens
gacaactttagatcattcattagaaaggcattatggtattgtatgattccaaggtatttttcacttatgtccacca

SEQ ID NO: 170699 - DNA, 75 bp, Homo sapiens
tcattagaaaggcattatggtattgtatgattccaaggtatttttcacttatgtccaccacaaacctttcatgaa

SEQ ID NO: 170700 - DNA, 73 bp, Homo sapiens
aggcattatggtattgtatgattccaaggtatttttcacttatgtccaccacaaacctttcatgaaatacaaa

SEQ ID NO: 170701 - DNA, 71 bp, Homo sapiens
ttgtatgattccaaggtatttttcacttatgtccaccacaaacctttcatgaaatacaaatttttcctctg

SEQ ID NO: 170702 - DNA, 69 bp, Homo sapiens
tccaaggtatttttcacttatgtccaccacaaacctttcatgaaatacaaatttttcctctgttcaaac

SEQ ID NO: 170703 - DNA, 72 bp, Homo sapiens
tttcacttatgtccaccacaaacctttcatgaaatacaaatttttcctctgttcaaacctgacttagcaaca

SEQ ID NO: 170704 - DNA, 72 bp, Homo sapiens
aaacctttcatgaaatacaaatttttcctctgttcaaacctgacttagcaacagggaccagcagtctactga

SEQ ID NO: 170705 - DNA, 76 bp, Homo sapiens
aaatacaaatttttcctctgttcaaacctgacttagcaacagggaccagcagtctactgacatgggctgcagttca

SEQ ID NO: 170706 - DNA, 81 bp, Homo sapiens
tgttcaaacctgacttagcaacagggaccagcagtctactgacatgggctgcagttcaggaaagctctctacattggtgaa

SEQ ID NO: 170707 - DNA, 78 bp, Homo sapiens
acttagcaacagggaccagcagtctactgacatgggctgcagttcaggaaagctctctacattggtgaagggagaatt

SEQ ID NO: 170708 - DNA, 77 bp, Homo sapiens
agggaccagcagtctactgacatgggctgcagttcaggaaagctctctacattggtgaagggagaatttgagttaaa

SEQ ID NO: 170709 - DNA, 76 bp, Homo sapiens
agtctactgacatgggctgcagttcaggaaagctctctacattggtgaagggagaatttgagttaaagcctttcca

SEQ ID NO: 170710 - DNA, 74 bp, Homo sapiens
acatgggctgcagttcaggaaagctctctacattggtgaagggagaatttgagttaaagcctttccacaggtct

SEQ ID NO: 170711 - DNA, 71 bp, Homo sapiens
gttcaggaaagctctctacattggtgaagggagaatttgagttaaagcctttccacaggtcttctcaactt

SEQ ID NO: 170712 - DNA, 71 bp, Homo sapiens
aaagctctctacattggtgaagggagaatttgagttaaagcctttccacaggtcttctcaactttcctctc

SEQ ID NO: 170713 - DNA, 71 bp, Homo sapiens
ctacattggtgaagggagaatttgagttaaagcctttccacaggtcttctcaactttcctctcggcttcta

SEQ ID NO: 170714 - DNA, 75 bp, Homo sapiens
gagaatttgagttaaagcctttccacaggtcttctcaactttcctctcggcttctagcaggctgttgtgatacac

SEQ ID NO: 170715 - DNA, 76 bp, Homo sapiens
agttaaagcctttccacaggtcttctcaactttcctctcggcttctagcaggctgttgtgatacactgtgacttca

SEQ ID NO: 170716 - DNA, 79 bp, Homo sapiens
ttccacaggtcttctcaactttcctctcggcttctagcaggctgttgtgatacactgtgacttcacacagtgggtatta

SEQ ID NO: 170717 - DNA, 79 bp, Homo sapiens
tcttctcaactttcctctcggcttctagcaggctgttgtgatacactgtgacttcacacagtgggtattaagtgagtta

SEQ ID NO: 170718 - DNA, 77 bp, Homo sapiens
cttctagcaggctgttgtgatacactgtgacttcacacagtgggtattaagtgagttaattcaaaggagctgaaacc

SEQ ID NO: 170719 - DNA, 75 bp, Homo sapiens
acttcacacagtgggtattaagtgagttaattcaaaggagctgaaacctcattgatcctaattgaaagcaataca

SEQ ID NO: 170720 - DNA, 73 bp, Homo sapiens
tgggtattaagtgagttaattcaaaggagctgaaacctcattgatcctaattgaaagcaatacacccaaccaa

SEQ ID NO: 170721 - DNA, 71 bp, Homo sapiens
aagtgagttaattcaaaggagctgaaacctcattgatcctaattgaaagcaatacacccaaccaaatactt

SEQ ID NO: 170722 - DNA, 74 bp, Homo sapiens
agctgaaacctcattgatcctaattgaaagcaatacacccaaccaaatactttcctaccccatctgctctggcc

SEQ ID NO: 170723 - DNA, 74 bp, Homo sapiens
ttgatcctaattgaaagcaatacacccaaccaaatactttcctaccccatctgctctggcctgccaccaactat

SEQ ID NO: 170724 - DNA, 75 bp, Homo sapiens
taattgaaagcaatacacccaaccaaatactttcctaccccatctgctctggcctgccaccaactattcaataca

SEQ ID NO: 170725 - DNA, 74 bp, Homo sapiens
tacacccaaccaaatactttcctaccccatctgctctggcctgccaccaactattcaatacaagagaattaata

SEQ ID NO: 170726 - DNA, 73 bp, Homo sapiens
aaccaaatactttcctaccccatctgctctggcctgccaccaactattcaatacaagagaattaatagtttca

SEQ ID NO: 170727 - DNA, 75 bp, Homo sapiens
actttcctaccccatctgctctggcctgccaccaactattcaatacaagagaattaatagtttcagatattctaa

SEQ ID NO: 170728 - DNA, 75 bp, Homo sapiens
atctgctctggcctgccaccaactattcaatacaagagaattaatagtttcagatattctaaccgacccaataaa

SEQ ID NO: 170729 - DNA, 73 bp, Homo sapiens
ctgccaccaactattcaatacaagagaattaatagtttcagatattctaaccgacccaataaaggcactcatt

SEQ ID NO: 170730 - DNA, 74 bp, Homo sapiens
atacaagagaattaatagtttcagatattctaaccgacccaataaaggcactcatttaagcagggctgcattaa

SEQ ID NO: 170731 - DNA, 73 bp, Homo sapiens
aattaatagtttcagatattctaaccgacccaataaaggcactcatttaagcagggctgcattaacaaagtga

SEQ ID NO: 170732 - DNA, 72 bp, Homo sapiens
tttcagatattctaaccgacccaataaaggcactcatttaagcagggctgcattaacaaagtgaaaaaacaa

SEQ ID NO: 170733 - DNA, 70 bp, Homo sapiens
tctaaccgacccaataaaggcactcatttaagcagggctgcattaacaaagtgaaaaaacaagggcaaaa

SEQ ID NO: 170734 - DNA, 71 bp, Homo sapiens
actcatttaagcagggctgcattaacaaagtgaaaaaacaagggcaaaatgggttcaaatggagcatttta

SEQ ID NO: 170735 - DNA, 69 bp, Homo sapiens
agggctgcattaacaaagtgaaaaaacaagggcaaaatgggttcaaatggagcattttactcctagttg

SEQ ID NO: 170736 - DNA, 67 bp, Homo sapiens
acaaagtgaaaaaacaagggcaaaatgggttcaaatggagcattttactcctagttggctttaacaa

SEQ ID NO: 170737 - DNA, 68 bp, Homo sapiens
aaaacaagggcaaaatgggttcaaatggagcattttactcctagttggctttaacaaagctgaataag

SEQ ID NO: 170738 - DNA, 70 bp, Homo sapiens
gggttcaaatggagcattttactcctagttggctttaacaaagctgaataaggcttattctgacttttta

SEQ ID NO: 170739 - DNA, 75 bp, Homo sapiens
gagcattttactcctagttggctttaacaaagctgaataaggcttattctgactttttatgtgcaagacttgata

SEQ ID NO: 170740 - DNA, 76 bp, Homo sapiens
tcctagttggctttaacaaagctgaataaggcttattctgactttttatgtgcaagacttgataaactgaatgaga

SEQ ID NO: 170741 - DNA, 76 bp, Homo sapiens
ctttaacaaagctgaataaggcttattctgactttttatgtgcaagacttgataaactgaatgagaaggcactcaa

SEQ ID NO: 170742 - DNA, 79 bp, Homo sapiens
aagctgaataaggcttattctgactttttatgtgcaagacttgataaactgaatgagaaggcactcaatgatcacccaa

SEQ ID NO: 170743 - DNA, 82 bp, Homo sapiens
ttattctgactttttatgtgcaagacttgataaactgaatgagaaggcactcaatgatcacccaacgagcattgatgaatgg

SEQ ID NO: 170744 - DNA, 81 bp, Homo sapiens
actttttatgtgcaagacttgataaactgaatgagaaggcactcaatgatcacccaacgagcattgatgaatggtcattaa

SEQ ID NO: 170745 - DNA, 81 bp, Homo sapiens
atgtgcaagacttgataaactgaatgagaaggcactcaatgatcacccaacgagcattgatgaatggtcattaagaccccc

SEQ ID NO: 170746 - DNA, 81 bp, Homo sapiens
ttgataaactgaatgagaaggcactcaatgatcacccaacgagcattgatgaatggtcattaagacccccctgctcttaga

SEQ ID NO: 170747 - DNA, 78 bp, Homo sapiens
atgagaaggcactcaatgatcacccaacgagcattgatgaatggtcattaagacccccctgctcttagaggagaccct

SEQ ID NO: 170748 - DNA, 76 bp, Homo sapiens
actcaatgatcacccaacgagcattgatgaatggtcattaagacccccctgctcttagaggagacccttccacaaa

SEQ ID NO: 170749 - DNA, 74 bp, Homo sapiens
attgatgaatggtcattaagacccccctgctcttagaggagacccttccacaaagtggcacaccagcttgaaag

SEQ ID NO: 170750 - DNA, 77 bp, Homo sapiens
ctcttagaggagacccttccacaaagtggcacaccagcttgaaagggcagactcactcatgtccagatttctccgct

SEQ ID NO: 170751 - DNA, 77 bp, Homo sapiens
acaaagtggcacaccagcttgaaagggcagactcactcatgtccagatttctccgcttgcttgtcccactttcaatt

SEQ ID NO: 170752 - DNA, 78 bp, Homo sapiens
acaccagcttgaaagggcagactcactcatgtccagatttctccgcttgcttgtcccactttcaatttcagaccactg

SEQ ID NO: 170753 - DNA, 76 bp, Homo sapiens
aaagggcagactcactcatgtccagatttctccgcttgcttgtcccactttcaatttcagaccactggccaccaaa

SEQ ID NO: 170754 - DNA, 80 bp, Homo sapiens
actcactcatgtccagatttctccgcttgcttgtcccactttcaatttcagaccactggccaccaaatgaggctgacata

SEQ ID NO: 170755 - DNA, 77 bp, Homo sapiens
tccagatttctccgcttgcttgtcccactttcaatttcagaccactggccaccaaatgaggctgacatattggaaaa

SEQ ID NO: 170756 - DNA, 75 bp, Homo sapiens
atttctccgcttgcttgtcccactttcaatttcagaccactggccaccaaatgaggctgacatattggaaaataa

SEQ ID NO: 170757 - DNA, 75 bp, Homo sapiens
ttgcttgtcccactttcaatttcagaccactggccaccaaatgaggctgacatattggaaaataatgttttatgg

SEQ ID NO: 170758 - DNA, 74 bp, Homo sapiens
tcaatttcagaccactggccaccaaatgaggctgacatattggaaaataatgttttatgggcgagtggtaaaaa

SEQ ID NO: 170759 - DNA, 71 bp, Homo sapiens
agaccactggccaccaaatgaggctgacatattggaaaataatgttttatgggcgagtggtaaaaaataaa

SEQ ID NO: 170760 - DNA, 72 bp, Homo sapiens
caccaaatgaggctgacatattggaaaataatgttttatgggcgagtggtaaaaaataaaatggaggcatta

SEQ ID NO: 170761 - DNA, 71 bp, Homo sapiens
tggaaaataatgttttatgggcgagtggtaaaaaataaaatggaggcattagctctgctttcaaattcaaa

SEQ ID NO: 170762 - DNA, 72 bp, Homo sapiens
aatgttttatgggcgagtggtaaaaaataaaatggaggcattagctctgctttcaaattcaaatctgctagt

SEQ ID NO: 170763 - DNA, 75 bp, Homo sapiens
tatgggcgagtggtaaaaaataaaatggaggcattagctctgctttcaaattcaaatctgctagttttgtcagac

SEQ ID NO: 170764 - DNA, 70 bp, Homo sapiens
aaaaataaaatggaggcattagctctgctttcaaattcaaatctgctagttttgtcagaccccaaaggtt

SEQ ID NO: 170765 - DNA, 71 bp, Homo sapiens
tttcaaattcaaatctgctagttttgtcagaccccaaaggttttgattttccacccagctggaagctatta

SEQ ID NO: 170766 - DNA, 70 bp, Homo sapiens
ttcaaatctgctagttttgtcagaccccaaaggttttgattttccacccagctggaagctattagtgttt

SEQ ID NO: 170767 - DNA, 73 bp, Homo sapiens
acccagctggaagctattagtgttttctaaaggcatcccactgataaggcaaacctacctaatgtgtgagttg

SEQ ID NO: 170768 - DNA, 72 bp, Homo sapiens
aagctattagtgttttctaaaggcatcccactgataaggcaaacctacctaatgtgtgagttgttgggctaa

SEQ ID NO: 170769 - DNA, 73 bp, Homo sapiens
taaaggcatcccactgataaggcaaacctacctaatgtgtgagttgttgggctaagggagatggacctctctt

SEQ ID NO: 170770 - DNA, 73 bp, Homo sapiens
actgataaggcaaacctacctaatgtgtgagttgttgggctaagggagatggacctctcttttggatgatttc

SEQ ID NO: 170771 - DNA, 74 bp, Homo sapiens
tacctaatgtgtgagttgttgggctaagggagatggacctctcttttggatgatttcctaacttctcatcactt

SEQ ID NO: 170772 - DNA, 74 bp, Homo sapiens
ttgttgggctaagggagatggacctctcttttggatgatttcctaacttctcatcactttgacagtcaattaaa

SEQ ID NO: 170773 - DNA, 76 bp, Homo sapiens
gatggacctctcttttggatgatttcctaacttctcatcactttgacagtcaattaaatagatacaacacctaata

SEQ ID NO: 170774 - DNA, 73 bp, Homo sapiens
ctcttttggatgatttcctaacttctcatcactttgacagtcaattaaatagatacaacacctaataaaaatg

SEQ ID NO: 170775 - DNA, 72 bp, Homo sapiens
gatttcctaacttctcatcactttgacagtcaattaaatagatacaacacctaataaaaatgtacattaatt

SEQ ID NO: 170776 - DNA, 74 bp, Homo sapiens
cttctcatcactttgacagtcaattaaatagatacaacacctaataaaaatgtacattaatttgtttctgccac

SEQ ID NO: 170777 - DNA, 74 bp, Homo sapiens
tcaattaaatagatacaacacctaataaaaatgtacattaatttgtttctgccactgaaagccatctgaaactg

SEQ ID NO: 170778 - DNA, 73 bp, Homo sapiens
agatacaacacctaataaaaatgtacattaatttgtttctgccactgaaagccatctgaaactgtattaaata

SEQ ID NO: 170779 - DNA, 72 bp, Homo sapiens
cctaataaaaatgtacattaatttgtttctgccactgaaagccatctgaaactgtattaaataaaagccata

SEQ ID NO: 170780 - DNA, 73 bp, Homo sapiens
gccatctgaaactgtattaaataaaagccataatagattgtcccctgacaaagataaatccaattatactttg

SEQ ID NO: 170781 - DNA, 72 bp, Homo sapiens
ctgtattaaataaaagccataatagattgtcccctgacaaagataaatccaattatactttgtctgcaaaaa

SEQ ID NO: 170782 - DNA, 71 bp, Homo sapiens
taatagattgtcccctgacaaagataaatccaattatactttgtctgcaaaaaaacacaaatggtttatgt

SEQ ID NO: 170783 - DNA, 69 bp, Homo sapiens
cctgacaaagataaatccaattatactttgtctgcaaaaaaacacaaatggtttatgttttagttaggc

SEQ ID NO: 170784 - DNA, 70 bp, Homo sapiens
taaatccaattatactttgtctgcaaaaaaacacaaatggtttatgttttagttaggctacaatgtaaga

SEQ ID NO: 170785 - DNA, 71 bp, Homo sapiens
atactttgtctgcaaaaaaacacaaatggtttatgttttagttaggctacaatgtaagatacagctaacca

SEQ ID NO: 170786 - DNA, 72 bp, Homo sapiens
tgtctgcaaaaaaacacaaatggtttatgttttagttaggctacaatgtaagatacagctaaccacaagaaa

SEQ ID NO: 170787 - DNA, 72 bp, Homo sapiens
cacaaatggtttatgttttagttaggctacaatgtaagatacagctaaccacaagaaataagtgggatagag

SEQ ID NO: 170788 - DNA, 70 bp, Homo sapiens
atggtttatgttttagttaggctacaatgtaagatacagctaaccacaagaaataagtgggatagagggg

SEQ ID NO: 170789 - DNA, 67 bp, Homo sapiens
agatacagctaaccacaagaaataagtgggatagagggggaaagaaaaaactaagtgaaaaagttca

SEQ ID NO: 170790 - DNA, 66 bp, Homo sapiens
ccacaagaaataagtgggatagagggggaaagaaaaaactaagtgaaaaagttcattgaagtattc

SEQ ID NO: 170791 - DNA, 66 bp, Homo sapiens
gagggggaaagaaaaaactaagtgaaaaagttcattgaagtattccatcaaggttaagaggttatc

SEQ ID NO: 170792 - DNA, 70 bp, Homo sapiens
gaaaaaactaagtgaaaaagttcattgaagtattccatcaaggttaagaggttatctgtcattttagctc

SEQ ID NO: 170793 - DNA, 72 bp, Homo sapiens
gtgaaaaagttcattgaagtattccatcaaggttaagaggttatctgtcattttagctcccttacataaatg

SEQ ID NO: 170794 - DNA, 73 bp, Homo sapiens
aagttcattgaagtattccatcaaggttaagaggttatctgtcattttagctcccttacataaatgtctgttg

SEQ ID NO: 170795 - DNA, 72 bp, Homo sapiens
gaagtattccatcaaggttaagaggttatctgtcattttagctcccttacataaatgtctgttgtaaacaac

SEQ ID NO: 170796 - DNA, 72 bp, Homo sapiens
tgtcattttagctcccttacataaatgtctgttgtaaacaactaaacacatttacgctattccctcaaatat

SEQ ID NO: 170797 - DNA, 70 bp, Homo sapiens
gctcccttacataaatgtctgttgtaaacaactaaacacatttacgctattccctcaaatatttcctttg

SEQ ID NO: 170798 - DNA, 71 bp, Homo sapiens
tgtctgttgtaaacaactaaacacatttacgctattccctcaaatatttcctttgggggaaatgattggca

SEQ ID NO: 170799 - DNA, 70 bp, Homo sapiens
tgtaaacaactaaacacatttacgctattccctcaaatatttcctttgggggaaatgattggcaagcatt

SEQ ID NO: 170800 - DNA, 73 bp, Homo sapiens
taaacacatttacgctattccctcaaatatttcctttgggggaaatgattggcaagcatttgcacctcctcaa

SEQ ID NO: 170801 - DNA, 76 bp, Homo sapiens
caaatatttcctttgggggaaatgattggcaagcatttgcacctcctcaactttcagccagcccgcagaactcaca

SEQ ID NO: 170802 - DNA, 79 bp, Homo sapiens
aaatgattggcaagcatttgcacctcctcaactttcagccagcccgcagaactcacaagaactttgcttagatgacaaa

SEQ ID NO: 170803 - DNA, 77 bp, Homo sapiens
aagcatttgcacctcctcaactttcagccagcccgcagaactcacaagaactttgcttagatgacaaaagaacagga

SEQ ID NO: 170804 - DNA, 75 bp, Homo sapiens
acctcctcaactttcagccagcccgcagaactcacaagaactttgcttagatgacaaaagaacaggagacattat

SEQ ID NO: 170805 - DNA, 76 bp, Homo sapiens
agcccgcagaactcacaagaactttgcttagatgacaaaagaacaggagacattattgccatcttaagaatttgaa

SEQ ID NO: 170806 - DNA, 75 bp, Homo sapiens
ctcacaagaactttgcttagatgacaaaagaacaggagacattattgccatcttaagaatttgaagggtgtataa

SEQ ID NO: 170807 - DNA, 74 bp, Homo sapiens
gatgacaaaagaacaggagacattattgccatcttaagaatttgaagggtgtataaacatcatgaggttaaagg

SEQ ID NO: 170808 - DNA, 71 bp, Homo sapiens
agaacaggagacattattgccatcttaagaatttgaagggtgtataaacatcatgaggttaaaggtttatt

SEQ ID NO: 170809 - DNA, 72 bp, Homo sapiens
cattattgccatcttaagaatttgaagggtgtataaacatcatgaggttaaaggtttatttagggctgtcca

SEQ ID NO: 170810 - DNA, 71 bp, Homo sapiens
aatttgaagggtgtataaacatcatgaggttaaaggtttatttagggctgtccaagagagcctaagtgcta

SEQ ID NO: 170811 - DNA, 78 bp, Homo sapiens
tgtataaacatcatgaggttaaaggtttatttagggctgtccaagagagcctaagtgctagcaatgagatggagtcaa

SEQ ID NO: 170812 - DNA, 75 bp, Homo sapiens
atcatgaggttaaaggtttatttagggctgtccaagagagcctaagtgctagcaatgagatggagtcaagtaaaa

SEQ ID NO: 170813 - DNA, 79 bp, Homo sapiens
tatttagggctgtccaagagagcctaagtgctagcaatgagatggagtcaagtaaaagaaaacatgctggatagaggaa

SEQ ID NO: 170814 - DNA, 77 bp, Homo sapiens
aagagagcctaagtgctagcaatgagatggagtcaagtaaaagaaaacatgctggatagaggaaacctatcttaata

SEQ ID NO: 170815 - DNA, 78 bp, Homo sapiens
taagtgctagcaatgagatggagtcaagtaaaagaaaacatgctggatagaggaaacctatcttaataggtgattata

SEQ ID NO: 170816 - DNA, 77 bp, Homo sapiens
caatgagatggagtcaagtaaaagaaaacatgctggatagaggaaacctatcttaataggtgattatacagacatta

SEQ ID NO: 170817 - DNA, 75 bp, Homo sapiens
atggagtcaagtaaaagaaaacatgctggatagaggaaacctatcttaataggtgattatacagacattacagac

SEQ ID NO: 170818 - DNA, 73 bp, Homo sapiens
aagaaaacatgctggatagaggaaacctatcttaataggtgattatacagacattacagacgcggaaaagctt

SEQ ID NO: 170819 - DNA, 76 bp, Homo sapiens
atgctggatagaggaaacctatcttaataggtgattatacagacattacagacgcggaaaagctttactgcctcaa

SEQ ID NO: 170820 - DNA, 82 bp, Homo sapiens
taggtgattatacagacattacagacgcggaaaagctttactgcctcaatcacatgcaactagtcagacaaagcactataga

SEQ ID NO: 170821 - DNA, 81 bp, Homo sapiens
acagacattacagacgcggaaaagctttactgcctcaatcacatgcaactagtcagacaaagcactatagaacacagtggc

SEQ ID NO: 170822 - DNA, 83 bp, Homo sapiens
ctcaatcacatgcaactagtcagacaaagcactatagaacacagtggcccatggaggacatgctgtaggtctgtttagaaatc

SEQ ID NO: 170823 - DNA, 82 bp, Homo sapiens
atgcaactagtcagacaaagcactatagaacacagtggcccatggaggacatgctgtaggtctgtttagaaatcctcatcta

SEQ ID NO: 170824 - DNA, 79 bp, Homo sapiens
agacaaagcactatagaacacagtggcccatggaggacatgctgtaggtctgtttagaaatcctcatctaccagggcaa

SEQ ID NO: 170825 - DNA, 80 bp, Homo sapiens
aagcactatagaacacagtggcccatggaggacatgctgtaggtctgtttagaaatcctcatctaccagggcaagtggca

SEQ ID NO: 170826 - DNA, 81 bp, Homo sapiens
acagtggcccatggaggacatgctgtaggtctgtttagaaatcctcatctaccagggcaagtggcaggctgagagctagaa

SEQ ID NO: 170827 - DNA, 80 bp, Homo sapiens
atggaggacatgctgtaggtctgtttagaaatcctcatctaccagggcaagtggcaggctgagagctagaagtcacaacc

SEQ ID NO: 170828 - DNA, 79 bp, Homo sapiens
acatgctgtaggtctgtttagaaatcctcatctaccagggcaagtggcaggctgagagctagaagtcacaacccctagc

SEQ ID NO: 170829 - DNA, 79 bp, Homo sapiens
tctgtttagaaatcctcatctaccagggcaagtggcaggctgagagctagaagtcacaacccctagccttcacctatga

SEQ ID NO: 170830 - DNA, 78 bp, Homo sapiens
atcctcatctaccagggcaagtggcaggctgagagctagaagtcacaacccctagccttcacctatgacttatgtaaa

SEQ ID NO: 170831 - DNA, 77 bp, Homo sapiens
atctaccagggcaagtggcaggctgagagctagaagtcacaacccctagccttcacctatgacttatgtaaaactca

SEQ ID NO: 170832 - DNA, 78 bp, Homo sapiens
tggcaggctgagagctagaagtcacaacccctagccttcacctatgacttatgtaaaactcatggtctcaggtcactt

SEQ ID NO: 170833 - DNA, 74 bp, Homo sapiens
agagctagaagtcacaacccctagccttcacctatgacttatgtaaaactcatggtctcaggtcactttgattt

SEQ ID NO: 170834 - DNA, 76 bp, Homo sapiens
tagaagtcacaacccctagccttcacctatgacttatgtaaaactcatggtctcaggtcactttgatttttgcatc

SEQ ID NO: 170835 - DNA, 76 bp, Homo sapiens
ttcacctatgacttatgtaaaactcatggtctcaggtcactttgatttttgcatctccatcagttaaagtaagtta

SEQ ID NO: 170836 - DNA, 75 bp, Homo sapiens
atgtaaaactcatggtctcaggtcactttgatttttgcatctccatcagttaaagtaagttaataatggactcta

SEQ ID NO: 170837 - DNA, 74 bp, Homo sapiens
aaactcatggtctcaggtcactttgatttttgcatctccatcagttaaagtaagttaataatggactctacgac

SEQ ID NO: 170838 - DNA, 75 bp, Homo sapiens
tctcaggtcactttgatttttgcatctccatcagttaaagtaagttaataatggactctacgactgtactttgaa

SEQ ID NO: 170839 - DNA, 74 bp, Homo sapiens
gatttttgcatctccatcagttaaagtaagttaataatggactctacgactgtactttgaagattccaatgtta

SEQ ID NO: 170840 - DNA, 73 bp, Homo sapiens
gcatctccatcagttaaagtaagttaataatggactctacgactgtactttgaagattccaatgttaaaatat

SEQ ID NO: 170841 - DNA, 71 bp, Homo sapiens
atattttaaataatgacttcctaaactgataaaccaaatagtctctatgatattcttttttccatcttcaa

SEQ ID NO: 170842 - DNA, 75 bp, Homo sapiens
ataatgacttcctaaactgataaaccaaatagtctctatgatattcttttttccatcttcaatgtctacagaata

SEQ ID NO: 170843 - DNA, 72 bp, Homo sapiens
acttcctaaactgataaaccaaatagtctctatgatattcttttttccatcttcaatgtctacagaataaaa

SEQ ID NO: 170844 - DNA, 78 bp, Homo sapiens
ccaaatagtctctatgatattcttttttccatcttcaatgtctacagaataaaatattagtgatatcattctgacagt

SEQ ID NO: 170845 - DNA, 79 bp, Homo sapiens
tagtctctatgatattcttttttccatcttcaatgtctacagaataaaatattagtgatatcattctgacagtttttca

SEQ ID NO: 170846 - DNA, 80 bp, Homo sapiens
tctctatgatattcttttttccatcttcaatgtctacagaataaaatattagtgatatcattctgacagtttttcaagca

SEQ ID NO: 170847 - DNA, 78 bp, Homo sapiens
gatattcttttttccatcttcaatgtctacagaataaaatattagtgatatcattctgacagtttttcaagcaatata

SEQ ID NO: 170848 - DNA, 77 bp, Homo sapiens
ttttttccatcttcaatgtctacagaataaaatattagtgatatcattctgacagtttttcaagcaatatatttgac

SEQ ID NO: 170849 - DNA, 77 bp, Homo sapiens
ttttccatcttcaatgtctacagaataaaatattagtgatatcattctgacagtttttcaagcaatatatttgactt

SEQ ID NO: 170850 - DNA, 77 bp, Homo sapiens
ccatcttcaatgtctacagaataaaatattagtgatatcattctgacagtttttcaagcaatatatttgacttttaa

SEQ ID NO: 170851 - DNA, 77 bp, Homo sapiens
tcaatgtctacagaataaaatattagtgatatcattctgacagtttttcaagcaatatatttgacttttaactctgg

SEQ ID NO: 170852 - DNA, 76 bp, Homo sapiens
gtctacagaataaaatattagtgatatcattctgacagtttttcaagcaatatatttgacttttaactctggttga

SEQ ID NO: 170853 - DNA, 77 bp, Homo sapiens
gtgatatcattctgacagtttttcaagcaatatatttgacttttaactctggttgaagtacaatgtcctcttataca

SEQ ID NO: 170854 - DNA, 74 bp, Homo sapiens
ctgacagtttttcaagcaatatatttgacttttaactctggttgaagtacaatgtcctcttatacatgaataaa

SEQ ID NO: 170855 - DNA, 74 bp, Homo sapiens
ttttcaagcaatatatttgacttttaactctggttgaagtacaatgtcctcttatacatgaataaaaagatgtg

SEQ ID NO: 170856 - DNA, 72 bp, Homo sapiens
atttgacttttaactctggttgaagtacaatgtcctcttatacatgaataaaaagatgtgtattagtatatt

SEQ ID NO: 170857 - DNA, 77 bp, Homo sapiens
taactctggttgaagtacaatgtcctcttatacatgaataaaaagatgtgtattagtatatttaagttgtgtgtgca

SEQ ID NO: 170858 - DNA, 80 bp, Homo sapiens
tacaatgtcctcttatacatgaataaaaagatgtgtattagtatatttaagttgtgtgtgcatttatgtgtatgtgtaca

SEQ ID NO: 170859 - DNA, 78 bp, Homo sapiens
tacatgaataaaaagatgtgtattagtatatttaagttgtgtgtgcatttatgtgtatgtgtacaaaaatgaagtctg

SEQ ID NO: 170860 - DNA, 75 bp, Homo sapiens
aaaagatgtgtattagtatatttaagttgtgtgtgcatttatgtgtatgtgtacaaaaatgaagtctgtttaaga

SEQ ID NO: 170861 - DNA, 77 bp, Homo sapiens
tattagtatatttaagttgtgtgtgcatttatgtgtatgtgtacaaaaatgaagtctgtttaagacaaaatatcaca

SEQ ID NO: 170862 - DNA, 75 bp, Homo sapiens
atgtgtatgtgtacaaaaatgaagtctgtttaagacaaaatatcacactgaaagtaaacaaaatctatatctgta

SEQ ID NO: 170863 - DNA, 73 bp, Homo sapiens
atgtgtacaaaaatgaagtctgtttaagacaaaatatcacactgaaagtaaacaaaatctatatctgtaatta

SEQ ID NO: 170864 - DNA, 71 bp, Homo sapiens
gaagtctgtttaagacaaaatatcacactgaaagtaaacaaaatctatatctgtaattattacaaattgtt

SEQ ID NO: 170865 - DNA, 75 bp, Homo sapiens
taagacaaaatatcacactgaaagtaaacaaaatctatatctgtaattattacaaattgtttctgatagtgccaa

SEQ ID NO: 170866 - DNA, 75 bp, Homo sapiens
tatcacactgaaagtaaacaaaatctatatctgtaattattacaaattgtttctgatagtgccaatgcctttaaa

SEQ ID NO: 170867 - DNA, 73 bp, Homo sapiens
cactgaaagtaaacaaaatctatatctgtaattattacaaattgtttctgatagtgccaatgcctttaaaata

SEQ ID NO: 170868 - DNA, 76 bp, Homo sapiens
caaaatctatatctgtaattattacaaattgtttctgatagtgccaatgcctttaaaatatgacaatatattgtag

SEQ ID NO: 170869 - DNA, 75 bp, Homo sapiens
ctgtaattattacaaattgtttctgatagtgccaatgcctttaaaatatgacaatatattgtagttcatttccac

SEQ ID NO: 170870 - DNA, 74 bp, Homo sapiens
tacaaattgtttctgatagtgccaatgcctttaaaatatgacaatatattgtagttcatttccaccaacttatt

SEQ ID NO: 170871 - DNA, 73 bp, Homo sapiens
gtttctgatagtgccaatgcctttaaaatatgacaatatattgtagttcatttccaccaacttattttcaacg

SEQ ID NO: 170872 - DNA, 73 bp, Homo sapiens
tagtgccaatgcctttaaaatatgacaatatattgtagttcatttccaccaacttattttcaacgtctaatat

SEQ ID NO: 170873 - DNA, 69 bp, Homo sapiens
gcctttaaaatatgacaatatattgtagttcatttccaccaacttattttcaacgtctaatattttaaa

SEQ ID NO: 170874 - DNA, 71 bp, Homo sapiens
ttaaaattttttgaaatgctataacagcttttaacacttgcactgattaaattttatgctatttaaacaca

SEQ ID NO: 170875 - DNA, 72 bp, Homo sapiens
ttgaaatgctataacagcttttaacacttgcactgattaaattttatgctatttaaacacaaattttaaaca

SEQ ID NO: 170876 - DNA, 72 bp, Homo sapiens
atgctataacagcttttaacacttgcactgattaaattttatgctatttaaacacaaattttaaacatacta

SEQ ID NO: 170877 - DNA, 71 bp, Homo sapiens
gcttttaacacttgcactgattaaattttatgctatttaaacacaaattttaaacatactataataataca

SEQ ID NO: 170878 - DNA, 71 bp, Homo sapiens
tgcactgattaaattttatgctatttaaacacaaattttaaacatactataataatacagttaaaggtaga

SEQ ID NO: 170879 - DNA, 69 bp, Homo sapiens
attttatgctatttaaacacaaattttaaacatactataataatacagttaaaggtagattcctacata

SEQ ID NO: 170880 - DNA, 72 bp, Homo sapiens
gctatttaaacacaaattttaaacatactataataatacagttaaaggtagattcctacataggcactagca

SEQ ID NO: 170881 - DNA, 70 bp, Homo sapiens
cacaaattttaaacatactataataatacagttaaaggtagattcctacataggcactagcaaggggtta

SEQ ID NO: 170882 - DNA, 70 bp, Homo sapiens
aacatactataataatacagttaaaggtagattcctacataggcactagcaaggggttaaattatgttaa

SEQ ID NO: 170883 - DNA, 66 bp, Homo sapiens
cagttaaaggtagattcctacataggcactagcaaggggttaaattatgttaaaattttttaagta

SEQ ID NO: 170884 - DNA, 65 bp, Homo sapiens
agattcctacataggcactagcaaggggttaaattatgttaaaattttttaagtaaaacacttcc

SEQ ID NO: 170885 - DNA, 65 bp, Homo sapiens
ggcactagcaaggggttaaattatgttaaaattttttaagtaaaacacttccttattaatccaca

SEQ ID NO: 170886 - DNA, 65 bp, Homo sapiens
agcaaggggttaaattatgttaaaattttttaagtaaaacacttccttattaatccacaagctga

SEQ ID NO: 170887 - DNA, 70 bp, Homo sapiens
tatgttaaaattttttaagtaaaacacttccttattaatccacaagctgaacactagctatgttaactgc

SEQ ID NO: 170888 - DNA, 71 bp, Homo sapiens
cttccttattaatccacaagctgaacactagctatgttaactgctgttttttttcaagtaaaagcatttcc

SEQ ID NO: 170889 - DNA, 71 bp, Homo sapiens
ccacaagctgaacactagctatgttaactgctgttttttttcaagtaaaagcatttcccataaaacaattc

SEQ ID NO: 170890 - DNA, 70 bp, Homo sapiens
gctgaacactagctatgttaactgctgttttttttcaagtaaaagcatttcccataaaacaattcctaaa

SEQ ID NO: 170891 - DNA, 69 bp, Homo sapiens
ctgctgttttttttcaagtaaaagcatttcccataaaacaattcctaaaaactatacatttgcaatgta

SEQ ID NO: 170892 - DNA, 70 bp, Homo sapiens
caagtaaaagcatttcccataaaacaattcctaaaaactatacatttgcaatgtaaatctgcaaataagt

SEQ ID NO: 170893 - DNA, 72 bp, Homo sapiens
gcatttcccataaaacaattcctaaaaactatacatttgcaatgtaaatctgcaaataagttaccatttaca

SEQ ID NO: 170894 - DNA, 69 bp, Homo sapiens
cccataaaacaattcctaaaaactatacatttgcaatgtaaatctgcaaataagttaccatttacagtt

SEQ ID NO: 170895 - DNA, 73 bp, Homo sapiens
ctaaaaactatacatttgcaatgtaaatctgcaaataagttaccatttacagttttctcatattttgtacagc

SEQ ID NO: 170896 - DNA, 75 bp, Homo sapiens
tacatttgcaatgtaaatctgcaaataagttaccatttacagttttctcatattttgtacagctacaaaaatcac

SEQ ID NO: 170897 - DNA, 75 bp, Homo sapiens
ttgcaatgtaaatctgcaaataagttaccatttacagttttctcatattttgtacagctacaaaaatcactcagg

SEQ ID NO: 170898 - DNA, 74 bp, Homo sapiens
ctgcaaataagttaccatttacagttttctcatattttgtacagctacaaaaatcactcaggtaacatggaaga

SEQ ID NO: 170899 - DNA, 73 bp, Homo sapiens
gttaccatttacagttttctcatattttgtacagctacaaaaatcactcaggtaacatggaagacatcctaac

SEQ ID NO: 170900 - DNA, 75 bp, Homo sapiens
agctacaaaaatcactcaggtaacatggaagacatcctaactacccatctcttattcatttgacaaggactgtaa

SEQ ID NO: 170901 - DNA, 73 bp, Homo sapiens
aggtaacatggaagacatcctaactacccatctcttattcatttgacaaggactgtaacactatatagaaaac

SEQ ID NO: 170902 - DNA, 71 bp, Homo sapiens
ggaagacatcctaactacccatctcttattcatttgacaaggactgtaacactatatagaaaacctttgtt

SEQ ID NO: 170903 - DNA, 72 bp, Homo sapiens
cctaactacccatctcttattcatttgacaaggactgtaacactatatagaaaacctttgtttcaatgtcac

SEQ ID NO: 170904 - DNA, 74 bp, Homo sapiens
atctcttattcatttgacaaggactgtaacactatatagaaaacctttgtttcaatgtcaccacctcctcatct

SEQ ID NO: 170905 - DNA, 74 bp, Homo sapiens
atttgacaaggactgtaacactatatagaaaacctttgtttcaatgtcaccacctcctcatcttgactaatggc

SEQ ID NO: 170906 - DNA, 71 bp, Homo sapiens
actatatagaaaacctttgtttcaatgtcaccacctcctcatcttgactaatggcgagttagttttgttaa

SEQ ID NO: 170907 - DNA, 74 bp, Homo sapiens
acctcctcatcttgactaatggcgagttagttttgttaaaacgcaagggtgatggcatatgctccaatgaactt

SEQ ID NO: 170908 - DNA, 73 bp, Homo sapiens
atcttgactaatggcgagttagttttgttaaaacgcaagggtgatggcatatgctccaatgaactttccctcc

SEQ ID NO: 170909 - DNA, 75 bp, Homo sapiens
aatggcgagttagttttgttaaaacgcaagggtgatggcatatgctccaatgaactttccctcctctcagcaaca

SEQ ID NO: 170910 - DNA, 80 bp, Homo sapiens
aaaacgcaagggtgatggcatatgctccaatgaactttccctcctctcagcaacagagacaaaaacctgcagctctgctc

SEQ ID NO: 170911 - DNA, 88 bp, Homo sapiens
atggcatatgctccaatgaactttccctcctctcagcaacagagacaaaaacctgcagctctgctctgtgcaggcagccatctggaca

SEQ ID NO: 170912 - DNA, 86 bp, Homo sapiens
tatgctccaatgaactttccctcctctcagcaacagagacaaaaacctgcagctctgctctgtgcaggcagccatctggacagctt

SEQ ID NO: 170913 - DNA, 82 bp, Homo sapiens
actttccctcctctcagcaacagagacaaaaacctgcagctctgctctgtgcaggcagccatctggacagctttccctcaaa

SEQ ID NO: 170914 - DNA, 86 bp, Homo sapiens
tcctctcagcaacagagacaaaaacctgcagctctgctctgtgcaggcagccatctggacagctttccctcaaagcccagcccaca

SEQ ID NO: 170915 - DNA, 82 bp, Homo sapiens
aacagagacaaaaacctgcagctctgctctgtgcaggcagccatctggacagctttccctcaaagcccagcccacaccacac

SEQ ID NO: 170916 - DNA, 83 bp, Homo sapiens
aaaacctgcagctctgctctgtgcaggcagccatctggacagctttccctcaaagcccagcccacaccacactgcaggcaaaa

SEQ ID NO: 170917 - DNA, 84 bp, Homo sapiens
tgctctgtgcaggcagccatctggacagctttccctcaaagcccagcccacaccacactgcaggcaaaatcggagggctcgaga

SEQ ID NO: 170918 - DNA, 80 bp, Homo sapiens
aggcagccatctggacagctttccctcaaagcccagcccacaccacactgcaggcaaaatcggagggctcgagagctctg

SEQ ID NO: 170919 - DNA, 78 bp, Homo sapiens
ccatctggacagctttccctcaaagcccagcccacaccacactgcaggcaaaatcggagggctcgagagctctgtggg

SEQ ID NO: 170920 - DNA, 80 bp, Homo sapiens
tttccctcaaagcccagcccacaccacactgcaggcaaaatcggagggctcgagagctctgtggggctattcatgacata

SEQ ID NO: 170921 - DNA, 79 bp, Homo sapiens
cccacaccacactgcaggcaaaatcggagggctcgagagctctgtggggctattcatgacataccaatttcacattttc

SEQ ID NO: 170922 - DNA, 81 bp, Homo sapiens
caggcaaaatcggagggctcgagagctctgtggggctattcatgacataccaatttcacattttctgcttgtacgcttgca

SEQ ID NO: 170923 - DNA, 80 bp, Homo sapiens
atcggagggctcgagagctctgtggggctattcatgacataccaatttcacattttctgcttgtacgcttgcaacaataa

SEQ ID NO: 170924 - DNA, 83 bp, Homo sapiens
tcgagagctctgtggggctattcatgacataccaatttcacattttctgcttgtacgcttgcaacaataaatgctaatgagga

SEQ ID NO: 170925 - DNA, 83 bp, Homo sapiens
tgtggggctattcatgacataccaatttcacattttctgcttgtacgcttgcaacaataaatgctaatgaggactatgaatga

SEQ ID NO: 170926 - DNA, 81 bp, Homo sapiens
ctattcatgacataccaatttcacattttctgcttgtacgcttgcaacaataaatgctaatgaggactatgaatgacaatt

SEQ ID NO: 170927 - DNA, 78 bp, Homo sapiens
cataccaatttcacattttctgcttgtacgcttgcaacaataaatgctaatgaggactatgaatgacaattttaaaga

SEQ ID NO: 170928 - DNA, 76 bp, Homo sapiens
cacattttctgcttgtacgcttgcaacaataaatgctaatgaggactatgaatgacaattttaaagacaataaaaa

SEQ ID NO: 170929 - DNA, 75 bp, Homo sapiens
gcttgtacgcttgcaacaataaatgctaatgaggactatgaatgacaattttaaagacaataaaaaggtctccaa

SEQ ID NO: 170930 - DNA, 75 bp, Homo sapiens
gcaacaataaatgctaatgaggactatgaatgacaattttaaagacaataaaaaggtctccaaatcccttgcata

SEQ ID NO: 170931 - DNA, 75 bp, Homo sapiens
aatgctaatgaggactatgaatgacaattttaaagacaataaaaaggtctccaaatcccttgcatatggagacac

SEQ ID NO: 170932 - DNA, 70 bp, Homo sapiens
gacaattttaaagacaataaaaaggtctccaaatcccttgcatatggagacactgttttcaaaacttcac

SEQ ID NO: 170933 - DNA, 70 bp, Homo sapiens
aaagacaataaaaaggtctccaaatcccttgcatatggagacactgttttcaaaacttcaccttctgtta

SEQ ID NO: 170934 - DNA, 77 bp, Homo sapiens
aaatcccttgcatatggagacactgttttcaaaacttcaccttctgttacagagctgtgagagactgcaggagaaaa

SEQ ID NO: 170935 - DNA, 77 bp, Homo sapiens
cttgcatatggagacactgttttcaaaacttcaccttctgttacagagctgtgagagactgcaggagaaaaaaagaa

SEQ ID NO: 170936 - DNA, 72 bp, Homo sapiens
acactgttttcaaaacttcaccttctgttacagagctgtgagagactgcaggagaaaaaaagaataacctaa

SEQ ID NO: 170937 - DNA, 71 bp, Homo sapiens
tttcaaaacttcaccttctgttacagagctgtgagagactgcaggagaaaaaaagaataacctaaggaaaa

SEQ ID NO: 170938 - DNA, 74 bp, Homo sapiens
accttctgttacagagctgtgagagactgcaggagaaaaaaagaataacctaaggaaaacaataagatgatcaa

SEQ ID NO: 170939 - DNA, 74 bp, Homo sapiens
gtgagagactgcaggagaaaaaaagaataacctaaggaaaacaataagatgatcaaagcacaactgaatcctta

SEQ ID NO: 170940 - DNA, 71 bp, Homo sapiens
gagaaaaaaagaataacctaaggaaaacaataagatgatcaaagcacaactgaatccttaagattttcaga

SEQ ID NO: 170941 - DNA, 75 bp, Homo sapiens
gaataacctaaggaaaacaataagatgatcaaagcacaactgaatccttaagattttcagagaaagcaatctgtg

SEQ ID NO: 170942 - DNA, 81 bp, Homo sapiens
ataagatgatcaaagcacaactgaatccttaagattttcagagaaagcaatctgtgtgagcccagcaaacaacagatctta

SEQ ID NO: 170943 - DNA, 78 bp, Homo sapiens
atcaaagcacaactgaatccttaagattttcagagaaagcaatctgtgtgagcccagcaaacaacagatcttaccacc

SEQ ID NO: 170944 - DNA, 79 bp, Homo sapiens
taagattttcagagaaagcaatctgtgtgagcccagcaaacaacagatcttaccaccgctatgaacaaccctatgaata

SEQ ID NO: 170945 - DNA, 79 bp, Homo sapiens
gaaagcaatctgtgtgagcccagcaaacaacagatcttaccaccgctatgaacaaccctatgaatacatgagatacctt

SEQ ID NO: 170946 - DNA, 78 bp, Homo sapiens
aatctgtgtgagcccagcaaacaacagatcttaccaccgctatgaacaaccctatgaatacatgagatacctttaatc

SEQ ID NO: 170947 - DNA, 75 bp, Homo sapiens
ccagcaaacaacagatcttaccaccgctatgaacaaccctatgaatacatgagatacctttaatctcactacctt

SEQ ID NO: 170948 - DNA, 74 bp, Homo sapiens
aacaacagatcttaccaccgctatgaacaaccctatgaatacatgagatacctttaatctcactacctttgcct

SEQ ID NO: 170949 - DNA, 78 bp, Homo sapiens
cttaccaccgctatgaacaaccctatgaatacatgagatacctttaatctcactacctttgccttctgtagacatgca

SEQ ID NO: 170950 - DNA, 78 bp, Homo sapiens
tatgaacaaccctatgaatacatgagatacctttaatctcactacctttgccttctgtagacatgcagcttaataaaa

SEQ ID NO: 170951 - DNA, 80 bp, Homo sapiens
atgaatacatgagatacctttaatctcactacctttgccttctgtagacatgcagcttaataaaagcaattcttgatgaa

SEQ ID NO: 170952 - DNA, 77 bp, Homo sapiens
agatacctttaatctcactacctttgccttctgtagacatgcagcttaataaaagcaattcttgatgaacttgatta

SEQ ID NO: 170953 - DNA, 78 bp, Homo sapiens
cctttaatctcactacctttgccttctgtagacatgcagcttaataaaagcaattcttgatgaacttgattatattca

SEQ ID NO: 170954 - DNA, 78 bp, Homo sapiens
tacctttgccttctgtagacatgcagcttaataaaagcaattcttgatgaacttgattatattcattattttggagcc

SEQ ID NO: 170955 - DNA, 77 bp, Homo sapiens
ccttctgtagacatgcagcttaataaaagcaattcttgatgaacttgattatattcattattttggagcctgggaat

SEQ ID NO: 170956 - DNA, 77 bp, Homo sapiens
catgcagcttaataaaagcaattcttgatgaacttgattatattcattattttggagcctgggaattctaaggatag

SEQ ID NO: 170957 - DNA, 73 bp, Homo sapiens
caattcttgatgaacttgattatattcattattttggagcctgggaattctaaggatagtatttgtccaaaaa

SEQ ID NO: 170958 - DNA, 72 bp, Homo sapiens
tgaacttgattatattcattattttggagcctgggaattctaaggatagtatttgtccaaaaataattatag

SEQ ID NO: 170959 - DNA, 74 bp, Homo sapiens
attcattattttggagcctgggaattctaaggatagtatttgtccaaaaataattatagtaataatcatcatca

SEQ ID NO: 170960 - DNA, 77 bp, Homo sapiens
ggagcctgggaattctaaggatagtatttgtccaaaaataattatagtaataatcatcatcatcatactttggcata

SEQ ID NO: 170961 - DNA, 76 bp, Homo sapiens
ctgggaattctaaggatagtatttgtccaaaaataattatagtaataatcatcatcatcatactttggcataatat

SEQ ID NO: 170962 - DNA, 79 bp, Homo sapiens
gatagtatttgtccaaaaataattatagtaataatcatcatcatcatactttggcataatatttaacattccagatatc

SEQ ID NO: 170963 - DNA, 77 bp, Homo sapiens
ttgtccaaaaataattatagtaataatcatcatcatcatactttggcataatatttaacattccagatatctttaaa

SEQ ID NO: 170964 - DNA, 79 bp, Homo sapiens
attatagtaataatcatcatcatcatactttggcataatatttaacattccagatatctttaaataaattcaaatgcaa

SEQ ID NO: 170965 - DNA, 79 bp, Homo sapiens
taatcatcatcatcatactttggcataatatttaacattccagatatctttaaataaattcaaatgcaaactggttctc

SEQ ID NO: 170966 - DNA, 78 bp, Homo sapiens
catcatcatactttggcataatatttaacattccagatatctttaaataaattcaaatgcaaactggttctcttctga

SEQ ID NO: 170967 - DNA, 77 bp, Homo sapiens
tggcataatatttaacattccagatatctttaaataaattcaaatgcaaactggttctcttctgataatgtctattc

SEQ ID NO: 170968 - DNA, 74 bp, Homo sapiens
tatttaacattccagatatctttaaataaattcaaatgcaaactggttctcttctgataatgtctattcttaaa

SEQ ID NO: 170969 - DNA, 76 bp, Homo sapiens
cattccagatatctttaaataaattcaaatgcaaactggttctcttctgataatgtctattcttaaaaataatgca

SEQ ID NO: 170970 - DNA, 75 bp, Homo sapiens
taaataaattcaaatgcaaactggttctcttctgataatgtctattcttaaaaataatgcaattgtgggtggtga

SEQ ID NO: 170971 - DNA, 70 bp, Homo sapiens
taatgtctattcttaaaaataatgcaattgtgggtggtgaaattatatacaatatttattccctattttt

SEQ ID NO: 170972 - DNA, 67 bp, Homo sapiens
tcttaaaaataatgcaattgtgggtggtgaaattatatacaatatttattccctatttttttatttt

SEQ ID NO: 170973 - DNA, 70 bp, Homo sapiens
aaaaaaaaagttactttcaatgcattgaaagaactgaacaaatgacacataaatgttttgacctagatag

SEQ ID NO: 170974 - DNA, 73 bp, Homo sapiens
agttactttcaatgcattgaaagaactgaacaaatgacacataaatgttttgacctagataggaattaaacta

SEQ ID NO: 170975 - DNA, 77 bp, Homo sapiens
tcaatgcattgaaagaactgaacaaatgacacataaatgttttgacctagataggaattaaactattttacacagca

SEQ ID NO: 170976 - DNA, 72 bp, Homo sapiens
gaaagaactgaacaaatgacacataaatgttttgacctagataggaattaaactattttacacagcaacaaa

SEQ ID NO: 170977 - DNA, 70 bp, Homo sapiens
gaacaaatgacacataaatgttttgacctagataggaattaaactattttacacagcaacaaaaataaaa

SEQ ID NO: 170978 - DNA, 67 bp, Homo sapiens
aaaaataaaacaaaagatttccctatagttcagagaaattgtctaaagagtgttcttttcattaaca

SEQ ID NO: 170979 - DNA, 69 bp, Homo sapiens
caaaagatttccctatagttcagagaaattgtctaaagagtgttcttttcattaacaaggattaaaaca

SEQ ID NO: 170980 - DNA, 70 bp, Homo sapiens
gatttccctatagttcagagaaattgtctaaagagtgttcttttcattaacaaggattaaaacactttca

SEQ ID NO: 170981 - DNA, 69 bp, Homo sapiens
cagagaaattgtctaaagagtgttcttttcattaacaaggattaaaacactttcaacaaaatccaccag

SEQ ID NO: 170982 - DNA, 69 bp, Homo sapiens
gtctaaagagtgttcttttcattaacaaggattaaaacactttcaacaaaatccaccaggtggagcaaa

SEQ ID NO: 170983 - DNA, 70 bp, Homo sapiens
aagagtgttcttttcattaacaaggattaaaacactttcaacaaaatccaccaggtggagcaaatacaca

SEQ ID NO: 170984 - DNA, 71 bp, Homo sapiens
agtgttcttttcattaacaaggattaaaacactttcaacaaaatccaccaggtggagcaaatacacagcaa

SEQ ID NO: 170985 - DNA, 71 bp, Homo sapiens
gttcttttcattaacaaggattaaaacactttcaacaaaatccaccaggtggagcaaatacacagcaataa

SEQ ID NO: 170986 - DNA, 70 bp, Homo sapiens
ttttcattaacaaggattaaaacactttcaacaaaatccaccaggtggagcaaatacacagcaataaaaa

SEQ ID NO: 170987 - DNA, 68 bp, Homo sapiens
attaacaaggattaaaacactttcaacaaaatccaccaggtggagcaaatacacagcaataaaaaaaa

SEQ ID NO: 170988 - DNA, 69 bp, Homo sapiens
aaaaaatcccagaatttttttcatcatattttctttcacaggactttcatctctaataaattctccact

SEQ ID NO: 170989 - DNA, 75 bp, Homo sapiens
ccagaatttttttcatcatattttctttcacaggactttcatctctaataaattctccacttatatctctccaca

SEQ ID NO: 170990 - DNA, 79 bp, Homo sapiens
tcatcatattttctttcacaggactttcatctctaataaattctccacttatatctctccacattgcaaattatcaaaa

SEQ ID NO: 170991 - DNA, 82 bp, Homo sapiens
ggactttcatctctaataaattctccacttatatctctccacattgcaaattatcaaaatctatgcacacatactaatctgc

SEQ ID NO: 170992 - DNA, 80 bp, Homo sapiens
ctctaataaattctccacttatatctctccacattgcaaattatcaaaatctatgcacacatactaatctgccacgttta

SEQ ID NO: 170993 - DNA, 77 bp, Homo sapiens
ctccacattgcaaattatcaaaatctatgcacacatactaatctgccacgtttataaacaattcaaagttactcaaa

SEQ ID NO: 170994 - DNA, 75 bp, Homo sapiens
gcaaattatcaaaatctatgcacacatactaatctgccacgtttataaacaattcaaagttactcaaaaatgaat

SEQ ID NO: 170995 - DNA, 74 bp, Homo sapiens
ctatgcacacatactaatctgccacgtttataaacaattcaaagttactcaaaaatgaattttagttacaatga

SEQ ID NO: 170996 - DNA, 71 bp, Homo sapiens
cacacatactaatctgccacgtttataaacaattcaaagttactcaaaaatgaattttagttacaatgaat

SEQ ID NO: 170997 - DNA, 70 bp, Homo sapiens
aatctgccacgtttataaacaattcaaagttactcaaaaatgaattttagttacaatgaattctattaca

SEQ ID NO: 170998 - DNA, 70 bp, Homo sapiens
taaacaattcaaagttactcaaaaatgaattttagttacaatgaattctattacaaatgttcactccaaa

SEQ ID NO: 170999 - DNA, 71 bp, Homo sapiens
attcaaagttactcaaaaatgaattttagttacaatgaattctattacaaatgttcactccaaaactgctc

SEQ ID NO: 171000 - DNA, 72 bp, Homo sapiens
ctcaaaaatgaattttagttacaatgaattctattacaaatgttcactccaaaactgctctatttgttcaaa

SEQ ID NO: 171001 - DNA, 74 bp, Homo sapiens
tttagttacaatgaattctattacaaatgttcactccaaaactgctctatttgttcaaataatacccagcatag

SEQ ID NO: 171002 - DNA, 76 bp, Homo sapiens
caatgaattctattacaaatgttcactccaaaactgctctatttgttcaaataatacccagcatagtatatttgct

SEQ ID NO: 171003 - DNA, 76 bp, Homo sapiens
ctattacaaatgttcactccaaaactgctctatttgttcaaataatacccagcatagtatatttgcttttatatca

SEQ ID NO: 171004 - DNA, 72 bp, Homo sapiens
ccaaaactgctctatttgttcaaataatacccagcatagtatatttgcttttatatcaatgtaaatttttaa

SEQ ID NO: 171005 - DNA, 71 bp, Homo sapiens
tctatttgttcaaataatacccagcatagtatatttgcttttatatcaatgtaaatttttaaattaatgtt

SEQ ID NO: 171006 - DNA, 71 bp, Homo sapiens
taatacccagcatagtatatttgcttttatatcaatgtaaatttttaaattaatgttttacagtgacccta

SEQ ID NO: 171007 - DNA, 70 bp, Homo sapiens
ccagcatagtatatttgcttttatatcaatgtaaatttttaaattaatgttttacagtgaccctacaggg

SEQ ID NO: 171008 - DNA, 68 bp, Homo sapiens
tgcttttatatcaatgtaaatttttaaattaatgttttacagtgaccctacagggttttaccaggcaa

SEQ ID NO: 171009 - DNA, 67 bp, Homo sapiens
atatcaatgtaaatttttaaattaatgttttacagtgaccctacagggttttaccaggcaaaagaga

SEQ ID NO: 171010 - DNA, 67 bp, Homo sapiens
tttttaaattaatgttttacagtgaccctacagggttttaccaggcaaaagagaatttaatgctgta

SEQ ID NO: 171011 - DNA, 71 bp, Homo sapiens
aatgttttacagtgaccctacagggttttaccaggcaaaagagaatttaatgctgtatatgttgaaataca

SEQ ID NO: 171012 - DNA, 73 bp, Homo sapiens
tttacagtgaccctacagggttttaccaggcaaaagagaatttaatgctgtatatgttgaaatacactcaaga

SEQ ID NO: 171013 - DNA, 72 bp, Homo sapiens
cagggttttaccaggcaaaagagaatttaatgctgtatatgttgaaatacactcaagaatggttaaagccta

SEQ ID NO: 171014 - DNA, 77 bp, Homo sapiens
ccaggcaaaagagaatttaatgctgtatatgttgaaatacactcaagaatggttaaagcctataaatctcaatgcaa

SEQ ID NO: 171015 - DNA, 76 bp, Homo sapiens
gagaatttaatgctgtatatgttgaaatacactcaagaatggttaaagcctataaatctcaatgcaattcccttac

SEQ ID NO: 171016 - DNA, 78 bp, Homo sapiens
atgctgtatatgttgaaatacactcaagaatggttaaagcctataaatctcaatgcaattcccttactctatatggaa

SEQ ID NO: 171017 - DNA, 72 bp, Homo sapiens
gttgaaatacactcaagaatggttaaagcctataaatctcaatgcaattcccttactctatatggaaatttt

SEQ ID NO: 171018 - DNA, 72 bp, Homo sapiens
cactcaagaatggttaaagcctataaatctcaatgcaattcccttactctatatggaaatttttactcttac

SEQ ID NO: 171019 - DNA, 71 bp, Homo sapiens
agaatggttaaagcctataaatctcaatgcaattcccttactctatatggaaatttttactcttactttca

SEQ ID NO: 171020 - DNA, 70 bp, Homo sapiens
aagcctataaatctcaatgcaattcccttactctatatggaaatttttactcttactttcatttattaaa

SEQ ID NO: 171021 - DNA, 70 bp, Homo sapiens
tcccttactctatatggaaatttttactcttactttcatttattaaaattctccttaactgcatatacca

SEQ ID NO: 171022 - DNA, 71 bp, Homo sapiens
ctctatatggaaatttttactcttactttcatttattaaaattctccttaactgcatataccataatctta

SEQ ID NO: 171023 - DNA, 70 bp, Homo sapiens
tttactcttactttcatttattaaaattctccttaactgcatataccataatcttattaaaattatggat

SEQ ID NO: 171024 - DNA, 70 bp, Homo sapiens
ctttcatttattaaaattctccttaactgcatataccataatcttattaaaattatggattattgtacct

SEQ ID NO: 171025 - DNA, 68 bp, Homo sapiens
tttattaaaattctccttaactgcatataccataatcttattaaaattatggattattgtaccttttt

SEQ ID NO: 171026 - DNA, 70 bp, Homo sapiens
ctgcatataccataatcttattaaaattatggattattgtaccttttttacccattatacctaaatgtcc

SEQ ID NO: 171027 - DNA, 65 bp, Homo sapiens
ccataatcttattaaaattatggattattgtaccttttttacccattatacctaaatgtcctttt

SEQ ID NO: 171028 - DNA, 67 bp, Homo sapiens
aattatggattattgtaccttttttacccattatacctaaatgtccttttttcattcctattgataa

SEQ ID NO: 171029 - DNA, 69 bp, Homo sapiens
tttttacccattatacctaaatgtccttttttcattcctattgataaattgacacaagtccacaattag

SEQ ID NO: 171030 - DNA, 71 bp, Homo sapiens
acccattatacctaaatgtccttttttcattcctattgataaattgacacaagtccacaattagttatatg

SEQ ID NO: 171031 - DNA, 70 bp, Homo sapiens
atgtccttttttcattcctattgataaattgacacaagtccacaattagttatatgttttcccttcactt

SEQ ID NO: 171032 - DNA, 74 bp, Homo sapiens
ttcattcctattgataaattgacacaagtccacaattagttatatgttttcccttcactttccagagtaattca

SEQ ID NO: 171033 - DNA, 74 bp, Homo sapiens
tattgataaattgacacaagtccacaattagttatatgttttcccttcactttccagagtaattcactgcctcc

SEQ ID NO: 171034 - DNA, 72 bp, Homo sapiens
aaattgacacaagtccacaattagttatatgttttcccttcactttccagagtaattcactgcctccgattc

SEQ ID NO: 171035 - DNA, 74 bp, Homo sapiens
aagtccacaattagttatatgttttcccttcactttccagagtaattcactgcctccgattctcttctctcaca

SEQ ID NO: 171036 - DNA, 73 bp, Homo sapiens
ttagttatatgttttcccttcactttccagagtaattcactgcctccgattctcttctctcacagattgtttt

SEQ ID NO: 171037 - DNA, 75 bp, Homo sapiens
gttttcccttcactttccagagtaattcactgcctccgattctcttctctcacagattgtttttcttgcatttca

SEQ ID NO: 171038 - DNA, 76 bp, Homo sapiens
actttccagagtaattcactgcctccgattctcttctctcacagattgtttttcttgcatttcagtccacacttac

SEQ ID NO: 171039 - DNA, 77 bp, Homo sapiens
ttctctcacagattgtttttcttgcatttcagtccacacttactgagcaccctcagtgcaagtctccaaacccaaat

SEQ ID NO: 171040 - DNA, 74 bp, Homo sapiens
attgtttttcttgcatttcagtccacacttactgagcaccctcagtgcaagtctccaaacccaaattctttcat

SEQ ID NO: 171041 - DNA, 77 bp, Homo sapiens
ttttcttgcatttcagtccacacttactgagcaccctcagtgcaagtctccaaacccaaattctttcatttctgaca

SEQ ID NO: 171042 - DNA, 77 bp, Homo sapiens
ttcagtccacacttactgagcaccctcagtgcaagtctccaaacccaaattctttcatttctgacaccacctgcaaa

SEQ ID NO: 171043 - DNA, 71 bp, Homo sapiens
aagtctccaaacccaaattctttcatttctgacaccacctgcaaaccacaattctccccattcagttttca

SEQ ID NO: 171044 - DNA, 72 bp, Homo sapiens
ccaaattctttcatttctgacaccacctgcaaaccacaattctccccattcagttttcagtcttccacattt

SEQ ID NO: 171045 - DNA, 76 bp, Homo sapiens
ttcatttctgacaccacctgcaaaccacaattctccccattcagttttcagtcttccacatttttctcacattata

SEQ ID NO: 171046 - DNA, 77 bp, Homo sapiens
tctgacaccacctgcaaaccacaattctccccattcagttttcagtcttccacatttttctcacattatacactctc

SEQ ID NO: 171047 - DNA, 75 bp, Homo sapiens
aaaccacaattctccccattcagttttcagtcttccacatttttctcacattatacactctctgctgccaaagct

SEQ ID NO: 171048 - DNA, 76 bp, Homo sapiens
aattctccccattcagttttcagtcttccacatttttctcacattatacactctctgctgccaaagcttaaagcta

SEQ ID NO: 171049 - DNA, 78 bp, Homo sapiens
ttcagttttcagtcttccacatttttctcacattatacactctctgctgccaaagcttaaagctacacatggtcctaa

SEQ ID NO: 171050 - DNA, 78 bp, Homo sapiens
tcttccacatttttctcacattatacactctctgctgccaaagcttaaagctacacatggtcctaatgttactattgt

SEQ ID NO: 171051 - DNA, 77 bp, Homo sapiens
acattatacactctctgctgccaaagcttaaagctacacatggtcctaatgttactattgttacctgcatttaagaa

SEQ ID NO: 171052 - DNA, 76 bp, Homo sapiens
actctctgctgccaaagcttaaagctacacatggtcctaatgttactattgttacctgcatttaagaagactccac

SEQ ID NO: 171053 - DNA, 73 bp, Homo sapiens
aaagcttaaagctacacatggtcctaatgttactattgttacctgcatttaagaagactccacgtggacagaa

SEQ ID NO: 171054 - DNA, 74 bp, Homo sapiens
taaagctacacatggtcctaatgttactattgttacctgcatttaagaagactccacgtggacagaactacaaa

SEQ ID NO: 171055 - DNA, 70 bp, Homo sapiens
atggtcctaatgttactattgttacctgcatttaagaagactccacgtggacagaactacaaaaaagttg

SEQ ID NO: 171056 - DNA, 71 bp, Homo sapiens
ttactattgttacctgcatttaagaagactccacgtggacagaactacaaaaaagttggagcttgaaagaa

SEQ ID NO: 171057 - DNA, 71 bp, Homo sapiens
ttacctgcatttaagaagactccacgtggacagaactacaaaaaagttggagcttgaaagaaacctgccaa

SEQ ID NO: 171058 - DNA, 68 bp, Homo sapiens
atttaagaagactccacgtggacagaactacaaaaaagttggagcttgaaagaaacctgccaagagtt

SEQ ID NO: 171059 - DNA, 68 bp, Homo sapiens
aactacaaaaaagttggagcttgaaagaaacctgccaagagtttgttggtggaggagaacactagtta

SEQ ID NO: 171060 - DNA, 68 bp, Homo sapiens
aaaaagttggagcttgaaagaaacctgccaagagtttgttggtggaggagaacactagttaggaatat

SEQ ID NO: 171061 - DNA, 71 bp, Homo sapiens
ttgaaagaaacctgccaagagtttgttggtggaggagaacactagttaggaatattggctgtggcttaaaa

SEQ ID NO: 171062 - DNA, 71 bp, Homo sapiens
caagagtttgttggtggaggagaacactagttaggaatattggctgtggcttaaaatatatttatatgttt

SEQ ID NO: 171063 - DNA, 74 bp, Homo sapiens
atatatttatatgttttcttttttcatatttatactgatgttgaaaagagaaatactctaaaagaaatgcagca

SEQ ID NO: 171064 - DNA, 76 bp, Homo sapiens
atgttttcttttttcatatttatactgatgttgaaaagagaaatactctaaaagaaatgcagcaggctgatacata

SEQ ID NO: 171065 - DNA, 78 bp, Homo sapiens
ttttcatatttatactgatgttgaaaagagaaatactctaaaagaaatgcagcaggctgatacataaataaacacgca

SEQ ID NO: 171066 - DNA, 81 bp, Homo sapiens
tatttatactgatgttgaaaagagaaatactctaaaagaaatgcagcaggctgatacataaataaacacgcacatgcctga

SEQ ID NO: 171067 - DNA, 81 bp, Homo sapiens
ttgaaaagagaaatactctaaaagaaatgcagcaggctgatacataaataaacacgcacatgcctgaggatacacataaca

SEQ ID NO: 171068 - DNA, 80 bp, Homo sapiens
aagagaaatactctaaaagaaatgcagcaggctgatacataaataaacacgcacatgcctgaggatacacataacactta

SEQ ID NO: 171069 - DNA, 83 bp, Homo sapiens
taaaagaaatgcagcaggctgatacataaataaacacgcacatgcctgaggatacacataacacttatggcagagctacttac

SEQ ID NO: 171070 - DNA, 86 bp, Homo sapiens
agcaggctgatacataaataaacacgcacatgcctgaggatacacataacacttatggcagagctacttacgctgtgcataataga

SEQ ID NO: 171071 - DNA, 88 bp, Homo sapiens
tacataaataaacacgcacatgcctgaggatacacataacacttatggcagagctacttacgctgtgcataatagatcacgatgatgc

SEQ ID NO: 171072 - DNA, 91 bp, Homo sapiens
acatgcctgaggatacacataacacttatggcagagctacttacgctgtgcataatagatcacgatgatgccagctccatcacaaggcgca

SEQ ID NO: 171073 - DNA, 88 bp, Homo sapiens
atacacataacacttatggcagagctacttacgctgtgcataatagatcacgatgatgccagctccatcacaaggcgcaccaggctaa

SEQ ID NO: 171074 - DNA, 87 bp, Homo sapiens
acttatggcagagctacttacgctgtgcataatagatcacgatgatgccagctccatcacaaggcgcaccaggctaatgcaattatt

SEQ ID NO: 171075 - DNA, 85 bp, Homo sapiens
agagctacttacgctgtgcataatagatcacgatgatgccagctccatcacaaggcgcaccaggctaatgcaattatttaaatta

SEQ ID NO: 171076 - DNA, 84 bp, Homo sapiens
acttacgctgtgcataatagatcacgatgatgccagctccatcacaaggcgcaccaggctaatgcaattatttaaattattata

SEQ ID NO: 171077 - DNA, 81 bp, Homo sapiens
ataatagatcacgatgatgccagctccatcacaaggcgcaccaggctaatgcaattatttaaattattatatatgttttac

SEQ ID NO: 171078 - DNA, 80 bp, Homo sapiens
gatgatgccagctccatcacaaggcgcaccaggctaatgcaattatttaaattattatatatgttttactggagtggtaa

SEQ ID NO: 171079 - DNA, 75 bp, Homo sapiens
agctccatcacaaggcgcaccaggctaatgcaattatttaaattattatatatgttttactggagtggtaaacaa

SEQ ID NO: 171080 - DNA, 74 bp, Homo sapiens
atcacaaggcgcaccaggctaatgcaattatttaaattattatatatgttttactggagtggtaaacaaatata

SEQ ID NO: 171081 - DNA, 73 bp, Homo sapiens
tttaaattattatatatgttttactggagtggtaaacaaatatataaaatattgacattacttccatgtgata

SEQ ID NO: 171082 - DNA, 75 bp, Homo sapiens
tatatatgttttactggagtggtaaacaaatatataaaatattgacattacttccatgtgatatgcaaaacaagt

SEQ ID NO: 171083 - DNA, 72 bp, Homo sapiens
atgttttactggagtggtaaacaaatatataaaatattgacattacttccatgtgatatgcaaaacaagttt

SEQ ID NO: 171084 - DNA, 71 bp, Homo sapiens
ggagtggtaaacaaatatataaaatattgacattacttccatgtgatatgcaaaacaagtttttaaaataa

SEQ ID NO: 171085 - DNA, 71 bp, Homo sapiens
tatataaaatattgacattacttccatgtgatatgcaaaacaagtttttaaaataattcccaccaaaatct

SEQ ID NO: 171086 - DNA, 71 bp, Homo sapiens
attgacattacttccatgtgatatgcaaaacaagtttttaaaataattcccaccaaaatcttccctgcaaa

SEQ ID NO: 171087 - DNA, 69 bp, Homo sapiens
caagtttttaaaataattcccaccaaaatcttccctgcaaagcccaatctctattctttgcaaaggaca

SEQ ID NO: 171088 - DNA, 71 bp, Homo sapiens
tttaaaataattcccaccaaaatcttccctgcaaagcccaatctctattctttgcaaaggacagaatcaat

SEQ ID NO: 171089 - DNA, 76 bp, Homo sapiens
ccaccaaaatcttccctgcaaagcccaatctctattctttgcaaaggacagaatcaattccttggagctgtgctta

SEQ ID NO: 171090 - DNA, 78 bp, Homo sapiens
aaatcttccctgcaaagcccaatctctattctttgcaaaggacagaatcaattccttggagctgtgcttatgcactag

SEQ ID NO: 171091 - DNA, 78 bp, Homo sapiens
aaagcccaatctctattctttgcaaaggacagaatcaattccttggagctgtgcttatgcactaggcaaaggtatata

SEQ ID NO: 171092 - DNA, 80 bp, Homo sapiens
caaaggacagaatcaattccttggagctgtgcttatgcactaggcaaaggtatatactgctctctttacatgcccataac

SEQ ID NO: 171093 - DNA, 79 bp, Homo sapiens
aatcaattccttggagctgtgcttatgcactaggcaaaggtatatactgctctctttacatgcccataactcctattaa

SEQ ID NO: 171094 - DNA, 81 bp, Homo sapiens
tgtgcttatgcactaggcaaaggtatatactgctctctttacatgcccataactcctattaacattaatgggaggcacata

SEQ ID NO: 171095 - DNA, 80 bp, Homo sapiens
taggcaaaggtatatactgctctctttacatgcccataactcctattaacattaatgggaggcacatatgtgcatctaaa

SEQ ID NO: 171096 - DNA, 77 bp, Homo sapiens
aaaggtatatactgctctctttacatgcccataactcctattaacattaatgggaggcacatatgtgcatctaaagg

SEQ ID NO: 171097 - DNA, 78 bp, Homo sapiens
gtatatactgctctctttacatgcccataactcctattaacattaatgggaggcacatatgtgcatctaaagggtaaa

SEQ ID NO: 171098 - DNA, 80 bp, Homo sapiens
tatatactgctctctttacatgcccataactcctattaacattaatgggaggcacatatgtgcatctaaagggtaaatgc

SEQ ID NO: 171099 - DNA, 77 bp, Homo sapiens
tctctttacatgcccataactcctattaacattaatgggaggcacatatgtgcatctaaagggtaaatgcccttcag

SEQ ID NO: 171100 - DNA, 81 bp, Homo sapiens
ttacatgcccataactcctattaacattaatgggaggcacatatgtgcatctaaagggtaaatgcccttcagtctgcatga

SEQ ID NO: 171101 - DNA, 79 bp, Homo sapiens
ataactcctattaacattaatgggaggcacatatgtgcatctaaagggtaaatgcccttcagtctgcatgacagaatcc

SEQ ID NO: 171102 - DNA, 81 bp, Homo sapiens
tcctattaacattaatgggaggcacatatgtgcatctaaagggtaaatgcccttcagtctgcatgacagaatcctaatgaa

SEQ ID NO: 171103 - DNA, 81 bp, Homo sapiens
tattaacattaatgggaggcacatatgtgcatctaaagggtaaatgcccttcagtctgcatgacagaatcctaatgaagta

SEQ ID NO: 171104 - DNA, 80 bp, Homo sapiens
taacattaatgggaggcacatatgtgcatctaaagggtaaatgcccttcagtctgcatgacagaatcctaatgaagtagt

SEQ ID NO: 171105 - DNA, 76 bp, Homo sapiens
acatatgtgcatctaaagggtaaatgcccttcagtctgcatgacagaatcctaatgaagtagttggaaaaaccaaa

SEQ ID NO: 171106 - DNA, 76 bp, Homo sapiens
atctaaagggtaaatgcccttcagtctgcatgacagaatcctaatgaagtagttggaaaaaccaaatcactgcaca

SEQ ID NO: 171107 - DNA, 79 bp, Homo sapiens
taaatgcccttcagtctgcatgacagaatcctaatgaagtagttggaaaaaccaaatcactgcacatgtagtcacactt

SEQ ID NO: 171108 - DNA, 77 bp, Homo sapiens
ccttcagtctgcatgacagaatcctaatgaagtagttggaaaaaccaaatcactgcacatgtagtcacactttcccc

SEQ ID NO: 171109 - DNA, 76 bp, Homo sapiens
atgacagaatcctaatgaagtagttggaaaaaccaaatcactgcacatgtagtcacactttcccctgcctttgcag

SEQ ID NO: 171110 - DNA, 74 bp, Homo sapiens
atcctaatgaagtagttggaaaaaccaaatcactgcacatgtagtcacactttcccctgcctttgcaggaaaca

SEQ ID NO: 171111 - DNA, 74 bp, Homo sapiens
acctttgtttcccaacccacagcaaagacatttcatcagcccactgtgtggacagatttcctcttggtaagata

SEQ ID NO: 171112 - DNA, 76 bp, Homo sapiens
tcccaacccacagcaaagacatttcatcagcccactgtgtggacagatttcctcttggtaagataaaatcctctta

SEQ ID NO: 171113 - DNA, 78 bp, Homo sapiens
agcaaagacatttcatcagcccactgtgtggacagatttcctcttggtaagataaaatcctcttatattcatgggatc

SEQ ID NO: 171114 - DNA, 76 bp, Homo sapiens
atttcatcagcccactgtgtggacagatttcctcttggtaagataaaatcctcttatattcatgggatctcccaaa

SEQ ID NO: 171115 - DNA, 77 bp, Homo sapiens
ccactgtgtggacagatttcctcttggtaagataaaatcctcttatattcatgggatctcccaaatggctccatctc

SEQ ID NO: 171116 - DNA, 77 bp, Homo sapiens
gacagatttcctcttggtaagataaaatcctcttatattcatgggatctcccaaatggctccatctccaagcacttc

SEQ ID NO: 171117 - DNA, 77 bp, Homo sapiens
ctcttggtaagataaaatcctcttatattcatgggatctcccaaatggctccatctccaagcacttctcagaatatt

SEQ ID NO: 171118 - DNA, 79 bp, Homo sapiens
taagataaaatcctcttatattcatgggatctcccaaatggctccatctccaagcacttctcagaatatttatcccatg

SEQ ID NO: 171119 - DNA, 79 bp, Homo sapiens
tattcatgggatctcccaaatggctccatctccaagcacttctcagaatatttatcccatgttaccctcaaattggcca

SEQ ID NO: 171120 - DNA, 77 bp, Homo sapiens
atctcccaaatggctccatctccaagcacttctcagaatatttatcccatgttaccctcaaattggccacacattac

SEQ ID NO: 171121 - DNA, 78 bp, Homo sapiens
tccatctccaagcacttctcagaatatttatcccatgttaccctcaaattggccacacattactgtgcaaatattatt

SEQ ID NO: 171122 - DNA, 75 bp, Homo sapiens
agaatatttatcccatgttaccctcaaattggccacacattactgtgcaaatattatttctcaccacctccagct

SEQ ID NO: 171123 - DNA, 76 bp, Homo sapiens
aattggccacacattactgtgcaaatattatttctcaccacctccagcttcgtcaaagagtatggcccttcccaca

SEQ ID NO: 171124 - DNA, 75 bp, Homo sapiens
aatattatttctcaccacctccagcttcgtcaaagagtatggcccttcccacagcaaatgtcaaagaccatattc

SEQ ID NO: 171125 - DNA, 75 bp, Homo sapiens
caccacctccagcttcgtcaaagagtatggcccttcccacagcaaatgtcaaagaccatattccaattccaagaa

SEQ ID NO: 171126 - DNA, 72 bp, Homo sapiens
agcttcgtcaaagagtatggcccttcccacagcaaatgtcaaagaccatattccaattccaagaaaaggaaa

SEQ ID NO: 171127 - DNA, 69 bp, Homo sapiens
aaagagtatggcccttcccacagcaaatgtcaaagaccatattccaattccaagaaaaggaaaaaacat

SEQ ID NO: 171128 - DNA, 70 bp, Homo sapiens
cccttcccacagcaaatgtcaaagaccatattccaattccaagaaaaggaaaaaacattcaagtgcaaaa

SEQ ID NO: 171129 - DNA, 71 bp, Homo sapiens
cccacagcaaatgtcaaagaccatattccaattccaagaaaaggaaaaaacattcaagtgcaaaagttcta

SEQ ID NO: 171130 - DNA, 69 bp, Homo sapiens
atgtcaaagaccatattccaattccaagaaaaggaaaaaacattcaagtgcaaaagttctatcaccttt

SEQ ID NO: 171131 - DNA, 66 bp, Homo sapiens
ccatattccaattccaagaaaaggaaaaaacattcaagtgcaaaagttctatcacctttttttaaa

SEQ ID NO: 171132 - DNA, 65 bp, Homo sapiens
ccaagaaaaggaaaaaacattcaagtgcaaaagttctatcacctttttttaaaagtggactattc

SEQ ID NO: 171133 - DNA, 69 bp, Homo sapiens
aaaaacattcaagtgcaaaagttctatcacctttttttaaaagtggactattctattttcatgggcaga

SEQ ID NO: 171134 - DNA, 73 bp, Homo sapiens
ttcaagtgcaaaagttctatcacctttttttaaaagtggactattctattttcatgggcagatgaagattcca

SEQ ID NO: 171135 - DNA, 76 bp, Homo sapiens
tttaaaagtggactattctattttcatgggcagatgaagattccaaaaccgcctcataaaagcaatctctgagcta

SEQ ID NO: 171136 - DNA, 79 bp, Homo sapiens
ttttcatgggcagatgaagattccaaaaccgcctcataaaagcaatctctgagctactagctccacaccagactactaa

SEQ ID NO: 171137 - DNA, 80 bp, Homo sapiens
tgaagattccaaaaccgcctcataaaagcaatctctgagctactagctccacaccagactactaatgagtctgactggaa

SEQ ID NO: 171138 - DNA, 78 bp, Homo sapiens
ttccaaaaccgcctcataaaagcaatctctgagctactagctccacaccagactactaatgagtctgactggaaaaga

SEQ ID NO: 171139 - DNA, 81 bp, Homo sapiens
ataaaagcaatctctgagctactagctccacaccagactactaatgagtctgactggaaaagagcaacacacataggacac

SEQ ID NO: 171140 - DNA, 82 bp, Homo sapiens
aatctctgagctactagctccacaccagactactaatgagtctgactggaaaagagcaacacacataggacactatataatg

SEQ ID NO: 171141 - DNA, 81 bp, Homo sapiens
tactagctccacaccagactactaatgagtctgactggaaaagagcaacacacataggacactatataatgggaactcaga

SEQ ID NO: 171142 - DNA, 77 bp, Homo sapiens
acaccagactactaatgagtctgactggaaaagagcaacacacataggacactatataatgggaactcagaaaataa

SEQ ID NO: 171143 - DNA, 75 bp, Homo sapiens
actactaatgagtctgactggaaaagagcaacacacataggacactatataatgggaactcagaaaataagaacc

SEQ ID NO: 171144 - DNA, 74 bp, Homo sapiens
tctgactggaaaagagcaacacacataggacactatataatgggaactcagaaaataagaacccaacaaactaa

SEQ ID NO: 171145 - DNA, 72 bp, Homo sapiens
aaaagagcaacacacataggacactatataatgggaactcagaaaataagaacccaacaaactaaggccagc

SEQ ID NO: 171146 - DNA, 71 bp, Homo sapiens
aacacacataggacactatataatgggaactcagaaaataagaacccaacaaactaaggccagccctctac

SEQ ID NO: 171147 - DNA, 68 bp, Homo sapiens
actatataatgggaactcagaaaataagaacccaacaaactaaggccagccctctactggttaacgtc

SEQ ID NO: 171148 - DNA, 71 bp, Homo sapiens
ggaactcagaaaataagaacccaacaaactaaggccagccctctactggttaacgtctgttgctgctgaaa

SEQ ID NO: 171149 - DNA, 70 bp, Homo sapiens
aaataagaacccaacaaactaaggccagccctctactggttaacgtctgttgctgctgaaacagattgtt

SEQ ID NO: 171150 - DNA, 74 bp, Homo sapiens
agaacccaacaaactaaggccagccctctactggttaacgtctgttgctgctgaaacagattgtttcatagcaa

SEQ ID NO: 171151 - DNA, 76 bp, Homo sapiens
ctctactggttaacgtctgttgctgctgaaacagattgtttcatagcaaggccagaagtgtaaaatagagccaaat

SEQ ID NO: 171152 - DNA, 76 bp, Homo sapiens
tctgttgctgctgaaacagattgtttcatagcaaggccagaagtgtaaaatagagccaaattcttagatctttttt

SEQ ID NO: 171153 - DNA, 70 bp, Homo sapiens
ctgaaacagattgtttcatagcaaggccagaagtgtaaaatagagccaaattcttagatctttttttttt

SEQ ID NO: 171154 - DNA, 77 bp, Homo sapiens
tttttttaatcaagcatgtctgtcagtgtggtccacaaggggagagcaggggacacagcattggcaggaacctcaaa

SEQ ID NO: 171155 - DNA, 80 bp, Homo sapiens
ttaatcaagcatgtctgtcagtgtggtccacaaggggagagcaggggacacagcattggcaggaacctcaaattcctgac

SEQ ID NO: 171156 - DNA, 76 bp, Homo sapiens
atgtctgtcagtgtggtccacaaggggagagcaggggacacagcattggcaggaacctcaaattcctgaccaaacc

SEQ ID NO: 171157 - DNA, 74 bp, Homo sapiens
gtccacaaggggagagcaggggacacagcattggcaggaacctcaaattcctgaccaaaccctcttccacacaa

SEQ ID NO: 171158 - DNA, 75 bp, Homo sapiens
ggagagcaggggacacagcattggcaggaacctcaaattcctgaccaaaccctcttccacacaatgcctcccgaa

SEQ ID NO: 171159 - DNA, 73 bp, Homo sapiens
ggacacagcattggcaggaacctcaaattcctgaccaaaccctcttccacacaatgcctcccgaaagaaagga

SEQ ID NO: 171160 - DNA, 69 bp, Homo sapiens
attggcaggaacctcaaattcctgaccaaaccctcttccacacaatgcctcccgaaagaaaggaaccca

SEQ ID NO: 171161 - DNA, 67 bp, Homo sapiens
acctcaaattcctgaccaaaccctcttccacacaatgcctcccgaaagaaaggaacccagggtttga

SEQ ID NO: 171162 - DNA, 68 bp, Homo sapiens
aattcctgaccaaaccctcttccacacaatgcctcccgaaagaaaggaacccagggtttgagccagcc

SEQ ID NO: 171163 - DNA, 70 bp, Homo sapiens
aaaccctcttccacacaatgcctcccgaaagaaaggaacccagggtttgagccagcctgacgctggcgga

SEQ ID NO: 171164 - DNA, 76 bp, Homo sapiens
tcccgaaagaaaggaacccagggtttgagccagcctgacgctggcggacagacagggctggccttgcaggatgtca

SEQ ID NO: 171165 - DNA, 83 bp, Homo sapiens
agggtttgagccagcctgacgctggcggacagacagggctggccttgcaggatgtcagagcgccaggcggctgtgagagatac

SEQ ID NO: 171166 - DNA, 83 bp, Homo sapiens
agcctgacgctggcggacagacagggctggccttgcaggatgtcagagcgccaggcggctgtgagagatactgggttttcaca

SEQ ID NO: 171167 - DNA, 81 bp, Homo sapiens
cagggctggccttgcaggatgtcagagcgccaggcggctgtgagagatactgggttttcacacactcccagcctgactgtt

SEQ ID NO: 171168 - DNA, 82 bp, Homo sapiens
ccttgcaggatgtcagagcgccaggcggctgtgagagatactgggttttcacacactcccagcctgactgttttgctcttca

SEQ ID NO: 171169 - DNA, 80 bp, Homo sapiens
tgtcagagcgccaggcggctgtgagagatactgggttttcacacactcccagcctgactgttttgctcttcaggtaatta

SEQ ID NO: 171170 - DNA, 75 bp, Homo sapiens
ccaggcggctgtgagagatactgggttttcacacactcccagcctgactgttttgctcttcaggtaattaaacaa

SEQ ID NO: 171171 - DNA, 75 bp, Homo sapiens
ctgtgagagatactgggttttcacacactcccagcctgactgttttgctcttcaggtaattaaacaaggaagcag

SEQ ID NO: 171172 - DNA, 74 bp, Homo sapiens
atactgggttttcacacactcccagcctgactgttttgctcttcaggtaattaaacaaggaagcagggctgctg

SEQ ID NO: 171173 - DNA, 78 bp, Homo sapiens
tttcacacactcccagcctgactgttttgctcttcaggtaattaaacaaggaagcagggctgctgggtatgagcctga

SEQ ID NO: 171174 - DNA, 75 bp, Homo sapiens
tcccagcctgactgttttgctcttcaggtaattaaacaaggaagcagggctgctgggtatgagcctgaccccgaa

SEQ ID NO: 171175 - DNA, 77 bp, Homo sapiens
tgttttgctcttcaggtaattaaacaaggaagcagggctgctgggtatgagcctgaccccgaagctgcggctccatg

SEQ ID NO: 171176 - DNA, 78 bp, Homo sapiens
aggtaattaaacaaggaagcagggctgctgggtatgagcctgaccccgaagctgcggctccatggttctgcatatcaa

SEQ ID NO: 171177 - DNA, 78 bp, Homo sapiens
attaaacaaggaagcagggctgctgggtatgagcctgaccccgaagctgcggctccatggttctgcatatcaacttcc

SEQ ID NO: 171178 - DNA, 79 bp, Homo sapiens
agggctgctgggtatgagcctgaccccgaagctgcggctccatggttctgcatatcaacttccgcaagaactgcccgga

SEQ ID NO: 171179 - DNA, 81 bp, Homo sapiens
ggtatgagcctgaccccgaagctgcggctccatggttctgcatatcaacttccgcaagaactgcccggagcatcaacagaa

SEQ ID NO: 171180 - DNA, 82 bp, Homo sapiens
ccgaagctgcggctccatggttctgcatatcaacttccgcaagaactgcccggagcatcaacagaacattctcctctcactc

SEQ ID NO: 171181 - DNA, 82 bp, Homo sapiens
tccatggttctgcatatcaacttccgcaagaactgcccggagcatcaacagaacattctcctctcactctctctcatttcct

SEQ ID NO: 171182 - DNA, 77 bp, Homo sapiens
aacttccgcaagaactgcccggagcatcaacagaacattctcctctcactctctctcatttccttctccacctcttc

SEQ ID NO: 171183 - DNA, 78 bp, Homo sapiens
aagaactgcccggagcatcaacagaacattctcctctcactctctctcatttccttctccacctcttcctaaagctga

SEQ ID NO: 171184 - DNA, 77 bp, Homo sapiens
agcatcaacagaacattctcctctcactctctctcatttccttctccacctcttcctaaagctgacccagaaacaag

SEQ ID NO: 171185 - DNA, 76 bp, Homo sapiens
acattctcctctcactctctctcatttccttctccacctcttcctaaagctgacccagaaacaagtcctgcctata

SEQ ID NO: 171186 - DNA, 75 bp, Homo sapiens
tctcactctctctcatttccttctccacctcttcctaaagctgacccagaaacaagtcctgcctataaaaacatc

SEQ ID NO: 171187 - DNA, 72 bp, Homo sapiens
tctccacctcttcctaaagctgacccagaaacaagtcctgcctataaaaacatccagagaaaggtctgattt

SEQ ID NO: 171188 - DNA, 73 bp, Homo sapiens
ttcctaaagctgacccagaaacaagtcctgcctataaaaacatccagagaaaggtctgattttatttgtcata

SEQ ID NO: 171189 - DNA, 74 bp, Homo sapiens
acaagtcctgcctataaaaacatccagagaaaggtctgattttatttgtcataaaaatctctatgctattccca

SEQ ID NO: 171190 - DNA, 75 bp, Homo sapiens
tgcctataaaaacatccagagaaaggtctgattttatttgtcataaaaatctctatgctattcccagtcattacc

SEQ ID NO: 171191 - DNA, 73 bp, Homo sapiens
catccagagaaaggtctgattttatttgtcataaaaatctctatgctattcccagtcattaccctccaaattt

SEQ ID NO: 171192 - DNA, 71 bp, Homo sapiens
agagaaaggtctgattttatttgtcataaaaatctctatgctattcccagtcattaccctccaaattttaa

SEQ ID NO: 171193 - DNA, 69 bp, Homo sapiens
ctgattttatttgtcataaaaatctctatgctattcccagtcattaccctccaaattttaaaaaacaaa

SEQ ID NO: 171194 - DNA, 68 bp, Homo sapiens
aaaaacaaaaaagtaccttaatggcagaaacttcataaaaattcatatacagcaaatctgtgtaaaac

SEQ ID NO: 171195 - DNA, 76 bp, Homo sapiens
ccttaatggcagaaacttcataaaaattcatatacagcaaatctgtgtaaaacgctggtatcttaatcaagatgga

SEQ ID NO: 171196 - DNA, 76 bp, Homo sapiens
cttcataaaaattcatatacagcaaatctgtgtaaaacgctggtatcttaatcaagatggatcaaagaaaattgta

SEQ ID NO: 171197 - DNA, 76 bp, Homo sapiens
aaattcatatacagcaaatctgtgtaaaacgctggtatcttaatcaagatggatcaaagaaaattgtactcaaata

SEQ ID NO: 171198 - DNA, 75 bp, Homo sapiens
atacagcaaatctgtgtaaaacgctggtatcttaatcaagatggatcaaagaaaattgtactcaaataattataa

SEQ ID NO: 171199 - DNA, 72 bp, Homo sapiens
atctgtgtaaaacgctggtatcttaatcaagatggatcaaagaaaattgtactcaaataattataattttta

SEQ ID NO: 171200 - DNA, 72 bp, Homo sapiens
gatggatcaaagaaaattgtactcaaataattataatttttaacatgcttgattaaagtgtaaatcttcaaa

SEQ ID NO: 171201 - DNA, 71 bp, Homo sapiens
atcaaagaaaattgtactcaaataattataatttttaacatgcttgattaaagtgtaaatcttcaaattca

SEQ ID NO: 171202 - DNA, 72 bp, Homo sapiens
gtactcaaataattataatttttaacatgcttgattaaagtgtaaatcttcaaattcaaagaaggctcacca

SEQ ID NO: 171203 - DNA, 72 bp, Homo sapiens
ttataatttttaacatgcttgattaaagtgtaaatcttcaaattcaaagaaggctcaccaagaaataaatga

SEQ ID NO: 171204 - DNA, 75 bp, Homo sapiens
taacatgcttgattaaagtgtaaatcttcaaattcaaagaaggctcaccaagaaataaatgattttgatagtcca

SEQ ID NO: 171205 - DNA, 72 bp, Homo sapiens
gcttgattaaagtgtaaatcttcaaattcaaagaaggctcaccaagaaataaatgattttgatagtccagtt

SEQ ID NO: 171206 - DNA, 70 bp, Homo sapiens
cttcaaattcaaagaaggctcaccaagaaataaatgattttgatagtccagtttacaaattaaacatttg

SEQ ID NO: 171207 - DNA, 71 bp, Homo sapiens
aagaaggctcaccaagaaataaatgattttgatagtccagtttacaaattaaacatttgttgtgttacata

SEQ ID NO: 171208 - DNA, 70 bp, Homo sapiens
ccaagaaataaatgattttgatagtccagtttacaaattaaacatttgttgtgttacataattaacattg

SEQ ID NO: 171209 - DNA, 69 bp, Homo sapiens
aaatgattttgatagtccagtttacaaattaaacatttgttgtgttacataattaacattgttatttta

SEQ ID NO: 171210 - DNA, 68 bp, Homo sapiens
caaattaaacatttgttgtgttacataattaacattgttattttaaattttgatagtggtaattaatg

SEQ ID NO: 171211 - DNA, 70 bp, Homo sapiens
catttgttgtgttacataattaacattgttattttaaattttgatagtggtaattaatgtaagcaaatac

SEQ ID NO: 171212 - DNA, 74 bp, Homo sapiens
tgttacataattaacattgttattttaaattttgatagtggtaattaatgtaagcaaataccatctatgatctg

SEQ ID NO: 171213 - DNA, 72 bp, Homo sapiens
ttttaaattttgatagtggtaattaatgtaagcaaataccatctatgatctggtttattatgtttcaccaaa

SEQ ID NO: 171214 - DNA, 71 bp, Homo sapiens
aattttgatagtggtaattaatgtaagcaaataccatctatgatctggtttattatgtttcaccaaaaatt

SEQ ID NO: 171215 - DNA, 70 bp, Homo sapiens
gtggtaattaatgtaagcaaataccatctatgatctggtttattatgtttcaccaaaaattttatttaaa

SEQ ID NO: 171216 - DNA, 70 bp, Homo sapiens
atgtaagcaaataccatctatgatctggtttattatgtttcaccaaaaattttatttaaacaaaactcta

SEQ ID NO: 171217 - DNA, 67 bp, Homo sapiens
ccatctatgatctggtttattatgtttcaccaaaaattttatttaaacaaaactctaaaatattttg

SEQ ID NO: 171218 - DNA, 69 bp, Homo sapiens
tgatctggtttattatgtttcaccaaaaattttatttaaacaaaactctaaaatattttgtgtgtgcaa

SEQ ID NO: 171219 - DNA, 68 bp, Homo sapiens
tgtttcaccaaaaattttatttaaacaaaactctaaaatattttgtgtgtgcaaagtcaccaaactca

SEQ ID NO: 171220 - DNA, 67 bp, Homo sapiens
caccaaaaattttatttaaacaaaactctaaaatattttgtgtgtgcaaagtcaccaaactcaggaa

SEQ ID NO: 171221 - DNA, 71 bp, Homo sapiens
ttaaacaaaactctaaaatattttgtgtgtgcaaagtcaccaaactcaggaatatcaaacatatcctttaa

SEQ ID NO: 171222 - DNA, 72 bp, Homo sapiens
ctctaaaatattttgtgtgtgcaaagtcaccaaactcaggaatatcaaacatatcctttaaaagataagaaa

SEQ ID NO: 171223 - DNA, 72 bp, Homo sapiens
attttgtgtgtgcaaagtcaccaaactcaggaatatcaaacatatcctttaaaagataagaaagtggtatat

SEQ ID NO: 171224 - DNA, 74 bp, Homo sapiens
gtgtgcaaagtcaccaaactcaggaatatcaaacatatcctttaaaagataagaaagtggtatatttatataca

SEQ ID NO: 171225 - DNA, 79 bp, Homo sapiens
atacatatatataattaaacaatgattagaatcatataaatgatatactcttctttcatctcaaaatccatacagtaaa

SEQ ID NO: 171226 - DNA, 78 bp, Homo sapiens
tataattaaacaatgattagaatcatataaatgatatactcttctttcatctcaaaatccatacagtaaaatattggc

SEQ ID NO: 171227 - DNA, 81 bp, Homo sapiens
caatgattagaatcatataaatgatatactcttctttcatctcaaaatccatacagtaaaatattggctgaaagagacaga

SEQ ID NO: 171228 - DNA, 78 bp, Homo sapiens
atgatatactcttctttcatctcaaaatccatacagtaaaatattggctgaaagagacagagaccaaaagagagaaga

SEQ ID NO: 171229 - DNA, 78 bp, Homo sapiens
aaagagagaagaatacaaaagcatgcctgcttgtctgtgttcaacacaaagaacattaaatgaaaacaactggcatgc

SEQ ID NO: 171230 - DNA, 78 bp, Homo sapiens
aagaatacaaaagcatgcctgcttgtctgtgttcaacacaaagaacattaaatgaaaacaactggcatgctgccaaat

SEQ ID NO: 171231 - DNA, 79 bp, Homo sapiens
aaaagcatgcctgcttgtctgtgttcaacacaaagaacattaaatgaaaacaactggcatgctgccaaattcctataga

SEQ ID NO: 171232 - DNA, 79 bp, Homo sapiens
ttgtctgtgttcaacacaaagaacattaaatgaaaacaactggcatgctgccaaattcctatagaggcaaagagattca

SEQ ID NO: 171233 - DNA, 76 bp, Homo sapiens
gttcaacacaaagaacattaaatgaaaacaactggcatgctgccaaattcctatagaggcaaagagattcaaataa

SEQ ID NO: 171234 - DNA, 78 bp, Homo sapiens
gaacattaaatgaaaacaactggcatgctgccaaattcctatagaggcaaagagattcaaataaattgatttcacgca

SEQ ID NO: 171235 - DNA, 79 bp, Homo sapiens
ttaaatgaaaacaactggcatgctgccaaattcctatagaggcaaagagattcaaataaattgatttcacgcatcacac

SEQ ID NO: 171236 - DNA, 82 bp, Homo sapiens
acaactggcatgctgccaaattcctatagaggcaaagagattcaaataaattgatttcacgcatcacactgacctgggatca

SEQ ID NO: 171237 - DNA, 82 bp, Homo sapiens
ccaaattcctatagaggcaaagagattcaaataaattgatttcacgcatcacactgacctgggatcagtgtgcagtgctaca

SEQ ID NO: 171238 - DNA, 84 bp, Homo sapiens
tatagaggcaaagagattcaaataaattgatttcacgcatcacactgacctgggatcagtgtgcagtgctacaataagctcaaa

SEQ ID NO: 171239 - DNA, 83 bp, Homo sapiens
aaagagattcaaataaattgatttcacgcatcacactgacctgggatcagtgtgcagtgctacaataagctcaaagctccatg

SEQ ID NO: 171240 - DNA, 81 bp, Homo sapiens
aataaattgatttcacgcatcacactgacctgggatcagtgtgcagtgctacaataagctcaaagctccatgtggggtaaa

SEQ ID NO: 171241 - DNA, 81 bp, Homo sapiens
atttcacgcatcacactgacctgggatcagtgtgcagtgctacaataagctcaaagctccatgtggggtaaagcccattaa

SEQ ID NO: 171242 - DNA, 81 bp, Homo sapiens
acactgacctgggatcagtgtgcagtgctacaataagctcaaagctccatgtggggtaaagcccattaatgctatcagacc

SEQ ID NO: 171243 - DNA, 81 bp, Homo sapiens
tgggatcagtgtgcagtgctacaataagctcaaagctccatgtggggtaaagcccattaatgctatcagacccctcaaaca

SEQ ID NO: 171244 - DNA, 80 bp, Homo sapiens
tgcagtgctacaataagctcaaagctccatgtggggtaaagcccattaatgctatcagacccctcaaacatgaccaagaa

SEQ ID NO: 171245 - DNA, 75 bp, Homo sapiens
tacaataagctcaaagctccatgtggggtaaagcccattaatgctatcagacccctcaaacatgaccaagaaaaa

SEQ ID NO: 171246 - DNA, 73 bp, Homo sapiens
agctcaaagctccatgtggggtaaagcccattaatgctatcagacccctcaaacatgaccaagaaaaactaaa

SEQ ID NO: 171247 - DNA, 73 bp, Homo sapiens
tgtggggtaaagcccattaatgctatcagacccctcaaacatgaccaagaaaaactaaaaataagagcagata

SEQ ID NO: 171248 - DNA, 74 bp, Homo sapiens
taaagcccattaatgctatcagacccctcaaacatgaccaagaaaaactaaaaataagagcagatactctctaa

SEQ ID NO: 171249 - DNA, 75 bp, Homo sapiens
ttaatgctatcagacccctcaaacatgaccaagaaaaactaaaaataagagcagatactctctaaaagcagcaat

SEQ ID NO: 171250 - DNA, 71 bp, Homo sapiens
ccctcaaacatgaccaagaaaaactaaaaataagagcagatactctctaaaagcagcaattttacttaata

SEQ ID NO: 171251 - DNA, 70 bp, Homo sapiens
catgaccaagaaaaactaaaaataagagcagatactctctaaaagcagcaattttacttaataaaataac

SEQ ID NO: 171252 - DNA, 68 bp, Homo sapiens
aaactaaaaataagagcagatactctctaaaagcagcaattttacttaataaaataactttcctcttc

SEQ ID NO: 171253 - DNA, 71 bp, Homo sapiens
gcagatactctctaaaagcagcaattttacttaataaaataactttcctcttcctaacaaagataccaata

SEQ ID NO: 171254 - DNA, 75 bp, Homo sapiens
tttacttaataaaataactttcctcttcctaacaaagataccaatatataaaggtgcacagcatcatctatatca

SEQ ID NO: 171255 - DNA, 76 bp, Homo sapiens
ataaaataactttcctcttcctaacaaagataccaatatataaaggtgcacagcatcatctatatcagcattttaa

SEQ ID NO: 171256 - DNA, 76 bp, Homo sapiens
ttcctaacaaagataccaatatataaaggtgcacagcatcatctatatcagcattttaaaaatacctctttttcaa

SEQ ID NO: 171257 - DNA, 77 bp, Homo sapiens
taccaatatataaaggtgcacagcatcatctatatcagcattttaaaaatacctctttttcaaaatacaaatgtggc

SEQ ID NO: 171258 - DNA, 74 bp, Homo sapiens
aaggtgcacagcatcatctatatcagcattttaaaaatacctctttttcaaaatacaaatgtggcttttgaaac

SEQ ID NO: 171259 - DNA, 76 bp, Homo sapiens
gcacagcatcatctatatcagcattttaaaaatacctctttttcaaaatacaaatgtggcttttgaaacccacaca

SEQ ID NO: 171260 - DNA, 72 bp, Homo sapiens
tctatatcagcattttaaaaatacctctttttcaaaatacaaatgtggcttttgaaacccacacaatatgta

SEQ ID NO: 171261 - DNA, 67 bp, Homo sapiens
gcattttaaaaatacctctttttcaaaatacaaatgtggcttttgaaacccacacaatatgtaaaaa

SEQ ID NO: 171262 - DNA, 71 bp, Homo sapiens
ctctttttcaaaatacaaatgtggcttttgaaacccacacaatatgtaaaaattgatactacctatatatc

SEQ ID NO: 171263 - DNA, 74 bp, Homo sapiens
caaaatacaaatgtggcttttgaaacccacacaatatgtaaaaattgatactacctatatatcccattccatga

SEQ ID NO: 171264 - DNA, 79 bp, Homo sapiens
caaatgtggcttttgaaacccacacaatatgtaaaaattgatactacctatatatcccattccatgatatgcatgaaca

SEQ ID NO: 171265 - DNA, 79 bp, Homo sapiens
tttgaaacccacacaatatgtaaaaattgatactacctatatatcccattccatgatatgcatgaacataaacaggcac

SEQ ID NO: 171266 - DNA, 81 bp, Homo sapiens
cacacaatatgtaaaaattgatactacctatatatcccattccatgatatgcatgaacataaacaggcactctttgcaaaa

SEQ ID NO: 171267 - DNA, 76 bp, Homo sapiens
aaattgatactacctatatatcccattccatgatatgcatgaacataaacaggcactctttgcaaaaaaagtttcc

SEQ ID NO: 171268 - DNA, 78 bp, Homo sapiens
tatatcccattccatgatatgcatgaacataaacaggcactctttgcaaaaaaagtttcctgtcattctttcctccca

SEQ ID NO: 171269 - DNA, 73 bp, Homo sapiens
atgaacataaacaggcactctttgcaaaaaaagtttcctgtcattctttcctcccaagctgcttcctcttaca

SEQ ID NO: 171270 - DNA, 71 bp, Homo sapiens
aacaggcactctttgcaaaaaaagtttcctgtcattctttcctcccaagctgcttcctcttacatctttta

SEQ ID NO: 171271 - DNA, 72 bp, Homo sapiens
cccaagctgcttcctcttacatcttttagaaaacatatggatctttttaatatgtcaaatactacacccttc

SEQ ID NO: 171272 - DNA, 72 bp, Homo sapiens
ctgcttcctcttacatcttttagaaaacatatggatctttttaatatgtcaaatactacacccttcttagaa

SEQ ID NO: 171273 - DNA, 73 bp, Homo sapiens
catcttttagaaaacatatggatctttttaatatgtcaaatactacacccttcttagaattgtcctcaatggc

SEQ ID NO: 171274 - DNA, 77 bp, Homo sapiens
atggatctttttaatatgtcaaatactacacccttcttagaattgtcctcaatggcttatgatagcaagctcctcag

SEQ ID NO: 171275 - DNA, 76 bp, Homo sapiens
aaatactacacccttcttagaattgtcctcaatggcttatgatagcaagctcctcaggccagactaccactcctag

SEQ ID NO: 171276 - DNA, 79 bp, Homo sapiens
ttcttagaattgtcctcaatggcttatgatagcaagctcctcaggccagactaccactcctaggtgtcccaaatctgtc

SEQ ID NO: 171277 - DNA, 78 bp, Homo sapiens
aattgtcctcaatggcttatgatagcaagctcctcaggccagactaccactcctaggtgtcccaaatctgtctggtcc

SEQ ID NO: 171278 - DNA, 79 bp, Homo sapiens
aatggcttatgatagcaagctcctcaggccagactaccactcctaggtgtcccaaatctgtctggtccctacaatggca

SEQ ID NO: 171279 - DNA, 78 bp, Homo sapiens
atagcaagctcctcaggccagactaccactcctaggtgtcccaaatctgtctggtccctacaatggcaggcattacag

SEQ ID NO: 171280 - DNA, 76 bp, Homo sapiens
tcctcaggccagactaccactcctaggtgtcccaaatctgtctggtccctacaatggcaggcattacaggagaacg

SEQ ID NO: 171281 - DNA, 74 bp, Homo sapiens
actaccactcctaggtgtcccaaatctgtctggtccctacaatggcaggcattacaggagaacggctccaaatg

SEQ ID NO: 171282 - DNA, 77 bp, Homo sapiens
tcctaggtgtcccaaatctgtctggtccctacaatggcaggcattacaggagaacggctccaaatggcattctagag

SEQ ID NO: 171283 - DNA, 80 bp, Homo sapiens
atctgtctggtccctacaatggcaggcattacaggagaacggctccaaatggcattctagaggaccaagcactgtgtgta

SEQ ID NO: 171284 - DNA, 78 bp, Homo sapiens
tctggtccctacaatggcaggcattacaggagaacggctccaaatggcattctagaggaccaagcactgtgtgtacct

SEQ ID NO: 171285 - DNA, 74 bp, Homo sapiens
attacaggagaacggctccaaatggcattctagaggaccaagcactgtgtgtaccttgggtatgctttaaaaca

SEQ ID NO: 171286 - DNA, 73 bp, Homo sapiens
agaacggctccaaatggcattctagaggaccaagcactgtgtgtaccttgggtatgctttaaaacaccaggtg

SEQ ID NO: 171287 - DNA, 72 bp, Homo sapiens
aaatggcattctagaggaccaagcactgtgtgtaccttgggtatgctttaaaacaccaggtgggaaacacaa

SEQ ID NO: 171288 - DNA, 71 bp, Homo sapiens
aggaccaagcactgtgtgtaccttgggtatgctttaaaacaccaggtgggaaacacaacagcgttctcatt

SEQ ID NO: 171289 - DNA, 71 bp, Homo sapiens
aagcactgtgtgtaccttgggtatgctttaaaacaccaggtgggaaacacaacagcgttctcattttacca

SEQ ID NO: 171290 - DNA, 74 bp, Homo sapiens
tatgctttaaaacaccaggtgggaaacacaacagcgttctcattttaccagcttccacccaagctggtggcata

SEQ ID NO: 171291 - DNA, 70 bp, Homo sapiens
aaaacaccaggtgggaaacacaacagcgttctcattttaccagcttccacccaagctggtggcatacccc

SEQ ID NO: 171292 - DNA, 72 bp, Homo sapiens
aaacacaacagcgttctcattttaccagcttccacccaagctggtggcatacccctttagtatcatttccca

SEQ ID NO: 171293 - DNA, 71 bp, Homo sapiens
aacagcgttctcattttaccagcttccacccaagctggtggcatacccctttagtatcatttcccaccctc

SEQ ID NO: 171294 - DNA, 70 bp, Homo sapiens
ctcattttaccagcttccacccaagctggtggcatacccctttagtatcatttcccaccctcctgccccc

SEQ ID NO: 171295 - DNA, 71 bp, Homo sapiens
ttccacccaagctggtggcatacccctttagtatcatttcccaccctcctgccccccagcctctgccctaa

SEQ ID NO: 171296 - DNA, 71 bp, Homo sapiens
aagctggtggcatacccctttagtatcatttcccaccctcctgccccccagcctctgccctaacagaggcc

SEQ ID NO: 171297 - DNA, 71 bp, Homo sapiens
atacccctttagtatcatttcccaccctcctgccccccagcctctgccctaacagaggcccatctccagga

SEQ ID NO: 171298 - DNA, 73 bp, Homo sapiens
tttagtatcatttcccaccctcctgccccccagcctctgccctaacagaggcccatctccaggagaccccagc

SEQ ID NO: 171299 - DNA, 75 bp, Homo sapiens
caccctcctgccccccagcctctgccctaacagaggcccatctccaggagaccccagcctgcttcaaacttgcta

SEQ ID NO: 171300 - DNA, 76 bp, Homo sapiens
ccccccagcctctgccctaacagaggcccatctccaggagaccccagcctgcttcaaacttgctacgcagaccaga

SEQ ID NO: 171301 - DNA, 79 bp, Homo sapiens
agcctctgccctaacagaggcccatctccaggagaccccagcctgcttcaaacttgctacgcagaccagactctctggc

SEQ ID NO: 171302 - DNA, 79 bp, Homo sapiens
ctaacagaggcccatctccaggagaccccagcctgcttcaaacttgctacgcagaccagactctctggcgccacctcag

SEQ ID NO: 171303 - DNA, 82 bp, Homo sapiens
atctccaggagaccccagcctgcttcaaacttgctacgcagaccagactctctggcgccacctcaggccattctcactcaca

SEQ ID NO: 171304 - DNA, 83 bp, Homo sapiens
aaacttgctacgcagaccagactctctggcgccacctcaggccattctcactcacaatgccgactgttcagccatggatagtc

SEQ ID NO: 171305 - DNA, 82 bp, Homo sapiens
agaccagactctctggcgccacctcaggccattctcactcacaatgccgactgttcagccatggatagtcctttgctttatc

SEQ ID NO: 171306 - DNA, 82 bp, Homo sapiens
tctggcgccacctcaggccattctcactcacaatgccgactgttcagccatggatagtcctttgctttatctgcttctaaat

SEQ ID NO: 171307 - DNA, 79 bp, Homo sapiens
acctcaggccattctcactcacaatgccgactgttcagccatggatagtcctttgctttatctgcttctaaattacaac

SEQ ID NO: 171308 - DNA, 77 bp, Homo sapiens
attctcactcacaatgccgactgttcagccatggatagtcctttgctttatctgcttctaaattacaactccaaaac

SEQ ID NO: 171309 - DNA, 76 bp, Homo sapiens
tgttcagccatggatagtcctttgctttatctgcttctaaattacaactccaaaactctaagagcccaatggattc

SEQ ID NO: 171310 - DNA, 73 bp, Homo sapiens
atggatagtcctttgctttatctgcttctaaattacaactccaaaactctaagagcccaatggattccaggtg

SEQ ID NO: 171311 - DNA, 73 bp, Homo sapiens
ttgctttatctgcttctaaattacaactccaaaactctaagagcccaatggattccaggtgttctaaaatgta

SEQ ID NO: 171312 - DNA, 71 bp, Homo sapiens
ttatctgcttctaaattacaactccaaaactctaagagcccaatggattccaggtgttctaaaatgtaaag

SEQ ID NO: 171313 - DNA, 71 bp, Homo sapiens
attacaactccaaaactctaagagcccaatggattccaggtgttctaaaatgtaaagtatgtgatttctgt

SEQ ID NO: 171314 - DNA, 69 bp, Homo sapiens
aaaactctaagagcccaatggattccaggtgttctaaaatgtaaagtatgtgatttctgttttcccaac

SEQ ID NO: 171315 - DNA, 71 bp, Homo sapiens
taagagcccaatggattccaggtgttctaaaatgtaaagtatgtgatttctgttttcccaacttcttgagt

SEQ ID NO: 171316 - DNA, 70 bp, Homo sapiens
caatggattccaggtgttctaaaatgtaaagtatgtgatttctgttttcccaacttcttgagtttgaacc

SEQ ID NO: 171317 - DNA, 69 bp, Homo sapiens
caggtgttctaaaatgtaaagtatgtgatttctgttttcccaacttcttgagtttgaaccccatatttc

SEQ ID NO: 171318 - DNA, 71 bp, Homo sapiens
tgtaaagtatgtgatttctgttttcccaacttcttgagtttgaaccccatatttctatacacctaatatta

SEQ ID NO: 171319 - DNA, 70 bp, Homo sapiens
tgatttctgttttcccaacttcttgagtttgaaccccatatttctatacacctaatattattacaaagag

SEQ ID NO: 171320 - DNA, 68 bp, Homo sapiens
ctgttttcccaacttcttgagtttgaaccccatatttctatacacctaatattattacaaagaggaaa

SEQ ID NO: 171321 - DNA, 66 bp, Homo sapiens
caacttcttgagtttgaaccccatatttctatacacctaatattattacaaagaggaaaaaaaaat

SEQ ID NO: 171322 - DNA, 68 bp, Homo sapiens
tgcctggcctagaagtaaatttttaatgccacatggaaaacaaagaaaacccaacagttacaaaatag

SEQ ID NO: 171323 - DNA, 67 bp, Homo sapiens
ggcctagaagtaaatttttaatgccacatggaaaacaaagaaaacccaacagttacaaaataggtca

SEQ ID NO: 171324 - DNA, 71 bp, Homo sapiens
ttttaatgccacatggaaaacaaagaaaacccaacagttacaaaataggtcaatacaaatatgtatatgtg

SEQ ID NO: 171325 - DNA, 81 bp, Homo sapiens
tatatgtgtatacagacatcatgtttaaagtatgtacacacaccacacatacaggagagtaggagagacagagaagaaaaa

SEQ ID NO: 171326 - DNA, 78 bp, Homo sapiens
gtatacagacatcatgtttaaagtatgtacacacaccacacatacaggagagtaggagagacagagaagaaaaaaaga

SEQ ID NO: 171327 - DNA, 75 bp, Homo sapiens
gaagaaaaaaagaagaaattgcacattgtgtttctgatacatgatgctgggggttccgtacatgaataacaaata

SEQ ID NO: 171328 - DNA, 76 bp, Homo sapiens
aaaaagaagaaattgcacattgtgtttctgatacatgatgctgggggttccgtacatgaataacaaataaatgcat

SEQ ID NO: 171329 - DNA, 78 bp, Homo sapiens
aaattgcacattgtgtttctgatacatgatgctgggggttccgtacatgaataacaaataaatgcattccaaattata

SEQ ID NO: 171330 - DNA, 78 bp, Homo sapiens
gtgtttctgatacatgatgctgggggttccgtacatgaataacaaataaatgcattccaaattatattaagatatgtg

SEQ ID NO: 171331 - DNA, 81 bp, Homo sapiens
tacatgatgctgggggttccgtacatgaataacaaataaatgcattccaaattatattaagatatgtgttcttgtcatgca

SEQ ID NO: 171332 - DNA, 76 bp, Homo sapiens
gggttccgtacatgaataacaaataaatgcattccaaattatattaagatatgtgttcttgtcatgcatttttgct

SEQ ID NO: 171333 - DNA, 78 bp, Homo sapiens
ccgtacatgaataacaaataaatgcattccaaattatattaagatatgtgttcttgtcatgcatttttgctttcaata

SEQ ID NO: 171334 - DNA, 83 bp, Homo sapiens
caaataaatgcattccaaattatattaagatatgtgttcttgtcatgcatttttgctttcaatatagatcttccatgctgcaa

SEQ ID NO: 171335 - DNA, 84 bp, Homo sapiens
cattccaaattatattaagatatgtgttcttgtcatgcatttttgctttcaatatagatcttccatgctgcaatggttcattgc

SEQ ID NO: 171336 - DNA, 84 bp, Homo sapiens
aaattatattaagatatgtgttcttgtcatgcatttttgctttcaatatagatcttccatgctgcaatggttcattgccagcag

SEQ ID NO: 171337 - DNA, 87 bp, Homo sapiens
aagatatgtgttcttgtcatgcatttttgctttcaatatagatcttccatgctgcaatggttcattgccagcaggccacagatatat

SEQ ID NO: 171338 - DNA, 89 bp, Homo sapiens
tgtcatgcatttttgctttcaatatagatcttccatgctgcaatggttcattgccagcaggccacagatatattccacatgaccagaaa

SEQ ID NO: 171339 - DNA, 85 bp, Homo sapiens
ttttgctttcaatatagatcttccatgctgcaatggttcattgccagcaggccacagatatattccacatgaccagaaaggaata

SEQ ID NO: 171340 - DNA, 87 bp, Homo sapiens
tttcaatatagatcttccatgctgcaatggttcattgccagcaggccacagatatattccacatgaccagaaaggaatagattgtga

SEQ ID NO: 171341 - DNA, 87 bp, Homo sapiens
atcttccatgctgcaatggttcattgccagcaggccacagatatattccacatgaccagaaaggaatagattgtgatggaatgcgag

SEQ ID NO: 171342 - DNA, 81 bp, Homo sapiens
aatggttcattgccagcaggccacagatatattccacatgaccagaaaggaatagattgtgatggaatgcgagtgggtaaa

SEQ ID NO: 171343 - DNA, 81 bp, Homo sapiens
attgccagcaggccacagatatattccacatgaccagaaaggaatagattgtgatggaatgcgagtgggtaaagatagtaa

SEQ ID NO: 171344 - DNA, 80 bp, Homo sapiens
ccacagatatattccacatgaccagaaaggaatagattgtgatggaatgcgagtgggtaaagatagtaactctatgtatc

SEQ ID NO: 171345 - DNA, 81 bp, Homo sapiens
atatattccacatgaccagaaaggaatagattgtgatggaatgcgagtgggtaaagatagtaactctatgtatctgcaata

SEQ ID NO: 171346 - DNA, 78 bp, Homo sapiens
accagaaaggaatagattgtgatggaatgcgagtgggtaaagatagtaactctatgtatctgcaatatgttcaagctt

SEQ ID NO: 171347 - DNA, 77 bp, Homo sapiens
tgatggaatgcgagtgggtaaagatagtaactctatgtatctgcaatatgttcaagctttaaagtccaatatccttt

SEQ ID NO: 171348 - DNA, 75 bp, Homo sapiens
aatgcgagtgggtaaagatagtaactctatgtatctgcaatatgttcaagctttaaagtccaatatcctttttga

SEQ ID NO: 171349 - DNA, 72 bp, Homo sapiens
ggtaaagatagtaactctatgtatctgcaatatgttcaagctttaaagtccaatatcctttttgatttttaa

SEQ ID NO: 171350 - DNA, 78 bp, Homo sapiens
taactctatgtatctgcaatatgttcaagctttaaagtccaatatcctttttgatttttaatctgcatcttagatatc

SEQ ID NO: 171351 - DNA, 76 bp, Homo sapiens
tatgttcaagctttaaagtccaatatcctttttgatttttaatctgcatcttagatatctttatcatattaataca

SEQ ID NO: 171352 - DNA, 75 bp, Homo sapiens
aaagtccaatatcctttttgatttttaatctgcatcttagatatctttatcatattaatacaaactccacgcaga

SEQ ID NO: 171353 - DNA, 78 bp, Homo sapiens
tcctttttgatttttaatctgcatcttagatatctttatcatattaatacaaactccacgcagatacataaggcagaa

SEQ ID NO: 171354 - DNA, 77 bp, Homo sapiens
tttttaatctgcatcttagatatctttatcatattaatacaaactccacgcagatacataaggcagaaaccaaggag

SEQ ID NO: 171355 - DNA, 79 bp, Homo sapiens
aatctgcatcttagatatctttatcatattaatacaaactccacgcagatacataaggcagaaaccaaggagttccaca

SEQ ID NO: 171356 - DNA, 78 bp, Homo sapiens
tagatatctttatcatattaatacaaactccacgcagatacataaggcagaaaccaaggagttccacagacacattaa

SEQ ID NO: 171357 - DNA, 75 bp, Homo sapiens
atattaatacaaactccacgcagatacataaggcagaaaccaaggagttccacagacacattaagcccaagctta

SEQ ID NO: 171358 - DNA, 75 bp, Homo sapiens
aatacaaactccacgcagatacataaggcagaaaccaaggagttccacagacacattaagcccaagcttaatgtg

SEQ ID NO: 171359 - DNA, 74 bp, Homo sapiens
acgcagatacataaggcagaaaccaaggagttccacagacacattaagcccaagcttaatgtggaagcccaaac

SEQ ID NO: 171360 - DNA, 73 bp, Homo sapiens
aaaccaaggagttccacagacacattaagcccaagcttaatgtggaagcccaaactggtggaagatgacaaga

SEQ ID NO: 171361 - DNA, 73 bp, Homo sapiens
agttccacagacacattaagcccaagcttaatgtggaagcccaaactggtggaagatgacaagaaaacaattc

SEQ ID NO: 171362 - DNA, 71 bp, Homo sapiens
attaagcccaagcttaatgtggaagcccaaactggtggaagatgacaagaaaacaattctaaagcgggatg

SEQ ID NO: 171363 - DNA, 71 bp, Homo sapiens
agcttaatgtggaagcccaaactggtggaagatgacaagaaaacaattctaaagcgggatggttattatta

SEQ ID NO: 171364 - DNA, 70 bp, Homo sapiens
tggaagcccaaactggtggaagatgacaagaaaacaattctaaagcgggatggttattattattagattt

SEQ ID NO: 171365 - DNA, 68 bp, Homo sapiens
ccaaactggtggaagatgacaagaaaacaattctaaagcgggatggttattattattagatttttcct

SEQ ID NO: 171366 - DNA, 70 bp, Homo sapiens
gatgacaagaaaacaattctaaagcgggatggttattattattagatttttcctttaagatattgatacc

SEQ ID NO: 171367 - DNA, 67 bp, Homo sapiens
gaaaacaattctaaagcgggatggttattattattagatttttcctttaagatattgataccttttc

SEQ ID NO: 171368 - DNA, 67 bp, Homo sapiens
ttctaaagcgggatggttattattattagatttttcctttaagatattgataccttttctttttctc

SEQ ID NO: 171369 - DNA, 70 bp, Homo sapiens
gttattattattagatttttcctttaagatattgataccttttctttttctctatgcaagactttagcag

SEQ ID NO: 171370 - DNA, 75 bp, Homo sapiens
tcctttaagatattgataccttttctttttctctatgcaagactttagcaggctaatcaaccaagatctgagttc

SEQ ID NO: 171371 - DNA, 75 bp, Homo sapiens
aagatattgataccttttctttttctctatgcaagactttagcaggctaatcaaccaagatctgagttctcaaaa

SEQ ID NO: 171372 - DNA, 73 bp, Homo sapiens
tttctttttctctatgcaagactttagcaggctaatcaaccaagatctgagttctcaaaaaaccaatgtttag

SEQ ID NO: 171373 - DNA, 72 bp, Homo sapiens
caggctaatcaaccaagatctgagttctcaaaaaaccaatgtttagtaacaacagtgcataaggttaagaaa

SEQ ID NO: 171374 - DNA, 70 bp, Homo sapiens
caaccaagatctgagttctcaaaaaaccaatgtttagtaacaacagtgcataaggttaagaaaagagaag

SEQ ID NO: 171375 - DNA, 75 bp, Homo sapiens
tttagtaacaacagtgcataaggttaagaaaagagaagtagtcatgggagatgtctcaactgcttaaacaattga

SEQ ID NO: 171376 - DNA, 74 bp, Homo sapiens
acaacagtgcataaggttaagaaaagagaagtagtcatgggagatgtctcaactgcttaaacaattgaactcct

SEQ ID NO: 171377 - DNA, 73 bp, Homo sapiens
ataaggttaagaaaagagaagtagtcatgggagatgtctcaactgcttaaacaattgaactccttgccttctc

SEQ ID NO: 171378 - DNA, 75 bp, Homo sapiens
aaaagagaagtagtcatgggagatgtctcaactgcttaaacaattgaactccttgccttctcttttgaattgatg

SEQ ID NO: 171379 - DNA, 79 bp, Homo sapiens
tcatgggagatgtctcaactgcttaaacaattgaactccttgccttctcttttgaattgatgtctctcattaattgtat

SEQ ID NO: 171380 - DNA, 77 bp, Homo sapiens
gagatgtctcaactgcttaaacaattgaactccttgccttctcttttgaattgatgtctctcattaattgtattaaa

SEQ ID NO: 171381 - DNA, 77 bp, Homo sapiens
gcttaaacaattgaactccttgccttctcttttgaattgatgtctctcattaattgtattaaaagaacatcatcaca

SEQ ID NO: 171382 - DNA, 79 bp, Homo sapiens
tgaactccttgccttctcttttgaattgatgtctctcattaattgtattaaaagaacatcatcacagtatgaagaagga

SEQ ID NO: 171383 - DNA, 77 bp, Homo sapiens
ccttgccttctcttttgaattgatgtctctcattaattgtattaaaagaacatcatcacagtatgaagaaggaggaa

SEQ ID NO: 171384 - DNA, 77 bp, Homo sapiens
tttgaattgatgtctctcattaattgtattaaaagaacatcatcacagtatgaagaaggaggaatgaaaagaaggga

SEQ ID NO: 171385 - DNA, 76 bp, Homo sapiens
gtctctcattaattgtattaaaagaacatcatcacagtatgaagaaggaggaatgaaaagaagggaaatacagaca

SEQ ID NO: 171386 - DNA, 73 bp, Homo sapiens
aattgtattaaaagaacatcatcacagtatgaagaaggaggaatgaaaagaagggaaatacagacacagaaac

SEQ ID NO: 171387 - DNA, 76 bp, Homo sapiens
acatcatcacagtatgaagaaggaggaatgaaaagaagggaaatacagacacagaaaccaaatcatgattaaggct

SEQ ID NO: 171388 - DNA, 72 bp, Homo sapiens
tatgaagaaggaggaatgaaaagaagggaaatacagacacagaaaccaaatcatgattaaggcttccccaaa

SEQ ID NO: 171389 - DNA, 72 bp, Homo sapiens
aggaatgaaaagaagggaaatacagacacagaaaccaaatcatgattaaggcttccccaaaggagtgtatca

SEQ ID NO: 171390 - DNA, 72 bp, Homo sapiens
aaaagaagggaaatacagacacagaaaccaaatcatgattaaggcttccccaaaggagtgtatcatcctaca

SEQ ID NO: 171391 - DNA, 72 bp, Homo sapiens
acagaaaccaaatcatgattaaggcttccccaaaggagtgtatcatcctacagggaattatttcattttctc

SEQ ID NO: 171392 - DNA, 69 bp, Homo sapiens
aaggcttccccaaaggagtgtatcatcctacagggaattatttcattttctctggtctttcaagaaaaa

SEQ ID NO: 171393 - DNA, 65 bp, Homo sapiens
aaaaaaaacaacaactttattttccaacaccttcctgagaactttaagaacaagcctataagcat

SEQ ID NO: 171394 - DNA, 69 bp, Homo sapiens
acaactttattttccaacaccttcctgagaactttaagaacaagcctataagcatttgtaaaaatggca

SEQ ID NO: 171395 - DNA, 71 bp, Homo sapiens
ttttccaacaccttcctgagaactttaagaacaagcctataagcatttgtaaaaatggcaagagtagacat

SEQ ID NO: 171396 - DNA, 71 bp, Homo sapiens
aacaccttcctgagaactttaagaacaagcctataagcatttgtaaaaatggcaagagtagacattgtggg

SEQ ID NO: 171397 - DNA, 76 bp, Homo sapiens
actttaagaacaagcctataagcatttgtaaaaatggcaagagtagacattgtggggtggatgctagcagtgatgt

SEQ ID NO: 171398 - DNA, 78 bp, Homo sapiens
aagaacaagcctataagcatttgtaaaaatggcaagagtagacattgtggggtggatgctagcagtgatgtttccaga

SEQ ID NO: 171399 - DNA, 79 bp, Homo sapiens
taagcatttgtaaaaatggcaagagtagacattgtggggtggatgctagcagtgatgtttccagaacagtggtcaccaa

SEQ ID NO: 171400 - DNA, 77 bp, Homo sapiens
aaaatggcaagagtagacattgtggggtggatgctagcagtgatgtttccagaacagtggtcaccaagggtgagtat

SEQ ID NO: 171401 - DNA, 77 bp, Homo sapiens
aagagtagacattgtggggtggatgctagcagtgatgtttccagaacagtggtcaccaagggtgagtatttcgctcc

SEQ ID NO: 171402 - DNA, 74 bp, Homo sapiens
attgtggggtggatgctagcagtgatgtttccagaacagtggtcaccaagggtgagtatttcgctccccctctt

SEQ ID NO: 171403 - DNA, 75 bp, Homo sapiens
atgctagcagtgatgtttccagaacagtggtcaccaagggtgagtatttcgctccccctctttctacgtagtcag

SEQ ID NO: 171404 - DNA, 74 bp, Homo sapiens
agtgatgtttccagaacagtggtcaccaagggtgagtatttcgctccccctctttctacgtagtcagtcagtca

SEQ ID NO: 171405 - DNA, 73 bp, Homo sapiens
tcaccaagggtgagtatttcgctccccctctttctacgtagtcagtcagtcagtcacagaacttaaaatctct

SEQ ID NO: 171406 - DNA, 71 bp, Homo sapiens
aagggtgagtatttcgctccccctctttctacgtagtcagtcagtcagtcacagaacttaaaatctcttcc

SEQ ID NO: 171407 - DNA, 72 bp, Homo sapiens
atttcgctccccctctttctacgtagtcagtcagtcagtcacagaacttaaaatctcttcccaaccactaga

SEQ ID NO: 171408 - DNA, 77 bp, Homo sapiens
tctttctacgtagtcagtcagtcagtcacagaacttaaaatctcttcccaaccactagagtgccaaccagtatcaca

SEQ ID NO: 171409 - DNA, 77 bp, Homo sapiens
gtcagtcagtcagtcacagaacttaaaatctcttcccaaccactagagtgccaaccagtatcacacaacatttgtgt

SEQ ID NO: 171410 - DNA, 78 bp, Homo sapiens
tcagtcacagaacttaaaatctcttcccaaccactagagtgccaaccagtatcacacaacatttgtgttgactctcaa

SEQ ID NO: 171411 - DNA, 72 bp, Homo sapiens
acttaaaatctcttcccaaccactagagtgccaaccagtatcacacaacatttgtgttgactctcaactttt

SEQ ID NO: 171412 - DNA, 75 bp, Homo sapiens
aaatctcttcccaaccactagagtgccaaccagtatcacacaacatttgtgttgactctcaactttttcttagca

SEQ ID NO: 171413 - DNA, 77 bp, Homo sapiens
aaccactagagtgccaaccagtatcacacaacatttgtgttgactctcaactttttcttagcagtggatccttatgc

SEQ ID NO: 171414 - DNA, 77 bp, Homo sapiens
agtgccaaccagtatcacacaacatttgtgttgactctcaactttttcttagcagtggatccttatgccctggtgct

SEQ ID NO: 171415 - DNA, 79 bp, Homo sapiens
agtatcacacaacatttgtgttgactctcaactttttcttagcagtggatccttatgccctggtgcttctgcacaagtc

SEQ ID NO: 171416 - DNA, 75 bp, Homo sapiens
aactttttcttagcagtggatccttatgccctggtgcttctgcacaagtccactatccactaaacctggaacaga

SEQ ID NO: 171417 - DNA, 81 bp, Homo sapiens
agtggatccttatgccctggtgcttctgcacaagtccactatccactaaacctggaacagagctggctacaggagacatga

SEQ ID NO: 171418 - DNA, 81 bp, Homo sapiens
tccttatgccctggtgcttctgcacaagtccactatccactaaacctggaacagagctggctacaggagacatgaactctc

SEQ ID NO: 171419 - DNA, 77 bp, Homo sapiens
acaagtccactatccactaaacctggaacagagctggctacaggagacatgaactctctcccataattcagggcttc

SEQ ID NO: 171420 - DNA, 76 bp, Homo sapiens
taaacctggaacagagctggctacaggagacatgaactctctcccataattcagggcttccttgaattttcaaata

SEQ ID NO: 171421 - DNA, 74 bp, Homo sapiens
aggagacatgaactctctcccataattcagggcttccttgaattttcaaatattgcagactttaagaagtctct

SEQ ID NO: 171422 - DNA, 74 bp, Homo sapiens
ccataattcagggcttccttgaattttcaaatattgcagactttaagaagtctcttgccaaatggcaatacatt

SEQ ID NO: 171423 - DNA, 73 bp, Homo sapiens
cagggcttccttgaattttcaaatattgcagactttaagaagtctcttgccaaatggcaatacatttagttta

SEQ ID NO: 171424 - DNA, 74 bp, Homo sapiens
cttgaattttcaaatattgcagactttaagaagtctcttgccaaatggcaatacatttagtttatatttgctgt

SEQ ID NO: 171425 - DNA, 73 bp, Homo sapiens
caaatattgcagactttaagaagtctcttgccaaatggcaatacatttagtttatatttgctgttttcctaaa

SEQ ID NO: 171426 - DNA, 72 bp, Homo sapiens
ttaagaagtctcttgccaaatggcaatacatttagtttatatttgctgttttcctaaattaagatatcacct

SEQ ID NO: 171427 - DNA, 70 bp, Homo sapiens
aagtctcttgccaaatggcaatacatttagtttatatttgctgttttcctaaattaagatatcacctttt

SEQ ID NO: 171428 - DNA, 72 bp, Homo sapiens
tggcaatacatttagtttatatttgctgttttcctaaattaagatatcaccttttttcttaatgtgtctatg

SEQ ID NO: 171429 - DNA, 70 bp, Homo sapiens
tttagtttatatttgctgttttcctaaattaagatatcaccttttttcttaatgtgtctatggaatgaac

SEQ ID NO: 171430 - DNA, 72 bp, Homo sapiens
atttgctgttttcctaaattaagatatcaccttttttcttaatgtgtctatggaatgaactctgcttaggaa

SEQ ID NO: 171431 - DNA, 74 bp, Homo sapiens
ttcctaaattaagatatcaccttttttcttaatgtgtctatggaatgaactctgcttaggaagtgacatttgcc

SEQ ID NO: 171432 - DNA, 73 bp, Homo sapiens
attaagatatcaccttttttcttaatgtgtctatggaatgaactctgcttaggaagtgacatttgcctaaaag

SEQ ID NO: 171433 - DNA, 70 bp, Homo sapiens
atcaccttttttcttaatgtgtctatggaatgaactctgcttaggaagtgacatttgcctaaaagttttt

SEQ ID NO: 171434 - DNA, 71 bp, Homo sapiens
ttcttaatgtgtctatggaatgaactctgcttaggaagtgacatttgcctaaaagttttttaaaaatccaa

SEQ ID NO: 171435 - DNA, 68 bp, Homo sapiens
ttttttaaaaatccaaatacatcagaagaaataataaactgaaaggcagttttttgcctatttagtca

SEQ ID NO: 171436 - DNA, 71 bp, Homo sapiens
atccaaatacatcagaagaaataataaactgaaaggcagttttttgcctatttagtcaacaaactgtttca

SEQ ID NO: 171437 - DNA, 69 bp, Homo sapiens
ataataaactgaaaggcagttttttgcctatttagtcaacaaactgtttcagaaaacaccatctcctcg

SEQ ID NO: 171438 - DNA, 70 bp, Homo sapiens
ctgaaaggcagttttttgcctatttagtcaacaaactgtttcagaaaacaccatctcctcgttacaataa

SEQ ID NO: 171439 - DNA, 72 bp, Homo sapiens
tttttgcctatttagtcaacaaactgtttcagaaaacaccatctcctcgttacaataaacacagaaatcatg

SEQ ID NO: 171440 - DNA, 73 bp, Homo sapiens
cctatttagtcaacaaactgtttcagaaaacaccatctcctcgttacaataaacacagaaatcatggcatagt

SEQ ID NO: 171441 - DNA, 72 bp, Homo sapiens
caacaaactgtttcagaaaacaccatctcctcgttacaataaacacagaaatcatggcatagtttttactct

SEQ ID NO: 171442 - DNA, 72 bp, Homo sapiens
cagaaaacaccatctcctcgttacaataaacacagaaatcatggcatagtttttactctttaactccaagta

SEQ ID NO: 171443 - DNA, 76 bp, Homo sapiens
catctcctcgttacaataaacacagaaatcatggcatagtttttactctttaactccaagtattgctcagcttata

SEQ ID NO: 171444 - DNA, 75 bp, Homo sapiens
ctcgttacaataaacacagaaatcatggcatagtttttactctttaactccaagtattgctcagcttataacaga

SEQ ID NO: 171445 - DNA, 80 bp, Homo sapiens
cacagaaatcatggcatagtttttactctttaactccaagtattgctcagcttataacagatgtattatgaaacatggca

SEQ ID NO: 171446 - DNA, 80 bp, Homo sapiens
atcatggcatagtttttactctttaactccaagtattgctcagcttataacagatgtattatgaaacatggcaagaagca

SEQ ID NO: 171447 - DNA, 79 bp, Homo sapiens
ttttactctttaactccaagtattgctcagcttataacagatgtattatgaaacatggcaagaagcactgcaacaagaa

SEQ ID NO: 171448 - DNA, 77 bp, Homo sapiens
aagtattgctcagcttataacagatgtattatgaaacatggcaagaagcactgcaacaagaagagggtgaaaaaatt

SEQ ID NO: 171449 - DNA, 77 bp, Homo sapiens
ttataacagatgtattatgaaacatggcaagaagcactgcaacaagaagagggtgaaaaaatttggtacttgatcat

SEQ ID NO: 171450 - DNA, 78 bp, Homo sapiens
agatgtattatgaaacatggcaagaagcactgcaacaagaagagggtgaaaaaatttggtacttgatcatttgatata

SEQ ID NO: 171451 - DNA, 78 bp, Homo sapiens
tatgaaacatggcaagaagcactgcaacaagaagagggtgaaaaaatttggtacttgatcatttgatatattcagacc

SEQ ID NO: 171452 - DNA, 75 bp, Homo sapiens
agaagcactgcaacaagaagagggtgaaaaaatttggtacttgatcatttgatatattcagacccaaaactatca

SEQ ID NO: 171453 - DNA, 72 bp, Homo sapiens
gcaacaagaagagggtgaaaaaatttggtacttgatcatttgatatattcagacccaaaactatcaaacagg

SEQ ID NO: 171454 - DNA, 70 bp, Homo sapiens
aaaaatttggtacttgatcatttgatatattcagacccaaaactatcaaacagggttcccaccaccagat

SEQ ID NO: 171455 - DNA, 74 bp, Homo sapiens
tacttgatcatttgatatattcagacccaaaactatcaaacagggttcccaccaccagattgatccccacccaa

SEQ ID NO: 171456 - DNA, 71 bp, Homo sapiens
atttgatatattcagacccaaaactatcaaacagggttcccaccaccagattgatccccacccaatcccca

SEQ ID NO: 171457 - DNA, 67 bp, Homo sapiens
acccaaaactatcaaacagggttcccaccaccagattgatccccacccaatccccacacccaaagat

SEQ ID NO: 171458 - DNA, 68 bp, Homo sapiens
aaactatcaaacagggttcccaccaccagattgatccccacccaatccccacacccaaagatttcaaa

SEQ ID NO: 171459 - DNA, 68 bp, Homo sapiens
gttcccaccaccagattgatccccacccaatccccacacccaaagatttcaaagacaaatgtttaaaa

SEQ ID NO: 171460 - DNA, 70 bp, Homo sapiens
accagattgatccccacccaatccccacacccaaagatttcaaagacaaatgtttaaaacatacaataga

SEQ ID NO: 171461 - DNA, 71 bp, Homo sapiens
ttgatccccacccaatccccacacccaaagatttcaaagacaaatgtttaaaacatacaatagaacaggca

SEQ ID NO: 171462 - DNA, 70 bp, Homo sapiens
aatccccacacccaaagatttcaaagacaaatgtttaaaacatacaatagaacaggcactagaagaagga

SEQ ID NO: 171463 - DNA, 65 bp, Homo sapiens
gaaaaaagaaaatctttacaattataatttattggaaaaaatagattgatttttctggtacgtaa

SEQ ID NO: 171464 - DNA, 68 bp, Homo sapiens
gaaaatctttacaattataatttattggaaaaaatagattgatttttctggtacgtaagtaaattgca

SEQ ID NO: 171465 - DNA, 68 bp, Homo sapiens
caattataatttattggaaaaaatagattgatttttctggtacgtaagtaaattgcaaaatcaaaata

SEQ ID NO: 171466 - DNA, 71 bp, Homo sapiens
tagattgatttttctggtacgtaagtaaattgcaaaatcaaaatatttgtctgttccttaccttgacaata

SEQ ID NO: 171467 - DNA, 70 bp, Homo sapiens
gatttttctggtacgtaagtaaattgcaaaatcaaaatatttgtctgttccttaccttgacaatattcaa

SEQ ID NO: 171468 - DNA, 68 bp, Homo sapiens
ggtacgtaagtaaattgcaaaatcaaaatatttgtctgttccttaccttgacaatattcaaagttccc

SEQ ID NO: 171469 - DNA, 70 bp, Homo sapiens
tgcaaaatcaaaatatttgtctgttccttaccttgacaatattcaaagttcccttttttccggcagtcac

SEQ ID NO: 171470 - DNA, 67 bp, Homo sapiens
aaatatttgtctgttccttaccttgacaatattcaaagttcccttttttccggcagtcacctattac

SEQ ID NO: 171471 - DNA, 67 bp, Homo sapiens
tttgtctgttccttaccttgacaatattcaaagttcccttttttccggcagtcacctattactaaac

SEQ ID NO: 171472 - DNA, 70 bp, Homo sapiens
cttaccttgacaatattcaaagttcccttttttccggcagtcacctattactaaactcagtgctctccaa

SEQ ID NO: 171473 - DNA, 76 bp, Homo sapiens
ttttccggcagtcacctattactaaactcagtgctctccaagtgtttcttttgacagatatcattctccaccaatc

SEQ ID NO: 171474 - DNA, 77 bp, Homo sapiens
acctattactaaactcagtgctctccaagtgtttcttttgacagatatcattctccaccaatcgctctgctaatttc

SEQ ID NO: 171475 - DNA, 78 bp, Homo sapiens
taaactcagtgctctccaagtgtttcttttgacagatatcattctccaccaatcgctctgctaatttcctctctcctt

SEQ ID NO: 171476 - DNA, 79 bp, Homo sapiens
ttcttttgacagatatcattctccaccaatcgctctgctaatttcctctctccttttctgactgggacagagattatgt

SEQ ID NO: 171477 - DNA, 80 bp, Homo sapiens
attctccaccaatcgctctgctaatttcctctctccttttctgactgggacagagattatgttcaccagcccagagatca

SEQ ID NO: 171478 - DNA, 79 bp, Homo sapiens
atcgctctgctaatttcctctctccttttctgactgggacagagattatgttcaccagcccagagatcaatcttttcta

SEQ ID NO: 171479 - DNA, 78 bp, Homo sapiens
taatttcctctctccttttctgactgggacagagattatgttcaccagcccagagatcaatcttttctattgacaaca

SEQ ID NO: 171480 - DNA, 76 bp, Homo sapiens
tccttttctgactgggacagagattatgttcaccagcccagagatcaatcttttctattgacaacaacaaagggaa

SEQ ID NO: 171481 - DNA, 75 bp, Homo sapiens
ttctgactgggacagagattatgttcaccagcccagagatcaatcttttctattgacaacaacaaagggaaaaaa

SEQ ID NO: 171482 - DNA, 77 bp, Homo sapiens
acagagattatgttcaccagcccagagatcaatcttttctattgacaacaacaaagggaaaaaaaatgcatatatca

SEQ ID NO: 171483 - DNA, 75 bp, Homo sapiens
atgttcaccagcccagagatcaatcttttctattgacaacaacaaagggaaaaaaaatgcatatatcacaaccag

SEQ ID NO: 171484 - DNA, 76 bp, Homo sapiens
cccagagatcaatcttttctattgacaacaacaaagggaaaaaaaatgcatatatcacaaccagtctgaagtatca

SEQ ID NO: 171485 - DNA, 75 bp, Homo sapiens
tcttttctattgacaacaacaaagggaaaaaaaatgcatatatcacaaccagtctgaagtatcatacccatctgt

SEQ ID NO: 171486 - DNA, 78 bp, Homo sapiens
tgacaacaacaaagggaaaaaaaatgcatatatcacaaccagtctgaagtatcatacccatctgtttacatgataaca

SEQ ID NO: 171487 - DNA, 76 bp, Homo sapiens
agggaaaaaaaatgcatatatcacaaccagtctgaagtatcatacccatctgtttacatgataacactaggccagt

SEQ ID NO: 171488 - DNA, 78 bp, Homo sapiens
aaatgcatatatcacaaccagtctgaagtatcatacccatctgtttacatgataacactaggccagttttgttatgtt

SEQ ID NO: 171489 - DNA, 76 bp, Homo sapiens
atatatcacaaccagtctgaagtatcatacccatctgtttacatgataacactaggccagttttgttatgttttgt

SEQ ID NO: 171490 - DNA, 72 bp, Homo sapiens
accagtctgaagtatcatacccatctgtttacatgataacactaggccagttttgttatgttttgtttaaaa

SEQ ID NO: 171491 - DNA, 75 bp, Homo sapiens
cagatacaagctcttctaaattttagaagaatccaaaacaatccccattgtctcagttcctatcatgatgttttc

SEQ ID NO: 171492 - DNA, 73 bp, Homo sapiens
gctcttctaaattttagaagaatccaaaacaatccccattgtctcagttcctatcatgatgttttctaaagga

SEQ ID NO: 171493 - DNA, 72 bp, Homo sapiens
ttagaagaatccaaaacaatccccattgtctcagttcctatcatgatgttttctaaaggactcttaattttc

SEQ ID NO: 171494 - DNA, 75 bp, Homo sapiens
atccaaaacaatccccattgtctcagttcctatcatgatgttttctaaaggactcttaattttccaatcatctga

SEQ ID NO: 171495 - DNA, 80 bp, Homo sapiens
ttgtctcagttcctatcatgatgttttctaaaggactcttaattttccaatcatctgactcaaagctggatacattctca

SEQ ID NO: 171496 - DNA, 78 bp, Homo sapiens
tcctatcatgatgttttctaaaggactcttaattttccaatcatctgactcaaagctggatacattctcaccctgaaa

SEQ ID NO: 171497 - DNA, 74 bp, Homo sapiens
ttttctaaaggactcttaattttccaatcatctgactcaaagctggatacattctcaccctgaaagctcttctt

SEQ ID NO: 171498 - DNA, 74 bp, Homo sapiens
aaggactcttaattttccaatcatctgactcaaagctggatacattctcaccctgaaagctcttcttttcttaa

SEQ ID NO: 171499 - DNA, 74 bp, Homo sapiens
tcttaattttccaatcatctgactcaaagctggatacattctcaccctgaaagctcttcttttcttaaattggt

SEQ ID NO: 171500 - DNA, 72 bp, Homo sapiens
aattttccaatcatctgactcaaagctggatacattctcaccctgaaagctcttcttttcttaaattggttt

SEQ ID NO: 171501 - DNA, 75 bp, Homo sapiens
tccaatcatctgactcaaagctggatacattctcaccctgaaagctcttcttttcttaaattggttttaaagata

SEQ ID NO: 171502 - DNA, 77 bp, Homo sapiens
tgactcaaagctggatacattctcaccctgaaagctcttcttttcttaaattggttttaaagatatgcacatcaata

SEQ ID NO: 171503 - DNA, 76 bp, Homo sapiens
gactcaaagctggatacattctcaccctgaaagctcttcttttcttaaattggttttaaagatatgcacatcaata

SEQ ID NO: 171504 - DNA, 74 bp, Homo sapiens
gctggatacattctcaccctgaaagctcttcttttcttaaattggttttaaagatatgcacatcaataccctaa

SEQ ID NO: 171505 - DNA, 73 bp, Homo sapiens
ggatacattctcaccctgaaagctcttcttttcttaaattggttttaaagatatgcacatcaataccctaaga

SEQ ID NO: 171506 - DNA, 73 bp, Homo sapiens
cattctcaccctgaaagctcttcttttcttaaattggttttaaagatatgcacatcaataccctaagagaatg

SEQ ID NO: 171507 - DNA, 71 bp, Homo sapiens
gctcttcttttcttaaattggttttaaagatatgcacatcaataccctaagagaatgttacattttacctg

SEQ ID NO: 171508 - DNA, 70 bp, Homo sapiens
ttcttaaattggttttaaagatatgcacatcaataccctaagagaatgttacattttacctgtttcaaaa

SEQ ID NO: 171509 - DNA, 69 bp, Homo sapiens
ttggttttaaagatatgcacatcaataccctaagagaatgttacattttacctgtttcaaaaaaataaa

SEQ ID NO: 171510 - DNA, 69 bp, Homo sapiens
aaaaataaataatctgtcagatattatgttttctttagaaaacaatttagacattattatttatggaat

SEQ ID NO: 171511 - DNA, 72 bp, Homo sapiens
taatctgtcagatattatgttttctttagaaaacaatttagacattattatttatggaattttacacacaag

SEQ ID NO: 171512 - DNA, 69 bp, Homo sapiens
gatattatgttttctttagaaaacaatttagacattattatttatggaattttacacacaagttaatcc

SEQ ID NO: 171513 - DNA, 68 bp, Homo sapiens
gttttctttagaaaacaatttagacattattatttatggaattttacacacaagttaatcctgtttca

SEQ ID NO: 171514 - DNA, 67 bp, Homo sapiens
aacaatttagacattattatttatggaattttacacacaagttaatcctgtttcaaaacaaagtggt

SEQ ID NO: 171515 - DNA, 69 bp, Homo sapiens
gacattattatttatggaattttacacacaagttaatcctgtttcaaaacaaagtggtttgtttcatta

SEQ ID NO: 171516 - DNA, 67 bp, Homo sapiens
atttatggaattttacacacaagttaatcctgtttcaaaacaaagtggtttgtttcattattcaaat

SEQ ID NO: 171517 - DNA, 67 bp, Homo sapiens
atggaattttacacacaagttaatcctgtttcaaaacaaagtggtttgtttcattattcaaattttg

SEQ ID NO: 171518 - DNA, 68 bp, Homo sapiens
ttacacacaagttaatcctgtttcaaaacaaagtggtttgtttcattattcaaattttgtttcgctgt

SEQ ID NO: 171519 - DNA, 70 bp, Homo sapiens
cacacaagttaatcctgtttcaaaacaaagtggtttgtttcattattcaaattttgtttcgctgttctga

SEQ ID NO: 171520 - DNA, 69 bp, Homo sapiens
cacaagttaatcctgtttcaaaacaaagtggtttgtttcattattcaaattttgtttcgctgttctgaa

SEQ ID NO: 171521 - DNA, 69 bp, Homo sapiens
taatcctgtttcaaaacaaagtggtttgtttcattattcaaattttgtttcgctgttctgaaatttcag

SEQ ID NO: 171522 - DNA, 70 bp, Homo sapiens
gtttcaaaacaaagtggtttgtttcattattcaaattttgtttcgctgttctgaaatttcagtattgcca

SEQ ID NO: 171523 - DNA, 71 bp, Homo sapiens
ttcaaaacaaagtggtttgtttcattattcaaattttgtttcgctgttctgaaatttcagtattgccatta

SEQ ID NO: 171524 - DNA, 74 bp, Homo sapiens
caaagtggtttgtttcattattcaaattttgtttcgctgttctgaaatttcagtattgccattattagcacaca

SEQ ID NO: 171525 - DNA, 74 bp, Homo sapiens
gtggtttgtttcattattcaaattttgtttcgctgttctgaaatttcagtattgccattattagcacacatagt

SEQ ID NO: 171526 - DNA, 74 bp, Homo sapiens
gtttgtttcattattcaaattttgtttcgctgttctgaaatttcagtattgccattattagcacacatagttta

SEQ ID NO: 171527 - DNA, 73 bp, Homo sapiens
ttattcaaattttgtttcgctgttctgaaatttcagtattgccattattagcacacatagtttaaaacaacag

SEQ ID NO: 171528 - DNA, 74 bp, Homo sapiens
caaattttgtttcgctgttctgaaatttcagtattgccattattagcacacatagtttaaaacaacagtgaaga

SEQ ID NO: 171529 - DNA, 77 bp, Homo sapiens
tcgctgttctgaaatttcagtattgccattattagcacacatagtttaaaacaacagtgaagaataatccttatgta

SEQ ID NO: 171530 - DNA, 74 bp, Homo sapiens
aatttcagtattgccattattagcacacatagtttaaaacaacagtgaagaataatccttatgtaatagaatag

SEQ ID NO: 171531 - DNA, 73 bp, Homo sapiens
gtattgccattattagcacacatagtttaaaacaacagtgaagaataatccttatgtaatagaatagttaaaa

SEQ ID NO: 171532 - DNA, 71 bp, Homo sapiens
tattagcacacatagtttaaaacaacagtgaagaataatccttatgtaatagaatagttaaaaaatattaa

SEQ ID NO: 171533 - DNA, 69 bp, Homo sapiens
catagtttaaaacaacagtgaagaataatccttatgtaatagaatagttaaaaaatattaatgaaacaa

SEQ ID NO: 171534 - DNA, 69 bp, Homo sapiens
cttatgtaatagaatagttaaaaaatattaatgaaacaaatattgttgaattattttaccaaatcaaca

SEQ ID NO: 171535 - DNA, 67 bp, Homo sapiens
atattaatgaaacaaatattgttgaattattttaccaaatcaacaaacttctacaccttttcttcct

SEQ ID NO: 171536 - DNA, 66 bp, Homo sapiens
tattgttgaattattttaccaaatcaacaaacttctacaccttttcttccttttaataatataaat

SEQ ID NO: 171537 - DNA, 65 bp, Homo sapiens
ttaccaaatcaacaaacttctacaccttttcttccttttaataatataaattttctcatttttcc

SEQ ID NO: 171538 - DNA, 69 bp, Homo sapiens
tcaacaaacttctacaccttttcttccttttaataatataaattttctcatttttcctgctatatttga

SEQ ID NO: 171539 - DNA, 67 bp, Homo sapiens
acttctacaccttttcttccttttaataatataaattttctcatttttcctgctatatttgacaaac

SEQ ID NO: 171540 - DNA, 70 bp, Homo sapiens
cttccttttaataatataaattttctcatttttcctgctatatttgacaaacttagaatttgttcattca

SEQ ID NO: 171541 - DNA, 72 bp, Homo sapiens
ataatataaattttctcatttttcctgctatatttgacaaacttagaatttgttcattcacaatatttattg

SEQ ID NO: 171542 - DNA, 74 bp, Homo sapiens
ttttctcatttttcctgctatatttgacaaacttagaatttgttcattcacaatatttattgtctattcctcac

SEQ ID NO: 171543 - DNA, 76 bp, Homo sapiens
tttcctgctatatttgacaaacttagaatttgttcattcacaatatttattgtctattcctcacctactatgatta

SEQ ID NO: 171544 - DNA, 75 bp, Homo sapiens
tatttgacaaacttagaatttgttcattcacaatatttattgtctattcctcacctactatgattaaaaatgaga

SEQ ID NO: 171545 - DNA, 74 bp, Homo sapiens
gacaaacttagaatttgttcattcacaatatttattgtctattcctcacctactatgattaaaaatgagaccac

SEQ ID NO: 171546 - DNA, 76 bp, Homo sapiens
cacaatatttattgtctattcctcacctactatgattaaaaatgagaccactactatcactactatgaatagaaaa

SEQ ID NO: 171547 - DNA, 77 bp, Homo sapiens
ttgtctattcctcacctactatgattaaaaatgagaccactactatcactactatgaatagaaaaagtattgctatg

SEQ ID NO: 171548 - DNA, 75 bp, Homo sapiens
cctcacctactatgattaaaaatgagaccactactatcactactatgaatagaaaaagtattgctatgtaattct

SEQ ID NO: 171549 - DNA, 75 bp, Homo sapiens
tgattaaaaatgagaccactactatcactactatgaatagaaaaagtattgctatgtaattcttacaaactagga

SEQ ID NO: 171550 - DNA, 74 bp, Homo sapiens
tgagaccactactatcactactatgaatagaaaaagtattgctatgtaattcttacaaactaggaaatataagg

SEQ ID NO: 171551 - DNA, 74 bp, Homo sapiens
actatcactactatgaatagaaaaagtattgctatgtaattcttacaaactaggaaatataagggtccagcaca

SEQ ID NO: 171552 - DNA, 73 bp, Homo sapiens
agaaaaagtattgctatgtaattcttacaaactaggaaatataagggtccagcacaatcatacacatataagg

SEQ ID NO: 171553 - DNA, 76 bp, Homo sapiens
ttgctatgtaattcttacaaactaggaaatataagggtccagcacaatcatacacatataaggtaggaactcaaca

SEQ ID NO: 171554 - DNA, 75 bp, Homo sapiens
gtaattcttacaaactaggaaatataagggtccagcacaatcatacacatataaggtaggaactcaacaaatgca

SEQ ID NO: 171555 - DNA, 73 bp, Homo sapiens
aactaggaaatataagggtccagcacaatcatacacatataaggtaggaactcaacaaatgcaagggaagaaa

SEQ ID NO: 171556 - DNA, 74 bp, Homo sapiens
aatataagggtccagcacaatcatacacatataaggtaggaactcaacaaatgcaagggaagaaagatttctaa

SEQ ID NO: 171557 - DNA, 75 bp, Homo sapiens
agcacaatcatacacatataaggtaggaactcaacaaatgcaagggaagaaagatttctaaaagcagtctcaaaa

SEQ ID NO: 171558 - DNA, 71 bp, Homo sapiens
cacatataaggtaggaactcaacaaatgcaagggaagaaagatttctaaaagcagtctcaaaaggaattac

SEQ ID NO: 171559 - DNA, 71 bp, Homo sapiens
gtaggaactcaacaaatgcaagggaagaaagatttctaaaagcagtctcaaaaggaattactaaggctgta

SEQ ID NO: 171560 - DNA, 71 bp, Homo sapiens
aactcaacaaatgcaagggaagaaagatttctaaaagcagtctcaaaaggaattactaaggctgtagctat

SEQ ID NO: 171561 - DNA, 71 bp, Homo sapiens
atgcaagggaagaaagatttctaaaagcagtctcaaaaggaattactaaggctgtagctattattttttga

SEQ ID NO: 171562 - DNA, 69 bp, Homo sapiens
ttattttttgagaccaaattacttcctagaaattaaaatcggtgaacatattctgatgtaaataaaaca

SEQ ID NO: 171563 - DNA, 71 bp, Homo sapiens
ttgagaccaaattacttcctagaaattaaaatcggtgaacatattctgatgtaaataaaacaagcaggttc

SEQ ID NO: 171564 - DNA, 68 bp, Homo sapiens
attacttcctagaaattaaaatcggtgaacatattctgatgtaaataaaacaagcaggttctattttt

SEQ ID NO: 171565 - DNA, 67 bp, Homo sapiens
ctagaaattaaaatcggtgaacatattctgatgtaaataaaacaagcaggttctattttttaaaaaa

SEQ ID NO: 171566 - DNA, 75 bp, Homo sapiens
ttttttaaaaaatcaatgtagtttatgtgccacattatgattcttttgtgatgcaatcagttgtttcttgctctt

SEQ ID NO: 171567 - DNA, 76 bp, Homo sapiens
aatcaatgtagtttatgtgccacattatgattcttttgtgatgcaatcagttgtttcttgctctttaaggtttaaa

SEQ ID NO: 171568 - DNA, 74 bp, Homo sapiens
atgtagtttatgtgccacattatgattcttttgtgatgcaatcagttgtttcttgctctttaaggtttaaaaat

SEQ ID NO: 171569 - DNA, 73 bp, Homo sapiens
gtttatgtgccacattatgattcttttgtgatgcaatcagttgtttcttgctctttaaggtttaaaaattaaa

SEQ ID NO: 171570 - DNA, 70 bp, Homo sapiens
gattcttttgtgatgcaatcagttgtttcttgctctttaaggtttaaaaattaaataagtactgattaat

SEQ ID NO: 171571 - DNA, 70 bp, Homo sapiens
tcttttgtgatgcaatcagttgtttcttgctctttaaggtttaaaaattaaataagtactgattaattaa

SEQ ID NO: 171572 - DNA, 71 bp, Homo sapiens
tgtgatgcaatcagttgtttcttgctctttaaggtttaaaaattaaataagtactgattaattaaaataca

SEQ ID NO: 171573 - DNA, 68 bp, Homo sapiens
atgcaatcagttgtttcttgctctttaaggtttaaaaattaaataagtactgattaattaaaatacat

SEQ ID NO: 171574 - DNA, 66 bp, Homo sapiens
atcagttgtttcttgctctttaaggtttaaaaattaaataagtactgattaattaaaatacattac

SEQ ID NO: 171575 - DNA, 67 bp, Homo sapiens
ttcttgctctttaaggtttaaaaattaaataagtactgattaattaaaatacattactagatatttc

SEQ ID NO: 171576 - DNA, 66 bp, Homo sapiens
taaggtttaaaaattaaataagtactgattaattaaaatacattactagatatttcttagttggga

SEQ ID NO: 171577 - DNA, 70 bp, Homo sapiens
aaattaaataagtactgattaattaaaatacattactagatatttcttagttgggaattgccttgcagta

SEQ ID NO: 171578 - DNA, 73 bp, Homo sapiens
aagtactgattaattaaaatacattactagatatttcttagttgggaattgccttgcagtaagcaaagatcat

SEQ ID NO: 171579 - DNA, 77 bp, Homo sapiens
aatacattactagatatttcttagttgggaattgccttgcagtaagcaaagatcattaaagacaatcagctggatct

SEQ ID NO: 171580 - DNA, 76 bp, Homo sapiens
atatttcttagttgggaattgccttgcagtaagcaaagatcattaaagacaatcagctggatcttggaaacattta

SEQ ID NO: 171581 - DNA, 77 bp, Homo sapiens
ttgggaattgccttgcagtaagcaaagatcattaaagacaatcagctggatcttggaaacatttagcttactataaa

SEQ ID NO: 171582 - DNA, 74 bp, Homo sapiens
cagtaagcaaagatcattaaagacaatcagctggatcttggaaacatttagcttactataaatactaacaattt

SEQ ID NO: 171583 - DNA, 73 bp, Homo sapiens
agatcattaaagacaatcagctggatcttggaaacatttagcttactataaatactaacaattttattaacaa

SEQ ID NO: 171584 - DNA, 74 bp, Homo sapiens
agacaatcagctggatcttggaaacatttagcttactataaatactaacaattttattaacaaatgataaagca

SEQ ID NO: 171585 - DNA, 69 bp, Homo sapiens
ctggatcttggaaacatttagcttactataaatactaacaattttattaacaaatgataaagcaaaaaa

SEQ ID NO: 171586 - DNA, 70 bp, Homo sapiens
gaaacatttagcttactataaatactaacaattttattaacaaatgataaagcaaaaaatttcaatgcta

SEQ ID NO: 171587 - DNA, 71 bp, Homo sapiens
gcttactataaatactaacaattttattaacaaatgataaagcaaaaaatttcaatgctataaccaagata

SEQ ID NO: 171588 - DNA, 72 bp, Homo sapiens
atactaacaattttattaacaaatgataaagcaaaaaatttcaatgctataaccaagatacataaatatatg

SEQ ID NO: 171589 - DNA, 74 bp, Homo sapiens
tattaacaaatgataaagcaaaaaatttcaatgctataaccaagatacataaatatatgtacacgtataggttg

SEQ ID NO: 171590 - DNA, 75 bp, Homo sapiens
gataaagcaaaaaatttcaatgctataaccaagatacataaatatatgtacacgtataggttgtgtaagtactca

SEQ ID NO: 171591 - DNA, 74 bp, Homo sapiens
aaaatttcaatgctataaccaagatacataaatatatgtacacgtataggttgtgtaagtactcaaatagtgga

SEQ ID NO: 171592 - DNA, 75 bp, Homo sapiens
ttcaatgctataaccaagatacataaatatatgtacacgtataggttgtgtaagtactcaaatagtggagtgggg

SEQ ID NO: 171593 - DNA, 74 bp, Homo sapiens
taaccaagatacataaatatatgtacacgtataggttgtgtaagtactcaaatagtggagtgggggagggtgca

SEQ ID NO: 171594 - DNA, 73 bp, Homo sapiens
acataaatatatgtacacgtataggttgtgtaagtactcaaatagtggagtgggggagggtgcacacagcggg

SEQ ID NO: 171595 - DNA, 73 bp, Homo sapiens
tgtacacgtataggttgtgtaagtactcaaatagtggagtgggggagggtgcacacagcggggaagactgaaa

SEQ ID NO: 171596 - DNA, 71 bp, Homo sapiens
ataggttgtgtaagtactcaaatagtggagtgggggagggtgcacacagcggggaagactgaaagtaaata

SEQ ID NO: 171597 - DNA, 74 bp, Homo sapiens
aatagtggagtgggggagggtgcacacagcggggaagactgaaagtaaatacatctagatgttaaatatgatta

SEQ ID NO: 171598 - DNA, 78 bp, Homo sapiens
gagggtgcacacagcggggaagactgaaagtaaatacatctagatgttaaatatgattatttctggaagatggcaatg

SEQ ID NO: 171599 - DNA, 79 bp, Homo sapiens
gaagactgaaagtaaatacatctagatgttaaatatgattatttctggaagatggcaatgtgagtaacttttctgcaca

SEQ ID NO: 171600 - DNA, 78 bp, Homo sapiens
gaaagtaaatacatctagatgttaaatatgattatttctggaagatggcaatgtgagtaacttttctgcacaattctg

SEQ ID NO: 171601 - DNA, 79 bp, Homo sapiens
catctagatgttaaatatgattatttctggaagatggcaatgtgagtaacttttctgcacaattctgttatttccaatg

SEQ ID NO: 171602 - DNA, 77 bp, Homo sapiens
atatgattatttctggaagatggcaatgtgagtaacttttctgcacaattctgttatttccaatgtttctgtacaaa

SEQ ID NO: 171603 - DNA, 74 bp, Homo sapiens
ttctggaagatggcaatgtgagtaacttttctgcacaattctgttatttccaatgtttctgtacaaaggtaaaa

SEQ ID NO: 171604 - DNA, 70 bp, Homo sapiens
atgtgagtaacttttctgcacaattctgttatttccaatgtttctgtacaaaggtaaaaaacattttata

SEQ ID NO: 171605 - DNA, 70 bp, Homo sapiens
ctgcacaattctgttatttccaatgtttctgtacaaaggtaaaaaacattttatataggctaaacaaata

SEQ ID NO: 171606 - DNA, 67 bp, Homo sapiens
ctgttatttccaatgtttctgtacaaaggtaaaaaacattttatataggctaaacaaatattgggaa

SEQ ID NO: 171607 - DNA, 65 bp, Homo sapiens
ctgtacaaaggtaaaaaacattttatataggctaaacaaatattgggaaaaaagaaaatgtatac

SEQ ID NO: 171608 - DNA, 66 bp, Homo sapiens
ggtaaaaaacattttatataggctaaacaaatattgggaaaaaagaaaatgtatactcttcttaga

SEQ ID NO: 171609 - DNA, 72 bp, Homo sapiens
cattttatataggctaaacaaatattgggaaaaaagaaaatgtatactcttcttagattcaatcataatata

SEQ ID NO: 171610 - DNA, 73 bp, Homo sapiens
taggctaaacaaatattgggaaaaaagaaaatgtatactcttcttagattcaatcataatatatattttgtgc

SEQ ID NO: 171611 - DNA, 76 bp, Homo sapiens
ttgggaaaaaagaaaatgtatactcttcttagattcaatcataatatatattttgtgcttcagcaaccatcaacaa

SEQ ID NO: 171612 - DNA, 81 bp, Homo sapiens
agaaaatgtatactcttcttagattcaatcataatatatattttgtgcttcagcaaccatcaacaaaggccatcagagagc

SEQ ID NO: 171613 - DNA, 82 bp, Homo sapiens
tatactcttcttagattcaatcataatatatattttgtgcttcagcaaccatcaacaaaggccatcagagagcctgacaaaa

SEQ ID NO: 171614 - DNA, 83 bp, Homo sapiens
ttcttagattcaatcataatatatattttgtgcttcagcaaccatcaacaaaggccatcagagagcctgacaaaagtggatca

SEQ ID NO: 171615 - DNA, 82 bp, Homo sapiens
ttttgtgcttcagcaaccatcaacaaaggccatcagagagcctgacaaaagtggatcatgcccctatatgagccatagttaa

SEQ ID NO: 171616 - DNA, 83 bp, Homo sapiens
ttcagcaaccatcaacaaaggccatcagagagcctgacaaaagtggatcatgcccctatatgagccatagttaataatctcta

SEQ ID NO: 171617 - DNA, 82 bp, Homo sapiens
atcaacaaaggccatcagagagcctgacaaaagtggatcatgcccctatatgagccatagttaataatctctactgagcaaa

SEQ ID NO: 171618 - DNA, 82 bp, Homo sapiens
catcagagagcctgacaaaagtggatcatgcccctatatgagccatagttaataatctctactgagcaaacgaaccaggcaa

SEQ ID NO: 171619 - DNA, 78 bp, Homo sapiens
aaaagtggatcatgcccctatatgagccatagttaataatctctactgagcaaacgaaccaggcaaagcatatacaaa

SEQ ID NO: 171620 - DNA, 78 bp, Homo sapiens
cccctatatgagccatagttaataatctctactgagcaaacgaaccaggcaaagcatatacaaatcctctagagtcta

SEQ ID NO: 171621 - DNA, 80 bp, Homo sapiens
tatgagccatagttaataatctctactgagcaaacgaaccaggcaaagcatatacaaatcctctagagtctaagtctata

SEQ ID NO: 171622 - DNA, 77 bp, Homo sapiens
ttaataatctctactgagcaaacgaaccaggcaaagcatatacaaatcctctagagtctaagtctatatcttccttc

SEQ ID NO: 171623 - DNA, 80 bp, Homo sapiens
tactgagcaaacgaaccaggcaaagcatatacaaatcctctagagtctaagtctatatcttccttctcatgactgctaaa

SEQ ID NO: 171624 - DNA, 79 bp, Homo sapiens
aaacgaaccaggcaaagcatatacaaatcctctagagtctaagtctatatcttccttctcatgactgctaaatatcaga

SEQ ID NO: 171625 - DNA, 79 bp, Homo sapiens
aaagcatatacaaatcctctagagtctaagtctatatcttccttctcatgactgctaaatatcagaccaatgtctgggt

SEQ ID NO: 171626 - DNA, 78 bp, Homo sapiens
atatacaaatcctctagagtctaagtctatatcttccttctcatgactgctaaatatcagaccaatgtctgggtttaa

SEQ ID NO: 171627 - DNA, 76 bp, Homo sapiens
cctctagagtctaagtctatatcttccttctcatgactgctaaatatcagaccaatgtctgggtttaacaaaaatg

SEQ ID NO: 171628 - DNA, 71 bp, Homo sapiens
tccttctcatgactgctaaatatcagaccaatgtctgggtttaacaaaaatggggtacttaatcttggttt

SEQ ID NO: 171629 - DNA, 69 bp, Homo sapiens
tatcagaccaatgtctgggtttaacaaaaatggggtacttaatcttggttttgaggcacataaaattac

SEQ ID NO: 171630 - DNA, 67 bp, Homo sapiens
accaatgtctgggtttaacaaaaatggggtacttaatcttggttttgaggcacataaaattaccatg

SEQ ID NO: 171631 - DNA, 66 bp, Homo sapiens
gggtttaacaaaaatggggtacttaatcttggttttgaggcacataaaattaccatgtgataaact

SEQ ID NO: 171632 - DNA, 74 bp, Homo sapiens
tgaggcacataaaattaccatgtgataaactttaagacaaatttctcaattaaaaatgatctctcaatttggaa

SEQ ID NO: 171633 - DNA, 72 bp, Homo sapiens
accatgtgataaactttaagacaaatttctcaattaaaaatgatctctcaatttggaatatactgctttact

SEQ ID NO: 171634 - DNA, 70 bp, Homo sapiens
tttaagacaaatttctcaattaaaaatgatctctcaatttggaatatactgctttactttttaacttcac

SEQ ID NO: 171635 - DNA, 72 bp, Homo sapiens
gacaaatttctcaattaaaaatgatctctcaatttggaatatactgctttactttttaacttcacttgtatc

SEQ ID NO: 171636 - DNA, 72 bp, Homo sapiens
taaaaatgatctctcaatttggaatatactgctttactttttaacttcacttgtatctattttaatcagagt

SEQ ID NO: 171637 - DNA, 71 bp, Homo sapiens
atgatctctcaatttggaatatactgctttactttttaacttcacttgtatctattttaatcagagttttt

SEQ ID NO: 171638 - DNA, 70 bp, Homo sapiens
gctttactttttaacttcacttgtatctattttaatcagagttttttgaagtgaatgaagaaaattggca

SEQ ID NO: 171639 - DNA, 74 bp, Homo sapiens
ttaacttcacttgtatctattttaatcagagttttttgaagtgaatgaagaaaattggcaggaacatggtgata

SEQ ID NO: 171640 - DNA, 73 bp, Homo sapiens
cacttgtatctattttaatcagagttttttgaagtgaatgaagaaaattggcaggaacatggtgataacaaag

SEQ ID NO: 171641 - DNA, 72 bp, Homo sapiens
tctattttaatcagagttttttgaagtgaatgaagaaaattggcaggaacatggtgataacaaagtatttta

SEQ ID NO: 171642 - DNA, 74 bp, Homo sapiens
tcagagttttttgaagtgaatgaagaaaattggcaggaacatggtgataacaaagtattttaaatgtgcatatt

SEQ ID NO: 171643 - DNA, 74 bp, Homo sapiens
ttgaagtgaatgaagaaaattggcaggaacatggtgataacaaagtattttaaatgtgcatatttataaattct

SEQ ID NO: 171644 - DNA, 73 bp, Homo sapiens
tgaagaaaattggcaggaacatggtgataacaaagtattttaaatgtgcatatttataaattcttaaatgtta

SEQ ID NO: 171645 - DNA, 74 bp, Homo sapiens
ggcaggaacatggtgataacaaagtattttaaatgtgcatatttataaattcttaaatgttaacatagtgtaca

SEQ ID NO: 171646 - DNA, 72 bp, Homo sapiens
tggtgataacaaagtattttaaatgtgcatatttataaattcttaaatgttaacatagtgtacaaatacagt

SEQ ID NO: 171647 - DNA, 74 bp, Homo sapiens
gtgcatatttataaattcttaaatgttaacatagtgtacaaatacagtttcaaacaatatacaatgtaaatcta

SEQ ID NO: 171648 - DNA, 71 bp, Homo sapiens
ataaattcttaaatgttaacatagtgtacaaatacagtttcaaacaatatacaatgtaaatctaaagtcac

SEQ ID NO: 171649 - DNA, 73 bp, Homo sapiens
cttaaatgttaacatagtgtacaaatacagtttcaaacaatatacaatgtaaatctaaagtcacccatgagga

SEQ ID NO: 171650 - DNA, 73 bp, Homo sapiens
acatagtgtacaaatacagtttcaaacaatatacaatgtaaatctaaagtcacccatgaggattttcaccact

SEQ ID NO: 171651 - DNA, 72 bp, Homo sapiens
gtacaaatacagtttcaaacaatatacaatgtaaatctaaagtcacccatgaggattttcaccacttaacta

SEQ ID NO: 171652 - DNA, 71 bp, Homo sapiens
agtttcaaacaatatacaatgtaaatctaaagtcacccatgaggattttcaccacttaactattttatata

SEQ ID NO: 171653 - DNA, 76 bp, Homo sapiens
tatacaatgtaaatctaaagtcacccatgaggattttcaccacttaactattttatatatgaaacaatatatcaca

SEQ ID NO: 171654 - DNA, 73 bp, Homo sapiens
tctaaagtcacccatgaggattttcaccacttaactattttatatatgaaacaatatatcacaatcaaaaggg

SEQ ID NO: 171655 - DNA, 72 bp, Homo sapiens
agtcacccatgaggattttcaccacttaactattttatatatgaaacaatatatcacaatcaaaagggtaac

SEQ ID NO: 171656 - DNA, 69 bp, Homo sapiens
gaggattttcaccacttaactattttatatatgaaacaatatatcacaatcaaaagggtaactaaaaaa

SEQ ID NO: 171657 - DNA, 75 bp, Homo sapiens
aaaaaagagctaatctttggatttttcaaaacaatgactggagtgtcacatttgtgcttcatatctccaacacat

SEQ ID NO: 171658 - DNA, 77 bp, Homo sapiens
taatctttggatttttcaaaacaatgactggagtgtcacatttgtgcttcatatctccaacacattaaatgcccttc

SEQ ID NO: 171659 - DNA, 77 bp, Homo sapiens
atttttcaaaacaatgactggagtgtcacatttgtgcttcatatctccaacacattaaatgcccttccaatatgaaa

SEQ ID NO: 171660 - DNA, 79 bp, Homo sapiens
caaaacaatgactggagtgtcacatttgtgcttcatatctccaacacattaaatgcccttccaatatgaaataataata

SEQ ID NO: 171661 - DNA, 77 bp, Homo sapiens
taataaaataagtaatggtaataagcacgatgttcaggtatttctgagacctattccgcactgaagtctgtcacatg

SEQ ID NO: 171662 - DNA, 76 bp, Homo sapiens
aaataagtaatggtaataagcacgatgttcaggtatttctgagacctattccgcactgaagtctgtcacatggaag

SEQ ID NO: 171663 - DNA, 79 bp, Homo sapiens
tggtaataagcacgatgttcaggtatttctgagacctattccgcactgaagtctgtcacatggaagtgataataaaatc

SEQ ID NO: 171664 - DNA, 80 bp, Homo sapiens
ataagcacgatgttcaggtatttctgagacctattccgcactgaagtctgtcacatggaagtgataataaaatctctcta

SEQ ID NO: 171665 - DNA, 79 bp, Homo sapiens
tgttcaggtatttctgagacctattccgcactgaagtctgtcacatggaagtgataataaaatctctctatctttaata

SEQ ID NO: 171666 - DNA, 78 bp, Homo sapiens
tttctgagacctattccgcactgaagtctgtcacatggaagtgataataaaatctctctatctttaataattgctttg

SEQ ID NO: 171667 - DNA, 78 bp, Homo sapiens
agacctattccgcactgaagtctgtcacatggaagtgataataaaatctctctatctttaataattgctttgttcaga

SEQ ID NO: 171668 - DNA, 81 bp, Homo sapiens
actgaagtctgtcacatggaagtgataataaaatctctctatctttaataattgctttgttcagatctggatgctcagccc

SEQ ID NO: 171669 - DNA, 76 bp, Homo sapiens
gtgataataaaatctctctatctttaataattgctttgttcagatctggatgctcagccctcaaatttgtaaaacc

SEQ ID NO: 171670 - DNA, 76 bp, Homo sapiens
aatctctctatctttaataattgctttgttcagatctggatgctcagccctcaaatttgtaaaacctcattacgag

SEQ ID NO: 171671 - DNA, 73 bp, Homo sapiens
tttgttcagatctggatgctcagccctcaaatttgtaaaacctcattacgaggggaacatactgagaaaagtt

SEQ ID NO: 171672 - DNA, 71 bp, Homo sapiens
agatctggatgctcagccctcaaatttgtaaaacctcattacgaggggaacatactgagaaaagtttaaaa

SEQ ID NO: 171673 - DNA, 68 bp, Homo sapiens
agccctcaaatttgtaaaacctcattacgaggggaacatactgagaaaagtttaaaagctaagctcca

SEQ ID NO: 171674 - DNA, 68 bp, Homo sapiens
caaatttgtaaaacctcattacgaggggaacatactgagaaaagtttaaaagctaagctccaccaaga

SEQ ID NO: 171675 - DNA, 71 bp, Homo sapiens
agtttaaaagctaagctccaccaagagcagaatgcctcaaacaatttgtagttctacaagtgttatttaaa

SEQ ID NO: 171676 - DNA, 75 bp, Homo sapiens
taagctccaccaagagcagaatgcctcaaacaatttgtagttctacaagtgttatttaaaaggctcaacatgttg

SEQ ID NO: 171677 - DNA, 75 bp, Homo sapiens
caagagcagaatgcctcaaacaatttgtagttctacaagtgttatttaaaaggctcaacatgttgtattaccatg

SEQ ID NO: 171678 - DNA, 71 bp, Homo sapiens
caaacaatttgtagttctacaagtgttatttaaaaggctcaacatgttgtattaccatggaaattgtggaa

SEQ ID NO: 171679 - DNA, 72 bp, Homo sapiens
gttctacaagtgttatttaaaaggctcaacatgttgtattaccatggaaattgtggaaaacatacattccca

SEQ ID NO: 171680 - DNA, 71 bp, Homo sapiens
gtgttatttaaaaggctcaacatgttgtattaccatggaaattgtggaaaacatacattcccaaacaaata

SEQ ID NO: 171681 - DNA, 69 bp, Homo sapiens
aaaaggctcaacatgttgtattaccatggaaattgtggaaaacatacattcccaaacaaatattacttt

SEQ ID NO: 171682 - DNA, 73 bp, Homo sapiens
catgttgtattaccatggaaattgtggaaaacatacattcccaaacaaatattactttttctcaatggtatga

SEQ ID NO: 171683 - DNA, 71 bp, Homo sapiens
accatggaaattgtggaaaacatacattcccaaacaaatattactttttctcaatggtatgaagtaatgaa

SEQ ID NO: 171684 - DNA, 76 bp, Homo sapiens
catacattcccaaacaaatattactttttctcaatggtatgaagtaatgaaaaccacatgtgcaaatctgcgatcc

SEQ ID NO: 171685 - DNA, 75 bp, Homo sapiens
aaacaaatattactttttctcaatggtatgaagtaatgaaaaccacatgtgcaaatctgcgatccgtgcagtagt

SEQ ID NO: 171686 - DNA, 79 bp, Homo sapiens
actttttctcaatggtatgaagtaatgaaaaccacatgtgcaaatctgcgatccgtgcagtagttcaagctgcaactaa

SEQ ID NO: 171687 - DNA, 80 bp, Homo sapiens
tatgaagtaatgaaaaccacatgtgcaaatctgcgatccgtgcagtagttcaagctgcaactaatagaaaatacagaaag

SEQ ID NO: 171688 - DNA, 82 bp, Homo sapiens
accacatgtgcaaatctgcgatccgtgcagtagttcaagctgcaactaatagaaaatacagaaagtgaactctgctatataa

SEQ ID NO: 171689 - DNA, 79 bp, Homo sapiens
caaatctgcgatccgtgcagtagttcaagctgcaactaatagaaaatacagaaagtgaactctgctatataaaggattc

SEQ ID NO: 171690 - DNA, 77 bp, Homo sapiens
atccgtgcagtagttcaagctgcaactaatagaaaatacagaaagtgaactctgctatataaaggattcttgttaca

SEQ ID NO: 171691 - DNA, 77 bp, Homo sapiens
gcagtagttcaagctgcaactaatagaaaatacagaaagtgaactctgctatataaaggattcttgttacagaaata

SEQ ID NO: 171692 - DNA, 77 bp, Homo sapiens
caagctgcaactaatagaaaatacagaaagtgaactctgctatataaaggattcttgttacagaaatataatgtgaa

SEQ ID NO: 171693 - DNA, 77 bp, Homo sapiens
agaaaatacagaaagtgaactctgctatataaaggattcttgttacagaaatataatgtgaaaaccagatgcagaca

SEQ ID NO: 171694 - DNA, 76 bp, Homo sapiens
cagaaagtgaactctgctatataaaggattcttgttacagaaatataatgtgaaaaccagatgcagacagaaaacc

SEQ ID NO: 171695 - DNA, 78 bp, Homo sapiens
tctgctatataaaggattcttgttacagaaatataatgtgaaaaccagatgcagacagaaaaccttaatcacagatgg

SEQ ID NO: 171696 - DNA, 75 bp, Homo sapiens
ataaaggattcttgttacagaaatataatgtgaaaaccagatgcagacagaaaaccttaatcacagatgggaatg

SEQ ID NO: 171697 - DNA, 80 bp, Homo sapiens
ttgttacagaaatataatgtgaaaaccagatgcagacagaaaaccttaatcacagatgggaatgtaatcattggcataca

SEQ ID NO: 171698 - DNA, 78 bp, Homo sapiens
atataatgtgaaaaccagatgcagacagaaaaccttaatcacagatgggaatgtaatcattggcatacagaatacttt

SEQ ID NO: 171699 - DNA, 77 bp, Homo sapiens
aaaaccagatgcagacagaaaaccttaatcacagatgggaatgtaatcattggcatacagaatacttttttgatcaa

SEQ ID NO: 171700 - DNA, 78 bp, Homo sapiens
gcagacagaaaaccttaatcacagatgggaatgtaatcattggcatacagaatacttttttgatcaatcttaaccata

SEQ ID NO: 171701 - DNA, 79 bp, Homo sapiens
aatcacagatgggaatgtaatcattggcatacagaatacttttttgatcaatcttaaccatatgcgcaatgtatttatt

SEQ ID NO: 171702 - DNA, 77 bp, Homo sapiens
cattggcatacagaatacttttttgatcaatcttaaccatatgcgcaatgtatttattttctaaggaatgcaataac

SEQ ID NO: 171703 - DNA, 75 bp, Homo sapiens
gaatacttttttgatcaatcttaaccatatgcgcaatgtatttattttctaaggaatgcaataacttgagagaac

SEQ ID NO: 171704 - DNA, 75 bp, Homo sapiens
atcttaaccatatgcgcaatgtatttattttctaaggaatgcaataacttgagagaaccttctatttgaattcag

SEQ ID NO: 171705 - DNA, 74 bp, Homo sapiens
ttattttctaaggaatgcaataacttgagagaaccttctatttgaattcagttaacctcatatggccttggcaa

SEQ ID NO: 171706 - DNA, 76 bp, Homo sapiens
aggaatgcaataacttgagagaaccttctatttgaattcagttaacctcatatggccttggcaaatcattcttgta

SEQ ID NO: 171707 - DNA, 75 bp, Homo sapiens
caataacttgagagaaccttctatttgaattcagttaacctcatatggccttggcaaatcattcttgtatcagtt

SEQ ID NO: 171708 - DNA, 74 bp, Homo sapiens
ttctatttgaattcagttaacctcatatggccttggcaaatcattcttgtatcagtttatctttcaaaaattta

SEQ ID NO: 171709 - DNA, 74 bp, Homo sapiens
attcagttaacctcatatggccttggcaaatcattcttgtatcagtttatctttcaaaaatttaataggatgta

SEQ ID NO: 171710 - DNA, 75 bp, Homo sapiens
cctcatatggccttggcaaatcattcttgtatcagtttatctttcaaaaatttaataggatgtaaagactacaca

SEQ ID NO: 171711 - DNA, 75 bp, Homo sapiens
ggcaaatcattcttgtatcagtttatctttcaaaaatttaataggatgtaaagactacacacatcagaatcaacc

SEQ ID NO: 171712 - DNA, 74 bp, Homo sapiens
cttgtatcagtttatctttcaaaaatttaataggatgtaaagactacacacatcagaatcaacctcaaaagaga

SEQ ID NO: 171713 - DNA, 75 bp, Homo sapiens
gtttatctttcaaaaatttaataggatgtaaagactacacacatcagaatcaacctcaaaagagatcaagtgcag

SEQ ID NO: 171714 - DNA, 74 bp, Homo sapiens
ctttcaaaaatttaataggatgtaaagactacacacatcagaatcaacctcaaaagagatcaagtgcagttccc

SEQ ID NO: 171715 - DNA, 76 bp, Homo sapiens
tttaataggatgtaaagactacacacatcagaatcaacctcaaaagagatcaagtgcagttccccattactgtatt

SEQ ID NO: 171716 - DNA, 81 bp, Homo sapiens
tgtaaagactacacacatcagaatcaacctcaaaagagatcaagtgcagttccccattactgtatttctcaatcactgcca

SEQ ID NO: 171717 - DNA, 79 bp, Homo sapiens
acatcagaatcaacctcaaaagagatcaagtgcagttccccattactgtatttctcaatcactgccaggaatcctttca

SEQ ID NO: 171718 - DNA, 76 bp, Homo sapiens
aacctcaaaagagatcaagtgcagttccccattactgtatttctcaatcactgccaggaatcctttcactgcctaa

SEQ ID NO: 171719 - DNA, 76 bp, Homo sapiens
aaagagatcaagtgcagttccccattactgtatttctcaatcactgccaggaatcctttcactgcctaaacacatt

SEQ ID NO: 171720 - DNA, 77 bp, Homo sapiens
aagtgcagttccccattactgtatttctcaatcactgccaggaatcctttcactgcctaaacacatttctctagaga

SEQ ID NO: 171721 - DNA, 77 bp, Homo sapiens
attactgtatttctcaatcactgccaggaatcctttcactgcctaaacacatttctctagagaattctatcaacatt

SEQ ID NO: 171722 - DNA, 79 bp, Homo sapiens
tgtatttctcaatcactgccaggaatcctttcactgcctaaacacatttctctagagaattctatcaacatttggggca

SEQ ID NO: 171723 - DNA, 74 bp, Homo sapiens
aatcactgccaggaatcctttcactgcctaaacacatttctctagagaattctatcaacatttggggcactttt

SEQ ID NO: 171724 - DNA, 73 bp, Homo sapiens
ctagagaattctatcaacatttggggcactttttcctttagtaaatgatacatggttattccaaaaatgagca

SEQ ID NO: 171725 - DNA, 70 bp, Homo sapiens
caacatttggggcactttttcctttagtaaatgatacatggttattccaaaaatgagcatttaaacacac

SEQ ID NO: 171726 - DNA, 68 bp, Homo sapiens
gggcactttttcctttagtaaatgatacatggttattccaaaaatgagcatttaaacacacctctttt

SEQ ID NO: 171727 - DNA, 71 bp, Homo sapiens
cctttagtaaatgatacatggttattccaaaaatgagcatttaaacacacctctttttatctatcaacctg

SEQ ID NO: 171728 - DNA, 73 bp, Homo sapiens
atgatacatggttattccaaaaatgagcatttaaacacacctctttttatctatcaacctgggttgaatcaaa

SEQ ID NO: 171729 - DNA, 69 bp, Homo sapiens
aaatgagcatttaaacacacctctttttatctatcaacctgggttgaatcaaaccttaactctaactct

SEQ ID NO: 171730 - DNA, 68 bp, Homo sapiens
gcatttaaacacacctctttttatctatcaacctgggttgaatcaaaccttaactctaactcttttct

SEQ ID NO: 171731 - DNA, 68 bp, Homo sapiens
cacacctctttttatctatcaacctgggttgaatcaaaccttaactctaactcttttcttttccttca

SEQ ID NO: 171732 - DNA, 68 bp, Homo sapiens
aacctgggttgaatcaaaccttaactctaactcttttcttttccttcatagaaacattttatatcata

SEQ ID NO: 171733 - DNA, 69 bp, Homo sapiens
gaatcaaaccttaactctaactcttttcttttccttcatagaaacattttatatcataaaagctattat

SEQ ID NO: 171734 - DNA, 71 bp, Homo sapiens
ctctaactcttttcttttccttcatagaaacattttatatcataaaagctattattttacatgaacaaatg

SEQ ID NO: 171735 - DNA, 71 bp, Homo sapiens
ttccttcatagaaacattttatatcataaaagctattattttacatgaacaaatgtacacttagtttttgt

SEQ ID NO: 171736 - DNA, 68 bp, Homo sapiens
aacattttatatcataaaagctattattttacatgaacaaatgtacacttagtttttgtttccaaggg

SEQ ID NO: 171737 - DNA, 69 bp, Homo sapiens
cataaaagctattattttacatgaacaaatgtacacttagtttttgtttccaaggggaatcaccataaa

SEQ ID NO: 171738 - DNA, 72 bp, Homo sapiens
tgaacaaatgtacacttagtttttgtttccaaggggaatcaccataaaaggaacctgttatagcatatctga

SEQ ID NO: 171739 - DNA, 70 bp, Homo sapiens
tacacttagtttttgtttccaaggggaatcaccataaaaggaacctgttatagcatatctgacttaggaa

SEQ ID NO: 171740 - DNA, 70 bp, Homo sapiens
aaggggaatcaccataaaaggaacctgttatagcatatctgacttaggaaatattaccttggtaagtaca

SEQ ID NO: 171741 - DNA, 74 bp, Homo sapiens
tgttatagcatatctgacttaggaaatattaccttggtaagtacagtttctggcactggactgtagcttacctt

SEQ ID NO: 171742 - DNA, 73 bp, Homo sapiens
tatctgacttaggaaatattaccttggtaagtacagtttctggcactggactgtagcttacctttgtcaaagc

SEQ ID NO: 171743 - DNA, 71 bp, Homo sapiens
aatattaccttggtaagtacagtttctggcactggactgtagcttacctttgtcaaagcttcaccatttct

SEQ ID NO: 171744 - DNA, 71 bp, Homo sapiens
accttggtaagtacagtttctggcactggactgtagcttacctttgtcaaagcttcaccatttctttgtaa

SEQ ID NO: 171745 - DNA, 75 bp, Homo sapiens
gtttctggcactggactgtagcttacctttgtcaaagcttcaccatttctttgtaagcaattgtgtgtccctcta

SEQ ID NO: 171746 - DNA, 73 bp, Homo sapiens
actggactgtagcttacctttgtcaaagcttcaccatttctttgtaagcaattgtgtgtccctctaatttgaa

SEQ ID NO: 171747 - DNA, 76 bp, Homo sapiens
tttgtcaaagcttcaccatttctttgtaagcaattgtgtgtccctctaatttgaaggagtagtgaacagagcacca

SEQ ID NO: 171748 - DNA, 80 bp, Homo sapiens
tctttgtaagcaattgtgtgtccctctaatttgaaggagtagtgaacagagcaccatctatgcctcacttcaggactata

SEQ ID NO: 171749 - DNA, 78 bp, Homo sapiens
aattgtgtgtccctctaatttgaaggagtagtgaacagagcaccatctatgcctcacttcaggactatactcaacttc

SEQ ID NO: 171750 - DNA, 78 bp, Homo sapiens
ctctaatttgaaggagtagtgaacagagcaccatctatgcctcacttcaggactatactcaacttccaacaggaagta

SEQ ID NO: 171751 - DNA, 78 bp, Homo sapiens
atttgaaggagtagtgaacagagcaccatctatgcctcacttcaggactatactcaacttccaacaggaagtaactga

SEQ ID NO: 171752 - DNA, 81 bp, Homo sapiens
tagtgaacagagcaccatctatgcctcacttcaggactatactcaacttccaacaggaagtaactgagacactgtgtgatt

SEQ ID NO: 171753 - DNA, 77 bp, Homo sapiens
accatctatgcctcacttcaggactatactcaacttccaacaggaagtaactgagacactgtgtgatttgggtgccc

SEQ ID NO: 171754 - DNA, 80 bp, Homo sapiens
tatgcctcacttcaggactatactcaacttccaacaggaagtaactgagacactgtgtgatttgggtgcccctcatcgca

SEQ ID NO: 171755 - DNA, 79 bp, Homo sapiens
gactatactcaacttccaacaggaagtaactgagacactgtgtgatttgggtgcccctcatcgcaggtcatgtgaacta

SEQ ID NO: 171756 - DNA, 77 bp, Homo sapiens
aacttccaacaggaagtaactgagacactgtgtgatttgggtgcccctcatcgcaggtcatgtgaactaaatgtcat

SEQ ID NO: 171757 - DNA, 77 bp, Homo sapiens
aggaagtaactgagacactgtgtgatttgggtgcccctcatcgcaggtcatgtgaactaaatgtcattatcctagtt

SEQ ID NO: 171758 - DNA, 80 bp, Homo sapiens
taactgagacactgtgtgatttgggtgcccctcatcgcaggtcatgtgaactaaatgtcattatcctagtttcacaagct

SEQ ID NO: 171759 - DNA, 77 bp, Homo sapiens
actgtgtgatttgggtgcccctcatcgcaggtcatgtgaactaaatgtcattatcctagtttcacaagcttccttaa

SEQ ID NO: 171760 - DNA, 80 bp, Homo sapiens
ttgggtgcccctcatcgcaggtcatgtgaactaaatgtcattatcctagtttcacaagcttccttaagcttccatgcata

SEQ ID NO: 171761 - DNA, 80 bp, Homo sapiens
atgtgaactaaatgtcattatcctagtttcacaagcttccttaagcttccatgcatacactcatccagattctccttctc

SEQ ID NO: 171762 - DNA, 79 bp, Homo sapiens
actaaatgtcattatcctagtttcacaagcttccttaagcttccatgcatacactcatccagattctccttctctcttc

SEQ ID NO: 171763 - DNA, 79 bp, Homo sapiens
attatcctagtttcacaagcttccttaagcttccatgcatacactcatccagattctccttctctcttctaactactca

SEQ ID NO: 171764 - DNA, 82 bp, Homo sapiens
tttcacaagcttccttaagcttccatgcatacactcatccagattctccttctctcttctaactactcatctcctacattca

SEQ ID NO: 171765 - DNA, 82 bp, Homo sapiens
atgcatacactcatccagattctccttctctcttctaactactcatctcctacattcacacacagaaacacacagtccttat

SEQ ID NO: 171766 - DNA, 79 bp, Homo sapiens
acactcatccagattctccttctctcttctaactactcatctcctacattcacacacagaaacacacagtccttattct

SEQ ID NO: 171767 - DNA, 81 bp, Homo sapiens
tctctcttctaactactcatctcctacattcacacacagaaacacacagtccttattcttgcctaatctcacatacaagac

SEQ ID NO: 171768 - DNA, 80 bp, Homo sapiens
aactactcatctcctacattcacacacagaaacacacagtccttattcttgcctaatctcacatacaagaccctccatca

SEQ ID NO: 171769 - DNA, 83 bp, Homo sapiens
tacattcacacacagaaacacacagtccttattcttgcctaatctcacatacaagaccctccatcacttggcactcatctaca

SEQ ID NO: 171770 - DNA, 79 bp, Homo sapiens
aacacacagtccttattcttgcctaatctcacatacaagaccctccatcacttggcactcatctacagttttcagcctc

SEQ ID NO: 171771 - DNA, 79 bp, Homo sapiens
cttattcttgcctaatctcacatacaagaccctccatcacttggcactcatctacagttttcagcctccactccaacca

SEQ ID NO: 171772 - DNA, 79 bp, Homo sapiens
taatctcacatacaagaccctccatcacttggcactcatctacagttttcagcctccactccaaccacgcccttccaga

SEQ ID NO: 171773 - DNA, 79 bp, Homo sapiens
acatacaagaccctccatcacttggcactcatctacagttttcagcctccactccaaccacgcccttccagagtgcagc

SEQ ID NO: 171774 - DNA, 82 bp, Homo sapiens
catcacttggcactcatctacagttttcagcctccactccaaccacgcccttccagagtgcagctcttctctggctggataa

SEQ ID NO: 171775 - DNA, 80 bp, Homo sapiens
ttggcactcatctacagttttcagcctccactccaaccacgcccttccagagtgcagctcttctctggctggataaactc

SEQ ID NO: 171776 - DNA, 78 bp, Homo sapiens
tacagttttcagcctccactccaaccacgcccttccagagtgcagctcttctctggctggataaactccctgatggaa

SEQ ID NO: 171777 - DNA, 79 bp, Homo sapiens
actccaaccacgcccttccagagtgcagctcttctctggctggataaactccctgatggaacacttcctctcatgctgg

SEQ ID NO: 171778 - DNA, 81 bp, Homo sapiens
agtgcagctcttctctggctggataaactccctgatggaacacttcctctcatgctggtggcttcgttcactgacttcacg

SEQ ID NO: 171779 - DNA, 78 bp, Homo sapiens
ttctctggctggataaactccctgatggaacacttcctctcatgctggtggcttcgttcactgacttcacggcccttc

SEQ ID NO: 171780 - DNA, 79 bp, Homo sapiens
atggaacacttcctctcatgctggtggcttcgttcactgacttcacggcccttcccatagactgctgcacggccagttc

SEQ ID NO: 171781 - DNA, 79 bp, Homo sapiens
ttcctctcatgctggtggcttcgttcactgacttcacggcccttcccatagactgctgcacggccagttcttcctcaac

SEQ ID NO: 171782 - DNA, 74 bp, Homo sapiens
actgacttcacggcccttcccatagactgctgcacggccagttcttcctcaaccctcaggctttagttcaagag

SEQ ID NO: 171783 - DNA, 78 bp, Homo sapiens
cttcccatagactgctgcacggccagttcttcctcaaccctcaggctttagttcaagagtcaccacctgacagatgat

SEQ ID NO: 171784 - DNA, 77 bp, Homo sapiens
atagactgctgcacggccagttcttcctcaaccctcaggctttagttcaagagtcaccacctgacagatgatttccc

SEQ ID NO: 171785 - DNA, 74 bp, Homo sapiens
ggccagttcttcctcaaccctcaggctttagttcaagagtcaccacctgacagatgatttccccaaccatttga

SEQ ID NO: 171786 - DNA, 72 bp, Homo sapiens
aaccctcaggctttagttcaagagtcaccacctgacagatgatttccccaaccatttgaaataaagtctcac

SEQ ID NO: 171787 - DNA, 73 bp, Homo sapiens
ctttagttcaagagtcaccacctgacagatgatttccccaaccatttgaaataaagtctcactaccatgtccc

SEQ ID NO: 171788 - DNA, 72 bp, Homo sapiens
agagtcaccacctgacagatgatttccccaaccatttgaaataaagtctcactaccatgtccccccaccctc

SEQ ID NO: 171789 - DNA, 74 bp, Homo sapiens
acagatgatttccccaaccatttgaaataaagtctcactaccatgtccccccaccctctgcatcattctaacat

SEQ ID NO: 171790 - DNA, 71 bp, Homo sapiens
atttccccaaccatttgaaataaagtctcactaccatgtccccccaccctctgcatcattctaacattgtt

SEQ ID NO: 171791 - DNA, 73 bp, Homo sapiens
ttgaaataaagtctcactaccatgtccccccaccctctgcatcattctaacattgtttcttaattgtcttaat

SEQ ID NO: 171792 - DNA, 73 bp, Homo sapiens
ataaagtctcactaccatgtccccccaccctctgcatcattctaacattgtttcttaattgtcttaattatat

SEQ ID NO: 171793 - DNA, 76 bp, Homo sapiens
catgtccccccaccctctgcatcattctaacattgtttcttaattgtcttaattatatttagcactacatgaaata

SEQ ID NO: 171794 - DNA, 75 bp, Homo sapiens
cccaccctctgcatcattctaacattgtttcttaattgtcttaattatatttagcactacatgaaataatcttag

SEQ ID NO: 171795 - DNA, 76 bp, Homo sapiens
tctgcatcattctaacattgtttcttaattgtcttaattatatttagcactacatgaaataatcttagtaacttct

SEQ ID NO: 171796 - DNA, 69 bp, Homo sapiens
ctaacattgtttcttaattgtcttaattatatttagcactacatgaaataatcttagtaacttcttttt

SEQ ID NO: 171797 - DNA, 69 bp, Homo sapiens
taattatatttagcactacatgaaataatcttagtaacttcttttttatctttctccctcccccaccca

SEQ ID NO: 171798 - DNA, 70 bp, Homo sapiens
tatttagcactacatgaaataatcttagtaacttcttttttatctttctccctcccccacccaaactgca

SEQ ID NO: 171799 - DNA, 72 bp, Homo sapiens
tacatgaaataatcttagtaacttcttttttatctttctccctcccccacccaaactgcaagctctgtgaga

SEQ ID NO: 171800 - DNA, 71 bp, Homo sapiens
acttcttttttatctttctccctcccccacccaaactgcaagctctgtgagagctagggtctcatctgggg

SEQ ID NO: 171801 - DNA, 77 bp, Homo sapiens
tatctttctccctcccccacccaaactgcaagctctgtgagagctagggtctcatctggggggtgctcattactcta

SEQ ID NO: 171802 - DNA, 77 bp, Homo sapiens
cccacccaaactgcaagctctgtgagagctagggtctcatctggggggtgctcattactctaccctccacatttgga

SEQ ID NO: 171803 - DNA, 78 bp, Homo sapiens
aactgcaagctctgtgagagctagggtctcatctggggggtgctcattactctaccctccacatttggaactggacta

SEQ ID NO: 171804 - DNA, 76 bp, Homo sapiens
tctgtgagagctagggtctcatctggggggtgctcattactctaccctccacatttggaactggactaggaaccta

SEQ ID NO: 171805 - DNA, 72 bp, Homo sapiens
ctagggtctcatctggggggtgctcattactctaccctccacatttggaactggactaggaacctagttgta

SEQ ID NO: 171806 - DNA, 70 bp, Homo sapiens
atctggggggtgctcattactctaccctccacatttggaactggactaggaacctagttgtagccccaaa

SEQ ID NO: 171807 - DNA, 71 bp, Homo sapiens
ggtgctcattactctaccctccacatttggaactggactaggaacctagttgtagccccaaatgaaaagaa

SEQ ID NO: 171808 - DNA, 68 bp, Homo sapiens
tactctaccctccacatttggaactggactaggaacctagttgtagccccaaatgaaaagaaaaacaa

SEQ ID NO: 171809 - DNA, 68 bp, Homo sapiens
atttggaactggactaggaacctagttgtagccccaaatgaaaagaaaaacaaatgaatcccactcaa

SEQ ID NO: 171810 - DNA, 70 bp, Homo sapiens
aactggactaggaacctagttgtagccccaaatgaaaagaaaaacaaatgaatcccactcaatgaaatgc

SEQ ID NO: 171811 - DNA, 70 bp, Homo sapiens
aggaacctagttgtagccccaaatgaaaagaaaaacaaatgaatcccactcaatgaaatgccacaaaagc

SEQ ID NO: 171812 - DNA, 72 bp, Homo sapiens
ttgtagccccaaatgaaaagaaaaacaaatgaatcccactcaatgaaatgccacaaaagcccaattcaatcc

SEQ ID NO: 171813 - DNA, 72 bp, Homo sapiens
aaaagaaaaacaaatgaatcccactcaatgaaatgccacaaaagcccaattcaatccccatgactttggcaa

SEQ ID NO: 171814 - DNA, 71 bp, Homo sapiens
aaaacaaatgaatcccactcaatgaaatgccacaaaagcccaattcaatccccatgactttggcaaacctt

SEQ ID NO: 171815 - DNA, 72 bp, Homo sapiens
atcccactcaatgaaatgccacaaaagcccaattcaatccccatgactttggcaaacctttccgtggctact

SEQ ID NO: 171816 - DNA, 70 bp, Homo sapiens
aaaagcccaattcaatccccatgactttggcaaacctttccgtggctacttctgtgacctgtgatctttt

SEQ ID NO: 171817 - DNA, 72 bp, Homo sapiens
ccaattcaatccccatgactttggcaaacctttccgtggctacttctgtgacctgtgatctttttctcttct

SEQ ID NO: 171818 - DNA, 72 bp, Homo sapiens
tgactttggcaaacctttccgtggctacttctgtgacctgtgatctttttctcttctttatactatagtact

SEQ ID NO: 171819 - DNA, 74 bp, Homo sapiens
tgatctttttctcttctttatactatagtactttgggtctacatcaggctctgcaaccttttacctgccaggta

SEQ ID NO: 171820 - DNA, 72 bp, Homo sapiens
ttttctcttctttatactatagtactttgggtctacatcaggctctgcaaccttttacctgccaggtactgt

SEQ ID NO: 171821 - DNA, 75 bp, Homo sapiens
tttatactatagtactttgggtctacatcaggctctgcaaccttttacctgccaggtactgttcacagaagccca

SEQ ID NO: 171822 - DNA, 75 bp, Homo sapiens
tagtactttgggtctacatcaggctctgcaaccttttacctgccaggtactgttcacagaagcccattcccactg

SEQ ID NO: 171823 - DNA, 80 bp, Homo sapiens
gtctacatcaggctctgcaaccttttacctgccaggtactgttcacagaagcccattcccactggtgctgtatagagata

SEQ ID NO: 171824 - DNA, 80 bp, Homo sapiens
tctgcaaccttttacctgccaggtactgttcacagaagcccattcccactggtgctgtatagagatagggcagcatggaa

SEQ ID NO: 171825 - DNA, 79 bp, Homo sapiens
aggtactgttcacagaagcccattcccactggtgctgtatagagatagggcagcatggaaatcacccacgacatccacg

SEQ ID NO: 171826 - DNA, 83 bp, Homo sapiens
ttcacagaagcccattcccactggtgctgtatagagatagggcagcatggaaatcacccacgacatccacggctatgaagcca

SEQ ID NO: 171827 - DNA, 80 bp, Homo sapiens
attcccactggtgctgtatagagatagggcagcatggaaatcacccacgacatccacggctatgaagccagccctttgtc

SEQ ID NO: 171828 - DNA, 84 bp, Homo sapiens
tatagagatagggcagcatggaaatcacccacgacatccacggctatgaagccagccctttgtcccacactgagcagcaggaca

SEQ ID NO: 171829 - DNA, 82 bp, Homo sapiens
agcatggaaatcacccacgacatccacggctatgaagccagccctttgtcccacactgagcagcaggacactgtgactggga

SEQ ID NO: 171830 - DNA, 81 bp, Homo sapiens
aaatcacccacgacatccacggctatgaagccagccctttgtcccacactgagcagcaggacactgtgactgggaactgca

SEQ ID NO: 171831 - DNA, 84 bp, Homo sapiens
acatccacggctatgaagccagccctttgtcccacactgagcagcaggacactgtgactgggaactgcagcagagtccatacaa

SEQ ID NO: 171832 - DNA, 81 bp, Homo sapiens
tatgaagccagccctttgtcccacactgagcagcaggacactgtgactgggaactgcagcagagtccatacaacctttaag

SEQ ID NO: 171833 - DNA, 84 bp, Homo sapiens
ccacactgagcagcaggacactgtgactgggaactgcagcagagtccatacaacctttaaggcataagtgcactctagcagctt

SEQ ID NO: 171834 - DNA, 83 bp, Homo sapiens
cagcaggacactgtgactgggaactgcagcagagtccatacaacctttaaggcataagtgcactctagcagctttttatgcat

SEQ ID NO: 171835 - DNA, 81 bp, Homo sapiens
actgtgactgggaactgcagcagagtccatacaacctttaaggcataagtgcactctagcagctttttatgcattggatta

SEQ ID NO: 171836 - DNA, 83 bp, Homo sapiens
ggaactgcagcagagtccatacaacctttaaggcataagtgcactctagcagctttttatgcattggattatctcacaattga

SEQ ID NO: 171837 - DNA, 84 bp, Homo sapiens
agagtccatacaacctttaaggcataagtgcactctagcagctttttatgcattggattatctcacaattgagcatgtcagctg

SEQ ID NO: 171838 - DNA, 84 bp, Homo sapiens
atacaacctttaaggcataagtgcactctagcagctttttatgcattggattatctcacaattgagcatgtcagctgttgtaga

SEQ ID NO: 171839 - DNA, 87 bp, Homo sapiens
tttaaggcataagtgcactctagcagctttttatgcattggattatctcacaattgagcatgtcagctgttgtagaaatgagatcca

SEQ ID NO: 171840 - DNA, 84 bp, Homo sapiens
cactctagcagctttttatgcattggattatctcacaattgagcatgtcagctgttgtagaaatgagatccaatcttaatttct

SEQ ID NO: 171841 - DNA, 82 bp, Homo sapiens
ttatgcattggattatctcacaattgagcatgtcagctgttgtagaaatgagatccaatcttaatttcttacacctttggac

SEQ ID NO: 171842 - DNA, 78 bp, Homo sapiens
attatctcacaattgagcatgtcagctgttgtagaaatgagatccaatcttaatttcttacacctttggaccctacat

SEQ ID NO: 171843 - DNA, 80 bp, Homo sapiens
attgagcatgtcagctgttgtagaaatgagatccaatcttaatttcttacacctttggaccctacattgatgcactctat

SEQ ID NO: 171844 - DNA, 77 bp, Homo sapiens
agctgttgtagaaatgagatccaatcttaatttcttacacctttggaccctacattgatgcactctattcattccat

SEQ ID NO: 171845 - DNA, 77 bp, Homo sapiens
gtagaaatgagatccaatcttaatttcttacacctttggaccctacattgatgcactctattcattccattggcagg

SEQ ID NO: 171846 - DNA, 80 bp, Homo sapiens
atccaatcttaatttcttacacctttggaccctacattgatgcactctattcattccattggcagggctgcaagagcatg

SEQ ID NO: 171847 - DNA, 84 bp, Homo sapiens
tttggaccctacattgatgcactctattcattccattggcagggctgcaagagcatggccatgtttattcaacaatgcccatac

SEQ ID NO: 171848 - DNA, 83 bp, Homo sapiens
accctacattgatgcactctattcattccattggcagggctgcaagagcatggccatgtttattcaacaatgcccatacccag

SEQ ID NO: 171849 - DNA, 78 bp, Homo sapiens
tgcctggcacacaaaaggtgttcactaaatactgactgagtaaacagggaataactgataatggaatatgatctggtc

SEQ ID NO: 171850 - DNA, 74 bp, Homo sapiens
acacaaaaggtgttcactaaatactgactgagtaaacagggaataactgataatggaatatgatctggtctttc

SEQ ID NO: 171851 - DNA, 75 bp, Homo sapiens
aggtgttcactaaatactgactgagtaaacagggaataactgataatggaatatgatctggtctttcttcaagcc

SEQ ID NO: 171852 - DNA, 75 bp, Homo sapiens
ggaataactgataatggaatatgatctggtctttcttcaagcccctttctcttgtgataaggcattatttcaaaa

SEQ ID NO: 171853 - DNA, 76 bp, Homo sapiens
tgataatggaatatgatctggtctttcttcaagcccctttctcttgtgataaggcattatttcaaaatcctacaaa

SEQ ID NO: 171854 - DNA, 72 bp, Homo sapiens
atatgatctggtctttcttcaagcccctttctcttgtgataaggcattatttcaaaatcctacaaatatttt

SEQ ID NO: 171855 - DNA, 69 bp, Homo sapiens
gtctttcttcaagcccctttctcttgtgataaggcattatttcaaaatcctacaaatatttttaagtaa

SEQ ID NO: 171856 - DNA, 71 bp, Homo sapiens
tgtgataaggcattatttcaaaatcctacaaatatttttaagtaacaaattaatcagaaggtaggcaacca

SEQ ID NO: 171857 - DNA, 68 bp, Homo sapiens
gcattatttcaaaatcctacaaatatttttaagtaacaaattaatcagaaggtaggcaaccaactaag

SEQ ID NO: 171858 - DNA, 69 bp, Homo sapiens
aatcctacaaatatttttaagtaacaaattaatcagaaggtaggcaaccaactaagtatcaacaacgca

SEQ ID NO: 171859 - DNA, 72 bp, Homo sapiens
atatttttaagtaacaaattaatcagaaggtaggcaaccaactaagtatcaacaacgcaatatgaccagtga

SEQ ID NO: 171860 - DNA, 73 bp, Homo sapiens
ttaatcagaaggtaggcaaccaactaagtatcaacaacgcaatatgaccagtgagttaacaaaccaggcaatt

SEQ ID NO: 171861 - DNA, 70 bp, Homo sapiens
aaggtaggcaaccaactaagtatcaacaacgcaatatgaccagtgagttaacaaaccaggcaattttaaa

SEQ ID NO: 171862 - DNA, 70 bp, Homo sapiens
aaccaactaagtatcaacaacgcaatatgaccagtgagttaacaaaccaggcaattttaaatggtaggaa

SEQ ID NO: 171863 - DNA, 73 bp, Homo sapiens
gtatcaacaacgcaatatgaccagtgagttaacaaaccaggcaattttaaatggtaggaagctcttaaatatc

SEQ ID NO: 171864 - DNA, 76 bp, Homo sapiens
tatgaccagtgagttaacaaaccaggcaattttaaatggtaggaagctcttaaatatcttctctgttgcagatata

SEQ ID NO: 171865 - DNA, 73 bp, Homo sapiens
ccagtgagttaacaaaccaggcaattttaaatggtaggaagctcttaaatatcttctctgttgcagatataat

SEQ ID NO: 171866 - DNA, 70 bp, Homo sapiens
aacaaaccaggcaattttaaatggtaggaagctcttaaatatcttctctgttgcagatataatttaattt

SEQ ID NO: 171867 - DNA, 71 bp, Homo sapiens
gcaattttaaatggtaggaagctcttaaatatcttctctgttgcagatataatttaattttcaaaaaataa

SEQ ID NO: 171868 - DNA, 71 bp, Homo sapiens
atggtaggaagctcttaaatatcttctctgttgcagatataatttaattttcaaaaaataaagtgttataa

SEQ ID NO: 171869 - DNA, 73 bp, Homo sapiens
gctcttaaatatcttctctgttgcagatataatttaattttcaaaaaataaagtgttataaatgactgtggcc

SEQ ID NO: 171870 - DNA, 74 bp, Homo sapiens
tctctgttgcagatataatttaattttcaaaaaataaagtgttataaatgactgtggcctacacacgcgggcca

SEQ ID NO: 171871 - DNA, 73 bp, Homo sapiens
tgcagatataatttaattttcaaaaaataaagtgttataaatgactgtggcctacacacgcgggccatttaga

SEQ ID NO: 171872 - DNA, 70 bp, Homo sapiens
aattttcaaaaaataaagtgttataaatgactgtggcctacacacgcgggccatttagaagcccactgta

SEQ ID NO: 171873 - DNA, 73 bp, Homo sapiens
aaaaataaagtgttataaatgactgtggcctacacacgcgggccatttagaagcccactgtatacgcactctg

SEQ ID NO: 171874 - DNA, 77 bp, Homo sapiens
agtgttataaatgactgtggcctacacacgcgggccatttagaagcccactgtatacgcactctggctggattggaa

SEQ ID NO: 171875 - DNA, 80 bp, Homo sapiens
tacacacgcgggccatttagaagcccactgtatacgcactctggctggattggaatctcagttcttacacttactcatca

SEQ ID NO: 171876 - DNA, 79 bp, Homo sapiens
ccatttagaagcccactgtatacgcactctggctggattggaatctcagttcttacacttactcatcagctatttgacc

SEQ ID NO: 171877 - DNA, 81 bp, Homo sapiens
tagaagcccactgtatacgcactctggctggattggaatctcagttcttacacttactcatcagctatttgaccttggaca

SEQ ID NO: 171878 - DNA, 75 bp, Homo sapiens
cacttaacctctctaagcttcagatttaaatctccaaagtaagataataacacctaacttatcaggatgatatga

SEQ ID NO: 171879 - DNA, 76 bp, Homo sapiens
acctctctaagcttcagatttaaatctccaaagtaagataataacacctaacttatcaggatgatatgaggagata

SEQ ID NO: 171880 - DNA, 76 bp, Homo sapiens
gcttcagatttaaatctccaaagtaagataataacacctaacttatcaggatgatatgaggagataatacttgtaa

SEQ ID NO: 171881 - DNA, 75 bp, Homo sapiens
taaatctccaaagtaagataataacacctaacttatcaggatgatatgaggagataatacttgtaaagcgcctac

SEQ ID NO: 171882 - DNA, 75 bp, Homo sapiens
tctccaaagtaagataataacacctaacttatcaggatgatatgaggagataatacttgtaaagcgcctacctta

SEQ ID NO: 171883 - DNA, 74 bp, Homo sapiens
aaagtaagataataacacctaacttatcaggatgatatgaggagataatacttgtaaagcgcctaccttagtgc

SEQ ID NO: 171884 - DNA, 75 bp, Homo sapiens
aagtaagataataacacctaacttatcaggatgatatgaggagataatacttgtaaagcgcctaccttagtgctc

SEQ ID NO: 171885 - DNA, 76 bp, Homo sapiens
acctaacttatcaggatgatatgaggagataatacttgtaaagcgcctaccttagtgctcccagtgcaagtattat

SEQ ID NO: 171886 - DNA, 79 bp, Homo sapiens
acttatcaggatgatatgaggagataatacttgtaaagcgcctaccttagtgctcccagtgcaagtattatttcatcca

SEQ ID NO: 171887 - DNA, 77 bp, Homo sapiens
ataatacttgtaaagcgcctaccttagtgctcccagtgcaagtattatttcatccagtgtgctcagttcttatcatt

SEQ ID NO: 171888 - DNA, 79 bp, Homo sapiens
taaagcgcctaccttagtgctcccagtgcaagtattatttcatccagtgtgctcagttcttatcatttgatactagaaa

SEQ ID NO: 171889 - DNA, 78 bp, Homo sapiens
ctaccttagtgctcccagtgcaagtattatttcatccagtgtgctcagttcttatcatttgatactagaaaagaggta

SEQ ID NO: 171890 - DNA, 76 bp, Homo sapiens
ccagtgcaagtattatttcatccagtgtgctcagttcttatcatttgatactagaaaagaggtagtacctatttta

SEQ ID NO: 171891 - DNA, 70 bp, Homo sapiens
tcatttgatactagaaaagaggtagtacctattttaatataattaaatatgaaataaatgaaagcaaagg

SEQ ID NO: 171892 - DNA, 70 bp, Homo sapiens
ctagaaaagaggtagtacctattttaatataattaaatatgaaataaatgaaagcaaaggtcactactca

SEQ ID NO: 171893 - DNA, 71 bp, Homo sapiens
gaggtagtacctattttaatataattaaatatgaaataaatgaaagcaaaggtcactactcaaaaatatca

SEQ ID NO: 171894 - DNA, 73 bp, Homo sapiens
cctattttaatataattaaatatgaaataaatgaaagcaaaggtcactactcaaaaatatcagtacaatcata

SEQ ID NO: 171895 - DNA, 71 bp, Homo sapiens
aattaaatatgaaataaatgaaagcaaaggtcactactcaaaaatatcagtacaatcataatctttttctt

SEQ ID NO: 171896 - DNA, 72 bp, Homo sapiens
gaaataaatgaaagcaaaggtcactactcaaaaatatcagtacaatcataatctttttctttctgaaagtaa

SEQ ID NO: 171897 - DNA, 74 bp, Homo sapiens
gaaagcaaaggtcactactcaaaaatatcagtacaatcataatctttttctttctgaaagtaattactgcacta

SEQ ID NO: 171898 - DNA, 75 bp, Homo sapiens
aggtcactactcaaaaatatcagtacaatcataatctttttctttctgaaagtaattactgcactattagtgata

SEQ ID NO: 171899 - DNA, 73 bp, Homo sapiens
actcaaaaatatcagtacaatcataatctttttctttctgaaagtaattactgcactattagtgataaaaaca

SEQ ID NO: 171900 - DNA, 72 bp, Homo sapiens
tcagtacaatcataatctttttctttctgaaagtaattactgcactattagtgataaaaacaaaatacctag

SEQ ID NO: 171901 - DNA, 71 bp, Homo sapiens
atctttttctttctgaaagtaattactgcactattagtgataaaaacaaaatacctaggatcagtcaacaa

SEQ ID NO: 171902 - DNA, 71 bp, Homo sapiens
aagtaattactgcactattagtgataaaaacaaaatacctaggatcagtcaacaaaaccaaaatatgtgga

SEQ ID NO: 171903 - DNA, 72 bp, Homo sapiens
gataaaaacaaaatacctaggatcagtcaacaaaaccaaaatatgtggaattaagctgcaggctctaaaaca

SEQ ID NO: 171904 - DNA, 71 bp, Homo sapiens
aaaatacctaggatcagtcaacaaaaccaaaatatgtggaattaagctgcaggctctaaaacattttggtg

SEQ ID NO: 171905 - DNA, 73 bp, Homo sapiens
aggatcagtcaacaaaaccaaaatatgtggaattaagctgcaggctctaaaacattttggtgtgatgaaaaaa

SEQ ID NO: 171906 - DNA, 70 bp, Homo sapiens
caacaaaaccaaaatatgtggaattaagctgcaggctctaaaacattttggtgtgatgaaaaaaaaaaca

SEQ ID NO: 171907 - DNA, 72 bp, Homo sapiens
atatgtggaattaagctgcaggctctaaaacattttggtgtgatgaaaaaaaaaacataaactgatgtttgg

SEQ ID NO: 171908 - DNA, 70 bp, Homo sapiens
gaattaagctgcaggctctaaaacattttggtgtgatgaaaaaaaaaacataaactgatgtttggtagtt

SEQ ID NO: 171909 - DNA, 66 bp, Homo sapiens
gcaggctctaaaacattttggtgtgatgaaaaaaaaaacataaactgatgtttggtagtttttttt

SEQ ID NO: 171910 - DNA, 73 bp, Homo sapiens
tttttaaatctaatttcatctgggaaagactctctctagggaataagaggagacagaaccagaatcatttaca

SEQ ID NO: 171911 - DNA, 73 bp, Homo sapiens
aaatctaatttcatctgggaaagactctctctagggaataagaggagacagaaccagaatcatttacaaagac

SEQ ID NO: 171912 - DNA, 73 bp, Homo sapiens
tgggaaagactctctctagggaataagaggagacagaaccagaatcatttacaaagactgttttctccaaata

SEQ ID NO: 171913 - DNA, 71 bp, Homo sapiens
aagactctctctagggaataagaggagacagaaccagaatcatttacaaagactgttttctccaaataaag

SEQ ID NO: 171914 - DNA, 75 bp, Homo sapiens
agacagaaccagaatcatttacaaagactgttttctccaaataaaggcatctgttccatgccagcaatttccacc

SEQ ID NO: 171915 - DNA, 73 bp, Homo sapiens
agaatcatttacaaagactgttttctccaaataaaggcatctgttccatgccagcaatttccacctggaaaaa

SEQ ID NO: 171916 - DNA, 70 bp, Homo sapiens
atttacaaagactgttttctccaaataaaggcatctgttccatgccagcaatttccacctggaaaaaaaa

SEQ ID NO: 171917 - DNA, 76 bp, Homo sapiens
aaaaatggaactttggaaatatctgcattcgtggttgatggtcacacatctcaagaggctataacaactgtccagt

SEQ ID NO: 171918 - DNA, 81 bp, Homo sapiens
aactttggaaatatctgcattcgtggttgatggtcacacatctcaagaggctataacaactgtccagttgccagcatggcc

SEQ ID NO: 171919 - DNA, 86 bp, Homo sapiens
aaatatctgcattcgtggttgatggtcacacatctcaagaggctataacaactgtccagttgccagcatggcctggttgctgctgc

SEQ ID NO: 171920 - DNA, 85 bp, Homo sapiens
attcgtggttgatggtcacacatctcaagaggctataacaactgtccagttgccagcatggcctggttgctgctgctcctatcaa

SEQ ID NO: 171921 - DNA, 88 bp, Homo sapiens
atggtcacacatctcaagaggctataacaactgtccagttgccagcatggcctggttgctgctgctcctatcaactgatctctctctc

SEQ ID NO: 171922 - DNA, 68 bp, Homo sapiens
cgcgcctggcctaagttgtggtatttttgtactgtaaacagtaacttttctaagtgcagtgaaaggtt

SEQ ID NO: 171923 - DNA, 69 bp, Homo sapiens
ctggcctaagttgtggtatttttgtactgtaaacagtaacttttctaagtgcagtgaaaggttttgata

SEQ ID NO: 171924 - DNA, 67 bp, Homo sapiens
gtggtatttttgtactgtaaacagtaacttttctaagtgcagtgaaaggttttgatagttttccatt

SEQ ID NO: 171925 - DNA, 69 bp, Homo sapiens
tgtactgtaaacagtaacttttctaagtgcagtgaaaggttttgatagttttccatttgtactttagta

SEQ ID NO: 171926 - DNA, 71 bp, Homo sapiens
cagtaacttttctaagtgcagtgaaaggttttgatagttttccatttgtactttagtatcattccctgctg

SEQ ID NO: 171927 - DNA, 73 bp, Homo sapiens
ttctaagtgcagtgaaaggttttgatagttttccatttgtactttagtatcattccctgctgtaattagtgtg

SEQ ID NO: 171928 - DNA, 72 bp, Homo sapiens
tgaaaggttttgatagttttccatttgtactttagtatcattccctgctgtaattagtgtggctgaccctgt

SEQ ID NO: 171929 - DNA, 75 bp, Homo sapiens
tttgatagttttccatttgtactttagtatcattccctgctgtaattagtgtggctgaccctgttcatgtagaaa

SEQ ID NO: 171930 - DNA, 74 bp, Homo sapiens
ttttccatttgtactttagtatcattccctgctgtaattagtgtggctgaccctgttcatgtagaaaattccta

SEQ ID NO: 171931 - DNA, 72 bp, Homo sapiens
tttagtatcattccctgctgtaattagtgtggctgaccctgttcatgtagaaaattcctacgtggtagggtt

SEQ ID NO: 171932 - DNA, 71 bp, Homo sapiens
attccctgctgtaattagtgtggctgaccctgttcatgtagaaaattcctacgtggtagggtttgaagaat

SEQ ID NO: 171933 - DNA, 73 bp, Homo sapiens
gctgaccctgttcatgtagaaaattcctacgtggtagggtttgaagaattccaggagagtagtaagctctgga

SEQ ID NO: 171934 - DNA, 72 bp, Homo sapiens
ttcatgtagaaaattcctacgtggtagggtttgaagaattccaggagagtagtaagctctggaatagtgaag

SEQ ID NO: 171935 - DNA, 70 bp, Homo sapiens
aaaattcctacgtggtagggtttgaagaattccaggagagtagtaagctctggaatagtgaagtcttgaa

SEQ ID NO: 171936 - DNA, 72 bp, Homo sapiens
ctacgtggtagggtttgaagaattccaggagagtagtaagctctggaatagtgaagtcttgaagaaaatcta

SEQ ID NO: 171937 - DNA, 72 bp, Homo sapiens
ggtttgaagaattccaggagagtagtaagctctggaatagtgaagtcttgaagaaaatctaggttcagacct

SEQ ID NO: 171938 - DNA, 73 bp, Homo sapiens
aattccaggagagtagtaagctctggaatagtgaagtcttgaagaaaatctaggttcagaccttgccccgtca

SEQ ID NO: 171939 - DNA, 77 bp, Homo sapiens
tagtaagctctggaatagtgaagtcttgaagaaaatctaggttcagaccttgccccgtcatgtgcacagggtcatct

SEQ ID NO: 171940 - DNA, 76 bp, Homo sapiens
tctggaatagtgaagtcttgaagaaaatctaggttcagaccttgccccgtcatgtgcacagggtcatcttgggtaa

SEQ ID NO: 171941 - DNA, 75 bp, Homo sapiens
aagtcttgaagaaaatctaggttcagaccttgccccgtcatgtgcacagggtcatcttgggtaagagagtagatc

SEQ ID NO: 171942 - DNA, 75 bp, Homo sapiens
aagaaaatctaggttcagaccttgccccgtcatgtgcacagggtcatcttgggtaagagagtagatctctaagag

SEQ ID NO: 171943 - DNA, 77 bp, Homo sapiens
ttcagaccttgccccgtcatgtgcacagggtcatcttgggtaagagagtagatctctaagagtgacttacaaaatta

SEQ ID NO: 171944 - DNA, 80 bp, Homo sapiens
tgtgcacagggtcatcttgggtaagagagtagatctctaagagtgacttacaaaattagctcactcacaagtcgatatta

SEQ ID NO: 171945 - DNA, 77 bp, Homo sapiens
ttgggtaagagagtagatctctaagagtgacttacaaaattagctcactcacaagtcgatattaagacaatatgaaa

SEQ ID NO: 171946 - DNA, 78 bp, Homo sapiens
ctaagagtgacttacaaaattagctcactcacaagtcgatattaagacaatatgaaaacatcattccatcaagtcctc

SEQ ID NO: 171947 - DNA, 77 bp, Homo sapiens
ttacaaaattagctcactcacaagtcgatattaagacaatatgaaaacatcattccatcaagtcctcccttgaggcc

SEQ ID NO: 171948 - DNA, 81 bp, Homo sapiens
tcactcacaagtcgatattaagacaatatgaaaacatcattccatcaagtcctcccttgaggccccacacacagctgtcta

SEQ ID NO: 171949 - DNA, 76 bp, Homo sapiens
attaagacaatatgaaaacatcattccatcaagtcctcccttgaggccccacacacagctgtctaaaattgtccag

SEQ ID NO: 171950 - DNA, 77 bp, Homo sapiens
aaacatcattccatcaagtcctcccttgaggccccacacacagctgtctaaaattgtccagtcacttgcattaagaa

SEQ ID NO: 171951 - DNA, 76 bp, Homo sapiens
attccatcaagtcctcccttgaggccccacacacagctgtctaaaattgtccagtcacttgcattaagaaactgaa

SEQ ID NO: 171952 - DNA, 78 bp, Homo sapiens
gccccacacacagctgtctaaaattgtccagtcacttgcattaagaaactgaaggctgcactgccgaaactgtctctt

SEQ ID NO: 171953 - DNA, 77 bp, Homo sapiens
acagctgtctaaaattgtccagtcacttgcattaagaaactgaaggctgcactgccgaaactgtctctttcaataaa

SEQ ID NO: 171954 - DNA, 73 bp, Homo sapiens
taaaattgtccagtcacttgcattaagaaactgaaggctgcactgccgaaactgtctctttcaataaaaaggt

SEQ ID NO: 171955 - DNA, 73 bp, Homo sapiens
agtcacttgcattaagaaactgaaggctgcactgccgaaactgtctctttcaataaaaaggtttcctgaagaa

SEQ ID NO: 171956 - DNA, 69 bp, Homo sapiens
attaagaaactgaaggctgcactgccgaaactgtctctttcaataaaaaggtttcctgaagaaaaaaca

SEQ ID NO: 171957 - DNA, 72 bp, Homo sapiens
tgaaggctgcactgccgaaactgtctctttcaataaaaaggtttcctgaagaaaaaacagtgagactcttta

SEQ ID NO: 171958 - DNA, 68 bp, Homo sapiens
cactgccgaaactgtctctttcaataaaaaggtttcctgaagaaaaaacagtgagactctttaccatt

SEQ ID NO: 171959 - DNA, 70 bp, Homo sapiens
actgtctctttcaataaaaaggtttcctgaagaaaaaacagtgagactctttaccatttccgcattgtga

SEQ ID NO: 171960 - DNA, 69 bp, Homo sapiens
ctttcaataaaaaggtttcctgaagaaaaaacagtgagactctttaccatttccgcattgtgagccacg

SEQ ID NO: 171961 - DNA, 75 bp, Homo sapiens
aaaggtttcctgaagaaaaaacagtgagactctttaccatttccgcattgtgagccacggcatctcaggctgaga

SEQ ID NO: 171962 - DNA, 77 bp, Homo sapiens
aaaaaacagtgagactctttaccatttccgcattgtgagccacggcatctcaggctgagatggacctacctcactgt

SEQ ID NO: 171963 - DNA, 81 bp, Homo sapiens
agtgagactctttaccatttccgcattgtgagccacggcatctcaggctgagatggacctacctcactgttcagtaccatc

SEQ ID NO: 171964 - DNA, 87 bp, Homo sapiens
ttccgcattgtgagccacggcatctcaggctgagatggacctacctcactgttcagtaccatctgtggttctgaagctgattcatca

SEQ ID NO: 171965 - DNA, 87 bp, Homo sapiens
agccacggcatctcaggctgagatggacctacctcactgttcagtaccatctgtggttctgaagctgattcatcaggcagtagagca

SEQ ID NO: 171966 - DNA, 87 bp, Homo sapiens
atctcaggctgagatggacctacctcactgttcagtaccatctgtggttctgaagctgattcatcaggcagtagagcagctggaatc

SEQ ID NO: 171967 - DNA, 84 bp, Homo sapiens
agatggacctacctcactgttcagtaccatctgtggttctgaagctgattcatcaggcagtagagcagctggaatcccacacaa

SEQ ID NO: 171968 - DNA, 86 bp, Homo sapiens
tacctcactgttcagtaccatctgtggttctgaagctgattcatcaggcagtagagcagctggaatcccacacaatgtcagacaaa

SEQ ID NO: 171969 - DNA, 85 bp, Homo sapiens
ttcagtaccatctgtggttctgaagctgattcatcaggcagtagagcagctggaatcccacacaatgtcagacaaaagaccagac

SEQ ID NO: 171970 - DNA, 85 bp, Homo sapiens
tctgtggttctgaagctgattcatcaggcagtagagcagctggaatcccacacaatgtcagacaaaagaccagactggatgggaa

SEQ ID NO: 171971 - DNA, 82 bp, Homo sapiens
aagctgattcatcaggcagtagagcagctggaatcccacacaatgtcagacaaaagaccagactggatgggaaggaatgtcg

SEQ ID NO: 171972 - DNA, 78 bp, Homo sapiens
atcaggcagtagagcagctggaatcccacacaatgtcagacaaaagaccagactggatgggaaggaatgtcgggggaa

SEQ ID NO: 171973 - DNA, 74 bp, Homo sapiens
agtagagcagctggaatcccacacaatgtcagacaaaagaccagactggatgggaaggaatgtcgggggaaggg

SEQ ID NO: 171974 - DNA, 71 bp, Homo sapiens
aatcccacacaatgtcagacaaaagaccagactggatgggaaggaatgtcgggggaagggtcctggaggaa

SEQ ID NO: 171975 - DNA, 72 bp, Homo sapiens
aatgtcagacaaaagaccagactggatgggaaggaatgtcgggggaagggtcctggaggaagagtactcaga

SEQ ID NO: 171976 - DNA, 70 bp, Homo sapiens
agacaaaagaccagactggatgggaaggaatgtcgggggaagggtcctggaggaagagtactcagactgg

SEQ ID NO: 171977 - DNA, 71 bp, Homo sapiens
actggatgggaaggaatgtcgggggaagggtcctggaggaagagtactcagactggggatctgtccagaaa

SEQ ID NO: 171978 - DNA, 73 bp, Homo sapiens
aggaatgtcgggggaagggtcctggaggaagagtactcagactggggatctgtccagaaagcagatatgggta

SEQ ID NO: 171979 - DNA, 75 bp, Homo sapiens
ggggaagggtcctggaggaagagtactcagactggggatctgtccagaaagcagatatgggtatccagaggaaga

SEQ ID NO: 171980 - DNA, 76 bp, Homo sapiens
agggtcctggaggaagagtactcagactggggatctgtccagaaagcagatatgggtatccagaggaagagaggag

SEQ ID NO: 171981 - DNA, 77 bp, Homo sapiens
aggaagagtactcagactggggatctgtccagaaagcagatatgggtatccagaggaagagaggagggagagaagga

SEQ ID NO: 171982 - DNA, 69 bp, Homo sapiens
gggagagaaggaagagggagaccgtggcaactaagggacaactggagggaatctggtagggaaaatctg

SEQ ID NO: 171983 - DNA, 69 bp, Homo sapiens
aaggaagagggagaccgtggcaactaagggacaactggagggaatctggtagggaaaatctggaagcca

SEQ ID NO: 171984 - DNA, 68 bp, Homo sapiens
accgtggcaactaagggacaactggagggaatctggtagggaaaatctggaagccactacaatggttt

SEQ ID NO: 171985 - DNA, 69 bp, Homo sapiens
aactaagggacaactggagggaatctggtagggaaaatctggaagccactacaatggttttcagccttg

SEQ ID NO: 171986 - DNA, 70 bp, Homo sapiens
taagggacaactggagggaatctggtagggaaaatctggaagccactacaatggttttcagccttgttcg

SEQ ID NO: 171987 - DNA, 70 bp, Homo sapiens
actggagggaatctggtagggaaaatctggaagccactacaatggttttcagccttgttcggacccttga

SEQ ID NO: 171988 - DNA, 70 bp, Homo sapiens
agggaatctggtagggaaaatctggaagccactacaatggttttcagccttgttcggacccttgatcaaa

SEQ ID NO: 171989 - DNA, 70 bp, Homo sapiens
aatctggtagggaaaatctggaagccactacaatggttttcagccttgttcggacccttgatcaaagaaa

SEQ ID NO: 171990 - DNA, 70 bp, Homo sapiens
atctggtagggaaaatctggaagccactacaatggttttcagccttgttcggacccttgatcaaagaaat

SEQ ID NO: 171991 - DNA, 74 bp, Homo sapiens
gaaaatctggaagccactacaatggttttcagccttgttcggacccttgatcaaagaaattgttcgatctcata

SEQ ID NO: 171992 - DNA, 73 bp, Homo sapiens
tctggaagccactacaatggttttcagccttgttcggacccttgatcaaagaaattgttcgatctcataaaaa

SEQ ID NO: 171993 - DNA, 72 bp, Homo sapiens
aagccactacaatggttttcagccttgttcggacccttgatcaaagaaattgttcgatctcataaaaatgtc

SEQ ID NO: 171994 - DNA, 72 bp, Homo sapiens
ggttttcagccttgttcggacccttgatcaaagaaattgttcgatctcataaaaatgtccatatacataaaa

SEQ ID NO: 171995 - DNA, 72 bp, Homo sapiens
agccttgttcggacccttgatcaaagaaattgttcgatctcataaaaatgtccatatacataaaattttgct

SEQ ID NO: 171996 - DNA, 73 bp, Homo sapiens
ggacccttgatcaaagaaattgttcgatctcataaaaatgtccatatacataaaattttgcttataatttcaa

SEQ ID NO: 171997 - DNA, 74 bp, Homo sapiens
tcaaagaaattgttcgatctcataaaaatgtccatatacataaaattttgcttataatttcaagaagcttatcc

SEQ ID NO: 171998 - DNA, 72 bp, Homo sapiens
cgatctcataaaaatgtccatatacataaaattttgcttataatttcaagaagcttatcctttattaaagcc

SEQ ID NO: 171999 - DNA, 71 bp, Homo sapiens
aaatgtccatatacataaaattttgcttataatttcaagaagcttatcctttattaaagcccatttatgaa

SEQ ID NO: 172000 - DNA, 69 bp, Homo sapiens
atacataaaattttgcttataatttcaagaagcttatcctttattaaagcccatttatgaacttcaggg

SEQ ID NO: 172001 - DNA, 67 bp, Homo sapiens
cttataatttcaagaagcttatcctttattaaagcccatttatgaacttcagggtaagaaaataaaa

SEQ ID NO: 172002 - DNA, 75 bp, Homo sapiens
aataaaataaaaagttacagtgtgcatctatgaagatccaagtggcttgaccacttcgcagtttgcctaaagatg

SEQ ID NO: 172003 - DNA, 74 bp, Homo sapiens
aaaataaaaagttacagtgtgcatctatgaagatccaagtggcttgaccacttcgcagtttgcctaaagatggg

SEQ ID NO: 172004 - DNA, 74 bp, Homo sapiens
aaaagttacagtgtgcatctatgaagatccaagtggcttgaccacttcgcagtttgcctaaagatggggtattt

SEQ ID NO: 172005 - DNA, 75 bp, Homo sapiens
aaagttacagtgtgcatctatgaagatccaagtggcttgaccacttcgcagtttgcctaaagatggggtattttc

SEQ ID NO: 172006 - DNA, 78 bp, Homo sapiens
tacagtgtgcatctatgaagatccaagtggcttgaccacttcgcagtttgcctaaagatggggtattttccaaaagca

SEQ ID NO: 172007 - DNA, 78 bp, Homo sapiens
cacttctcaaaataagacatttatacagacaatgaacatgaaaacaagctcatccatcaccactgggcattaaagaaa

SEQ ID NO: 172008 - DNA, 79 bp, Homo sapiens
ctcaaaataagacatttatacagacaatgaacatgaaaacaagctcatccatcaccactgggcattaaagaaatgcaaa

SEQ ID NO: 172009 - DNA, 65 bp, Homo sapiens
ggggtgggggtggattttgcttttgttttattgtatgttttttagttgccaaaacttataagcca

SEQ ID NO: 172010 - DNA, 69 bp, Homo sapiens
gtggattttgcttttgttttattgtatgttttttagttgccaaaacttataagccaaaatataacagca

SEQ ID NO: 172011 - DNA, 70 bp, Homo sapiens
ttttgttttattgtatgttttttagttgccaaaacttataagccaaaatataacagcaataaattgtgca

SEQ ID NO: 172012 - DNA, 73 bp, Homo sapiens
ttgtatgttttttagttgccaaaacttataagccaaaatataacagcaataaattgtgcattctttgacaaga

SEQ ID NO: 172013 - DNA, 72 bp, Homo sapiens
tgttttttagttgccaaaacttataagccaaaatataacagcaataaattgtgcattctttgacaagagaac

SEQ ID NO: 172014 - DNA, 75 bp, Homo sapiens
tttagttgccaaaacttataagccaaaatataacagcaataaattgtgcattctttgacaagagaacgcaatgaa

SEQ ID NO: 172015 - DNA, 76 bp, Homo sapiens
ttgccaaaacttataagccaaaatataacagcaataaattgtgcattctttgacaagagaacgcaatgaaagcgac

SEQ ID NO: 172016 - DNA, 75 bp, Homo sapiens
ccaaaacttataagccaaaatataacagcaataaattgtgcattctttgacaagagaacgcaatgaaagcgacca

SEQ ID NO: 172017 - DNA, 74 bp, Homo sapiens
aacttataagccaaaatataacagcaataaattgtgcattctttgacaagagaacgcaatgaaagcgaccaagg

SEQ ID NO: 172018 - DNA, 75 bp, Homo sapiens
ataagccaaaatataacagcaataaattgtgcattctttgacaagagaacgcaatgaaagcgaccaaggtggaaa

SEQ ID NO: 172019 - DNA, 73 bp, Homo sapiens
aaaatataacagcaataaattgtgcattctttgacaagagaacgcaatgaaagcgaccaaggtggaaagaggt

SEQ ID NO: 172020 - DNA, 75 bp, Homo sapiens
taacagcaataaattgtgcattctttgacaagagaacgcaatgaaagcgaccaaggtggaaagaggttgagaaaa

SEQ ID NO: 172021 - DNA, 71 bp, Homo sapiens
aataaattgtgcattctttgacaagagaacgcaatgaaagcgaccaaggtggaaagaggttgagaaaaaaa

SEQ ID NO: 172022 - DNA, 71 bp, Homo sapiens
aaattgtgcattctttgacaagagaacgcaatgaaagcgaccaaggtggaaagaggttgagaaaaaaaaca

SEQ ID NO: 172023 - DNA, 72 bp, Homo sapiens
tttgacaagagaacgcaatgaaagcgaccaaggtggaaagaggttgagaaaaaaaacaacatgctgttggaa

SEQ ID NO: 172024 - DNA, 69 bp, Homo sapiens
aacgcaatgaaagcgaccaaggtggaaagaggttgagaaaaaaaacaacatgctgttggaaccaaagat

SEQ ID NO: 172025 - DNA, 68 bp, Homo sapiens
aagcgaccaaggtggaaagaggttgagaaaaaaaacaacatgctgttggaaccaaagatttcacttta

SEQ ID NO: 172026 - DNA, 72 bp, Homo sapiens
gtggaaagaggttgagaaaaaaaacaacatgctgttggaaccaaagatttcactttagtctcagcagtgaaa

SEQ ID NO: 172027 - DNA, 74 bp, Homo sapiens
gttgagaaaaaaaacaacatgctgttggaaccaaagatttcactttagtctcagcagtgaaatatttcaggaca

SEQ ID NO: 172028 - DNA, 74 bp, Homo sapiens
aaaacaacatgctgttggaaccaaagatttcactttagtctcagcagtgaaatatttcaggacagtttcaagta

SEQ ID NO: 172029 - DNA, 76 bp, Homo sapiens
atgctgttggaaccaaagatttcactttagtctcagcagtgaaatatttcaggacagtttcaagtaaatcacttga

SEQ ID NO: 172030 - DNA, 75 bp, Homo sapiens
tggaaccaaagatttcactttagtctcagcagtgaaatatttcaggacagtttcaagtaaatcacttgagttcaa

SEQ ID NO: 172031 - DNA, 80 bp, Homo sapiens
tcactttagtctcagcagtgaaatatttcaggacagtttcaagtaaatcacttgagttcaaggcatgagctctcaataat

SEQ ID NO: 172032 - DNA, 77 bp, Homo sapiens
gtgaaatatttcaggacagtttcaagtaaatcacttgagttcaaggcatgagctctcaataattatttaacaaagca

SEQ ID NO: 172033 - DNA, 75 bp, Homo sapiens
gacagtttcaagtaaatcacttgagttcaaggcatgagctctcaataattatttaacaaagcattagaaagtacc

SEQ ID NO: 172034 - DNA, 75 bp, Homo sapiens
tcaagtaaatcacttgagttcaaggcatgagctctcaataattatttaacaaagcattagaaagtaccccaactg

SEQ ID NO: 172035 - DNA, 74 bp, Homo sapiens
acttgagttcaaggcatgagctctcaataattatttaacaaagcattagaaagtaccccaactgttccagactc

SEQ ID NO: 172036 - DNA, 71 bp, Homo sapiens
aaggcatgagctctcaataattatttaacaaagcattagaaagtaccccaactgttccagactcccacttt

SEQ ID NO: 172037 - DNA, 68 bp, Homo sapiens
ctcaataattatttaacaaagcattagaaagtaccccaactgttccagactcccacttttgaaggtct

SEQ ID NO: 172038 - DNA, 67 bp, Homo sapiens
ttatttaacaaagcattagaaagtaccccaactgttccagactcccacttttgaaggtcttacaaac

SEQ ID NO: 172039 - DNA, 70 bp, Homo sapiens
acaaagcattagaaagtaccccaactgttccagactcccacttttgaaggtcttacaaaccagcagagaa

SEQ ID NO: 172040 - DNA, 76 bp, Homo sapiens
aactgttccagactcccacttttgaaggtcttacaaaccagcagagaagtctgaattgcacggatgatagcagagt

SEQ ID NO: 172041 - DNA, 77 bp, Homo sapiens
tcccacttttgaaggtcttacaaaccagcagagaagtctgaattgcacggatgatagcagagttggatgtaataaat

SEQ ID NO: 172042 - DNA, 78 bp, Homo sapiens
ttttgaaggtcttacaaaccagcagagaagtctgaattgcacggatgatagcagagttggatgtaataaattctatct

SEQ ID NO: 172043 - DNA, 77 bp, Homo sapiens
agagaagtctgaattgcacggatgatagcagagttggatgtaataaattctatctttggggaggaagggtcatgaaa

SEQ ID NO: 172044 - DNA, 77 bp, Homo sapiens
aattgcacggatgatagcagagttggatgtaataaattctatctttggggaggaagggtcatgaaagtgtcaccaga

SEQ ID NO: 172045 - DNA, 76 bp, Homo sapiens
atgatagcagagttggatgtaataaattctatctttggggaggaagggtcatgaaagtgtcaccagaggcttagga

SEQ ID NO: 172046 - DNA, 73 bp, Homo sapiens
agagttggatgtaataaattctatctttggggaggaagggtcatgaaagtgtcaccagaggcttaggagagga

SEQ ID NO: 172047 - DNA, 73 bp, Homo sapiens
atgtaataaattctatctttggggaggaagggtcatgaaagtgtcaccagaggcttaggagaggacaaagtga

SEQ ID NO: 172048 - DNA, 74 bp, Homo sapiens
attctatctttggggaggaagggtcatgaaagtgtcaccagaggcttaggagaggacaaagtgagccaagcttg

SEQ ID NO: 172049 - DNA, 77 bp, Homo sapiens
atgaaagtgtcaccagaggcttaggagaggacaaagtgagccaagcttggcttccctgcagaaagagcttaggtgtc

SEQ ID NO: 172050 - DNA, 76 bp, Homo sapiens
agtgtcaccagaggcttaggagaggacaaagtgagccaagcttggcttccctgcagaaagagcttaggtgtccaaa

SEQ ID NO: 172051 - DNA, 75 bp, Homo sapiens
ttaggagaggacaaagtgagccaagcttggcttccctgcagaaagagcttaggtgtccaaacgtgaagcaaccca

SEQ ID NO: 172052 - DNA, 71 bp, Homo sapiens
acaaagtgagccaagcttggcttccctgcagaaagagcttaggtgtccaaacgtgaagcaacccagggttt

SEQ ID NO: 172053 - DNA, 71 bp, Homo sapiens
agccaagcttggcttccctgcagaaagagcttaggtgtccaaacgtgaagcaacccagggttttagagaag

SEQ ID NO: 172054 - DNA, 73 bp, Homo sapiens
cttggcttccctgcagaaagagcttaggtgtccaaacgtgaagcaacccagggttttagagaaggctgagaga

SEQ ID NO: 172055 - DNA, 72 bp, Homo sapiens
agaaagagcttaggtgtccaaacgtgaagcaacccagggttttagagaaggctgagagagagaggtccagga

SEQ ID NO: 172056 - DNA, 71 bp, Homo sapiens
agcttaggtgtccaaacgtgaagcaacccagggttttagagaaggctgagagagagaggtccaggaaaggc

SEQ ID NO: 172057 - DNA, 71 bp, Homo sapiens
aaacgtgaagcaacccagggttttagagaaggctgagagagagaggtccaggaaaggcctggcaaagcagg

SEQ ID NO: 172058 - DNA, 72 bp, Homo sapiens
aagcaacccagggttttagagaaggctgagagagagaggtccaggaaaggcctggcaaagcagggtgtcatt

SEQ ID NO: 172059 - DNA, 78 bp, Homo sapiens
ttttagagaaggctgagagagagaggtccaggaaaggcctggcaaagcagggtgtcatttgtcttcaacatcctcata

SEQ ID NO: 172060 - DNA, 78 bp, Homo sapiens
agagagaggtccaggaaaggcctggcaaagcagggtgtcatttgtcttcaacatcctcatatcccccagtgtccatca

SEQ ID NO: 172061 - DNA, 78 bp, Homo sapiens
aaaggcctggcaaagcagggtgtcatttgtcttcaacatcctcatatcccccagtgtccatcagggccagatcgtcta

SEQ ID NO: 172062 - DNA, 80 bp, Homo sapiens
tggcaaagcagggtgtcatttgtcttcaacatcctcatatcccccagtgtccatcagggccagatcgtctattaagcatt

SEQ ID NO: 172063 - DNA, 81 bp, Homo sapiens
agggtgtcatttgtcttcaacatcctcatatcccccagtgtccatcagggccagatcgtctattaagcatttgctgaatga

SEQ ID NO: 172064 - DNA, 83 bp, Homo sapiens
ttgtcttcaacatcctcatatcccccagtgtccatcagggccagatcgtctattaagcatttgctgaatgaagaagcagccaa

SEQ ID NO: 172065 - DNA, 79 bp, Homo sapiens
ccagtgtccatcagggccagatcgtctattaagcatttgctgaatgaagaagcagccaaagagagactactggggttta

SEQ ID NO: 172066 - DNA, 78 bp, Homo sapiens
agatcgtctattaagcatttgctgaatgaagaagcagccaaagagagactactggggtttagagaaggaagtgatgaa

SEQ ID NO: 172067 - DNA, 80 bp, Homo sapiens
tgaatgaagaagcagccaaagagagactactggggtttagagaaggaagtgatgaacagttccatagccatcaagtcaga

SEQ ID NO: 172068 - DNA, 79 bp, Homo sapiens
agcagccaaagagagactactggggtttagagaaggaagtgatgaacagttccatagccatcaagtcagatgccaagaa

SEQ ID NO: 172069 - DNA, 75 bp, Homo sapiens
aaagagagactactggggtttagagaaggaagtgatgaacagttccatagccatcaagtcagatgccaagaaaaa

SEQ ID NO: 172070 - DNA, 74 bp, Homo sapiens
tggggtttagagaaggaagtgatgaacagttccatagccatcaagtcagatgccaagaaaaagcaaccctttac

SEQ ID NO: 172071 - DNA, 75 bp, Homo sapiens
ttagagaaggaagtgatgaacagttccatagccatcaagtcagatgccaagaaaaagcaaccctttactgaaggt

SEQ ID NO: 172072 - DNA, 79 bp, Homo sapiens
agtgatgaacagttccatagccatcaagtcagatgccaagaaaaagcaaccctttactgaaggttgtgcttcacacata

SEQ ID NO: 172073 - DNA, 79 bp, Homo sapiens
agttccatagccatcaagtcagatgccaagaaaaagcaaccctttactgaaggttgtgcttcacacatatcacgtcatc

SEQ ID NO: 172074 - DNA, 80 bp, Homo sapiens
aagcaaccctttactgaaggttgtgcttcacacatatcacgtcatcctcatgaccaccctatgaggccatgccattatta

SEQ ID NO: 172075 - DNA, 81 bp, Homo sapiens
aaggttgtgcttcacacatatcacgtcatcctcatgaccaccctatgaggccatgccattattatccagatgaaaattatt

SEQ ID NO: 172076 - DNA, 83 bp, Homo sapiens
ttcacacatatcacgtcatcctcatgaccaccctatgaggccatgccattattatccagatgaaaattatttctagatgaaaa

SEQ ID NO: 172077 - DNA, 79 bp, Homo sapiens
atcacgtcatcctcatgaccaccctatgaggccatgccattattatccagatgaaaattatttctagatgaaaagggta

SEQ ID NO: 172078 - DNA, 75 bp, Homo sapiens
gccatgccattattatccagatgaaaattatttctagatgaaaagggtagctaaaggagataaatggtaaagcac

SEQ ID NO: 172079 - DNA, 71 bp, Homo sapiens
tccagatgaaaattatttctagatgaaaagggtagctaaaggagataaatggtaaagcacttgggagttag

SEQ ID NO: 172080 - DNA, 70 bp, Homo sapiens
aattatttctagatgaaaagggtagctaaaggagataaatggtaaagcacttgggagttaggtctcttca

SEQ ID NO: 172081 - DNA, 73 bp, Homo sapiens
tttctagatgaaaagggtagctaaaggagataaatggtaaagcacttgggagttaggtctcttcatcactata

SEQ ID NO: 172082 - DNA, 72 bp, Homo sapiens
aaaagggtagctaaaggagataaatggtaaagcacttgggagttaggtctcttcatcactatactcgactgc

SEQ ID NO: 172083 - DNA, 75 bp, Homo sapiens
taaaggagataaatggtaaagcacttgggagttaggtctcttcatcactatactcgactgccttctggcagggaa

SEQ ID NO: 172084 - DNA, 79 bp, Homo sapiens
taaatggtaaagcacttgggagttaggtctcttcatcactatactcgactgccttctggcagggaagagcagcatcact

SEQ ID NO: 172085 - DNA, 78 bp, Homo sapiens
acttgggagttaggtctcttcatcactatactcgactgccttctggcagggaagagcagcatcacttccctctggaag

SEQ ID NO: 172086 - DNA, 80 bp, Homo sapiens
agttaggtctcttcatcactatactcgactgccttctggcagggaagagcagcatcacttccctctggaagggcagaggc

SEQ ID NO: 172087 - DNA, 82 bp, Homo sapiens
ttcatcactatactcgactgccttctggcagggaagagcagcatcacttccctctggaagggcagaggcccagaccagtcaa

SEQ ID NO: 172088 - DNA, 78 bp, Homo sapiens
atactcgactgccttctggcagggaagagcagcatcacttccctctggaagggcagaggcccagaccagtcaacctgg

SEQ ID NO: 172089 - DNA, 79 bp, Homo sapiens
tctggcagggaagagcagcatcacttccctctggaagggcagaggcccagaccagtcaacctgggcgacacaggcaaaa

SEQ ID NO: 172090 - DNA, 77 bp, Homo sapiens
agagcagcatcacttccctctggaagggcagaggcccagaccagtcaacctgggcgacacaggcaaaagatttgtaa

SEQ ID NO: 172091 - DNA, 74 bp, Homo sapiens
atcacttccctctggaagggcagaggcccagaccagtcaacctgggcgacacaggcaaaagatttgtaaaatga

SEQ ID NO: 172092 - DNA, 75 bp, Homo sapiens
tggaagggcagaggcccagaccagtcaacctgggcgacacaggcaaaagatttgtaaaatgactcagagtaccaa

SEQ ID NO: 172093 - DNA, 74 bp, Homo sapiens
agaggcccagaccagtcaacctgggcgacacaggcaaaagatttgtaaaatgactcagagtaccaaaggacata

SEQ ID NO: 172094 - DNA, 71 bp, Homo sapiens
aggcaaaagatttgtaaaatgactcagagtaccaaaggacatacagcaaaaaggctccttccaccactact

SEQ ID NO: 172095 - DNA, 72 bp, Homo sapiens
aaaatgactcagagtaccaaaggacatacagcaaaaaggctccttccaccactacttcctggccctgctttc

SEQ ID NO: 172096 - DNA, 78 bp, Homo sapiens
ttccaccactacttcctggccctgctttcttccctaacagcaagcactattgtcagattcttgtatatacttgcacaa

SEQ ID NO: 172097 - DNA, 78 bp, Homo sapiens
cttcctggccctgctttcttccctaacagcaagcactattgtcagattcttgtatatacttgcacaagtagaattcta

SEQ ID NO: 172098 - DNA, 78 bp, Homo sapiens
cctgctttcttccctaacagcaagcactattgtcagattcttgtatatacttgcacaagtagaattctatgcattttt

SEQ ID NO: 172099 - DNA, 78 bp, Homo sapiens
cttccctaacagcaagcactattgtcagattcttgtatatacttgcacaagtagaattctatgcatttttttgtacaa

SEQ ID NO: 172100 - DNA, 82 bp, Homo sapiens
cagcaagcactattgtcagattcttgtatatacttgcacaagtagaattctatgcatttttttgtacaaacacagcattcta

SEQ ID NO: 172101 - DNA, 82 bp, Homo sapiens
tcagattcttgtatatacttgcacaagtagaattctatgcatttttttgtacaaacacagcattctacagacattcttctgc

SEQ ID NO: 172102 - DNA, 80 bp, Homo sapiens
tcttgtatatacttgcacaagtagaattctatgcatttttttgtacaaacacagcattctacagacattcttctgctcct

SEQ ID NO: 172103 - DNA, 81 bp, Homo sapiens
ttgcacaagtagaattctatgcatttttttgtacaaacacagcattctacagacattcttctgctccttgctttgctcatt

SEQ ID NO: 172104 - DNA, 79 bp, Homo sapiens
atttttttgtacaaacacagcattctacagacattcttctgctccttgctttgctcatttaatgatatatctcaggaac

SEQ ID NO: 172105 - DNA, 82 bp, Homo sapiens
agacattcttctgctccttgctttgctcatttaatgatatatctcaggaacgattctgtatcaacacacataaatgtttcat

SEQ ID NO: 172106 - DNA, 78 bp, Homo sapiens
ttgctttgctcatttaatgatatatctcaggaacgattctgtatcaacacacataaatgtttcattctttaaaaaaga

SEQ ID NO: 172107 - DNA, 76 bp, Homo sapiens
catttaatgatatatctcaggaacgattctgtatcaacacacataaatgtttcattctttaaaaaagattgatttc

SEQ ID NO: 172108 - DNA, 76 bp, Homo sapiens
tatatctcaggaacgattctgtatcaacacacataaatgtttcattctttaaaaaagattgatttctttatgctta

SEQ ID NO: 172109 - DNA, 74 bp, Homo sapiens
tcaacacacataaatgtttcattctttaaaaaagattgatttctttatgcttaataattagttcttatcaagca

SEQ ID NO: 172110 - DNA, 72 bp, Homo sapiens
aatgtttcattctttaaaaaagattgatttctttatgcttaataattagttcttatcaagcataattcacta

SEQ ID NO: 172111 - DNA, 73 bp, Homo sapiens
tctttaaaaaagattgatttctttatgcttaataattagttcttatcaagcataattcactacagagggagaa

SEQ ID NO: 172112 - DNA, 73 bp, Homo sapiens
agattgatttctttatgcttaataattagttcttatcaagcataattcactacagagggagaagtcttaaaaa

SEQ ID NO: 172113 - DNA, 73 bp, Homo sapiens
gatttctttatgcttaataattagttcttatcaagcataattcactacagagggagaagtcttaaaaaatcca

SEQ ID NO: 172114 - DNA, 75 bp, Homo sapiens
tgcttaataattagttcttatcaagcataattcactacagagggagaagtcttaaaaaatccaattctgacagat

SEQ ID NO: 172115 - DNA, 73 bp, Homo sapiens
tcaagcataattcactacagagggagaagtcttaaaaaatccaattctgacagattttagaacaaaaccacaa

SEQ ID NO: 172116 - DNA, 69 bp, Homo sapiens
cactacagagggagaagtcttaaaaaatccaattctgacagattttagaacaaaaccacaaactccaaa

SEQ ID NO: 172117 - DNA, 67 bp, Homo sapiens
agggagaagtcttaaaaaatccaattctgacagattttagaacaaaaccacaaactccaaatatggt

SEQ ID NO: 172118 - DNA, 70 bp, Homo sapiens
ataaaaagaattgccagcatgtttttaaattaagtgttatcagacaaaacaagataaagaccttgaaata

SEQ ID NO: 172119 - DNA, 72 bp, Homo sapiens
agaattgccagcatgtttttaaattaagtgttatcagacaaaacaagataaagaccttgaaataatattatc

SEQ ID NO: 172120 - DNA, 71 bp, Homo sapiens
gcatgtttttaaattaagtgttatcagacaaaacaagataaagaccttgaaataatattatcttaatgaac

SEQ ID NO: 172121 - DNA, 72 bp, Homo sapiens
taagtgttatcagacaaaacaagataaagaccttgaaataatattatcttaatgaaccatatcctaaaagtc

SEQ ID NO: 172122 - DNA, 71 bp, Homo sapiens
cagacaaaacaagataaagaccttgaaataatattatcttaatgaaccatatcctaaaagtcctcacccag

SEQ ID NO: 172123 - DNA, 70 bp, Homo sapiens
caagataaagaccttgaaataatattatcttaatgaaccatatcctaaaagtcctcacccaggtagattt

SEQ ID NO: 172124 - DNA, 67 bp, Homo sapiens
aaagaccttgaaataatattatcttaatgaaccatatcctaaaagtcctcacccaggtagatttttt

SEQ ID NO: 172125 - DNA, 69 bp, Homo sapiens
atattatcttaatgaaccatatcctaaaagtcctcacccaggtagatttttttgttgtttcttccaata

SEQ ID NO: 172126 - DNA, 69 bp, Homo sapiens
tatcttaatgaaccatatcctaaaagtcctcacccaggtagatttttttgttgtttcttccaataacta

SEQ ID NO: 172127 - DNA, 67 bp, Homo sapiens
cttaatgaaccatatcctaaaagtcctcacccaggtagatttttttgttgtttcttccaataactaa

SEQ ID NO: 172128 - DNA, 67 bp, Homo sapiens
gaaccatatcctaaaagtcctcacccaggtagatttttttgttgtttcttccaataactaaaatctc

SEQ ID NO: 172129 - DNA, 67 bp, Homo sapiens
ctaaaagtcctcacccaggtagatttttttgttgtttcttccaataactaaaatctctcacataggg

SEQ ID NO: 172130 - DNA, 69 bp, Homo sapiens
tcctcacccaggtagatttttttgttgtttcttccaataactaaaatctctcacataggggtcaactaa

SEQ ID NO: 172131 - DNA, 69 bp, Homo sapiens
ctcacccaggtagatttttttgttgtttcttccaataactaaaatctctcacataggggtcaactaaga

SEQ ID NO: 172132 - DNA, 71 bp, Homo sapiens
caggtagatttttttgttgtttcttccaataactaaaatctctcacataggggtcaactaagagtgagcaa

SEQ ID NO: 172133 - DNA, 72 bp, Homo sapiens
ttttgttgtttcttccaataactaaaatctctcacataggggtcaactaagagtgagcaataaggattgacg

SEQ ID NO: 172134 - DNA, 73 bp, Homo sapiens
aataactaaaatctctcacataggggtcaactaagagtgagcaataaggattgacggctctttaacatgttaa

SEQ ID NO: 172135 - DNA, 69 bp, Homo sapiens
ataggggtcaactaagagtgagcaataaggattgacggctctttaacatgttaaagaaattcctttact

SEQ ID NO: 172136 - DNA, 70 bp, Homo sapiens
gtcaactaagagtgagcaataaggattgacggctctttaacatgttaaagaaattcctttacttttccaa

SEQ ID NO: 172137 - DNA, 69 bp, Homo sapiens
tgagcaataaggattgacggctctttaacatgttaaagaaattcctttacttttccaaaacaactcctc

SEQ ID NO: 172138 - DNA, 65 bp, Homo sapiens
aaggattgacggctctttaacatgttaaagaaattcctttacttttccaaaacaactcctccatt

SEQ ID NO: 172139 - DNA, 63 bp, Homo sapiens
ggctctttaacatgttaaagaaattcctttacttttccaaaacaactcctccatttaaaaaaa

SEQ ID NO: 172140 - DNA, 68 bp, Homo sapiens
cctttacttttccaaaacaactcctccatttaaaaaaagtatggctcagcacatcatagtatttagtt

SEQ ID NO: 172141 - DNA, 71 bp, Homo sapiens
cttttccaaaacaactcctccatttaaaaaaagtatggctcagcacatcatagtatttagtttactatctg

SEQ ID NO: 172142 - DNA, 73 bp, Homo sapiens
ctcctccatttaaaaaaagtatggctcagcacatcatagtatttagtttactatctgttaattgtaaaatgga

SEQ ID NO: 172143 - DNA, 74 bp, Homo sapiens
ttaaaaaaagtatggctcagcacatcatagtatttagtttactatctgttaattgtaaaatggatagacatttc

SEQ ID NO: 172144 - DNA, 77 bp, Homo sapiens
gtatggctcagcacatcatagtatttagtttactatctgttaattgtaaaatggatagacatttctattaaactcag

SEQ ID NO: 172145 - DNA, 76 bp, Homo sapiens
tcagcacatcatagtatttagtttactatctgttaattgtaaaatggatagacatttctattaaactcagtagatt

SEQ ID NO: 172146 - DNA, 73 bp, Homo sapiens
tagtatttagtttactatctgttaattgtaaaatggatagacatttctattaaactcagtagattttaatgca

SEQ ID NO: 172147 - DNA, 71 bp, Homo sapiens
gtttactatctgttaattgtaaaatggatagacatttctattaaactcagtagattttaatgcattttttg

SEQ ID NO: 172148 - DNA, 70 bp, Homo sapiens
gttaattgtaaaatggatagacatttctattaaactcagtagattttaatgcattttttgttcttttcat

SEQ ID NO: 172149 - DNA, 72 bp, Homo sapiens
ggatagacatttctattaaactcagtagattttaatgcattttttgttcttttcatttagagtagatttgaa

SEQ ID NO: 172150 - DNA, 70 bp, Homo sapiens
gacatttctattaaactcagtagattttaatgcattttttgttcttttcatttagagtagatttgaaaaa

SEQ ID NO: 172151 - DNA, 73 bp, Homo sapiens
ctcagtagattttaatgcattttttgttcttttcatttagagtagatttgaaaaatatcatcacatgaaaaag

SEQ ID NO: 172152 - DNA, 72 bp, Homo sapiens
tttaatgcattttttgttcttttcatttagagtagatttgaaaaatatcatcacatgaaaaagtatttggtc

SEQ ID NO: 172153 - DNA, 74 bp, Homo sapiens
gttcttttcatttagagtagatttgaaaaatatcatcacatgaaaaagtatttggtctacagacagtgcttggg

SEQ ID NO: 172154 - DNA, 76 bp, Homo sapiens
agagtagatttgaaaaatatcatcacatgaaaaagtatttggtctacagacagtgcttggggtactgaacaaatga

SEQ ID NO: 172155 - DNA, 77 bp, Homo sapiens
gaaaaatatcatcacatgaaaaagtatttggtctacagacagtgcttggggtactgaacaaatgaatctagattcaa

SEQ ID NO: 172156 - DNA, 75 bp, Homo sapiens
tcacatgaaaaagtatttggtctacagacagtgcttggggtactgaacaaatgaatctagattcaaaagcacctt

SEQ ID NO: 172157 - DNA, 71 bp, Homo sapiens
aaaaagtatttggtctacagacagtgcttggggtactgaacaaatgaatctagattcaaaagcacctttaa

SEQ ID NO: 172158 - DNA, 73 bp, Homo sapiens
tttggtctacagacagtgcttggggtactgaacaaatgaatctagattcaaaagcacctttaaataaccaagc

SEQ ID NO: 172159 - DNA, 72 bp, Homo sapiens
agacagtgcttggggtactgaacaaatgaatctagattcaaaagcacctttaaataaccaagctccctcttc

SEQ ID NO: 172160 - DNA, 76 bp, Homo sapiens
tctagattcaaaagcacctttaaataaccaagctccctcttcctccaagagcactgagcccaagtctgaggcctgc

SEQ ID NO: 172161 - DNA, 73 bp, Homo sapiens
aaagcacctttaaataaccaagctccctcttcctccaagagcactgagcccaagtctgaggcctgctggttta

SEQ ID NO: 172162 - DNA, 78 bp, Homo sapiens
taaataaccaagctccctcttcctccaagagcactgagcccaagtctgaggcctgctggtttacaagcactgctttca

SEQ ID NO: 172163 - DNA, 79 bp, Homo sapiens
cctcttcctccaagagcactgagcccaagtctgaggcctgctggtttacaagcactgctttcatcagctactccttaac

SEQ ID NO: 172164 - DNA, 83 bp, Homo sapiens
actgagcccaagtctgaggcctgctggtttacaagcactgctttcatcagctactccttaactccatatgctgtcatctctac

SEQ ID NO: 172165 - DNA, 82 bp, Homo sapiens
aagtctgaggcctgctggtttacaagcactgctttcatcagctactccttaactccatatgctgtcatctctaccttctctc

SEQ ID NO: 172166 - DNA, 80 bp, Homo sapiens
ctggtttacaagcactgctttcatcagctactccttaactccatatgctgtcatctctaccttctctccttcttaccatg

SEQ ID NO: 172167 - DNA, 81 bp, Homo sapiens
agcactgctttcatcagctactccttaactccatatgctgtcatctctaccttctctccttcttaccatgttagaattcaa

SEQ ID NO: 172168 - DNA, 78 bp, Homo sapiens
ctttcatcagctactccttaactccatatgctgtcatctctaccttctctccttcttaccatgttagaattcaaagaa

SEQ ID NO: 172169 - DNA, 75 bp, Homo sapiens
tactccttaactccatatgctgtcatctctaccttctctccttcttaccatgttagaattcaaagaagttttata

SEQ ID NO: 172170 - DNA, 71 bp, Homo sapiens
gctgtcatctctaccttctctccttcttaccatgttagaattcaaagaagttttataaattattttacaaa

SEQ ID NO: 172171 - DNA, 67 bp, Homo sapiens
ccttctctccttcttaccatgttagaattcaaagaagttttataaattattttacaaacaaagtcca

SEQ ID NO: 172172 - DNA, 66 bp, Homo sapiens
ctccttcttaccatgttagaattcaaagaagttttataaattattttacaaacaaagtccaatgtt

SEQ ID NO: 172173 - DNA, 67 bp, Homo sapiens
ccatgttagaattcaaagaagttttataaattattttacaaacaaagtccaatgtttgaaatttata

SEQ ID NO: 172174 - DNA, 71 bp, Homo sapiens
ataaattattttacaaacaaagtccaatgtttgaaatttataaagcaggctgcactggtcaaatgagaagt

SEQ ID NO: 172175 - DNA, 71 bp, Homo sapiens
aacaaagtccaatgtttgaaatttataaagcaggctgcactggtcaaatgagaagttaagggtcccagaac

SEQ ID NO: 172176 - DNA, 71 bp, Homo sapiens
aatgtttgaaatttataaagcaggctgcactggtcaaatgagaagttaagggtcccagaacccagcccacc

SEQ ID NO: 172177 - DNA, 74 bp, Homo sapiens
atttataaagcaggctgcactggtcaaatgagaagttaagggtcccagaacccagcccacctgaccactttgca

SEQ ID NO: 172178 - DNA, 75 bp, Homo sapiens
aggctgcactggtcaaatgagaagttaagggtcccagaacccagcccacctgaccactttgcattctcctgcacg

SEQ ID NO: 172179 - DNA, 73 bp, Homo sapiens
aaatgagaagttaagggtcccagaacccagcccacctgaccactttgcattctcctgcacggcctgagggcac

SEQ ID NO: 172180 - DNA, 73 bp, Homo sapiens
agttaagggtcccagaacccagcccacctgaccactttgcattctcctgcacggcctgagggcacctgcaaaa

SEQ ID NO: 172181 - DNA, 76 bp, Homo sapiens
cagaacccagcccacctgaccactttgcattctcctgcacggcctgagggcacctgcaaaagagaaactcaaagaa

SEQ ID NO: 172182 - DNA, 76 bp, Homo sapiens
cactttgcattctcctgcacggcctgagggcacctgcaaaagagaaactcaaagaagagtttgaaatctgtggaaa

SEQ ID NO: 172183 - DNA, 75 bp, Homo sapiens
attctcctgcacggcctgagggcacctgcaaaagagaaactcaaagaagagtttgaaatctgtggaaagaggcaa

SEQ ID NO: 172184 - DNA, 72 bp, Homo sapiens
aaagaagagtttgaaatctgtggaaagaggcaaaacacatgagggagccaagtcctacagtggtaaataaca

SEQ ID NO: 172185 - DNA, 75 bp, Homo sapiens
ttgaaatctgtggaaagaggcaaaacacatgagggagccaagtcctacagtggtaaataacagatcttttatgta

SEQ ID NO: 172186 - DNA, 74 bp, Homo sapiens
atctgtggaaagaggcaaaacacatgagggagccaagtcctacagtggtaaataacagatcttttatgtaacaa

SEQ ID NO: 172187 - DNA, 71 bp, Homo sapiens
caaaacacatgagggagccaagtcctacagtggtaaataacagatcttttatgtaacaaccgcattttaag

SEQ ID NO: 172188 - DNA, 71 bp, Homo sapiens
acatgagggagccaagtcctacagtggtaaataacagatcttttatgtaacaaccgcattttaaggaacac

SEQ ID NO: 172189 - DNA, 69 bp, Homo sapiens
aagtcctacagtggtaaataacagatcttttatgtaacaaccgcattttaaggaacacccaccacttga

SEQ ID NO: 172190 - DNA, 71 bp, Homo sapiens
agtggtaaataacagatcttttatgtaacaaccgcattttaaggaacacccaccacttgacagccctgtca

SEQ ID NO: 172191 - DNA, 72 bp, Homo sapiens
aataacagatcttttatgtaacaaccgcattttaaggaacacccaccacttgacagccctgtcaccatctcc

SEQ ID NO: 172192 - DNA, 73 bp, Homo sapiens
ttttatgtaacaaccgcattttaaggaacacccaccacttgacagccctgtcaccatctccgaaaggcagctg

SEQ ID NO: 172193 - DNA, 73 bp, Homo sapiens
tttaaggaacacccaccacttgacagccctgtcaccatctccgaaaggcagctgggaccaccagaagccctgg

SEQ ID NO: 172194 - DNA, 75 bp, Homo sapiens
accacttgacagccctgtcaccatctccgaaaggcagctgggaccaccagaagccctgggaccgaggtctgcaaa

SEQ ID NO: 172195 - DNA, 76 bp, Homo sapiens
agccctgtcaccatctccgaaaggcagctgggaccaccagaagccctgggaccgaggtctgcaaatggattctgaa

SEQ ID NO: 172196 - DNA, 78 bp, Homo sapiens
catctccgaaaggcagctgggaccaccagaagccctgggaccgaggtctgcaaatggattctgaagctcttctctaga

SEQ ID NO: 172197 - DNA, 78 bp, Homo sapiens
aaggcagctgggaccaccagaagccctgggaccgaggtctgcaaatggattctgaagctcttctctagaagctgtgat

SEQ ID NO: 172198 - DNA, 80 bp, Homo sapiens
ggaccaccagaagccctgggaccgaggtctgcaaatggattctgaagctcttctctagaagctgtgattctatgagtctg

SEQ ID NO: 172199 - DNA, 78 bp, Homo sapiens
agaagccctgggaccgaggtctgcaaatggattctgaagctcttctctagaagctgtgattctatgagtctggggtag

SEQ ID NO: 172200 - DNA, 78 bp, Homo sapiens
caaatggattctgaagctcttctctagaagctgtgattctatgagtctggggtagggtaacaaagctgcctctaaaca

SEQ ID NO: 172201 - DNA, 76 bp, Homo sapiens
attctgaagctcttctctagaagctgtgattctatgagtctggggtagggtaacaaagctgcctctaaacaaacac

SEQ ID NO: 172202 - DNA, 74 bp, Homo sapiens
aagctgtgattctatgagtctggggtagggtaacaaagctgcctctaaacaaacacctgaagtgagtcccagct

SEQ ID NO: 172203 - DNA, 74 bp, Homo sapiens
tctaaacaaacacctgaagtgagtcccagcttctggcaagttaagagcacttgatagtaaatccaggttggtat

SEQ ID NO: 172204 - DNA, 73 bp, Homo sapiens
aaacacctgaagtgagtcccagcttctggcaagttaagagcacttgatagtaaatccaggttggtattaataa

SEQ ID NO: 172205 - DNA, 71 bp, Homo sapiens
agcttctggcaagttaagagcacttgatagtaaatccaggttggtattaataacttccccctctctaaatc

SEQ ID NO: 172206 - DNA, 71 bp, Homo sapiens
aagttaagagcacttgatagtaaatccaggttggtattaataacttccccctctctaaatccactgctcta

SEQ ID NO: 172207 - DNA, 73 bp, Homo sapiens
ttgatagtaaatccaggttggtattaataacttccccctctctaaatccactgctctatccaagtgctaatta

SEQ ID NO: 172208 - DNA, 70 bp, Homo sapiens
taaatccaggttggtattaataacttccccctctctaaatccactgctctatccaagtgctaattatttt

SEQ ID NO: 172209 - DNA, 71 bp, Homo sapiens
gttggtattaataacttccccctctctaaatccactgctctatccaagtgctaattatttttcctttgcaa

SEQ ID NO: 172210 - DNA, 75 bp, Homo sapiens
tctctaaatccactgctctatccaagtgctaattatttttcctttgcaatacctcctgcccctgcctcttccttc

SEQ ID NO: 172211 - DNA, 75 bp, Homo sapiens
actgctctatccaagtgctaattatttttcctttgcaatacctcctgcccctgcctcttccttctcatcccacaa

SEQ ID NO: 172212 - DNA, 73 bp, Homo sapiens
tatccaagtgctaattatttttcctttgcaatacctcctgcccctgcctcttccttctcatcccacaaaccca

SEQ ID NO: 172213 - DNA, 72 bp, Homo sapiens
attatttttcctttgcaatacctcctgcccctgcctcttccttctcatcccacaaacccaacgctggtcatc

SEQ ID NO: 172214 - DNA, 74 bp, Homo sapiens
aatacctcctgcccctgcctcttccttctcatcccacaaacccaacgctggtcatccttctgcaatatctaaaa

SEQ ID NO: 172215 - DNA, 75 bp, Homo sapiens
acaaacccaacgctggtcatccttctgcaatatctaaaacctaaactgcagcaacaagcttctcgcctggccttg

SEQ ID NO: 172216 - DNA, 77 bp, Homo sapiens
atccttctgcaatatctaaaacctaaactgcagcaacaagcttctcgcctggccttggcctccagtccatctggccc

SEQ ID NO: 172217 - DNA, 76 bp, Homo sapiens
aatatctaaaacctaaactgcagcaacaagcttctcgcctggccttggcctccagtccatctggcccctcacatta

SEQ ID NO: 172218 - DNA, 77 bp, Homo sapiens
agcaacaagcttctcgcctggccttggcctccagtccatctggcccctcacattaggaccaactctttgcaaacata

SEQ ID NO: 172219 - DNA, 75 bp, Homo sapiens
ttctcgcctggccttggcctccagtccatctggcccctcacattaggaccaactctttgcaaacataactgttat

SEQ ID NO: 172220 - DNA, 75 bp, Homo sapiens
ccttggcctccagtccatctggcccctcacattaggaccaactctttgcaaacataactgttattggatgcaggg

SEQ ID NO: 172221 - DNA, 73 bp, Homo sapiens
cagtccatctggcccctcacattaggaccaactctttgcaaacataactgttattggatgcagggtttccttt

SEQ ID NO: 172222 - DNA, 73 bp, Homo sapiens
atctggcccctcacattaggaccaactctttgcaaacataactgttattggatgcagggtttccttttgccta

SEQ ID NO: 172223 - DNA, 71 bp, Homo sapiens
attaggaccaactctttgcaaacataactgttattggatgcagggtttccttttgcctagctcaattttta

SEQ ID NO: 172224 - DNA, 71 bp, Homo sapiens
gaccaactctttgcaaacataactgttattggatgcagggtttccttttgcctagctcaatttttatttta

SEQ ID NO: 172225 - DNA, 69 bp, Homo sapiens
tgcaaacataactgttattggatgcagggtttccttttgcctagctcaatttttattttaaccttggtt

SEQ ID NO: 172226 - DNA, 67 bp, Homo sapiens
ctgttattggatgcagggtttccttttgcctagctcaatttttattttaaccttggttttataaaga

SEQ ID NO: 172227 - DNA, 69 bp, Homo sapiens
cctagctcaatttttattttaaccttggttttataaagatctattttatcacagactcctctgttcaaa

SEQ ID NO: 172228 - DNA, 71 bp, Homo sapiens
accttggttttataaagatctattttatcacagactcctctgttcaaaagacgcccagctagaaaatcaaa

SEQ ID NO: 172229 - DNA, 75 bp, Homo sapiens
ttataaagatctattttatcacagactcctctgttcaaaagacgcccagctagaaaatcaaatatataaagcaat

SEQ ID NO: 172230 - DNA, 76 bp, Homo sapiens
ctcctctgttcaaaagacgcccagctagaaaatcaaatatataaagcaatttattataaaagcagagctattctgc

SEQ ID NO: 172231 - DNA, 74 bp, Homo sapiens
ctgttcaaaagacgcccagctagaaaatcaaatatataaagcaatttattataaaagcagagctattctgcttt

SEQ ID NO: 172232 - DNA, 74 bp, Homo sapiens
cgcccagctagaaaatcaaatatataaagcaatttattataaaagcagagctattctgcttttatggtggttag

SEQ ID NO: 172233 - DNA, 72 bp, Homo sapiens
aatatataaagcaatttattataaaagcagagctattctgcttttatggtggttaggggatggaagaccctg

SEQ ID NO: 172234 - DNA, 72 bp, Homo sapiens
aatttattataaaagcagagctattctgcttttatggtggttaggggatggaagaccctgtgcccaatctgg

SEQ ID NO: 172235 - DNA, 72 bp, Homo sapiens
ataaaagcagagctattctgcttttatggtggttaggggatggaagaccctgtgcccaatctgggtaccctc

SEQ ID NO: 172236 - DNA, 71 bp, Homo sapiens
agctattctgcttttatggtggttaggggatggaagaccctgtgcccaatctgggtaccctccatcccacc

SEQ ID NO: 172237 - DNA, 68 bp, Homo sapiens
cttttatggtggttaggggatggaagaccctgtgcccaatctgggtaccctccatcccacctcccaac

SEQ ID NO: 172238 - DNA, 72 bp, Homo sapiens
ttaggggatggaagaccctgtgcccaatctgggtaccctccatcccacctcccaaccctgaggcactccaca

SEQ ID NO: 172239 - DNA, 74 bp, Homo sapiens
aagaccctgtgcccaatctgggtaccctccatcccacctcccaaccctgaggcactccacaggacacagctgaa

SEQ ID NO: 172240 - DNA, 75 bp, Homo sapiens
ccaatctgggtaccctccatcccacctcccaaccctgaggcactccacaggacacagctgaaaaatgtctggtga

SEQ ID NO: 172241 - DNA, 75 bp, Homo sapiens
taccctccatcccacctcccaaccctgaggcactccacaggacacagctgaaaaatgtctggtgaattcagaagt

SEQ ID NO: 172242 - DNA, 76 bp, Homo sapiens
aaccctgaggcactccacaggacacagctgaaaaatgtctggtgaattcagaagttgaagcttaaatcaaaatgct

SEQ ID NO: 172243 - DNA, 78 bp, Homo sapiens
acaggacacagctgaaaaatgtctggtgaattcagaagttgaagcttaaatcaaaatgcttgatattcaagacattta

SEQ ID NO: 172244 - DNA, 80 bp, Homo sapiens
gctgaaaaatgtctggtgaattcagaagttgaagcttaaatcaaaatgcttgatattcaagacatttatgatctttctgc

SEQ ID NO: 172245 - DNA, 81 bp, Homo sapiens
tgtctggtgaattcagaagttgaagcttaaatcaaaatgcttgatattcaagacatttatgatctttctgctctcatttcc

SEQ ID NO: 172246 - DNA, 80 bp, Homo sapiens
ttcagaagttgaagcttaaatcaaaatgcttgatattcaagacatttatgatctttctgctctcatttcccactcaacac

SEQ ID NO: 172247 - DNA, 77 bp, Homo sapiens
aagcttaaatcaaaatgcttgatattcaagacatttatgatctttctgctctcatttcccactcaacacccaagggc

SEQ ID NO: 172248 - DNA, 75 bp, Homo sapiens
atcaaaatgcttgatattcaagacatttatgatctttctgctctcatttcccactcaacacccaagggccctttt

SEQ ID NO: 172249 - DNA, 78 bp, Homo sapiens
tattcaagacatttatgatctttctgctctcatttcccactcaacacccaagggccctttttgctgcagccacagtat

SEQ ID NO: 172250 - DNA, 75 bp, Homo sapiens
tttatgatctttctgctctcatttcccactcaacacccaagggccctttttgctgcagccacagtattaatttat

SEQ ID NO: 172251 - DNA, 75 bp, Homo sapiens
atctttctgctctcatttcccactcaacacccaagggccctttttgctgcagccacagtattaatttattctctc

SEQ ID NO: 172252 - DNA, 73 bp, Homo sapiens
ctctcatttcccactcaacacccaagggccctttttgctgcagccacagtattaatttattctctctccaccc

SEQ ID NO: 172253 - DNA, 70 bp, Homo sapiens
aagggccctttttgctgcagccacagtattaatttattctctctccacccctactccaccccaatactcc

SEQ ID NO: 172254 - DNA, 72 bp, Homo sapiens
tttttgctgcagccacagtattaatttattctctctccacccctactccaccccaatactcctccaaagtct

SEQ ID NO: 172255 - DNA, 70 bp, Homo sapiens
acagtattaatttattctctctccacccctactccaccccaatactcctccaaagtcttttccacatcta

SEQ ID NO: 172256 - DNA, 69 bp, Homo sapiens
attaatttattctctctccacccctactccaccccaatactcctccaaagtcttttccacatctaggct

SEQ ID NO: 172257 - DNA, 73 bp, Homo sapiens
tctctccacccctactccaccccaatactcctccaaagtcttttccacatctaggcttctgcattccctattc

SEQ ID NO: 172258 - DNA, 73 bp, Homo sapiens
tactccaccccaatactcctccaaagtcttttccacatctaggcttctgcattccctattcctattgtataac

SEQ ID NO: 172259 - DNA, 73 bp, Homo sapiens
aatactcctccaaagtcttttccacatctaggcttctgcattccctattcctattgtataacctaccacaatc

SEQ ID NO: 172260 - DNA, 74 bp, Homo sapiens
caaagtcttttccacatctaggcttctgcattccctattcctattgtataacctaccacaatcctattacaata

SEQ ID NO: 172261 - DNA, 73 bp, Homo sapiens
tcttttccacatctaggcttctgcattccctattcctattgtataacctaccacaatcctattacaataactt

SEQ ID NO: 172262 - DNA, 72 bp, Homo sapiens
attccctattcctattgtataacctaccacaatcctattacaataactttgccttgatgaatcctacctgtc

SEQ ID NO: 172263 - DNA, 75 bp, Homo sapiens
tattcctattgtataacctaccacaatcctattacaataactttgccttgatgaatcctacctgtctcaagacaa

SEQ ID NO: 172264 - DNA, 74 bp, Homo sapiens
tataacctaccacaatcctattacaataactttgccttgatgaatcctacctgtctcaagacaagcttaaattc

SEQ ID NO: 172265 - DNA, 74 bp, Homo sapiens
acaatcctattacaataactttgccttgatgaatcctacctgtctcaagacaagcttaaattccaattcacacc

SEQ ID NO: 172266 - DNA, 75 bp, Homo sapiens
ttacaataactttgccttgatgaatcctacctgtctcaagacaagcttaaattccaattcacacctgcctctaaa

SEQ ID NO: 172267 - DNA, 79 bp, Homo sapiens
tctcaagacaagcttaaattccaattcacacctgcctctaaaatctcacttgctgcaccatttaattggtaactgatca

SEQ ID NO: 172268 - DNA, 77 bp, Homo sapiens
aagcttaaattccaattcacacctgcctctaaaatctcacttgctgcaccatttaattggtaactgatcaagctcca

SEQ ID NO: 172269 - DNA, 80 bp, Homo sapiens
attccaattcacacctgcctctaaaatctcacttgctgcaccatttaattggtaactgatcaagctccacgatctatgta

SEQ ID NO: 172270 - DNA, 80 bp, Homo sapiens
tctaaaatctcacttgctgcaccatttaattggtaactgatcaagctccacgatctatgtagctatttaatttgtcctga

SEQ ID NO: 172271 - DNA, 78 bp, Homo sapiens
acttgctgcaccatttaattggtaactgatcaagctccacgatctatgtagctatttaatttgtcctgagtttatcat

SEQ ID NO: 172272 - DNA, 76 bp, Homo sapiens
atttaattggtaactgatcaagctccacgatctatgtagctatttaatttgtcctgagtttatcattcagtgggaa

SEQ ID NO: 172273 - DNA, 79 bp, Homo sapiens
taactgatcaagctccacgatctatgtagctatttaatttgtcctgagtttatcattcagtgggaactgagccgactac

SEQ ID NO: 172274 - DNA, 77 bp, Homo sapiens
aagctccacgatctatgtagctatttaatttgtcctgagtttatcattcagtgggaactgagccgactacctgcttg

SEQ ID NO: 172275 - DNA, 79 bp, Homo sapiens
atctatgtagctatttaatttgtcctgagtttatcattcagtgggaactgagccgactacctgcttgtgtctacatcta

SEQ ID NO: 172276 - DNA, 79 bp, Homo sapiens
tttaatttgtcctgagtttatcattcagtgggaactgagccgactacctgcttgtgtctacatctagcacacagcttta

SEQ ID NO: 172277 - DNA, 82 bp, Homo sapiens
ttgtcctgagtttatcattcagtgggaactgagccgactacctgcttgtgtctacatctagcacacagctttacacatagaa

SEQ ID NO: 172278 - DNA, 79 bp, Homo sapiens
gtttatcattcagtgggaactgagccgactacctgcttgtgtctacatctagcacacagctttacacatagaaaacatt

SEQ ID NO: 172279 - DNA, 77 bp, Homo sapiens
tgggaactgagccgactacctgcttgtgtctacatctagcacacagctttacacatagaaaacatttactaaatatt

SEQ ID NO: 172280 - DNA, 77 bp, Homo sapiens
cgactacctgcttgtgtctacatctagcacacagctttacacatagaaaacatttactaaatatttatccatgtact

SEQ ID NO: 172281 - DNA, 78 bp, Homo sapiens
gtctacatctagcacacagctttacacatagaaaacatttactaaatatttatccatgtacttcagattcactcccaa

SEQ ID NO: 172282 - DNA, 76 bp, Homo sapiens
gcacacagctttacacatagaaaacatttactaaatatttatccatgtacttcagattcactcccaagagtaaaca

SEQ ID NO: 172283 - DNA, 72 bp, Homo sapiens
ttacacatagaaaacatttactaaatatttatccatgtacttcagattcactcccaagagtaaacattttac

SEQ ID NO: 172284 - DNA, 75 bp, Homo sapiens
catttactaaatatttatccatgtacttcagattcactcccaagagtaaacattttacttttctatcagatgctg

SEQ ID NO: 172285 - DNA, 74 bp, Homo sapiens
atatttatccatgtacttcagattcactcccaagagtaaacattttacttttctatcagatgctgtaaaaggtg

SEQ ID NO: 172286 - DNA, 74 bp, Homo sapiens
catgtacttcagattcactcccaagagtaaacattttacttttctatcagatgctgtaaaaggtgtctttacca

SEQ ID NO: 172287 - DNA, 74 bp, Homo sapiens
ttcagattcactcccaagagtaaacattttacttttctatcagatgctgtaaaaggtgtctttaccatggctac

SEQ ID NO: 172288 - DNA, 74 bp, Homo sapiens
cattttacttttctatcagatgctgtaaaaggtgtctttaccatggctaccaaaacagcatgtgactttcttta

SEQ ID NO: 172289 - DNA, 75 bp, Homo sapiens
tacttttctatcagatgctgtaaaaggtgtctttaccatggctaccaaaacagcatgtgactttctttataagta

SEQ ID NO: 172290 - DNA, 73 bp, Homo sapiens
tgctgtaaaaggtgtctttaccatggctaccaaaacagcatgtgactttctttataagtagtcaaatcaggtt

SEQ ID NO: 172291 - DNA, 71 bp, Homo sapiens
aaaggtgtctttaccatggctaccaaaacagcatgtgactttctttataagtagtcaaatcaggtttaatg

SEQ ID NO: 172292 - DNA, 73 bp, Homo sapiens
taccatggctaccaaaacagcatgtgactttctttataagtagtcaaatcaggtttaatgggttgttcacatt

SEQ ID NO: 172293 - DNA, 72 bp, Homo sapiens
ccaaaacagcatgtgactttctttataagtagtcaaatcaggtttaatgggttgttcacattttattgctct

SEQ ID NO: 172294 - DNA, 75 bp, Homo sapiens
cagcatgtgactttctttataagtagtcaaatcaggtttaatgggttgttcacattttattgctcttcacctata

SEQ ID NO: 172295 - DNA, 72 bp, Homo sapiens
tctttataagtagtcaaatcaggtttaatgggttgttcacattttattgctcttcacctatattttcctcca

SEQ ID NO: 172296 - DNA, 70 bp, Homo sapiens
aagtagtcaaatcaggtttaatgggttgttcacattttattgctcttcacctatattttcctccaatatt

SEQ ID NO: 172297 - DNA, 76 bp, Homo sapiens
ttgttcacattttattgctcttcacctatattttcctccaatattttatacctgctctctcgagccaactcaaatc

SEQ ID NO: 172298 - DNA, 74 bp, Homo sapiens
acattttattgctcttcacctatattttcctccaatattttatacctgctctctcgagccaactcaaatcttag

SEQ ID NO: 172299 - DNA, 79 bp, Homo sapiens
attttcctccaatattttatacctgctctctcgagccaactcaaatcttaggcacatcaatggagactgatcacattaa

SEQ ID NO: 172300 - DNA, 78 bp, Homo sapiens
aatattttatacctgctctctcgagccaactcaaatcttaggcacatcaatggagactgatcacattaactcttcctt

SEQ ID NO: 172301 - DNA, 82 bp, Homo sapiens
ttatacctgctctctcgagccaactcaaatcttaggcacatcaatggagactgatcacattaactcttcctttagacatgaa

SEQ ID NO: 172302 - DNA, 80 bp, Homo sapiens
tcgagccaactcaaatcttaggcacatcaatggagactgatcacattaactcttcctttagacatgaactgacctaccta

SEQ ID NO: 172303 - DNA, 77 bp, Homo sapiens
tcaaatcttaggcacatcaatggagactgatcacattaactcttcctttagacatgaactgacctacctacctttat

SEQ ID NO: 172304 - DNA, 75 bp, Homo sapiens
ttaggcacatcaatggagactgatcacattaactcttcctttagacatgaactgacctacctacctttatttaaa

SEQ ID NO: 172305 - DNA, 71 bp, Homo sapiens
caatggagactgatcacattaactcttcctttagacatgaactgacctacctacctttatttaaacaaaag

SEQ ID NO: 172306 - DNA, 71 bp, Homo sapiens
ctgatcacattaactcttcctttagacatgaactgacctacctacctttatttaaacaaaaggatgagaat

SEQ ID NO: 172307 - DNA, 71 bp, Homo sapiens
actcttcctttagacatgaactgacctacctacctttatttaaacaaaaggatgagaattcattgtccaca

SEQ ID NO: 172308 - DNA, 75 bp, Homo sapiens
gacatgaactgacctacctacctttatttaaacaaaaggatgagaattcattgtccacatttgtttctcatcaga

SEQ ID NO: 172309 - DNA, 71 bp, Homo sapiens
aactgacctacctacctttatttaaacaaaaggatgagaattcattgtccacatttgtttctcatcagagg

SEQ ID NO: 172310 - DNA, 75 bp, Homo sapiens
tacctttatttaaacaaaaggatgagaattcattgtccacatttgtttctcatcagaggtcaaatgcggaactca

SEQ ID NO: 172311 - DNA, 75 bp, Homo sapiens
tttaaacaaaaggatgagaattcattgtccacatttgtttctcatcagaggtcaaatgcggaactcatttctaaa

SEQ ID NO: 172312 - DNA, 79 bp, Homo sapiens
aggatgagaattcattgtccacatttgtttctcatcagaggtcaaatgcggaactcatttctaaataaatctagctgaa

SEQ ID NO: 172313 - DNA, 75 bp, Homo sapiens
atttgtttctcatcagaggtcaaatgcggaactcatttctaaataaatctagctgaaccggagaatgaaaatgtg

SEQ ID NO: 172314 - DNA, 77 bp, Homo sapiens
ctcatcagaggtcaaatgcggaactcatttctaaataaatctagctgaaccggagaatgaaaatgtgtgacaggtgg

SEQ ID NO: 172315 - DNA, 75 bp, Homo sapiens
ctcatttctaaataaatctagctgaaccggagaatgaaaatgtgtgacaggtgggcaaaggagctgtggagtaaa

SEQ ID NO: 172316 - DNA, 76 bp, Homo sapiens
ctaaataaatctagctgaaccggagaatgaaaatgtgtgacaggtgggcaaaggagctgtggagtaaagcacactc

SEQ ID NO: 172317 - DNA, 80 bp, Homo sapiens
tgaaccggagaatgaaaatgtgtgacaggtgggcaaaggagctgtggagtaaagcacactccttgtgtgacacatgataa

SEQ ID NO: 172318 - DNA, 78 bp, Homo sapiens
aatgaaaatgtgtgacaggtgggcaaaggagctgtggagtaaagcacactccttgtgtgacacatgataaaagttaca

SEQ ID NO: 172319 - DNA, 76 bp, Homo sapiens
aaatgtgtgacaggtgggcaaaggagctgtggagtaaagcacactccttgtgtgacacatgataaaagttacaaaa

SEQ ID NO: 172320 - DNA, 74 bp, Homo sapiens
aggtgggcaaaggagctgtggagtaaagcacactccttgtgtgacacatgataaaagttacaaaagttacagaa

SEQ ID NO: 172321 - DNA, 77 bp, Homo sapiens
gctgtggagtaaagcacactccttgtgtgacacatgataaaagttacaaaagttacagaatcccagcagtcacttaa

SEQ ID NO: 172322 - DNA, 73 bp, Homo sapiens
agtaaagcacactccttgtgtgacacatgataaaagttacaaaagttacagaatcccagcagtcacttaaaaa

SEQ ID NO: 172323 - DNA, 71 bp, Homo sapiens
actccttgtgtgacacatgataaaagttacaaaagttacagaatcccagcagtcacttaaaaagaacactt

SEQ ID NO: 172324 - DNA, 71 bp, Homo sapiens
gacacatgataaaagttacaaaagttacagaatcccagcagtcacttaaaaagaacactttcacaggaaag

SEQ ID NO: 172325 - DNA, 73 bp, Homo sapiens
aatcccagcagtcacttaaaaagaacactttcacaggaaaggaggattactatgtcagtctgataaacaccca

SEQ ID NO: 172326 - DNA, 71 bp, Homo sapiens
agtcacttaaaaagaacactttcacaggaaaggaggattactatgtcagtctgataaacacccagttccaa

SEQ ID NO: 172327 - DNA, 77 bp, Homo sapiens
aaaggaggattactatgtcagtctgataaacacccagttccaatcccaatatcatctgctgttcttcccagctgtat

SEQ ID NO: 172328 - DNA, 84 bp, Homo sapiens
ataaacacccagttccaatcccaatatcatctgctgttcttcccagctgtatttgctcatcactgtgtacataacatatgcata

SEQ ID NO: 172329 - DNA, 85 bp, Homo sapiens
agttccaatcccaatatcatctgctgttcttcccagctgtatttgctcatcactgtgtacataacatatgcatagactcagaaaa

SEQ ID NO: 172330 - DNA, 86 bp, Homo sapiens
aatcccaatatcatctgctgttcttcccagctgtatttgctcatcactgtgtacataacatatgcatagactcagaaaataagcta

SEQ ID NO: 172331 - DNA, 86 bp, Homo sapiens
atcatctgctgttcttcccagctgtatttgctcatcactgtgtacataacatatgcatagactcagaaaataagctattagtcttc

SEQ ID NO: 172332 - DNA, 82 bp, Homo sapiens
gttcttcccagctgtatttgctcatcactgtgtacataacatatgcatagactcagaaaataagctattagtcttccctgac

SEQ ID NO: 172333 - DNA, 81 bp, Homo sapiens
atcactgtgtacataacatatgcatagactcagaaaataagctattagtcttccctgacctgtcttacagttcacatgccc

SEQ ID NO: 172334 - DNA, 80 bp, Homo sapiens
ataacatatgcatagactcagaaaataagctattagtcttccctgacctgtcttacagttcacatgcccctgtatcttga

SEQ ID NO: 172335 - DNA, 79 bp, Homo sapiens
tatgcatagactcagaaaataagctattagtcttccctgacctgtcttacagttcacatgcccctgtatcttgaggtta

SEQ ID NO: 172336 - DNA, 72 bp, Homo sapiens
agaaaataagctattagtcttccctgacctgtcttacagttcacatgcccctgtatcttgaggttagggaaa

SEQ ID NO: 172337 - DNA, 72 bp, Homo sapiens
tattagtcttccctgacctgtcttacagttcacatgcccctgtatcttgaggttagggaaaggggtatagta

SEQ ID NO: 172338 - DNA, 71 bp, Homo sapiens
tccctgacctgtcttacagttcacatgcccctgtatcttgaggttagggaaaggggtatagtacttctagt

SEQ ID NO: 172339 - DNA, 69 bp, Homo sapiens
acctgtcttacagttcacatgcccctgtatcttgaggttagggaaaggggtatagtacttctagtttaa

SEQ ID NO: 172340 - DNA, 71 bp, Homo sapiens
tcacatgcccctgtatcttgaggttagggaaaggggtatagtacttctagtttaagctagtctaatcaact

SEQ ID NO: 172341 - DNA, 68 bp, Homo sapiens
aggttagggaaaggggtatagtacttctagtttaagctagtctaatcaacttcccaagactgcattta

SEQ ID NO: 172342 - DNA, 72 bp, Homo sapiens
aaggggtatagtacttctagtttaagctagtctaatcaacttcccaagactgcatttaaagcgcagcttgta

SEQ ID NO: 172343 - DNA, 77 bp, Homo sapiens
tatagtacttctagtttaagctagtctaatcaacttcccaagactgcatttaaagcgcagcttgtaccatgcttata

SEQ ID NO: 172344 - DNA, 75 bp, Homo sapiens
tagtttaagctagtctaatcaacttcccaagactgcatttaaagcgcagcttgtaccatgcttataaccagtggg

SEQ ID NO: 172345 - DNA, 72 bp, Homo sapiens
aacttcccaagactgcatttaaagcgcagcttgtaccatgcttataaccagtggggataacttcctaatttc

SEQ ID NO: 172346 - DNA, 77 bp, Homo sapiens
tgcatttaaagcgcagcttgtaccatgcttataaccagtggggataacttcctaatttctgatactccacttgtcaa

SEQ ID NO: 172347 - DNA, 78 bp, Homo sapiens
taaagcgcagcttgtaccatgcttataaccagtggggataacttcctaatttctgatactccacttgtcaatgtgcat

SEQ ID NO: 172348 - DNA, 75 bp, Homo sapiens
taccatgcttataaccagtggggataacttcctaatttctgatactccacttgtcaatgtgcatttgaagtattt

SEQ ID NO: 172349 - DNA, 74 bp, Homo sapiens
ttataaccagtggggataacttcctaatttctgatactccacttgtcaatgtgcatttgaagtattttccacaa

SEQ ID NO: 172350 - DNA, 78 bp, Homo sapiens
ggataacttcctaatttctgatactccacttgtcaatgtgcatttgaagtattttccacaatacagctgtgctatttc

SEQ ID NO: 172351 - DNA, 77 bp, Homo sapiens
acttcctaatttctgatactccacttgtcaatgtgcatttgaagtattttccacaatacagctgtgctatttccctg

SEQ ID NO: 172352 - DNA, 80 bp, Homo sapiens
ttgtcaatgtgcatttgaagtattttccacaatacagctgtgctatttccctggcaccatgatctgtgccaaccctttta

SEQ ID NO: 172353 - DNA, 75 bp, Homo sapiens
aagtattttccacaatacagctgtgctatttccctggcaccatgatctgtgccaacccttttaggtaccattata

SEQ ID NO: 172354 - DNA, 78 bp, Homo sapiens
atacagctgtgctatttccctggcaccatgatctgtgccaacccttttaggtaccattatagatctgctttcctaata

SEQ ID NO: 172355 - DNA, 76 bp, Homo sapiens
ctgtgctatttccctggcaccatgatctgtgccaacccttttaggtaccattatagatctgctttcctaatattag

SEQ ID NO: 172356 - DNA, 76 bp, Homo sapiens
ttccctggcaccatgatctgtgccaacccttttaggtaccattatagatctgctttcctaatattaggctctggtc

SEQ ID NO: 172357 - DNA, 76 bp, Homo sapiens
atgatctgtgccaacccttttaggtaccattatagatctgctttcctaatattaggctctggtctcctcactaaga

SEQ ID NO: 172358 - DNA, 71 bp, Homo sapiens
aacccttttaggtaccattatagatctgctttcctaatattaggctctggtctcctcactaagagttacta

SEQ ID NO: 172359 - DNA, 74 bp, Homo sapiens
tttaggtaccattatagatctgctttcctaatattaggctctggtctcctcactaagagttactaggtggattc

SEQ ID NO: 172360 - DNA, 73 bp, Homo sapiens
attatagatctgctttcctaatattaggctctggtctcctcactaagagttactaggtggattctccaaaaag

SEQ ID NO: 172361 - DNA, 73 bp, Homo sapiens
tctcctcactaagagttactaggtggattctccaaaaagtctagtggaagagtcctcccagatactctttata

SEQ ID NO: 172362 - DNA, 70 bp, Homo sapiens
actaagagttactaggtggattctccaaaaagtctagtggaagagtcctcccagatactctttataataa

SEQ ID NO: 172363 - DNA, 75 bp, Homo sapiens
tactaggtggattctccaaaaagtctagtggaagagtcctcccagatactctttataataacatctcacagctag

SEQ ID NO: 172364 - DNA, 76 bp, Homo sapiens
ttctccaaaaagtctagtggaagagtcctcccagatactctttataataacatctcacagctagttctctctccta

SEQ ID NO: 172365 - DNA, 80 bp, Homo sapiens
tagtggaagagtcctcccagatactctttataataacatctcacagctagttctctctcctagtgctctaattatctcat

SEQ ID NO: 172366 - DNA, 78 bp, Homo sapiens
aagagtcctcccagatactctttataataacatctcacagctagttctctctcctagtgctctaattatctcattacg

SEQ ID NO: 172367 - DNA, 82 bp, Homo sapiens
atactctttataataacatctcacagctagttctctctcctagtgctctaattatctcattacgtggccatgtctagctcat

SEQ ID NO: 172368 - DNA, 84 bp, Homo sapiens
tttataataacatctcacagctagttctctctcctagtgctctaattatctcattacgtggccatgtctagctcattactgctc

SEQ ID NO: 172369 - DNA, 85 bp, Homo sapiens
acatctcacagctagttctctctcctagtgctctaattatctcattacgtggccatgtctagctcattactgctctgacactgtt

SEQ ID NO: 172370 - DNA, 83 bp, Homo sapiens
ttctctctcctagtgctctaattatctcattacgtggccatgtctagctcattactgctctgacactgtttcccttcatatta

SEQ ID NO: 172371 - DNA, 82 bp, Homo sapiens
tcctagtgctctaattatctcattacgtggccatgtctagctcattactgctctgacactgtttcccttcatattatcggtg

SEQ ID NO: 172372 - DNA, 81 bp, Homo sapiens
taattatctcattacgtggccatgtctagctcattactgctctgacactgtttcccttcatattatcggtggccacccatc

SEQ ID NO: 172373 - DNA, 80 bp, Homo sapiens
attacgtggccatgtctagctcattactgctctgacactgtttcccttcatattatcggtggccacccatctcttgagct

SEQ ID NO: 172374 - DNA, 80 bp, Homo sapiens
atgtctagctcattactgctctgacactgtttcccttcatattatcggtggccacccatctcttgagcttctttagacaa

SEQ ID NO: 172375 - DNA, 76 bp, Homo sapiens
attactgctctgacactgtttcccttcatattatcggtggccacccatctcttgagcttctttagacaaattacca

SEQ ID NO: 172376 - DNA, 78 bp, Homo sapiens
tgacactgtttcccttcatattatcggtggccacccatctcttgagcttctttagacaaattaccattactgctgcta

SEQ ID NO: 172377 - DNA, 76 bp, Homo sapiens
atattatcggtggccacccatctcttgagcttctttagacaaattaccattactgctgctaatattttatctaata

SEQ ID NO: 172378 - DNA, 76 bp, Homo sapiens
cttgagcttctttagacaaattaccattactgctgctaatattttatctaatatttctctgacataatattcaacc

SEQ ID NO: 172379 - DNA, 75 bp, Homo sapiens
gcttctttagacaaattaccattactgctgctaatattttatctaatatttctctgacataatattcaacccagt

SEQ ID NO: 172380 - DNA, 75 bp, Homo sapiens
atatttctctgacataatattcaacccagttagtaccaactacgagttcactgtatatatacgcttaagacattc

SEQ ID NO: 172381 - DNA, 74 bp, Homo sapiens
ctctgacataatattcaacccagttagtaccaactacgagttcactgtatatatacgcttaagacattctcctt

SEQ ID NO: 172382 - DNA, 73 bp, Homo sapiens
atattcaacccagttagtaccaactacgagttcactgtatatatacgcttaagacattctcctttgtggcaaa

SEQ ID NO: 172383 - DNA, 72 bp, Homo sapiens
agttagtaccaactacgagttcactgtatatatacgcttaagacattctcctttgtggcaaagaacttcaat

SEQ ID NO: 172384 - DNA, 73 bp, Homo sapiens
aactacgagttcactgtatatatacgcttaagacattctcctttgtggcaaagaacttcaatttgacttccca

SEQ ID NO: 172385 - DNA, 75 bp, Homo sapiens
actgtatatatacgcttaagacattctcctttgtggcaaagaacttcaatttgacttcccattgaactctgaata

SEQ ID NO: 172386 - DNA, 77 bp, Homo sapiens
tatatacgcttaagacattctcctttgtggcaaagaacttcaatttgacttcccattgaactctgaataccaatgca

SEQ ID NO: 172387 - DNA, 72 bp, Homo sapiens
agacattctcctttgtggcaaagaacttcaatttgacttcccattgaactctgaataccaatgcaaaaattt

SEQ ID NO: 172388 - DNA, 75 bp, Homo sapiens
ttgtggcaaagaacttcaatttgacttcccattgaactctgaataccaatgcaaaaattttctacagcctatgaa

SEQ ID NO: 172389 - DNA, 75 bp, Homo sapiens
caaagaacttcaatttgacttcccattgaactctgaataccaatgcaaaaattttctacagcctatgaagcaaca

SEQ ID NO: 172390 - DNA, 77 bp, Homo sapiens
aatttgacttcccattgaactctgaataccaatgcaaaaattttctacagcctatgaagcaacagtgcttcctctga

SEQ ID NO: 172391 - DNA, 79 bp, Homo sapiens
attgaactctgaataccaatgcaaaaattttctacagcctatgaagcaacagtgcttcctctgacatccatttctaatg

SEQ ID NO: 172392 - DNA, 79 bp, Homo sapiens
caaaaattttctacagcctatgaagcaacagtgcttcctctgacatccatttctaatgtcagatgaaaatatcattact

SEQ ID NO: 172393 - DNA, 81 bp, Homo sapiens
attttctacagcctatgaagcaacagtgcttcctctgacatccatttctaatgtcagatgaaaatatcattacttccaagc

SEQ ID NO: 172394 - DNA, 79 bp, Homo sapiens
agtgcttcctctgacatccatttctaatgtcagatgaaaatatcattacttccaagccaaaccaatccctgacatccta

SEQ ID NO: 172395 - DNA, 78 bp, Homo sapiens
tgacatccatttctaatgtcagatgaaaatatcattacttccaagccaaaccaatccctgacatcctagtaaacagta

SEQ ID NO: 172396 - DNA, 74 bp, Homo sapiens
atttctaatgtcagatgaaaatatcattacttccaagccaaaccaatccctgacatcctagtaaacagtaagct

SEQ ID NO: 172397 - DNA, 74 bp, Homo sapiens
agatgaaaatatcattacttccaagccaaaccaatccctgacatcctagtaaacagtaagcttccactgtcatt

SEQ ID NO: 172398 - DNA, 72 bp, Homo sapiens
aaaatatcattacttccaagccaaaccaatccctgacatcctagtaaacagtaagcttccactgtcattttg

SEQ ID NO: 172399 - DNA, 75 bp, Homo sapiens
tacttccaagccaaaccaatccctgacatcctagtaaacagtaagcttccactgtcattttggatgatgaggaag

SEQ ID NO: 172400 - DNA, 79 bp, Homo sapiens
ctgacatcctagtaaacagtaagcttccactgtcattttggatgatgaggaagtgctcaccttgatcaaaccagaagaa

SEQ ID NO: 172401 - DNA, 79 bp, Homo sapiens
tagtaaacagtaagcttccactgtcattttggatgatgaggaagtgctcaccttgatcaaaccagaagaatgccaataa

SEQ ID NO: 172402 - DNA, 78 bp, Homo sapiens
taagcttccactgtcattttggatgatgaggaagtgctcaccttgatcaaaccagaagaatgccaataactcttaagt

SEQ ID NO: 172403 - DNA, 77 bp, Homo sapiens
tgtcattttggatgatgaggaagtgctcaccttgatcaaaccagaagaatgccaataactcttaagttcaaaagaaa

SEQ ID NO: 172404 - DNA, 74 bp, Homo sapiens
atgatgaggaagtgctcaccttgatcaaaccagaagaatgccaataactcttaagttcaaaagaaaccctagcc

SEQ ID NO: 172405 - DNA, 71 bp, Homo sapiens
tgctcaccttgatcaaaccagaagaatgccaataactcttaagttcaaaagaaaccctagcctgggtttac

SEQ ID NO: 172406 - DNA, 68 bp, Homo sapiens
cttgatcaaaccagaagaatgccaataactcttaagttcaaaagaaaccctagcctgggtttactatt

SEQ ID NO: 172407 - DNA, 67 bp, Homo sapiens
gaagaatgccaataactcttaagttcaaaagaaaccctagcctgggtttactatttataaccaccca

SEQ ID NO: 172408 - DNA, 65 bp, Homo sapiens
gccaataactcttaagttcaaaagaaaccctagcctgggtttactatttataaccacccaaatta

SEQ ID NO: 172409 - DNA, 65 bp, Homo sapiens
ctcttaagttcaaaagaaaccctagcctgggtttactatttataaccacccaaattagaatcaaa

SEQ ID NO: 172410 - DNA, 67 bp, Homo sapiens
aaagaaaccctagcctgggtttactatttataaccacccaaattagaatcaaatctctaataatgtc

SEQ ID NO: 172411 - DNA, 69 bp, Homo sapiens
cctagcctgggtttactatttataaccacccaaattagaatcaaatctctaataatgtctatattttaa

SEQ ID NO: 172412 - DNA, 72 bp, Homo sapiens
gtttactatttataaccacccaaattagaatcaaatctctaataatgtctatattttaatcacctacatcag

SEQ ID NO: 172413 - DNA, 72 bp, Homo sapiens
tataaccacccaaattagaatcaaatctctaataatgtctatattttaatcacctacatcagttttacaaac

SEQ ID NO: 172414 - DNA, 73 bp, Homo sapiens
ttagaatcaaatctctaataatgtctatattttaatcacctacatcagttttacaaactaaagtacaaaatca

SEQ ID NO: 172415 - DNA, 72 bp, Homo sapiens
tcaaatctctaataatgtctatattttaatcacctacatcagttttacaaactaaagtacaaaatcaatagg

SEQ ID NO: 172416 - DNA, 67 bp, Homo sapiens
cacctacatcagttttacaaactaaagtacaaaatcaataggtaataattgaattatttaattattt

SEQ ID NO: 172417 - DNA, 71 bp, Homo sapiens
agtacaaaatcaataggtaataattgaattatttaattattttagaagcaatagcaaactatttcttcaga

SEQ ID NO: 172418 - DNA, 72 bp, Homo sapiens
tcaataggtaataattgaattatttaattattttagaagcaatagcaaactatttcttcagacaaaaagaga

SEQ ID NO: 172419 - DNA, 70 bp, Homo sapiens
ggtaataattgaattatttaattattttagaagcaatagcaaactatttcttcagacaaaaagagaattg

SEQ ID NO: 172420 - DNA, 70 bp, Homo sapiens
atttaattattttagaagcaatagcaaactatttcttcagacaaaaagagaattgtttagtctttcctga

SEQ ID NO: 172421 - DNA, 75 bp, Homo sapiens
tttagaagcaatagcaaactatttcttcagacaaaaagagaattgtttagtctttcctgagatctgattcctagc

SEQ ID NO: 172422 - DNA, 76 bp, Homo sapiens
aaactatttcttcagacaaaaagagaattgtttagtctttcctgagatctgattcctagccagatgataatgtgcc

SEQ ID NO: 172423 - DNA, 77 bp, Homo sapiens
acaaaaagagaattgtttagtctttcctgagatctgattcctagccagatgataatgtgcccatgttcaattaaaca

SEQ ID NO: 172424 - DNA, 78 bp, Homo sapiens
aagagaattgtttagtctttcctgagatctgattcctagccagatgataatgtgcccatgttcaattaaacaagctac

SEQ ID NO: 172425 - DNA, 78 bp, Homo sapiens
gatctgattcctagccagatgataatgtgcccatgttcaattaaacaagctaccaggttctctccaaaaaatggctta

SEQ ID NO: 172426 - DNA, 74 bp, Homo sapiens
attcctagccagatgataatgtgcccatgttcaattaaacaagctaccaggttctctccaaaaaatggcttaaa

SEQ ID NO: 172427 - DNA, 72 bp, Homo sapiens
atgataatgtgcccatgttcaattaaacaagctaccaggttctctccaaaaaatggcttaaagaggtcattt

SEQ ID NO: 172428 - DNA, 68 bp, Homo sapiens
ttaaacaagctaccaggttctctccaaaaaatggcttaaagaggtcattttctaaatttcccaagtga

SEQ ID NO: 172429 - DNA, 69 bp, Homo sapiens
taccaggttctctccaaaaaatggcttaaagaggtcattttctaaatttcccaagtgaagcgagtccaa

SEQ ID NO: 172430 - DNA, 69 bp, Homo sapiens
ttctctccaaaaaatggcttaaagaggtcattttctaaatttcccaagtgaagcgagtccaaactttga

SEQ ID NO: 172431 - DNA, 66 bp, Homo sapiens
aaaaatggcttaaagaggtcattttctaaatttcccaagtgaagcgagtccaaactttgagaccgg

SEQ ID NO: 172432 - DNA, 68 bp, Homo sapiens
taaagaggtcattttctaaatttcccaagtgaagcgagtccaaactttgagaccgggggtatggtgaa

SEQ ID NO: 172433 - DNA, 69 bp, Homo sapiens
ttttctaaatttcccaagtgaagcgagtccaaactttgagaccgggggtatggtgaatgcctggctaaa

SEQ ID NO: 172434 - DNA, 72 bp, Homo sapiens
aagcgagtccaaactttgagaccgggggtatggtgaatgcctggctaaacacaagcaaccccatccacctca

SEQ ID NO: 172435 - DNA, 71 bp, Homo sapiens
ccaaactttgagaccgggggtatggtgaatgcctggctaaacacaagcaaccccatccacctcagccccta

SEQ ID NO: 172436 - DNA, 74 bp, Homo sapiens
tatggtgaatgcctggctaaacacaagcaaccccatccacctcagcccctagcccctcactcccacccctaggc

SEQ ID NO: 172437 - DNA, 75 bp, Homo sapiens
gctaaacacaagcaaccccatccacctcagcccctagcccctcactcccacccctaggcgctgagttcatcatct

SEQ ID NO: 172438 - DNA, 75 bp, Homo sapiens
agcaaccccatccacctcagcccctagcccctcactcccacccctaggcgctgagttcatcatcttgtccagtaa

SEQ ID NO: 172439 - DNA, 77 bp, Homo sapiens
tccacctcagcccctagcccctcactcccacccctaggcgctgagttcatcatcttgtccagtaactatgaggcgaa

SEQ ID NO: 172440 - DNA, 75 bp, Homo sapiens
cccctagcccctcactcccacccctaggcgctgagttcatcatcttgtccagtaactatgaggcgaaagcataaa

SEQ ID NO: 172441 - DNA, 76 bp, Homo sapiens
ctcactcccacccctaggcgctgagttcatcatcttgtccagtaactatgaggcgaaagcataaaggcaattttcc

SEQ ID NO: 172442 - DNA, 75 bp, Homo sapiens
acccctaggcgctgagttcatcatcttgtccagtaactatgaggcgaaagcataaaggcaattttccttggacaa

SEQ ID NO: 172443 - DNA, 73 bp, Homo sapiens
atcatcttgtccagtaactatgaggcgaaagcataaaggcaattttccttggacaagacccagactctttagt

SEQ ID NO: 172444 - DNA, 71 bp, Homo sapiens
agtaactatgaggcgaaagcataaaggcaattttccttggacaagacccagactctttagttccctcctca

SEQ ID NO: 172445 - DNA, 73 bp, Homo sapiens
tatgaggcgaaagcataaaggcaattttccttggacaagacccagactctttagttccctcctcactacataa

SEQ ID NO: 172446 - DNA, 69 bp, Homo sapiens
ataaaggcaattttccttggacaagacccagactctttagttccctcctcactacataaacagatttat

SEQ ID NO: 172447 - DNA, 71 bp, Homo sapiens
attttccttggacaagacccagactctttagttccctcctcactacataaacagatttattcctacatcat

SEQ ID NO: 172448 - DNA, 73 bp, Homo sapiens
acaagacccagactctttagttccctcctcactacataaacagatttattcctacatcattcacctctgaaaa

SEQ ID NO: 172449 - DNA, 73 bp, Homo sapiens
gactctttagttccctcctcactacataaacagatttattcctacatcattcacctctgaaaaaggaatcgta

SEQ ID NO: 172450 - DNA, 69 bp, Homo sapiens
cctcactacataaacagatttattcctacatcattcacctctgaaaaaggaatcgtaaaaacaaaaatt

SEQ ID NO: 172451 - DNA, 73 bp, Homo sapiens
cagatttattcctacatcattcacctctgaaaaaggaatcgtaaaaacaaaaatttcagataatcatctaaga

SEQ ID NO: 172452 - DNA, 74 bp, Homo sapiens
tcattcacctctgaaaaaggaatcgtaaaaacaaaaatttcagataatcatctaagatttaggatagctatgga

SEQ ID NO: 172453 - DNA, 71 bp, Homo sapiens
gaaaaaggaatcgtaaaaacaaaaatttcagataatcatctaagatttaggatagctatggaaagaatggc

SEQ ID NO: 172454 - DNA, 73 bp, Homo sapiens
cgtaaaaacaaaaatttcagataatcatctaagatttaggatagctatggaaagaatggctccctagtccata

SEQ ID NO: 172455 - DNA, 76 bp, Homo sapiens
aaatttcagataatcatctaagatttaggatagctatggaaagaatggctccctagtccataatggctcttcttta

SEQ ID NO: 172456 - DNA, 79 bp, Homo sapiens
agataatcatctaagatttaggatagctatggaaagaatggctccctagtccataatggctcttctttatgatggagaa

SEQ ID NO: 172457 - DNA, 78 bp, Homo sapiens
atctaagatttaggatagctatggaaagaatggctccctagtccataatggctcttctttatgatggagaagactgga

SEQ ID NO: 172458 - DNA, 79 bp, Homo sapiens
atagctatggaaagaatggctccctagtccataatggctcttctttatgatggagaagactggaatgatagtaatattc

SEQ ID NO: 172459 - DNA, 78 bp, Homo sapiens
tccctagtccataatggctcttctttatgatggagaagactggaatgatagtaatattccacactgatccctttccca

SEQ ID NO: 172460 - DNA, 78 bp, Homo sapiens
ataatggctcttctttatgatggagaagactggaatgatagtaatattccacactgatccctttcccagttagatgaa

SEQ ID NO: 172461 - DNA, 78 bp, Homo sapiens
tcttctttatgatggagaagactggaatgatagtaatattccacactgatccctttcccagttagatgaagatttata

SEQ ID NO: 172462 - DNA, 77 bp, Homo sapiens
atggagaagactggaatgatagtaatattccacactgatccctttcccagttagatgaagatttatagtgtcaccca

SEQ ID NO: 172463 - DNA, 74 bp, Homo sapiens
actggaatgatagtaatattccacactgatccctttcccagttagatgaagatttatagtgtcacccaccccaa

SEQ ID NO: 172464 - DNA, 73 bp, Homo sapiens
taatattccacactgatccctttcccagttagatgaagatttatagtgtcacccaccccaatccctgaattta

SEQ ID NO: 172465 - DNA, 71 bp, Homo sapiens
ttccacactgatccctttcccagttagatgaagatttatagtgtcacccaccccaatccctgaatttaaaa

SEQ ID NO: 172466 - DNA, 66 bp, Homo sapiens
atccctttcccagttagatgaagatttatagtgtcacccaccccaatccctgaatttaaaaaaaaa

SEQ ID NO: 172467 - DNA, 66 bp, Homo sapiens
aaaaaagcatttttttttcactctcctaaccctgggaaagccccaaagcctactttcagtatcaca

SEQ ID NO: 172468 - DNA, 69 bp, Homo sapiens
ttttttttcactctcctaaccctgggaaagccccaaagcctactttcagtatcacacagagacttgtcc

SEQ ID NO: 172469 - DNA, 73 bp, Homo sapiens
ttcactctcctaaccctgggaaagccccaaagcctactttcagtatcacacagagacttgtccgtatgagagt

SEQ ID NO: 172470 - DNA, 73 bp, Homo sapiens
cctgggaaagccccaaagcctactttcagtatcacacagagacttgtccgtatgagagttgggaagcctaaga

SEQ ID NO: 172471 - DNA, 74 bp, Homo sapiens
aagccccaaagcctactttcagtatcacacagagacttgtccgtatgagagttgggaagcctaagaatcaccaa

SEQ ID NO: 172472 - DNA, 75 bp, Homo sapiens
aagcctactttcagtatcacacagagacttgtccgtatgagagttgggaagcctaagaatcaccaagtctgccct

SEQ ID NO: 172473 - DNA, 77 bp, Homo sapiens
tatcacacagagacttgtccgtatgagagttgggaagcctaagaatcaccaagtctgcccttcgccttctgagaaat

SEQ ID NO: 172474 - DNA, 75 bp, Homo sapiens
acagagacttgtccgtatgagagttgggaagcctaagaatcaccaagtctgcccttcgccttctgagaaatttgc

SEQ ID NO: 172475 - DNA, 75 bp, Homo sapiens
cgtatgagagttgggaagcctaagaatcaccaagtctgcccttcgccttctgagaaatttgcctgagggctggaa

SEQ ID NO: 172476 - DNA, 74 bp, Homo sapiens
agttgggaagcctaagaatcaccaagtctgcccttcgccttctgagaaatttgcctgagggctggaatgcaccc

SEQ ID NO: 172477 - DNA, 78 bp, Homo sapiens
aagtctgcccttcgccttctgagaaatttgcctgagggctggaatgcaccccaggccacccagcaagtcagtgattga

SEQ ID NO: 172478 - DNA, 77 bp, Homo sapiens
cttcgccttctgagaaatttgcctgagggctggaatgcaccccaggccacccagcaagtcagtgattgaactggaaa

SEQ ID NO: 172479 - DNA, 75 bp, Homo sapiens
agaaatttgcctgagggctggaatgcaccccaggccacccagcaagtcagtgattgaactggaaagggaacttca

SEQ ID NO: 172480 - DNA, 75 bp, Homo sapiens
ctggaatgcaccccaggccacccagcaagtcagtgattgaactggaaagggaacttcagtttgcctattagtcaa

SEQ ID NO: 172481 - DNA, 79 bp, Homo sapiens
caggccacccagcaagtcagtgattgaactggaaagggaacttcagtttgcctattagtcaagcgactgcacacagaca

SEQ ID NO: 172482 - DNA, 77 bp, Homo sapiens
acccagcaagtcagtgattgaactggaaagggaacttcagtttgcctattagtcaagcgactgcacacagacaccag

SEQ ID NO: 172483 - DNA, 73 bp, Homo sapiens
agtgattgaactggaaagggaacttcagtttgcctattagtcaagcgactgcacacagacaccaggtcctttt

SEQ ID NO: 172484 - DNA, 69 bp, Homo sapiens
aactggaaagggaacttcagtttgcctattagtcaagcgactgcacacagacaccaggtcctttttttt

SEQ ID NO: 172485 - DNA, 63 bp, Homo sapiens
tttttttttttctaatacggagaaagctttacactatgaaactagttacaaactctttttttc

SEQ ID NO: 172486 - DNA, 68 bp, Homo sapiens
tctaatacggagaaagctttacactatgaaactagttacaaactctttttttccagcagtaaaggtgg

SEQ ID NO: 172487 - DNA, 69 bp, Homo sapiens
gagaaagctttacactatgaaactagttacaaactctttttttccagcagtaaaggtggtgtacaagtc

SEQ ID NO: 172488 - DNA, 69 bp, Homo sapiens
gctttacactatgaaactagttacaaactctttttttccagcagtaaaggtggtgtacaagtcctctaa

SEQ ID NO: 172489 - DNA, 67 bp, Homo sapiens
actagttacaaactctttttttccagcagtaaaggtggtgtacaagtcctctaaccttatcttaaga

SEQ ID NO: 172490 - DNA, 66 bp, Homo sapiens
aaactctttttttccagcagtaaaggtggtgtacaagtcctctaaccttatcttaagaggtaacca

SEQ ID NO: 172491 - DNA, 68 bp, Homo sapiens
tttttccagcagtaaaggtggtgtacaagtcctctaaccttatcttaagaggtaaccaggaagttgaa

SEQ ID NO: 172492 - DNA, 67 bp, Homo sapiens
agtaaaggtggtgtacaagtcctctaaccttatcttaagaggtaaccaggaagttgaacctggccaa

SEQ ID NO: 172493 - DNA, 70 bp, Homo sapiens
tggtgtacaagtcctctaaccttatcttaagaggtaaccaggaagttgaacctggccaactgggaaatgc

SEQ ID NO: 172494 - DNA, 74 bp, Homo sapiens
tctaaccttatcttaagaggtaaccaggaagttgaacctggccaactgggaaatgctgagatcaagatataatg

SEQ ID NO: 172495 - DNA, 75 bp, Homo sapiens
taaccaggaagttgaacctggccaactgggaaatgctgagatcaagatataatggagtgaccaactacgaaagga

SEQ ID NO: 172496 - DNA, 74 bp, Homo sapiens
aagttgaacctggccaactgggaaatgctgagatcaagatataatggagtgaccaactacgaaaggaacaagac

SEQ ID NO: 172497 - DNA, 75 bp, Homo sapiens
ccaactgggaaatgctgagatcaagatataatggagtgaccaactacgaaaggaacaagactcaagaactaagga

SEQ ID NO: 172498 - DNA, 76 bp, Homo sapiens
aaatgctgagatcaagatataatggagtgaccaactacgaaaggaacaagactcaagaactaaggactgggcagaa

SEQ ID NO: 172499 - DNA, 74 bp, Homo sapiens
atcaagatataatggagtgaccaactacgaaaggaacaagactcaagaactaaggactgggcagaaaatcactc

SEQ ID NO: 172500 - DNA, 75 bp, Homo sapiens
atataatggagtgaccaactacgaaaggaacaagactcaagaactaaggactgggcagaaaatcactccagcata

SEQ ID NO: 172501 - DNA, 74 bp, Homo sapiens
caactacgaaaggaacaagactcaagaactaaggactgggcagaaaatcactccagcatactggataagttcaa

SEQ ID NO: 172502 - DNA, 74 bp, Homo sapiens
aaaggaacaagactcaagaactaaggactgggcagaaaatcactccagcatactggataagttcaacaacaaca

SEQ ID NO: 172503 - DNA, 79 bp, Homo sapiens
caacaacaaaaacagattaaatcctcatggcctcagtgcagtgtagaatgaaggtattctgatgcaggaacagaatttg

SEQ ID NO: 172504 - DNA, 78 bp, Homo sapiens
aaaaacagattaaatcctcatggcctcagtgcagtgtagaatgaaggtattctgatgcaggaacagaatttggtaata

SEQ ID NO: 172505 - DNA, 80 bp, Homo sapiens
attaaatcctcatggcctcagtgcagtgtagaatgaaggtattctgatgcaggaacagaatttggtaatagagaagcctg

SEQ ID NO: 172506 - DNA, 81 bp, Homo sapiens
cctcagtgcagtgtagaatgaaggtattctgatgcaggaacagaatttggtaatagagaagcctggatcaggtggtactga

SEQ ID NO: 172507 - DNA, 79 bp, Homo sapiens
gtgtagaatgaaggtattctgatgcaggaacagaatttggtaatagagaagcctggatcaggtggtactgaggaatata

SEQ ID NO: 172508 - DNA, 78 bp, Homo sapiens
aatgaaggtattctgatgcaggaacagaatttggtaatagagaagcctggatcaggtggtactgaggaatatagacta

SEQ ID NO: 172509 - DNA, 81 bp, Homo sapiens
gatgcaggaacagaatttggtaatagagaagcctggatcaggtggtactgaggaatatagactagcacacacttgtgagta

SEQ ID NO: 172510 - DNA, 81 bp, Homo sapiens
aagcctggatcaggtggtactgaggaatatagactagcacacacttgtgagtatccaaggatatgtcagctagaagccaac

SEQ ID NO: 172511 - DNA, 81 bp, Homo sapiens
aggtggtactgaggaatatagactagcacacacttgtgagtatccaaggatatgtcagctagaagccaactctgattccta

SEQ ID NO: 172512 - DNA, 81 bp, Homo sapiens
tactgaggaatatagactagcacacacttgtgagtatccaaggatatgtcagctagaagccaactctgattcctaagtggg

SEQ ID NO: 172513 - DNA, 80 bp, Homo sapiens
tatagactagcacacacttgtgagtatccaaggatatgtcagctagaagccaactctgattcctaagtgggggtgaagag

SEQ ID NO: 172514 - DNA, 76 bp, Homo sapiens
acacacttgtgagtatccaaggatatgtcagctagaagccaactctgattcctaagtgggggtgaagaggggataa

SEQ ID NO: 172515 - DNA, 74 bp, Homo sapiens
agtatccaaggatatgtcagctagaagccaactctgattcctaagtgggggtgaagaggggataactgaaagaa

SEQ ID NO: 172516 - DNA, 73 bp, Homo sapiens
aggatatgtcagctagaagccaactctgattcctaagtgggggtgaagaggggataactgaaagaaaacaatg

SEQ ID NO: 172517 - DNA, 72 bp, Homo sapiens
tagaagccaactctgattcctaagtgggggtgaagaggggataactgaaagaaaacaatggatgagtagaaa

SEQ ID NO: 172518 - DNA, 71 bp, Homo sapiens
aactctgattcctaagtgggggtgaagaggggataactgaaagaaaacaatggatgagtagaaatggccac

SEQ ID NO: 172519 - DNA, 76 bp, Homo sapiens
aagaggggataactgaaagaaaacaatggatgagtagaaatggccactgaagagaatatgcagccaatttttcaga

SEQ ID NO: 172520 - DNA, 76 bp, Homo sapiens
ataactgaaagaaaacaatggatgagtagaaatggccactgaagagaatatgcagccaatttttcagagaataagg

SEQ ID NO: 172521 - DNA, 75 bp, Homo sapiens
aaacaatggatgagtagaaatggccactgaagagaatatgcagccaatttttcagagaataaggtcctaaataat

SEQ ID NO: 172522 - DNA, 76 bp, Homo sapiens
atggatgagtagaaatggccactgaagagaatatgcagccaatttttcagagaataaggtcctaaataattactaa

SEQ ID NO: 172523 - DNA, 76 bp, Homo sapiens
tgaagagaatatgcagccaatttttcagagaataaggtcctaaataattactaaagctcaggcacaaagtaagtca

SEQ ID NO: 172524 - DNA, 73 bp, Homo sapiens
tgcagccaatttttcagagaataaggtcctaaataattactaaagctcaggcacaaagtaagtcattaatttg

SEQ ID NO: 172525 - DNA, 68 bp, Homo sapiens
aatttttcagagaataaggtcctaaataattactaaagctcaggcacaaagtaagtcattaatttggg

SEQ ID NO: 172526 - DNA, 67 bp, Homo sapiens
aaggtcctaaataattactaaagctcaggcacaaagtaagtcattaatttggggaatacgaagaaac

SEQ ID NO: 172527 - DNA, 68 bp, Homo sapiens
cctaaataattactaaagctcaggcacaaagtaagtcattaatttggggaatacgaagaaacctcaat

SEQ ID NO: 172528 - DNA, 67 bp, Homo sapiens
aaagctcaggcacaaagtaagtcattaatttggggaatacgaagaaacctcaattttctaaattggg

SEQ ID NO: 172529 - DNA, 67 bp, Homo sapiens
ggcacaaagtaagtcattaatttggggaatacgaagaaacctcaattttctaaattggggcaaaaga

SEQ ID NO: 172530 - DNA, 70 bp, Homo sapiens
tcattaatttggggaatacgaagaaacctcaattttctaaattggggcaaaagatcaagccagaagagta

SEQ ID NO: 172531 - DNA, 68 bp, Homo sapiens
atttggggaatacgaagaaacctcaattttctaaattggggcaaaagatcaagccagaagagtaacta

SEQ ID NO: 172532 - DNA, 73 bp, Homo sapiens
atacgaagaaacctcaattttctaaattggggcaaaagatcaagccagaagagtaactatggcaagagtctca

SEQ ID NO: 172533 - DNA, 77 bp, Homo sapiens
taaattggggcaaaagatcaagccagaagagtaactatggcaagagtctcagagcaatgggctggagttctttgaaa

SEQ ID NO: 172534 - DNA, 77 bp, Homo sapiens
cagaagagtaactatggcaagagtctcagagcaatgggctggagttctttgaaatgaagaaagtgaaacactggtta

SEQ ID NO: 172535 - DNA, 77 bp, Homo sapiens
taactatggcaagagtctcagagcaatgggctggagttctttgaaatgaagaaagtgaaacactggttaatcaatta

SEQ ID NO: 172536 - DNA, 73 bp, Homo sapiens
aagagtctcagagcaatgggctggagttctttgaaatgaagaaagtgaaacactggttaatcaattacttaaa

SEQ ID NO: 172537 - DNA, 75 bp, Homo sapiens
agagcaatgggctggagttctttgaaatgaagaaagtgaaacactggttaatcaattacttaaaatcagtgatga

SEQ ID NO: 172538 - DNA, 75 bp, Homo sapiens
ggctggagttctttgaaatgaagaaagtgaaacactggttaatcaattacttaaaatcagtgatgagaatgtatg

SEQ ID NO: 172539 - DNA, 75 bp, Homo sapiens
gaaatgaagaaagtgaaacactggttaatcaattacttaaaatcagtgatgagaatgtatgtgaaggttggtgaa

SEQ ID NO: 172540 - DNA, 74 bp, Homo sapiens
agaaagtgaaacactggttaatcaattacttaaaatcagtgatgagaatgtatgtgaaggttggtgaaggacag

SEQ ID NO: 172541 - DNA, 76 bp, Homo sapiens
aaacactggttaatcaattacttaaaatcagtgatgagaatgtatgtgaaggttggtgaaggacaggctcatagta

SEQ ID NO: 172542 - DNA, 76 bp, Homo sapiens
aattacttaaaatcagtgatgagaatgtatgtgaaggttggtgaaggacaggctcatagtaggtctctagtattta

SEQ ID NO: 172543 - DNA, 78 bp, Homo sapiens
ttaaaatcagtgatgagaatgtatgtgaaggttggtgaaggacaggctcatagtaggtctctagtatttatcaattcc

SEQ ID NO: 172544 - DNA, 80 bp, Homo sapiens
gtgatgagaatgtatgtgaaggttggtgaaggacaggctcatagtaggtctctagtatttatcaattcctctcctctctc

SEQ ID NO: 172545 - DNA, 77 bp, Homo sapiens
tgtatgtgaaggttggtgaaggacaggctcatagtaggtctctagtatttatcaattcctctcctctctcccaagac

SEQ ID NO: 172546 - DNA, 75 bp, Homo sapiens
gtgaaggacaggctcatagtaggtctctagtatttatcaattcctctcctctctcccaagaccaacaactaagta

SEQ ID NO: 172547 - DNA, 76 bp, Homo sapiens
ggctcatagtaggtctctagtatttatcaattcctctcctctctcccaagaccaacaactaagtagcagccctcaa

SEQ ID NO: 172548 - DNA, 75 bp, Homo sapiens
atagtaggtctctagtatttatcaattcctctcctctctcccaagaccaacaactaagtagcagccctcaagagc

SEQ ID NO: 172549 - DNA, 77 bp, Homo sapiens
tatttatcaattcctctcctctctcccaagaccaacaactaagtagcagccctcaagagccctgagcacacttagaa

SEQ ID NO: 172550 - DNA, 76 bp, Homo sapiens
atcaattcctctcctctctcccaagaccaacaactaagtagcagccctcaagagccctgagcacacttagaagtgg

SEQ ID NO: 172551 - DNA, 77 bp, Homo sapiens
tctctcccaagaccaacaactaagtagcagccctcaagagccctgagcacacttagaagtggtctgtgccccaggtg

SEQ ID NO: 172552 - DNA, 76 bp, Homo sapiens
cctcaagagccctgagcacacttagaagtggtctgtgccccaggtgttaaaagattaatgaacccagtcaatcaca

SEQ ID NO: 172553 - DNA, 75 bp, Homo sapiens
agagccctgagcacacttagaagtggtctgtgccccaggtgttaaaagattaatgaacccagtcaatcacattcc

SEQ ID NO: 172554 - DNA, 72 bp, Homo sapiens
cttagaagtggtctgtgccccaggtgttaaaagattaatgaacccagtcaatcacattccccaaggcactta

SEQ ID NO: 172555 - DNA, 74 bp, Homo sapiens
gtctgtgccccaggtgttaaaagattaatgaacccagtcaatcacattccccaaggcacttagaggtgcttaga

SEQ ID NO: 172556 - DNA, 76 bp, Homo sapiens
agtcaatcacattccccaaggcacttagaggtgcttagattgctggagacacaacgggaaaacttcacatttgtgc

SEQ ID NO: 172557 - DNA, 76 bp, Homo sapiens
ccaaggcacttagaggtgcttagattgctggagacacaacgggaaaacttcacatttgtgccctctgcattcctct

SEQ ID NO: 172558 - DNA, 76 bp, Homo sapiens
acttagaggtgcttagattgctggagacacaacgggaaaacttcacatttgtgccctctgcattcctcttctacaa

SEQ ID NO: 172559 - DNA, 78 bp, Homo sapiens
ttagattgctggagacacaacgggaaaacttcacatttgtgccctctgcattcctcttctacaagatctatattctaa

SEQ ID NO: 172560 - DNA, 75 bp, Homo sapiens
gggaaaacttcacatttgtgccctctgcattcctcttctacaagatctatattctaaaggccctattcatccaaa

SEQ ID NO: 172561 - DNA, 77 bp, Homo sapiens
acttcacatttgtgccctctgcattcctcttctacaagatctatattctaaaggccctattcatccaaatagtgatt

SEQ ID NO: 172562 - DNA, 78 bp, Homo sapiens
ttgtgccctctgcattcctcttctacaagatctatattctaaaggccctattcatccaaatagtgatttgctttagag

SEQ ID NO: 172563 - DNA, 77 bp, Homo sapiens
ttcctcttctacaagatctatattctaaaggccctattcatccaaatagtgatttgctttagaggccttgatcgata

SEQ ID NO: 172564 - DNA, 77 bp, Homo sapiens
ttctacaagatctatattctaaaggccctattcatccaaatagtgatttgctttagaggccttgatcgatatgaaac

SEQ ID NO: 172565 - DNA, 73 bp, Homo sapiens
aaaggccctattcatccaaatagtgatttgctttagaggccttgatcgatatgaaaccgaccaaaacaaatgc

SEQ ID NO: 172566 - DNA, 73 bp, Homo sapiens
ctttagaggccttgatcgatatgaaaccgaccaaaacaaatgcctgctttattccttcatgaattactttata

SEQ ID NO: 172567 - DNA, 73 bp, Homo sapiens
acaaatgcctgctttattccttcatgaattactttataaaggtaatcacaattagaactattaaaggagatga

SEQ ID NO: 172568 - DNA, 72 bp, Homo sapiens
gcctgctttattccttcatgaattactttataaaggtaatcacaattagaactattaaaggagatgatttta

SEQ ID NO: 172569 - DNA, 69 bp, Homo sapiens
tactttataaaggtaatcacaattagaactattaaaggagatgattttaagttggtatctcttggtcct

SEQ ID NO: 172570 - DNA, 70 bp, Homo sapiens
ggtaatcacaattagaactattaaaggagatgattttaagttggtatctcttggtccttgaaaatattag

SEQ ID NO: 172571 - DNA, 71 bp, Homo sapiens
tcacaattagaactattaaaggagatgattttaagttggtatctcttggtccttgaaaatattagtagttg

SEQ ID NO: 172572 - DNA, 72 bp, Homo sapiens
ttaaaggagatgattttaagttggtatctcttggtccttgaaaatattagtagttgtaggcaacattgacag

SEQ ID NO: 172573 - DNA, 72 bp, Homo sapiens
tgattttaagttggtatctcttggtccttgaaaatattagtagttgtaggcaacattgacagttttaagctc

SEQ ID NO: 172574 - DNA, 72 bp, Homo sapiens
gttggtatctcttggtccttgaaaatattagtagttgtaggcaacattgacagttttaagctctttcaaaca

SEQ ID NO: 172575 - DNA, 72 bp, Homo sapiens
ttggtccttgaaaatattagtagttgtaggcaacattgacagttttaagctctttcaaacaagcaggtctta

SEQ ID NO: 172576 - DNA, 71 bp, Homo sapiens
ccttgaaaatattagtagttgtaggcaacattgacagttttaagctctttcaaacaagcaggtcttacact

SEQ ID NO: 172577 - DNA, 72 bp, Homo sapiens
ttagtagttgtaggcaacattgacagttttaagctctttcaaacaagcaggtcttacactttaaacatcaac

SEQ ID NO: 172578 - DNA, 72 bp, Homo sapiens
caacattgacagttttaagctctttcaaacaagcaggtcttacactttaaacatcaaccatgggacattact

SEQ ID NO: 172579 - DNA, 69 bp, Homo sapiens
agttttaagctctttcaaacaagcaggtcttacactttaaacatcaaccatgggacattactttaccag

SEQ ID NO: 172580 - DNA, 73 bp, Homo sapiens
tctttcaaacaagcaggtcttacactttaaacatcaaccatgggacattactttaccagtagttctgatgtaa

SEQ ID NO: 172581 - DNA, 72 bp, Homo sapiens
aaacaagcaggtcttacactttaaacatcaaccatgggacattactttaccagtagttctgatgtaagagcc

SEQ ID NO: 172582 - DNA, 78 bp, Homo sapiens
tttaaacatcaaccatgggacattactttaccagtagttctgatgtaagagcctggacatgatttcatcaagtatcaa

SEQ ID NO: 172583 - DNA, 77 bp, Homo sapiens
attactttaccagtagttctgatgtaagagcctggacatgatttcatcaagtatcaacatttcaaaaagaggcacag

SEQ ID NO: 172584 - DNA, 79 bp, Homo sapiens
tagttctgatgtaagagcctggacatgatttcatcaagtatcaacatttcaaaaagaggcacaggaatctcccctgttg

SEQ ID NO: 172585 - DNA, 79 bp, Homo sapiens
taagagcctggacatgatttcatcaagtatcaacatttcaaaaagaggcacaggaatctcccctgttggtgtcatgtaa

SEQ ID NO: 172586 - DNA, 77 bp, Homo sapiens
tggacatgatttcatcaagtatcaacatttcaaaaagaggcacaggaatctcccctgttggtgtcatgtaaggtacc

SEQ ID NO: 172587 - DNA, 71 bp, Homo sapiens
caacatttcaaaaagaggcacaggaatctcccctgttggtgtcatgtaaggtaccgtggcttcaaaaacaa

SEQ ID NO: 172588 - DNA, 71 bp, Homo sapiens
aaaaagaggcacaggaatctcccctgttggtgtcatgtaaggtaccgtggcttcaaaaacaactctcatta

SEQ ID NO: 172589 - DNA, 74 bp, Homo sapiens
acaggaatctcccctgttggtgtcatgtaaggtaccgtggcttcaaaaacaactctcattagaagatcacatcc

SEQ ID NO: 172590 - DNA, 73 bp, Homo sapiens
ccctgttggtgtcatgtaaggtaccgtggcttcaaaaacaactctcattagaagatcacatcccaagtgaagg

SEQ ID NO: 172591 - DNA, 75 bp, Homo sapiens
ttggtgtcatgtaaggtaccgtggcttcaaaaacaactctcattagaagatcacatcccaagtgaagggattatg

SEQ ID NO: 172592 - DNA, 75 bp, Homo sapiens
taaggtaccgtggcttcaaaaacaactctcattagaagatcacatcccaagtgaagggattatgtctgtgaataa

SEQ ID NO: 172593 - DNA, 75 bp, Homo sapiens
tggcttcaaaaacaactctcattagaagatcacatcccaagtgaagggattatgtctgtgaataaactttttgta

SEQ ID NO: 172594 - DNA, 76 bp, Homo sapiens
aaacaactctcattagaagatcacatcccaagtgaagggattatgtctgtgaataaactttttgtacactgatatg

SEQ ID NO: 172595 - DNA, 79 bp, Homo sapiens
ttagaagatcacatcccaagtgaagggattatgtctgtgaataaactttttgtacactgatatgtgattcagcatcttt

SEQ ID NO: 172596 - DNA, 78 bp, Homo sapiens
tcacatcccaagtgaagggattatgtctgtgaataaactttttgtacactgatatgtgattcagcatcttttcttaaa

SEQ ID NO: 172597 - DNA, 77 bp, Homo sapiens
agtgaagggattatgtctgtgaataaactttttgtacactgatatgtgattcagcatcttttcttaaaagtgtcaga

SEQ ID NO: 172598 - DNA, 77 bp, Homo sapiens
gtctgtgaataaactttttgtacactgatatgtgattcagcatcttttcttaaaagtgtcagaaactggtgctatat

SEQ ID NO: 172599 - DNA, 81 bp, Homo sapiens
tttgtacactgatatgtgattcagcatcttttcttaaaagtgtcagaaactggtgctatattggaggaaatagccgcatga

SEQ ID NO: 172600 - DNA, 82 bp, Homo sapiens
atatgtgattcagcatcttttcttaaaagtgtcagaaactggtgctatattggaggaaatagccgcatgatgcccagctctc

SEQ ID NO: 172601 - DNA, 77 bp, Homo sapiens
atcttttcttaaaagtgtcagaaactggtgctatattggaggaaatagccgcatgatgcccagctctctttaagata

SEQ ID NO: 172602 - DNA, 83 bp, Homo sapiens
ttcttaaaagtgtcagaaactggtgctatattggaggaaatagccgcatgatgcccagctctctttaagatatgccagcatga

SEQ ID NO: 172603 - DNA, 87 bp, Homo sapiens
tggtgctatattggaggaaatagccgcatgatgcccagctctctttaagatatgccagcatgacatgccatactgaactgttctttg

SEQ ID NO: 172604 - DNA, 83 bp, Homo sapiens
aggaaatagccgcatgatgcccagctctctttaagatatgccagcatgacatgccatactgaactgttctttgggcttgaaac

SEQ ID NO: 172605 - DNA, 84 bp, Homo sapiens
tagccgcatgatgcccagctctctttaagatatgccagcatgacatgccatactgaactgttctttgggcttgaaactggaaac

SEQ ID NO: 172606 - DNA, 81 bp, Homo sapiens
cagctctctttaagatatgccagcatgacatgccatactgaactgttctttgggcttgaaactggaaactgcattccttaa

SEQ ID NO: 172607 - DNA, 80 bp, Homo sapiens
tttaagatatgccagcatgacatgccatactgaactgttctttgggcttgaaactggaaactgcattccttaaaagcata

SEQ ID NO: 172608 - DNA, 73 bp, Homo sapiens
acatgccatactgaactgttctttgggcttgaaactggaaactgcattccttaaaagcatacttctttggttg

SEQ ID NO: 172609 - DNA, 70 bp, Homo sapiens
aactgttctttgggcttgaaactggaaactgcattccttaaaagcatacttctttggttggttccataca

SEQ ID NO: 172610 - DNA, 72 bp, Homo sapiens
ttctttgggcttgaaactggaaactgcattccttaaaagcatacttctttggttggttccatacatgtaatc

SEQ ID NO: 172611 - DNA, 73 bp, Homo sapiens
aaactggaaactgcattccttaaaagcatacttctttggttggttccatacatgtaatcgcaaatactcacat

SEQ ID NO: 172612 - DNA, 75 bp, Homo sapiens
aactgcattccttaaaagcatacttctttggttggttccatacatgtaatcgcaaatactcacattcaacattgt

SEQ ID NO: 172613 - DNA, 74 bp, Homo sapiens
atacttctttggttggttccatacatgtaatcgcaaatactcacattcaacattgttcttcaaactacctcttc

SEQ ID NO: 172614 - DNA, 74 bp, Homo sapiens
gttccatacatgtaatcgcaaatactcacattcaacattgttcttcaaactacctcttcttttgagttggtgtt

SEQ ID NO: 172615 - DNA, 74 bp, Homo sapiens
catgtaatcgcaaatactcacattcaacattgttcttcaaactacctcttcttttgagttggtgttttagaaga

SEQ ID NO: 172616 - DNA, 71 bp, Homo sapiens
cgcaaatactcacattcaacattgttcttcaaactacctcttcttttgagttggtgttttagaagaaacac

SEQ ID NO: 172617 - DNA, 73 bp, Homo sapiens
tcacattcaacattgttcttcaaactacctcttcttttgagttggtgttttagaagaaacactgcatttgtta

SEQ ID NO: 172618 - DNA, 73 bp, Homo sapiens
tgttcttcaaactacctcttcttttgagttggtgttttagaagaaacactgcatttgttaatatcaaacatgc

SEQ ID NO: 172619 - DNA, 74 bp, Homo sapiens
tacctcttcttttgagttggtgttttagaagaaacactgcatttgttaatatcaaacatgctaaggtgtcactg

SEQ ID NO: 172620 - DNA, 76 bp, Homo sapiens
cttcttttgagttggtgttttagaagaaacactgcatttgttaatatcaaacatgctaaggtgtcactgtgcctgc

SEQ ID NO: 172621 - DNA, 76 bp, Homo sapiens
tgttttagaagaaacactgcatttgttaatatcaaacatgctaaggtgtcactgtgcctgccttcccctttataca

SEQ ID NO: 172622 - DNA, 74 bp, Homo sapiens
atttgttaatatcaaacatgctaaggtgtcactgtgcctgccttcccctttatacattcctgaaatattttgag

SEQ ID NO: 172623 - DNA, 75 bp, Homo sapiens
ttaatatcaaacatgctaaggtgtcactgtgcctgccttcccctttatacattcctgaaatattttgagtttatc

SEQ ID NO: 172624 - DNA, 76 bp, Homo sapiens
acatgctaaggtgtcactgtgcctgccttcccctttatacattcctgaaatattttgagtttatctgtgaagagtg

SEQ ID NO: 172625 - DNA, 77 bp, Homo sapiens
actgtgcctgccttcccctttatacattcctgaaatattttgagtttatctgtgaagagtgtgtctagcaattcaca

SEQ ID NO: 172626 - DNA, 77 bp, Homo sapiens
ccttcccctttatacattcctgaaatattttgagtttatctgtgaagagtgtgtctagcaattcacatgtgaagcca

SEQ ID NO: 172627 - DNA, 81 bp, Homo sapiens
tatacattcctgaaatattttgagtttatctgtgaagagtgtgtctagcaattcacatgtgaagccacaaactcagctaat

SEQ ID NO: 172628 - DNA, 81 bp, Homo sapiens
attcctgaaatattttgagtttatctgtgaagagtgtgtctagcaattcacatgtgaagccacaaactcagctaattgatc

SEQ ID NO: 172629 - DNA, 86 bp, Homo sapiens
tattttgagtttatctgtgaagagtgtgtctagcaattcacatgtgaagccacaaactcagctaattgatcctcagcagtgatcag

SEQ ID NO: 172630 - DNA, 87 bp, Homo sapiens
ttatctgtgaagagtgtgtctagcaattcacatgtgaagccacaaactcagctaattgatcctcagcagtgatcaggtctcacccca

SEQ ID NO: 172631 - DNA, 85 bp, Homo sapiens
tgtgtctagcaattcacatgtgaagccacaaactcagctaattgatcctcagcagtgatcaggtctcaccccagacaaattacta

SEQ ID NO: 172632 - DNA, 83 bp, Homo sapiens
aattcacatgtgaagccacaaactcagctaattgatcctcagcagtgatcaggtctcaccccagacaaattactatagccaca

SEQ ID NO: 172633 - DNA, 82 bp, Homo sapiens
atgtgaagccacaaactcagctaattgatcctcagcagtgatcaggtctcaccccagacaaattactatagccacaagccca

SEQ ID NO: 172634 - DNA, 79 bp, Homo sapiens
ctaattgatcctcagcagtgatcaggtctcaccccagacaaattactatagccacaagcccaccaaactgcaatccaag

SEQ ID NO: 172635 - DNA, 76 bp, Homo sapiens
atcaggtctcaccccagacaaattactatagccacaagcccaccaaactgcaatccaaggttgagtcagtattgaa

SEQ ID NO: 172636 - DNA, 75 bp, Homo sapiens
cagacaaattactatagccacaagcccaccaaactgcaatccaaggttgagtcagtattgaacctcatccaaatt

SEQ ID NO: 172637 - DNA, 74 bp, Homo sapiens
aaattactatagccacaagcccaccaaactgcaatccaaggttgagtcagtattgaacctcatccaaatttcac

SEQ ID NO: 172638 - DNA, 73 bp, Homo sapiens
acaagcccaccaaactgcaatccaaggttgagtcagtattgaacctcatccaaatttcaccagtcttccttcc

SEQ ID NO: 172639 - DNA, 72 bp, Homo sapiens
aaactgcaatccaaggttgagtcagtattgaacctcatccaaatttcaccagtcttccttccttctagttta

SEQ ID NO: 172640 - DNA, 73 bp, Homo sapiens
gtcagtattgaacctcatccaaatttcaccagtcttccttccttctagtttaattctctctgcccatgtttta

SEQ ID NO: 172641 - DNA, 74 bp, Homo sapiens
tattgaacctcatccaaatttcaccagtcttccttccttctagtttaattctctctgcccatgttttatatgga

SEQ ID NO: 172642 - DNA, 74 bp, Homo sapiens
aaatttcaccagtcttccttccttctagtttaattctctctgcccatgttttatatggatagcgttgccattca

SEQ ID NO: 172643 - DNA, 73 bp, Homo sapiens
agtcttccttccttctagtttaattctctctgcccatgttttatatggatagcgttgccattcactttcttgt

SEQ ID NO: 172644 - DNA, 74 bp, Homo sapiens
cttccttctagtttaattctctctgcccatgttttatatggatagcgttgccattcactttcttgttataagga

SEQ ID NO: 172645 - DNA, 75 bp, Homo sapiens
taattctctctgcccatgttttatatggatagcgttgccattcactttcttgttataaggacgcagtattatttt

SEQ ID NO: 172646 - DNA, 75 bp, Homo sapiens
ctctctgcccatgttttatatggatagcgttgccattcactttcttgttataaggacgcagtattatttttatta

SEQ ID NO: 172647 - DNA, 75 bp, Homo sapiens
ttatatggatagcgttgccattcactttcttgttataaggacgcagtattatttttattatgattatttaagaca

SEQ ID NO: 172648 - DNA, 72 bp, Homo sapiens
gccattcactttcttgttataaggacgcagtattatttttattatgattatttaagacatcttaagagtttc

SEQ ID NO: 172649 - DNA, 68 bp, Homo sapiens
tttcttgttataaggacgcagtattatttttattatgattatttaagacatcttaagagtttcctttt

SEQ ID NO: 172650 - DNA, 66 bp, Homo sapiens
tatttttattatgattatttaagacatcttaagagtttcctttttaattaaaattagataatttta

SEQ ID NO: 172651 - DNA, 67 bp, Homo sapiens
agacatcttaagagtttcctttttaattaaaattagataattttaaaagaacatgtctttcctagca

SEQ ID NO: 172652 - DNA, 67 bp, Homo sapiens
agagtttcctttttaattaaaattagataattttaaaagaacatgtctttcctagcaatgtcactag

SEQ ID NO: 172653 - DNA, 73 bp, Homo sapiens
aattagataattttaaaagaacatgtctttcctagcaatgtcactagtaaaatgcatccaatttttctctatg

SEQ ID NO: 172654 - DNA, 74 bp, Homo sapiens
ttttaaaagaacatgtctttcctagcaatgtcactagtaaaatgcatccaatttttctctatgtggtgctttcc

SEQ ID NO: 172655 - DNA, 76 bp, Homo sapiens
aacatgtctttcctagcaatgtcactagtaaaatgcatccaatttttctctatgtggtgctttccctgtccataaa

SEQ ID NO: 172656 - DNA, 76 bp, Homo sapiens
caatgtcactagtaaaatgcatccaatttttctctatgtggtgctttccctgtccataaaacttatttgattagca

SEQ ID NO: 172657 - DNA, 76 bp, Homo sapiens
aatgcatccaatttttctctatgtggtgctttccctgtccataaaacttatttgattagcagtactatagaagcta

SEQ ID NO: 172658 - DNA, 73 bp, Homo sapiens
caatttttctctatgtggtgctttccctgtccataaaacttatttgattagcagtactatagaagctaaagct

SEQ ID NO: 172659 - DNA, 77 bp, Homo sapiens
tctctatgtggtgctttccctgtccataaaacttatttgattagcagtactatagaagctaaagcttttgtatgcag

SEQ ID NO: 172660 - DNA, 77 bp, Homo sapiens
ttccctgtccataaaacttatttgattagcagtactatagaagctaaagcttttgtatgcaggcactcaagcataat

SEQ ID NO: 172661 - DNA, 78 bp, Homo sapiens
gtccataaaacttatttgattagcagtactatagaagctaaagcttttgtatgcaggcactcaagcataatttaatca

SEQ ID NO: 172662 - DNA, 76 bp, Homo sapiens
acttatttgattagcagtactatagaagctaaagcttttgtatgcaggcactcaagcataatttaatcattttatt

SEQ ID NO: 172663 - DNA, 78 bp, Homo sapiens
gcagtactatagaagctaaagcttttgtatgcaggcactcaagcataatttaatcattttatttaagcatggaaaaga

SEQ ID NO: 172664 - DNA, 77 bp, Homo sapiens
agaagctaaagcttttgtatgcaggcactcaagcataatttaatcattttatttaagcatggaaaagattattctga

SEQ ID NO: 172665 - DNA, 76 bp, Homo sapiens
agcttttgtatgcaggcactcaagcataatttaatcattttatttaagcatggaaaagattattctgaaagccctg

SEQ ID NO: 172666 - DNA, 75 bp, Homo sapiens
tgcaggcactcaagcataatttaatcattttatttaagcatggaaaagattattctgaaagccctgttagtaaaa

SEQ ID NO: 172667 - DNA, 72 bp, Homo sapiens
gcataatttaatcattttatttaagcatggaaaagattattctgaaagccctgttagtaaaatatccctgat

SEQ ID NO: 172668 - DNA, 70 bp, Homo sapiens
atcattttatttaagcatggaaaagattattctgaaagccctgttagtaaaatatccctgattagtttaa

SEQ ID NO: 172669 - DNA, 66 bp, Homo sapiens
aagccctgttagtaaaatatccctgattagtttaaacttacatttgcaggtatattaaaggtaaaa

SEQ ID NO: 172670 - DNA, 70 bp, Homo sapiens
aatatccctgattagtttaaacttacatttgcaggtatattaaaggtaaaataaatctcggaatgctcag

SEQ ID NO: 172671 - DNA, 72 bp, Homo sapiens
acttacatttgcaggtatattaaaggtaaaataaatctcggaatgctcagtatgcaagaacagtgttaactt

SEQ ID NO: 172672 - DNA, 73 bp, Homo sapiens
gcaggtatattaaaggtaaaataaatctcggaatgctcagtatgcaagaacagtgttaactttgttacaacag

SEQ ID NO: 172673 - DNA, 73 bp, Homo sapiens
taaaggtaaaataaatctcggaatgctcagtatgcaagaacagtgttaactttgttacaacagtccggcagta

SEQ ID NO: 172674 - DNA, 73 bp, Homo sapiens
taaaataaatctcggaatgctcagtatgcaagaacagtgttaactttgttacaacagtccggcagtaagttaa

SEQ ID NO: 172675 - DNA, 72 bp, Homo sapiens
ggaatgctcagtatgcaagaacagtgttaactttgttacaacagtccggcagtaagttaaaaattgtagtat

SEQ ID NO: 172676 - DNA, 72 bp, Homo sapiens
ctcagtatgcaagaacagtgttaactttgttacaacagtccggcagtaagttaaaaattgtagtattagaga

SEQ ID NO: 172677 - DNA, 69 bp, Homo sapiens
gaacagtgttaactttgttacaacagtccggcagtaagttaaaaattgtagtattagagaatgtaagga

SEQ ID NO: 172678 - DNA, 70 bp, Homo sapiens
ctttgttacaacagtccggcagtaagttaaaaattgtagtattagagaatgtaaggaataactatctgat

SEQ ID NO: 172679 - DNA, 72 bp, Homo sapiens
caacagtccggcagtaagttaaaaattgtagtattagagaatgtaaggaataactatctgattttcaataca

SEQ ID NO: 172680 - DNA, 70 bp, Homo sapiens
aaaattgtagtattagagaatgtaaggaataactatctgattttcaatacatgtatttaaacaggttatt

SEQ ID NO: 172681 - DNA, 63 bp, Homo sapiens
aaaataaattttgttttgtgtgaacccctttttattaccaggattttcacctatggaaacctc

SEQ ID NO: 172682 - DNA, 66 bp, Homo sapiens
ttgttttgtgtgaacccctttttattaccaggattttcacctatggaaacctcttttatagtcaaa

SEQ ID NO: 172683 - DNA, 69 bp, Homo sapiens
tgtgtgaacccctttttattaccaggattttcacctatggaaacctcttttatagtcaaacaagatgag

SEQ ID NO: 172684 - DNA, 72 bp, Homo sapiens
tttattaccaggattttcacctatggaaacctcttttatagtcaaacaagatgaggtcttaattgcatacta

SEQ ID NO: 172685 - DNA, 75 bp, Homo sapiens
acctatggaaacctcttttatagtcaaacaagatgaggtcttaattgcatactaccatttatctgctgaggataa

SEQ ID NO: 172686 - DNA, 76 bp, Homo sapiens
ctcttttatagtcaaacaagatgaggtcttaattgcatactaccatttatctgctgaggataaaagtgccaacaaa

SEQ ID NO: 172687 - DNA, 77 bp, Homo sapiens
ttatagtcaaacaagatgaggtcttaattgcatactaccatttatctgctgaggataaaagtgccaacaaatgaaaa

SEQ ID NO: 172688 - DNA, 79 bp, Homo sapiens
aagatgaggtcttaattgcatactaccatttatctgctgaggataaaagtgccaacaaatgaaaatgcacattaggcaa

SEQ ID NO: 172689 - DNA, 81 bp, Homo sapiens
ttaattgcatactaccatttatctgctgaggataaaagtgccaacaaatgaaaatgcacattaggcaagagattgtcagaa

SEQ ID NO: 172690 - DNA, 78 bp, Homo sapiens
taccatttatctgctgaggataaaagtgccaacaaatgaaaatgcacattaggcaagagattgtcagaatagaaaatt

SEQ ID NO: 172691 - DNA, 76 bp, Homo sapiens
tttatctgctgaggataaaagtgccaacaaatgaaaatgcacattaggcaagagattgtcagaatagaaaattttt

SEQ ID NO: 172692 - DNA, 72 bp, Homo sapiens
gaggataaaagtgccaacaaatgaaaatgcacattaggcaagagattgtcagaatagaaaatttttttttta

SEQ ID NO: 172693 - DNA, 67 bp, Homo sapiens
tttttttgtttttaaataacccactcacattaacaaaagactgcagtagcttccaaattataggttg

SEQ ID NO: 172694 - DNA, 69 bp, Homo sapiens
tttaaataacccactcacattaacaaaagactgcagtagcttccaaattataggttgttatttttagtg

SEQ ID NO: 172695 - DNA, 71 bp, Homo sapiens
cccactcacattaacaaaagactgcagtagcttccaaattataggttgttatttttagtggaagtagttca

SEQ ID NO: 172696 - DNA, 72 bp, Homo sapiens
cacattaacaaaagactgcagtagcttccaaattataggttgttatttttagtggaagtagttcaatattca

SEQ ID NO: 172697 - DNA, 77 bp, Homo sapiens
actgcagtagcttccaaattataggttgttatttttagtggaagtagttcaatattcatattggagcagatgtagca

SEQ ID NO: 172698 - DNA, 74 bp, Homo sapiens
taggttgttatttttagtggaagtagttcaatattcatattggagcagatgtagcagtttaacaaaacagctct

SEQ ID NO: 172699 - DNA, 75 bp, Homo sapiens
ggttgttatttttagtggaagtagttcaatattcatattggagcagatgtagcagtttaacaaaacagctcttca

SEQ ID NO: 172700 - DNA, 74 bp, Homo sapiens
atttttagtggaagtagttcaatattcatattggagcagatgtagcagtttaacaaaacagctcttcaaatccc

SEQ ID NO: 172701 - DNA, 76 bp, Homo sapiens
tttttagtggaagtagttcaatattcatattggagcagatgtagcagtttaacaaaacagctcttcaaatcccgca

SEQ ID NO: 172702 - DNA, 76 bp, Homo sapiens
aagtagttcaatattcatattggagcagatgtagcagtttaacaaaacagctcttcaaatcccgcacaaattgaaa

SEQ ID NO: 172703 - DNA, 74 bp, Homo sapiens
atattggagcagatgtagcagtttaacaaaacagctcttcaaatcccgcacaaattgaaaacaggaaaactgat

SEQ ID NO: 172704 - DNA, 71 bp, Homo sapiens
aaacagctcttcaaatcccgcacaaattgaaaacaggaaaactgattgcattttctcttatcactttcctt

SEQ ID NO: 172705 - DNA, 71 bp, Homo sapiens
cccgcacaaattgaaaacaggaaaactgattgcattttctcttatcactttccttttctgaattgacactt

SEQ ID NO: 172706 - DNA, 72 bp, Homo sapiens
gaaaacaggaaaactgattgcattttctcttatcactttccttttctgaattgacacttttggccttctgaa

SEQ ID NO: 172707 - DNA, 74 bp, Homo sapiens
ctgattgcattttctcttatcactttccttttctgaattgacacttttggccttctgaaaatttacacatggct

SEQ ID NO: 172708 - DNA, 75 bp, Homo sapiens
tgcattttctcttatcactttccttttctgaattgacacttttggccttctgaaaatttacacatggctttcatc

SEQ ID NO: 172709 - DNA, 75 bp, Homo sapiens
ttatcactttccttttctgaattgacacttttggccttctgaaaatttacacatggctttcatctcaacagcacc

SEQ ID NO: 172710 - DNA, 79 bp, Homo sapiens
ttttctgaattgacacttttggccttctgaaaatttacacatggctttcatctcaacagcacctgctgatcaaacagaa

SEQ ID NO: 172711 - DNA, 77 bp, Homo sapiens
aattgacacttttggccttctgaaaatttacacatggctttcatctcaacagcacctgctgatcaaacagaaaccta

SEQ ID NO: 172712 - DNA, 77 bp, Homo sapiens
ccttctgaaaatttacacatggctttcatctcaacagcacctgctgatcaaacagaaacctaacattttcatgaaaa

SEQ ID NO: 172713 - DNA, 78 bp, Homo sapiens
gaaaatttacacatggctttcatctcaacagcacctgctgatcaaacagaaacctaacattttcatgaaaattgtata

SEQ ID NO: 172714 - DNA, 76 bp, Homo sapiens
tggctttcatctcaacagcacctgctgatcaaacagaaacctaacattttcatgaaaattgtataaaggactagtt

SEQ ID NO: 172715 - DNA, 76 bp, Homo sapiens
tcatctcaacagcacctgctgatcaaacagaaacctaacattttcatgaaaattgtataaaggactagttttgttc

SEQ ID NO: 172716 - DNA, 72 bp, Homo sapiens
gcacctgctgatcaaacagaaacctaacattttcatgaaaattgtataaaggactagttttgttctaaacac

SEQ ID NO: 172717 - DNA, 66 bp, Homo sapiens
aacagaaacctaacattttcatgaaaattgtataaaggactagttttgttctaaacactgtaaagg

SEQ ID NO: 172718 - DNA, 70 bp, Homo sapiens
cctaacattttcatgaaaattgtataaaggactagttttgttctaaacactgtaaagggcatcagttgcc

SEQ ID NO: 172719 - DNA, 72 bp, Homo sapiens
aattgtataaaggactagttttgttctaaacactgtaaagggcatcagttgcctacttgatggcaacaattg

SEQ ID NO: 172720 - DNA, 78 bp, Homo sapiens
tagttttgttctaaacactgtaaagggcatcagttgcctacttgatggcaacaattgtcatgtataagtcatagtcaa

SEQ ID NO: 172721 - DNA, 78 bp, Homo sapiens
ttctaaacactgtaaagggcatcagttgcctacttgatggcaacaattgtcatgtataagtcatagtcaaaatagatt

SEQ ID NO: 172722 - DNA, 78 bp, Homo sapiens
cactgtaaagggcatcagttgcctacttgatggcaacaattgtcatgtataagtcatagtcaaaatagatttatattt

SEQ ID NO: 172723 - DNA, 79 bp, Homo sapiens
ggcatcagttgcctacttgatggcaacaattgtcatgtataagtcatagtcaaaatagatttatattttcataaatttc

SEQ ID NO: 172724 - DNA, 76 bp, Homo sapiens
gcctacttgatggcaacaattgtcatgtataagtcatagtcaaaatagatttatattttcataaatttctttaaca

SEQ ID NO: 172725 - DNA, 74 bp, Homo sapiens
tggcaacaattgtcatgtataagtcatagtcaaaatagatttatattttcataaatttctttaacataaaaata

SEQ ID NO: 172726 - DNA, 69 bp, Homo sapiens
gtcatagtcaaaatagatttatattttcataaatttctttaacataaaaatatgttaagtcccttctgg

SEQ ID NO: 172727 - DNA, 65 bp, Homo sapiens
caaaatagatttatattttcataaatttctttaacataaaaatatgttaagtcccttctggtttt

SEQ ID NO: 172728 - DNA, 71 bp, Homo sapiens
tatgttaagtcccttctggttttttttttcatattcactctctgtatggttcaaatttctttgactcaatg

SEQ ID NO: 172729 - DNA, 74 bp, Homo sapiens
tcccttctggttttttttttcatattcactctctgtatggttcaaatttctttgactcaatgtctgcctaatgc

SEQ ID NO: 172730 - DNA, 74 bp, Homo sapiens
ttttttcatattcactctctgtatggttcaaatttctttgactcaatgtctgcctaatgcttagttttgttatt

SEQ ID NO: 172731 - DNA, 77 bp, Homo sapiens
ttcactctctgtatggttcaaatttctttgactcaatgtctgcctaatgcttagttttgttatttaaagactatgca

SEQ ID NO: 172732 - DNA, 75 bp, Homo sapiens
tctctgtatggttcaaatttctttgactcaatgtctgcctaatgcttagttttgttatttaaagactatgcaaaa

SEQ ID NO: 172733 - DNA, 72 bp, Homo sapiens
aatttctttgactcaatgtctgcctaatgcttagttttgttatttaaagactatgcaaaatgtgtgaaaggg

SEQ ID NO: 172734 - DNA, 73 bp, Homo sapiens
gactcaatgtctgcctaatgcttagttttgttatttaaagactatgcaaaatgtgtgaaagggtaaattacac

SEQ ID NO: 172735 - DNA, 72 bp, Homo sapiens
atgtctgcctaatgcttagttttgttatttaaagactatgcaaaatgtgtgaaagggtaaattacaccaaga

SEQ ID NO: 172736 - DNA, 69 bp, Homo sapiens
gcttagttttgttatttaaagactatgcaaaatgtgtgaaagggtaaattacaccaagataacaaatac

SEQ ID NO: 172737 - DNA, 72 bp, Homo sapiens
tatttaaagactatgcaaaatgtgtgaaagggtaaattacaccaagataacaaatacttagtatttctctgc

SEQ ID NO: 172738 - DNA, 72 bp, Homo sapiens
aatgtgtgaaagggtaaattacaccaagataacaaatacttagtatttctctgcctttgcttgaaatacaca

SEQ ID NO: 172739 - DNA, 71 bp, Homo sapiens
gaaagggtaaattacaccaagataacaaatacttagtatttctctgcctttgcttgaaatacacatattaa

SEQ ID NO: 172740 - DNA, 80 bp, Homo sapiens
caaatacttagtatttctctgcctttgcttgaaatacacatattaatctatataagttattgtctatgcatgcacttgag

SEQ ID NO: 172741 - DNA, 80 bp, Homo sapiens
cttagtatttctctgcctttgcttgaaatacacatattaatctatataagttattgtctatgcatgcacttgagtgtaaa

SEQ ID NO: 172742 - DNA, 83 bp, Homo sapiens
ctgcctttgcttgaaatacacatattaatctatataagttattgtctatgcatgcacttgagtgtaaaatacatacatctcac

SEQ ID NO: 172743 - DNA, 82 bp, Homo sapiens
gcttgaaatacacatattaatctatataagttattgtctatgcatgcacttgagtgtaaaatacatacatctcactttgtat

SEQ ID NO: 172744 - DNA, 81 bp, Homo sapiens
acacatattaatctatataagttattgtctatgcatgcacttgagtgtaaaatacatacatctcactttgtattgaaccca

SEQ ID NO: 172745 - DNA, 82 bp, Homo sapiens
tctatataagttattgtctatgcatgcacttgagtgtaaaatacatacatctcactttgtattgaacccattatcgcttctc

SEQ ID NO: 172746 - DNA, 79 bp, Homo sapiens
ttattgtctatgcatgcacttgagtgtaaaatacatacatctcactttgtattgaacccattatcgcttctcggccttt

SEQ ID NO: 172747 - DNA, 79 bp, Homo sapiens
atgcatgcacttgagtgtaaaatacatacatctcactttgtattgaacccattatcgcttctcggccttttggctaaga

SEQ ID NO: 172748 - DNA, 70 bp, Homo sapiens
tggctaagatcaagtgtattccacccactaaaagaaaactggaaacaaaaagtcagagtcaggccctatt

SEQ ID NO: 172749 - DNA, 68 bp, Homo sapiens
atcaagtgtattccacccactaaaagaaaactggaaacaaaaagtcagagtcaggccctatttttgaa

SEQ ID NO: 172750 - DNA, 66 bp, Homo sapiens
gtattccacccactaaaagaaaactggaaacaaaaagtcagagtcaggccctatttttgaagggaa

SEQ ID NO: 172751 - DNA, 67 bp, Homo sapiens
cactaaaagaaaactggaaacaaaaagtcagagtcaggccctatttttgaagggaacttacacatta

SEQ ID NO: 172752 - DNA, 71 bp, Homo sapiens
ctggaaacaaaaagtcagagtcaggccctatttttgaagggaacttacacattattttatgagatatagat

SEQ ID NO: 172753 - DNA, 72 bp, Homo sapiens
caaaaagtcagagtcaggccctatttttgaagggaacttacacattattttatgagatatagatttagcagg

SEQ ID NO: 172754 - DNA, 73 bp, Homo sapiens
agtcaggccctatttttgaagggaacttacacattattttatgagatatagatttagcaggtgcctggctgtt

SEQ ID NO: 172755 - DNA, 74 bp, Homo sapiens
tatttttgaagggaacttacacattattttatgagatatagatttagcaggtgcctggctgtttcagtacccga

SEQ ID NO: 172756 - DNA, 75 bp, Homo sapiens
aacttacacattattttatgagatatagatttagcaggtgcctggctgtttcagtacccgactggaaaagaatga

SEQ ID NO: 172757 - DNA, 80 bp, Homo sapiens
ttattttatgagatatagatttagcaggtgcctggctgtttcagtacccgactggaaaagaatgaatgtcactcatgcaa

SEQ ID NO: 172758 - DNA, 81 bp, Homo sapiens
tatgagatatagatttagcaggtgcctggctgtttcagtacccgactggaaaagaatgaatgtcactcatgcaacaaactg

SEQ ID NO: 172759 - DNA, 78 bp, Homo sapiens
tagcaggtgcctggctgtttcagtacccgactggaaaagaatgaatgtcactcatgcaacaaactggtcacctaaata

SEQ ID NO: 172760 - DNA, 78 bp, Homo sapiens
tgtttcagtacccgactggaaaagaatgaatgtcactcatgcaacaaactggtcacctaaatagtgactgaccactca

SEQ ID NO: 172761 - DNA, 77 bp, Homo sapiens
actggaaaagaatgaatgtcactcatgcaacaaactggtcacctaaatagtgactgaccactcactgtaaataactc

SEQ ID NO: 172762 - DNA, 77 bp, Homo sapiens
agaatgaatgtcactcatgcaacaaactggtcacctaaatagtgactgaccactcactgtaaataactccaggtaaa

SEQ ID NO: 172763 - DNA, 73 bp, Homo sapiens
ctcatgcaacaaactggtcacctaaatagtgactgaccactcactgtaaataactccaggtaaaggtaaatct

SEQ ID NO: 172764 - DNA, 73 bp, Homo sapiens
atgcaacaaactggtcacctaaatagtgactgaccactcactgtaaataactccaggtaaaggtaaatcttga

SEQ ID NO: 172765 - DNA, 69 bp, Homo sapiens
aaactggtcacctaaatagtgactgaccactcactgtaaataactccaggtaaaggtaaatcttgaaaa

SEQ ID NO: 172766 - DNA, 70 bp, Homo sapiens
acctaaatagtgactgaccactcactgtaaataactccaggtaaaggtaaatcttgaaaatggatatcct

SEQ ID NO: 172767 - DNA, 72 bp, Homo sapiens
ctaaatagtgactgaccactcactgtaaataactccaggtaaaggtaaatcttgaaaatggatatccttcta

SEQ ID NO: 172768 - DNA, 72 bp, Homo sapiens
gactgaccactcactgtaaataactccaggtaaaggtaaatcttgaaaatggatatccttctatataaaata

SEQ ID NO: 172769 - DNA, 73 bp, Homo sapiens
ccactcactgtaaataactccaggtaaaggtaaatcttgaaaatggatatccttctatataaaatatgcaaga

SEQ ID NO: 172770 - DNA, 74 bp, Homo sapiens
ctgtaaataactccaggtaaaggtaaatcttgaaaatggatatccttctatataaaatatgcaagatctatggc

SEQ ID NO: 172771 - DNA, 77 bp, Homo sapiens
ataactccaggtaaaggtaaatcttgaaaatggatatccttctatataaaatatgcaagatctatggctagcatgct

SEQ ID NO: 172772 - DNA, 78 bp, Homo sapiens
ctccaggtaaaggtaaatcttgaaaatggatatccttctatataaaatatgcaagatctatggctagcatgcttttca

SEQ ID NO: 172773 - DNA, 76 bp, Homo sapiens
aaaggtaaatcttgaaaatggatatccttctatataaaatatgcaagatctatggctagcatgcttttcatatttt

SEQ ID NO: 172774 - DNA, 78 bp, Homo sapiens
ggatatccttctatataaaatatgcaagatctatggctagcatgcttttcatatttttaaacgtgctccacctatttc

SEQ ID NO: 172775 - DNA, 78 bp, Homo sapiens
taaaatatgcaagatctatggctagcatgcttttcatatttttaaacgtgctccacctatttctctgtaacatccaat

SEQ ID NO: 172776 - DNA, 78 bp, Homo sapiens
tatgcaagatctatggctagcatgcttttcatatttttaaacgtgctccacctatttctctgtaacatccaattcggg

SEQ ID NO: 172777 - DNA, 73 bp, Homo sapiens
gctagcatgcttttcatatttttaaacgtgctccacctatttctctgtaacatccaattcggggtagaattaa

SEQ ID NO: 172778 - DNA, 75 bp, Homo sapiens
tttctctgtaacatccaattcggggtagaattaaagatgttcctaagacatgctatctgctagtttcttagccaa

SEQ ID NO: 172779 - DNA, 75 bp, Homo sapiens
tgtaacatccaattcggggtagaattaaagatgttcctaagacatgctatctgctagtttcttagccaaaagagc

SEQ ID NO: 172780 - DNA, 74 bp, Homo sapiens
aattaaagatgttcctaagacatgctatctgctagtttcttagccaaaagagctctaccctttctgaaagattc

SEQ ID NO: 172781 - DNA, 75 bp, Homo sapiens
ttcctaagacatgctatctgctagtttcttagccaaaagagctctaccctttctgaaagattccaggctgtcctt

SEQ ID NO: 172782 - DNA, 75 bp, Homo sapiens
acatgctatctgctagtttcttagccaaaagagctctaccctttctgaaagattccaggctgtccttttccattc

SEQ ID NO: 172783 - DNA, 73 bp, Homo sapiens
tagtttcttagccaaaagagctctaccctttctgaaagattccaggctgtccttttccattctgtctgggtga

SEQ ID NO: 172784 - DNA, 73 bp, Homo sapiens
ttagccaaaagagctctaccctttctgaaagattccaggctgtccttttccattctgtctgggtgataaggta

SEQ ID NO: 172785 - DNA, 73 bp, Homo sapiens
tctaccctttctgaaagattccaggctgtccttttccattctgtctgggtgataaggtaacctgaaggcagaa

SEQ ID NO: 172786 - DNA, 76 bp, Homo sapiens
tttctgaaagattccaggctgtccttttccattctgtctgggtgataaggtaacctgaaggcagaaatgacataca

SEQ ID NO: 172787 - DNA, 76 bp, Homo sapiens
agattccaggctgtccttttccattctgtctgggtgataaggtaacctgaaggcagaaatgacatacagtaatata

SEQ ID NO: 172788 - DNA, 80 bp, Homo sapiens
tgataaggtaacctgaaggcagaaatgacatacagtaatatatgtgccactctggccagttggtctgtgaatttcagtgt

SEQ ID NO: 172789 - DNA, 81 bp, Homo sapiens
ggtaacctgaaggcagaaatgacatacagtaatatatgtgccactctggccagttggtctgtgaatttcagtgtttcatca

SEQ ID NO: 172790 - DNA, 87 bp, Homo sapiens
gaaatgacatacagtaatatatgtgccactctggccagttggtctgtgaatttcagtgtttcatcatgctcactgaggcaacagcaa

SEQ ID NO: 172791 - DNA, 86 bp, Homo sapiens
tatatgtgccactctggccagttggtctgtgaatttcagtgtttcatcatgctcactgaggcaacagcaaacctgaaatgtcaata

SEQ ID NO: 172792 - DNA, 85 bp, Homo sapiens
tctggccagttggtctgtgaatttcagtgtttcatcatgctcactgaggcaacagcaaacctgaaatgtcaatatgttcagtcaa

SEQ ID NO: 172793 - DNA, 84 bp, Homo sapiens
tggtctgtgaatttcagtgtttcatcatgctcactgaggcaacagcaaacctgaaatgtcaatatgttcagtcaatggaagtaa

SEQ ID NO: 172794 - DNA, 80 bp, Homo sapiens
aatttcagtgtttcatcatgctcactgaggcaacagcaaacctgaaatgtcaatatgttcagtcaatggaagtaaaataa

SEQ ID NO: 172795 - DNA, 81 bp, Homo sapiens
tttcatcatgctcactgaggcaacagcaaacctgaaatgtcaatatgttcagtcaatggaagtaaaataatgggactctat

SEQ ID NO: 172796 - DNA, 78 bp, Homo sapiens
ctcactgaggcaacagcaaacctgaaatgtcaatatgttcagtcaatggaagtaaaataatgggactctattgtctta

SEQ ID NO: 172797 - DNA, 74 bp, Homo sapiens
aacagcaaacctgaaatgtcaatatgttcagtcaatggaagtaaaataatgggactctattgtcttacccaatc

SEQ ID NO: 172798 - DNA, 75 bp, Homo sapiens
aaacctgaaatgtcaatatgttcagtcaatggaagtaaaataatgggactctattgtcttacccaatcgatctgc

SEQ ID NO: 172799 - DNA, 77 bp, Homo sapiens
atatgttcagtcaatggaagtaaaataatgggactctattgtcttacccaatcgatctgctgctgtcaacaaggaaa

SEQ ID NO: 172800 - DNA, 78 bp, Homo sapiens
ttcagtcaatggaagtaaaataatgggactctattgtcttacccaatcgatctgctgctgtcaacaaggaaacatgcc

SEQ ID NO: 172801 - DNA, 75 bp, Homo sapiens
taaaataatgggactctattgtcttacccaatcgatctgctgctgtcaacaaggaaacatgcccccctggcttta

SEQ ID NO: 172802 - DNA, 75 bp, Homo sapiens
taatgggactctattgtcttacccaatcgatctgctgctgtcaacaaggaaacatgcccccctggctttaaacaa

SEQ ID NO: 172803 - DNA, 72 bp, Homo sapiens
tattgtcttacccaatcgatctgctgctgtcaacaaggaaacatgcccccctggctttaaacaaattttaat

SEQ ID NO: 172804 - DNA, 70 bp, Homo sapiens
aatcgatctgctgctgtcaacaaggaaacatgcccccctggctttaaacaaattttaattaggcttttag

SEQ ID NO: 172805 - DNA, 70 bp, Homo sapiens
tgctgtcaacaaggaaacatgcccccctggctttaaacaaattttaattaggcttttagttactggatca

SEQ ID NO: 172806 - DNA, 69 bp, Homo sapiens
caaggaaacatgcccccctggctttaaacaaattttaattaggcttttagttactggatcatatctatc

SEQ ID NO: 172807 - DNA, 71 bp, Homo sapiens
tctatgaaaacacctattttgacaatgtgtagaaggcaaaacaaccatcttttccacttttcttcatttta

SEQ ID NO: 172808 - DNA, 68 bp, Homo sapiens
cacctattttgacaatgtgtagaaggcaaaacaaccatcttttccacttttcttcattttaagaacct

SEQ ID NO: 172809 - DNA, 69 bp, Homo sapiens
gacaatgtgtagaaggcaaaacaaccatcttttccacttttcttcattttaagaaccttctaaagttga

SEQ ID NO: 172810 - DNA, 68 bp, Homo sapiens
caaccatcttttccacttttcttcattttaagaaccttctaaagttgatattacaatgtttcaaatac

SEQ ID NO: 172811 - DNA, 71 bp, Homo sapiens
cacttttcttcattttaagaaccttctaaagttgatattacaatgtttcaaatacttgtgagtcaataaga

SEQ ID NO: 172812 - DNA, 72 bp, Homo sapiens
tcttcattttaagaaccttctaaagttgatattacaatgtttcaaatacttgtgagtcaataagacatgttt

SEQ ID NO: 172813 - DNA, 72 bp, Homo sapiens
cattttaagaaccttctaaagttgatattacaatgtttcaaatacttgtgagtcaataagacatgttttctc

SEQ ID NO: 172814 - DNA, 71 bp, Homo sapiens
tttaagaaccttctaaagttgatattacaatgtttcaaatacttgtgagtcaataagacatgttttctcct

SEQ ID NO: 172815 - DNA, 70 bp, Homo sapiens
aagaaccttctaaagttgatattacaatgtttcaaatacttgtgagtcaataagacatgttttctccttt

SEQ ID NO: 172816 - DNA, 70 bp, Homo sapiens
ccttctaaagttgatattacaatgtttcaaatacttgtgagtcaataagacatgttttctccttttttta

SEQ ID NO: 172817 - DNA, 71 bp, Homo sapiens
tattacaatgtttcaaatacttgtgagtcaataagacatgttttctcctttttttaaactagctccaacca

SEQ ID NO: 172818 - DNA, 69 bp, Homo sapiens
caatgtttcaaatacttgtgagtcaataagacatgttttctcctttttttaaactagctccaaccaaaa

SEQ ID NO: 172819 - DNA, 69 bp, Homo sapiens
tgtttcaaatacttgtgagtcaataagacatgttttctcctttttttaaactagctccaaccaaaagat

SEQ ID NO: 172820 - DNA, 69 bp, Homo sapiens
aatacttgtgagtcaataagacatgttttctcctttttttaaactagctccaaccaaaagatttcatgg

SEQ ID NO: 172821 - DNA, 67 bp, Homo sapiens
tttctcctttttttaaactagctccaaccaaaagatttcatggttcaaatccaaaatacaaatctac

SEQ ID NO: 172822 - DNA, 69 bp, Homo sapiens
ttttaaactagctccaaccaaaagatttcatggttcaaatccaaaatacaaatctacctaacagacttg

SEQ ID NO: 172823 - DNA, 71 bp, Homo sapiens
aactagctccaaccaaaagatttcatggttcaaatccaaaatacaaatctacctaacagacttgtagtgat

SEQ ID NO: 172824 - DNA, 67 bp, Homo sapiens
aaccaaaagatttcatggttcaaatccaaaatacaaatctacctaacagacttgtagtgattttttt

SEQ ID NO: 172825 - DNA, 73 bp, Homo sapiens
tccaaaatacaaatctacctaacagacttgtagtgatttttttttctcctctaggctgagttgagccatacta

SEQ ID NO: 172826 - DNA, 74 bp, Homo sapiens
tacaaatctacctaacagacttgtagtgatttttttttctcctctaggctgagttgagccatactataaagtca

SEQ ID NO: 172827 - DNA, 71 bp, Homo sapiens
agtgatttttttttctcctctaggctgagttgagccatactataaagtcaactaattccatattaaaagta

SEQ ID NO: 172828 - DNA, 75 bp, Homo sapiens
tgagttgagccatactataaagtcaactaattccatattaaaagtaggcttcatttgcttttcttactcattcaa

SEQ ID NO: 172829 - DNA, 73 bp, Homo sapiens
agtcaactaattccatattaaaagtaggcttcatttgcttttcttactcattcaagtaccgtcagcatcaatt

SEQ ID NO: 172830 - DNA, 75 bp, Homo sapiens
ccatattaaaagtaggcttcatttgcttttcttactcattcaagtaccgtcagcatcaatttatcacgcatttaa

SEQ ID NO: 172831 - DNA, 75 bp, Homo sapiens
aagtaggcttcatttgcttttcttactcattcaagtaccgtcagcatcaatttatcacgcatttaaaacaagtca

SEQ ID NO: 172832 - DNA, 74 bp, Homo sapiens
ttgcttttcttactcattcaagtaccgtcagcatcaatttatcacgcatttaaaacaagtcacacaaaaccaaa

SEQ ID NO: 172833 - DNA, 75 bp, Homo sapiens
cttactcattcaagtaccgtcagcatcaatttatcacgcatttaaaacaagtcacacaaaaccaaacattaatga

SEQ ID NO: 172834 - DNA, 73 bp, Homo sapiens
gcatcaatttatcacgcatttaaaacaagtcacacaaaaccaaacattaatgatcaatcccaaagcctttacc

SEQ ID NO: 172835 - DNA, 71 bp, Homo sapiens
aaaacaagtcacacaaaaccaaacattaatgatcaatcccaaagcctttaccctcttttctcagttcatca

SEQ ID NO: 172836 - DNA, 73 bp, Homo sapiens
acacaaaaccaaacattaatgatcaatcccaaagcctttaccctcttttctcagttcatcaatcctaaatgca

SEQ ID NO: 172837 - DNA, 71 bp, Homo sapiens
aaaccaaacattaatgatcaatcccaaagcctttaccctcttttctcagttcatcaatcctaaatgcaagg

SEQ ID NO: 172838 - DNA, 71 bp, Homo sapiens
taatgatcaatcccaaagcctttaccctcttttctcagttcatcaatcctaaatgcaaggggtaaacgaaa

SEQ ID NO: 172839 - DNA, 67 bp, Homo sapiens
aaagcctttaccctcttttctcagttcatcaatcctaaatgcaaggggtaaacgaaactcctgttaa

SEQ ID NO: 172840 - DNA, 69 bp, Homo sapiens
tttaccctcttttctcagttcatcaatcctaaatgcaaggggtaaacgaaactcctgttaaatcaggga

SEQ ID NO: 172841 - DNA, 75 bp, Homo sapiens
ttttctcagttcatcaatcctaaatgcaaggggtaaacgaaactcctgttaaatcagggaggtgcatggtgctga

SEQ ID NO: 172842 - DNA, 72 bp, Homo sapiens
atcaatcctaaatgcaaggggtaaacgaaactcctgttaaatcagggaggtgcatggtgctgagaagggtag

SEQ ID NO: 172843 - DNA, 70 bp, Homo sapiens
taaacgaaactcctgttaaatcagggaggtgcatggtgctgagaagggtagggggttgtcgggagaggaa

SEQ ID NO: 172844 - DNA, 71 bp, Homo sapiens
aactcctgttaaatcagggaggtgcatggtgctgagaagggtagggggttgtcgggagaggaaataagaca

SEQ ID NO: 172845 - DNA, 71 bp, Homo sapiens
atggtgctgagaagggtagggggttgtcgggagaggaaataagacattttaagtcattcaaattgcaccaa

SEQ ID NO: 172846 - DNA, 67 bp, Homo sapiens
agaagggtagggggttgtcgggagaggaaataagacattttaagtcattcaaattgcaccaaagttc

SEQ ID NO: 172847 - DNA, 69 bp, Homo sapiens
gggttgtcgggagaggaaataagacattttaagtcattcaaattgcaccaaagttctctagcccttcct

SEQ ID NO: 172848 - DNA, 71 bp, Homo sapiens
gagaggaaataagacattttaagtcattcaaattgcaccaaagttctctagcccttccttccaccaaaaga

SEQ ID NO: 172849 - DNA, 71 bp, Homo sapiens
aaataagacattttaagtcattcaaattgcaccaaagttctctagcccttccttccaccaaaagagagaca

SEQ ID NO: 172850 - DNA, 70 bp, Homo sapiens
attcaaattgcaccaaagttctctagcccttccttccaccaaaagagagacagtctcaccttaaaataaa

SEQ ID NO: 172851 - DNA, 70 bp, Homo sapiens
tctagcccttccttccaccaaaagagagacagtctcaccttaaaataaaaatgaactaatcaagttgtta

SEQ ID NO: 172852 - DNA, 75 bp, Homo sapiens
ataaaaatgaactaatcaagttgttaagcagctttgtctctcccttcttcatctaaaggcttcagcgtccagtca

SEQ ID NO: 172853 - DNA, 74 bp, Homo sapiens
aactaatcaagttgttaagcagctttgtctctcccttcttcatctaaaggcttcagcgtccagtcaataaataa

SEQ ID NO: 172854 - DNA, 74 bp, Homo sapiens
aagttgttaagcagctttgtctctcccttcttcatctaaaggcttcagcgtccagtcaataaataatctattgt

SEQ ID NO: 172855 - DNA, 72 bp, Homo sapiens
agctttgtctctcccttcttcatctaaaggcttcagcgtccagtcaataaataatctattgttcccccttta

SEQ ID NO: 172856 - DNA, 72 bp, Homo sapiens
tcccttcttcatctaaaggcttcagcgtccagtcaataaataatctattgttccccctttatcgagtctctt

SEQ ID NO: 172857 - DNA, 70 bp, Homo sapiens
atctaaaggcttcagcgtccagtcaataaataatctattgttccccctttatcgagtctctttaaaccta

SEQ ID NO: 172858 - DNA, 71 bp, Homo sapiens
aaggcttcagcgtccagtcaataaataatctattgttccccctttatcgagtctctttaaacctattcaga

SEQ ID NO: 172859 - DNA, 70 bp, Homo sapiens
ccagtcaataaataatctattgttccccctttatcgagtctctttaaacctattcagactggcaaaacta

SEQ ID NO: 172860 - DNA, 67 bp, Homo sapiens
aaataatctattgttccccctttatcgagtctctttaaacctattcagactggcaaaactaaaccca

SEQ ID NO: 172861 - DNA, 66 bp, Homo sapiens
attgttccccctttatcgagtctctttaaacctattcagactggcaaaactaaacccaattaaaga

SEQ ID NO: 172862 - DNA, 67 bp, Homo sapiens
cctttatcgagtctctttaaacctattcagactggcaaaactaaacccaattaaagataaggccctc

SEQ ID NO: 172863 - DNA, 67 bp, Homo sapiens
tttaaacctattcagactggcaaaactaaacccaattaaagataaggccctccggtattctcacctc

SEQ ID NO: 172864 - DNA, 68 bp, Homo sapiens
acctattcagactggcaaaactaaacccaattaaagataaggccctccggtattctcacctcggtgag

SEQ ID NO: 172865 - DNA, 77 bp, Homo sapiens
ttaaagataaggccctccggtattctcacctcggtgagtcctgtctggatagcagaggtgatgggagatagcgtcaa

SEQ ID NO: 172866 - DNA, 80 bp, Homo sapiens
tattctcacctcggtgagtcctgtctggatagcagaggtgatgggagatagcgtcaaggccaggggtagatgcctcctcc

SEQ ID NO: 172867 - DNA, 81 bp, Homo sapiens
tgagtcctgtctggatagcagaggtgatgggagatagcgtcaaggccaggggtagatgcctcctcctcaccccacacaaca

SEQ ID NO: 172868 - DNA, 75 bp, Homo sapiens
agaggtgatgggagatagcgtcaaggccaggggtagatgcctcctcctcaccccacacaacaaaaggcagatttc

SEQ ID NO: 172869 - DNA, 74 bp, Homo sapiens
aaggccaggggtagatgcctcctcctcaccccacacaacaaaaggcagatttctctttctcactctgctaatct

SEQ ID NO: 172870 - DNA, 74 bp, Homo sapiens
tcctcctcaccccacacaacaaaaggcagatttctctttctcactctgctaatctttaaatgtaaattctctcc

SEQ ID NO: 172871 - DNA, 75 bp, Homo sapiens
ccacacaacaaaaggcagatttctctttctcactctgctaatctttaaatgtaaattctctccgccagctaagag

SEQ ID NO: 172872 - DNA, 77 bp, Homo sapiens
aaaggcagatttctctttctcactctgctaatctttaaatgtaaattctctccgccagctaagaggagcgacagata

SEQ ID NO: 172873 - DNA, 79 bp, Homo sapiens
ttctcactctgctaatctttaaatgtaaattctctccgccagctaagaggagcgacagataacatgttacatcttcact

SEQ ID NO: 172874 - DNA, 76 bp, Homo sapiens
atctttaaatgtaaattctctccgccagctaagaggagcgacagataacatgttacatcttcacttctcctggtct

SEQ ID NO: 172875 - DNA, 77 bp, Homo sapiens
aatgtaaattctctccgccagctaagaggagcgacagataacatgttacatcttcacttctcctggtcttatcgact

SEQ ID NO: 172876 - DNA, 80 bp, Homo sapiens
ttctctccgccagctaagaggagcgacagataacatgttacatcttcacttctcctggtcttatcgacttctgaatcatt

SEQ ID NO: 172877 - DNA, 77 bp, Homo sapiens
agctaagaggagcgacagataacatgttacatcttcacttctcctggtcttatcgacttctgaatcatttggaaagg

SEQ ID NO: 172878 - DNA, 77 bp, Homo sapiens
agcgacagataacatgttacatcttcacttctcctggtcttatcgacttctgaatcatttggaaagggagagaggga

SEQ ID NO: 172879 - DNA, 68 bp, Homo sapiens
agagagaaaagccgcctccccacgccccccttcctcctggccacccctccttcctccctgctcgcctc

SEQ ID NO: 172880 - DNA, 68 bp, Homo sapiens
gccccccttcctcctggccacccctccttcctccctgctcgcctccctcccctgttcacggagattac

SEQ ID NO: 172881 - DNA, 71 bp, Homo sapiens
tcctcctggccacccctccttcctccctgctcgcctccctcccctgttcacggagattaccttctggcaaa

SEQ ID NO: 172882 - DNA, 69 bp, Homo sapiens
acccctccttcctccctgctcgcctccctcccctgttcacggagattaccttctggcaaaggagcgcgg

SEQ ID NO: 172883 - DNA, 72 bp, Homo sapiens
cttcctccctgctcgcctccctcccctgttcacggagattaccttctggcaaaggagcgcgggagagcggcc

SEQ ID NO: 172884 - DNA, 73 bp, Homo sapiens
gcctccctcccctgttcacggagattaccttctggcaaaggagcgcgggagagcggccgcggccgaggcggca

SEQ ID NO: 172885 - DNA, 72 bp, Homo sapiens
ccctgttcacggagattaccttctggcaaaggagcgcgggagagcggccgcggccgaggcggcacccagacc

SEQ ID NO: 172886 - DNA, 73 bp, Homo sapiens
ttcacggagattaccttctggcaaaggagcgcgggagagcggccgcggccgaggcggcacccagaccgcggct

SEQ ID NO: 172887 - DNA, 73 bp, Homo sapiens
gagattaccttctggcaaaggagcgcgggagagcggccgcggccgaggcggcacccagaccgcggctttgtat

SEQ ID NO: 172888 - DNA, 73 bp, Homo sapiens
ttaccttctggcaaaggagcgcgggagagcggccgcggccgaggcggcacccagaccgcggctttgtattcat

SEQ ID NO: 172889 - DNA, 74 bp, Homo sapiens
taccttctggcaaaggagcgcgggagagcggccgcggccgaggcggcacccagaccgcggctttgtattcatta

SEQ ID NO: 172890 - DNA, 75 bp, Homo sapiens
tctggcaaaggagcgcgggagagcggccgcggccgaggcggcacccagaccgcggctttgtattcattaaacaca

SEQ ID NO: 172891 - DNA, 72 bp, Homo sapiens
aaaggagcgcgggagagcggccgcggccgaggcggcacccagaccgcggctttgtattcattaaacacacat

SEQ ID NO: 172892 - DNA, 74 bp, Homo sapiens
gccgcggccgaggcggcacccagaccgcggctttgtattcattaaacacacattggagcttatcagaagtaaaa

SEQ ID NO: 172893 - DNA, 73 bp, Homo sapiens
ccgcggccgaggcggcacccagaccgcggctttgtattcattaaacacacattggagcttatcagaagtaaaa

SEQ ID NO: 172894 - DNA, 74 bp, Homo sapiens
aggcggcacccagaccgcggctttgtattcattaaacacacattggagcttatcagaagtaaaagccttgtcag

SEQ ID NO: 172895 - DNA, 78 bp, Homo sapiens
cagaccgcggctttgtattcattaaacacacattggagcttatcagaagtaaaagccttgtcaggatggcacattgtg

SEQ ID NO: 172896 - DNA, 80 bp, Homo sapiens
cggctttgtattcattaaacacacattggagcttatcagaagtaaaagccttgtcaggatggcacattgtgtgtgagtga

SEQ ID NO: 172897 - DNA, 85 bp, Homo sapiens
tattcattaaacacacattggagcttatcagaagtaaaagccttgtcaggatggcacattgtgtgtgagtgagtgtgtgagcgca

SEQ ID NO: 172898 - DNA, 84 bp, Homo sapiens
acacacattggagcttatcagaagtaaaagccttgtcaggatggcacattgtgtgtgagtgagtgtgtgagcgcaggagggaga

SEQ ID NO: 172899 - DNA, 83 bp, Homo sapiens
ttatcagaagtaaaagccttgtcaggatggcacattgtgtgtgagtgagtgtgtgagcgcaggagggagaggagagaagccaa

SEQ ID NO: 172900 - DNA, 84 bp, Homo sapiens
agtaaaagccttgtcaggatggcacattgtgtgtgagtgagtgtgtgagcgcaggagggagaggagagaagccaacgtgcatca

SEQ ID NO: 172901 - DNA, 88 bp, Homo sapiens
tcaggatggcacattgtgtgtgagtgagtgtgtgagcgcaggagggagaggagagaagccaacgtgcatcagggtgattacaatatca

SEQ ID NO: 172902 - DNA, 87 bp, Homo sapiens
atggcacattgtgtgtgagtgagtgtgtgagcgcaggagggagaggagagaagccaacgtgcatcagggtgattacaatatcagcag

SEQ ID NO: 172903 - DNA, 85 bp, Homo sapiens
tgagtgagtgtgtgagcgcaggagggagaggagagaagccaacgtgcatcagggtgattacaatatcagcagggcccagatggag

SEQ ID NO: 172904 - DNA, 78 bp, Homo sapiens
ggagggagaggagagaagccaacgtgcatcagggtgattacaatatcagcagggcccagatggaggcaggaaaataaa

SEQ ID NO: 172905 - DNA, 78 bp, Homo sapiens
agaggagagaagccaacgtgcatcagggtgattacaatatcagcagggcccagatggaggcaggaaaataaacagagg

SEQ ID NO: 172906 - DNA, 79 bp, Homo sapiens
aagccaacgtgcatcagggtgattacaatatcagcagggcccagatggaggcaggaaaataaacagagggtgcgtgtga

SEQ ID NO: 172907 - DNA, 77 bp, Homo sapiens
atcagggtgattacaatatcagcagggcccagatggaggcaggaaaataaacagagggtgcgtgtgagacggagcgg

SEQ ID NO: 172908 - DNA, 76 bp, Homo sapiens
attacaatatcagcagggcccagatggaggcaggaaaataaacagagggtgcgtgtgagacggagcgggagaggga

SEQ ID NO: 172909 - DNA, 71 bp, Homo sapiens
agggcccagatggaggcaggaaaataaacagagggtgcgtgtgagacggagcgggagagggaggaaaagtg

SEQ ID NO: 172910 - DNA, 73 bp, Homo sapiens
agatggaggcaggaaaataaacagagggtgcgtgtgagacggagcgggagagggaggaaaagtgggagagaga

SEQ ID NO: 172911 - DNA, 67 bp, Homo sapiens
agggaaggagggatggaggagggggcgggggctcagaccccaggatggggccagaaagtgggggaga

SEQ ID NO: 172912 - DNA, 68 bp, Homo sapiens
ggatggaggagggggcgggggctcagaccccaggatggggccagaaagtgggggagagctaccctaag

SEQ ID NO: 172913 - DNA, 68 bp, Homo sapiens
agggggcgggggctcagaccccaggatggggccagaaagtgggggagagctaccctaaggctatctgg

SEQ ID NO: 172914 - DNA, 76 bp, Homo sapiens
gctcagaccccaggatggggccagaaagtgggggagagctaccctaaggctatctgggaatgagaggcaggctaga

SEQ ID NO: 172915 - DNA, 77 bp, Homo sapiens
caggatggggccagaaagtgggggagagctaccctaaggctatctgggaatgagaggcaggctagaagtcgcctgca

SEQ ID NO: 172916 - DNA, 77 bp, Homo sapiens
aagtgggggagagctaccctaaggctatctgggaatgagaggcaggctagaagtcgcctgcatgcccaaatctgccc

SEQ ID NO: 172917 - DNA, 77 bp, Homo sapiens
taccctaaggctatctgggaatgagaggcaggctagaagtcgcctgcatgcccaaatctgcccctaccacccaaaga

SEQ ID NO: 172918 - DNA, 76 bp, Homo sapiens
aaggctatctgggaatgagaggcaggctagaagtcgcctgcatgcccaaatctgcccctaccacccaaagaaggga

SEQ ID NO: 172919 - DNA, 76 bp, Homo sapiens
aatgagaggcaggctagaagtcgcctgcatgcccaaatctgcccctaccacccaaagaagggaggaatccagcaaa

SEQ ID NO: 172920 - DNA, 73 bp, Homo sapiens
aggctagaagtcgcctgcatgcccaaatctgcccctaccacccaaagaagggaggaatccagcaaactgtatt

SEQ ID NO: 172921 - DNA, 73 bp, Homo sapiens
aagtcgcctgcatgcccaaatctgcccctaccacccaaagaagggaggaatccagcaaactgtatttccctgc

SEQ ID NO: 172922 - DNA, 72 bp, Homo sapiens
atgcccaaatctgcccctaccacccaaagaagggaggaatccagcaaactgtatttccctgctccagggcta

SEQ ID NO: 172923 - DNA, 71 bp, Homo sapiens
ccctaccacccaaagaagggaggaatccagcaaactgtatttccctgctccagggctaggctggaacatgt

SEQ ID NO: 172924 - DNA, 76 bp, Homo sapiens
caaagaagggaggaatccagcaaactgtatttccctgctccagggctaggctggaacatgttcgagattctgtcaa

SEQ ID NO: 172925 - DNA, 76 bp, Homo sapiens
aagggaggaatccagcaaactgtatttccctgctccagggctaggctggaacatgttcgagattctgtcaaggtca

SEQ ID NO: 172926 - DNA, 80 bp, Homo sapiens
tccagcaaactgtatttccctgctccagggctaggctggaacatgttcgagattctgtcaaggtcagaggaggatcaaga

SEQ ID NO: 172927 - DNA, 79 bp, Homo sapiens
tgtatttccctgctccagggctaggctggaacatgttcgagattctgtcaaggtcagaggaggatcaagagctctcttt

SEQ ID NO: 172928 - DNA, 80 bp, Homo sapiens
cagggctaggctggaacatgttcgagattctgtcaaggtcagaggaggatcaagagctctcttttggcagagcctaagga

SEQ ID NO: 172929 - DNA, 81 bp, Homo sapiens
attctgtcaaggtcagaggaggatcaagagctctcttttggcagagcctaaggagacagtcgccatctcacctccatccaa

SEQ ID NO: 172930 - DNA, 79 bp, Homo sapiens
agaggaggatcaagagctctcttttggcagagcctaaggagacagtcgccatctcacctccatccaaacagccacattt

SEQ ID NO: 172931 - DNA, 80 bp, Homo sapiens
atcaagagctctcttttggcagagcctaaggagacagtcgccatctcacctccatccaaacagccacattttgcaaaaca

SEQ ID NO: 172932 - DNA, 77 bp, Homo sapiens
tctcttttggcagagcctaaggagacagtcgccatctcacctccatccaaacagccacattttgcaaaacaaaccta

SEQ ID NO: 172933 - DNA, 77 bp, Homo sapiens
agcctaaggagacagtcgccatctcacctccatccaaacagccacattttgcaaaacaaacctactgagtctataga

SEQ ID NO: 172934 - DNA, 77 bp, Homo sapiens
aaggagacagtcgccatctcacctccatccaaacagccacattttgcaaaacaaacctactgagtctatagagcagt

SEQ ID NO: 172935 - DNA, 78 bp, Homo sapiens
atctcacctccatccaaacagccacattttgcaaaacaaacctactgagtctatagagcagttaagctgccttccaga

SEQ ID NO: 172936 - DNA, 77 bp, Homo sapiens
catccaaacagccacattttgcaaaacaaacctactgagtctatagagcagttaagctgccttccagaccaacctca

SEQ ID NO: 172937 - DNA, 74 bp, Homo sapiens
aaacagccacattttgcaaaacaaacctactgagtctatagagcagttaagctgccttccagaccaacctcaag

SEQ ID NO: 172938 - DNA, 73 bp, Homo sapiens
ttttgcaaaacaaacctactgagtctatagagcagttaagctgccttccagaccaacctcaagtcggagttct

SEQ ID NO: 172939 - DNA, 72 bp, Homo sapiens
aaacctactgagtctatagagcagttaagctgccttccagaccaacctcaagtcggagttcttgtccctttc

SEQ ID NO: 172940 - DNA, 72 bp, Homo sapiens
agtctatagagcagttaagctgccttccagaccaacctcaagtcggagttcttgtccctttctttgctaacc

SEQ ID NO: 172941 - DNA, 71 bp, Homo sapiens
aagtcggagttcttgtccctttctttgctaaccccaatactcctaaattccagcccctgcacattcacaca

SEQ ID NO: 172942 - DNA, 75 bp, Homo sapiens
tgtccctttctttgctaaccccaatactcctaaattccagcccctgcacattcacacactcagagatataaaata

SEQ ID NO: 172943 - DNA, 77 bp, Homo sapiens
caatactcctaaattccagcccctgcacattcacacactcagagatataaaatagcttctgtccctgaactttaatg

SEQ ID NO: 172944 - DNA, 78 bp, Homo sapiens
tcctaaattccagcccctgcacattcacacactcagagatataaaatagcttctgtccctgaactttaatgtgtccca

SEQ ID NO: 172945 - DNA, 82 bp, Homo sapiens
ccctgcacattcacacactcagagatataaaatagcttctgtccctgaactttaatgtgtcccagctgaagactcctgcagc

SEQ ID NO: 172946 - DNA, 83 bp, Homo sapiens
attcacacactcagagatataaaatagcttctgtccctgaactttaatgtgtcccagctgaagactcctgcagccagcatcat

SEQ ID NO: 172947 - DNA, 82 bp, Homo sapiens
agagatataaaatagcttctgtccctgaactttaatgtgtcccagctgaagactcctgcagccagcatcattgtgataagga

SEQ ID NO: 172948 - DNA, 81 bp, Homo sapiens
tataaaatagcttctgtccctgaactttaatgtgtcccagctgaagactcctgcagccagcatcattgtgataaggaggaa

SEQ ID NO: 172949 - DNA, 82 bp, Homo sapiens
tgtccctgaactttaatgtgtcccagctgaagactcctgcagccagcatcattgtgataaggaggaacacttgtgattggta

SEQ ID NO: 172950 - DNA, 81 bp, Homo sapiens
aactttaatgtgtcccagctgaagactcctgcagccagcatcattgtgataaggaggaacacttgtgattggtagccacag

SEQ ID NO: 172951 - DNA, 85 bp, Homo sapiens
tgtcccagctgaagactcctgcagccagcatcattgtgataaggaggaacacttgtgattggtagccacaggtgactcttagaga

SEQ ID NO: 172952 - DNA, 83 bp, Homo sapiens
aagactcctgcagccagcatcattgtgataaggaggaacacttgtgattggtagccacaggtgactcttagagacctgctcca

SEQ ID NO: 172953 - DNA, 81 bp, Homo sapiens
agccagcatcattgtgataaggaggaacacttgtgattggtagccacaggtgactcttagagacctgctccacctccagaa

SEQ ID NO: 172954 - DNA, 78 bp, Homo sapiens
atcattgtgataaggaggaacacttgtgattggtagccacaggtgactcttagagacctgctccacctccagaaattg

SEQ ID NO: 172955 - DNA, 75 bp, Homo sapiens
ataaggaggaacacttgtgattggtagccacaggtgactcttagagacctgctccacctccagaaattgtgttgg

SEQ ID NO: 172956 - DNA, 75 bp, Homo sapiens
acacttgtgattggtagccacaggtgactcttagagacctgctccacctccagaaattgtgttgggggaggaggc

SEQ ID NO: 172957 - DNA, 80 bp, Homo sapiens
tagccacaggtgactcttagagacctgctccacctccagaaattgtgttgggggaggaggctccttatgtgtgcatctga

SEQ ID NO: 172958 - DNA, 78 bp, Homo sapiens
ttagagacctgctccacctccagaaattgtgttgggggaggaggctccttatgtgtgcatctgagagtctattttgga

SEQ ID NO: 172959 - DNA, 76 bp, Homo sapiens
acctccagaaattgtgttgggggaggaggctccttatgtgtgcatctgagagtctattttggaggtgggaatctga

SEQ ID NO: 172960 - DNA, 76 bp, Homo sapiens
agaaattgtgttgggggaggaggctccttatgtgtgcatctgagagtctattttggaggtgggaatctgaaattga

SEQ ID NO: 172961 - DNA, 84 bp, Homo sapiens
aaattgaggcaatcaatctcggcttgagctgcctcatggctcttcacccacccagagccagagaatcaatcagagaacaagcaa

SEQ ID NO: 172962 - DNA, 84 bp, Homo sapiens
aatcaatctcggcttgagctgcctcatggctcttcacccacccagagccagagaatcaatcagagaacaagcaagggctaatgc

SEQ ID NO: 172963 - DNA, 84 bp, Homo sapiens
atctcggcttgagctgcctcatggctcttcacccacccagagccagagaatcaatcagagaacaagcaagggctaatgcttgtc

SEQ ID NO: 172964 - DNA, 84 bp, Homo sapiens
ttgagctgcctcatggctcttcacccacccagagccagagaatcaatcagagaacaagcaagggctaatgcttgtccgtcagtc

SEQ ID NO: 172965 - DNA, 81 bp, Homo sapiens
atggctcttcacccacccagagccagagaatcaatcagagaacaagcaagggctaatgcttgtccgtcagtccagagttca

SEQ ID NO: 172966 - DNA, 77 bp, Homo sapiens
acccagagccagagaatcaatcagagaacaagcaagggctaatgcttgtccgtcagtccagagttcatccccctccc

SEQ ID NO: 172967 - DNA, 78 bp, Homo sapiens
cccagagccagagaatcaatcagagaacaagcaagggctaatgcttgtccgtcagtccagagttcatccccctcccca

SEQ ID NO: 172968 - DNA, 78 bp, Homo sapiens
agagaatcaatcagagaacaagcaagggctaatgcttgtccgtcagtccagagttcatccccctccccagcagggtca

SEQ ID NO: 172969 - DNA, 77 bp, Homo sapiens
agaatcaatcagagaacaagcaagggctaatgcttgtccgtcagtccagagttcatccccctccccagcagggtcag

SEQ ID NO: 172970 - DNA, 75 bp, Homo sapiens
agagaacaagcaagggctaatgcttgtccgtcagtccagagttcatccccctccccagcagggtcaggaaggaga

SEQ ID NO: 172971 - DNA, 75 bp, Homo sapiens
agggctaatgcttgtccgtcagtccagagttcatccccctccccagcagggtcaggaaggagacacacctgagta

SEQ ID NO: 172972 - DNA, 71 bp, Homo sapiens
tccagagttcatccccctccccagcagggtcaggaaggagacacacctgagtagtcccttgggagtccctt

SEQ ID NO: 172973 - DNA, 69 bp, Homo sapiens
ccagcagggtcaggaaggagacacacctgagtagtcccttgggagtcccttttcacttttaaatacacc

SEQ ID NO: 172974 - DNA, 72 bp, Homo sapiens
tcaggaaggagacacacctgagtagtcccttgggagtcccttttcacttttaaatacacccatcagacaatg

SEQ ID NO: 172975 - DNA, 74 bp, Homo sapiens
agtagtcccttgggagtcccttttcacttttaaatacacccatcagacaatgtgaacatctgatcagctcctta

SEQ ID NO: 172976 - DNA, 79 bp, Homo sapiens
tgggagtcccttttcacttttaaatacacccatcagacaatgtgaacatctgatcagctccttaatggagtgcagataa

SEQ ID NO: 172977 - DNA, 82 bp, Homo sapiens
tttcacttttaaatacacccatcagacaatgtgaacatctgatcagctccttaatggagtgcagataatgcagcaaaggagg

SEQ ID NO: 172978 - DNA, 81 bp, Homo sapiens
ttttaaatacacccatcagacaatgtgaacatctgatcagctccttaatggagtgcagataatgcagcaaaggaggttatt

SEQ ID NO: 172979 - DNA, 77 bp, Homo sapiens
aatgtgaacatctgatcagctccttaatggagtgcagataatgcagcaaaggaggttattttattgggggaggggaa

SEQ ID NO: 172980 - DNA, 73 bp, Homo sapiens
ttaatggagtgcagataatgcagcaaaggaggttattttattgggggaggggaagtatttggttgtgctgtgt

SEQ ID NO: 172981 - DNA, 72 bp, Homo sapiens
agtgcagataatgcagcaaaggaggttattttattgggggaggggaagtatttggttgtgctgtgtttcaag

SEQ ID NO: 172982 - DNA, 72 bp, Homo sapiens
taatgcagcaaaggaggttattttattgggggaggggaagtatttggttgtgctgtgtttcaaggcactgaa

SEQ ID NO: 172983 - DNA, 72 bp, Homo sapiens
ttttattgggggaggggaagtatttggttgtgctgtgtttcaaggcactgaagcttggttaagaagctctca

SEQ ID NO: 172984 - DNA, 80 bp, Homo sapiens
ggaagtatttggttgtgctgtgtttcaaggcactgaagcttggttaagaagctctcactacagcatcaagagtgagttca

SEQ ID NO: 172985 - DNA, 82 bp, Homo sapiens
tatttggttgtgctgtgtttcaaggcactgaagcttggttaagaagctctcactacagcatcaagagtgagttcagaatgaa

SEQ ID NO: 172986 - DNA, 80 bp, Homo sapiens
tgtttcaaggcactgaagcttggttaagaagctctcactacagcatcaagagtgagttcagaatgaaggagccaataaat

SEQ ID NO: 172987 - DNA, 80 bp, Homo sapiens
cactgaagcttggttaagaagctctcactacagcatcaagagtgagttcagaatgaaggagccaataaattacacaattg

SEQ ID NO: 172988 - DNA, 79 bp, Homo sapiens
aagcttggttaagaagctctcactacagcatcaagagtgagttcagaatgaaggagccaataaattacacaattgttca

SEQ ID NO: 172989 - DNA, 83 bp, Homo sapiens
actacagcatcaagagtgagttcagaatgaaggagccaataaattacacaattgttcatggtgtgcactgtagccctagctgc

SEQ ID NO: 172990 - DNA, 81 bp, Homo sapiens
agtgagttcagaatgaaggagccaataaattacacaattgttcatggtgtgcactgtagccctagctgctgtgaaacttca

SEQ ID NO: 172991 - DNA, 79 bp, Homo sapiens
gaatgaaggagccaataaattacacaattgttcatggtgtgcactgtagccctagctgctgtgaaacttcaggttataa

SEQ ID NO: 172992 - DNA, 78 bp, Homo sapiens
taaattacacaattgttcatggtgtgcactgtagccctagctgctgtgaaacttcaggttataaaatagttttatgca

SEQ ID NO: 172993 - DNA, 75 bp, Homo sapiens
aattgttcatggtgtgcactgtagccctagctgctgtgaaacttcaggttataaaatagttttatgcagggggtc

SEQ ID NO: 172994 - DNA, 74 bp, Homo sapiens
gtgtgcactgtagccctagctgctgtgaaacttcaggttataaaatagttttatgcagggggtctccctagaaa

SEQ ID NO: 172995 - DNA, 69 bp, Homo sapiens
cctagctgctgtgaaacttcaggttataaaatagttttatgcagggggtctccctagaaaggaataaaa

SEQ ID NO: 172996 - DNA, 68 bp, Homo sapiens
ctgctgtgaaacttcaggttataaaatagttttatgcagggggtctccctagaaaggaataaaatggg

SEQ ID NO: 172997 - DNA, 65 bp, Homo sapiens
aggttataaaatagttttatgcagggggtctccctagaaaggaataaaatggggatgaagggtaa

SEQ ID NO: 172998 - DNA, 68 bp, Homo sapiens
taaaatagttttatgcagggggtctccctagaaaggaataaaatggggatgaagggtaaggctagtga

SEQ ID NO: 172999 - DNA, 68 bp, Homo sapiens
tttatgcagggggtctccctagaaaggaataaaatggggatgaagggtaaggctagtgagtagaaaaa

SEQ ID NO: 173000 - DNA, 66 bp, Homo sapiens
ggtctccctagaaaggaataaaatggggatgaagggtaaggctagtgagtagaaaaaaaaacaata

SEQ ID NO: 173001 - DNA, 69 bp, Homo sapiens
tggggatgaagggtaaggctagtgagtagaaaaaaaaacaatagcaagagaactagcccctgcctttta

SEQ ID NO: 173002 - DNA, 66 bp, Homo sapiens
aagggtaaggctagtgagtagaaaaaaaaacaatagcaagagaactagcccctgccttttaaggga

SEQ ID NO: 173003 - DNA, 68 bp, Homo sapiens
gctagtgagtagaaaaaaaaacaatagcaagagaactagcccctgccttttaagggaaccatatttta

SEQ ID NO: 173004 - DNA, 64 bp, Homo sapiens
aaaaaaacaatagcaagagaactagcccctgccttttaagggaaccatattttaagaggccctt

SEQ ID NO: 173005 - DNA, 69 bp, Homo sapiens
tagcaagagaactagcccctgccttttaagggaaccatattttaagaggccctttagaaaatgaggaga

SEQ ID NO: 173006 - DNA, 67 bp, Homo sapiens
agaactagcccctgccttttaagggaaccatattttaagaggccctttagaaaatgaggagaagcat

SEQ ID NO: 173007 - DNA, 68 bp, Homo sapiens
cctgccttttaagggaaccatattttaagaggccctttagaaaatgaggagaagcattgtttaatcag

SEQ ID NO: 173008 - DNA, 69 bp, Homo sapiens
ttaagggaaccatattttaagaggccctttagaaaatgaggagaagcattgtttaatcaggcactcccc

SEQ ID NO: 173009 - DNA, 71 bp, Homo sapiens
atattttaagaggccctttagaaaatgaggagaagcattgtttaatcaggcactcccctccaaatcacttg

SEQ ID NO: 173010 - DNA, 70 bp, Homo sapiens
cctttagaaaatgaggagaagcattgtttaatcaggcactcccctccaaatcacttggccaaaaatcggt

SEQ ID NO: 173011 - DNA, 72 bp, Homo sapiens
aaatgaggagaagcattgtttaatcaggcactcccctccaaatcacttggccaaaaatcggttttatgtata

SEQ ID NO: 173012 - DNA, 70 bp, Homo sapiens
gtttaatcaggcactcccctccaaatcacttggccaaaaatcggttttatgtatagttgagcaccgcccc

SEQ ID NO: 173013 - DNA, 68 bp, Homo sapiens
actcccctccaaatcacttggccaaaaatcggttttatgtatagttgagcaccgccccctctccccca

SEQ ID NO: 173014 - DNA, 67 bp, Homo sapiens
ccaaatcacttggccaaaaatcggttttatgtatagttgagcaccgccccctctcccccaccccacc

SEQ ID NO: 173015 - DNA, 69 bp, Homo sapiens
tggccaaaaatcggttttatgtatagttgagcaccgccccctctcccccaccccacccaaacacacaca

SEQ ID NO: 173016 - DNA, 70 bp, Homo sapiens
acacacacacaccaatgttccaaccccaagaatagaattaaaagaaatttgataggtaacacaaagtgaa

SEQ ID NO: 173017 - DNA, 68 bp, Homo sapiens
cacacaccaatgttccaaccccaagaatagaattaaaagaaatttgataggtaacacaaagtgaaaaa

SEQ ID NO: 173018 - DNA, 67 bp, Homo sapiens
ccaaccccaagaatagaattaaaagaaatttgataggtaacacaaagtgaaaaaagctgggcatagg

SEQ ID NO: 173019 - DNA, 67 bp, Homo sapiens
gaatagaattaaaagaaatttgataggtaacacaaagtgaaaaaagctgggcataggtgggggaagg

SEQ ID NO: 173020 - DNA, 69 bp, Homo sapiens
aaagaaatttgataggtaacacaaagtgaaaaaagctgggcataggtgggggaagggcatgtgtgaaaa

SEQ ID NO: 173021 - DNA, 72 bp, Homo sapiens
aatttgataggtaacacaaagtgaaaaaagctgggcataggtgggggaagggcatgtgtgaaaatcttgtca

SEQ ID NO: 173022 - DNA, 77 bp, Homo sapiens
acaaagtgaaaaaagctgggcataggtgggggaagggcatgtgtgaaaatcttgtcatgcaatgaatgtcagataaa

SEQ ID NO: 173023 - DNA, 78 bp, Homo sapiens
cataggtgggggaagggcatgtgtgaaaatcttgtcatgcaatgaatgtcagataaaaaggggtctgccacaatcctc

SEQ ID NO: 173024 - DNA, 79 bp, Homo sapiens
ggaagggcatgtgtgaaaatcttgtcatgcaatgaatgtcagataaaaaggggtctgccacaatcctccagtaatccaa

SEQ ID NO: 173025 - DNA, 75 bp, Homo sapiens
aaatcttgtcatgcaatgaatgtcagataaaaaggggtctgccacaatcctccagtaatccaataacgtggaaaa

SEQ ID NO: 173026 - DNA, 74 bp, Homo sapiens
aatgaatgtcagataaaaaggggtctgccacaatcctccagtaatccaataacgtggaaaacctcatggtatca

SEQ ID NO: 173027 - DNA, 73 bp, Homo sapiens
agataaaaaggggtctgccacaatcctccagtaatccaataacgtggaaaacctcatggtatcactgagacga

SEQ ID NO: 173028 - DNA, 74 bp, Homo sapiens
gggtctgccacaatcctccagtaatccaataacgtggaaaacctcatggtatcactgagacgagaacaaggtaa

SEQ ID NO: 173029 - DNA, 73 bp, Homo sapiens
acaatcctccagtaatccaataacgtggaaaacctcatggtatcactgagacgagaacaaggtaatatttctc

SEQ ID NO: 173030 - DNA, 73 bp, Homo sapiens
aatcctccagtaatccaataacgtggaaaacctcatggtatcactgagacgagaacaaggtaatatttctcca

SEQ ID NO: 173031 - DNA, 72 bp, Homo sapiens
agtaatccaataacgtggaaaacctcatggtatcactgagacgagaacaaggtaatatttctccataaatct

SEQ ID NO: 173032 - DNA, 74 bp, Homo sapiens
taatccaataacgtggaaaacctcatggtatcactgagacgagaacaaggtaatatttctccataaatcttcaa

SEQ ID NO: 173033 - DNA, 72 bp, Homo sapiens
ccaataacgtggaaaacctcatggtatcactgagacgagaacaaggtaatatttctccataaatcttcaaaa

SEQ ID NO: 173034 - DNA, 72 bp, Homo sapiens
aacgtggaaaacctcatggtatcactgagacgagaacaaggtaatatttctccataaatcttcaaaaagtga

SEQ ID NO: 173035 - DNA, 71 bp, Homo sapiens
aaaacctcatggtatcactgagacgagaacaaggtaatatttctccataaatcttcaaaaagtgaccaggt

SEQ ID NO: 173036 - DNA, 75 bp, Homo sapiens
tcatggtatcactgagacgagaacaaggtaatatttctccataaatcttcaaaaagtgaccaggttcaatagtta

SEQ ID NO: 173037 - DNA, 74 bp, Homo sapiens
gtatcactgagacgagaacaaggtaatatttctccataaatcttcaaaaagtgaccaggttcaatagttagaga

SEQ ID NO: 173038 - DNA, 71 bp, Homo sapiens
actgagacgagaacaaggtaatatttctccataaatcttcaaaaagtgaccaggttcaatagttagagaag

SEQ ID NO: 173039 - DNA, 71 bp, Homo sapiens
acaaggtaatatttctccataaatcttcaaaaagtgaccaggttcaatagttagagaagggtgcaaggata

SEQ ID NO: 173040 - DNA, 69 bp, Homo sapiens
ataaatcttcaaaaagtgaccaggttcaatagttagagaagggtgcaaggataggaagtaaaacacttg

SEQ ID NO: 173041 - DNA, 71 bp, Homo sapiens
aaaagtgaccaggttcaatagttagagaagggtgcaaggataggaagtaaaacacttggctggctacatta

SEQ ID NO: 173042 - DNA, 71 bp, Homo sapiens
accaggttcaatagttagagaagggtgcaaggataggaagtaaaacacttggctggctacattacaaaatc

SEQ ID NO: 173043 - DNA, 73 bp, Homo sapiens
tagttagagaagggtgcaaggataggaagtaaaacacttggctggctacattacaaaatccagtgagctttaa

SEQ ID NO: 173044 - DNA, 72 bp, Homo sapiens
aagggtgcaaggataggaagtaaaacacttggctggctacattacaaaatccagtgagctttaaatgggtga

SEQ ID NO: 173045 - DNA, 73 bp, Homo sapiens
taggaagtaaaacacttggctggctacattacaaaatccagtgagctttaaatgggtgaaaatctgtcattct

SEQ ID NO: 173046 - DNA, 73 bp, Homo sapiens
ggctggctacattacaaaatccagtgagctttaaatgggtgaaaatctgtcattcttacatgttttaaattta

SEQ ID NO: 173047 - DNA, 72 bp, Homo sapiens
cattacaaaatccagtgagctttaaatgggtgaaaatctgtcattcttacatgttttaaatttaataacaga

SEQ ID NO: 173048 - DNA, 74 bp, Homo sapiens
cagtgagctttaaatgggtgaaaatctgtcattcttacatgttttaaatttaataacagatttctagcgtatca

SEQ ID NO: 173049 - DNA, 74 bp, Homo sapiens
aatgggtgaaaatctgtcattcttacatgttttaaatttaataacagatttctagcgtatcactttagctctca

SEQ ID NO: 173050 - DNA, 74 bp, Homo sapiens
atctgtcattcttacatgttttaaatttaataacagatttctagcgtatcactttagctctcataaaaggtcac

SEQ ID NO: 173051 - DNA, 71 bp, Homo sapiens
cttacatgttttaaatttaataacagatttctagcgtatcactttagctctcataaaaggtcacctttcac

SEQ ID NO: 173052 - DNA, 70 bp, Homo sapiens
tttaaatttaataacagatttctagcgtatcactttagctctcataaaaggtcacctttcaccttttctc

SEQ ID NO: 173053 - DNA, 74 bp, Homo sapiens
taacagatttctagcgtatcactttagctctcataaaaggtcacctttcaccttttctctagctattctagaaa

SEQ ID NO: 173054 - DNA, 74 bp, Homo sapiens
atttctagcgtatcactttagctctcataaaaggtcacctttcaccttttctctagctattctagaaaaatgca

SEQ ID NO: 173055 - DNA, 75 bp, Homo sapiens
tatcactttagctctcataaaaggtcacctttcaccttttctctagctattctagaaaaatgcattcagagtaac

SEQ ID NO: 173056 - DNA, 73 bp, Homo sapiens
aaggtcacctttcaccttttctctagctattctagaaaaatgcattcagagtaaccgaaagcaaccacacata

SEQ ID NO: 173057 - DNA, 72 bp, Homo sapiens
tttcaccttttctctagctattctagaaaaatgcattcagagtaaccgaaagcaaccacacatacccccacc

SEQ ID NO: 173058 - DNA, 73 bp, Homo sapiens
tagctattctagaaaaatgcattcagagtaaccgaaagcaaccacacatacccccaccctttattgcatttta

SEQ ID NO: 173059 - DNA, 71 bp, Homo sapiens
ttctagaaaaatgcattcagagtaaccgaaagcaaccacacatacccccaccctttattgcattttagtta

SEQ ID NO: 173060 - DNA, 74 bp, Homo sapiens
taaccgaaagcaaccacacatacccccaccctttattgcattttagttagatcagcttggacacagactacata

SEQ ID NO: 173061 - DNA, 73 bp, Homo sapiens
accacacatacccccaccctttattgcattttagttagatcagcttggacacagactacatacaaacacctaa

SEQ ID NO: 173062 - DNA, 71 bp, Homo sapiens
ccctttattgcattttagttagatcagcttggacacagactacatacaaacacctaaaaatccaagaaaac

SEQ ID NO: 173063 - DNA, 72 bp, Homo sapiens
attttagttagatcagcttggacacagactacatacaaacacctaaaaatccaagaaaactccagaggaaga

SEQ ID NO: 173064 - DNA, 71 bp, Homo sapiens
atcagcttggacacagactacatacaaacacctaaaaatccaagaaaactccagaggaagaaaaatacaat

SEQ ID NO: 173065 - DNA, 69 bp, Homo sapiens
cagactacatacaaacacctaaaaatccaagaaaactccagaggaagaaaaatacaatttacaagtgcc

SEQ ID NO: 173066 - DNA, 66 bp, Homo sapiens
acatacaaacacctaaaaatccaagaaaactccagaggaagaaaaatacaatttacaagtgccccc

SEQ ID NO: 173067 - DNA, 65 bp, Homo sapiens
cctaaaaatccaagaaaactccagaggaagaaaaatacaatttacaagtgcccccctgatttttc

SEQ ID NO: 173068 - DNA, 69 bp, Homo sapiens
gaaaactccagaggaagaaaaatacaatttacaagtgcccccctgatttttccattacatgctctttta

SEQ ID NO: 173069 - DNA, 71 bp, Homo sapiens
cagaggaagaaaaatacaatttacaagtgcccccctgatttttccattacatgctcttttaagaaatgcta

SEQ ID NO: 173070 - DNA, 68 bp, Homo sapiens
gaaaaatacaatttacaagtgcccccctgatttttccattacatgctcttttaagaaatgctattttt

SEQ ID NO: 173071 - DNA, 66 bp, Homo sapiens
aatttacaagtgcccccctgatttttccattacatgctcttttaagaaatgctatttttttaaaaa

SEQ ID NO: 173072 - DNA, 62 bp, Homo sapiens
ttaaaaaaaattgcattactattgctttcaaacccagaaaaggtttgctttttttaaaaggg

SEQ ID NO: 173073 - DNA, 68 bp, Homo sapiens
tgcattactattgctttcaaacccagaaaaggtttgctttttttaaaaggggcatcccaaatactaga

SEQ ID NO: 173074 - DNA, 67 bp, Homo sapiens
ctattgctttcaaacccagaaaaggtttgctttttttaaaaggggcatcccaaatactagaggcata

SEQ ID NO: 173075 - DNA, 68 bp, Homo sapiens
ggtttgctttttttaaaaggggcatcccaaatactagaggcataaagaaatctgttcaaaagctaatc

SEQ ID NO: 173076 - DNA, 72 bp, Homo sapiens
ttttaaaaggggcatcccaaatactagaggcataaagaaatctgttcaaaagctaatctgccagtggtctta

SEQ ID NO: 173077 - DNA, 75 bp, Homo sapiens
gcataaagaaatctgttcaaaagctaatctgccagtggtcttattttgtaaatgcacagtatttctattagtacc

SEQ ID NO: 173078 - DNA, 75 bp, Homo sapiens
tctgttcaaaagctaatctgccagtggtcttattttgtaaatgcacagtatttctattagtaccttgtttgttca

SEQ ID NO: 173079 - DNA, 75 bp, Homo sapiens
tcaaaagctaatctgccagtggtcttattttgtaaatgcacagtatttctattagtaccttgtttgttcattgac

SEQ ID NO: 173080 - DNA, 75 bp, Homo sapiens
atctgccagtggtcttattttgtaaatgcacagtatttctattagtaccttgtttgttcattgacttttggctca

SEQ ID NO: 173081 - DNA, 73 bp, Homo sapiens
ccagtggtcttattttgtaaatgcacagtatttctattagtaccttgtttgttcattgacttttggctcacag

SEQ ID NO: 173082 - DNA, 73 bp, Homo sapiens
ggtcttattttgtaaatgcacagtatttctattagtaccttgtttgttcattgacttttggctcacagttata

SEQ ID NO: 173083 - DNA, 75 bp, Homo sapiens
tgtaaatgcacagtatttctattagtaccttgtttgttcattgacttttggctcacagttatagaaaagatcaac

SEQ ID NO: 173084 - DNA, 75 bp, Homo sapiens
tgcacagtatttctattagtaccttgtttgttcattgacttttggctcacagttatagaaaagatcaaccaattc

SEQ ID NO: 173085 - DNA, 74 bp, Homo sapiens
cagtatttctattagtaccttgtttgttcattgacttttggctcacagttatagaaaagatcaaccaattctca

SEQ ID NO: 173086 - DNA, 73 bp, Homo sapiens
ctattagtaccttgtttgttcattgacttttggctcacagttatagaaaagatcaaccaattctcaaatggga

SEQ ID NO: 173087 - DNA, 72 bp, Homo sapiens
agtaccttgtttgttcattgacttttggctcacagttatagaaaagatcaaccaattctcaaatgggaagaa

SEQ ID NO: 173088 - DNA, 76 bp, Homo sapiens
tttgttcattgacttttggctcacagttatagaaaagatcaaccaattctcaaatgggaagaatccatgactctct

SEQ ID NO: 173089 - DNA, 75 bp, Homo sapiens
attgacttttggctcacagttatagaaaagatcaaccaattctcaaatgggaagaatccatgactctcttccaaa

SEQ ID NO: 173090 - DNA, 76 bp, Homo sapiens
tggctcacagttatagaaaagatcaaccaattctcaaatgggaagaatccatgactctcttccaaagcaaacactt

SEQ ID NO: 173091 - DNA, 76 bp, Homo sapiens
gttatagaaaagatcaaccaattctcaaatgggaagaatccatgactctcttccaaagcaaacactttgctgcaaa

SEQ ID NO: 173092 - DNA, 76 bp, Homo sapiens
atcaaccaattctcaaatgggaagaatccatgactctcttccaaagcaaacactttgctgcaaagctttcaattaa

SEQ ID NO: 173093 - DNA, 74 bp, Homo sapiens
aattctcaaatgggaagaatccatgactctcttccaaagcaaacactttgctgcaaagctttcaattaaaagaa

SEQ ID NO: 173094 - DNA, 72 bp, Homo sapiens
atgggaagaatccatgactctcttccaaagcaaacactttgctgcaaagctttcaattaaaagaaaaaaaca

SEQ ID NO: 173095 - DNA, 69 bp, Homo sapiens
attaaaagaaaaaaacagcaatacaataatcaagaagtataatcacagaagtgtaaaacagaaagtggt

SEQ ID NO: 173096 - DNA, 77 bp, Homo sapiens
cagcaatacaataatcaagaagtataatcacagaagtgtaaaacagaaagtggtttctataatcacagctgtcttaa

SEQ ID NO: 173097 - DNA, 75 bp, Homo sapiens
atcaagaagtataatcacagaagtgtaaaacagaaagtggtttctataatcacagctgtcttaaagtccaggcta

SEQ ID NO: 173098 - DNA, 74 bp, Homo sapiens
aatcacagaagtgtaaaacagaaagtggtttctataatcacagctgtcttaaagtccaggctagagactagaaa

SEQ ID NO: 173099 - DNA, 72 bp, Homo sapiens
gtgtaaaacagaaagtggtttctataatcacagctgtcttaaagtccaggctagagactagaaatcttaatt

SEQ ID NO: 173100 - DNA, 72 bp, Homo sapiens
agaaagtggtttctataatcacagctgtcttaaagtccaggctagagactagaaatcttaatttcaactagt

SEQ ID NO: 173101 - DNA, 72 bp, Homo sapiens
ggtttctataatcacagctgtcttaaagtccaggctagagactagaaatcttaatttcaactagttcttttc

SEQ ID NO: 173102 - DNA, 71 bp, Homo sapiens
cacagctgtcttaaagtccaggctagagactagaaatcttaatttcaactagttcttttcttaataatagg

SEQ ID NO: 173103 - DNA, 67 bp, Homo sapiens
aaagtccaggctagagactagaaatcttaatttcaactagttcttttcttaataataggttaccttc

SEQ ID NO: 173104 - DNA, 68 bp, Homo sapiens
ccaggctagagactagaaatcttaatttcaactagttcttttcttaataataggttaccttcctataa

SEQ ID NO: 173105 - DNA, 66 bp, Homo sapiens
gactagaaatcttaatttcaactagttcttttcttaataataggttaccttcctataaaaggaaga

SEQ ID NO: 173106 - DNA, 66 bp, Homo sapiens
aatttcaactagttcttttcttaataataggttaccttcctataaaaggaagaagtccatctgccc

SEQ ID NO: 173107 - DNA, 68 bp, Homo sapiens
ttcttttcttaataataggttaccttcctataaaaggaagaagtccatctgccccaggcagataagtt

SEQ ID NO: 173108 - DNA, 71 bp, Homo sapiens
ttaataataggttaccttcctataaaaggaagaagtccatctgccccaggcagataagttttgaagcatta

SEQ ID NO: 173109 - DNA, 72 bp, Homo sapiens
ttaccttcctataaaaggaagaagtccatctgccccaggcagataagttttgaagcattaattcagataaaa

SEQ ID NO: 173110 - DNA, 74 bp, Homo sapiens
gaagaagtccatctgccccaggcagataagttttgaagcattaattcagataaaaatctagcattttctttctt

SEQ ID NO: 173111 - DNA, 86 bp, Homo sapiens
ttctttctttgagtatgtgaattctagtgtgctataatgtgagaattccaacatatgaccattatggcataatatctcattgctca

SEQ ID NO: 173112 - DNA, 89 bp, Homo sapiens
tgagtatgtgaattctagtgtgctataatgtgagaattccaacatatgaccattatggcataatatctcattgctcagcttgtcattat

SEQ ID NO: 173113 - DNA, 89 bp, Homo sapiens
tatgtgaattctagtgtgctataatgtgagaattccaacatatgaccattatggcataatatctcattgctcagcttgtcattatttca

SEQ ID NO: 173114 - DNA, 88 bp, Homo sapiens
tgtgaattctagtgtgctataatgtgagaattccaacatatgaccattatggcataatatctcattgctcagcttgtcattatttcat

SEQ ID NO: 173115 - DNA, 85 bp, Homo sapiens
agtgtgctataatgtgagaattccaacatatgaccattatggcataatatctcattgctcagcttgtcattatttcatttgtaat

SEQ ID NO: 173116 - DNA, 85 bp, Homo sapiens
gctataatgtgagaattccaacatatgaccattatggcataatatctcattgctcagcttgtcattatttcatttgtaattctta

SEQ ID NO: 173117 - DNA, 84 bp, Homo sapiens
atgtgagaattccaacatatgaccattatggcataatatctcattgctcagcttgtcattatttcatttgtaattcttatgtta

SEQ ID NO: 173118 - DNA, 82 bp, Homo sapiens
gagaattccaacatatgaccattatggcataatatctcattgctcagcttgtcattatttcatttgtaattcttatgttaat

SEQ ID NO: 173119 - DNA, 84 bp, Homo sapiens
tccaacatatgaccattatggcataatatctcattgctcagcttgtcattatttcatttgtaattcttatgttaattatgttca

SEQ ID NO: 173120 - DNA, 83 bp, Homo sapiens
acatatgaccattatggcataatatctcattgctcagcttgtcattatttcatttgtaattcttatgttaattatgttcataa

SEQ ID NO: 173121 - DNA, 82 bp, Homo sapiens
tgaccattatggcataatatctcattgctcagcttgtcattatttcatttgtaattcttatgttaattatgttcataattac

SEQ ID NO: 173122 - DNA, 79 bp, Homo sapiens
ctcattgctcagcttgtcattatttcatttgtaattcttatgttaattatgttcataattactataaacagatgtggta

SEQ ID NO: 173123 - DNA, 77 bp, Homo sapiens
cattatttcatttgtaattcttatgttaattatgttcataattactataaacagatgtggtagacattcatgtgacc

SEQ ID NO: 173124 - DNA, 77 bp, Homo sapiens
gtaattcttatgttaattatgttcataattactataaacagatgtggtagacattcatgtgaccttttattgcagaa

SEQ ID NO: 173125 - DNA, 82 bp, Homo sapiens
tgttaattatgttcataattactataaacagatgtggtagacattcatgtgaccttttattgcagaatgcattcttcactca

SEQ ID NO: 173126 - DNA, 78 bp, Homo sapiens
aattactataaacagatgtggtagacattcatgtgaccttttattgcagaatgcattcttcactcattttgctttaat

SEQ ID NO: 173127 - DNA, 81 bp, Homo sapiens
aaacagatgtggtagacattcatgtgaccttttattgcagaatgcattcttcactcattttgctttaatttctcatggata

SEQ ID NO: 173128 - DNA, 81 bp, Homo sapiens
gtagacattcatgtgaccttttattgcagaatgcattcttcactcattttgctttaatttctcatggatacaaagctgaaa

SEQ ID NO: 173129 - DNA, 80 bp, Homo sapiens
atgtgaccttttattgcagaatgcattcttcactcattttgctttaatttctcatggatacaaagctgaaatgcaggaaa

SEQ ID NO: 173130 - DNA, 78 bp, Homo sapiens
tttattgcagaatgcattcttcactcattttgctttaatttctcatggatacaaagctgaaatgcaggaaaaagaaaa

SEQ ID NO: 173131 - DNA, 76 bp, Homo sapiens
tgcattcttcactcattttgctttaatttctcatggatacaaagctgaaatgcaggaaaaagaaaaagcctttcca

SEQ ID NO: 173132 - DNA, 71 bp, Homo sapiens
cattttgctttaatttctcatggatacaaagctgaaatgcaggaaaaagaaaaagcctttccaattttcca

SEQ ID NO: 173133 - DNA, 70 bp, Homo sapiens
gctttaatttctcatggatacaaagctgaaatgcaggaaaaagaaaaagcctttccaattttccaatgtt

SEQ ID NO: 173134 - DNA, 75 bp, Homo sapiens
tctcatggatacaaagctgaaatgcaggaaaaagaaaaagcctttccaattttccaatgttttatatgcataagc

SEQ ID NO: 173135 - DNA, 71 bp, Homo sapiens
gctgaaatgcaggaaaaagaaaaagcctttccaattttccaatgttttatatgcataagctaaaacagaac

SEQ ID NO: 173136 - DNA, 68 bp, Homo sapiens
gcaggaaaaagaaaaagcctttccaattttccaatgttttatatgcataagctaaaacagaacctacc

SEQ ID NO: 173137 - DNA, 72 bp, Homo sapiens
aaaagcctttccaattttccaatgttttatatgcataagctaaaacagaacctaccttctacttcatctgca

SEQ ID NO: 173138 - DNA, 74 bp, Homo sapiens
cctttccaattttccaatgttttatatgcataagctaaaacagaacctaccttctacttcatctgcatttcaga

SEQ ID NO: 173139 - DNA, 79 bp, Homo sapiens
atgcataagctaaaacagaacctaccttctacttcatctgcatttcagaatatcataatattcttaatgtttaagctgc

SEQ ID NO: 173140 - DNA, 79 bp, Homo sapiens
cagaacctaccttctacttcatctgcatttcagaatatcataatattcttaatgtttaagctgctttatacagcacatt

SEQ ID NO: 173141 - DNA, 83 bp, Homo sapiens
tgcatttcagaatatcataatattcttaatgtttaagctgctttatacagcacatttctaaattgcacactgaacctcactgc

SEQ ID NO: 173142 - DNA, 80 bp, Homo sapiens
atattcttaatgtttaagctgctttatacagcacatttctaaattgcacactgaacctcactgctgctcactaaattgta

SEQ ID NO: 173143 - DNA, 83 bp, Homo sapiens
tttaagctgctttatacagcacatttctaaattgcacactgaacctcactgctgctcactaaattgtagctatggatgccaaa

SEQ ID NO: 173144 - DNA, 82 bp, Homo sapiens
ttatacagcacatttctaaattgcacactgaacctcactgctgctcactaaattgtagctatggatgccaaacaaaggctaa

SEQ ID NO: 173145 - DNA, 81 bp, Homo sapiens
acatttctaaattgcacactgaacctcactgctgctcactaaattgtagctatggatgccaaacaaaggctaacatccatg

SEQ ID NO: 173146 - DNA, 81 bp, Homo sapiens
taaattgcacactgaacctcactgctgctcactaaattgtagctatggatgccaaacaaaggctaacatccatgtctaagt

SEQ ID NO: 173147 - DNA, 77 bp, Homo sapiens
aacctcactgctgctcactaaattgtagctatggatgccaaacaaaggctaacatccatgtctaagttgtttgtctt

SEQ ID NO: 173148 - DNA, 75 bp, Homo sapiens
actgctgctcactaaattgtagctatggatgccaaacaaaggctaacatccatgtctaagttgtttgtctttttt

SEQ ID NO: 173149 - DNA, 72 bp, Homo sapiens
cactaaattgtagctatggatgccaaacaaaggctaacatccatgtctaagttgtttgtcttttttttaata

SEQ ID NO: 173150 - DNA, 72 bp, Homo sapiens
tagctatggatgccaaacaaaggctaacatccatgtctaagttgtttgtcttttttttaatatcaaaggtta

SEQ ID NO: 173151 - DNA, 73 bp, Homo sapiens
tgccaaacaaaggctaacatccatgtctaagttgtttgtcttttttttaatatcaaaggttaatgcagcagaa

SEQ ID NO: 173152 - DNA, 74 bp, Homo sapiens
aggctaacatccatgtctaagttgtttgtcttttttttaatatcaaaggttaatgcagcagaattgtgcttcaa

SEQ ID NO: 173153 - DNA, 71 bp, Homo sapiens
gtctaagttgtttgtcttttttttaatatcaaaggttaatgcagcagaattgtgcttcaaaaccaagtgcc

SEQ ID NO: 173154 - DNA, 77 bp, Homo sapiens
ttgtcttttttttaatatcaaaggttaatgcagcagaattgtgcttcaaaaccaagtgcctagcagctacatagcga

SEQ ID NO: 173155 - DNA, 80 bp, Homo sapiens
ttttaatatcaaaggttaatgcagcagaattgtgcttcaaaaccaagtgcctagcagctacatagcgatttattcactca

SEQ ID NO: 173156 - DNA, 80 bp, Homo sapiens
cagcagaattgtgcttcaaaaccaagtgcctagcagctacatagcgatttattcactcagaactcaaccatcaccctctt

SEQ ID NO: 173157 - DNA, 77 bp, Homo sapiens
accaagtgcctagcagctacatagcgatttattcactcagaactcaaccatcaccctctttacataaaacgcattta

SEQ ID NO: 173158 - DNA, 75 bp, Homo sapiens
attcactcagaactcaaccatcaccctctttacataaaacgcatttacaataaaatcagtatggatttcattagc

SEQ ID NO: 173159 - DNA, 72 bp, Homo sapiens
accatcaccctctttacataaaacgcatttacaataaaatcagtatggatttcattagctgaaaacctcctc

SEQ ID NO: 173160 - DNA, 72 bp, Homo sapiens
ctctttacataaaacgcatttacaataaaatcagtatggatttcattagctgaaaacctcctcgaatttcat

SEQ ID NO: 173161 - DNA, 71 bp, Homo sapiens
aacgcatttacaataaaatcagtatggatttcattagctgaaaacctcctcgaatttcatttctttggccc

SEQ ID NO: 173162 - DNA, 72 bp, Homo sapiens
taaaatcagtatggatttcattagctgaaaacctcctcgaatttcatttctttggccctaatctataattag

SEQ ID NO: 173163 - DNA, 72 bp, Homo sapiens
gtatggatttcattagctgaaaacctcctcgaatttcatttctttggccctaatctataattagtttggaca

SEQ ID NO: 173164 - DNA, 71 bp, Homo sapiens
tttcattagctgaaaacctcctcgaatttcatttctttggccctaatctataattagtttggacagacagg

SEQ ID NO: 173165 - DNA, 68 bp, Homo sapiens
aaaacctcctcgaatttcatttctttggccctaatctataattagtttggacagacaggtgcaaaccc

SEQ ID NO: 173166 - DNA, 72 bp, Homo sapiens
aatttcatttctttggccctaatctataattagtttggacagacaggtgcaaacccttctcttctacagatg

SEQ ID NO: 173167 - DNA, 73 bp, Homo sapiens
atttctttggccctaatctataattagtttggacagacaggtgcaaacccttctcttctacagatggctactg

SEQ ID NO: 173168 - DNA, 76 bp, Homo sapiens
taatctataattagtttggacagacaggtgcaaacccttctcttctacagatggctactggaaatggtgcaaagta

SEQ ID NO: 173169 - DNA, 75 bp, Homo sapiens
taattagtttggacagacaggtgcaaacccttctcttctacagatggctactggaaatggtgcaaagtagctcct

SEQ ID NO: 173170 - DNA, 74 bp, Homo sapiens
aacccttctcttctacagatggctactggaaatggtgcaaagtagctccttctgtttaaacaacacagagataa

SEQ ID NO: 173171 - DNA, 77 bp, Homo sapiens
atggctactggaaatggtgcaaagtagctccttctgtttaaacaacacagagataacctgctctgtcttatcactta

SEQ ID NO: 173172 - DNA, 73 bp, Homo sapiens
aaagtagctccttctgtttaaacaacacagagataacctgctctgtcttatcacttacaattacctccattaa

SEQ ID NO: 173173 - DNA, 74 bp, Homo sapiens
tccttctgtttaaacaacacagagataacctgctctgtcttatcacttacaattacctccattaaactgaacta

SEQ ID NO: 173174 - DNA, 73 bp, Homo sapiens
aaacaacacagagataacctgctctgtcttatcacttacaattacctccattaaactgaactaatgtttgctt

SEQ ID NO: 173175 - DNA, 73 bp, Homo sapiens
cagagataacctgctctgtcttatcacttacaattacctccattaaactgaactaatgtttgctttaataaaa

SEQ ID NO: 173176 - DNA, 73 bp, Homo sapiens
ctgctctgtcttatcacttacaattacctccattaaactgaactaatgtttgctttaataaaatgttcactgt

SEQ ID NO: 173177 - DNA, 68 bp, Homo sapiens
cattaaactgaactaatgtttgctttaataaaatgttcactgttctttaaacattatttaggaactct

SEQ ID NO: 173178 - DNA, 71 bp, Homo sapiens
atgtttgctttaataaaatgttcactgttctttaaacattatttaggaactcttatattaatggctgtgga

SEQ ID NO: 173179 - DNA, 69 bp, Homo sapiens
gctttaataaaatgttcactgttctttaaacattatttaggaactcttatattaatggctgtggaaaaa

SEQ ID NO: 173180 - DNA, 69 bp, Homo sapiens
gttcactgttctttaaacattatttaggaactcttatattaatggctgtggaaaaaaagtgaagttgga

SEQ ID NO: 173181 - DNA, 68 bp, Homo sapiens
ctttaaacattatttaggaactcttatattaatggctgtggaaaaaaagtgaagttggaaggtgtctc

SEQ ID NO: 173182 - DNA, 71 bp, Homo sapiens
cattatttaggaactcttatattaatggctgtggaaaaaaagtgaagttggaaggtgtctctagataataa

SEQ ID NO: 173183 - DNA, 72 bp, Homo sapiens
atggctgtggaaaaaaagtgaagttggaaggtgtctctagataataataaatagcttattctggataaaatg

SEQ ID NO: 173184 - DNA, 70 bp, Homo sapiens
gaaaaaaagtgaagttggaaggtgtctctagataataataaatagcttattctggataaaatgttcccac

SEQ ID NO: 173185 - DNA, 75 bp, Homo sapiens
gtgaagttggaaggtgtctctagataataataaatagcttattctggataaaatgttcccactgacagataatac

SEQ ID NO: 173186 - DNA, 76 bp, Homo sapiens
ggtgtctctagataataataaatagcttattctggataaaatgttcccactgacagataatacttaggttcacaga

SEQ ID NO: 173187 - DNA, 74 bp, Homo sapiens
ctagataataataaatagcttattctggataaaatgttcccactgacagataatacttaggttcacagaggtgt

SEQ ID NO: 173188 - DNA, 74 bp, Homo sapiens
aatagcttattctggataaaatgttcccactgacagataatacttaggttcacagaggtgttttagttgattga

SEQ ID NO: 173189 - DNA, 73 bp, Homo sapiens
ttctggataaaatgttcccactgacagataatacttaggttcacagaggtgttttagttgattgaatatttgt

SEQ ID NO: 173190 - DNA, 70 bp, Homo sapiens
aaaatgttcccactgacagataatacttaggttcacagaggtgttttagttgattgaatatttgttattt

SEQ ID NO: 173191 - DNA, 74 bp, Homo sapiens
ccactgacagataatacttaggttcacagaggtgttttagttgattgaatatttgttattttgcataaatagag

SEQ ID NO: 173192 - DNA, 72 bp, Homo sapiens
aatacttaggttcacagaggtgttttagttgattgaatatttgttattttgcataaatagagtcaaatttga

SEQ ID NO: 173193 - DNA, 71 bp, Homo sapiens
ttgattgaatatttgttattttgcataaatagagtcaaatttgatttttaaaaggcaaacataatttaaca

SEQ ID NO: 173194 - DNA, 67 bp, Homo sapiens
tttgttattttgcataaatagagtcaaatttgatttttaaaaggcaaacataatttaacaagttggg

SEQ ID NO: 173195 - DNA, 69 bp, Homo sapiens
tgcataaatagagtcaaatttgatttttaaaaggcaaacataatttaacaagttgggggagacaacatt

SEQ ID NO: 173196 - DNA, 67 bp, Homo sapiens
gagtcaaatttgatttttaaaaggcaaacataatttaacaagttgggggagacaacatttttcttga

SEQ ID NO: 173197 - DNA, 64 bp, Homo sapiens
ttttaaaaggcaaacataatttaacaagttgggggagacaacatttttcttgaatttagaaaaa

SEQ ID NO: 173198 - DNA, 65 bp, Homo sapiens
aaaggcaaacataatttaacaagttgggggagacaacatttttcttgaatttagaaaaagaataa

SEQ ID NO: 173199 - DNA, 62 bp, Homo sapiens
ataatttaacaagttgggggagacaacatttttcttgaatttagaaaaagaataaatttttt

SEQ ID NO: 173200 - DNA, 63 bp, Homo sapiens
aagttgggggagacaacatttttcttgaatttagaaaaagaataaatttttttcttatagatt

SEQ ID NO: 173201 - DNA, 65 bp, Homo sapiens
ttttcttgaatttagaaaaagaataaatttttttcttatagattttaagttgttattaacatgta

SEQ ID NO: 173202 - DNA, 66 bp, Homo sapiens
tgaatttagaaaaagaataaatttttttcttatagattttaagttgttattaacatgtagaaatta

SEQ ID NO: 173203 - DNA, 64 bp, Homo sapiens
gaataaatttttttcttatagattttaagttgttattaacatgtagaaattaaaatccttattt

SEQ ID NO: 173204 - DNA, 68 bp, Homo sapiens
tttcttatagattttaagttgttattaacatgtagaaattaaaatccttattttcaaaggatatgtta

SEQ ID NO: 173205 - DNA, 66 bp, Homo sapiens
gattttaagttgttattaacatgtagaaattaaaatccttattttcaaaggatatgttaacttagt

SEQ ID NO: 173206 - DNA, 68 bp, Homo sapiens
aagttgttattaacatgtagaaattaaaatccttattttcaaaggatatgttaacttagttttatgca

SEQ ID NO: 173207 - DNA, 71 bp, Homo sapiens
catgtagaaattaaaatccttattttcaaaggatatgttaacttagttttatgcatttaacttctgataga

SEQ ID NO: 173208 - DNA, 74 bp, Homo sapiens
ttttcaaaggatatgttaacttagttttatgcatttaacttctgatagattattctcaaagttgaatgagttca

SEQ ID NO: 173209 - DNA, 75 bp, Homo sapiens
aggatatgttaacttagttttatgcatttaacttctgatagattattctcaaagttgaatgagttcattctttca

SEQ ID NO: 173210 - DNA, 76 bp, Homo sapiens
taacttagttttatgcatttaacttctgatagattattctcaaagttgaatgagttcattctttcaaggcacatct

SEQ ID NO: 173211 - DNA, 75 bp, Homo sapiens
atgcatttaacttctgatagattattctcaaagttgaatgagttcattctttcaaggcacatcttaaaaattaac

SEQ ID NO: 173212 - DNA, 79 bp, Homo sapiens
tctgatagattattctcaaagttgaatgagttcattctttcaaggcacatcttaaaaattaactatgaatgtaagtgca

SEQ ID NO: 173213 - DNA, 80 bp, Homo sapiens
tattctcaaagttgaatgagttcattctttcaaggcacatcttaaaaattaactatgaatgtaagtgcactctgcaagca

SEQ ID NO: 173214 - DNA, 79 bp, Homo sapiens
gttgaatgagttcattctttcaaggcacatcttaaaaattaactatgaatgtaagtgcactctgcaagcacatggttaa

SEQ ID NO: 173215 - DNA, 77 bp, Homo sapiens
agttcattctttcaaggcacatcttaaaaattaactatgaatgtaagtgcactctgcaagcacatggttaaaagcaa

SEQ ID NO: 173216 - DNA, 78 bp, Homo sapiens
ttcattctttcaaggcacatcttaaaaattaactatgaatgtaagtgcactctgcaagcacatggttaaaagcaactc

SEQ ID NO: 173217 - DNA, 79 bp, Homo sapiens
tcaaggcacatcttaaaaattaactatgaatgtaagtgcactctgcaagcacatggttaaaagcaactccattccataa

SEQ ID NO: 173218 - DNA, 78 bp, Homo sapiens
gcacatcttaaaaattaactatgaatgtaagtgcactctgcaagcacatggttaaaagcaactccattccataataaa

SEQ ID NO: 173219 - DNA, 75 bp, Homo sapiens
aaaattaactatgaatgtaagtgcactctgcaagcacatggttaaaagcaactccattccataataaataacttc

SEQ ID NO: 173220 - DNA, 77 bp, Homo sapiens
aactatgaatgtaagtgcactctgcaagcacatggttaaaagcaactccattccataataaataacttctataaagc

SEQ ID NO: 173221 - DNA, 79 bp, Homo sapiens
aatgtaagtgcactctgcaagcacatggttaaaagcaactccattccataataaataacttctataaagccagagctca

SEQ ID NO: 173222 - DNA, 76 bp, Homo sapiens
actctgcaagcacatggttaaaagcaactccattccataataaataacttctataaagccagagctcacttctccc

SEQ ID NO: 173223 - DNA, 75 bp, Homo sapiens
aagcacatggttaaaagcaactccattccataataaataacttctataaagccagagctcacttctccctgcttc

SEQ ID NO: 173224 - DNA, 77 bp, Homo sapiens
ttaaaagcaactccattccataataaataacttctataaagccagagctcacttctccctgcttctgctatcaataa

SEQ ID NO: 173225 - DNA, 77 bp, Homo sapiens
aactccattccataataaataacttctataaagccagagctcacttctccctgcttctgctatcaataaagtctgtg

SEQ ID NO: 173226 - DNA, 82 bp, Homo sapiens
taaagccagagctcacttctccctgcttctgctatcaataaagtctgtggatcactatatgatgaataaggtgtccataaaa

SEQ ID NO: 173227 - DNA, 77 bp, Homo sapiens
acttctccctgcttctgctatcaataaagtctgtggatcactatatgatgaataaggtgtccataaaacaaagaacc

SEQ ID NO: 173228 - DNA, 76 bp, Homo sapiens
cctgcttctgctatcaataaagtctgtggatcactatatgatgaataaggtgtccataaaacaaagaacctttaaa

SEQ ID NO: 173229 - DNA, 76 bp, Homo sapiens
tcaataaagtctgtggatcactatatgatgaataaggtgtccataaaacaaagaacctttaaatgcccaaacagca

SEQ ID NO: 173230 - DNA, 74 bp, Homo sapiens
aaagtctgtggatcactatatgatgaataaggtgtccataaaacaaagaacctttaaatgcccaaacagcaaca

SEQ ID NO: 173231 - DNA, 69 bp, Homo sapiens
ggtgtccataaaacaaagaacctttaaatgcccaaacagcaacaaataaatagcctttctcactgaact

SEQ ID NO: 173232 - DNA, 70 bp, Homo sapiens
caaagaacctttaaatgcccaaacagcaacaaataaatagcctttctcactgaacttacataacttacag

SEQ ID NO: 173233 - DNA, 72 bp, Homo sapiens
ttaaatgcccaaacagcaacaaataaatagcctttctcactgaacttacataacttacagtaatagactccg

SEQ ID NO: 173234 - DNA, 73 bp, Homo sapiens
aacagcaacaaataaatagcctttctcactgaacttacataacttacagtaatagactccggcaaaatgcaac

SEQ ID NO: 173235 - DNA, 72 bp, Homo sapiens
ataaatagcctttctcactgaacttacataacttacagtaatagactccggcaaaatgcaactgactccgtt

SEQ ID NO: 173236 - DNA, 71 bp, Homo sapiens
tagcctttctcactgaacttacataacttacagtaatagactccggcaaaatgcaactgactccgtttttt

SEQ ID NO: 173237 - DNA, 73 bp, Homo sapiens
actgaacttacataacttacagtaatagactccggcaaaatgcaactgactccgtttttttcacatgcaaatc

SEQ ID NO: 173238 - DNA, 75 bp, Homo sapiens
taacttacagtaatagactccggcaaaatgcaactgactccgtttttttcacatgcaaatcctgcaggtgccaat

SEQ ID NO: 173239 - DNA, 75 bp, Homo sapiens
agtaatagactccggcaaaatgcaactgactccgtttttttcacatgcaaatcctgcaggtgccaatttttcaga

SEQ ID NO: 173240 - DNA, 78 bp, Homo sapiens
cggcaaaatgcaactgactccgtttttttcacatgcaaatcctgcaggtgccaatttttcagactgctttgctatgaa

SEQ ID NO: 173241 - DNA, 76 bp, Homo sapiens
aactgactccgtttttttcacatgcaaatcctgcaggtgccaatttttcagactgctttgctatgaagggctatgt

SEQ ID NO: 173242 - DNA, 79 bp, Homo sapiens
tttttttcacatgcaaatcctgcaggtgccaatttttcagactgctttgctatgaagggctatgttgcctgcataaaac

SEQ ID NO: 173243 - DNA, 81 bp, Homo sapiens
atgcaaatcctgcaggtgccaatttttcagactgctttgctatgaagggctatgttgcctgcataaaacctcagtgaagaa

SEQ ID NO: 173244 - DNA, 81 bp, Homo sapiens
tgcaggtgccaatttttcagactgctttgctatgaagggctatgttgcctgcataaaacctcagtgaagaaggctttgcat

SEQ ID NO: 173245 - DNA, 79 bp, Homo sapiens
aatttttcagactgctttgctatgaagggctatgttgcctgcataaaacctcagtgaagaaggctttgcattcagtgcc

SEQ ID NO: 173246 - DNA, 85 bp, Homo sapiens
actgctttgctatgaagggctatgttgcctgcataaaacctcagtgaagaaggctttgcattcagtgcctgtcagctgatgttca

SEQ ID NO: 173247 - DNA, 85 bp, Homo sapiens
tatgaagggctatgttgcctgcataaaacctcagtgaagaaggctttgcattcagtgcctgtcagctgatgttcatatcaaagaa

SEQ ID NO: 173248 - DNA, 81 bp, Homo sapiens
aaacctcagtgaagaaggctttgcattcagtgcctgtcagctgatgttcatatcaaagaagtgagaaacaggatttgacag

SEQ ID NO: 173249 - DNA, 82 bp, Homo sapiens
aggctttgcattcagtgcctgtcagctgatgttcatatcaaagaagtgagaaacaggatttgacagtgaagaatgtcctaaa

SEQ ID NO: 173250 - DNA, 81 bp, Homo sapiens
attcagtgcctgtcagctgatgttcatatcaaagaagtgagaaacaggatttgacagtgaagaatgtcctaaactgacaac

SEQ ID NO: 173251 - DNA, 81 bp, Homo sapiens
ctgtcagctgatgttcatatcaaagaagtgagaaacaggatttgacagtgaagaatgtcctaaactgacaaccactgacca

SEQ ID NO: 173252 - DNA, 78 bp, Homo sapiens
atgttcatatcaaagaagtgagaaacaggatttgacagtgaagaatgtcctaaactgacaaccactgaccagcattcc

SEQ ID NO: 173253 - DNA, 75 bp, Homo sapiens
aaagaagtgagaaacaggatttgacagtgaagaatgtcctaaactgacaaccactgaccagcattcctattggaa

SEQ ID NO: 173254 - DNA, 75 bp, Homo sapiens
agaaacaggatttgacagtgaagaatgtcctaaactgacaaccactgaccagcattcctattggaagcatttctt

SEQ ID NO: 173255 - DNA, 77 bp, Homo sapiens
tttgacagtgaagaatgtcctaaactgacaaccactgaccagcattcctattggaagcatttctttcttgtgatcct

SEQ ID NO: 173256 - DNA, 73 bp, Homo sapiens
ctaaactgacaaccactgaccagcattcctattggaagcatttctttcttgtgatcctttttcagtgtttaaa

SEQ ID NO: 173257 - DNA, 71 bp, Homo sapiens
accagcattcctattggaagcatttctttcttgtgatcctttttcagtgtttaaagaaatgcaagattttt

SEQ ID NO: 173258 - DNA, 70 bp, Homo sapiens
ggaagcatttctttcttgtgatcctttttcagtgtttaaagaaatgcaagattttttggctacggttcga

SEQ ID NO: 173259 - DNA, 70 bp, Homo sapiens
ctttcttgtgatcctttttcagtgtttaaagaaatgcaagattttttggctacggttcgatttgacaata

SEQ ID NO: 173260 - DNA, 71 bp, Homo sapiens
gaaatgcaagattttttggctacggttcgatttgacaataaaataaattataatggcaccttaaatgtgtg

SEQ ID NO: 173261 - DNA, 70 bp, Homo sapiens
gcaagattttttggctacggttcgatttgacaataaaataaattataatggcaccttaaatgtgtgtagt

SEQ ID NO: 173262 - DNA, 71 bp, Homo sapiens
ttggctacggttcgatttgacaataaaataaattataatggcaccttaaatgtgtgtagttctttgcaatt

SEQ ID NO: 173263 - DNA, 73 bp, Homo sapiens
cgatttgacaataaaataaattataatggcaccttaaatgtgtgtagttctttgcaatttatgaagtgctctt

SEQ ID NO: 173264 - DNA, 73 bp, Homo sapiens
aaataaattataatggcaccttaaatgtgtgtagttctttgcaatttatgaagtgctcttttatctacaaata

SEQ ID NO: 173265 - DNA, 75 bp, Homo sapiens
taatggcaccttaaatgtgtgtagttctttgcaatttatgaagtgctcttttatctacaaatatttagactaaca

SEQ ID NO: 173266 - DNA, 75 bp, Homo sapiens
gcaccttaaatgtgtgtagttctttgcaatttatgaagtgctcttttatctacaaatatttagactaacacctca

SEQ ID NO: 173267 - DNA, 80 bp, Homo sapiens
tgtagttctttgcaatttatgaagtgctcttttatctacaaatatttagactaacacctcaatgggagagcacatcatca

SEQ ID NO: 173268 - DNA, 79 bp, Homo sapiens
gcaatttatgaagtgctcttttatctacaaatatttagactaacacctcaatgggagagcacatcatcaaatactaaca

SEQ ID NO: 173269 - DNA, 79 bp, Homo sapiens
aagtgctcttttatctacaaatatttagactaacacctcaatgggagagcacatcatcaaatactaacatcaagagcaa

SEQ ID NO: 173270 - DNA, 79 bp, Homo sapiens
ttatctacaaatatttagactaacacctcaatgggagagcacatcatcaaatactaacatcaagagcaatattttactc

SEQ ID NO: 173271 - DNA, 79 bp, Homo sapiens
tagactaacacctcaatgggagagcacatcatcaaatactaacatcaagagcaatattttactcctctcaggaaaagaa

SEQ ID NO: 173272 - DNA, 78 bp, Homo sapiens
aatgggagagcacatcatcaaatactaacatcaagagcaatattttactcctctcaggaaaagaaaattgtgcaaata

SEQ ID NO: 173273 - DNA, 77 bp, Homo sapiens
agagcacatcatcaaatactaacatcaagagcaatattttactcctctcaggaaaagaaaattgtgcaaatattaaa

SEQ ID NO: 173274 - DNA, 74 bp, Homo sapiens
atactaacatcaagagcaatattttactcctctcaggaaaagaaaattgtgcaaatattaaaaagctgcagtcc

SEQ ID NO: 173275 - DNA, 73 bp, Homo sapiens
attttactcctctcaggaaaagaaaattgtgcaaatattaaaaagctgcagtcccatagctgcaaaaatactg

SEQ ID NO: 173276 - DNA, 76 bp, Homo sapiens
tctcaggaaaagaaaattgtgcaaatattaaaaagctgcagtcccatagctgcaaaaatactgtccttgcaattta

SEQ ID NO: 173277 - DNA, 77 bp, Homo sapiens
agaaaattgtgcaaatattaaaaagctgcagtcccatagctgcaaaaatactgtccttgcaatttaatagtgcaatg

SEQ ID NO: 173278 - DNA, 79 bp, Homo sapiens
ttgtgcaaatattaaaaagctgcagtcccatagctgcaaaaatactgtccttgcaatttaatagtgcaatgtattgtat

SEQ ID NO: 173279 - DNA, 80 bp, Homo sapiens
attaaaaagctgcagtcccatagctgcaaaaatactgtccttgcaatttaatagtgcaatgtattgtattgcacatagaa

SEQ ID NO: 173280 - DNA, 81 bp, Homo sapiens
ctgcagtcccatagctgcaaaaatactgtccttgcaatttaatagtgcaatgtattgtattgcacatagaatgatttttat

SEQ ID NO: 173281 - DNA, 78 bp, Homo sapiens
gctgcaaaaatactgtccttgcaatttaatagtgcaatgtattgtattgcacatagaatgatttttattagaaaggac

SEQ ID NO: 173282 - DNA, 75 bp, Homo sapiens
cttgcaatttaatagtgcaatgtattgtattgcacatagaatgatttttattagaaaggaccttttaaagatcat

SEQ ID NO: 173283 - DNA, 72 bp, Homo sapiens
tgtattgcacatagaatgatttttattagaaaggaccttttaaagatcattttaacacaaattattagcagg

SEQ ID NO: 173284 - DNA, 72 bp, Homo sapiens
tgcacatagaatgatttttattagaaaggaccttttaaagatcattttaacacaaattattagcaggtatta

SEQ ID NO: 173285 - DNA, 67 bp, Homo sapiens
ttttattagaaaggaccttttaaagatcattttaacacaaattattagcaggtattaacggaccaca

SEQ ID NO: 173286 - DNA, 68 bp, Homo sapiens
aaggaccttttaaagatcattttaacacaaattattagcaggtattaacggaccacagagactaagtc

SEQ ID NO: 173287 - DNA, 70 bp, Homo sapiens
taaagatcattttaacacaaattattagcaggtattaacggaccacagagactaagtccacaaaggaaaa

SEQ ID NO: 173288 - DNA, 71 bp, Homo sapiens
cacaaattattagcaggtattaacggaccacagagactaagtccacaaaggaaaatatcatttcaaagact

SEQ ID NO: 173289 - DNA, 72 bp, Homo sapiens
aggtattaacggaccacagagactaagtccacaaaggaaaatatcatttcaaagacttctagtctgctttga

SEQ ID NO: 173290 - DNA, 75 bp, Homo sapiens
gaccacagagactaagtccacaaaggaaaatatcatttcaaagacttctagtctgctttgagttgtacaaacata

SEQ ID NO: 173291 - DNA, 73 bp, Homo sapiens
cagagactaagtccacaaaggaaaatatcatttcaaagacttctagtctgctttgagttgtacaaacataaaa

SEQ ID NO: 173292 - DNA, 70 bp, Homo sapiens
gtccacaaaggaaaatatcatttcaaagacttctagtctgctttgagttgtacaaacataaaagaaaaaa

SEQ ID NO: 173293 - DNA, 72 bp, Homo sapiens
tatcatttcaaagacttctagtctgctttgagttgtacaaacataaaagaaaaaatagactgttttctccac

SEQ ID NO: 173294 - DNA, 71 bp, Homo sapiens
tttcaaagacttctagtctgctttgagttgtacaaacataaaagaaaaaatagactgttttctccactgct

SEQ ID NO: 173295 - DNA, 69 bp, Homo sapiens
gagttgtacaaacataaaagaaaaaatagactgttttctccactgcttttattaggtataaactggaca

SEQ ID NO: 173296 - DNA, 68 bp, Homo sapiens
acataaaagaaaaaatagactgttttctccactgcttttattaggtataaactggacactggagaaac

SEQ ID NO: 173297 - DNA, 70 bp, Homo sapiens
aaaaatagactgttttctccactgcttttattaggtataaactggacactggagaaactgagtattgaaa

SEQ ID NO: 173298 - DNA, 75 bp, Homo sapiens
tgttttctccactgcttttattaggtataaactggacactggagaaactgagtattgaaattctcccatgcaata

SEQ ID NO: 173299 - DNA, 74 bp, Homo sapiens
cactgcttttattaggtataaactggacactggagaaactgagtattgaaattctcccatgcaatatttagctt

SEQ ID NO: 173300 - DNA, 73 bp, Homo sapiens
ttttattaggtataaactggacactggagaaactgagtattgaaattctcccatgcaatatttagcttttcaa

SEQ ID NO: 173301 - DNA, 76 bp, Homo sapiens
tataaactggacactggagaaactgagtattgaaattctcccatgcaatatttagcttttcaaataaagtcactgc

SEQ ID NO: 173302 - DNA, 75 bp, Homo sapiens
acactggagaaactgagtattgaaattctcccatgcaatatttagcttttcaaataaagtcactgctatctagtt

SEQ ID NO: 173303 - DNA, 74 bp, Homo sapiens
aactgagtattgaaattctcccatgcaatatttagcttttcaaataaagtcactgctatctagtttataataaa

SEQ ID NO: 173304 - DNA, 75 bp, Homo sapiens
attctcccatgcaatatttagcttttcaaataaagtcactgctatctagtttataataaaattattaatgactga

SEQ ID NO: 173305 - DNA, 74 bp, Homo sapiens
ccatgcaatatttagcttttcaaataaagtcactgctatctagtttataataaaattattaatgactgaacaaa

SEQ ID NO: 173306 - DNA, 70 bp, Homo sapiens
tttagcttttcaaataaagtcactgctatctagtttataataaaattattaatgactgaacaaaaatatt

SEQ ID NO: 173307 - DNA, 69 bp, Homo sapiens
caaataaagtcactgctatctagtttataataaaattattaatgactgaacaaaaatatttaataaaaa

SEQ ID NO: 173308 - DNA, 63 bp, Homo sapiens
ttattaatgactgaacaaaaatatttaataaaaagttaacctcagtattaaaaaagtccgttt

SEQ ID NO: 173309 - DNA, 69 bp, Homo sapiens
atgcacccagtataagactgattggttgttttgttggaatttcatcttttaaaataataaaccaacaaa

SEQ ID NO: 173310 - DNA, 69 bp, Homo sapiens
agactgattggttgttttgttggaatttcatcttttaaaataataaaccaacaaaatataaaatgctga

SEQ ID NO: 173311 - DNA, 70 bp, Homo sapiens
ggttgttttgttggaatttcatcttttaaaataataaaccaacaaaatataaaatgctgaacacagcaca

SEQ ID NO: 173312 - DNA, 72 bp, Homo sapiens
ttcatcttttaaaataataaaccaacaaaatataaaatgctgaacacagcacaagaaataatggacttcaac

SEQ ID NO: 173313 - DNA, 74 bp, Homo sapiens
aaaataataaaccaacaaaatataaaatgctgaacacagcacaagaaataatggacttcaacttcttcagcatc

SEQ ID NO: 173314 - DNA, 76 bp, Homo sapiens
aataaaccaacaaaatataaaatgctgaacacagcacaagaaataatggacttcaacttcttcagcatccatcctg

SEQ ID NO: 173315 - DNA, 77 bp, Homo sapiens
aaaatataaaatgctgaacacagcacaagaaataatggacttcaacttcttcagcatccatcctggctgcaaaaaaa

SEQ ID NO: 173316 - DNA, 78 bp, Homo sapiens
tataaaatgctgaacacagcacaagaaataatggacttcaacttcttcagcatccatcctggctgcaaaaaaagcccg

SEQ ID NO: 173317 - DNA, 79 bp, Homo sapiens
atgctgaacacagcacaagaaataatggacttcaacttcttcagcatccatcctggctgcaaaaaaagcccggatcaaa

SEQ ID NO: 173318 - DNA, 76 bp, Homo sapiens
acagcacaagaaataatggacttcaacttcttcagcatccatcctggctgcaaaaaaagcccggatcaaaccaaga

SEQ ID NO: 173319 - DNA, 74 bp, Homo sapiens
acaagaaataatggacttcaacttcttcagcatccatcctggctgcaaaaaaagcccggatcaaaccaagattc

SEQ ID NO: 173320 - DNA, 74 bp, Homo sapiens
acttcaacttcttcagcatccatcctggctgcaaaaaaagcccggatcaaaccaagattccctgattactattg

SEQ ID NO: 173321 - DNA, 76 bp, Homo sapiens
ttcttcagcatccatcctggctgcaaaaaaagcccggatcaaaccaagattccctgattactattgggtgagattg

SEQ ID NO: 173322 - DNA, 72 bp, Homo sapiens
caaaaaaagcccggatcaaaccaagattccctgattactattgggtgagattgtcagacttctctgaaacaa

SEQ ID NO: 173323 - DNA, 72 bp, Homo sapiens
aaagcccggatcaaaccaagattccctgattactattgggtgagattgtcagacttctctgaaacaaacaaa

SEQ ID NO: 173324 - DNA, 64 bp, Homo sapiens
caaacaaaaaaatcagtaaaggaaaaaaacgaaaatgaaatcaaataaccctatctttattatc

SEQ ID NO: 173325 - DNA, 68 bp, Homo sapiens
aatcagtaaaggaaaaaaacgaaaatgaaatcaaataaccctatctttattatctgaaaatcataata

SEQ ID NO: 173326 - DNA, 69 bp, Homo sapiens
gaaaaaaacgaaaatgaaatcaaataaccctatctttattatctgaaaatcataatattacaaactaga

SEQ ID NO: 173327 - DNA, 70 bp, Homo sapiens
cgaaaatgaaatcaaataaccctatctttattatctgaaaatcataatattacaaactagactttaagga

SEQ ID NO: 173328 - DNA, 70 bp, Homo sapiens
tcaaataaccctatctttattatctgaaaatcataatattacaaactagactttaaggataaaagagagg

SEQ ID NO: 173329 - DNA, 71 bp, Homo sapiens
cctatctttattatctgaaaatcataatattacaaactagactttaaggataaaagagagggaaatccaca

SEQ ID NO: 173330 - DNA, 70 bp, Homo sapiens
atctgaaaatcataatattacaaactagactttaaggataaaagagagggaaatccacagaattataaat

SEQ ID NO: 173331 - DNA, 71 bp, Homo sapiens
cataatattacaaactagactttaaggataaaagagagggaaatccacagaattataaatttgcttctgtg

SEQ ID NO: 173332 - DNA, 74 bp, Homo sapiens
caaactagactttaaggataaaagagagggaaatccacagaattataaatttgcttctgtgtatacacatcaca

SEQ ID NO: 173333 - DNA, 78 bp, Homo sapiens
tagactttaaggataaaagagagggaaatccacagaattataaatttgcttctgtgtatacacatcacagctgacata

SEQ ID NO: 173334 - DNA, 77 bp, Homo sapiens
ataaaagagagggaaatccacagaattataaatttgcttctgtgtatacacatcacagctgacataaacactcaggt

SEQ ID NO: 173335 - DNA, 78 bp, Homo sapiens
aaatccacagaattataaatttgcttctgtgtatacacatcacagctgacataaacactcaggttggggctatgttag

SEQ ID NO: 173336 - DNA, 77 bp, Homo sapiens
taaatttgcttctgtgtatacacatcacagctgacataaacactcaggttggggctatgttagtttaagaaacaatg

SEQ ID NO: 173337 - DNA, 77 bp, Homo sapiens
tgtgtatacacatcacagctgacataaacactcaggttggggctatgttagtttaagaaacaatggtgtttggtgac

SEQ ID NO: 173338 - DNA, 73 bp, Homo sapiens
tcacagctgacataaacactcaggttggggctatgttagtttaagaaacaatggtgtttggtgaccttttcta

SEQ ID NO: 173339 - DNA, 69 bp, Homo sapiens
actcaggttggggctatgttagtttaagaaacaatggtgtttggtgaccttttctaaagaattgtgtga

SEQ ID NO: 173340 - DNA, 69 bp, Homo sapiens
ctatgttagtttaagaaacaatggtgtttggtgaccttttctaaagaattgtgtgacaggagaaactgg

SEQ ID NO: 173341 - DNA, 74 bp, Homo sapiens
aacaatggtgtttggtgaccttttctaaagaattgtgtgacaggagaaactgggcacaacagaatactcacatg

SEQ ID NO: 173342 - DNA, 75 bp, Homo sapiens
tttggtgaccttttctaaagaattgtgtgacaggagaaactgggcacaacagaatactcacatggtcaaggcaaa

SEQ ID NO: 173343 - DNA, 77 bp, Homo sapiens
taaagaattgtgtgacaggagaaactgggcacaacagaatactcacatggtcaaggcaaacgctgccataaactaaa

SEQ ID NO: 173344 - DNA, 76 bp, Homo sapiens
aattgtgtgacaggagaaactgggcacaacagaatactcacatggtcaaggcaaacgctgccataaactaaaagga

SEQ ID NO: 173345 - DNA, 73 bp, Homo sapiens
agaaactgggcacaacagaatactcacatggtcaaggcaaacgctgccataaactaaaaggaggcccccaaca

SEQ ID NO: 173346 - DNA, 71 bp, Homo sapiens
acaacagaatactcacatggtcaaggcaaacgctgccataaactaaaaggaggcccccaacactaacaaac

SEQ ID NO: 173347 - DNA, 69 bp, Homo sapiens
atactcacatggtcaaggcaaacgctgccataaactaaaaggaggcccccaacactaacaaaccgttta

SEQ ID NO: 173348 - DNA, 70 bp, Homo sapiens
atggtcaaggcaaacgctgccataaactaaaaggaggcccccaacactaacaaaccgtttatcacagaga

SEQ ID NO: 173349 - DNA, 69 bp, Homo sapiens
aaacgctgccataaactaaaaggaggcccccaacactaacaaaccgtttatcacagagaagctggtcaa

SEQ ID NO: 173350 - DNA, 69 bp, Homo sapiens
aaaggaggcccccaacactaacaaaccgtttatcacagagaagctggtcaatttgtattctagggagtg

SEQ ID NO: 173351 - DNA, 75 bp, Homo sapiens
aacactaacaaaccgtttatcacagagaagctggtcaatttgtattctagggagtgtggactcactgggcacaga

SEQ ID NO: 173352 - DNA, 79 bp, Homo sapiens
tatcacagagaagctggtcaatttgtattctagggagtgtggactcactgggcacagacccagttccactcctgttcta

SEQ ID NO: 173353 - DNA, 76 bp, Homo sapiens
aagctggtcaatttgtattctagggagtgtggactcactgggcacagacccagttccactcctgttctatgcaaag

SEQ ID NO: 173354 - DNA, 78 bp, Homo sapiens
tattctagggagtgtggactcactgggcacagacccagttccactcctgttctatgcaaaggagggcaatgataataa

SEQ ID NO: 173355 - DNA, 78 bp, Homo sapiens
agtgtggactcactgggcacagacccagttccactcctgttctatgcaaaggagggcaatgataataaaagctactga

SEQ ID NO: 173356 - DNA, 79 bp, Homo sapiens
tcactgggcacagacccagttccactcctgttctatgcaaaggagggcaatgataataaaagctactgagtgcacttaa

SEQ ID NO: 173357 - DNA, 75 bp, Homo sapiens
acagacccagttccactcctgttctatgcaaaggagggcaatgataataaaagctactgagtgcacttaaaaatg

SEQ ID NO: 173358 - DNA, 77 bp, Homo sapiens
tgttctatgcaaaggagggcaatgataataaaagctactgagtgcacttaaaaatggtacagatgttgaaaaggaga

SEQ ID NO: 173359 - DNA, 73 bp, Homo sapiens
aaaggagggcaatgataataaaagctactgagtgcacttaaaaatggtacagatgttgaaaaggagactagga

SEQ ID NO: 173360 - DNA, 72 bp, Homo sapiens
atgataataaaagctactgagtgcacttaaaaatggtacagatgttgaaaaggagactaggagagggaaaaa

SEQ ID NO: 173361 - DNA, 70 bp, Homo sapiens
taaaagctactgagtgcacttaaaaatggtacagatgttgaaaaggagactaggagagggaaaaaaatcc

SEQ ID NO: 173362 - DNA, 69 bp, Homo sapiens
aaatggtacagatgttgaaaaggagactaggagagggaaaaaaatccctgtaaaacacatttcagttca

SEQ ID NO: 173363 - DNA, 70 bp, Homo sapiens
tgttgaaaaggagactaggagagggaaaaaaatccctgtaaaacacatttcagttcacacagaaggtata

SEQ ID NO: 173364 - DNA, 67 bp, Homo sapiens
aaaaggagactaggagagggaaaaaaatccctgtaaaacacatttcagttcacacagaaggtataag

SEQ ID NO: 173365 - DNA, 70 bp, Homo sapiens
gagggaaaaaaatccctgtaaaacacatttcagttcacacagaaggtataaggaatgctttggtcagaaa

SEQ ID NO: 173366 - DNA, 69 bp, Homo sapiens
aaaaatccctgtaaaacacatttcagttcacacagaaggtataaggaatgctttggtcagaaacccgac

SEQ ID NO: 173367 - DNA, 72 bp, Homo sapiens
aaacacatttcagttcacacagaaggtataaggaatgctttggtcagaaacccgacctttatcaggagataa

SEQ ID NO: 173368 - DNA, 73 bp, Homo sapiens
atttcagttcacacagaaggtataaggaatgctttggtcagaaacccgacctttatcaggagataaatcaatc

SEQ ID NO: 173369 - DNA, 78 bp, Homo sapiens
acagaaggtataaggaatgctttggtcagaaacccgacctttatcaggagataaatcaatctgcagcagctgcggaca

SEQ ID NO: 173370 - DNA, 80 bp, Homo sapiens
taaggaatgctttggtcagaaacccgacctttatcaggagataaatcaatctgcagcagctgcggacagccatttatata

SEQ ID NO: 173371 - DNA, 81 bp, Homo sapiens
acccgacctttatcaggagataaatcaatctgcagcagctgcggacagccatttatatacaggctctgggcagattaatta

SEQ ID NO: 173372 - DNA, 81 bp, Homo sapiens
cctttatcaggagataaatcaatctgcagcagctgcggacagccatttatatacaggctctgggcagattaattaagaaaa

SEQ ID NO: 173373 - DNA, 79 bp, Homo sapiens
ataaatcaatctgcagcagctgcggacagccatttatatacaggctctgggcagattaattaagaaaagcgaagttaaa

SEQ ID NO: 173374 - DNA, 79 bp, Homo sapiens
aatctgcagcagctgcggacagccatttatatacaggctctgggcagattaattaagaaaagcgaagttaaagattcaa

SEQ ID NO: 173375 - DNA, 73 bp, Homo sapiens
cggacagccatttatatacaggctctgggcagattaattaagaaaagcgaagttaaagattcaaggggcctca

SEQ ID NO: 173376 - DNA, 71 bp, Homo sapiens
agattaattaagaaaagcgaagttaaagattcaaggggcctcagagttacattaagcacatgaagtttgtc

SEQ ID NO: 173377 - DNA, 71 bp, Homo sapiens
aattaagaaaagcgaagttaaagattcaaggggcctcagagttacattaagcacatgaagtttgtctggag

SEQ ID NO: 173378 - DNA, 76 bp, Homo sapiens
agcgaagttaaagattcaaggggcctcagagttacattaagcacatgaagtttgtctggagtggcctctccagctc

SEQ ID NO: 173379 - DNA, 78 bp, Homo sapiens
aagattcaaggggcctcagagttacattaagcacatgaagtttgtctggagtggcctctccagctctcctggtcttca

SEQ ID NO: 173380 - DNA, 81 bp, Homo sapiens
tcagagttacattaagcacatgaagtttgtctggagtggcctctccagctctcctggtcttcactccctagctctggcctc

SEQ ID NO: 173381 - DNA, 78 bp, Homo sapiens
gttacattaagcacatgaagtttgtctggagtggcctctccagctctcctggtcttcactccctagctctggcctcgg

SEQ ID NO: 173382 - DNA, 80 bp, Homo sapiens
atgaagtttgtctggagtggcctctccagctctcctggtcttcactccctagctctggcctcgggcactattctgcagga

SEQ ID NO: 173383 - DNA, 79 bp, Homo sapiens
tttgtctggagtggcctctccagctctcctggtcttcactccctagctctggcctcgggcactattctgcaggacctcc

SEQ ID NO: 173384 - DNA, 77 bp, Homo sapiens
tctcctggtcttcactccctagctctggcctcgggcactattctgcaggacctcctccacgggaatcctagctattc

SEQ ID NO: 173385 - DNA, 75 bp, Homo sapiens
tcttcactccctagctctggcctcgggcactattctgcaggacctcctccacgggaatcctagctattccttaaa

SEQ ID NO: 173386 - DNA, 77 bp, Homo sapiens
tagctctggcctcgggcactattctgcaggacctcctccacgggaatcctagctattccttaaagcgaccttctgca

SEQ ID NO: 173387 - DNA, 74 bp, Homo sapiens
cctcgggcactattctgcaggacctcctccacgggaatcctagctattccttaaagcgaccttctgcagattcc

SEQ ID NO: 173388 - DNA, 73 bp, Homo sapiens
actattctgcaggacctcctccacgggaatcctagctattccttaaagcgaccttctgcagattcccccagga

SEQ ID NO: 173389 - DNA, 74 bp, Homo sapiens
aggacctcctccacgggaatcctagctattccttaaagcgaccttctgcagattcccccaggaagcagcagcca

SEQ ID NO: 173390 - DNA, 74 bp, Homo sapiens
acgggaatcctagctattccttaaagcgaccttctgcagattcccccaggaagcagcagccagactagggcacg

SEQ ID NO: 173391 - DNA, 76 bp, Homo sapiens
ttaaagcgaccttctgcagattcccccaggaagcagcagccagactagggcacggtggaatttgtggtgcccagtc

SEQ ID NO: 173392 - DNA, 75 bp, Homo sapiens
ttctgcagattcccccaggaagcagcagccagactagggcacggtggaatttgtggtgcccagtcttcaagggtt

SEQ ID NO: 173393 - DNA, 72 bp, Homo sapiens
ccccaggaagcagcagccagactagggcacggtggaatttgtggtgcccagtcttcaagggtttctccgtta

SEQ ID NO: 173394 - DNA, 73 bp, Homo sapiens
cagcagccagactagggcacggtggaatttgtggtgcccagtcttcaagggtttctccgttacgctttgcaag

SEQ ID NO: 173395 - DNA, 71 bp, Homo sapiens
agactagggcacggtggaatttgtggtgcccagtcttcaagggtttctccgttacgctttgcaaggaatga

SEQ ID NO: 173396 - DNA, 73 bp, Homo sapiens
aatttgtggtgcccagtcttcaagggtttctccgttacgctttgcaaggaatgagaccatgggctgcacggcc

SEQ ID NO: 173397 - DNA, 72 bp, Homo sapiens
aagggtttctccgttacgctttgcaaggaatgagaccatgggctgcacggccgcccagccaaatcctccaaa

SEQ ID NO: 173398 - DNA, 74 bp, Homo sapiens
ttacgctttgcaaggaatgagaccatgggctgcacggccgcccagccaaatcctccaaactgaaaggccttttg

SEQ ID NO: 173399 - DNA, 73 bp, Homo sapiens
tttgcaaggaatgagaccatgggctgcacggccgcccagccaaatcctccaaactgaaaggccttttggggga

SEQ ID NO: 173400 - DNA, 71 bp, Homo sapiens
atgagaccatgggctgcacggccgcccagccaaatcctccaaactgaaaggccttttgggggagaggggga

SEQ ID NO: 173401 - DNA, 67 bp, Homo sapiens
gggctgcacggccgcccagccaaatcctccaaactgaaaggccttttgggggagagggggagggaag

SEQ ID NO: 173402 - DNA, 65 bp, Homo sapiens
ccagccaaatcctccaaactgaaaggccttttgggggagagggggagggaaggcggctattttta

SEQ ID NO: 173403 - DNA, 63 bp, Homo sapiens
aaatcctccaaactgaaaggccttttgggggagagggggagggaaggcggctatttttagtaa

SEQ ID NO: 173404 - DNA, 67 bp, Homo sapiens
ttttgggggagagggggagggaaggcggctatttttagtaacagttgtggctcacatcctacttccc

SEQ ID NO: 173405 - DNA, 69 bp, Homo sapiens
agggggagggaaggcggctatttttagtaacagttgtggctcacatcctacttcccggaatcatagtac

SEQ ID NO: 173406 - DNA, 70 bp, Homo sapiens
aaggcggctatttttagtaacagttgtggctcacatcctacttcccggaatcatagtactcaaacttttc

SEQ ID NO: 173407 - DNA, 69 bp, Homo sapiens
tatttttagtaacagttgtggctcacatcctacttcccggaatcatagtactcaaacttttccaagggt

SEQ ID NO: 173408 - DNA, 70 bp, Homo sapiens
agttgtggctcacatcctacttcccggaatcatagtactcaaacttttccaagggttgaccgcccttaca

SEQ ID NO: 173409 - DNA, 69 bp, Homo sapiens
tggctcacatcctacttcccggaatcatagtactcaaacttttccaagggttgaccgcccttacaaaaa

SEQ ID NO: 173410 - DNA, 64 bp, Homo sapiens
cctacttcccggaatcatagtactcaaacttttccaagggttgaccgcccttacaaaaaataaa

SEQ ID NO: 173411 - DNA, 72 bp, Homo sapiens
aaaaataaaaaatagcacgtttcaaaaaatggatctgagcgccttgtgctgacctagccgtatttgctcaaa

SEQ ID NO: 173412 - DNA, 74 bp, Homo sapiens
aaaaatagcacgtttcaaaaaatggatctgagcgccttgtgctgacctagccgtatttgctcaaagcaccccag

SEQ ID NO: 173413 - DNA, 76 bp, Homo sapiens
acgtttcaaaaaatggatctgagcgccttgtgctgacctagccgtatttgctcaaagcaccccagtcagcgccagg

SEQ ID NO: 173414 - DNA, 75 bp, Homo sapiens
aaaatggatctgagcgccttgtgctgacctagccgtatttgctcaaagcaccccagtcagcgccaggtccccccc

SEQ ID NO: 173415 - DNA, 72 bp, Homo sapiens
agcgccttgtgctgacctagccgtatttgctcaaagcaccccagtcagcgccaggtcccccccgggaaagag

SEQ ID NO: 173416 - DNA, 71 bp, Homo sapiens
gtgctgacctagccgtatttgctcaaagcaccccagtcagcgccaggtcccccccgggaaagaggtctggg

SEQ ID NO: 173417 - DNA, 70 bp, Homo sapiens
tatttgctcaaagcaccccagtcagcgccaggtcccccccgggaaagaggtctgggtgcgccaaccaacc

SEQ ID NO: 173418 - DNA, 66 bp, Homo sapiens
aaagcaccccagtcagcgccaggtcccccccgggaaagaggtctgggtgcgccaaccaacccggtc

SEQ ID NO: 173419 - DNA, 65 bp, Homo sapiens
agtcagcgccaggtcccccccgggaaagaggtctgggtgcgccaaccaacccggtcctttcaggt

SEQ ID NO: 173420 - DNA, 64 bp, Homo sapiens
aggtcccccccgggaaagaggtctgggtgcgccaaccaacccggtcctttcaggttcgcaaaga

SEQ ID NO: 173421 - DNA, 67 bp, Homo sapiens
cccgggaaagaggtctgggtgcgccaaccaacccggtcctttcaggttcgcaaagagggcggtgagc

SEQ ID NO: 173422 - DNA, 68 bp, Homo sapiens
aggtctgggtgcgccaaccaacccggtcctttcaggttcgcaaagagggcggtgagcggcgggccctg

SEQ ID NO: 173423 - DNA, 69 bp, Homo sapiens
ccaaccaacccggtcctttcaggttcgcaaagagggcggtgagcggcgggccctggagcgcgtctccac

SEQ ID NO: 173424 - DNA, 72 bp, Homo sapiens
tttcaggttcgcaaagagggcggtgagcggcgggccctggagcgcgtctccactggcccgggggcttcacca

SEQ ID NO: 173425 - DNA, 68 bp, Homo sapiens
aaagagggcggtgagcggcgggccctggagcgcgtctccactggcccgggggcttcaccagaggggtt

SEQ ID NO: 173426 - DNA, 67 bp, Homo sapiens
ccctggagcgcgtctccactggcccgggggcttcaccagaggggtttctggaaaacgaaaggaatta

SEQ ID NO: 173427 - DNA, 65 bp, Homo sapiens
cgtctccactggcccgggggcttcaccagaggggtttctggaaaacgaaaggaattatccggacg

SEQ ID NO: 173428 - DNA, 66 bp, Homo sapiens
tggcccgggggcttcaccagaggggtttctggaaaacgaaaggaattatccggacgtggctccaag

SEQ ID NO: 173429 - DNA, 67 bp, Homo sapiens
gggcttcaccagaggggtttctggaaaacgaaaggaattatccggacgtggctccaagtctggaccc

SEQ ID NO: 173430 - DNA, 65 bp, Homo sapiens
agaggggtttctggaaaacgaaaggaattatccggacgtggctccaagtctggaccccttcgggc

SEQ ID NO: 173431 - DNA, 68 bp, Homo sapiens
ttctggaaaacgaaaggaattatccggacgtggctccaagtctggaccccttcgggcgggagctacag

SEQ ID NO: 173432 - DNA, 68 bp, Homo sapiens
aaaggaattatccggacgtggctccaagtctggaccccttcgggcgggagctacagggcacaaggttg

SEQ ID NO: 173433 - DNA, 73 bp, Homo sapiens
tatccggacgtggctccaagtctggaccccttcgggcgggagctacagggcacaaggttgtgctccccactca

SEQ ID NO: 173434 - DNA, 73 bp, Homo sapiens
ctccaagtctggaccccttcgggcgggagctacagggcacaaggttgtgctccccactcagaagaagcgggca

SEQ ID NO: 173435 - DNA, 72 bp, Homo sapiens
tacagggcacaaggttgtgctccccactcagaagaagcgggcaccgagtcggggccgcgacgggaacaccca

SEQ ID NO: 173436 - DNA, 69 bp, Homo sapiens
acaaggttgtgctccccactcagaagaagcgggcaccgagtcggggccgcgacgggaacacccaggagg

SEQ ID NO: 173437 - DNA, 69 bp, Homo sapiens
cccactcagaagaagcgggcaccgagtcggggccgcgacgggaacacccaggagggccggggcggctga

SEQ ID NO: 173438 - DNA, 71 bp, Homo sapiens
tcagaagaagcgggcaccgagtcggggccgcgacgggaacacccaggagggccggggcggctgagtccaga

SEQ ID NO: 173439 - DNA, 70 bp, Homo sapiens
accgagtcggggccgcgacgggaacacccaggagggccggggcggctgagtccagagcgcgcagaggtcg

SEQ ID NO: 173440 - DNA, 71 bp, Homo sapiens
ggccgcgacgggaacacccaggagggccggggcggctgagtccagagcgcgcagaggtcgggcggggacga

SEQ ID NO: 173441 - DNA, 70 bp, Homo sapiens
acgggaacacccaggagggccggggcggctgagtccagagcgcgcagaggtcgggcggggacgactctcc

SEQ ID NO: 173442 - DNA, 74 bp, Homo sapiens
ggcggctgagtccagagcgcgcagaggtcgggcggggacgactctccccatcggcccctgactgcgaagcccgg

SEQ ID NO: 173443 - DNA, 74 bp, Homo sapiens
ctgagtccagagcgcgcagaggtcgggcggggacgactctccccatcggcccctgactgcgaagcccgggacca

SEQ ID NO: 173444 - DNA, 71 bp, Homo sapiens
agcgcgcagaggtcgggcggggacgactctccccatcggcccctgactgcgaagcccgggaccagcctcgg

SEQ ID NO: 173445 - DNA, 69 bp, Homo sapiens
gtcgggcggggacgactctccccatcggcccctgactgcgaagcccgggaccagcctcgggcgggagcc

SEQ ID NO: 173446 - DNA, 71 bp, Homo sapiens
actctccccatcggcccctgactgcgaagcccgggaccagcctcgggcgggagccgccgtccgcccgctca

SEQ ID NO: 173447 - DNA, 71 bp, Homo sapiens
ccatcggcccctgactgcgaagcccgggaccagcctcgggcgggagccgccgtccgcccgctcacccagga

SEQ ID NO: 173448 - DNA, 70 bp, Homo sapiens
aagcccgggaccagcctcgggcgggagccgccgtccgcccgctcacccaggagcttcccagtccagcacc

SEQ ID NO: 173449 - DNA, 69 bp, Homo sapiens
cgtccgcccgctcacccaggagcttcccagtccagcaccccaaacggccaggagtaacaaggaaagttc

SEQ ID NO: 173450 - DNA, 73 bp, Homo sapiens
ttcccagtccagcaccccaaacggccaggagtaacaaggaaagttcgcaggcaggcgcagagcgcctgggtac

SEQ ID NO: 173451 - DNA, 73 bp, Homo sapiens
agcaccccaaacggccaggagtaacaaggaaagttcgcaggcaggcgcagagcgcctgggtacctctaagcaa

SEQ ID NO: 173452 - DNA, 71 bp, Homo sapiens
cccaaacggccaggagtaacaaggaaagttcgcaggcaggcgcagagcgcctgggtacctctaagcaaacc

SEQ ID NO: 173453 - DNA, 72 bp, Homo sapiens
agtaacaaggaaagttcgcaggcaggcgcagagcgcctgggtacctctaagcaaacccccaccctagttgca

SEQ ID NO: 173454 - DNA, 71 bp, Homo sapiens
aaggaaagttcgcaggcaggcgcagagcgcctgggtacctctaagcaaacccccaccctagttgcagccgg

SEQ ID NO: 173455 - DNA, 71 bp, Homo sapiens
gcaggcgcagagcgcctgggtacctctaagcaaacccccaccctagttgcagccgggtcccaaagttaaga

SEQ ID NO: 173456 - DNA, 67 bp, Homo sapiens
tacctctaagcaaacccccaccctagttgcagccgggtcccaaagttaagatcccgcctctttactc

SEQ ID NO: 173457 - DNA, 66 bp, Homo sapiens
ctaagcaaacccccaccctagttgcagccgggtcccaaagttaagatcccgcctctttactcctta

SEQ ID NO: 173458 - DNA, 65 bp, Homo sapiens
accctagttgcagccgggtcccaaagttaagatcccgcctctttactccttagggctaagttttc

SEQ ID NO: 173459 - DNA, 65 bp, Homo sapiens
agccgggtcccaaagttaagatcccgcctctttactccttagggctaagttttccaccatcaaaa

SEQ ID NO: 173460 - DNA, 66 bp, Homo sapiens
tcccaaagttaagatcccgcctctttactccttagggctaagttttccaccatcaaaacaagtctt

SEQ ID NO: 173461 - DNA, 68 bp, Homo sapiens
ttaagatcccgcctctttactccttagggctaagttttccaccatcaaaacaagtctttgcttccagt

SEQ ID NO: 173462 - DNA, 67 bp, Homo sapiens
ctctttactccttagggctaagttttccaccatcaaaacaagtctttgcttccagtttacagaaaaa

SEQ ID NO: 173463 - DNA, 72 bp, Homo sapiens
aaaaacccacgatgcgggcatagggccacctgccaaatgcactgtgggcacctcgatcggttgttttgtcgg

SEQ ID NO: 173464 - DNA, 73 bp, Homo sapiens
acgatgcgggcatagggccacctgccaaatgcactgtgggcacctcgatcggttgttttgtcgggggagaaac

SEQ ID NO: 173465 - DNA, 72 bp, Homo sapiens
atagggccacctgccaaatgcactgtgggcacctcgatcggttgttttgtcgggggagaaacccactcgtca

SEQ ID NO: 173466 - DNA, 74 bp, Homo sapiens
tgtgggcacctcgatcggttgttttgtcgggggagaaacccactcgtcatcttcctgctcgcataccgtgacta

SEQ ID NO: 173467 - DNA, 73 bp, Homo sapiens
acctcgatcggttgttttgtcgggggagaaacccactcgtcatcttcctgctcgcataccgtgactatggaga

SEQ ID NO: 173468 - DNA, 72 bp, Homo sapiens
ggttgttttgtcgggggagaaacccactcgtcatcttcctgctcgcataccgtgactatggagagggaagaa

SEQ ID NO: 173469 - DNA, 71 bp, Homo sapiens
gggagaaacccactcgtcatcttcctgctcgcataccgtgactatggagagggaagaaaaattatttttaa

SEQ ID NO: 173470 - DNA, 70 bp, Homo sapiens
ttatttttaaaagacactgtggggaatataatagtaaaaactgcatcctcggctgacccgcgaagttcag

SEQ ID NO: 173471 - DNA, 75 bp, Homo sapiens
tttaaaagacactgtggggaatataatagtaaaaactgcatcctcggctgacccgcgaagttcagtgtcatcgca

SEQ ID NO: 173472 - DNA, 75 bp, Homo sapiens
aatagtaaaaactgcatcctcggctgacccgcgaagttcagtgtcatcgcagaccggagtcacccgcgatgttcc

SEQ ID NO: 173473 - DNA, 76 bp, Homo sapiens
aaaaactgcatcctcggctgacccgcgaagttcagtgtcatcgcagaccggagtcacccgcgatgttcctctttgc

SEQ ID NO: 173474 - DNA, 77 bp, Homo sapiens
tcctcggctgacccgcgaagttcagtgtcatcgcagaccggagtcacccgcgatgttcctctttgccctggtgcgta

SEQ ID NO: 173475 - DNA, 74 bp, Homo sapiens
cgaagttcagtgtcatcgcagaccggagtcacccgcgatgttcctctttgccctggtgcgtagtcctaccctaa

SEQ ID NO: 173476 - DNA, 77 bp, Homo sapiens
ttcagtgtcatcgcagaccggagtcacccgcgatgttcctctttgccctggtgcgtagtcctaccctaattgagcga

SEQ ID NO: 173477 - DNA, 73 bp, Homo sapiens
agaccggagtcacccgcgatgttcctctttgccctggtgcgtagtcctaccctaattgagcgacaagtacagc

SEQ ID NO: 173478 - DNA, 74 bp, Homo sapiens
agtcacccgcgatgttcctctttgccctggtgcgtagtcctaccctaattgagcgacaagtacagcctggagcc

SEQ ID NO: 173479 - DNA, 74 bp, Homo sapiens
ttcctctttgccctggtgcgtagtcctaccctaattgagcgacaagtacagcctggagcctcgcggtcgaataa

SEQ ID NO: 173480 - DNA, 74 bp, Homo sapiens
tttgccctggtgcgtagtcctaccctaattgagcgacaagtacagcctggagcctcgcggtcgaataatccaaa

SEQ ID NO: 173481 - DNA, 75 bp, Homo sapiens
tagtcctaccctaattgagcgacaagtacagcctggagcctcgcggtcgaataatccaaacgaagatgacggtca

SEQ ID NO: 173482 - DNA, 76 bp, Homo sapiens
ctaattgagcgacaagtacagcctggagcctcgcggtcgaataatccaaacgaagatgacggtcatcggaacagta

SEQ ID NO: 173483 - DNA, 74 bp, Homo sapiens
cgacaagtacagcctggagcctcgcggtcgaataatccaaacgaagatgacggtcatcggaacagtaattaata

SEQ ID NO: 173484 - DNA, 75 bp, Homo sapiens
tacagcctggagcctcgcggtcgaataatccaaacgaagatgacggtcatcggaacagtaattaataacagtcag

SEQ ID NO: 173485 - DNA, 71 bp, Homo sapiens
agcctcgcggtcgaataatccaaacgaagatgacggtcatcggaacagtaattaataacagtcaggggccc

SEQ ID NO: 173486 - DNA, 68 bp, Homo sapiens
ccaaacgaagatgacggtcatcggaacagtaattaataacagtcaggggcccgaccccgccgcccgcc

SEQ ID NO: 173487 - DNA, 68 bp, Homo sapiens
atgacggtcatcggaacagtaattaataacagtcaggggcccgaccccgccgcccgcccgccggccaa

SEQ ID NO: 173488 - DNA, 66 bp, Homo sapiens
tcggaacagtaattaataacagtcaggggcccgaccccgccgcccgcccgccggccaagccctacc

SEQ ID NO: 173489 - DNA, 66 bp, Homo sapiens
attaataacagtcaggggcccgaccccgccgcccgcccgccggccaagccctaccgcggacactta

SEQ ID NO: 173490 - DNA, 68 bp, Homo sapiens
agtcaggggcccgaccccgccgcccgcccgccggccaagccctaccgcggacacttacactgcacagg

SEQ ID NO: 173491 - DNA, 77 bp, Homo sapiens
caagccctaccgcggacacttacactgcacagggccggagagtcccaccatccgccacaggctccgagctgcaaata

SEQ ID NO: 173492 - DNA, 75 bp, Homo sapiens
cctaccgcggacacttacactgcacagggccggagagtcccaccatccgccacaggctccgagctgcaaataaaa

SEQ ID NO: 173493 - DNA, 74 bp, Homo sapiens
acacttacactgcacagggccggagagtcccaccatccgccacaggctccgagctgcaaataaaacttcccgtc

SEQ ID NO: 173494 - DNA, 71 bp, Homo sapiens
acagggccggagagtcccaccatccgccacaggctccgagctgcaaataaaacttcccgtcgtctcggccg

SEQ ID NO: 173495 - DNA, 70 bp, Homo sapiens
agagtcccaccatccgccacaggctccgagctgcaaataaaacttcccgtcgtctcggccggcccgcggg

SEQ ID NO: 173496 - DNA, 69 bp, Homo sapiens
accatccgccacaggctccgagctgcaaataaaacttcccgtcgtctcggccggcccgcggggcgacgg

SEQ ID NO: 173497 - DNA, 67 bp, Homo sapiens
gcaaataaaacttcccgtcgtctcggccggcccgcggggcgacggggcgaggacgcggcgcggcttc

SEQ ID NO: 173498 - DNA, 66 bp, Homo sapiens
taaaacttcccgtcgtctcggccggcccgcggggcgacggggcgaggacgcggcgcggcttccctc

SEQ ID NO: 173499 - DNA, 71 bp, Homo sapiens
cccgcggggcgacggggcgaggacgcggcgcggcttccctcgcgaggccagagtgtccgcggccactcgcc

SEQ ID NO: 173500 - DNA, 76 bp, Homo sapiens
gacggggcgaggacgcggcgcggcttccctcgcgaggccagagtgtccgcggccactcgcccacgcgcgctcgcca

SEQ ID NO: 173501 - DNA, 76 bp, Homo sapiens
aggacgcggcgcggcttccctcgcgaggccagagtgtccgcggccactcgcccacgcgcgctcgccacgagaccgc

SEQ ID NO: 173502 - DNA, 76 bp, Homo sapiens
cggcttccctcgcgaggccagagtgtccgcggccactcgcccacgcgcgctcgccacgagaccgcggagtcgcgcc

SEQ ID NO: 173503 - DNA, 79 bp, Homo sapiens
tcgcgaggccagagtgtccgcggccactcgcccacgcgcgctcgccacgagaccgcggagtcgcgccgcggagcgacta

SEQ ID NO: 173504 - DNA, 76 bp, Homo sapiens
ccagagtgtccgcggccactcgcccacgcgcgctcgccacgagaccgcggagtcgcgccgcggagcgactacggcc

SEQ ID NO: 173505 - DNA, 75 bp, Homo sapiens
tccgcggccactcgcccacgcgcgctcgccacgagaccgcggagtcgcgccgcggagcgactacggccgcccggc

SEQ ID NO: 173506 - DNA, 79 bp, Homo sapiens
ctcgcccacgcgcgctcgccacgagaccgcggagtcgcgccgcggagcgactacggccgcccggcgctgcgcagagaga

SEQ ID NO: 173507 - DNA, 79 bp, Homo sapiens
tcgccacgagaccgcggagtcgcgccgcggagcgactacggccgcccggcgctgcgcagagagagctgccgtgcaaaaa

SEQ ID NO: 173508 - DNA, 77 bp, Homo sapiens
acgagaccgcggagtcgcgccgcggagcgactacggccgcccggcgctgcgcagagagagctgccgtgcaaaaagcc

SEQ ID NO: 173509 - DNA, 74 bp, Homo sapiens
agtcgcgccgcggagcgactacggccgcccggcgctgcgcagagagagctgccgtgcaaaaagcccggggtcgg

SEQ ID NO: 173510 - DNA, 74 bp, Homo sapiens
agcgactacggccgcccggcgctgcgcagagagagctgccgtgcaaaaagcccggggtcggggacgccagccaa

SEQ ID NO: 173511 - DNA, 74 bp, Homo sapiens
tacggccgcccggcgctgcgcagagagagctgccgtgcaaaaagcccggggtcggggacgccagccaaacgcaa

SEQ ID NO: 173512 - DNA, 77 bp, Homo sapiens
gctgcgcagagagagctgccgtgcaaaaagcccggggtcggggacgccagccaaacgcaacctccacgcagagccca

SEQ ID NO: 173513 - DNA, 73 bp, Homo sapiens
agagagagctgccgtgcaaaaagcccggggtcggggacgccagccaaacgcaacctccacgcagagcccaaga

SEQ ID NO: 173514 - DNA, 72 bp, Homo sapiens
gtgcaaaaagcccggggtcggggacgccagccaaacgcaacctccacgcagagcccaagacttgcggagctc

SEQ ID NO: 173515 - DNA, 72 bp, Homo sapiens
aaaagcccggggtcggggacgccagccaaacgcaacctccacgcagagcccaagacttgcggagctctgctc

SEQ ID NO: 173516 - DNA, 74 bp, Homo sapiens
gggacgccagccaaacgcaacctccacgcagagcccaagacttgcggagctctgctcccctcctcccgcctccc

SEQ ID NO: 173517 - DNA, 74 bp, Homo sapiens
ccagccaaacgcaacctccacgcagagcccaagacttgcggagctctgctcccctcctcccgcctccctccctc

SEQ ID NO: 173518 - DNA, 80 bp, Homo sapiens
ctccctccctccgcttttctgttgttgctgctgtggcagacaaatgtgatgtggggcgcagggaattgccactgtcacag

SEQ ID NO: 173519 - DNA, 74 bp, Homo sapiens
acagggatcctctcctcaaggaagaacttgccccctcccccaaagccaagagtgcccctgcagagcgaggcaga

SEQ ID NO: 173520 - DNA, 74 bp, Homo sapiens
tcaaggaagaacttgccccctcccccaaagccaagagtgcccctgcagagcgaggcagagagcaactaaaagaa

SEQ ID NO: 173521 - DNA, 71 bp, Homo sapiens
aagaacttgccccctcccccaaagccaagagtgcccctgcagagcgaggcagagagcaactaaaagaaatt

SEQ ID NO: 173522 - DNA, 75 bp, Homo sapiens
tcccccaaagccaagagtgcccctgcagagcgaggcagagagcaactaaaagaaatttctcctgattggagggtg

SEQ ID NO: 173523 - DNA, 74 bp, Homo sapiens
aaagccaagagtgcccctgcagagcgaggcagagagcaactaaaagaaatttctcctgattggagggtgggtgg

SEQ ID NO: 173524 - DNA, 76 bp, Homo sapiens
agtgcccctgcagagcgaggcagagagcaactaaaagaaatttctcctgattggagggtgggtgggatgaggctgg

SEQ ID NO: 173525 - DNA, 73 bp, Homo sapiens
cagagcgaggcagagagcaactaaaagaaatttctcctgattggagggtgggtgggatgaggctgggggaggg

SEQ ID NO: 173526 - DNA, 71 bp, Homo sapiens
ggctgggggagggggccggggtgtgtgtcccactgtcatgtaaatatcccttccaggcagggcggctccag

SEQ ID NO: 173527 - DNA, 73 bp, Homo sapiens
agggggccggggtgtgtgtcccactgtcatgtaaatatcccttccaggcagggcggctccagtgcagatttaa

SEQ ID NO: 173528 - DNA, 78 bp, Homo sapiens
gtgtgtgtcccactgtcatgtaaatatcccttccaggcagggcggctccagtgcagatttaagccgctggcacctggg

SEQ ID NO: 173529 - DNA, 80 bp, Homo sapiens
cactgtcatgtaaatatcccttccaggcagggcggctccagtgcagatttaagccgctggcacctggggcagtctcagtg

SEQ ID NO: 173530 - DNA, 79 bp, Homo sapiens
atgtaaatatcccttccaggcagggcggctccagtgcagatttaagccgctggcacctggggcagtctcagtgttcagc

SEQ ID NO: 173531 - DNA, 79 bp, Homo sapiens
ttccaggcagggcggctccagtgcagatttaagccgctggcacctggggcagtctcagtgttcagcctgcttccggacg

SEQ ID NO: 173532 - DNA, 77 bp, Homo sapiens
agggcggctccagtgcagatttaagccgctggcacctggggcagtctcagtgttcagcctgcttccggacgggcgag

SEQ ID NO: 173533 - DNA, 77 bp, Homo sapiens
agtgcagatttaagccgctggcacctggggcagtctcagtgttcagcctgcttccggacgggcgaggagactcgtgg

SEQ ID NO: 173534 - DNA, 75 bp, Homo sapiens
atttaagccgctggcacctggggcagtctcagtgttcagcctgcttccggacgggcgaggagactcgtggtctgg

SEQ ID NO: 173535 - DNA, 74 bp, Homo sapiens
cacctggggcagtctcagtgttcagcctgcttccggacgggcgaggagactcgtggtctggttctgggacttcc

SEQ ID NO: 173536 - DNA, 75 bp, Homo sapiens
agtctcagtgttcagcctgcttccggacgggcgaggagactcgtggtctggttctgggacttccctaacagcatg

SEQ ID NO: 173537 - DNA, 73 bp, Homo sapiens
agtgttcagcctgcttccggacgggcgaggagactcgtggtctggttctgggacttccctaacagcatggccc

SEQ ID NO: 173538 - DNA, 70 bp, Homo sapiens
cctgcttccggacgggcgaggagactcgtggtctggttctgggacttccctaacagcatggcccctaaac

SEQ ID NO: 173539 - DNA, 73 bp, Homo sapiens
gcgaggagactcgtggtctggttctgggacttccctaacagcatggcccctaaacgccagtctccactcccgc

SEQ ID NO: 173540 - DNA, 72 bp, Homo sapiens
tcgtggtctggttctgggacttccctaacagcatggcccctaaacgccagtctccactcccgcctcaaaaga

SEQ ID NO: 173541 - DNA, 71 bp, Homo sapiens
gtctggttctgggacttccctaacagcatggcccctaaacgccagtctccactcccgcctcaaaagaagaa

SEQ ID NO: 173542 - DNA, 69 bp, Homo sapiens
gggacttccctaacagcatggcccctaaacgccagtctccactcccgcctcaaaagaagaaaccaagac

SEQ ID NO: 173543 - DNA, 74 bp, Homo sapiens
agaagaaaccaagaccacctcctgctctgggaccggaggagacatcggcctctgcaggcttgccgaagaaggga

SEQ ID NO: 173544 - DNA, 72 bp, Homo sapiens
aagaccacctcctgctctgggaccggaggagacatcggcctctgcaggcttgccgaagaagggaggtacgtt

SEQ ID NO: 173545 - DNA, 74 bp, Homo sapiens
ctgctctgggaccggaggagacatcggcctctgcaggcttgccgaagaagggaggtacgtttctgcgctaagtt

SEQ ID NO: 173546 - DNA, 72 bp, Homo sapiens
accggaggagacatcggcctctgcaggcttgccgaagaagggaggtacgtttctgcgctaagttttattgga

SEQ ID NO: 173547 - DNA, 72 bp, Homo sapiens
agacatcggcctctgcaggcttgccgaagaagggaggtacgtttctgcgctaagttttattggagatttaag

SEQ ID NO: 173548 - DNA, 73 bp, Homo sapiens
aaggaaacgggaagctttgattggctgagggcaggcaactcttatggaagaagcactgaggaggagtcctacc

SEQ ID NO: 173549 - DNA, 79 bp, Homo sapiens
aagctttgattggctgagggcaggcaactcttatggaagaagcactgaggaggagtcctacctcagggctcagtgtgga

SEQ ID NO: 173550 - DNA, 78 bp, Homo sapiens
attggctgagggcaggcaactcttatggaagaagcactgaggaggagtcctacctcagggctcagtgtggacctgttg

SEQ ID NO: 173551 - DNA, 75 bp, Homo sapiens
aggcaactcttatggaagaagcactgaggaggagtcctacctcagggctcagtgtggacctgttggcacttttac

SEQ ID NO: 173552 - DNA, 77 bp, Homo sapiens
tcttatggaagaagcactgaggaggagtcctacctcagggctcagtgtggacctgttggcacttttactgggtctca

SEQ ID NO: 173553 - DNA, 72 bp, Homo sapiens
actgaggaggagtcctacctcagggctcagtgtggacctgttggcacttttactgggtctcagtcccttttc

SEQ ID NO: 173554 - DNA, 72 bp, Homo sapiens
aggagtcctacctcagggctcagtgtggacctgttggcacttttactgggtctcagtcccttttcctccaca

SEQ ID NO: 173555 - DNA, 77 bp, Homo sapiens
tacctcagggctcagtgtggacctgttggcacttttactgggtctcagtcccttttcctccacatgggatgcagaga

SEQ ID NO: 173556 - DNA, 75 bp, Homo sapiens
agtgtggacctgttggcacttttactgggtctcagtcccttttcctccacatgggatgcagagacctcctgccca

SEQ ID NO: 173557 - DNA, 75 bp, Homo sapiens
ttggcacttttactgggtctcagtcccttttcctccacatgggatgcagagacctcctgcccagcttgaaaccta

SEQ ID NO: 173558 - DNA, 72 bp, Homo sapiens
cttttactgggtctcagtcccttttcctccacatgggatgcagagacctcctgcccagcttgaaacctacct

SEQ ID NO: 173559 - DNA, 78 bp, Homo sapiens
tcagtcccttttcctccacatgggatgcagagacctcctgcccagcttgaaacctaccttgctgggtgagccacataa

SEQ ID NO: 173560 - DNA, 76 bp, Homo sapiens
tttcctccacatgggatgcagagacctcctgcccagcttgaaacctaccttgctgggtgagccacataaaacaact

SEQ ID NO: 173561 - DNA, 76 bp, Homo sapiens
tgggatgcagagacctcctgcccagcttgaaacctaccttgctgggtgagccacataaaacaacttgtgcttgttt

SEQ ID NO: 173562 - DNA, 73 bp, Homo sapiens
agagacctcctgcccagcttgaaacctaccttgctgggtgagccacataaaacaacttgtgcttgttttctct

SEQ ID NO: 173563 - DNA, 74 bp, Homo sapiens
agcatccgcgcggggcctggcgcgcctgcgccctgcgcccgcccctcgccgtaggaggaggtggaggaggaggc

SEQ ID NO: 173564 - DNA, 75 bp, Homo sapiens
gcctggcgcgcctgcgccctgcgcccgcccctcgccgtaggaggaggtggaggaggaggcggctcgggagagcga

SEQ ID NO: 173565 - DNA, 76 bp, Homo sapiens
cctgcgccctgcgcccgcccctcgccgtaggaggaggtggaggaggaggcggctcgggagagcgagcagcgagctg

SEQ ID NO: 173566 - DNA, 77 bp, Homo sapiens
cctgcgcccgcccctcgccgtaggaggaggtggaggaggaggcggctcgggagagcgagcagcgagctggctggatc

SEQ ID NO: 173567 - DNA, 80 bp, Homo sapiens
cctcgccgtaggaggaggtggaggaggaggcggctcgggagagcgagcagcgagctggctggatcgccgagcgcgagtga

SEQ ID NO: 173568 - DNA, 81 bp, Homo sapiens
taggaggaggtggaggaggaggcggctcgggagagcgagcagcgagctggctggatcgccgagcgcgagtgagggagccga

SEQ ID NO: 173569 - DNA, 80 bp, Homo sapiens
aggaggaggcggctcgggagagcgagcagcgagctggctggatcgccgagcgcgagtgagggagccgagccgcccgccgc

SEQ ID NO: 173570 - DNA, 80 bp, Homo sapiens
aggcggctcgggagagcgagcagcgagctggctggatcgccgagcgcgagtgagggagccgagccgcccgccgccgccgc

SEQ ID NO: 173571 - DNA, 80 bp, Homo sapiens
gggagagcgagcagcgagctggctggatcgccgagcgcgagtgagggagccgagccgcccgccgccgccgcctccgcctc

SEQ ID NO: 173572 - DNA, 76 bp, Homo sapiens
gagctggctggatcgccgagcgcgagtgagggagccgagccgcccgccgccgccgcctccgcctcccctccgcgaa

SEQ ID NO: 173573 - DNA, 74 bp, Homo sapiens
ctggatcgccgagcgcgagtgagggagccgagccgcccgccgccgccgcctccgcctcccctccgcgaacagga

SEQ ID NO: 173574 - DNA, 71 bp, Homo sapiens
cgagcgcgagtgagggagccgagccgcccgccgccgccgcctccgcctcccctccgcgaacaggagcccgg

SEQ ID NO: 173575 - DNA, 68 bp, Homo sapiens
gtgagggagccgagccgcccgccgccgccgcctccgcctcccctccgcgaacaggagcccgggccggg

SEQ ID NO: 173576 - DNA, 67 bp, Homo sapiens
agccgcccgccgccgccgcctccgcctcccctccgcgaacaggagcccgggccggggcccggcacgc

SEQ ID NO: 173577 - DNA, 66 bp, Homo sapiens
tccgcctcccctccgcgaacaggagcccgggccggggcccggcacgccgccccagcccgtccctcg

SEQ ID NO: 173578 - DNA, 69 bp, Homo sapiens
tccgcgaacaggagcccgggccggggcccggcacgccgccccagcccgtccctcggcgtcaggccgcga

SEQ ID NO: 173579 - DNA, 67 bp, Homo sapiens
acaggagcccgggccggggcccggcacgccgccccagcccgtccctcggcgtcaggccgcgagggta

SEQ ID NO: 173580 - DNA, 72 bp, Homo sapiens
ccggggcccggcacgccgccccagcccgtccctcggcgtcaggccgcgagggtagcgcgcgcgagcgagcga

SEQ ID NO: 173581 - DNA, 72 bp, Homo sapiens
acgccgccccagcccgtccctcggcgtcaggccgcgagggtagcgcgcgcgagcgagcgagggggagggaga

SEQ ID NO: 173582 - DNA, 75 bp, Homo sapiens
cccagcccgtccctcggcgtcaggccgcgagggtagcgcgcgcgagcgagcgagggggagggagagcgagcgagc

SEQ ID NO: 173583 - DNA, 76 bp, Homo sapiens
tccctcggcgtcaggccgcgagggtagcgcgcgcgagcgagcgagggggagggagagcgagcgagcgccgggagga

SEQ ID NO: 173584 - DNA, 76 bp, Homo sapiens
tcaggccgcgagggtagcgcgcgcgagcgagcgagggggagggagagcgagcgagcgccgggaggaggcggccgga

SEQ ID NO: 173585 - DNA, 73 bp, Homo sapiens
agggtagcgcgcgcgagcgagcgagggggagggagagcgagcgagcgccgggaggaggcggccggaccgagcg

SEQ ID NO: 173586 - DNA, 73 bp, Homo sapiens
gagcgagcgagggggagggagagcgagcgagcgccgggaggaggcggccggaccgagcgggcgcccgcgcgtg

SEQ ID NO: 173587 - DNA, 72 bp, Homo sapiens
gggggagggagagcgagcgagcgccgggaggaggcggccggaccgagcgggcgcccgcgcgtgtggcgtgag

SEQ ID NO: 173588 - DNA, 73 bp, Homo sapiens
gagcgagcgagcgccgggaggaggcggccggaccgagcgggcgcccgcgcgtgtggcgtgaggggaagccgct

SEQ ID NO: 173589 - DNA, 72 bp, Homo sapiens
agcgagcgccgggaggaggcggccggaccgagcgggcgcccgcgcgtgtggcgtgaggggaagccgcttgcc

SEQ ID NO: 173590 - DNA, 69 bp, Homo sapiens
aggaggcggccggaccgagcgggcgcccgcgcgtgtggcgtgaggggaagccgcttgcccgcccccttc

SEQ ID NO: 173591 - DNA, 70 bp, Homo sapiens
gaccgagcgggcgcccgcgcgtgtggcgtgaggggaagccgcttgcccgcccccttcgccttcccttctc

SEQ ID NO: 173592 - DNA, 69 bp, Homo sapiens
agcgggcgcccgcgcgtgtggcgtgaggggaagccgcttgcccgcccccttcgccttcccttctctccc

SEQ ID NO: 173593 - DNA, 67 bp, Homo sapiens
cgtgtggcgtgaggggaagccgcttgcccgcccccttcgccttcccttctctccccctccccgctcc

SEQ ID NO: 173594 - DNA, 64 bp, Homo sapiens
cgtgaggggaagccgcttgcccgcccccttcgccttcccttctctccccctccccgctcccccc

SEQ ID NO: 173595 - DNA, 63 bp, Homo sapiens
aagccgcttgcccgcccccttcgccttcccttctctccccctccccgctccccccccgaccgc

SEQ ID NO: 173596 - DNA, 67 bp, Homo sapiens
ccccttcgccttcccttctctccccctccccgctccccccccgaccgcggagcagcaccatgtcggc

SEQ ID NO: 173597 - DNA, 69 bp, Homo sapiens
tccccctccccgctccccccccgaccgcggagcagcaccatgtcggcgccggcggccaaagtcagtaaa

SEQ ID NO: 173598 - DNA, 73 bp, Homo sapiens
ccgaccgcggagcagcaccatgtcggcgccggcggccaaagtcagtaaaaaggagctcaactccaaccacgac

SEQ ID NO: 173599 - DNA, 72 bp, Homo sapiens
agcagcaccatgtcggcgccggcggccaaagtcagtaaaaaggagctcaactccaaccacgacggggccgac

SEQ ID NO: 173600 - DNA, 70 bp, Homo sapiens
accatgtcggcgccggcggccaaagtcagtaaaaaggagctcaactccaaccacgacggggccgacgaga

SEQ ID NO: 173601 - DNA, 72 bp, Homo sapiens
aaagtcagtaaaaaggagctcaactccaaccacgacggggccgacgagacctcaggtgagagcagcgagccc

SEQ ID NO: 173602 - DNA, 70 bp, Homo sapiens
aaaaaggagctcaactccaaccacgacggggccgacgagacctcaggtgagagcagcgagcccgggggcc

SEQ ID NO: 173603 - DNA, 71 bp, Homo sapiens
ctcaactccaaccacgacggggccgacgagacctcaggtgagagcagcgagcccgggggccggcccgcgcc

SEQ ID NO: 173604 - DNA, 78 bp, Homo sapiens
cctccctccctcccgagaagcctctctttattgtgctccgccatgatgcctcgctcccatcagccgccgccgccgcca

SEQ ID NO: 173605 - DNA, 81 bp, Homo sapiens
tccctcccgagaagcctctctttattgtgctccgccatgatgcctcgctcccatcagccgccgccgccgccacatggtgcg

SEQ ID NO: 173606 - DNA, 81 bp, Homo sapiens
agaagcctctctttattgtgctccgccatgatgcctcgctcccatcagccgccgccgccgccacatggtgcggccggacgc

SEQ ID NO: 173607 - DNA, 79 bp, Homo sapiens
ctttattgtgctccgccatgatgcctcgctcccatcagccgccgccgccgccacatggtgcggccggacgcggccccgc

SEQ ID NO: 173608 - DNA, 78 bp, Homo sapiens
tccgccatgatgcctcgctcccatcagccgccgccgccgccacatggtgcggccggacgcggccccgcgcccgacctc

SEQ ID NO: 173609 - DNA, 75 bp, Homo sapiens
atgcctcgctcccatcagccgccgccgccgccacatggtgcggccggacgcggccccgcgcccgacctcccgcgc

SEQ ID NO: 173610 - DNA, 71 bp, Homo sapiens
gccgccgccgccacatggtgcggccggacgcggccccgcgcccgacctcccgcgcggttccgcttcgcgcc

SEQ ID NO: 173611 - DNA, 66 bp, Homo sapiens
tattatagtattaacatctggaaaactaggtaaatttatcttagaattaagttttttgctcctttt

SEQ ID NO: 173612 - DNA, 66 bp, Homo sapiens
acatctggaaaactaggtaaatttatcttagaattaagttttttgctccttttttgcagaaaaaga

SEQ ID NO: 173613 - DNA, 68 bp, Homo sapiens
ctaggtaaatttatcttagaattaagttttttgctccttttttgcagaaaaagaacagcaagaagcga

SEQ ID NO: 173614 - DNA, 72 bp, Homo sapiens
tttatcttagaattaagttttttgctccttttttgcagaaaaagaacagcaagaagcgattgaacacattga

SEQ ID NO: 173615 - DNA, 73 bp, Homo sapiens
gaattaagttttttgctccttttttgcagaaaaagaacagcaagaagcgattgaacacattgatgaagtacaa

SEQ ID NO: 173616 - DNA, 75 bp, Homo sapiens
cagcaagaagcgattgaacacattgatgaagtacaaaatgaaatagacaggtaacatttttcttaatatacttcg

SEQ ID NO: 173617 - DNA, 74 bp, Homo sapiens
gaagcgattgaacacattgatgaagtacaaaatgaaatagacaggtaacatttttcttaatatacttcggagaa

SEQ ID NO: 173618 - DNA, 73 bp, Homo sapiens
cacattgatgaagtacaaaatgaaatagacaggtaacatttttcttaatatacttcggagaaattttctgaga

SEQ ID NO: 173619 - DNA, 72 bp, Homo sapiens
gaagtacaaaatgaaatagacaggtaacatttttcttaatatacttcggagaaattttctgagatgtgtcta

SEQ ID NO: 173620 - DNA, 78 bp, Homo sapiens
tttgttaaatactatcattgtcaacatctcttttcatttgcttcagacttaatgaacaagccagtgaggagattttga

SEQ ID NO: 173621 - DNA, 69 bp, Homo sapiens
agaattgatcgccaaaatcccaaatttttgggtaacaacatttgtcaaccatccacaaggtatgttttg

SEQ ID NO: 173622 - DNA, 69 bp, Homo sapiens
gccaaaatcccaaatttttgggtaacaacatttgtcaaccatccacaaggtatgttttggacagggcat

SEQ ID NO: 173623 - DNA, 69 bp, Homo sapiens
caaatttttgggtaacaacatttgtcaaccatccacaaggtatgttttggacagggcattgttaaagga

SEQ ID NO: 173624 - DNA, 79 bp, Homo sapiens
ttagtgtgtgcctgttgaaaattcagctgacctgtaattttctggcctagtgtctgcactgcttggggaggaagatgaa

SEQ ID NO: 173625 - DNA, 80 bp, Homo sapiens
cctgttgaaaattcagctgacctgtaattttctggcctagtgtctgcactgcttggggaggaagatgaagaggcactgca

SEQ ID NO: 173626 - DNA, 73 bp, Homo sapiens
cagaatttgaagatattaaatcaggttacagaatagattttgtaagtatctctaacttaatcttgtttgccac

SEQ ID NO: 173627 - DNA, 70 bp, Homo sapiens
ggttggaagacctgttcatatttctaatctttcaattatttattacagtattttgatgaaaatccttact

SEQ ID NO: 173628 - DNA, 70 bp, Homo sapiens
agacctgttcatatttctaatctttcaattatttattacagtattttgatgaaaatccttactttgaaaa

SEQ ID NO: 173629 - DNA, 68 bp, Homo sapiens
atatttctaatctttcaattatttattacagtattttgatgaaaatccttactttgaaaataaagttc

SEQ ID NO: 173630 - DNA, 76 bp, Homo sapiens
agaatttcatctgaatgagagtggtgatccatcttcgaagtccaccgaaatcaaatggaaatctggaaaggtatgt

SEQ ID NO: 173631 - DNA, 77 bp, Homo sapiens
ttcatctgaatgagagtggtgatccatcttcgaagtccaccgaaatcaaatggaaatctggaaaggtatgttttgag

SEQ ID NO: 173632 - DNA, 73 bp, Homo sapiens
gtggtgatccatcttcgaagtccaccgaaatcaaatggaaatctggaaaggtatgttttgaggaattatttga

SEQ ID NO: 173633 - DNA, 71 bp, Homo sapiens
atccatcttcgaagtccaccgaaatcaaatggaaatctggaaaggtatgttttgaggaattatttgacaaa

SEQ ID NO: 173634 - DNA, 70 bp, Homo sapiens
cgaagtccaccgaaatcaaatggaaatctggaaaggtatgttttgaggaattatttgacaaaaatagcat

SEQ ID NO: 173635 - DNA, 72 bp, Homo sapiens
gtgttatggagagattgtatcaaaagctcttccggtattcatttaggatttgacgaaacgttcgagtcaaac

SEQ ID NO: 173636 - DNA, 71 bp, Homo sapiens
agattgtatcaaaagctcttccggtattcatttaggatttgacgaaacgttcgagtcaaacgcagaataaa

SEQ ID NO: 173637 - DNA, 73 bp, Homo sapiens
gtatcaaaagctcttccggtattcatttaggatttgacgaaacgttcgagtcaaacgcagaataaagccagca

SEQ ID NO: 173638 - DNA, 73 bp, Homo sapiens
ctcttccggtattcatttaggatttgacgaaacgttcgagtcaaacgcagaataaagccagcaggaagaggca

SEQ ID NO: 173639 - DNA, 74 bp, Homo sapiens
tcaaagatgatatttggccaaacccattacagtactacttggtgagttctaatactcatttattcaaggttgga

SEQ ID NO: 173640 - DNA, 71 bp, Homo sapiens
atatttggccaaacccattacagtactacttggtgagttctaatactcatttattcaaggttggacttgtc

SEQ ID NO: 173641 - DNA, 69 bp, Homo sapiens
aacccattacagtactacttggtgagttctaatactcatttattcaaggttggacttgtctcggttgtt

SEQ ID NO: 173642 - DNA, 70 bp, Homo sapiens
ccattacagtactacttggtgagttctaatactcatttattcaaggttggacttgtctcggttgtttaaa

SEQ ID NO: 173643 - DNA, 69 bp, Homo sapiens
ttacagtactacttggtgagttctaatactcatttattcaaggttggacttgtctcggttgtttaaaaa

SEQ ID NO: 173644 - DNA, 70 bp, Homo sapiens
gtactacttggtgagttctaatactcatttattcaaggttggacttgtctcggttgtttaaaaatgagtc

SEQ ID NO: 173645 - DNA, 69 bp, Homo sapiens
acttggtgagttctaatactcatttattcaaggttggacttgtctcggttgtttaaaaatgagtcctta

SEQ ID NO: 173646 - DNA, 72 bp, Homo sapiens
gtgagttctaatactcatttattcaaggttggacttgtctcggttgtttaaaaatgagtccttatattgtgc

SEQ ID NO: 173647 - DNA, 70 bp, Homo sapiens
gttctaatactcatttattcaaggttggacttgtctcggttgtttaaaaatgagtccttatattgtgctt

SEQ ID NO: 173648 - DNA, 68 bp, Homo sapiens
aatactcatttattcaaggttggacttgtctcggttgtttaaaaatgagtccttatattgtgcttttt

SEQ ID NO: 173649 - DNA, 67 bp, Homo sapiens
tcatttattcaaggttggacttgtctcggttgtttaaaaatgagtccttatattgtgcttttttttt

SEQ ID NO: 173650 - DNA, 70 bp, Homo sapiens
aagatgaagatgatgatgaaggggaggaaggagaggtaaaagaaaatttggctaaacccacaaagataac

SEQ ID NO: 173651 - DNA, 68 bp, Homo sapiens
agatgatgatgaaggggaggaaggagaggtaaaagaaaatttggctaaacccacaaagataactttta

SEQ ID NO: 173652 - DNA, 64 bp, Homo sapiens
ggggaggaaggagaggtaaaagaaaatttggctaaacccacaaagataacttttaaagaattca

SEQ ID NO: 173653 - DNA, 65 bp, Homo sapiens
ggaaggagaggtaaaagaaaatttggctaaacccacaaagataacttttaaagaattcatgttat

SEQ ID NO: 173654 - DNA, 73 bp, Homo sapiens
tatatatatagtgtggtagaactgaccagaactgattgtggaaaaaaagtaagccattttgttgttcaagaat

SEQ ID NO: 173655 - DNA, 70 bp, Homo sapiens
agtgtggtagaactgaccagaactgattgtggaaaaaaagtaagccattttgttgttcaagaattaagga

SEQ ID NO: 173656 - DNA, 69 bp, Homo sapiens
gtagaactgaccagaactgattgtggaaaaaaagtaagccattttgttgttcaagaattaaggaaatgt

SEQ ID NO: 173657 - DNA, 71 bp, Homo sapiens
ccagaactgattgtggaaaaaaagtaagccattttgttgttcaagaattaaggaaatgtttgataagcaca

SEQ ID NO: 173658 - DNA, 70 bp, Homo sapiens
gtggaaaaaaagtaagccattttgttgttcaagaattaaggaaatgtttgataagcacatggtactaatg

SEQ ID NO: 173659 - DNA, 70 bp, Homo sapiens
gtaagccattttgttgttcaagaattaaggaaatgtttgataagcacatggtactaatgtttaactaggt

SEQ ID NO: 173660 - DNA, 67 bp, Homo sapiens
attttgttgttcaagaattaaggaaatgtttgataagcacatggtactaatgtttaactaggttttt

SEQ ID NO: 173661 - DNA, 66 bp, Homo sapiens
tcaagaattaaggaaatgtttgataagcacatggtactaatgtttaactaggttttttttggtttt

SEQ ID NO: 173662 - DNA, 68 bp, Homo sapiens
tgggtttttttggttagacttatcaccacccaagcttgtttttccctagccagtacttaggcaatata

SEQ ID NO: 173663 - DNA, 71 bp, Homo sapiens
tttttggttagacttatcaccacccaagcttgtttttccctagccagtacttaggcaatataggcagtgta

SEQ ID NO: 173664 - DNA, 76 bp, Homo sapiens
ttatcaccacccaagcttgtttttccctagccagtacttaggcaatataggcagtgtagctggtcaaattctgaca

SEQ ID NO: 173665 - DNA, 77 bp, Homo sapiens
caagcttgtttttccctagccagtacttaggcaatataggcagtgtagctggtcaaattctgacatctctgaaataa

SEQ ID NO: 173666 - DNA, 76 bp, Homo sapiens
ttgtttttccctagccagtacttaggcaatataggcagtgtagctggtcaaattctgacatctctgaaataacaaa

SEQ ID NO: 173667 - DNA, 78 bp, Homo sapiens
tagccagtacttaggcaatataggcagtgtagctggtcaaattctgacatctctgaaataacaaagtttcatgtattt

SEQ ID NO: 173668 - DNA, 77 bp, Homo sapiens
ttaggcaatataggcagtgtagctggtcaaattctgacatctctgaaataacaaagtttcatgtattttcgacaaac

SEQ ID NO: 173669 - DNA, 78 bp, Homo sapiens
agctggtcaaattctgacatctctgaaataacaaagtttcatgtattttcgacaaactgcacaatttctgaatagtca

SEQ ID NO: 173670 - DNA, 76 bp, Homo sapiens
tgacatctctgaaataacaaagtttcatgtattttcgacaaactgcacaatttctgaatagtcaaattaggatagg

SEQ ID NO: 173671 - DNA, 72 bp, Homo sapiens
ctgaaataacaaagtttcatgtattttcgacaaactgcacaatttctgaatagtcaaattaggataggttgg

SEQ ID NO: 173672 - DNA, 70 bp, Homo sapiens
agtttcatgtattttcgacaaactgcacaatttctgaatagtcaaattaggataggttggttttatttcg

SEQ ID NO: 173673 - DNA, 71 bp, Homo sapiens
catgtattttcgacaaactgcacaatttctgaatagtcaaattaggataggttggttttatttcggattat

SEQ ID NO: 173674 - DNA, 71 bp, Homo sapiens
cgacaaactgcacaatttctgaatagtcaaattaggataggttggttttatttcggattatttgatccgaa

SEQ ID NO: 173675 - DNA, 71 bp, Homo sapiens
cacaatttctgaatagtcaaattaggataggttggttttatttcggattatttgatccgaaatatacctga

SEQ ID NO: 173676 - DNA, 69 bp, Homo sapiens
ctgaatagtcaaattaggataggttggttttatttcggattatttgatccgaaatatacctgatttggt

SEQ ID NO: 173677 - DNA, 68 bp, Homo sapiens
gtcaaattaggataggttggttttatttcggattatttgatccgaaatatacctgatttggttagaac

SEQ ID NO: 173678 - DNA, 68 bp, Homo sapiens
gttggttttatttcggattatttgatccgaaatatacctgatttggttagaactgaagttactaatta

SEQ ID NO: 173679 - DNA, 74 bp, Homo sapiens
tttcggattatttgatccgaaatatacctgatttggttagaactgaagttactaattaatctgaagcaacatca

SEQ ID NO: 173680 - DNA, 75 bp, Homo sapiens
cggattatttgatccgaaatatacctgatttggttagaactgaagttactaattaatctgaagcaacatcatcac

SEQ ID NO: 173681 - DNA, 75 bp, Homo sapiens
tatttgatccgaaatatacctgatttggttagaactgaagttactaattaatctgaagcaacatcatcacgggtg

SEQ ID NO: 173682 - DNA, 73 bp, Homo sapiens
aatatacctgatttggttagaactgaagttactaattaatctgaagcaacatcatcacgggtgtttccttcga

SEQ ID NO: 173683 - DNA, 76 bp, Homo sapiens
atttggttagaactgaagttactaattaatctgaagcaacatcatcacgggtgtttccttcgatgcagctgactta

SEQ ID NO: 173684 - DNA, 77 bp, Homo sapiens
tagaactgaagttactaattaatctgaagcaacatcatcacgggtgtttccttcgatgcagctgacttacaggttta

SEQ ID NO: 173685 - DNA, 74 bp, Homo sapiens
aagttactaattaatctgaagcaacatcatcacgggtgtttccttcgatgcagctgacttacaggtttagaaac

SEQ ID NO: 173686 - DNA, 74 bp, Homo sapiens
aacatcatcacgggtgtttccttcgatgcagctgacttacaggtttagaaactggagtgcccccaggggcactc

SEQ ID NO: 173687 - DNA, 70 bp, Homo sapiens
acgggtgtttccttcgatgcagctgacttacaggtttagaaactggagtgcccccaggggcactcgtggg

SEQ ID NO: 173688 - DNA, 75 bp, Homo sapiens
ttcgatgcagctgacttacaggtttagaaactggagtgcccccaggggcactcgtggggtccattgtggtccata

SEQ ID NO: 173689 - DNA, 73 bp, Homo sapiens
tgacttacaggtttagaaactggagtgcccccaggggcactcgtggggtccattgtggtccatatgaaagcaa

SEQ ID NO: 173690 - DNA, 75 bp, Homo sapiens
tttagaaactggagtgcccccaggggcactcgtggggtccattgtggtccatatgaaagcaagtctcagcattaa

SEQ ID NO: 173691 - DNA, 78 bp, Homo sapiens
tggagtgcccccaggggcactcgtggggtccattgtggtccatatgaaagcaagtctcagcattaatcctgaagatta

SEQ ID NO: 173692 - DNA, 77 bp, Homo sapiens
caggggcactcgtggggtccattgtggtccatatgaaagcaagtctcagcattaatcctgaagattaactgcccact

SEQ ID NO: 173693 - DNA, 75 bp, Homo sapiens
actcgtggggtccattgtggtccatatgaaagcaagtctcagcattaatcctgaagattaactgcccactttttc

SEQ ID NO: 173694 - DNA, 77 bp, Homo sapiens
attgtggtccatatgaaagcaagtctcagcattaatcctgaagattaactgcccactttttctttcaggaggatgaa

SEQ ID NO: 173695 - DNA, 78 bp, Homo sapiens
atatgaaagcaagtctcagcattaatcctgaagattaactgcccactttttctttcaggaggatgaaggagaagatga

SEQ ID NO: 173696 - DNA, 75 bp, Homo sapiens
aagtctcagcattaatcctgaagattaactgcccactttttctttcaggaggatgaaggagaagatgactaaata

SEQ ID NO: 173697 - DNA, 74 bp, Homo sapiens
agcattaatcctgaagattaactgcccactttttctttcaggaggatgaaggagaagatgactaaatagaacac

SEQ ID NO: 173698 - DNA, 72 bp, Homo sapiens
ttcttgaggtctcttttctctactccatggttctcaatttatttggggggaaataccttgagcagaatacaa

SEQ ID NO: 173699 - DNA, 71 bp, Homo sapiens
ggtctcttttctctactccatggttctcaatttatttggggggaaataccttgagcagaatacaatgggaa

SEQ ID NO: 173700 - DNA, 75 bp, Homo sapiens
agttgctttgttacaataaaactaaatgtgtacacaaaggatttgatgcttttctctcagcataggtatgcttac

SEQ ID NO: 173701 - DNA, 76 bp, Homo sapiens
acaataaaactaaatgtgtacacaaaggatttgatgcttttctctcagcataggtatgcttactatgaccttccaa

SEQ ID NO: 173702 - DNA, 74 bp, Homo sapiens
aaaactaaatgtgtacacaaaggatttgatgcttttctctcagcataggtatgcttactatgaccttccaagtt

SEQ ID NO: 173703 - DNA, 80 bp, Homo sapiens
tgtacacaaaggatttgatgcttttctctcagcataggtatgcttactatgaccttccaagtttgacttgtataacatca

SEQ ID NO: 173704 - DNA, 78 bp, Homo sapiens
tttgatgcttttctctcagcataggtatgcttactatgaccttccaagtttgacttgtataacatcactgtcaaactt

SEQ ID NO: 173705 - DNA, 77 bp, Homo sapiens
ttttctctcagcataggtatgcttactatgaccttccaagtttgacttgtataacatcactgtcaaactttgtcacc

SEQ ID NO: 173706 - DNA, 73 bp, Homo sapiens
ataggtatgcttactatgaccttccaagtttgacttgtataacatcactgtcaaactttgtcaccctaacttc

SEQ ID NO: 173707 - DNA, 70 bp, Homo sapiens
cttactatgaccttccaagtttgacttgtataacatcactgtcaaactttgtcaccctaacttcgtattt

SEQ ID NO: 173708 - DNA, 71 bp, Homo sapiens
ttccaagtttgacttgtataacatcactgtcaaactttgtcaccctaacttcgtattttttgatacgcact

SEQ ID NO: 173709 - DNA, 72 bp, Homo sapiens
agtttgacttgtataacatcactgtcaaactttgtcaccctaacttcgtattttttgatacgcactttgcag

SEQ ID NO: 173710 - DNA, 73 bp, Homo sapiens
acttgtataacatcactgtcaaactttgtcaccctaacttcgtattttttgatacgcactttgcaggatgacc

SEQ ID NO: 173711 - DNA, 74 bp, Homo sapiens
gtataacatcactgtcaaactttgtcaccctaacttcgtattttttgatacgcactttgcaggatgacctcagg

SEQ ID NO: 173712 - DNA, 74 bp, Homo sapiens
actgtcaaactttgtcaccctaacttcgtattttttgatacgcactttgcaggatgacctcagggctatgtgga

SEQ ID NO: 173713 - DNA, 74 bp, Homo sapiens
actttgtcaccctaacttcgtattttttgatacgcactttgcaggatgacctcagggctatgtggattgagtaa

SEQ ID NO: 173714 - DNA, 77 bp, Homo sapiens
taacttcgtattttttgatacgcactttgcaggatgacctcagggctatgtggattgagtaatgggatttgaatcaa

SEQ ID NO: 173715 - DNA, 79 bp, Homo sapiens
tattttttgatacgcactttgcaggatgacctcagggctatgtggattgagtaatgggatttgaatcaatgtattaata

SEQ ID NO: 173716 - DNA, 82 bp, Homo sapiens
atacgcactttgcaggatgacctcagggctatgtggattgagtaatgggatttgaatcaatgtattaatatctccatagctg

SEQ ID NO: 173717 - DNA, 80 bp, Homo sapiens
tttgcaggatgacctcagggctatgtggattgagtaatgggatttgaatcaatgtattaatatctccatagctgggaaac

SEQ ID NO: 173718 - DNA, 77 bp, Homo sapiens
tcagggctatgtggattgagtaatgggatttgaatcaatgtattaatatctccatagctgggaaacgtgggttcaat

SEQ ID NO: 173719 - DNA, 77 bp, Homo sapiens
tatgtggattgagtaatgggatttgaatcaatgtattaatatctccatagctgggaaacgtgggttcaatttgccat

SEQ ID NO: 173720 - DNA, 74 bp, Homo sapiens
aatgggatttgaatcaatgtattaatatctccatagctgggaaacgtgggttcaatttgccattggtttctgaa

SEQ ID NO: 173721 - DNA, 74 bp, Homo sapiens
gatttgaatcaatgtattaatatctccatagctgggaaacgtgggttcaatttgccattggtttctgaaagtat

SEQ ID NO: 173722 - DNA, 74 bp, Homo sapiens
aatgtattaatatctccatagctgggaaacgtgggttcaatttgccattggtttctgaaagtattcacatcatt

SEQ ID NO: 173723 - DNA, 76 bp, Homo sapiens
tatctccatagctgggaaacgtgggttcaatttgccattggtttctgaaagtattcacatcatttgggataccaga

SEQ ID NO: 173724 - DNA, 79 bp, Homo sapiens
tgggttcaatttgccattggtttctgaaagtattcacatcatttgggataccagatagctcaatactctctgagtacat

SEQ ID NO: 173725 - DNA, 79 bp, Homo sapiens
cattggtttctgaaagtattcacatcatttgggataccagatagctcaatactctctgagtacattgtgcccttgattt

SEQ ID NO: 173726 - DNA, 79 bp, Homo sapiens
gtttctgaaagtattcacatcatttgggataccagatagctcaatactctctgagtacattgtgcccttgatttttatc

SEQ ID NO: 173727 - DNA, 80 bp, Homo sapiens
tcacatcatttgggataccagatagctcaatactctctgagtacattgtgcccttgatttttatctccaagtggcagttt

SEQ ID NO: 173728 - DNA, 76 bp, Homo sapiens
atttgggataccagatagctcaatactctctgagtacattgtgcccttgatttttatctccaagtggcagttttta

SEQ ID NO: 173729 - DNA, 75 bp, Homo sapiens
accagatagctcaatactctctgagtacattgtgcccttgatttttatctccaagtggcagtttttaaaattggc

SEQ ID NO: 173730 - DNA, 70 bp, Homo sapiens
aatactctctgagtacattgtgcccttgatttttatctccaagtggcagtttttaaaattggccttttac

SEQ ID NO: 173731 - DNA, 70 bp, Homo sapiens
gagtacattgtgcccttgatttttatctccaagtggcagtttttaaaattggccttttacctggatataa

SEQ ID NO: 173732 - DNA, 68 bp, Homo sapiens
ccttgatttttatctccaagtggcagtttttaaaattggccttttacctggatataaattaattgtgc

SEQ ID NO: 173733 - DNA, 70 bp, Homo sapiens
ttttatctccaagtggcagtttttaaaattggccttttacctggatataaattaattgtgcctgccacca

SEQ ID NO: 173734 - DNA, 71 bp, Homo sapiens
agtggcagtttttaaaattggccttttacctggatataaattaattgtgcctgccaccaccatccaacaga

SEQ ID NO: 173735 - DNA, 69 bp, Homo sapiens
gtttttaaaattggccttttacctggatataaattaattgtgcctgccaccaccatccaacagacctgg

SEQ ID NO: 173736 - DNA, 76 bp, Homo sapiens
tggccttttacctggatataaattaattgtgcctgccaccaccatccaacagacctggtgctctaatgccaagtta

SEQ ID NO: 173737 - DNA, 77 bp, Homo sapiens
tggatataaattaattgtgcctgccaccaccatccaacagacctggtgctctaatgccaagttatacacgggacagt

SEQ ID NO: 173738 - DNA, 78 bp, Homo sapiens
aaattaattgtgcctgccaccaccatccaacagacctggtgctctaatgccaagttatacacgggacagttgctggca

SEQ ID NO: 173739 - DNA, 79 bp, Homo sapiens
accatccaacagacctggtgctctaatgccaagttatacacgggacagttgctggcatgtcttcattggctatataaaa

SEQ ID NO: 173740 - DNA, 81 bp, Homo sapiens
ctggtgctctaatgccaagttatacacgggacagttgctggcatgtcttcattggctatataaaatgtggccaagaagata

SEQ ID NO: 173741 - DNA, 79 bp, Homo sapiens
aagttatacacgggacagttgctggcatgtcttcattggctatataaaatgtggccaagaagataggctctcagtaaga

SEQ ID NO: 173742 - DNA, 84 bp, Homo sapiens
acagttgctggcatgtcttcattggctatataaaatgtggccaagaagataggctctcagtaagaagtctgatggtgagcagta

SEQ ID NO: 173743 - DNA, 82 bp, Homo sapiens
gcatgtcttcattggctatataaaatgtggccaagaagataggctctcagtaagaagtctgatggtgagcagtaactgtccc

SEQ ID NO: 173744 - DNA, 80 bp, Homo sapiens
ttcattggctatataaaatgtggccaagaagataggctctcagtaagaagtctgatggtgagcagtaactgtccctgctt

SEQ ID NO: 173745 - DNA, 79 bp, Homo sapiens
tataaaatgtggccaagaagataggctctcagtaagaagtctgatggtgagcagtaactgtccctgctttctggtataa

SEQ ID NO: 173746 - DNA, 79 bp, Homo sapiens
ccaagaagataggctctcagtaagaagtctgatggtgagcagtaactgtccctgctttctggtataaagctctcaaatg

SEQ ID NO: 173747 - DNA, 80 bp, Homo sapiens
aagataggctctcagtaagaagtctgatggtgagcagtaactgtccctgctttctggtataaagctctcaaatgtgacca

SEQ ID NO: 173748 - DNA, 79 bp, Homo sapiens
agtaagaagtctgatggtgagcagtaactgtccctgctttctggtataaagctctcaaatgtgaccatgtgaatctggg

SEQ ID NO: 173749 - DNA, 80 bp, Homo sapiens
agtctgatggtgagcagtaactgtccctgctttctggtataaagctctcaaatgtgaccatgtgaatctgggtgggataa

SEQ ID NO: 173750 - DNA, 79 bp, Homo sapiens
agtaactgtccctgctttctggtataaagctctcaaatgtgaccatgtgaatctgggtgggataatggactcagctctg

SEQ ID NO: 173751 - DNA, 84 bp, Homo sapiens
cctgctttctggtataaagctctcaaatgtgaccatgtgaatctgggtgggataatggactcagctctgtctgctcaatgccat

SEQ ID NO: 173752 - DNA, 86 bp, Homo sapiens
aaagctctcaaatgtgaccatgtgaatctgggtgggataatggactcagctctgtctgctcaatgccattgtgcagagaagcaccc

SEQ ID NO: 173753 - DNA, 74 bp, Homo sapiens
cctaatgcataagctttttaatgctgtaaaatatagtcgctgaaattaaatgccactttttcagaggtgaatta

SEQ ID NO: 173754 - DNA, 72 bp, Homo sapiens
taaatgccactttttcagaggtgaattaatggacagtctggtgaacttcaaaagctttttgatgtataaaac

SEQ ID NO: 173755 - DNA, 71 bp, Homo sapiens
actttttcagaggtgaattaatggacagtctggtgaacttcaaaagctttttgatgtataaaacttgataa

SEQ ID NO: 173756 - DNA, 73 bp, Homo sapiens
cagaggtgaattaatggacagtctggtgaacttcaaaagctttttgatgtataaaacttgataaatggaacta

SEQ ID NO: 173757 - DNA, 73 bp, Homo sapiens
aatggacagtctggtgaacttcaaaagctttttgatgtataaaacttgataaatggaactattccatcaatag

SEQ ID NO: 173758 - DNA, 77 bp, Homo sapiens
acttgataaatggaactattccatcaataggcaaaagtgtaacaacctatctagatggatagtatgtaatttctgca

SEQ ID NO: 173759 - DNA, 76 bp, Homo sapiens
ataaatggaactattccatcaataggcaaaagtgtaacaacctatctagatggatagtatgtaatttctgcacagg

SEQ ID NO: 173760 - DNA, 73 bp, Homo sapiens
tcactgtataccgatcaggaatcttgctccaataaaggaacataaagattttttttggactggggtcattctc

SEQ ID NO: 173761 - DNA, 69 bp, Homo sapiens
accgatcaggaatcttgctccaataaaggaacataaagattttttttggactggggtcattctccttgt

SEQ ID NO: 173762 - DNA, 69 bp, Homo sapiens
caggaatcttgctccaataaaggaacataaagattttttttggactggggtcattctccttgttttata

SEQ ID NO: 173763 - DNA, 70 bp, Homo sapiens
actagttcggcaggaaatttgttggaagatgaagaagctaagatagggggttggtgacttccacaggaaa

SEQ ID NO: 173764 - DNA, 69 bp, Homo sapiens
aggaaatttgttggaagatgaagaagctaagatagggggttggtgacttccacaggaaaagttctggag

SEQ ID NO: 173765 - DNA, 72 bp, Homo sapiens
ttggaagatgaagaagctaagatagggggttggtgacttccacaggaaaagttctggaggagtagccaaaga

SEQ ID NO: 173766 - DNA, 73 bp, Homo sapiens
atgaagaagctaagatagggggttggtgacttccacaggaaaagttctggaggagtagccaaagaccatcagc

SEQ ID NO: 173767 - DNA, 69 bp, Homo sapiens
atagggggttggtgacttccacaggaaaagttctggaggagtagccaaagaccatcagcgtttccttta

SEQ ID NO: 173768 - DNA, 75 bp, Homo sapiens
tggtgacttccacaggaaaagttctggaggagtagccaaagaccatcagcgtttcctttatgtgtgagaattgaa

SEQ ID NO: 173769 - DNA, 75 bp, Homo sapiens
acaggaaaagttctggaggagtagccaaagaccatcagcgtttcctttatgtgtgagaattgaaatgactagcat

SEQ ID NO: 173770 - DNA, 76 bp, Homo sapiens
aaaagttctggaggagtagccaaagaccatcagcgtttcctttatgtgtgagaattgaaatgactagcattattga

SEQ ID NO: 173771 - DNA, 77 bp, Homo sapiens
aggagtagccaaagaccatcagcgtttcctttatgtgtgagaattgaaatgactagcattattgacccttttcagca

SEQ ID NO: 173772 - DNA, 77 bp, Homo sapiens
accatcagcgtttcctttatgtgtgagaattgaaatgactagcattattgacccttttcagcatcccctgtgaatat

SEQ ID NO: 173773 - DNA, 76 bp, Homo sapiens
tttcctttatgtgtgagaattgaaatgactagcattattgacccttttcagcatcccctgtgaatatttctgttta

SEQ ID NO: 173774 - DNA, 75 bp, Homo sapiens
tttatgtgtgagaattgaaatgactagcattattgacccttttcagcatcccctgtgaatatttctgtttaggtt

SEQ ID NO: 173775 - DNA, 72 bp, Homo sapiens
agaattgaaatgactagcattattgacccttttcagcatcccctgtgaatatttctgtttaggtttttcttc

SEQ ID NO: 173776 - DNA, 71 bp, Homo sapiens
gactagcattattgacccttttcagcatcccctgtgaatatttctgtttaggtttttcttcttgaaaagaa

SEQ ID NO: 173777 - DNA, 69 bp, Homo sapiens
gacccttttcagcatcccctgtgaatatttctgtttaggtttttcttcttgaaaagaaattgttattca

SEQ ID NO: 173778 - DNA, 69 bp, Homo sapiens
cagcatcccctgtgaatatttctgtttaggtttttcttcttgaaaagaaattgttattcagcccgttta

SEQ ID NO: 173779 - DNA, 65 bp, Homo sapiens
ccctgtgaatatttctgtttaggtttttcttcttgaaaagaaattgttattcagcccgtttaaaa

SEQ ID NO: 173780 - DNA, 64 bp, Homo sapiens
ctgtttaggtttttcttcttgaaaagaaattgttattcagcccgtttaaaacaaatcaagaaac

SEQ ID NO: 173781 - DNA, 65 bp, Homo sapiens
tttcttcttgaaaagaaattgttattcagcccgtttaaaacaaatcaagaaacttttgggtaaca

SEQ ID NO: 173782 - DNA, 67 bp, Homo sapiens
gaaaagaaattgttattcagcccgtttaaaacaaatcaagaaacttttgggtaacattgcaattaca

SEQ ID NO: 173783 - DNA, 69 bp, Homo sapiens
gttattcagcccgtttaaaacaaatcaagaaacttttgggtaacattgcaattacatgaaattgataac

SEQ ID NO: 173784 - DNA, 69 bp, Homo sapiens
cagcccgtttaaaacaaatcaagaaacttttgggtaacattgcaattacatgaaattgataaccgcgaa

SEQ ID NO: 173785 - DNA, 70 bp, Homo sapiens
caaatcaagaaacttttgggtaacattgcaattacatgaaattgataaccgcgaaaataattggaactcc

SEQ ID NO: 173786 - DNA, 71 bp, Homo sapiens
aaacttttgggtaacattgcaattacatgaaattgataaccgcgaaaataattggaactcctgcttgcaag

SEQ ID NO: 173787 - DNA, 71 bp, Homo sapiens
attacatgaaattgataaccgcgaaaataattggaactcctgcttgcaagtgtcaacctaaaaaaagtgct

SEQ ID NO: 173788 - DNA, 68 bp, Homo sapiens
aaattgataaccgcgaaaataattggaactcctgcttgcaagtgtcaacctaaaaaaagtgcttcctt

SEQ ID NO: 173789 - DNA, 69 bp, Homo sapiens
taaccgcgaaaataattggaactcctgcttgcaagtgtcaacctaaaaaaagtgcttccttttgttatg

SEQ ID NO: 173790 - DNA, 70 bp, Homo sapiens
aataattggaactcctgcttgcaagtgtcaacctaaaaaaagtgcttccttttgttatggaagatgtctt

SEQ ID NO: 173791 - DNA, 74 bp, Homo sapiens
ctgcttgcaagtgtcaacctaaaaaaagtgcttccttttgttatggaagatgtctttctgtgattgacttcaat

SEQ ID NO: 173792 - DNA, 73 bp, Homo sapiens
agtgtcaacctaaaaaaagtgcttccttttgttatggaagatgtctttctgtgattgacttcaattgctgact

SEQ ID NO: 173793 - DNA, 78 bp, Homo sapiens
aaaaaagtgcttccttttgttatggaagatgtctttctgtgattgacttcaattgctgacttgtggagatgcagcgaa

SEQ ID NO: 173794 - DNA, 81 bp, Homo sapiens
ttccttttgttatggaagatgtctttctgtgattgacttcaattgctgacttgtggagatgcagcgaatgtgaaatcccac

SEQ ID NO: 173795 - DNA, 84 bp, Homo sapiens
ttatggaagatgtctttctgtgattgacttcaattgctgacttgtggagatgcagcgaatgtgaaatcccacgtatatgccatt

SEQ ID NO: 173796 - DNA, 83 bp, Homo sapiens
atgtctttctgtgattgacttcaattgctgacttgtggagatgcagcgaatgtgaaatcccacgtatatgccatttccctcta

SEQ ID NO: 173797 - DNA, 85 bp, Homo sapiens
tgtgattgacttcaattgctgacttgtggagatgcagcgaatgtgaaatcccacgtatatgccatttccctctacgctcgctgac

SEQ ID NO: 173798 - DNA, 80 bp, Homo sapiens
acttcaattgctgacttgtggagatgcagcgaatgtgaaatcccacgtatatgccatttccctctacgctcgctgaccgt

SEQ ID NO: 173799 - DNA, 79 bp, Homo sapiens
acttgtggagatgcagcgaatgtgaaatcccacgtatatgccatttccctctacgctcgctgaccgttctggaagatct

SEQ ID NO: 173800 - DNA, 78 bp, Homo sapiens
agatgcagcgaatgtgaaatcccacgtatatgccatttccctctacgctcgctgaccgttctggaagatcttgaaccc

SEQ ID NO: 173801 - DNA, 75 bp, Homo sapiens
aatgtgaaatcccacgtatatgccatttccctctacgctcgctgaccgttctggaagatcttgaaccctcttctg

SEQ ID NO: 173802 - DNA, 73 bp, Homo sapiens
tcccacgtatatgccatttccctctacgctcgctgaccgttctggaagatcttgaaccctcttctggaaaggg

SEQ ID NO: 173803 - DNA, 69 bp, Homo sapiens
atttccctctacgctcgctgaccgttctggaagatcttgaaccctcttctggaaaggggtacctattat

SEQ ID NO: 173804 - DNA, 70 bp, Homo sapiens
ctctacgctcgctgaccgttctggaagatcttgaaccctcttctggaaaggggtacctattattacttta

SEQ ID NO: 173805 - DNA, 69 bp, Homo sapiens
accgttctggaagatcttgaaccctcttctggaaaggggtacctattattactttatggggcagcagcc

SEQ ID NO: 173806 - DNA, 69 bp, Homo sapiens
aagatcttgaaccctcttctggaaaggggtacctattattactttatggggcagcagcctggaaaagta

SEQ ID NO: 173807 - DNA, 68 bp, Homo sapiens
ttctggaaaggggtacctattattactttatggggcagcagcctggaaaagtacttggggaccaaaga

SEQ ID NO: 173808 - DNA, 75 bp, Homo sapiens
gcagcagcctggaaaagtacttggggaccaaagaaggccaagcttgcctgccctgcattttatcaaaggagcagg

SEQ ID NO: 173809 - DNA, 72 bp, Homo sapiens
tggaaaagtacttggggaccaaagaaggccaagcttgcctgccctgcattttatcaaaggagcagggaagaa

SEQ ID NO: 173810 - DNA, 73 bp, Homo sapiens
agtacttggggaccaaagaaggccaagcttgcctgccctgcattttatcaaaggagcagggaagaaggaatca

SEQ ID NO: 173811 - DNA, 75 bp, Homo sapiens
accaaagaaggccaagcttgcctgccctgcattttatcaaaggagcagggaagaaggaatcatcgaggcatgggg

SEQ ID NO: 173812 - DNA, 78 bp, Homo sapiens
agcttgcctgccctgcattttatcaaaggagcagggaagaaggaatcatcgaggcatgggggtccacactgcaatgtt

SEQ ID NO: 173813 - DNA, 76 bp, Homo sapiens
ccctgcattttatcaaaggagcagggaagaaggaatcatcgaggcatgggggtccacactgcaatgtttttgtgga

SEQ ID NO: 173814 - DNA, 75 bp, Homo sapiens
attttatcaaaggagcagggaagaaggaatcatcgaggcatgggggtccacactgcaatgtttttgtggaacatg

SEQ ID NO: 173815 - DNA, 77 bp, Homo sapiens
gcagggaagaaggaatcatcgaggcatgggggtccacactgcaatgtttttgtggaacatggtgagtgcttttcaaa

SEQ ID NO: 173816 - DNA, 76 bp, Homo sapiens
atcgaggcatgggggtccacactgcaatgtttttgtggaacatggtgagtgcttttcaaaatttctgctcatggtt

SEQ ID NO: 173817 - DNA, 72 bp, Homo sapiens
aagatgcgggggtgtggggtttgtgttttgctgaagctgtggttgcaaatctttgctttaggatgaaaggtg

SEQ ID NO: 173818 - DNA, 74 bp, Homo sapiens
tggggtttgtgttttgctgaagctgtggttgcaaatctttgctttaggatgaaaggtggggctctctgttacat

SEQ ID NO: 173819 - DNA, 75 bp, Homo sapiens
tgttttgctgaagctgtggttgcaaatctttgctttaggatgaaaggtggggctctctgttacatttgaacctta

SEQ ID NO: 173820 - DNA, 73 bp, Homo sapiens
aagctgtggttgcaaatctttgctttaggatgaaaggtggggctctctgttacatttgaaccttagttgctac

SEQ ID NO: 173821 - DNA, 73 bp, Homo sapiens
caaatctttgctttaggatgaaaggtggggctctctgttacatttgaaccttagttgctactcctacctcaca

SEQ ID NO: 173822 - DNA, 72 bp, Homo sapiens
ctttaggatgaaaggtggggctctctgttacatttgaaccttagttgctactcctacctcacagctagtgtt

SEQ ID NO: 173823 - DNA, 71 bp, Homo sapiens
aaaggtggggctctctgttacatttgaaccttagttgctactcctacctcacagctagtgtttctttctct

SEQ ID NO: 173824 - DNA, 73 bp, Homo sapiens
ctctctgttacatttgaaccttagttgctactcctacctcacagctagtgtttctttctcttcataaaataaa

SEQ ID NO: 173825 - DNA, 73 bp, Homo sapiens
tgttacatttgaaccttagttgctactcctacctcacagctagtgtttctttctcttcataaaataaattgat

SEQ ID NO: 173826 - DNA, 71 bp, Homo sapiens
aaccttagttgctactcctacctcacagctagtgtttctttctcttcataaaataaattgatttcctggtc

SEQ ID NO: 173827 - DNA, 70 bp, Homo sapiens
tactcctacctcacagctagtgtttctttctcttcataaaataaattgatttcctggtcccttggaaaac

SEQ ID NO: 173828 - DNA, 70 bp, Homo sapiens
acctcacagctagtgtttctttctcttcataaaataaattgatttcctggtcccttggaaaacctccaga

SEQ ID NO: 173829 - DNA, 71 bp, Homo sapiens
tttctttctcttcataaaataaattgatttcctggtcccttggaaaacctccagactgctttctggaatca

SEQ ID NO: 173830 - DNA, 74 bp, Homo sapiens
ttcataaaataaattgatttcctggtcccttggaaaacctccagactgctttctggaatcattttcatatagca

SEQ ID NO: 173831 - DNA, 74 bp, Homo sapiens
taaattgatttcctggtcccttggaaaacctccagactgctttctggaatcattttcatatagcatgtttgtta

SEQ ID NO: 173832 - DNA, 73 bp, Homo sapiens
atttcctggtcccttggaaaacctccagactgctttctggaatcattttcatatagcatgtttgttaatttga

SEQ ID NO: 173833 - DNA, 78 bp, Homo sapiens
ttggaaaacctccagactgctttctggaatcattttcatatagcatgtttgttaatttgagctcttgactgagtccca

SEQ ID NO: 173834 - DNA, 81 bp, Homo sapiens
acctccagactgctttctggaatcattttcatatagcatgtttgttaatttgagctcttgactgagtcccagtgagatgta

SEQ ID NO: 173835 - DNA, 82 bp, Homo sapiens
tttctggaatcattttcatatagcatgtttgttaatttgagctcttgactgagtcccagtgagatgtaggcaggaacacaga

SEQ ID NO: 173836 - DNA, 82 bp, Homo sapiens
aatcattttcatatagcatgtttgttaatttgagctcttgactgagtcccagtgagatgtaggcaggaacacagacctgata

SEQ ID NO: 173837 - DNA, 81 bp, Homo sapiens
atatagcatgtttgttaatttgagctcttgactgagtcccagtgagatgtaggcaggaacacagacctgatacagaaatag

SEQ ID NO: 173838 - DNA, 78 bp, Homo sapiens
tttgttaatttgagctcttgactgagtcccagtgagatgtaggcaggaacacagacctgatacagaaatagtcctctt

SEQ ID NO: 173839 - DNA, 79 bp, Homo sapiens
ttgagctcttgactgagtcccagtgagatgtaggcaggaacacagacctgatacagaaatagtcctcttttggaaataa

SEQ ID NO: 173840 - DNA, 77 bp, Homo sapiens
actgagtcccagtgagatgtaggcaggaacacagacctgatacagaaatagtcctcttttggaaataacaatagcta

SEQ ID NO: 173841 - DNA, 76 bp, Homo sapiens
agtgagatgtaggcaggaacacagacctgatacagaaatagtcctcttttggaaataacaatagctactgtttatc

SEQ ID NO: 173842 - DNA, 74 bp, Homo sapiens
aggaacacagacctgatacagaaatagtcctcttttggaaataacaatagctactgtttatcgagcaccttctg

SEQ ID NO: 173843 - DNA, 75 bp, Homo sapiens
acagacctgatacagaaatagtcctcttttggaaataacaatagctactgtttatcgagcaccttctgtgctttg

SEQ ID NO: 173844 - DNA, 75 bp, Homo sapiens
atacagaaatagtcctcttttggaaataacaatagctactgtttatcgagcaccttctgtgctttgggcactctc

SEQ ID NO: 173845 - DNA, 76 bp, Homo sapiens
tcttttggaaataacaatagctactgtttatcgagcaccttctgtgctttgggcactctccctacatgattcctaa

SEQ ID NO: 173846 - DNA, 76 bp, Homo sapiens
aatagctactgtttatcgagcaccttctgtgctttgggcactctccctacatgattcctaatcttcataataaccc

SEQ ID NO: 173847 - DNA, 78 bp, Homo sapiens
tttatcgagcaccttctgtgctttgggcactctccctacatgattcctaatcttcataataaccctgtgagataacta

SEQ ID NO: 173848 - DNA, 78 bp, Homo sapiens
ttctgtgctttgggcactctccctacatgattcctaatcttcataataaccctgtgagataactactcttatgactac

SEQ ID NO: 173849 - DNA, 76 bp, Homo sapiens
tgggcactctccctacatgattcctaatcttcataataaccctgtgagataactactcttatgactacctcccatt

SEQ ID NO: 173850 - DNA, 75 bp, Homo sapiens
ctctccctacatgattcctaatcttcataataaccctgtgagataactactcttatgactacctcccatttttca

SEQ ID NO: 173851 - DNA, 75 bp, Homo sapiens
atgattcctaatcttcataataaccctgtgagataactactcttatgactacctcccatttttcagatgagaaaa

SEQ ID NO: 173852 - DNA, 82 bp, Homo sapiens
atttttcagatgagaaaattgaggctctgagaggtgaagtcgttgcccatggccccacagtgagtggcagatctgagactca

SEQ ID NO: 173853 - DNA, 82 bp, Homo sapiens
gaaaattgaggctctgagaggtgaagtcgttgcccatggccccacagtgagtggcagatctgagactcagcgctagcctttg

SEQ ID NO: 173854 - DNA, 85 bp, Homo sapiens
gctctgagaggtgaagtcgttgcccatggccccacagtgagtggcagatctgagactcagcgctagcctttgtgacacataactc

SEQ ID NO: 173855 - DNA, 83 bp, Homo sapiens
agaggtgaagtcgttgcccatggccccacagtgagtggcagatctgagactcagcgctagcctttgtgacacataactcgtga

SEQ ID NO: 173856 - DNA, 86 bp, Homo sapiens
ttgcccatggccccacagtgagtggcagatctgagactcagcgctagcctttgtgacacataactcgtgaccagcaggtagtgcta

SEQ ID NO: 173857 - DNA, 84 bp, Homo sapiens
cccacagtgagtggcagatctgagactcagcgctagcctttgtgacacataactcgtgaccagcaggtagtgctacccgattga

SEQ ID NO: 173858 - DNA, 81 bp, Homo sapiens
agatctgagactcagcgctagcctttgtgacacataactcgtgaccagcaggtagtgctacccgattgaaaaaatgtgaga

SEQ ID NO: 173859 - DNA, 77 bp, Homo sapiens
ctcagcgctagcctttgtgacacataactcgtgaccagcaggtagtgctacccgattgaaaaaatgtgagacttaaa

SEQ ID NO: 173860 - DNA, 78 bp, Homo sapiens
tttgtgacacataactcgtgaccagcaggtagtgctacccgattgaaaaaatgtgagacttaaagggatgcatgtgtc

SEQ ID NO: 173861 - DNA, 76 bp, Homo sapiens
acataactcgtgaccagcaggtagtgctacccgattgaaaaaatgtgagacttaaagggatgcatgtgtccctata

SEQ ID NO: 173862 - DNA, 75 bp, Homo sapiens
accagcaggtagtgctacccgattgaaaaaatgtgagacttaaagggatgcatgtgtccctatacagtggcaaaa

SEQ ID NO: 173863 - DNA, 76 bp, Homo sapiens
tagtgctacccgattgaaaaaatgtgagacttaaagggatgcatgtgtccctatacagtggcaaaaactggtatga

SEQ ID NO: 173864 - DNA, 76 bp, Homo sapiens
ttgaaaaaatgtgagacttaaagggatgcatgtgtccctatacagtggcaaaaactggtatgacagaagtgatgtt

SEQ ID NO: 173865 - DNA, 75 bp, Homo sapiens
aaaatgtgagacttaaagggatgcatgtgtccctatacagtggcaaaaactggtatgacagaagtgatgttttaa

SEQ ID NO: 173866 - DNA, 76 bp, Homo sapiens
aagggatgcatgtgtccctatacagtggcaaaaactggtatgacagaagtgatgttttaagctatgttatccttta

SEQ ID NO: 173867 - DNA, 76 bp, Homo sapiens
tgtgtccctatacagtggcaaaaactggtatgacagaagtgatgttttaagctatgttatcctttagttggacata

SEQ ID NO: 173868 - DNA, 76 bp, Homo sapiens
tatacagtggcaaaaactggtatgacagaagtgatgttttaagctatgttatcctttagttggacatacactggac

SEQ ID NO: 173869 - DNA, 75 bp, Homo sapiens
aaaactggtatgacagaagtgatgttttaagctatgttatcctttagttggacatacactggacccacagagcta

SEQ ID NO: 173870 - DNA, 77 bp, Homo sapiens
gtatgacagaagtgatgttttaagctatgttatcctttagttggacatacactggacccacagagctagagtacctg

SEQ ID NO: 173871 - DNA, 76 bp, Homo sapiens
acagaagtgatgttttaagctatgttatcctttagttggacatacactggacccacagagctagagtacctggcag

SEQ ID NO: 173872 - DNA, 76 bp, Homo sapiens
agtgatgttttaagctatgttatcctttagttggacatacactggacccacagagctagagtacctggcaggctct

SEQ ID NO: 173873 - DNA, 78 bp, Homo sapiens
tttaagctatgttatcctttagttggacatacactggacccacagagctagagtacctggcaggctcttgctggacaa

SEQ ID NO: 173874 - DNA, 79 bp, Homo sapiens
gttatcctttagttggacatacactggacccacagagctagagtacctggcaggctcttgctggacaatgtttgctgaa

SEQ ID NO: 173875 - DNA, 80 bp, Homo sapiens
acatacactggacccacagagctagagtacctggcaggctcttgctggacaatgtttgctgaatcagagaaagtgggctt

SEQ ID NO: 173876 - DNA, 82 bp, Homo sapiens
ctagagtacctggcaggctcttgctggacaatgtttgctgaatcagagaaagtgggctttgttggcatttgcatgtgaaata

SEQ ID NO: 173877 - DNA, 82 bp, Homo sapiens
ctggacaatgtttgctgaatcagagaaagtgggctttgttggcatttgcatgtgaaatactgtgcacatacctcaagatctt

SEQ ID NO: 173878 - DNA, 78 bp, Homo sapiens
aatcagagaaagtgggctttgttggcatttgcatgtgaaatactgtgcacatacctcaagatctttgctgttcccccc

SEQ ID NO: 173879 - DNA, 75 bp, Homo sapiens
aaagtgggctttgttggcatttgcatgtgaaatactgtgcacatacctcaagatctttgctgttccccccctaaa

SEQ ID NO: 173880 - DNA, 81 bp, Homo sapiens
ttgttggcatttgcatgtgaaatactgtgcacatacctcaagatctttgctgttccccccctaaagctactagctatgctg

SEQ ID NO: 173881 - DNA, 78 bp, Homo sapiens
atgtgaaatactgtgcacatacctcaagatctttgctgttccccccctaaagctactagctatgctggaaacagtgaa

SEQ ID NO: 173882 - DNA, 73 bp, Homo sapiens
atctttgctgttccccccctaaagctactagctatgctggaaacagtgaaggggtcagccagacctggggtca

SEQ ID NO: 173883 - DNA, 71 bp, Homo sapiens
cccccctaaagctactagctatgctggaaacagtgaaggggtcagccagacctggggtcaccttgtcctgg

SEQ ID NO: 173884 - DNA, 73 bp, Homo sapiens
taaagctactagctatgctggaaacagtgaaggggtcagccagacctggggtcaccttgtcctggggtcccaa

SEQ ID NO: 173885 - DNA, 74 bp, Homo sapiens
tagctatgctggaaacagtgaaggggtcagccagacctggggtcaccttgtcctggggtcccaagccaggcctc

SEQ ID NO: 173886 - DNA, 70 bp, Homo sapiens
aacagtgaaggggtcagccagacctggggtcaccttgtcctggggtcccaagccaggcctcctgtcaggt

SEQ ID NO: 173887 - DNA, 76 bp, Homo sapiens
gtcagccagacctggggtcaccttgtcctggggtcccaagccaggcctcctgtcaggttcatctgtctctgttcca

SEQ ID NO: 173888 - DNA, 75 bp, Homo sapiens
agacctggggtcaccttgtcctggggtcccaagccaggcctcctgtcaggttcatctgtctctgttccacctgca

SEQ ID NO: 173889 - DNA, 76 bp, Homo sapiens
accttgtcctggggtcccaagccaggcctcctgtcaggttcatctgtctctgttccacctgcactcacacccagtc

SEQ ID NO: 173890 - DNA, 83 bp, Homo sapiens
gggtcccaagccaggcctcctgtcaggttcatctgtctctgttccacctgcactcacacccagtcttgctgctgagagatgga

SEQ ID NO: 173891 - DNA, 87 bp, Homo sapiens
aagccaggcctcctgtcaggttcatctgtctctgttccacctgcactcacacccagtcttgctgctgagagatggagcatccacatc

SEQ ID NO: 173892 - DNA, 87 bp, Homo sapiens
cctcctgtcaggttcatctgtctctgttccacctgcactcacacccagtcttgctgctgagagatggagcatccacatcctgaatcc

SEQ ID NO: 173893 - DNA, 87 bp, Homo sapiens
ggttcatctgtctctgttccacctgcactcacacccagtcttgctgctgagagatggagcatccacatcctgaatcctgcctccttc

SEQ ID NO: 173894 - DNA, 85 bp, Homo sapiens
tgttccacctgcactcacacccagtcttgctgctgagagatggagcatccacatcctgaatcctgcctccttcccttgacacact

SEQ ID NO: 173895 - DNA, 85 bp, Homo sapiens
acctgcactcacacccagtcttgctgctgagagatggagcatccacatcctgaatcctgcctccttcccttgacacacttctatg

SEQ ID NO: 173896 - DNA, 83 bp, Homo sapiens
acacccagtcttgctgctgagagatggagcatccacatcctgaatcctgcctccttcccttgacacacttctatggtgggtgc

SEQ ID NO: 173897 - DNA, 81 bp, Homo sapiens
tgctgagagatggagcatccacatcctgaatcctgcctccttcccttgacacacttctatggtgggtgcctgcccaacttt

SEQ ID NO: 173898 - DNA, 77 bp, Homo sapiens
tggagcatccacatcctgaatcctgcctccttcccttgacacacttctatggtgggtgcctgcccaactttttctta

SEQ ID NO: 173899 - DNA, 74 bp, Homo sapiens
atccacatcctgaatcctgcctccttcccttgacacacttctatggtgggtgcctgcccaactttttcttaata

SEQ ID NO: 173900 - DNA, 70 bp, Homo sapiens
atcctgcctccttcccttgacacacttctatggtgggtgcctgcccaactttttcttaataggactaaat

SEQ ID NO: 173901 - DNA, 69 bp, Homo sapiens
ttcccttgacacacttctatggtgggtgcctgcccaactttttcttaataggactaaattccaaattaa

SEQ ID NO: 173902 - DNA, 67 bp, Homo sapiens
gacacacttctatggtgggtgcctgcccaactttttcttaataggactaaattccaaattaaaaaaa

SEQ ID NO: 173903 - DNA, 70 bp, Homo sapiens
taaaaaaaaaattcagtctctctcctctaatcatccaagaagagtcctcttttggtaacttgttctagaa

SEQ ID NO: 173904 - DNA, 75 bp, Homo sapiens
attcagtctctctcctctaatcatccaagaagagtcctcttttggtaacttgttctagaactatgcctatcttaa

SEQ ID NO: 173905 - DNA, 74 bp, Homo sapiens
tctcctctaatcatccaagaagagtcctcttttggtaacttgttctagaactatgcctatcttaaattcagaaa

SEQ ID NO: 173906 - DNA, 73 bp, Homo sapiens
ctaatcatccaagaagagtcctcttttggtaacttgttctagaactatgcctatcttaaattcagaaattgct

SEQ ID NO: 173907 - DNA, 70 bp, Homo sapiens
cctcttttggtaacttgttctagaactatgcctatcttaaattcagaaattgctttcaaatgaattaaat

SEQ ID NO: 173908 - DNA, 73 bp, Homo sapiens
tgttctagaactatgcctatcttaaattcagaaattgctttcaaatgaattaaattttagaaatatccattcc

SEQ ID NO: 173909 - DNA, 72 bp, Homo sapiens
ctatgcctatcttaaattcagaaattgctttcaaatgaattaaattttagaaatatccattcctgttcgtcc

SEQ ID NO: 173910 - DNA, 71 bp, Homo sapiens
tcttaaattcagaaattgctttcaaatgaattaaattttagaaatatccattcctgttcgtcctattccca

SEQ ID NO: 173911 - DNA, 71 bp, Homo sapiens
attcagaaattgctttcaaatgaattaaattttagaaatatccattcctgttcgtcctattcccagtgaaa

SEQ ID NO: 173912 - DNA, 71 bp, Homo sapiens
tcaaatgaattaaattttagaaatatccattcctgttcgtcctattcccagtgaaaataagcaactcttcc

SEQ ID NO: 173913 - DNA, 70 bp, Homo sapiens
taaattttagaaatatccattcctgttcgtcctattcccagtgaaaataagcaactcttccctcttccaa

SEQ ID NO: 173914 - DNA, 70 bp, Homo sapiens
tttagaaatatccattcctgttcgtcctattcccagtgaaaataagcaactcttccctcttccaaaacag

SEQ ID NO: 173915 - DNA, 68 bp, Homo sapiens
attcctgttcgtcctattcccagtgaaaataagcaactcttccctcttccaaaacagtggatttcttt

SEQ ID NO: 173916 - DNA, 67 bp, Homo sapiens
ttcgtcctattcccagtgaaaataagcaactcttccctcttccaaaacagtggatttcttttctttt

SEQ ID NO: 173917 - DNA, 84 bp, Homo sapiens
aggcgtgagctactgtgtctggcccccaaacagtggatttccatcttacatatgcatacagatcatctgggagcttcagatcca

SEQ ID NO: 173918 - DNA, 84 bp, Homo sapiens
tactgtgtctggcccccaaacagtggatttccatcttacatatgcatacagatcatctgggagcttcagatccagcccattaca

SEQ ID NO: 173919 - DNA, 85 bp, Homo sapiens
tggcccccaaacagtggatttccatcttacatatgcatacagatcatctgggagcttcagatccagcccattacacatattctga

SEQ ID NO: 173920 - DNA, 86 bp, Homo sapiens
aacagtggatttccatcttacatatgcatacagatcatctgggagcttcagatccagcccattacacatattctgattctagacta

SEQ ID NO: 173921 - DNA, 85 bp, Homo sapiens
tttccatcttacatatgcatacagatcatctgggagcttcagatccagcccattacacatattctgattctagactagaaaccaa

SEQ ID NO: 173922 - DNA, 84 bp, Homo sapiens
tatgcatacagatcatctgggagcttcagatccagcccattacacatattctgattctagactagaaaccaagactccgcattt

SEQ ID NO: 173923 - DNA, 81 bp, Homo sapiens
tacagatcatctgggagcttcagatccagcccattacacatattctgattctagactagaaaccaagactccgcattttaa

SEQ ID NO: 173924 - DNA, 79 bp, Homo sapiens
tctgggagcttcagatccagcccattacacatattctgattctagactagaaaccaagactccgcattttaagcaagcc

SEQ ID NO: 173925 - DNA, 77 bp, Homo sapiens
atccagcccattacacatattctgattctagactagaaaccaagactccgcattttaagcaagccccacattattca

SEQ ID NO: 173926 - DNA, 75 bp, Homo sapiens
ccattacacatattctgattctagactagaaaccaagactccgcattttaagcaagccccacattattcaaaata

SEQ ID NO: 173927 - DNA, 75 bp, Homo sapiens
atattctgattctagactagaaaccaagactccgcattttaagcaagccccacattattcaaaatagattgtcca

SEQ ID NO: 173928 - DNA, 73 bp, Homo sapiens
actagaaaccaagactccgcattttaagcaagccccacattattcaaaatagattgtccatggattatgcttt

SEQ ID NO: 173929 - DNA, 73 bp, Homo sapiens
aaaccaagactccgcattttaagcaagccccacattattcaaaatagattgtccatggattatgcttttagaa

SEQ ID NO: 173930 - DNA, 74 bp, Homo sapiens
aagactccgcattttaagcaagccccacattattcaaaatagattgtccatggattatgcttttagaaacattg

SEQ ID NO: 173931 - DNA, 76 bp, Homo sapiens
cattttaagcaagccccacattattcaaaatagattgtccatggattatgcttttagaaacattgttcagatccca

SEQ ID NO: 173932 - DNA, 78 bp, Homo sapiens
taagcaagccccacattattcaaaatagattgtccatggattatgcttttagaaacattgttcagatcccatgcttta

SEQ ID NO: 173933 - DNA, 76 bp, Homo sapiens
agccccacattattcaaaatagattgtccatggattatgcttttagaaacattgttcagatcccatgctttaatgt

SEQ ID NO: 173934 - DNA, 76 bp, Homo sapiens
cccacattattcaaaatagattgtccatggattatgcttttagaaacattgttcagatcccatgctttaatgttgg

SEQ ID NO: 173935 - DNA, 75 bp, Homo sapiens
tattcaaaatagattgtccatggattatgcttttagaaacattgttcagatcccatgctttaatgttggggagtt

SEQ ID NO: 173936 - DNA, 76 bp, Homo sapiens
tcaaaatagattgtccatggattatgcttttagaaacattgttcagatcccatgctttaatgttggggagtttatc

SEQ ID NO: 173937 - DNA, 74 bp, Homo sapiens
aaatagattgtccatggattatgcttttagaaacattgttcagatcccatgctttaatgttggggagtttatcc

SEQ ID NO: 173938 - DNA, 74 bp, Homo sapiens
agattgtccatggattatgcttttagaaacattgttcagatcccatgctttaatgttggggagtttatcctttc

SEQ ID NO: 173939 - DNA, 71 bp, Homo sapiens
ggattatgcttttagaaacattgttcagatcccatgctttaatgttggggagtttatcctttccttctaaa

SEQ ID NO: 173940 - DNA, 68 bp, Homo sapiens
ttttagaaacattgttcagatcccatgctttaatgttggggagtttatcctttccttctaaatatttt

SEQ ID NO: 173941 - DNA, 65 bp, Homo sapiens
attgttcagatcccatgctttaatgttggggagtttatcctttccttctaaatattttttttttt

SEQ ID NO: 173942 - DNA, 68 bp, Homo sapiens
aaaaatcttaaatagctctagttccctgaattattttctcctaagacatgttttcccaacagttaatg

SEQ ID NO: 173943 - DNA, 69 bp, Homo sapiens
cttaaatagctctagttccctgaattattttctcctaagacatgttttcccaacagttaatgttactta

SEQ ID NO: 173944 - DNA, 70 bp, Homo sapiens
ctctagttccctgaattattttctcctaagacatgttttcccaacagttaatgttacttatttcatcttc

SEQ ID NO: 173945 - DNA, 74 bp, Homo sapiens
ttattttctcctaagacatgttttcccaacagttaatgttacttatttcatcttctgatcttactcatattatc

SEQ ID NO: 173946 - DNA, 73 bp, Homo sapiens
ctcctaagacatgttttcccaacagttaatgttacttatttcatcttctgatcttactcatattatccacctt

SEQ ID NO: 173947 - DNA, 73 bp, Homo sapiens
acatgttttcccaacagttaatgttacttatttcatcttctgatcttactcatattatccacctttcacttaa

SEQ ID NO: 173948 - DNA, 72 bp, Homo sapiens
ccaacagttaatgttacttatttcatcttctgatcttactcatattatccacctttcacttaaattggaaat

SEQ ID NO: 173949 - DNA, 73 bp, Homo sapiens
atgttacttatttcatcttctgatcttactcatattatccacctttcacttaaattggaaattttctgccatt

SEQ ID NO: 173950 - DNA, 74 bp, Homo sapiens
ttcatcttctgatcttactcatattatccacctttcacttaaattggaaattttctgccattttacaaagttca

SEQ ID NO: 173951 - DNA, 69 bp, Homo sapiens
cttactcatattatccacctttcacttaaattggaaattttctgccattttacaaagttcaagactttc

SEQ ID NO: 173952 - DNA, 67 bp, Homo sapiens
tatccacctttcacttaaattggaaattttctgccattttacaaagttcaagactttcctaccttcc

SEQ ID NO: 173953 - DNA, 67 bp, Homo sapiens
ttcacttaaattggaaattttctgccattttacaaagttcaagactttcctaccttcctacctcctg

SEQ ID NO: 173954 - DNA, 70 bp, Homo sapiens
taaattggaaattttctgccattttacaaagttcaagactttcctaccttcctacctcctggctgtgtga

SEQ ID NO: 173955 - DNA, 72 bp, Homo sapiens
tttctgccattttacaaagttcaagactttcctaccttcctacctcctggctgtgtgaacttggacagaata

SEQ ID NO: 173956 - DNA, 70 bp, Homo sapiens
gttcaagactttcctaccttcctacctcctggctgtgtgaacttggacagaatacttccccctctccctc

SEQ ID NO: 173957 - DNA, 71 bp, Homo sapiens
taccttcctacctcctggctgtgtgaacttggacagaatacttccccctctccctccagtcagttttctta

SEQ ID NO: 173958 - DNA, 72 bp, Homo sapiens
tacctcctggctgtgtgaacttggacagaatacttccccctctccctccagtcagttttcttacttgtgaaa

SEQ ID NO: 173959 - DNA, 70 bp, Homo sapiens
tgtgaacttggacagaatacttccccctctccctccagtcagttttcttacttgtgaaatggaattaaac

SEQ ID NO: 173960 - DNA, 68 bp, Homo sapiens
ttccccctctccctccagtcagttttcttacttgtgaaatggaattaaactatacaaaatcattaggt

SEQ ID NO: 173961 - DNA, 71 bp, Homo sapiens
ctctccctccagtcagttttcttacttgtgaaatggaattaaactatacaaaatcattaggttactgtgag

SEQ ID NO: 173962 - DNA, 71 bp, Homo sapiens
cagttttcttacttgtgaaatggaattaaactatacaaaatcattaggttactgtgaggcttaagagtgcc

SEQ ID NO: 173963 - DNA, 75 bp, Homo sapiens
tcttacttgtgaaatggaattaaactatacaaaatcattaggttactgtgaggcttaagagtgcctggcacatat

SEQ ID NO: 173964 - DNA, 76 bp, Homo sapiens
ggaattaaactatacaaaatcattaggttactgtgaggcttaagagtgcctggcacatattacatgcacattaaaa

SEQ ID NO: 173965 - DNA, 77 bp, Homo sapiens
actatacaaaatcattaggttactgtgaggcttaagagtgcctggcacatattacatgcacattaaaaatgtatttc

SEQ ID NO: 173966 - DNA, 76 bp, Homo sapiens
aaaatcattaggttactgtgaggcttaagagtgcctggcacatattacatgcacattaaaaatgtatttcttccca

SEQ ID NO: 173967 - DNA, 79 bp, Homo sapiens
ttactgtgaggcttaagagtgcctggcacatattacatgcacattaaaaatgtatttcttcccaaactaatgcaacata

SEQ ID NO: 173968 - DNA, 78 bp, Homo sapiens
taagagtgcctggcacatattacatgcacattaaaaatgtatttcttcccaaactaatgcaacatagcaaacaagtta

SEQ ID NO: 173969 - DNA, 78 bp, Homo sapiens
tggcacatattacatgcacattaaaaatgtatttcttcccaaactaatgcaacatagcaaacaagttagttcacagtc

SEQ ID NO: 173970 - DNA, 75 bp, Homo sapiens
catattacatgcacattaaaaatgtatttcttcccaaactaatgcaacatagcaaacaagttagttcacagtctt

SEQ ID NO: 173971 - DNA, 72 bp, Homo sapiens
gcacattaaaaatgtatttcttcccaaactaatgcaacatagcaaacaagttagttcacagtctttaatttc

SEQ ID NO: 173972 - DNA, 69 bp, Homo sapiens
aatgtatttcttcccaaactaatgcaacatagcaaacaagttagttcacagtctttaatttctttcctt

SEQ ID NO: 173973 - DNA, 67 bp, Homo sapiens
ttccttttccctttctttttagctaatagcttttgggtcttaggctgattagaaggaatccttcttg

SEQ ID NO: 173974 - DNA, 69 bp, Homo sapiens
tttctttttagctaatagcttttgggtcttaggctgattagaaggaatccttcttggggtgttcttctg

SEQ ID NO: 173975 - DNA, 72 bp, Homo sapiens
ttaggctgattagaaggaatccttcttggggtgttcttctggtaagaagattgaagctctcctttatttgct

SEQ ID NO: 173976 - DNA, 74 bp, Homo sapiens
tcttggggtgttcttctggtaagaagattgaagctctcctttatttgcttgtaacagaatgctcttcgtatctt

SEQ ID NO: 173977 - DNA, 74 bp, Homo sapiens
ggtgttcttctggtaagaagattgaagctctcctttatttgcttgtaacagaatgctcttcgtatctttcaaaa

SEQ ID NO: 173978 - DNA, 74 bp, Homo sapiens
ctggtaagaagattgaagctctcctttatttgcttgtaacagaatgctcttcgtatctttcaaaagcgtcaaaa

SEQ ID NO: 173979 - DNA, 76 bp, Homo sapiens
attgaagctctcctttatttgcttgtaacagaatgctcttcgtatctttcaaaagcgtcaaaagctggatatggaa

SEQ ID NO: 173980 - DNA, 74 bp, Homo sapiens
ctcctttatttgcttgtaacagaatgctcttcgtatctttcaaaagcgtcaaaagctggatatggaaagtatag

SEQ ID NO: 173981 - DNA, 76 bp, Homo sapiens
ttgtaacagaatgctcttcgtatctttcaaaagcgtcaaaagctggatatggaaagtataggccaggtttgataca

SEQ ID NO: 173982 - DNA, 75 bp, Homo sapiens
aatgctcttcgtatctttcaaaagcgtcaaaagctggatatggaaagtataggccaggtttgatacagaagtgta

SEQ ID NO: 173983 - DNA, 72 bp, Homo sapiens
aaaagctggatatggaaagtataggccaggtttgatacagaagtgtagtttggcagttttttcagtatccat

SEQ ID NO: 173984 - DNA, 73 bp, Homo sapiens
aaagtataggccaggtttgatacagaagtgtagtttggcagttttttcagtatccattgccactaattcagta

SEQ ID NO: 173985 - DNA, 73 bp, Homo sapiens
ataggccaggtttgatacagaagtgtagtttggcagttttttcagtatccattgccactaattcagtattttg

SEQ ID NO: 173986 - DNA, 78 bp, Homo sapiens
tgatacagaagtgtagtttggcagttttttcagtatccattgccactaattcagtattttgttagatctgttgatgta

SEQ ID NO: 173987 - DNA, 74 bp, Homo sapiens
aagtgtagtttggcagttttttcagtatccattgccactaattcagtattttgttagatctgttgatgtatggt

SEQ ID NO: 173988 - DNA, 75 bp, Homo sapiens
tggcagttttttcagtatccattgccactaattcagtattttgttagatctgttgatgtatggttttataactaa

SEQ ID NO: 173989 - DNA, 73 bp, Homo sapiens
ttcagtatccattgccactaattcagtattttgttagatctgttgatgtatggttttataactaaaattaaaa

SEQ ID NO: 173990 - DNA, 69 bp, Homo sapiens
tcagtattttgttagatctgttgatgtatggttttataactaaaattaaaaagatttgggtacagttta

SEQ ID NO: 173991 - DNA, 70 bp, Homo sapiens
ttgttagatctgttgatgtatggttttataactaaaattaaaaagatttgggtacagtttataagcatta

SEQ ID NO: 173992 - DNA, 69 bp, Homo sapiens
tgttgatgtatggttttataactaaaattaaaaagatttgggtacagtttataagcattattcatttta

SEQ ID NO: 173993 - DNA, 66 bp, Homo sapiens
tggttttataactaaaattaaaaagatttgggtacagtttataagcattattcattttaagaggat

SEQ ID NO: 173994 - DNA, 69 bp, Homo sapiens
aattaaaaagatttgggtacagtttataagcattattcattttaagaggatttaagaggataagatcat

SEQ ID NO: 173995 - DNA, 73 bp, Homo sapiens
gatttgggtacagtttataagcattattcattttaagaggatttaagaggataagatcattttagactcaaga

SEQ ID NO: 173996 - DNA, 75 bp, Homo sapiens
ggtacagtttataagcattattcattttaagaggatttaagaggataagatcattttagactcaagagcagaata

SEQ ID NO: 173997 - DNA, 75 bp, Homo sapiens
ataagcattattcattttaagaggatttaagaggataagatcattttagactcaagagcagaatattagtaataa

SEQ ID NO: 173998 - DNA, 74 bp, Homo sapiens
ttcattttaagaggatttaagaggataagatcattttagactcaagagcagaatattagtaataataattagct

SEQ ID NO: 173999 - DNA, 72 bp, Homo sapiens
gaggatttaagaggataagatcattttagactcaagagcagaatattagtaataataattagcttaaaaaaa

SEQ ID NO: 174000 - DNA, 73 bp, Homo sapiens
gaggataagatcattttagactcaagagcagaatattagtaataataattagcttaaaaaaataaacatatac

SEQ ID NO: 174001 - DNA, 73 bp, Homo sapiens
gagcagaatattagtaataataattagcttaaaaaaataaacatataccaatataaagaacagcacaaggcaa

SEQ ID NO: 174002 - DNA, 72 bp, Homo sapiens
ttagtaataataattagcttaaaaaaataaacatataccaatataaagaacagcacaaggcaagcaaatatc

SEQ ID NO: 174003 - DNA, 73 bp, Homo sapiens
taattagcttaaaaaaataaacatataccaatataaagaacagcacaaggcaagcaaatatctgggcctatat

SEQ ID NO: 174004 - DNA, 72 bp, Homo sapiens
aaaaaaataaacatataccaatataaagaacagcacaaggcaagcaaatatctgggcctatattaacagacg

SEQ ID NO: 174005 - DNA, 75 bp, Homo sapiens
ataaacatataccaatataaagaacagcacaaggcaagcaaatatctgggcctatattaacagacggtattcaag

SEQ ID NO: 174006 - DNA, 76 bp, Homo sapiens
atataaagaacagcacaaggcaagcaaatatctgggcctatattaacagacggtattcaaggatatggctagaatt

SEQ ID NO: 174007 - DNA, 75 bp, Homo sapiens
aacagcacaaggcaagcaaatatctgggcctatattaacagacggtattcaaggatatggctagaatttccaaaa

SEQ ID NO: 174008 - DNA, 75 bp, Homo sapiens
tatctgggcctatattaacagacggtattcaaggatatggctagaatttccaaaatgcctaataatgtgtaattc

SEQ ID NO: 174009 - DNA, 75 bp, Homo sapiens
gcctatattaacagacggtattcaaggatatggctagaatttccaaaatgcctaataatgtgtaattcttggcat

SEQ ID NO: 174010 - DNA, 73 bp, Homo sapiens
acggtattcaaggatatggctagaatttccaaaatgcctaataatgtgtaattcttggcattaagccgccaat

SEQ ID NO: 174011 - DNA, 76 bp, Homo sapiens
ttcaaggatatggctagaatttccaaaatgcctaataatgtgtaattcttggcattaagccgccaatttgaatatg

SEQ ID NO: 174012 - DNA, 72 bp, Homo sapiens
ctagaatttccaaaatgcctaataatgtgtaattcttggcattaagccgccaatttgaatatggccctttaa

SEQ ID NO: 174013 - DNA, 75 bp, Homo sapiens
ttccaaaatgcctaataatgtgtaattcttggcattaagccgccaatttgaatatggccctttaatatgaaatgc

SEQ ID NO: 174014 - DNA, 77 bp, Homo sapiens
taatgtgtaattcttggcattaagccgccaatttgaatatggccctttaatatgaaatgctatataatgacagactt

SEQ ID NO: 174015 - DNA, 77 bp, Homo sapiens
ttcttggcattaagccgccaatttgaatatggccctttaatatgaaatgctatataatgacagactttattatagtc

SEQ ID NO: 174016 - DNA, 76 bp, Homo sapiens
atttgaatatggccctttaatatgaaatgctatataatgacagactttattatagtctgatccaaggcccctgaac

SEQ ID NO: 174017 - DNA, 75 bp, Homo sapiens
aatatggccctttaatatgaaatgctatataatgacagactttattatagtctgatccaaggcccctgaactttc

SEQ ID NO: 174018 - DNA, 73 bp, Homo sapiens
aatgctatataatgacagactttattatagtctgatccaaggcccctgaactttccaaaagggcaacaaaaca

SEQ ID NO: 174019 - DNA, 72 bp, Homo sapiens
acagactttattatagtctgatccaaggcccctgaactttccaaaagggcaacaaaacagacagatactgta

SEQ ID NO: 174020 - DNA, 70 bp, Homo sapiens
tttattatagtctgatccaaggcccctgaactttccaaaagggcaacaaaacagacagatactgtatttt

SEQ ID NO: 174021 - DNA, 70 bp, Homo sapiens
ctgaactttccaaaagggcaacaaaacagacagatactgtattttttcactagttggtactggtggcacc

SEQ ID NO: 174022 - DNA, 68 bp, Homo sapiens
tttccaaaagggcaacaaaacagacagatactgtattttttcactagttggtactggtggcacccttt

SEQ ID NO: 174023 - DNA, 69 bp, Homo sapiens
acaaaacagacagatactgtattttttcactagttggtactggtggcacccttttgagtgttatttttg

SEQ ID NO: 174024 - DNA, 70 bp, Homo sapiens
tattttttcactagttggtactggtggcacccttttgagtgttatttttggcattacgtgtagaggttga

SEQ ID NO: 174025 - DNA, 73 bp, Homo sapiens
ttcactagttggtactggtggcacccttttgagtgttatttttggcattacgtgtagaggttgacagattcaa

SEQ ID NO: 174026 - DNA, 73 bp, Homo sapiens
tactggtggcacccttttgagtgttatttttggcattacgtgtagaggttgacagattcaagacaacactaaa

SEQ ID NO: 174027 - DNA, 73 bp, Homo sapiens
acccttttgagtgttatttttggcattacgtgtagaggttgacagattcaagacaacactaaacatgttagca

SEQ ID NO: 174028 - DNA, 77 bp, Homo sapiens
agtgttatttttggcattacgtgtagaggttgacagattcaagacaacactaaacatgttagcagtcaccacacgca

SEQ ID NO: 174029 - DNA, 82 bp, Homo sapiens
tttggcattacgtgtagaggttgacagattcaagacaacactaaacatgttagcagtcaccacacgcaggctgtccagcaga

SEQ ID NO: 174030 - DNA, 84 bp, Homo sapiens
tagaggttgacagattcaagacaacactaaacatgttagcagtcaccacacgcaggctgtccagcagaatgacagcgcttccca

SEQ ID NO: 174031 - DNA, 83 bp, Homo sapiens
agattcaagacaacactaaacatgttagcagtcaccacacgcaggctgtccagcagaatgacagcgcttcccagatcctagaa

SEQ ID NO: 174032 - DNA, 87 bp, Homo sapiens
ctaaacatgttagcagtcaccacacgcaggctgtccagcagaatgacagcgcttcccagatcctagaaagcatccagagtcactgca

SEQ ID NO: 174033 - DNA, 86 bp, Homo sapiens
tagcagtcaccacacgcaggctgtccagcagaatgacagcgcttcccagatcctagaaagcatccagagtcactgcacccatcccc

SEQ ID NO: 174034 - DNA, 82 bp, Homo sapiens
acacgcaggctgtccagcagaatgacagcgcttcccagatcctagaaagcatccagagtcactgcacccatcccctgggggc

SEQ ID NO: 174035 - DNA, 81 bp, Homo sapiens
tgtccagcagaatgacagcgcttcccagatcctagaaagcatccagagtcactgcacccatcccctgggggccctgtagtc

SEQ ID NO: 174036 - DNA, 80 bp, Homo sapiens
aatgacagcgcttcccagatcctagaaagcatccagagtcactgcacccatcccctgggggccctgtagtcctgcatctc

SEQ ID NO: 174037 - DNA, 81 bp, Homo sapiens
ttcccagatcctagaaagcatccagagtcactgcacccatcccctgggggccctgtagtcctgcatctccagatgatggga

SEQ ID NO: 174038 - DNA, 82 bp, Homo sapiens
tagaaagcatccagagtcactgcacccatcccctgggggccctgtagtcctgcatctccagatgatgggagctgcaaacttc

SEQ ID NO: 174039 - DNA, 81 bp, Homo sapiens
atccagagtcactgcacccatcccctgggggccctgtagtcctgcatctccagatgatgggagctgcaaacttccctgatg

SEQ ID NO: 174040 - DNA, 78 bp, Homo sapiens
cacccatcccctgggggccctgtagtcctgcatctccagatgatgggagctgcaaacttccctgatggtgccctcttg

SEQ ID NO: 174041 - DNA, 82 bp, Homo sapiens
ccctgggggccctgtagtcctgcatctccagatgatgggagctgcaaacttccctgatggtgccctcttggatgctcatgag

SEQ ID NO: 174042 - DNA, 87 bp, Homo sapiens
tgtagtcctgcatctccagatgatgggagctgcaaacttccctgatggtgccctcttggatgctcatgaggcctgatctggtaccac

SEQ ID NO: 174043 - DNA, 87 bp, Homo sapiens
catctccagatgatgggagctgcaaacttccctgatggtgccctcttggatgctcatgaggcctgatctggtaccacgactctagca

SEQ ID NO: 174044 - DNA, 83 bp, Homo sapiens
tgcaaacttccctgatggtgccctcttggatgctcatgaggcctgatctggtaccacgactctagcagtaggtccattcaatg

SEQ ID NO: 174045 - DNA, 82 bp, Homo sapiens
cctgatggtgccctcttggatgctcatgaggcctgatctggtaccacgactctagcagtaggtccattcaatggcagtaaaa

SEQ ID NO: 174046 - DNA, 80 bp, Homo sapiens
ccctcttggatgctcatgaggcctgatctggtaccacgactctagcagtaggtccattcaatggcagtaaaaatacatgt

SEQ ID NO: 174047 - DNA, 84 bp, Homo sapiens
atgctcatgaggcctgatctggtaccacgactctagcagtaggtccattcaatggcagtaaaaatacatgttgtatgttgatca

SEQ ID NO: 174048 - DNA, 80 bp, Homo sapiens
gcctgatctggtaccacgactctagcagtaggtccattcaatggcagtaaaaatacatgttgtatgttgatcagaatttg

SEQ ID NO: 174049 - DNA, 79 bp, Homo sapiens
atctggtaccacgactctagcagtaggtccattcaatggcagtaaaaatacatgttgtatgttgatcagaatttggcag

SEQ ID NO: 174050 - DNA, 80 bp, Homo sapiens
actctagcagtaggtccattcaatggcagtaaaaatacatgttgtatgttgatcagaatttggcaggacacatgtggaaa

SEQ ID NO: 174051 - DNA, 77 bp, Homo sapiens
agtaggtccattcaatggcagtaaaaatacatgttgtatgttgatcagaatttggcaggacacatgtggaaagttaa

SEQ ID NO: 174052 - DNA, 80 bp, Homo sapiens
attcaatggcagtaaaaatacatgttgtatgttgatcagaatttggcaggacacatgtggaaagttaatgacatcctggc

SEQ ID NO: 174053 - DNA, 77 bp, Homo sapiens
agtaaaaatacatgttgtatgttgatcagaatttggcaggacacatgtggaaagttaatgacatcctggccgagaac

SEQ ID NO: 174054 - DNA, 80 bp, Homo sapiens
atgttgtatgttgatcagaatttggcaggacacatgtggaaagttaatgacatcctggccgagaacccctgtgatataca

SEQ ID NO: 174055 - DNA, 74 bp, Homo sapiens
tgtggaaagttaatgacatcctggccgagaacccctgtgatatacactggttacatcctgtccaactggagttt

SEQ ID NO: 174056 - DNA, 72 bp, Homo sapiens
aaagttaatgacatcctggccgagaacccctgtgatatacactggttacatcctgtccaactggagttttta

SEQ ID NO: 174057 - DNA, 73 bp, Homo sapiens
acatcctggccgagaacccctgtgatatacactggttacatcctgtccaactggagtttttatgtgctgtttt

SEQ ID NO: 174058 - DNA, 75 bp, Homo sapiens
acccctgtgatatacactggttacatcctgtccaactggagtttttatgtgctgtttttggcagagccaagtgaa

SEQ ID NO: 174059 - DNA, 76 bp, Homo sapiens
atatacactggttacatcctgtccaactggagtttttatgtgctgtttttggcagagccaagtgaagatcttgtta

SEQ ID NO: 174060 - DNA, 74 bp, Homo sapiens
actggttacatcctgtccaactggagtttttatgtgctgtttttggcagagccaagtgaagatcttgttactta

SEQ ID NO: 174061 - DNA, 76 bp, Homo sapiens
tgtccaactggagtttttatgtgctgtttttggcagagccaagtgaagatcttgttacttagccattcctgaggta

SEQ ID NO: 174062 - DNA, 73 bp, Homo sapiens
tgctgtttttggcagagccaagtgaagatcttgttacttagccattcctgaggtactgaagatacccgggttt

SEQ ID NO: 174063 - DNA, 74 bp, Homo sapiens
ttggcagagccaagtgaagatcttgttacttagccattcctgaggtactgaagatacccgggtttttgtcatta

SEQ ID NO: 174064 - DNA, 71 bp, Homo sapiens
aagtgaagatcttgttacttagccattcctgaggtactgaagatacccgggtttttgtcattacaggatag

SEQ ID NO: 174065 - DNA, 71 bp, Homo sapiens
atcttgttacttagccattcctgaggtactgaagatacccgggtttttgtcattacaggataggctagaaa

SEQ ID NO: 174066 - DNA, 71 bp, Homo sapiens
cttagccattcctgaggtactgaagatacccgggtttttgtcattacaggataggctagaaagtagccagg

SEQ ID NO: 174067 - DNA, 70 bp, Homo sapiens
aggtactgaagatacccgggtttttgtcattacaggataggctagaaagtagccagggtctcataaccaa

SEQ ID NO: 174068 - DNA, 69 bp, Homo sapiens
aagatacccgggtttttgtcattacaggataggctagaaagtagccagggtctcataaccaaggctttc

SEQ ID NO: 174069 - DNA, 76 bp, Homo sapiens
tttttgtcattacaggataggctagaaagtagccagggtctcataaccaaggctttctctgaaacatataatgaca

SEQ ID NO: 174070 - DNA, 77 bp, Homo sapiens
ttacaggataggctagaaagtagccagggtctcataaccaaggctttctctgaaacatataatgacaatgctagtta

SEQ ID NO: 174071 - DNA, 75 bp, Homo sapiens
ctagaaagtagccagggtctcataaccaaggctttctctgaaacatataatgacaatgctagttatttgaccaaa

SEQ ID NO: 174072 - DNA, 76 bp, Homo sapiens
aagtagccagggtctcataaccaaggctttctctgaaacatataatgacaatgctagttatttgaccaaagatatc

SEQ ID NO: 174073 - DNA, 78 bp, Homo sapiens
tcataaccaaggctttctctgaaacatataatgacaatgctagttatttgaccaaagatatccaatgctttaatccac

SEQ ID NO: 174074 - DNA, 77 bp, Homo sapiens
caaggctttctctgaaacatataatgacaatgctagttatttgaccaaagatatccaatgctttaatccacttggaa

SEQ ID NO: 174075 - DNA, 76 bp, Homo sapiens
ctctgaaacatataatgacaatgctagttatttgaccaaagatatccaatgctttaatccacttggaatttattct

SEQ ID NO: 174076 - DNA, 79 bp, Homo sapiens
atgctagttatttgaccaaagatatccaatgctttaatccacttggaatttattcttgatgtgaagggtcagcatcatc

SEQ ID NO: 174077 - DNA, 78 bp, Homo sapiens
tttgaccaaagatatccaatgctttaatccacttggaatttattcttgatgtgaagggtcagcatcatccactggtcg

SEQ ID NO: 174078 - DNA, 79 bp, Homo sapiens
tatccaatgctttaatccacttggaatttattcttgatgtgaagggtcagcatcatccactggtcgggagcctgatcct

SEQ ID NO: 174079 - DNA, 78 bp, Homo sapiens
tttaatccacttggaatttattcttgatgtgaagggtcagcatcatccactggtcgggagcctgatccttggagccag

SEQ ID NO: 174080 - DNA, 79 bp, Homo sapiens
acttggaatttattcttgatgtgaagggtcagcatcatccactggtcgggagcctgatccttggagccaggcagacctg

SEQ ID NO: 174081 - DNA, 82 bp, Homo sapiens
tattcttgatgtgaagggtcagcatcatccactggtcgggagcctgatccttggagccaggcagacctgggttgagtccatc

SEQ ID NO: 174082 - DNA, 78 bp, Homo sapiens
agggtcagcatcatccactggtcgggagcctgatccttggagccaggcagacctgggttgagtccatctccgcctgtt

SEQ ID NO: 174083 - DNA, 79 bp, Homo sapiens
atcatccactggtcgggagcctgatccttggagccaggcagacctgggttgagtccatctccgcctgtttccagctgtg

SEQ ID NO: 174084 - DNA, 77 bp, Homo sapiens
actggtcgggagcctgatccttggagccaggcagacctgggttgagtccatctccgcctgtttccagctgtgggcaa

SEQ ID NO: 174085 - DNA, 81 bp, Homo sapiens
agccaggcagacctgggttgagtccatctccgcctgtttccagctgtgggcaaggtgtctgacttctctgagcatctgtgg

SEQ ID NO: 174086 - DNA, 77 bp, Homo sapiens
agacctgggttgagtccatctccgcctgtttccagctgtgggcaaggtgtctgacttctctgagcatctgtggggtt

SEQ ID NO: 174087 - DNA, 77 bp, Homo sapiens
gttgagtccatctccgcctgtttccagctgtgggcaaggtgtctgacttctctgagcatctgtggggtttgtttgtt

SEQ ID NO: 174088 - DNA, 74 bp, Homo sapiens
gtttgtttttaaacctgaagaattgggataatctgtttcctcacagaatcattacgcagatgcaatacagttaa

SEQ ID NO: 174089 - DNA, 80 bp, Homo sapiens
aagaattgggataatctgtttcctcacagaatcattacgcagatgcaatacagttaatgaaggtaacatggcacatagga

SEQ ID NO: 174090 - DNA, 83 bp, Homo sapiens
ataatctgtttcctcacagaatcattacgcagatgcaatacagttaatgaaggtaacatggcacataggaagagcacaataca

SEQ ID NO: 174091 - DNA, 85 bp, Homo sapiens
tcacagaatcattacgcagatgcaatacagttaatgaaggtaacatggcacataggaagagcacaatacacgtcagctcttactc

SEQ ID NO: 174092 - DNA, 83 bp, Homo sapiens
aatcattacgcagatgcaatacagttaatgaaggtaacatggcacataggaagagcacaatacacgtcagctcttactcttca

SEQ ID NO: 174093 - DNA, 83 bp, Homo sapiens
agatgcaatacagttaatgaaggtaacatggcacataggaagagcacaatacacgtcagctcttactcttcatggctagaaga

SEQ ID NO: 174094 - DNA, 81 bp, Homo sapiens
ttaatgaaggtaacatggcacataggaagagcacaatacacgtcagctcttactcttcatggctagaagatgtggactaaa

SEQ ID NO: 174095 - DNA, 79 bp, Homo sapiens
aaggtaacatggcacataggaagagcacaatacacgtcagctcttactcttcatggctagaagatgtggactaaacttc

SEQ ID NO: 174096 - DNA, 78 bp, Homo sapiens
tggcacataggaagagcacaatacacgtcagctcttactcttcatggctagaagatgtggactaaacttcccccttta

SEQ ID NO: 174097 - DNA, 76 bp, Homo sapiens
acataggaagagcacaatacacgtcagctcttactcttcatggctagaagatgtggactaaacttccccctttaca

SEQ ID NO: 174098 - DNA, 74 bp, Homo sapiens
gaagagcacaatacacgtcagctcttactcttcatggctagaagatgtggactaaacttccccctttacagttt

SEQ ID NO: 174099 - DNA, 73 bp, Homo sapiens
aagagcacaatacacgtcagctcttactcttcatggctagaagatgtggactaaacttccccctttacagttt

SEQ ID NO: 174100 - DNA, 73 bp, Homo sapiens
atacacgtcagctcttactcttcatggctagaagatgtggactaaacttccccctttacagttttgtgattaa

SEQ ID NO: 174101 - DNA, 72 bp, Homo sapiens
gctcttactcttcatggctagaagatgtggactaaacttccccctttacagttttgtgattaacaccattta

SEQ ID NO: 174102 - DNA, 72 bp, Homo sapiens
ttactcttcatggctagaagatgtggactaaacttccccctttacagttttgtgattaacaccatttatgaa

SEQ ID NO: 174103 - DNA, 72 bp, Homo sapiens
tactcttcatggctagaagatgtggactaaacttccccctttacagttttgtgattaacaccatttatgaaa

SEQ ID NO: 174104 - DNA, 71 bp, Homo sapiens
ttcatggctagaagatgtggactaaacttccccctttacagttttgtgattaacaccatttatgaaagaaa

SEQ ID NO: 174105 - DNA, 69 bp, Homo sapiens
ggctagaagatgtggactaaacttccccctttacagttttgtgattaacaccatttatgaaagaaataa

SEQ ID NO: 174106 - DNA, 70 bp, Homo sapiens
ataaatgaaataaattccttttcctgtcatgaggggaacttacctgattttattgaattatttggtgcca

SEQ ID NO: 174107 - DNA, 70 bp, Homo sapiens
taaattccttttcctgtcatgaggggaacttacctgattttattgaattatttggtgccattgagttcct

SEQ ID NO: 174108 - DNA, 70 bp, Homo sapiens
cttttcctgtcatgaggggaacttacctgattttattgaattatttggtgccattgagttccttattgtt

SEQ ID NO: 174109 - DNA, 74 bp, Homo sapiens
ttattgaattatttggtgccattgagttccttattgtttccctctgacctagatttctgggtgtgcgccagtaa

SEQ ID NO: 174110 - DNA, 73 bp, Homo sapiens
aattatttggtgccattgagttccttattgtttccctctgacctagatttctgggtgtgcgccagtaacacga

SEQ ID NO: 174111 - DNA, 76 bp, Homo sapiens
ttgagttccttattgtttccctctgacctagatttctgggtgtgcgccagtaacacgactgtgattgttgctgctt

SEQ ID NO: 174112 - DNA, 76 bp, Homo sapiens
cttattgtttccctctgacctagatttctgggtgtgcgccagtaacacgactgtgattgttgctgctttataacat

SEQ ID NO: 174113 - DNA, 78 bp, Homo sapiens
tttccctctgacctagatttctgggtgtgcgccagtaacacgactgtgattgttgctgctttataacattgtctgtgg

SEQ ID NO: 174114 - DNA, 78 bp, Homo sapiens
tgtgcgccagtaacacgactgtgattgttgctgctttataacattgtctgtggtcagtccaaacaagagtttaaaata

SEQ ID NO: 174115 - DNA, 74 bp, Homo sapiens
ccagtaacacgactgtgattgttgctgctttataacattgtctgtggtcagtccaaacaagagtttaaaataat

SEQ ID NO: 174116 - DNA, 76 bp, Homo sapiens
cgactgtgattgttgctgctttataacattgtctgtggtcagtccaaacaagagtttaaaataattgaatgaaatg

SEQ ID NO: 174117 - DNA, 74 bp, Homo sapiens
tgttgctgctttataacattgtctgtggtcagtccaaacaagagtttaaaataattgaatgaaatggattttaa

SEQ ID NO: 174118 - DNA, 70 bp, Homo sapiens
acattgtctgtggtcagtccaaacaagagtttaaaataattgaatgaaatggattttaaacaatggtccc

SEQ ID NO: 174119 - DNA, 66 bp, Homo sapiens
agtccaaacaagagtttaaaataattgaatgaaatggattttaaacaatggtccccccaccctcac

SEQ ID NO: 174120 - DNA, 66 bp, Homo sapiens
agtttaaaataattgaatgaaatggattttaaacaatggtccccccaccctcaccccgtggcactc

SEQ ID NO: 174121 - DNA, 68 bp, Homo sapiens
taattgaatgaaatggattttaaacaatggtccccccaccctcaccccgtggcactcggccaaaggaa

SEQ ID NO: 174122 - DNA, 67 bp, Homo sapiens
taaacaatggtccccccaccctcaccccgtggcactcggccaaaggaagaggaaaagttctctgtta

SEQ ID NO: 174123 - DNA, 69 bp, Homo sapiens
cccaccctcaccccgtggcactcggccaaaggaagaggaaaagttctctgttaaagaaaatgaatcaga

SEQ ID NO: 174124 - DNA, 70 bp, Homo sapiens
cctcaccccgtggcactcggccaaaggaagaggaaaagttctctgttaaagaaaatgaatcagagaagag

SEQ ID NO: 174125 - DNA, 70 bp, Homo sapiens
actcggccaaaggaagaggaaaagttctctgttaaagaaaatgaatcagagaagaggcccagaccgtgcc

SEQ ID NO: 174126 - DNA, 71 bp, Homo sapiens
aaaagttctctgttaaagaaaatgaatcagagaagaggcccagaccgtgcctccgaaaattctcattgtag

SEQ ID NO: 174127 - DNA, 72 bp, Homo sapiens
ttaaagaaaatgaatcagagaagaggcccagaccgtgcctccgaaaattctcattgtagggactaagtcctc

SEQ ID NO: 174128 - DNA, 73 bp, Homo sapiens
agaagaggcccagaccgtgcctccgaaaattctcattgtagggactaagtcctctcactctgaactcacaccc

SEQ ID NO: 174129 - DNA, 73 bp, Homo sapiens
cccagaccgtgcctccgaaaattctcattgtagggactaagtcctctcactctgaactcacacccgtctgttc

SEQ ID NO: 174130 - DNA, 78 bp, Homo sapiens
tccgaaaattctcattgtagggactaagtcctctcactctgaactcacacccgtctgttcgcagcctgacctcatatc

SEQ ID NO: 174131 - DNA, 78 bp, Homo sapiens
aattctcattgtagggactaagtcctctcactctgaactcacacccgtctgttcgcagcctgacctcatatcctggtc

SEQ ID NO: 174132 - DNA, 80 bp, Homo sapiens
gtagggactaagtcctctcactctgaactcacacccgtctgttcgcagcctgacctcatatcctggtctggatgtgcggc

SEQ ID NO: 174133 - DNA, 79 bp, Homo sapiens
agtcctctcactctgaactcacacccgtctgttcgcagcctgacctcatatcctggtctggatgtgcggcctcaccggg

SEQ ID NO: 174134 - DNA, 77 bp, Homo sapiens
acccgtctgttcgcagcctgacctcatatcctggtctggatgtgcggcctcaccggggtgtcgtgcgcacgtgtggt

SEQ ID NO: 174135 - DNA, 79 bp, Homo sapiens
gttcgcagcctgacctcatatcctggtctggatgtgcggcctcaccggggtgtcgtgcgcacgtgtggttgtcctgtgg

SEQ ID NO: 174136 - DNA, 80 bp, Homo sapiens
acctcatatcctggtctggatgtgcggcctcaccggggtgtcgtgcgcacgtgtggttgtcctgtgggtgccagctctga

SEQ ID NO: 174137 - DNA, 77 bp, Homo sapiens
atgtgcggcctcaccggggtgtcgtgcgcacgtgtggttgtcctgtgggtgccagctctgacttcctccccagacac

SEQ ID NO: 174138 - DNA, 81 bp, Homo sapiens
tgtcgtgcgcacgtgtggttgtcctgtgggtgccagctctgacttcctccccagacacccactgcctcagccttaatcaca

SEQ ID NO: 174139 - DNA, 79 bp, Homo sapiens
tggttgtcctgtgggtgccagctctgacttcctccccagacacccactgcctcagccttaatcacaggacgcgcgttga

SEQ ID NO: 174140 - DNA, 80 bp, Homo sapiens
tgtgggtgccagctctgacttcctccccagacacccactgcctcagccttaatcacaggacgcgcgttgagtagaaatga

SEQ ID NO: 174141 - DNA, 78 bp, Homo sapiens
gctctgacttcctccccagacacccactgcctcagccttaatcacaggacgcgcgttgagtagaaatgagaccagtta

SEQ ID NO: 174142 - DNA, 76 bp, Homo sapiens
ttcctccccagacacccactgcctcagccttaatcacaggacgcgcgttgagtagaaatgagaccagttagtattg

SEQ ID NO: 174143 - DNA, 78 bp, Homo sapiens
ctcagccttaatcacaggacgcgcgttgagtagaaatgagaccagttagtattggtaactgcagaggaatatgcattt

SEQ ID NO: 174144 - DNA, 78 bp, Homo sapiens
cttaatcacaggacgcgcgttgagtagaaatgagaccagttagtattggtaactgcagaggaatatgcattttcacca

SEQ ID NO: 174145 - DNA, 77 bp, Homo sapiens
aggacgcgcgttgagtagaaatgagaccagttagtattggtaactgcagaggaatatgcattttcaccagcgttctc

SEQ ID NO: 174146 - DNA, 75 bp, Homo sapiens
tagaaatgagaccagttagtattggtaactgcagaggaatatgcattttcaccagcgttctcgggtcagagggtt

SEQ ID NO: 174147 - DNA, 76 bp, Homo sapiens
atgagaccagttagtattggtaactgcagaggaatatgcattttcaccagcgttctcgggtcagagggtttgcctg

SEQ ID NO: 174148 - DNA, 76 bp, Homo sapiens
ttagtattggtaactgcagaggaatatgcattttcaccagcgttctcgggtcagagggtttgcctggcaccgcgta

SEQ ID NO: 174149 - DNA, 72 bp, Homo sapiens
aatatgcattttcaccagcgttctcgggtcagagggtttgcctggcaccgcgtactgggaaactcgccaaaa

SEQ ID NO: 174150 - DNA, 71 bp, Homo sapiens
cgttctcgggtcagagggtttgcctggcaccgcgtactgggaaactcgccaaaagcggtgcaggttggaga

SEQ ID NO: 174151 - DNA, 73 bp, Homo sapiens
tactgggaaactcgccaaaagcggtgcaggttggagacgccccaggccgcggtggagttgcgcgcggcttcta

SEQ ID NO: 174152 - DNA, 71 bp, Homo sapiens
aaactcgccaaaagcggtgcaggttggagacgccccaggccgcggtggagttgcgcgcggcttctaaagtg

SEQ ID NO: 174153 - DNA, 73 bp, Homo sapiens
aaaagcggtgcaggttggagacgccccaggccgcggtggagttgcgcgcggcttctaaagtggagtggagcag

SEQ ID NO: 174154 - DNA, 74 bp, Homo sapiens
aggttggagacgccccaggccgcggtggagttgcgcgcggcttctaaagtggagtggagcaggcctgcaccctc

SEQ ID NO: 174155 - DNA, 72 bp, Homo sapiens
acgccccaggccgcggtggagttgcgcgcggcttctaaagtggagtggagcaggcctgcaccctccccgccg

SEQ ID NO: 174156 - DNA, 73 bp, Homo sapiens
gttgcgcgcggcttctaaagtggagtggagcaggcctgcaccctccccgccggggctgggacggcgcttccag

SEQ ID NO: 174157 - DNA, 72 bp, Homo sapiens
ttctaaagtggagtggagcaggcctgcaccctccccgccggggctgggacggcgcttccaggcggagaaaga

SEQ ID NO: 174158 - DNA, 70 bp, Homo sapiens
agtggagcaggcctgcaccctccccgccggggctgggacggcgcttccaggcggagaaagacctccgcgg

SEQ ID NO: 174159 - DNA, 69 bp, Homo sapiens
aggcctgcaccctccccgccggggctgggacggcgcttccaggcggagaaagacctccgcgggccgcgc

SEQ ID NO: 174160 - DNA, 68 bp, Homo sapiens
tccccgccggggctgggacggcgcttccaggcggagaaagacctccgcgggccgcgcgcggccttccc

SEQ ID NO: 174161 - DNA, 72 bp, Homo sapiens
ctgggacggcgcttccaggcggagaaagacctccgcgggccgcgcgcggccttccccctgcgaggatcgcca

SEQ ID NO: 174162 - DNA, 72 bp, Homo sapiens
acggcgcttccaggcggagaaagacctccgcgggccgcgcgcggccttccccctgcgaggatcgccattggc

SEQ ID NO: 174163 - DNA, 69 bp, Homo sapiens
ggagaaagacctccgcgggccgcgcgcggccttccccctgcgaggatcgccattggcccgggttggctt

SEQ ID NO: 174164 - DNA, 69 bp, Homo sapiens
aagacctccgcgggccgcgcgcggccttccccctgcgaggatcgccattggcccgggttggctttggaa

SEQ ID NO: 174165 - DNA, 70 bp, Homo sapiens
cgcgcgcggccttccccctgcgaggatcgccattggcccgggttggctttggaaagcggcggtggctttg

SEQ ID NO: 174166 - DNA, 67 bp, Homo sapiens
ccttccccctgcgaggatcgccattggcccgggttggctttggaaagcggcggtggctttgggccgg

SEQ ID NO: 174167 - DNA, 65 bp, Homo sapiens
ccgggttggctttggaaagcggcggtggctttgggccgggctcggcctcgggaacgccaggggcc

SEQ ID NO: 174168 - DNA, 67 bp, Homo sapiens
tttggaaagcggcggtggctttgggccgggctcggcctcgggaacgccaggggcccctgggtgcgga

SEQ ID NO: 174169 - DNA, 67 bp, Homo sapiens
cggtggctttgggccgggctcggcctcgggaacgccaggggcccctgggtgcggacgggcgcggcca

SEQ ID NO: 174170 - DNA, 66 bp, Homo sapiens
tttgggccgggctcggcctcgggaacgccaggggcccctgggtgcggacgggcgcggccaggaggg

SEQ ID NO: 174171 - DNA, 67 bp, Homo sapiens
tcggcctcgggaacgccaggggcccctgggtgcggacgggcgcggccaggagggggttaaggcgcag

SEQ ID NO: 174172 - DNA, 66 bp, Homo sapiens
cgggaacgccaggggcccctgggtgcggacgggcgcggccaggagggggttaaggcgcaggcggcg

SEQ ID NO: 174173 - DNA, 65 bp, Homo sapiens
aggggcccctgggtgcggacgggcgcggccaggagggggttaaggcgcaggcggcggcggggcgg

SEQ ID NO: 174174 - DNA, 66 bp, Homo sapiens
gggtgcggacgggcgcggccaggagggggttaaggcgcaggcggcggcggggcgggggcgggcctg

SEQ ID NO: 174175 - DNA, 66 bp, Homo sapiens
cggccaggagggggttaaggcgcaggcggcggcggggcgggggcgggcctggcgggcgccctctcc

SEQ ID NO: 174176 - DNA, 64 bp, Homo sapiens
ggggttaaggcgcaggcggcggcggggcgggggcgggcctggcgggcgccctctccgggccctt

SEQ ID NO: 174177 - DNA, 67 bp, Homo sapiens
taaggcgcaggcggcggcggggcgggggcgggcctggcgggcgccctctccgggccctttgttaaca

SEQ ID NO: 174178 - DNA, 64 bp, Homo sapiens
cggcggggcgggggcgggcctggcgggcgccctctccgggccctttgttaacaggcgcgtcccg

SEQ ID NO: 174179 - DNA, 68 bp, Homo sapiens
gggcgggcctggcgggcgccctctccgggccctttgttaacaggcgcgtcccggccaggcggagacgc

SEQ ID NO: 174180 - DNA, 70 bp, Homo sapiens
tggcgggcgccctctccgggccctttgttaacaggcgcgtcccggccaggcggagacgcggccgcggcca

SEQ ID NO: 174181 - DNA, 68 bp, Homo sapiens
ccctctccgggccctttgttaacaggcgcgtcccggccaggcggagacgcggccgcggccatgggcgg

SEQ ID NO: 174182 - DNA, 69 bp, Homo sapiens
cgggccctttgttaacaggcgcgtcccggccaggcggagacgcggccgcggccatgggcgggcgcgggc

SEQ ID NO: 174183 - DNA, 71 bp, Homo sapiens
gttaacaggcgcgtcccggccaggcggagacgcggccgcggccatgggcgggcgcgggcgcgcggggcggc

SEQ ID NO: 174184 - DNA, 72 bp, Homo sapiens
tcccggccaggcggagacgcggccgcggccatgggcgggcgcgggcgcgcggggcggcggtgagggcggctg

SEQ ID NO: 174185 - DNA, 69 bp, Homo sapiens
cgcggccgcggccatgggcgggcgcgggcgcgcggggcggcggtgagggcggctggcggggccgggggc

SEQ ID NO: 174186 - DNA, 66 bp, Homo sapiens
ccatgggcgggcgcgggcgcgcggggcggcggtgagggcggctggcggggccgggggcgccggggg

SEQ ID NO: 174187 - DNA, 67 bp, Homo sapiens
ggcggcggtgagggcggctggcggggccgggggcgccgggggggcgcgcgggccgagccgggcctga

SEQ ID NO: 174188 - DNA, 66 bp, Homo sapiens
cggtgagggcggctggcggggccgggggcgccgggggggcgcgcgggccgagccgggcctgagccg

SEQ ID NO: 174189 - DNA, 65 bp, Homo sapiens
gcggggccgggggcgccgggggggcgcgcgggccgagccgggcctgagccgggcccgcggaccga

SEQ ID NO: 174190 - DNA, 67 bp, Homo sapiens
gggcgccgggggggcgcgcgggccgagccgggcctgagccgggcccgcggaccgagctgggagaggg

SEQ ID NO: 174191 - DNA, 67 bp, Homo sapiens
ggggcgcgcgggccgagccgggcctgagccgggcccgcggaccgagctgggagaggggttccggccc

SEQ ID NO: 174192 - DNA, 68 bp, Homo sapiens
ggccgagccgggcctgagccgggcccgcggaccgagctgggagaggggttccggcccccgacgtgctg

SEQ ID NO: 174193 - DNA, 68 bp, Homo sapiens
ggcctgagccgggcccgcggaccgagctgggagaggggttccggcccccgacgtgctggcgcgggaaa

SEQ ID NO: 174194 - DNA, 67 bp, Homo sapiens
cgggcccgcggaccgagctgggagaggggttccggcccccgacgtgctggcgcgggaaaatgttgga

SEQ ID NO: 174195 - DNA, 72 bp, Homo sapiens
accgagctgggagaggggttccggcccccgacgtgctggcgcgggaaaatgttggagatctgcctgaagctg

SEQ ID NO: 174196 - DNA, 74 bp, Homo sapiens
gagaggggttccggcccccgacgtgctggcgcgggaaaatgttggagatctgcctgaagctggtgggctgcaaa

SEQ ID NO: 174197 - DNA, 77 bp, Homo sapiens
acgtgctggcgcgggaaaatgttggagatctgcctgaagctggtgggctgcaaatccaagaaggggctgtcctcgtc

SEQ ID NO: 174198 - DNA, 77 bp, Homo sapiens
gcgggaaaatgttggagatctgcctgaagctggtgggctgcaaatccaagaaggggctgtcctcgtcctccagctgt

SEQ ID NO: 174199 - DNA, 78 bp, Homo sapiens
agatctgcctgaagctggtgggctgcaaatccaagaaggggctgtcctcgtcctccagctgttatctggaaggtaagc

SEQ ID NO: 174200 - DNA, 70 bp, Homo sapiens
caaatccaagaaggggctgtcctcgtcctccagctgttatctggaaggtaagcccgggccgcacgggttg

SEQ ID NO: 174201 - DNA, 73 bp, Homo sapiens
tcctcgtcctccagctgttatctggaaggtaagcccgggccgcacgggttgggctgagtagccgcgcgccctc

SEQ ID NO: 174202 - DNA, 74 bp, Homo sapiens
tcctccagctgttatctggaaggtaagcccgggccgcacgggttgggctgagtagccgcgcgccctcccgctgc

SEQ ID NO: 174203 - DNA, 73 bp, Homo sapiens
gggccgcacgggttgggctgagtagccgcgcgccctcccgctgctgctgggcccttcctaggcctcgccgccc

SEQ ID NO: 174204 - DNA, 77 bp, Homo sapiens
ttgggctgagtagccgcgcgccctcccgctgctgctgggcccttcctaggcctcgccgcccgcgcgctcccgcctgc

SEQ ID NO: 174205 - DNA, 75 bp, Homo sapiens
agtagccgcgcgccctcccgctgctgctgggcccttcctaggcctcgccgcccgcgcgctcccgcctgcgccctc

SEQ ID NO: 174206 - DNA, 73 bp, Homo sapiens
tcccgctgctgctgggcccttcctaggcctcgccgcccgcgcgctcccgcctgcgccctccccgggtcttgtc

SEQ ID NO: 174207 - DNA, 69 bp, Homo sapiens
tgctgggcccttcctaggcctcgccgcccgcgcgctcccgcctgcgccctccccgggtcttgtcttttt

SEQ ID NO: 174208 - DNA, 66 bp, Homo sapiens
cccttcctaggcctcgccgcccgcgcgctcccgcctgcgccctccccgggtcttgtcttttttttc

SEQ ID NO: 174209 - DNA, 73 bp, Homo sapiens
tgtctctttctctttctcgcgatggcccctaggcgccgccggcggagcgtggcccccagccccggcaccagcc

SEQ ID NO: 174210 - DNA, 70 bp, Homo sapiens
tttctctttctcgcgatggcccctaggcgccgccggcggagcgtggcccccagccccggcaccagccccg

SEQ ID NO: 174211 - DNA, 71 bp, Homo sapiens
ctcgcgatggcccctaggcgccgccggcggagcgtggcccccagccccggcaccagccccggtagagccac

SEQ ID NO: 174212 - DNA, 71 bp, Homo sapiens
taggcgccgccggcggagcgtggcccccagccccggcaccagccccggtagagccacgccggatggtgacg

SEQ ID NO: 174213 - DNA, 70 bp, Homo sapiens
aggcgccgccggcggagcgtggcccccagccccggcaccagccccggtagagccacgccggatggtgacg

SEQ ID NO: 174214 - DNA, 70 bp, Homo sapiens
ggcggagcgtggcccccagccccggcaccagccccggtagagccacgccggatggtgacggcggcgtccg

SEQ ID NO: 174215 - DNA, 69 bp, Homo sapiens
cggagcgtggcccccagccccggcaccagccccggtagagccacgccggatggtgacggcggcgtccgg

SEQ ID NO: 174216 - DNA, 69 bp, Homo sapiens
agcgtggcccccagccccggcaccagccccggtagagccacgccggatggtgacggcggcgtccggggc

SEQ ID NO: 174217 - DNA, 70 bp, Homo sapiens
cccggcaccagccccggtagagccacgccggatggtgacggcggcgtccggggccccacagtgcgggctc

SEQ ID NO: 174218 - DNA, 70 bp, Homo sapiens
cggcaccagccccggtagagccacgccggatggtgacggcggcgtccggggccccacagtgcgggctccc

SEQ ID NO: 174219 - DNA, 67 bp, Homo sapiens
ggtagagccacgccggatggtgacggcggcgtccggggccccacagtgcgggctcccccgaaaaagt

SEQ ID NO: 174220 - DNA, 67 bp, Homo sapiens
atggtgacggcggcgtccggggccccacagtgcgggctcccccgaaaaagtttgagaaagccaactc

SEQ ID NO: 174221 - DNA, 69 bp, Homo sapiens
cccacagtgcgggctcccccgaaaaagtttgagaaagccaactcgccaggccttaacatccctgggatc

SEQ ID NO: 174222 - DNA, 68 bp, Homo sapiens
ggctcccccgaaaaagtttgagaaagccaactcgccaggccttaacatccctgggatcccacgttgtg

SEQ ID NO: 174223 - DNA, 68 bp, Homo sapiens
aaaaagtttgagaaagccaactcgccaggccttaacatccctgggatcccacgttgtggaatttccac

SEQ ID NO: 174224 - DNA, 70 bp, Homo sapiens
ctcgccaggccttaacatccctgggatcccacgttgtggaatttccaccgttaattgggactgtgtgtta

SEQ ID NO: 174225 - DNA, 67 bp, Homo sapiens
aggccttaacatccctgggatcccacgttgtggaatttccaccgttaattgggactgtgtgttaaaa

SEQ ID NO: 174226 - DNA, 67 bp, Homo sapiens
ctgggatcccacgttgtggaatttccaccgttaattgggactgtgtgttaaaaagatcgacccgtgt

SEQ ID NO: 174227 - DNA, 66 bp, Homo sapiens
acgttgtggaatttccaccgttaattgggactgtgtgttaaaaagatcgacccgtgtttgtgaaaa

SEQ ID NO: 174228 - DNA, 68 bp, Homo sapiens
aatttccaccgttaattgggactgtgtgttaaaaagatcgacccgtgtttgtgaaaacatgcgatttc

SEQ ID NO: 174229 - DNA, 76 bp, Homo sapiens
actgtgtgttaaaaagatcgacccgtgtttgtgaaaacatgcgatttccattaagcatcatgtacacaaggagcac

SEQ ID NO: 174230 - DNA, 77 bp, Homo sapiens
tgttaaaaagatcgacccgtgtttgtgaaaacatgcgatttccattaagcatcatgtacacaaggagcaccactcta

SEQ ID NO: 174231 - DNA, 78 bp, Homo sapiens
acccgtgtttgtgaaaacatgcgatttccattaagcatcatgtacacaaggagcaccactctaccatttatggataca

SEQ ID NO: 174232 - DNA, 80 bp, Homo sapiens
tttgtgaaaacatgcgatttccattaagcatcatgtacacaaggagcaccactctaccatttatggatacagaatttcaa

SEQ ID NO: 174233 - DNA, 80 bp, Homo sapiens
tccattaagcatcatgtacacaaggagcaccactctaccatttatggatacagaatttcaagtgatctttccatctcccc

SEQ ID NO: 174234 - DNA, 76 bp, Homo sapiens
atcatgtacacaaggagcaccactctaccatttatggatacagaatttcaagtgatctttccatctcccccacccc

SEQ ID NO: 174235 - DNA, 76 bp, Homo sapiens
agcaccactctaccatttatggatacagaatttcaagtgatctttccatctcccccacccccatcttatctacaga

SEQ ID NO: 174236 - DNA, 75 bp, Homo sapiens
tatggatacagaatttcaagtgatctttccatctcccccacccccatcttatctacagaccacgaagaggtctta

SEQ ID NO: 174237 - DNA, 71 bp, Homo sapiens
aatttcaagtgatctttccatctcccccacccccatcttatctacagaccacgaagaggtcttaggaattc

SEQ ID NO: 174238 - DNA, 72 bp, Homo sapiens
atctttccatctcccccacccccatcttatctacagaccacgaagaggtcttaggaattcgctctcttttca

SEQ ID NO: 174239 - DNA, 69 bp, Homo sapiens
tcccccacccccatcttatctacagaccacgaagaggtcttaggaattcgctctcttttcaggggaggg

SEQ ID NO: 174240 - DNA, 70 bp, Homo sapiens
ttatctacagaccacgaagaggtcttaggaattcgctctcttttcaggggaggggagcccatttaagaag

SEQ ID NO: 174241 - DNA, 67 bp, Homo sapiens
attcgctctcttttcaggggaggggagcccatttaagaaggcgtttccaaggagtcccccagagtac

SEQ ID NO: 174242 - DNA, 67 bp, Homo sapiens
agcccatttaagaaggcgtttccaaggagtcccccagagtactggggtgtcatgttcgtttccttaa

SEQ ID NO: 174243 - DNA, 67 bp, Homo sapiens
atttaagaaggcgtttccaaggagtcccccagagtactggggtgtcatgttcgtttccttaagtgaa

SEQ ID NO: 174244 - DNA, 70 bp, Homo sapiens
cgtttccaaggagtcccccagagtactggggtgtcatgttcgtttccttaagtgaagctcagggccagga

SEQ ID NO: 174245 - DNA, 70 bp, Homo sapiens
agtcccccagagtactggggtgtcatgttcgtttccttaagtgaagctcagggccaggagggcttcactt

SEQ ID NO: 174246 - DNA, 72 bp, Homo sapiens
tactggggtgtcatgttcgtttccttaagtgaagctcagggccaggagggcttcacttttgcgttctttcta

SEQ ID NO: 174247 - DNA, 73 bp, Homo sapiens
tgtcatgttcgtttccttaagtgaagctcagggccaggagggcttcacttttgcgttctttctacctactctc

SEQ ID NO: 174248 - DNA, 71 bp, Homo sapiens
tttccttaagtgaagctcagggccaggagggcttcacttttgcgttctttctacctactctccttctctaa

SEQ ID NO: 174249 - DNA, 71 bp, Homo sapiens
aagctcagggccaggagggcttcacttttgcgttctttctacctactctccttctctaattacatctgttt

SEQ ID NO: 174250 - DNA, 69 bp, Homo sapiens
agggccaggagggcttcacttttgcgttctttctacctactctccttctctaattacatctgttttatt

SEQ ID NO: 174251 - DNA, 61 bp, Homo sapiens
ttatttttctttcctgttgtagtctttagttttataaatggaaaaaaagtaaattaagggt

SEQ ID NO: 174252 - DNA, 64 bp, Homo sapiens
ttcctgttgtagtctttagttttataaatggaaaaaaagtaaattaagggttatgggtcttcac

SEQ ID NO: 174253 - DNA, 64 bp, Homo sapiens
tagtctttagttttataaatggaaaaaaagtaaattaagggttatgggtcttcactttcgtagc

SEQ ID NO: 174254 - DNA, 64 bp, Homo sapiens
tttataaatggaaaaaaagtaaattaagggttatgggtcttcactttcgtagcttctaggtggg

SEQ ID NO: 174255 - DNA, 67 bp, Homo sapiens
gaaaaaaagtaaattaagggttatgggtcttcactttcgtagcttctaggtgggtatgaaattgatc

SEQ ID NO: 174256 - DNA, 74 bp, Homo sapiens
aagggttatgggtcttcactttcgtagcttctaggtgggtatgaaattgatctgatttgagactggtgctccca

SEQ ID NO: 174257 - DNA, 78 bp, Homo sapiens
ggtcttcactttcgtagcttctaggtgggtatgaaattgatctgatttgagactggtgctcccagaccattgccttca

SEQ ID NO: 174258 - DNA, 80 bp, Homo sapiens
ttcgtagcttctaggtgggtatgaaattgatctgatttgagactggtgctcccagaccattgccttcagcagaaaggcta

SEQ ID NO: 174259 - DNA, 83 bp, Homo sapiens
ttctaggtgggtatgaaattgatctgatttgagactggtgctcccagaccattgccttcagcagaaaggctatctgtgcttca

SEQ ID NO: 174260 - DNA, 83 bp, Homo sapiens
ctaggtgggtatgaaattgatctgatttgagactggtgctcccagaccattgccttcagcagaaaggctatctgtgcttcaga

SEQ ID NO: 174261 - DNA, 85 bp, Homo sapiens
tgggtatgaaattgatctgatttgagactggtgctcccagaccattgccttcagcagaaaggctatctgtgcttcagagatggag

SEQ ID NO: 174262 - DNA, 84 bp, Homo sapiens
aaattgatctgatttgagactggtgctcccagaccattgccttcagcagaaaggctatctgtgcttcagagatggagtggcact

SEQ ID NO: 174263 - DNA, 86 bp, Homo sapiens
attgatctgatttgagactggtgctcccagaccattgccttcagcagaaaggctatctgtgcttcagagatggagtggcacttgga

SEQ ID NO: 174264 - DNA, 83 bp, Homo sapiens
atttgagactggtgctcccagaccattgccttcagcagaaaggctatctgtgcttcagagatggagtggcacttggacttctc

SEQ ID NO: 174265 - DNA, 84 bp, Homo sapiens
tttgagactggtgctcccagaccattgccttcagcagaaaggctatctgtgcttcagagatggagtggcacttggacttctctg

SEQ ID NO: 174266 - DNA, 82 bp, Homo sapiens
tggtgctcccagaccattgccttcagcagaaaggctatctgtgcttcagagatggagtggcacttggacttctctgttgttt

SEQ ID NO: 174267 - DNA, 81 bp, Homo sapiens
ctcccagaccattgccttcagcagaaaggctatctgtgcttcagagatggagtggcacttggacttctctgttgttttcaa

SEQ ID NO: 174268 - DNA, 80 bp, Homo sapiens
agaccattgccttcagcagaaaggctatctgtgcttcagagatggagtggcacttggacttctctgttgttttcaactaa

SEQ ID NO: 174269 - DNA, 81 bp, Homo sapiens
tgccttcagcagaaaggctatctgtgcttcagagatggagtggcacttggacttctctgttgttttcaactaagaatataa

SEQ ID NO: 174270 - DNA, 77 bp, Homo sapiens
agaaaggctatctgtgcttcagagatggagtggcacttggacttctctgttgttttcaactaagaatataagagtaa

SEQ ID NO: 174271 - DNA, 77 bp, Homo sapiens
ctatctgtgcttcagagatggagtggcacttggacttctctgttgttttcaactaagaatataagagtaaaaatgtg

SEQ ID NO: 174272 - DNA, 73 bp, Homo sapiens
cttcagagatggagtggcacttggacttctctgttgttttcaactaagaatataagagtaaaaatgtggccgg

SEQ ID NO: 174273 - DNA, 72 bp, Homo sapiens
aaaaaaaagagtagaaagaaatgtgaagctcactttagatcaagtaggatttctgctagaatgccatgtttt

SEQ ID NO: 174274 - DNA, 73 bp, Homo sapiens
aaagagtagaaagaaatgtgaagctcactttagatcaagtaggatttctgctagaatgccatgtttttctttt

SEQ ID NO: 174275 - DNA, 64 bp, Homo sapiens
tttctttttaaaaaagcaggagaaataaacaggcctcatttattttctaacctatttttctttc

SEQ ID NO: 174276 - DNA, 66 bp, Homo sapiens
aaaaagcaggagaaataaacaggcctcatttattttctaacctatttttctttccttaacctctga

SEQ ID NO: 174277 - DNA, 68 bp, Homo sapiens
gcaggagaaataaacaggcctcatttattttctaacctatttttctttccttaacctctgactctacc

SEQ ID NO: 174278 - DNA, 67 bp, Homo sapiens
taaacaggcctcatttattttctaacctatttttctttccttaacctctgactctaccctgaaggcc

SEQ ID NO: 174279 - DNA, 70 bp, Homo sapiens
tttattttctaacctatttttctttccttaacctctgactctaccctgaaggcctgcttggagtcacata

SEQ ID NO: 174280 - DNA, 77 bp, Homo sapiens
tctaacctatttttctttccttaacctctgactctaccctgaaggcctgcttggagtcacatatgcagatcgcacta

SEQ ID NO: 174281 - DNA, 80 bp, Homo sapiens
ttctttccttaacctctgactctaccctgaaggcctgcttggagtcacatatgcagatcgcactagtgatgtgggtgaaa

SEQ ID NO: 174282 - DNA, 81 bp, Homo sapiens
ttaacctctgactctaccctgaaggcctgcttggagtcacatatgcagatcgcactagtgatgtgggtgaaacctgtttgc

SEQ ID NO: 174283 - DNA, 80 bp, Homo sapiens
actctaccctgaaggcctgcttggagtcacatatgcagatcgcactagtgatgtgggtgaaacctgtttgcccttcttgc

SEQ ID NO: 174284 - DNA, 81 bp, Homo sapiens
aggcctgcttggagtcacatatgcagatcgcactagtgatgtgggtgaaacctgtttgcccttcttgccacagtttgtgta

SEQ ID NO: 174285 - DNA, 81 bp, Homo sapiens
ttggagtcacatatgcagatcgcactagtgatgtgggtgaaacctgtttgcccttcttgccacagtttgtgtacctcactc

SEQ ID NO: 174286 - DNA, 79 bp, Homo sapiens
atatgcagatcgcactagtgatgtgggtgaaacctgtttgcccttcttgccacagtttgtgtacctcactcctcttctg

SEQ ID NO: 174287 - DNA, 74 bp, Homo sapiens
atgtgggtgaaacctgtttgcccttcttgccacagtttgtgtacctcactcctcttctgtctctgggattccag

SEQ ID NO: 174288 - DNA, 73 bp, Homo sapiens
aacctgtttgcccttcttgccacagtttgtgtacctcactcctcttctgtctctgggattccagggggctgaa

SEQ ID NO: 174289 - DNA, 75 bp, Homo sapiens
cccttcttgccacagtttgtgtacctcactcctcttctgtctctgggattccagggggctgaatggcccagagaa

SEQ ID NO: 174290 - DNA, 79 bp, Homo sapiens
tacctcactcctcttctgtctctgggattccagggggctgaatggcccagagaaggctcatctaggtggagtgggctca

SEQ ID NO: 174291 - DNA, 80 bp, Homo sapiens
ttctgtctctgggattccagggggctgaatggcccagagaaggctcatctaggtggagtgggctcacagagcctagcatt

SEQ ID NO: 174292 - DNA, 78 bp, Homo sapiens
ggattccagggggctgaatggcccagagaaggctcatctaggtggagtgggctcacagagcctagcatttggagggtg

SEQ ID NO: 174293 - DNA, 79 bp, Homo sapiens
gggctgaatggcccagagaaggctcatctaggtggagtgggctcacagagcctagcatttggagggtggagattgttta

SEQ ID NO: 174294 - DNA, 74 bp, Homo sapiens
aaggctcatctaggtggagtgggctcacagagcctagcatttggagggtggagattgtttatttgtccctaaaa

SEQ ID NO: 174295 - DNA, 79 bp, Homo sapiens
gctcacagagcctagcatttggagggtggagattgtttatttgtccctaaaagttgatgtctgagcattccaaatcatc

SEQ ID NO: 174296 - DNA, 75 bp, Homo sapiens
cctagcatttggagggtggagattgtttatttgtccctaaaagttgatgtctgagcattccaaatcatcttcaat

SEQ ID NO: 174297 - DNA, 75 bp, Homo sapiens
tttggagggtggagattgtttatttgtccctaaaagttgatgtctgagcattccaaatcatcttcaattaataca

SEQ ID NO: 174298 - DNA, 76 bp, Homo sapiens
gtggagattgtttatttgtccctaaaagttgatgtctgagcattccaaatcatcttcaattaatacatcgcttatt

SEQ ID NO: 174299 - DNA, 75 bp, Homo sapiens
tttgtccctaaaagttgatgtctgagcattccaaatcatcttcaattaatacatcgcttattttttccaagttgc

SEQ ID NO: 174300 - DNA, 79 bp, Homo sapiens
aagttgatgtctgagcattccaaatcatcttcaattaatacatcgcttattttttccaagttgctcaaaattctgagca

SEQ ID NO: 174301 - DNA, 81 bp, Homo sapiens
atgtctgagcattccaaatcatcttcaattaatacatcgcttattttttccaagttgctcaaaattctgagcacattctca

SEQ ID NO: 174302 - DNA, 79 bp, Homo sapiens
tccaaatcatcttcaattaatacatcgcttattttttccaagttgctcaaaattctgagcacattctcatttacatctg

SEQ ID NO: 174303 - DNA, 79 bp, Homo sapiens
catcttcaattaatacatcgcttattttttccaagttgctcaaaattctgagcacattctcatttacatctgtatcgag

SEQ ID NO: 174304 - DNA, 77 bp, Homo sapiens
atacatcgcttattttttccaagttgctcaaaattctgagcacattctcatttacatctgtatcgagttagtgttag

SEQ ID NO: 174305 - DNA, 81 bp, Homo sapiens
tttttccaagttgctcaaaattctgagcacattctcatttacatctgtatcgagttagtgttaggcatcatcatctccact

SEQ ID NO: 174306 - DNA, 84 bp, Homo sapiens
aagttgctcaaaattctgagcacattctcatttacatctgtatcgagttagtgttaggcatcatcatctccactttgcagatgg

SEQ ID NO: 174307 - DNA, 83 bp, Homo sapiens
aaaattctgagcacattctcatttacatctgtatcgagttagtgttaggcatcatcatctccactttgcagatgggtgcctaa

SEQ ID NO: 174308 - DNA, 80 bp, Homo sapiens
tttacatctgtatcgagttagtgttaggcatcatcatctccactttgcagatgggtgcctaaggcggggatgaatggact

SEQ ID NO: 174309 - DNA, 76 bp, Homo sapiens
taaggcggggatgaatggacttttgtaagtgcagagctggagcaaagtttaggtcacagctttgccaagtcattgt

SEQ ID NO: 174310 - DNA, 75 bp, Homo sapiens
atgaatggacttttgtaagtgcagagctggagcaaagtttaggtcacagctttgccaagtcattgttttgttttc

SEQ ID NO: 174311 - DNA, 74 bp, Homo sapiens
tttgtaagtgcagagctggagcaaagtttaggtcacagctttgccaagtcattgttttgttttcctgggagtaa

SEQ ID NO: 174312 - DNA, 70 bp, Homo sapiens
agctggagcaaagtttaggtcacagctttgccaagtcattgttttgttttcctgggagtaaaccggagat

SEQ ID NO: 174313 - DNA, 67 bp, Homo sapiens
aaagtttaggtcacagctttgccaagtcattgttttgttttcctgggagtaaaccggagatttagta

SEQ ID NO: 174314 - DNA, 71 bp, Homo sapiens
tcacagctttgccaagtcattgttttgttttcctgggagtaaaccggagatttagtatggacctggctggt

SEQ ID NO: 174315 - DNA, 67 bp, Homo sapiens
ccaagtcattgttttgttttcctgggagtaaaccggagatttagtatggacctggctggtttaatta

SEQ ID NO: 174316 - DNA, 65 bp, Homo sapiens
gttttgttttcctgggagtaaaccggagatttagtatggacctggctggtttaattattgttttg

SEQ ID NO: 174317 - DNA, 65 bp, Homo sapiens
gagtaaaccggagatttagtatggacctggctggtttaattattgttttgggaaaaaaatctaaa

SEQ ID NO: 174318 - DNA, 68 bp, Homo sapiens
gagatttagtatggacctggctggtttaattattgttttgggaaaaaaatctaaaactcattccaaca

SEQ ID NO: 174319 - DNA, 69 bp, Homo sapiens
ggacctggctggtttaattattgttttgggaaaaaaatctaaaactcattccaacatgtcttgaaatga

SEQ ID NO: 174320 - DNA, 70 bp, Homo sapiens
ttaattattgttttgggaaaaaaatctaaaactcattccaacatgtcttgaaatgaattataatgttgac

SEQ ID NO: 174321 - DNA, 72 bp, Homo sapiens
ttttgggaaaaaaatctaaaactcattccaacatgtcttgaaatgaattataatgttgactctaaagtctca

SEQ ID NO: 174322 - DNA, 71 bp, Homo sapiens
ggaaaaaaatctaaaactcattccaacatgtcttgaaatgaattataatgttgactctaaagtctcaaaaa

SEQ ID NO: 174323 - DNA, 69 bp, Homo sapiens
aaagttctagtacagcagactgccttgggttaaaccttcttctaggaaggtgtcactctaggaattctt

SEQ ID NO: 174324 - DNA, 66 bp, Homo sapiens
cttgggttaaaccttcttctaggaaggtgtcactctaggaattctttcttactgagttttcttctt

SEQ ID NO: 174325 - DNA, 66 bp, Homo sapiens
gttaaaccttcttctaggaaggtgtcactctaggaattctttcttactgagttttcttcttttcgt

SEQ ID NO: 174326 - DNA, 68 bp, Homo sapiens
ccttcttctaggaaggtgtcactctaggaattctttcttactgagttttcttcttttcgttgttatag

SEQ ID NO: 174327 - DNA, 68 bp, Homo sapiens
cttctaggaaggtgtcactctaggaattctttcttactgagttttcttcttttcgttgttatagttaa

SEQ ID NO: 174328 - DNA, 68 bp, Homo sapiens
ggtgtcactctaggaattctttcttactgagttttcttcttttcgttgttatagttaattagagaaag

SEQ ID NO: 174329 - DNA, 67 bp, Homo sapiens
cactctaggaattctttcttactgagttttcttcttttcgttgttatagttaattagagaaagtaaa

SEQ ID NO: 174330 - DNA, 66 bp, Homo sapiens
ggaattctttcttactgagttttcttcttttcgttgttatagttaattagagaaagtaaatggaat

SEQ ID NO: 174331 - DNA, 68 bp, Homo sapiens
attctttcttactgagttttcttcttttcgttgttatagttaattagagaaagtaaatggaattatca

SEQ ID NO: 174332 - DNA, 68 bp, Homo sapiens
tactgagttttcttcttttcgttgttatagttaattagagaaagtaaatggaattatcattttgtagt

SEQ ID NO: 174333 - DNA, 67 bp, Homo sapiens
gagttttcttcttttcgttgttatagttaattagagaaagtaaatggaattatcattttgtagttgg

SEQ ID NO: 174334 - DNA, 67 bp, Homo sapiens
cttcttttcgttgttatagttaattagagaaagtaaatggaattatcattttgtagttggtagactt

SEQ ID NO: 174335 - DNA, 71 bp, Homo sapiens
atagttaattagagaaagtaaatggaattatcattttgtagttggtagactttaacaagcctcagcgatag

SEQ ID NO: 174336 - DNA, 70 bp, Homo sapiens
agagaaagtaaatggaattatcattttgtagttggtagactttaacaagcctcagcgatagtcttttaaa

SEQ ID NO: 174337 - DNA, 72 bp, Homo sapiens
aatggaattatcattttgtagttggtagactttaacaagcctcagcgatagtcttttaaagactggaagtgc

SEQ ID NO: 174338 - DNA, 72 bp, Homo sapiens
tcattttgtagttggtagactttaacaagcctcagcgatagtcttttaaagactggaagtgctatttgtctt

SEQ ID NO: 174339 - DNA, 71 bp, Homo sapiens
ttgtagttggtagactttaacaagcctcagcgatagtcttttaaagactggaagtgctatttgtcttttgg

SEQ ID NO: 174340 - DNA, 70 bp, Homo sapiens
tagactttaacaagcctcagcgatagtcttttaaagactggaagtgctatttgtcttttgggaaaaatag

SEQ ID NO: 174341 - DNA, 70 bp, Homo sapiens
aagcctcagcgatagtcttttaaagactggaagtgctatttgtcttttgggaaaaatagttcctaacatc

SEQ ID NO: 174342 - DNA, 71 bp, Homo sapiens
ttaaagactggaagtgctatttgtcttttgggaaaaatagttcctaacatctggatgagtaatccaggctt

SEQ ID NO: 174343 - DNA, 71 bp, Homo sapiens
aagtgctatttgtcttttgggaaaaatagttcctaacatctggatgagtaatccaggctttccactttcac

SEQ ID NO: 174344 - DNA, 73 bp, Homo sapiens
ttttgggaaaaatagttcctaacatctggatgagtaatccaggctttccactttcactgacagcctaaatcag

SEQ ID NO: 174345 - DNA, 76 bp, Homo sapiens
aaaaatagttcctaacatctggatgagtaatccaggctttccactttcactgacagcctaaatcagtcaatcagtg

SEQ ID NO: 174346 - DNA, 83 bp, Homo sapiens
ttcctaacatctggatgagtaatccaggctttccactttcactgacagcctaaatcagtcaatcagtgtcgatcagtcagtca

SEQ ID NO: 174347 - DNA, 81 bp, Homo sapiens
atgagtaatccaggctttccactttcactgacagcctaaatcagtcaatcagtgtcgatcagtcagtcagtgtttattgac

SEQ ID NO: 174348 - DNA, 80 bp, Homo sapiens
aatccaggctttccactttcactgacagcctaaatcagtcaatcagtgtcgatcagtcagtcagtgtttattgacgccca

SEQ ID NO: 174349 - DNA, 80 bp, Homo sapiens
ttccactttcactgacagcctaaatcagtcaatcagtgtcgatcagtcagtcagtgtttattgacgcccactcagggtcc

SEQ ID NO: 174350 - DNA, 80 bp, Homo sapiens
actgacagcctaaatcagtcaatcagtgtcgatcagtcagtcagtgtttattgacgcccactcagggtcccaggcattcc

SEQ ID NO: 174351 - DNA, 80 bp, Homo sapiens
taaatcagtcaatcagtgtcgatcagtcagtcagtgtttattgacgcccactcagggtcccaggcattccctgtcaggga

SEQ ID NO: 174352 - DNA, 79 bp, Homo sapiens
aatcagtgtcgatcagtcagtcagtgtttattgacgcccactcagggtcccaggcattccctgtcagggagagaattga

SEQ ID NO: 174353 - DNA, 77 bp, Homo sapiens
gcccactcagggtcccaggcattccctgtcagggagagaattgaatgagatcaagtttttcattgttctatcaaaga

SEQ ID NO: 174354 - DNA, 76 bp, Homo sapiens
attccctgtcagggagagaattgaatgagatcaagtttttcattgttctatcaaagaagcttccaccataaatgtg

SEQ ID NO: 174355 - DNA, 78 bp, Homo sapiens
aattgaatgagatcaagtttttcattgttctatcaaagaagcttccaccataaatgtggtttgatggtgcatgctacc

SEQ ID NO: 174356 - DNA, 80 bp, Homo sapiens
tcaagtttttcattgttctatcaaagaagcttccaccataaatgtggtttgatggtgcatgctacctgctactcagccta

SEQ ID NO: 174357 - DNA, 82 bp, Homo sapiens
tttcattgttctatcaaagaagcttccaccataaatgtggtttgatggtgcatgctacctgctactcagcctagctgtcaaa

SEQ ID NO: 174358 - DNA, 81 bp, Homo sapiens
ttccaccataaatgtggtttgatggtgcatgctacctgctactcagcctagctgtcaaagcaacactggtaaacataaaga

SEQ ID NO: 174359 - DNA, 83 bp, Homo sapiens
taaatgtggtttgatggtgcatgctacctgctactcagcctagctgtcaaagcaacactggtaaacataaagatggctagcaa

SEQ ID NO: 174360 - DNA, 82 bp, Homo sapiens
tttgatggtgcatgctacctgctactcagcctagctgtcaaagcaacactggtaaacataaagatggctagcaattattaaa

SEQ ID NO: 174361 - DNA, 80 bp, Homo sapiens
atgctacctgctactcagcctagctgtcaaagcaacactggtaaacataaagatggctagcaattattaaatgcttacta

SEQ ID NO: 174362 - DNA, 80 bp, Homo sapiens
tactcagcctagctgtcaaagcaacactggtaaacataaagatggctagcaattattaaatgcttactatgtgccaaata

SEQ ID NO: 174363 - DNA, 76 bp, Homo sapiens
agctgtcaaagcaacactggtaaacataaagatggctagcaattattaaatgcttactatgtgccaaatactgttt

SEQ ID NO: 174364 - DNA, 75 bp, Homo sapiens
agcaacactggtaaacataaagatggctagcaattattaaatgcttactatgtgccaaatactgttttattactc

SEQ ID NO: 174365 - DNA, 79 bp, Homo sapiens
tggtaaacataaagatggctagcaattattaaatgcttactatgtgccaaatactgttttattactctatgtgatctga

SEQ ID NO: 174366 - DNA, 81 bp, Homo sapiens
gatggctagcaattattaaatgcttactatgtgccaaatactgttttattactctatgtgatctgatatagttatatttca

SEQ ID NO: 174367 - DNA, 82 bp, Homo sapiens
gcaattattaaatgcttactatgtgccaaatactgttttattactctatgtgatctgatatagttatatttcatgatagcac

SEQ ID NO: 174368 - DNA, 81 bp, Homo sapiens
ctatgtgccaaatactgttttattactctatgtgatctgatatagttatatttcatgatagcactatgattatttccattt

SEQ ID NO: 174369 - DNA, 70 bp, Homo sapiens
ggaaactgagtcaccaaaaggttaggtaacttgtctagggtcacagagccagtgagtgggggtactggaa

SEQ ID NO: 174370 - DNA, 72 bp, Homo sapiens
aaaaggttaggtaacttgtctagggtcacagagccagtgagtgggggtactggaatttgaactcatgctatc

SEQ ID NO: 174371 - DNA, 77 bp, Homo sapiens
ttgtctagggtcacagagccagtgagtgggggtactggaatttgaactcatgctatctggcttgggagagcccactt

SEQ ID NO: 174372 - DNA, 79 bp, Homo sapiens
tcacagagccagtgagtgggggtactggaatttgaactcatgctatctggcttgggagagcccacttttagccactgga

SEQ ID NO: 174373 - DNA, 77 bp, Homo sapiens
agtgagtgggggtactggaatttgaactcatgctatctggcttgggagagcccacttttagccactggatgctctac

SEQ ID NO: 174374 - DNA, 78 bp, Homo sapiens
agtgggggtactggaatttgaactcatgctatctggcttgggagagcccacttttagccactggatgctctactgatg

SEQ ID NO: 174375 - DNA, 79 bp, Homo sapiens
ggtactggaatttgaactcatgctatctggcttgggagagcccacttttagccactggatgctctactgatgtctcttt

SEQ ID NO: 174376 - DNA, 80 bp, Homo sapiens
tggaatttgaactcatgctatctggcttgggagagcccacttttagccactggatgctctactgatgtctcttttggaat

SEQ ID NO: 174377 - DNA, 80 bp, Homo sapiens
aatttgaactcatgctatctggcttgggagagcccacttttagccactggatgctctactgatgtctcttttggaattca

SEQ ID NO: 174378 - DNA, 81 bp, Homo sapiens
tttgaactcatgctatctggcttgggagagcccacttttagccactggatgctctactgatgtctcttttggaattcactg

SEQ ID NO: 174379 - DNA, 81 bp, Homo sapiens
actcatgctatctggcttgggagagcccacttttagccactggatgctctactgatgtctcttttggaattcactgtgatt

SEQ ID NO: 174380 - DNA, 79 bp, Homo sapiens
tatctggcttgggagagcccacttttagccactggatgctctactgatgtctcttttggaattcactgtgattttcaaa

SEQ ID NO: 174381 - DNA, 78 bp, Homo sapiens
agagcccacttttagccactggatgctctactgatgtctcttttggaattcactgtgattttcaaaatggtatctcca

SEQ ID NO: 174382 - DNA, 78 bp, Homo sapiens
tggatgctctactgatgtctcttttggaattcactgtgattttcaaaatggtatctccagaaactcctccaattaatc

SEQ ID NO: 174383 - DNA, 74 bp, Homo sapiens
actgatgtctcttttggaattcactgtgattttcaaaatggtatctccagaaactcctccaattaatccctgaa

SEQ ID NO: 174384 - DNA, 71 bp, Homo sapiens
aattcactgtgattttcaaaatggtatctccagaaactcctccaattaatccctgaaatgtaagggtagtc

SEQ ID NO: 174385 - DNA, 68 bp, Homo sapiens
ttttcaaaatggtatctccagaaactcctccaattaatccctgaaatgtaagggtagtctctttttct

SEQ ID NO: 174386 - DNA, 69 bp, Homo sapiens
aatggtatctccagaaactcctccaattaatccctgaaatgtaagggtagtctctttttcttttctaga

SEQ ID NO: 174387 - DNA, 67 bp, Homo sapiens
aaactcctccaattaatccctgaaatgtaagggtagtctctttttcttttctagaaacctgatcctg

SEQ ID NO: 174388 - DNA, 70 bp, Homo sapiens
ctgaaatgtaagggtagtctctttttcttttctagaaacctgatcctggcaaaatgattagctttaacag

SEQ ID NO: 174389 - DNA, 70 bp, Homo sapiens
tgtaagggtagtctctttttcttttctagaaacctgatcctggcaaaatgattagctttaacagtaggat

SEQ ID NO: 174390 - DNA, 65 bp, Homo sapiens
ttttttaaatgtatataaaaatacttgtatgtaagaaatcctaaaagggtatttagtgaaaagta

SEQ ID NO: 174391 - DNA, 66 bp, Homo sapiens
gtatataaaaatacttgtatgtaagaaatcctaaaagggtatttagtgaaaagtaattccctctcc

SEQ ID NO: 174392 - DNA, 67 bp, Homo sapiens
atacttgtatgtaagaaatcctaaaagggtatttagtgaaaagtaattccctctcctattcattttc

SEQ ID NO: 174393 - DNA, 65 bp, Homo sapiens
atgtaagaaatcctaaaagggtatttagtgaaaagtaattccctctcctattcattttccccacc

SEQ ID NO: 174394 - DNA, 66 bp, Homo sapiens
aatcctaaaagggtatttagtgaaaagtaattccctctcctattcattttccccacctagaggcaa

SEQ ID NO: 174395 - DNA, 69 bp, Homo sapiens
tatttagtgaaaagtaattccctctcctattcattttccccacctagaggcaatcaccctggagtttta

SEQ ID NO: 174396 - DNA, 69 bp, Homo sapiens
aaaagtaattccctctcctattcattttccccacctagaggcaatcaccctggagttttatgtgtgtcc

SEQ ID NO: 174397 - DNA, 72 bp, Homo sapiens
ttccctctcctattcattttccccacctagaggcaatcaccctggagttttatgtgtgtccttctagaaata

SEQ ID NO: 174398 - DNA, 76 bp, Homo sapiens
attcattttccccacctagaggcaatcaccctggagttttatgtgtgtccttctagaaatactgtgtgcacatata

SEQ ID NO: 174399 - DNA, 77 bp, Homo sapiens
acctagaggcaatcaccctggagttttatgtgtgtccttctagaaatactgtgtgcacatataagcatttattataa

SEQ ID NO: 174400 - DNA, 78 bp, Homo sapiens
caatcaccctggagttttatgtgtgtccttctagaaatactgtgtgcacatataagcatttattataacatgtgaatt

SEQ ID NO: 174401 - DNA, 80 bp, Homo sapiens
ctggagttttatgtgtgtccttctagaaatactgtgtgcacatataagcatttattataacatgtgaattttgctctcca

SEQ ID NO: 174402 - DNA, 82 bp, Homo sapiens
tatgtgtgtccttctagaaatactgtgtgcacatataagcatttattataacatgtgaattttgctctccagctttttgtga

SEQ ID NO: 174403 - DNA, 82 bp, Homo sapiens
ccttctagaaatactgtgtgcacatataagcatttattataacatgtgaattttgctctccagctttttgtgaatatgcatg

SEQ ID NO: 174404 - DNA, 85 bp, Homo sapiens
ctgtgtgcacatataagcatttattataacatgtgaattttgctctccagctttttgtgaatatgcatgtttatagcagtatcta

SEQ ID NO: 174405 - DNA, 82 bp, Homo sapiens
tataagcatttattataacatgtgaattttgctctccagctttttgtgaatatgcatgtttatagcagtatctattcaccag

SEQ ID NO: 174406 - DNA, 80 bp, Homo sapiens
catttattataacatgtgaattttgctctccagctttttgtgaatatgcatgtttatagcagtatctattcaccaggacc

SEQ ID NO: 174407 - DNA, 80 bp, Homo sapiens
acatgtgaattttgctctccagctttttgtgaatatgcatgtttatagcagtatctattcaccaggaccgcatttagctt

SEQ ID NO: 174408 - DNA, 81 bp, Homo sapiens
ttttgctctccagctttttgtgaatatgcatgtttatagcagtatctattcaccaggaccgcatttagctttgcaatattc

SEQ ID NO: 174409 - DNA, 79 bp, Homo sapiens
ttttgtgaatatgcatgtttatagcagtatctattcaccaggaccgcatttagctttgcaatattcggtctactttgaa

SEQ ID NO: 174410 - DNA, 78 bp, Homo sapiens
atgcatgtttatagcagtatctattcaccaggaccgcatttagctttgcaatattcggtctactttgaacactgaatt

SEQ ID NO: 174411 - DNA, 75 bp, Homo sapiens
gtttatagcagtatctattcaccaggaccgcatttagctttgcaatattcggtctactttgaacactgaattttc

SEQ ID NO: 174412 - DNA, 74 bp, Homo sapiens
agtatctattcaccaggaccgcatttagctttgcaatattcggtctactttgaacactgaattttctgattatt

SEQ ID NO: 174413 - DNA, 72 bp, Homo sapiens
ttagctttgcaatattcggtctactttgaacactgaattttctgattatttctttcccctggagacgtcaaa

SEQ ID NO: 174414 - DNA, 70 bp, Homo sapiens
caatattcggtctactttgaacactgaattttctgattatttctttcccctggagacgtcaaagaaaaca

SEQ ID NO: 174415 - DNA, 71 bp, Homo sapiens
tactttgaacactgaattttctgattatttctttcccctggagacgtcaaagaaaacatgaacactagcct

SEQ ID NO: 174416 - DNA, 71 bp, Homo sapiens
actgaattttctgattatttctttcccctggagacgtcaaagaaaacatgaacactagccttttgaattca

SEQ ID NO: 174417 - DNA, 69 bp, Homo sapiens
ctgattatttctttcccctggagacgtcaaagaaaacatgaacactagccttttgaattcagggttttc

SEQ ID NO: 174418 - DNA, 67 bp, Homo sapiens
tatttctttcccctggagacgtcaaagaaaacatgaacactagccttttgaattcagggttttcttt

SEQ ID NO: 174419 - DNA, 67 bp, Homo sapiens
ccctggagacgtcaaagaaaacatgaacactagccttttgaattcagggttttcttttcattttatt

SEQ ID NO: 174420 - DNA, 79 bp, Homo sapiens
tttcattttattttcatttgttcatgtgtttgtatttacatacattgtgcctgaatattgtacatgtatgtgacagttg

SEQ ID NO: 174421 - DNA, 81 bp, Homo sapiens
ttttcatttgttcatgtgtttgtatttacatacattgtgcctgaatattgtacatgtatgtgacagttgtgtactgtagaa

SEQ ID NO: 174422 - DNA, 80 bp, Homo sapiens
gttcatgtgtttgtatttacatacattgtgcctgaatattgtacatgtatgtgacagttgtgtactgtagaatcaaaaac

SEQ ID NO: 174423 - DNA, 82 bp, Homo sapiens
tgtatttacatacattgtgcctgaatattgtacatgtatgtgacagttgtgtactgtagaatcaaaaactaatgtctgtgaa

SEQ ID NO: 174424 - DNA, 82 bp, Homo sapiens
ttacatacattgtgcctgaatattgtacatgtatgtgacagttgtgtactgtagaatcaaaaactaatgtctgtgaactgaa

SEQ ID NO: 174425 - DNA, 79 bp, Homo sapiens
ctgaatattgtacatgtatgtgacagttgtgtactgtagaatcaaaaactaatgtctgtgaactgaactcttcttgaac

SEQ ID NO: 174426 - DNA, 76 bp, Homo sapiens
gtacatgtatgtgacagttgtgtactgtagaatcaaaaactaatgtctgtgaactgaactcttcttgaactttttg

SEQ ID NO: 174427 - DNA, 74 bp, Homo sapiens
gtatgtgacagttgtgtactgtagaatcaaaaactaatgtctgtgaactgaactcttcttgaactttttgttgt

SEQ ID NO: 174428 - DNA, 71 bp, Homo sapiens
actgcactcagcctgaactttcgaaatttattttaagggcccacttttaaatgcttcttttcagcagctaa

SEQ ID NO: 174429 - DNA, 69 bp, Homo sapiens
tcagcctgaactttcgaaatttattttaagggcccacttttaaatgcttcttttcagcagctaactttc

SEQ ID NO: 174430 - DNA, 67 bp, Homo sapiens
actttcgaaatttattttaagggcccacttttaaatgcttcttttcagcagctaactttccagcgga

SEQ ID NO: 174431 - DNA, 73 bp, Homo sapiens
atttattttaagggcccacttttaaatgcttcttttcagcagctaactttccagcggatgcttcatgtggtgc

SEQ ID NO: 174432 - DNA, 80 bp, Homo sapiens
aaatgcttcttttcagcagctaactttccagcggatgcttcatgtggtgccagccatacagatacgcttttagaacttga

SEQ ID NO: 174433 - DNA, 81 bp, Homo sapiens
tcttttcagcagctaactttccagcggatgcttcatgtggtgccagccatacagatacgcttttagaacttgagctttgga

SEQ ID NO: 174434 - DNA, 80 bp, Homo sapiens
taactttccagcggatgcttcatgtggtgccagccatacagatacgcttttagaacttgagctttggagaagcttatgct

SEQ ID NO: 174435 - DNA, 83 bp, Homo sapiens
agcggatgcttcatgtggtgccagccatacagatacgcttttagaacttgagctttggagaagcttatgcttgctttctgctc

SEQ ID NO: 174436 - DNA, 83 bp, Homo sapiens
cttcatgtggtgccagccatacagatacgcttttagaacttgagctttggagaagcttatgcttgctttctgctctctcctga

SEQ ID NO: 174437 - DNA, 82 bp, Homo sapiens
agccatacagatacgcttttagaacttgagctttggagaagcttatgcttgctttctgctctctcctgaggtcatcagatac

SEQ ID NO: 174438 - DNA, 78 bp, Homo sapiens
atacgcttttagaacttgagctttggagaagcttatgcttgctttctgctctctcctgaggtcatcagatacttccct

SEQ ID NO: 174439 - DNA, 80 bp, Homo sapiens
ttagaacttgagctttggagaagcttatgcttgctttctgctctctcctgaggtcatcagatacttcccttgttcagtaa

SEQ ID NO: 174440 - DNA, 79 bp, Homo sapiens
tttggagaagcttatgcttgctttctgctctctcctgaggtcatcagatacttcccttgttcagtaacaaagaaagtga

SEQ ID NO: 174441 - DNA, 78 bp, Homo sapiens
aagcttatgcttgctttctgctctctcctgaggtcatcagatacttcccttgttcagtaacaaagaaagtgagactct

SEQ ID NO: 174442 - DNA, 73 bp, Homo sapiens
tctcctgaggtcatcagatacttcccttgttcagtaacaaagaaagtgagactctttctgttacctaataaaa

SEQ ID NO: 174443 - DNA, 71 bp, Homo sapiens
aggtcatcagatacttcccttgttcagtaacaaagaaagtgagactctttctgttacctaataaaaggcca

SEQ ID NO: 174444 - DNA, 70 bp, Homo sapiens
agatacttcccttgttcagtaacaaagaaagtgagactctttctgttacctaataaaaggccagtctgtc

SEQ ID NO: 174445 - DNA, 70 bp, Homo sapiens
cttgttcagtaacaaagaaagtgagactctttctgttacctaataaaaggccagtctgtccatttcattt

SEQ ID NO: 174446 - DNA, 71 bp, Homo sapiens
taacaaagaaagtgagactctttctgttacctaataaaaggccagtctgtccatttcattttgggtgctat

SEQ ID NO: 174447 - DNA, 70 bp, Homo sapiens
aaagaaagtgagactctttctgttacctaataaaaggccagtctgtccatttcattttgggtgctattaa

SEQ ID NO: 174448 - DNA, 71 bp, Homo sapiens
actctttctgttacctaataaaaggccagtctgtccatttcattttgggtgctattaacattgttgaccat

SEQ ID NO: 174449 - DNA, 72 bp, Homo sapiens
ttctgttacctaataaaaggccagtctgtccatttcattttgggtgctattaacattgttgaccatttacaa

SEQ ID NO: 174450 - DNA, 74 bp, Homo sapiens
tgttacctaataaaaggccagtctgtccatttcattttgggtgctattaacattgttgaccatttacaatgtca

SEQ ID NO: 174451 - DNA, 74 bp, Homo sapiens
ttacctaataaaaggccagtctgtccatttcattttgggtgctattaacattgttgaccatttacaatgtcaca

SEQ ID NO: 174452 - DNA, 74 bp, Homo sapiens
taataaaaggccagtctgtccatttcattttgggtgctattaacattgttgaccatttacaatgtcacaggccc

SEQ ID NO: 174453 - DNA, 84 bp, Homo sapiens
catttcattttgggtgctattaacattgttgaccatttacaatgtcacaggccctggcactgagcacatcatgtgcagcctcac

SEQ ID NO: 174454 - DNA, 82 bp, Homo sapiens
ttgggtgctattaacattgttgaccatttacaatgtcacaggccctggcactgagcacatcatgtgcagcctcacttaattt

SEQ ID NO: 174455 - DNA, 83 bp, Homo sapiens
tattaacattgttgaccatttacaatgtcacaggccctggcactgagcacatcatgtgcagcctcacttaattttcacaccag

SEQ ID NO: 174456 - DNA, 81 bp, Homo sapiens
aatgtcacaggccctggcactgagcacatcatgtgcagcctcacttaattttcacaccagtgccctgaggtttctagaaaa

SEQ ID NO: 174457 - DNA, 78 bp, Homo sapiens
ggcactgagcacatcatgtgcagcctcacttaattttcacaccagtgccctgaggtttctagaaaagaggaagggccc

SEQ ID NO: 174458 - DNA, 73 bp, Homo sapiens
atcatgtgcagcctcacttaattttcacaccagtgccctgaggtttctagaaaagaggaagggccccagttta

SEQ ID NO: 174459 - DNA, 70 bp, Homo sapiens
tcacttaattttcacaccagtgccctgaggtttctagaaaagaggaagggccccagtttaggtggcagta

SEQ ID NO: 174460 - DNA, 68 bp, Homo sapiens
taattttcacaccagtgccctgaggtttctagaaaagaggaagggccccagtttaggtggcagtactt

SEQ ID NO: 174461 - DNA, 67 bp, Homo sapiens
accagtgccctgaggtttctagaaaagaggaagggccccagtttaggtggcagtacttttcaatttg

SEQ ID NO: 174462 - DNA, 67 bp, Homo sapiens
aaaagaggaagggccccagtttaggtggcagtacttttcaatttggaggcaggagatcccagttttc

SEQ ID NO: 174463 - DNA, 69 bp, Homo sapiens
aagggccccagtttaggtggcagtacttttcaatttggaggcaggagatcccagttttcctctgacctc

SEQ ID NO: 174464 - DNA, 73 bp, Homo sapiens
tttaggtggcagtacttttcaatttggaggcaggagatcccagttttcctctgacctctctgagcttccgtgt

SEQ ID NO: 174465 - DNA, 72 bp, Homo sapiens
tacttttcaatttggaggcaggagatcccagttttcctctgacctctctgagcttccgtgtttttacctcta

SEQ ID NO: 174466 - DNA, 73 bp, Homo sapiens
aatttggaggcaggagatcccagttttcctctgacctctctgagcttccgtgtttttacctctaagacagaga

SEQ ID NO: 174467 - DNA, 75 bp, Homo sapiens
agatcccagttttcctctgacctctctgagcttccgtgtttttacctctaagacagagagaccaatctctgttca

SEQ ID NO: 174468 - DNA, 75 bp, Homo sapiens
ttttcctctgacctctctgagcttccgtgtttttacctctaagacagagagaccaatctctgttcagccacctta

SEQ ID NO: 174469 - DNA, 74 bp, Homo sapiens
ctgagcttccgtgtttttacctctaagacagagagaccaatctctgttcagccaccttagaggattgttttgag

SEQ ID NO: 174470 - DNA, 75 bp, Homo sapiens
ttttacctctaagacagagagaccaatctctgttcagccaccttagaggattgttttgagggtctataagatgat

SEQ ID NO: 174471 - DNA, 77 bp, Homo sapiens
tctaagacagagagaccaatctctgttcagccaccttagaggattgttttgagggtctataagatgattgagggaaa

SEQ ID NO: 174472 - DNA, 71 bp, Homo sapiens
accttagaggattgttttgagggtctataagatgattgagggaaagctctgaaactggtaagagttaaatg

SEQ ID NO: 174473 - DNA, 72 bp, Homo sapiens
aggattgttttgagggtctataagatgattgagggaaagctctgaaactggtaagagttaaatgtatgtttg

SEQ ID NO: 174474 - DNA, 76 bp, Homo sapiens
gtctataagatgattgagggaaagctctgaaactggtaagagttaaatgtatgtttgtgttatgttgatacgagat

SEQ ID NO: 174475 - DNA, 76 bp, Homo sapiens
taagatgattgagggaaagctctgaaactggtaagagttaaatgtatgtttgtgttatgttgatacgagattcctc

SEQ ID NO: 174476 - DNA, 76 bp, Homo sapiens
aaactggtaagagttaaatgtatgtttgtgttatgttgatacgagattcctctgagatgctctttagtccaggcag

SEQ ID NO: 174477 - DNA, 77 bp, Homo sapiens
gtaagagttaaatgtatgtttgtgttatgttgatacgagattcctctgagatgctctttagtccaggcaggtttatg

SEQ ID NO: 174478 - DNA, 81 bp, Homo sapiens
tatgtttgtgttatgttgatacgagattcctctgagatgctctttagtccaggcaggtttatggctcacacagcgttccta

SEQ ID NO: 174479 - DNA, 80 bp, Homo sapiens
ttatgttgatacgagattcctctgagatgctctttagtccaggcaggtttatggctcacacagcgttcctagggtctcat

SEQ ID NO: 174480 - DNA, 81 bp, Homo sapiens
atacgagattcctctgagatgctctttagtccaggcaggtttatggctcacacagcgttcctagggtctcattcttctgca

SEQ ID NO: 174481 - DNA, 83 bp, Homo sapiens
ttcctctgagatgctctttagtccaggcaggtttatggctcacacagcgttcctagggtctcattcttctgcacaggcaggca

SEQ ID NO: 174482 - DNA, 82 bp, Homo sapiens
aggcaggtttatggctcacacagcgttcctagggtctcattcttctgcacaggcaggcagctcccgagccagccagtctgga

SEQ ID NO: 174483 - DNA, 81 bp, Homo sapiens
tttatggctcacacagcgttcctagggtctcattcttctgcacaggcaggcagctcccgagccagccagtctggacccaaa

SEQ ID NO: 174484 - DNA, 80 bp, Homo sapiens
acacagcgttcctagggtctcattcttctgcacaggcaggcagctcccgagccagccagtctggacccaaatgccacctg

SEQ ID NO: 174485 - DNA, 85 bp, Homo sapiens
attcttctgcacaggcaggcagctcccgagccagccagtctggacccaaatgccacctgtgctcttggctggtcttgcgcattca

SEQ ID NO: 174486 - DNA, 83 bp, Homo sapiens
aggcaggcagctcccgagccagccagtctggacccaaatgccacctgtgctcttggctggtcttgcgcattcaccgaggctca

SEQ ID NO: 174487 - DNA, 80 bp, Homo sapiens
tcccgagccagccagtctggacccaaatgccacctgtgctcttggctggtcttgcgcattcaccgaggctcactgtacct

SEQ ID NO: 174488 - DNA, 79 bp, Homo sapiens
agccagtctggacccaaatgccacctgtgctcttggctggtcttgcgcattcaccgaggctcactgtaccttggtgttc

SEQ ID NO: 174489 - DNA, 77 bp, Homo sapiens
acccaaatgccacctgtgctcttggctggtcttgcgcattcaccgaggctcactgtaccttggtgttcccatttcta

SEQ ID NO: 174490 - DNA, 77 bp, Homo sapiens
aatgccacctgtgctcttggctggtcttgcgcattcaccgaggctcactgtaccttggtgttcccatttctaaaata

SEQ ID NO: 174491 - DNA, 75 bp, Homo sapiens
tcttggctggtcttgcgcattcaccgaggctcactgtaccttggtgttcccatttctaaaataaggcctgtagta

SEQ ID NO: 174492 - DNA, 70 bp, Homo sapiens
attcaccgaggctcactgtaccttggtgttcccatttctaaaataaggcctgtagtaatccctacctcac

SEQ ID NO: 174493 - DNA, 73 bp, Homo sapiens
tcactgtaccttggtgttcccatttctaaaataaggcctgtagtaatccctacctcactgagttgttgagaga

SEQ ID NO: 174494 - DNA, 73 bp, Homo sapiens
tggtgttcccatttctaaaataaggcctgtagtaatccctacctcactgagttgttgagagacttcatgtaaa

SEQ ID NO: 174495 - DNA, 73 bp, Homo sapiens
atttctaaaataaggcctgtagtaatccctacctcactgagttgttgagagacttcatgtaaattgtttagca

SEQ ID NO: 174496 - DNA, 78 bp, Homo sapiens
tgtagtaatccctacctcactgagttgttgagagacttcatgtaaattgtttagcagggagcctggcacagaacaaga

SEQ ID NO: 174497 - DNA, 79 bp, Homo sapiens
tacctcactgagttgttgagagacttcatgtaaattgtttagcagggagcctggcacagaacaagagcctagcagaaaa

SEQ ID NO: 174498 - DNA, 77 bp, Homo sapiens
actgagttgttgagagacttcatgtaaattgtttagcagggagcctggcacagaacaagagcctagcagaaaagtaa

SEQ ID NO: 174499 - DNA, 75 bp, Homo sapiens
gacttcatgtaaattgtttagcagggagcctggcacagaacaagagcctagcagaaaagtaagctgttgttactt

SEQ ID NO: 174500 - DNA, 74 bp, Homo sapiens
taaattgtttagcagggagcctggcacagaacaagagcctagcagaaaagtaagctgttgttactttaagcaaa

SEQ ID NO: 174501 - DNA, 74 bp, Homo sapiens
gtttagcagggagcctggcacagaacaagagcctagcagaaaagtaagctgttgttactttaagcaaatattta

SEQ ID NO: 174502 - DNA, 75 bp, Homo sapiens
tggcacagaacaagagcctagcagaaaagtaagctgttgttactttaagcaaatatttagcagcctaaaatggtg

SEQ ID NO: 174503 - DNA, 72 bp, Homo sapiens
acaagagcctagcagaaaagtaagctgttgttactttaagcaaatatttagcagcctaaaatggtggcttta

SEQ ID NO: 174504 - DNA, 70 bp, Homo sapiens
agcagaaaagtaagctgttgttactttaagcaaatatttagcagcctaaaatggtggctttaccagtttc

SEQ ID NO: 174505 - DNA, 70 bp, Homo sapiens
agtaagctgttgttactttaagcaaatatttagcagcctaaaatggtggctttaccagtttctgtaatgg

SEQ ID NO: 174506 - DNA, 75 bp, Homo sapiens
tttagcagcctaaaatggtggctttaccagtttctgtaatggttgaagtgatgacagaattcagccaatcccacc

SEQ ID NO: 174507 - DNA, 72 bp, Homo sapiens
aaatggtggctttaccagtttctgtaatggttgaagtgatgacagaattcagccaatcccacccatagtttt

SEQ ID NO: 174508 - DNA, 74 bp, Homo sapiens
tttaccagtttctgtaatggttgaagtgatgacagaattcagccaatcccacccatagtttttcttgctaataa

SEQ ID NO: 174509 - DNA, 71 bp, Homo sapiens
agccaatcccacccatagtttttcttgctaataaagcagtttgtttctaagtgtgttttgatgcgtataat

SEQ ID NO: 174510 - DNA, 70 bp, Homo sapiens
ccacccatagtttttcttgctaataaagcagtttgtttctaagtgtgttttgatgcgtataattaatact

SEQ ID NO: 174511 - DNA, 71 bp, Homo sapiens
cttgctaataaagcagtttgtttctaagtgtgttttgatgcgtataattaatacttcctgtccttgatttt

SEQ ID NO: 174512 - DNA, 71 bp, Homo sapiens
aaagcagtttgtttctaagtgtgttttgatgcgtataattaatacttcctgtccttgatttttggctgaaa

SEQ ID NO: 174513 - DNA, 72 bp, Homo sapiens
gtttctaagtgtgttttgatgcgtataattaatacttcctgtccttgatttttggctgaaaaatgtcttctc

SEQ ID NO: 174514 - DNA, 72 bp, Homo sapiens
aagtgtgttttgatgcgtataattaatacttcctgtccttgatttttggctgaaaaatgtcttctcttcctc

SEQ ID NO: 174515 - DNA, 71 bp, Homo sapiens
cgtataattaatacttcctgtccttgatttttggctgaaaaatgtcttctcttcctcgcaccctctgttat

SEQ ID NO: 174516 - DNA, 70 bp, Homo sapiens
aattaatacttcctgtccttgatttttggctgaaaaatgtcttctcttcctcgcaccctctgttattccc

SEQ ID NO: 174517 - DNA, 72 bp, Homo sapiens
tccttgatttttggctgaaaaatgtcttctcttcctcgcaccctctgttattcccgtagtgaatattttcat

SEQ ID NO: 174518 - DNA, 75 bp, Homo sapiens
ttctcttcctcgcaccctctgttattcccgtagtgaatattttcattgtggaagagaaattcccattggctcatg

SEQ ID NO: 174519 - DNA, 74 bp, Homo sapiens
tgttattcccgtagtgaatattttcattgtggaagagaaattcccattggctcatggttggcattttatttctc

SEQ ID NO: 174520 - DNA, 77 bp, Homo sapiens
tgaatattttcattgtggaagagaaattcccattggctcatggttggcattttatttctcctgtccagagacaatat

SEQ ID NO: 174521 - DNA, 76 bp, Homo sapiens
ttttcattgtggaagagaaattcccattggctcatggttggcattttatttctcctgtccagagacaatatttcca

SEQ ID NO: 174522 - DNA, 75 bp, Homo sapiens
aagagaaattcccattggctcatggttggcattttatttctcctgtccagagacaatatttccacagcctcaaac

SEQ ID NO: 174523 - DNA, 73 bp, Homo sapiens
atggttggcattttatttctcctgtccagagacaatatttccacagcctcaaacgtgaaaactgaaaatctgg

SEQ ID NO: 174524 - DNA, 73 bp, Homo sapiens
attttatttctcctgtccagagacaatatttccacagcctcaaacgtgaaaactgaaaatctggtgccactta

SEQ ID NO: 174525 - DNA, 73 bp, Homo sapiens
tgtccagagacaatatttccacagcctcaaacgtgaaaactgaaaatctggtgccacttaccaccttgtaaaa

SEQ ID NO: 174526 - DNA, 72 bp, Homo sapiens
caatatttccacagcctcaaacgtgaaaactgaaaatctggtgccacttaccaccttgtaaaatcaagtcat

SEQ ID NO: 174527 - DNA, 72 bp, Homo sapiens
ttccacagcctcaaacgtgaaaactgaaaatctggtgccacttaccaccttgtaaaatcaagtcattgtaat

SEQ ID NO: 174528 - DNA, 72 bp, Homo sapiens
aaacgtgaaaactgaaaatctggtgccacttaccaccttgtaaaatcaagtcattgtaattgtgccagtata

SEQ ID NO: 174529 - DNA, 78 bp, Homo sapiens
tgaaaatctggtgccacttaccaccttgtaaaatcaagtcattgtaattgtgccagtataatcattgatctgaaataa

SEQ ID NO: 174530 - DNA, 78 bp, Homo sapiens
atctggtgccacttaccaccttgtaaaatcaagtcattgtaattgtgccagtataatcattgatctgaaataaaagca

SEQ ID NO: 174531 - DNA, 75 bp, Homo sapiens
acttaccaccttgtaaaatcaagtcattgtaattgtgccagtataatcattgatctgaaataaaagcagaaaata

SEQ ID NO: 174532 - DNA, 76 bp, Homo sapiens
agtcattgtaattgtgccagtataatcattgatctgaaataaaagcagaaaataaatcaatgggtagctttcttaa

SEQ ID NO: 174533 - DNA, 76 bp, Homo sapiens
tgtgccagtataatcattgatctgaaataaaagcagaaaataaatcaatgggtagctttcttaaatacataagaac

SEQ ID NO: 174534 - DNA, 71 bp, Homo sapiens
ctgaaataaaagcagaaaataaatcaatgggtagctttcttaaatacataagaactaaagatcaaatggga

SEQ ID NO: 174535 - DNA, 72 bp, Homo sapiens
gcagaaaataaatcaatgggtagctttcttaaatacataagaactaaagatcaaatgggatattggaagact

SEQ ID NO: 174536 - DNA, 69 bp, Homo sapiens
aaatcaatgggtagctttcttaaatacataagaactaaagatcaaatgggatattggaagactttaact

SEQ ID NO: 174537 - DNA, 69 bp, Homo sapiens
tgggtagctttcttaaatacataagaactaaagatcaaatgggatattggaagactttaacttttcctc

SEQ ID NO: 174538 - DNA, 70 bp, Homo sapiens
gaactaaagatcaaatgggatattggaagactttaacttttcctccataatggtggatcttaattaaaca

SEQ ID NO: 174539 - DNA, 69 bp, Homo sapiens
gggatattggaagactttaacttttcctccataatggtggatcttaattaaacacacagaagaacaatt

SEQ ID NO: 174540 - DNA, 69 bp, Homo sapiens
gaagactttaacttttcctccataatggtggatcttaattaaacacacagaagaacaatttataaaata

SEQ ID NO: 174541 - DNA, 70 bp, Homo sapiens
tttcctccataatggtggatcttaattaaacacacagaagaacaatttataaaataaattcataggtttg

SEQ ID NO: 174542 - DNA, 70 bp, Homo sapiens
cataatggtggatcttaattaaacacacagaagaacaatttataaaataaattcataggtttgtttgttc

SEQ ID NO: 174543 - DNA, 68 bp, Homo sapiens
taattaaacacacagaagaacaatttataaaataaattcataggtttgtttgttcttttttagtgtca

SEQ ID NO: 174544 - DNA, 67 bp, Homo sapiens
cacacagaagaacaatttataaaataaattcataggtttgtttgttcttttttagtgtcaattttta

SEQ ID NO: 174545 - DNA, 64 bp, Homo sapiens
tataaaataaattcataggtttgtttgttcttttttagtgtcaatttttaaaactatctctttt

SEQ ID NO: 174546 - DNA, 63 bp, Homo sapiens
aataaattcataggtttgtttgttcttttttagtgtcaatttttaaaactatctcttttttaa

SEQ ID NO: 174547 - DNA, 77 bp, Homo sapiens
gcacccagcctaaaactgtctcaaaagtagacagcataatgaactcccatgtacttatgatgtggctttaacaatta

SEQ ID NO: 174548 - DNA, 78 bp, Homo sapiens
taaaactgtctcaaaagtagacagcataatgaactcccatgtacttatgatgtggctttaacaattatcagcttatag

SEQ ID NO: 174549 - DNA, 79 bp, Homo sapiens
tcaaaagtagacagcataatgaactcccatgtacttatgatgtggctttaacaattatcagcttatagtcagtcttgtt

SEQ ID NO: 174550 - DNA, 78 bp, Homo sapiens
agtagacagcataatgaactcccatgtacttatgatgtggctttaacaattatcagcttatagtcagtcttgttttct

SEQ ID NO: 174551 - DNA, 75 bp, Homo sapiens
gaactcccatgtacttatgatgtggctttaacaattatcagcttatagtcagtcttgttttcttacataataaag

SEQ ID NO: 174552 - DNA, 75 bp, Homo sapiens
cccatgtacttatgatgtggctttaacaattatcagcttatagtcagtcttgttttcttacataataaagttaca

SEQ ID NO: 174553 - DNA, 75 bp, Homo sapiens
tgatgtggctttaacaattatcagcttatagtcagtcttgttttcttacataataaagttacagtttcaaagcca

SEQ ID NO: 174554 - DNA, 73 bp, Homo sapiens
taacaattatcagcttatagtcagtcttgttttcttacataataaagttacagtttcaaagccattaggaaga

SEQ ID NO: 174555 - DNA, 74 bp, Homo sapiens
cagcttatagtcagtcttgttttcttacataataaagttacagtttcaaagccattaggaagaatagcttgcta

SEQ ID NO: 174556 - DNA, 72 bp, Homo sapiens
gtcagtcttgttttcttacataataaagttacagtttcaaagccattaggaagaatagcttgctaattataa

SEQ ID NO: 174557 - DNA, 70 bp, Homo sapiens
tcttacataataaagttacagtttcaaagccattaggaagaatagcttgctaattataattacttagttt

SEQ ID NO: 174558 - DNA, 71 bp, Homo sapiens
taaagttacagtttcaaagccattaggaagaatagcttgctaattataattacttagttttgatagtgtaa

SEQ ID NO: 174559 - DNA, 74 bp, Homo sapiens
gccattaggaagaatagcttgctaattataattacttagttttgatagtgtaactttgtcctcagatgggtaga

SEQ ID NO: 174560 - DNA, 73 bp, Homo sapiens
gaatagcttgctaattataattacttagttttgatagtgtaactttgtcctcagatgggtagaatcgttactc

SEQ ID NO: 174561 - DNA, 72 bp, Homo sapiens
gctaattataattacttagttttgatagtgtaactttgtcctcagatgggtagaatcgttactctggaacag

SEQ ID NO: 174562 - DNA, 70 bp, Homo sapiens
ataattacttagttttgatagtgtaactttgtcctcagatgggtagaatcgttactctggaacaggggtg

SEQ ID NO: 174563 - DNA, 73 bp, Homo sapiens
ttttgatagtgtaactttgtcctcagatgggtagaatcgttactctggaacaggggtgtccaatcttggcttc

SEQ ID NO: 174564 - DNA, 72 bp, Homo sapiens
gtgtaactttgtcctcagatgggtagaatcgttactctggaacaggggtgtccaatcttggcttccctgggc

SEQ ID NO: 174565 - DNA, 71 bp, Homo sapiens
gagccactgcaccgggccaaaaatcttataatgtttttaagaaagtttgcaaatttgttaggccacattca

SEQ ID NO: 174566 - DNA, 68 bp, Homo sapiens
actgcaccgggccaaaaatcttataatgtttttaagaaagtttgcaaatttgttaggccacattcaaa

SEQ ID NO: 174567 - DNA, 68 bp, Homo sapiens
gccaaaaatcttataatgtttttaagaaagtttgcaaatttgttaggccacattcaaagccgtcctgg

SEQ ID NO: 174568 - DNA, 72 bp, Homo sapiens
ttataatgtttttaagaaagtttgcaaatttgttaggccacattcaaagccgtcctgggccatatgcagccc

SEQ ID NO: 174569 - DNA, 73 bp, Homo sapiens
taagaaagtttgcaaatttgttaggccacattcaaagccgtcctgggccatatgcagcccgtgggccatgggt

SEQ ID NO: 174570 - DNA, 77 bp, Homo sapiens
ttgcaaatttgttaggccacattcaaagccgtcctgggccatatgcagcccgtgggccatgggttgaacaagcttgc

SEQ ID NO: 174571 - DNA, 77 bp, Homo sapiens
ttaggccacattcaaagccgtcctgggccatatgcagcccgtgggccatgggttgaacaagcttgctctagaaattg

SEQ ID NO: 174572 - DNA, 74 bp, Homo sapiens
aaagccgtcctgggccatatgcagcccgtgggccatgggttgaacaagcttgctctagaaattggttttcaggc

SEQ ID NO: 174573 - DNA, 74 bp, Homo sapiens
cgtcctgggccatatgcagcccgtgggccatgggttgaacaagcttgctctagaaattggttttcaggccgggc

SEQ ID NO: 174574 - DNA, 63 bp, Homo sapiens
aaaaaaaagttggttttcaaatccttctttctttaccatgttacaccataaatatttttgtta

SEQ ID NO: 174575 - DNA, 71 bp, Homo sapiens
tggttttcaaatccttctttctttaccatgttacaccataaatatttttgttatattgcgtgtgttgagta

SEQ ID NO: 174576 - DNA, 72 bp, Homo sapiens
atccttctttctttaccatgttacaccataaatatttttgttatattgcgtgtgttgagtactggtgatagg

SEQ ID NO: 174577 - DNA, 75 bp, Homo sapiens
ttctttaccatgttacaccataaatatttttgttatattgcgtgtgttgagtactggtgatagggaagacagaga

SEQ ID NO: 174578 - DNA, 74 bp, Homo sapiens
atgttacaccataaatatttttgttatattgcgtgtgttgagtactggtgatagggaagacagagagaaatagg

SEQ ID NO: 174579 - DNA, 74 bp, Homo sapiens
aatatttttgttatattgcgtgtgttgagtactggtgatagggaagacagagagaaataggtgggaaggagata

SEQ ID NO: 174580 - DNA, 77 bp, Homo sapiens
ttttgttatattgcgtgtgttgagtactggtgatagggaagacagagagaaataggtgggaaggagatagagagaga

SEQ ID NO: 174581 - DNA, 71 bp, Homo sapiens
agggaggaaggggagacataagggggaaatctatagagacagagactgagagacaaatacaaaaaggttga

SEQ ID NO: 174582 - DNA, 73 bp, Homo sapiens
ggagacataagggggaaatctatagagacagagactgagagacaaatacaaaaaggttgagacaggaaaggga

SEQ ID NO: 174583 - DNA, 71 bp, Homo sapiens
atctatagagacagagactgagagacaaatacaaaaaggttgagacaggaaagggaaaaaaaaacaagctg

SEQ ID NO: 174584 - DNA, 67 bp, Homo sapiens
agagactgagagacaaatacaaaaaggttgagacaggaaagggaaaaaaaaacaagctgggagggaa

SEQ ID NO: 174585 - DNA, 66 bp, Homo sapiens
agactgagagacaaatacaaaaaggttgagacaggaaagggaaaaaaaaacaagctgggagggaag

SEQ ID NO: 174586 - DNA, 67 bp, Homo sapiens
tgagagacaaatacaaaaaggttgagacaggaaagggaaaaaaaaacaagctgggagggaaggaaga

SEQ ID NO: 174587 - DNA, 65 bp, Homo sapiens
aaatacaaaaaggttgagacaggaaagggaaaaaaaaacaagctgggagggaaggaagactgaga

SEQ ID NO: 174588 - DNA, 66 bp, Homo sapiens
atacaaaaaggttgagacaggaaagggaaaaaaaaacaagctgggagggaaggaagactgagagaa

SEQ ID NO: 174589 - DNA, 65 bp, Homo sapiens
aaaaggttgagacaggaaagggaaaaaaaaacaagctgggagggaaggaagactgagagaaggga

SEQ ID NO: 174590 - DNA, 68 bp, Homo sapiens
gttgagacaggaaagggaaaaaaaaacaagctgggagggaaggaagactgagagaagggagacaaaga

SEQ ID NO: 174591 - DNA, 66 bp, Homo sapiens
aggaaagggaaaaaaaaacaagctgggagggaaggaagactgagagaagggagacaaagaggaata

SEQ ID NO: 174592 - DNA, 67 bp, Homo sapiens
aagggaaaaaaaaacaagctgggagggaaggaagactgagagaagggagacaaagaggaataggatg

SEQ ID NO: 174593 - DNA, 69 bp, Homo sapiens
aaaaaaacaagctgggagggaaggaagactgagagaagggagacaaagaggaataggatggccagtggg

SEQ ID NO: 174594 - DNA, 72 bp, Homo sapiens
acaagctgggagggaaggaagactgagagaagggagacaaagaggaataggatggccagtggggctggggtg

SEQ ID NO: 174595 - DNA, 74 bp, Homo sapiens
actgagagaagggagacaaagaggaataggatggccagtggggctggggtgggtgggtacagagagagaatgag

SEQ ID NO: 174596 - DNA, 77 bp, Homo sapiens
agacaaagaggaataggatggccagtggggctggggtgggtgggtacagagagagaatgagtgagagcaagagaagc

SEQ ID NO: 174597 - DNA, 81 bp, Homo sapiens
aataggatggccagtggggctggggtgggtgggtacagagagagaatgagtgagagcaagagaagcgcaggagacagatga

SEQ ID NO: 174598 - DNA, 82 bp, Homo sapiens
atggccagtggggctggggtgggtgggtacagagagagaatgagtgagagcaagagaagcgcaggagacagatgatggacag

SEQ ID NO: 174599 - DNA, 87 bp, Homo sapiens
tggggtgggtgggtacagagagagaatgagtgagagcaagagaagcgcaggagacagatgatggacaggcagctgatgtatggatgg

SEQ ID NO: 174600 - DNA, 91 bp, Homo sapiens
tgggtacagagagagaatgagtgagagcaagagaagcgcaggagacagatgatggacaggcagctgatgtatggatgggtagctggagaga

SEQ ID NO: 174601 - DNA, 91 bp, Homo sapiens
agagaatgagtgagagcaagagaagcgcaggagacagatgatggacaggcagctgatgtatggatgggtagctggagagagaggccatcag

SEQ ID NO: 174602 - DNA, 91 bp, Homo sapiens
tgagagcaagagaagcgcaggagacagatgatggacaggcagctgatgtatggatgggtagctggagagagaggccatcagtaacttcaca

SEQ ID NO: 174603 - DNA, 87 bp, Homo sapiens
gagacagatgatggacaggcagctgatgtatggatgggtagctggagagagaggccatcagtaacttcacatctctctgtttccatt

SEQ ID NO: 174604 - DNA, 85 bp, Homo sapiens
agatgatggacaggcagctgatgtatggatgggtagctggagagagaggccatcagtaacttcacatctctctgtttccatttcc

SEQ ID NO: 174605 - DNA, 83 bp, Homo sapiens
aggcagctgatgtatggatgggtagctggagagagaggccatcagtaacttcacatctctctgtttccatttcctgccctcaa

SEQ ID NO: 174606 - DNA, 82 bp, Homo sapiens
tatggatgggtagctggagagagaggccatcagtaacttcacatctctctgtttccatttcctgccctcaaatgccttcata

SEQ ID NO: 174607 - DNA, 82 bp, Homo sapiens
tagctggagagagaggccatcagtaacttcacatctctctgtttccatttcctgccctcaaatgccttcataatagagtcta

SEQ ID NO: 174608 - DNA, 78 bp, Homo sapiens
gaggccatcagtaacttcacatctctctgtttccatttcctgccctcaaatgccttcataatagagtctacgtaataa

SEQ ID NO: 174609 - DNA, 75 bp, Homo sapiens
gtaacttcacatctctctgtttccatttcctgccctcaaatgccttcataatagagtctacgtaataaggttata

SEQ ID NO: 174610 - DNA, 74 bp, Homo sapiens
atctctctgtttccatttcctgccctcaaatgccttcataatagagtctacgtaataaggttatagggattcag

SEQ ID NO: 174611 - DNA, 81 bp, Homo sapiens
tgccctcaaatgccttcataatagagtctacgtaataaggttatagggattcagtgcagatgaagtgctggcacttgatac

SEQ ID NO: 174612 - DNA, 78 bp, Homo sapiens
ataatagagtctacgtaataaggttatagggattcagtgcagatgaagtgctggcacttgatacgggatcagtaagta

SEQ ID NO: 174613 - DNA, 78 bp, Homo sapiens
agatgaagtgctggcacttgatacgggatcagtaagtattagctattattctatcacattaagttgcataaactttaa

SEQ ID NO: 174614 - DNA, 78 bp, Homo sapiens
tgctggcacttgatacgggatcagtaagtattagctattattctatcacattaagttgcataaactttaacctcatta

SEQ ID NO: 174615 - DNA, 74 bp, Homo sapiens
gatacgggatcagtaagtattagctattattctatcacattaagttgcataaactttaacctcattactcttaa

SEQ ID NO: 174616 - DNA, 74 bp, Homo sapiens
cagtaagtattagctattattctatcacattaagttgcataaactttaacctcattactcttaaattctctata

SEQ ID NO: 174617 - DNA, 73 bp, Homo sapiens
tctatcacattaagttgcataaactttaacctcattactcttaaattctctatagaaacctagtctttatctg

SEQ ID NO: 174618 - DNA, 71 bp, Homo sapiens
ttgcataaactttaacctcattactcttaaattctctatagaaacctagtctttatctgtcttacaagccc

SEQ ID NO: 174619 - DNA, 69 bp, Homo sapiens
ctttaacctcattactcttaaattctctatagaaacctagtctttatctgtcttacaagccctcaaatt

SEQ ID NO: 174620 - DNA, 72 bp, Homo sapiens
cattactcttaaattctctatagaaacctagtctttatctgtcttacaagccctcaaatttagctaatagcg

SEQ ID NO: 174621 - DNA, 74 bp, Homo sapiens
attctctatagaaacctagtctttatctgtcttacaagccctcaaatttagctaatagcgttgttcattgaata

SEQ ID NO: 174622 - DNA, 72 bp, Homo sapiens
ctatagaaacctagtctttatctgtcttacaagccctcaaatttagctaatagcgttgttcattgaatacct

SEQ ID NO: 174623 - DNA, 72 bp, Homo sapiens
ctagtctttatctgtcttacaagccctcaaatttagctaatagcgttgttcattgaataccttaaaattgta

SEQ ID NO: 174624 - DNA, 70 bp, Homo sapiens
cttacaagccctcaaatttagctaatagcgttgttcattgaataccttaaaattgtatttaaagacaggc

SEQ ID NO: 174625 - DNA, 70 bp, Homo sapiens
agccctcaaatttagctaatagcgttgttcattgaataccttaaaattgtatttaaagacaggccgtgaa

SEQ ID NO: 174626 - DNA, 73 bp, Homo sapiens
agctaatagcgttgttcattgaataccttaaaattgtatttaaagacaggccgtgaatacaattaggcattgc

SEQ ID NO: 174627 - DNA, 72 bp, Homo sapiens
gcgttgttcattgaataccttaaaattgtatttaaagacaggccgtgaatacaattaggcattgctttttga

SEQ ID NO: 174628 - DNA, 71 bp, Homo sapiens
cattgaataccttaaaattgtatttaaagacaggccgtgaatacaattaggcattgctttttgaagccaaa

SEQ ID NO: 174629 - DNA, 71 bp, Homo sapiens
aaattgtatttaaagacaggccgtgaatacaattaggcattgctttttgaagccaaaataccatgagggtg

SEQ ID NO: 174630 - DNA, 71 bp, Homo sapiens
tatttaaagacaggccgtgaatacaattaggcattgctttttgaagccaaaataccatgagggtggggagg

SEQ ID NO: 174631 - DNA, 74 bp, Homo sapiens
atacaattaggcattgctttttgaagccaaaataccatgagggtggggagggtcatgttcatttacccagatca

SEQ ID NO: 174632 - DNA, 72 bp, Homo sapiens
attgctttttgaagccaaaataccatgagggtggggagggtcatgttcatttacccagatcagcaataaaaa

SEQ ID NO: 174633 - DNA, 71 bp, Homo sapiens
gggagggtcatgttcatttacccagatcagcaataaaaatactaatggctaacaaggctttctggggaaat

SEQ ID NO: 174634 - DNA, 74 bp, Homo sapiens
atgttcatttacccagatcagcaataaaaatactaatggctaacaaggctttctggggaaattgcctgtcattg

SEQ ID NO: 174635 - DNA, 72 bp, Homo sapiens
atttacccagatcagcaataaaaatactaatggctaacaaggctttctggggaaattgcctgtcattgggta

SEQ ID NO: 174636 - DNA, 72 bp, Homo sapiens
caataaaaatactaatggctaacaaggctttctggggaaattgcctgtcattgggtagcccagtgcctctgg

SEQ ID NO: 174637 - DNA, 74 bp, Homo sapiens
aaaatactaatggctaacaaggctttctggggaaattgcctgtcattgggtagcccagtgcctctggtgtcagc

SEQ ID NO: 174638 - DNA, 75 bp, Homo sapiens
taacaaggctttctggggaaattgcctgtcattgggtagcccagtgcctctggtgtcagctgaccccggagtcca

SEQ ID NO: 174639 - DNA, 78 bp, Homo sapiens
ttctggggaaattgcctgtcattgggtagcccagtgcctctggtgtcagctgaccccggagtccatgaagacatgtta

SEQ ID NO: 174640 - DNA, 77 bp, Homo sapiens
tgtcattgggtagcccagtgcctctggtgtcagctgaccccggagtccatgaagacatgttaaaagaagaggaaatg

SEQ ID NO: 174641 - DNA, 78 bp, Homo sapiens
tctggtgtcagctgaccccggagtccatgaagacatgttaaaagaagaggaaatgtgaatgctttcaaaccagccatg

SEQ ID NO: 174642 - DNA, 76 bp, Homo sapiens
aagacatgttaaaagaagaggaaatgtgaatgctttcaaaccagccatggctggcagcagaaggggaggcctttca

SEQ ID NO: 174643 - DNA, 81 bp, Homo sapiens
tgtgaatgctttcaaaccagccatggctggcagcagaaggggaggcctttcagtctgttgcaaatggcctgtgacaataaa

SEQ ID NO: 174644 - DNA, 78 bp, Homo sapiens
atgctttcaaaccagccatggctggcagcagaaggggaggcctttcagtctgttgcaaatggcctgtgacaataaaaa

SEQ ID NO: 174645 - DNA, 77 bp, Homo sapiens
ccatggctggcagcagaaggggaggcctttcagtctgttgcaaatggcctgtgacaataaaaatgcctttgtgggta

SEQ ID NO: 174646 - DNA, 81 bp, Homo sapiens
tgttgcaaatggcctgtgacaataaaaatgcctttgtgggtattagcaggctgactgtggacagtctggatctgcggccac

SEQ ID NO: 174647 - DNA, 80 bp, Homo sapiens
gtgacaataaaaatgcctttgtgggtattagcaggctgactgtggacagtctggatctgcggccactgcagggattcctg

SEQ ID NO: 174648 - DNA, 78 bp, Homo sapiens
aataaaaatgcctttgtgggtattagcaggctgactgtggacagtctggatctgcggccactgcagggattcctggaa

SEQ ID NO: 174649 - DNA, 78 bp, Homo sapiens
ctttgtgggtattagcaggctgactgtggacagtctggatctgcggccactgcagggattcctggaacctgttgggaa

SEQ ID NO: 174650 - DNA, 79 bp, Homo sapiens
tattagcaggctgactgtggacagtctggatctgcggccactgcagggattcctggaacctgttgggaaggtgtccggc

SEQ ID NO: 174651 - DNA, 78 bp, Homo sapiens
actgtggacagtctggatctgcggccactgcagggattcctggaacctgttgggaaggtgtccggcgagctcactgtg

SEQ ID NO: 174652 - DNA, 78 bp, Homo sapiens
gtctggatctgcggccactgcagggattcctggaacctgttgggaaggtgtccggcgagctcactgtggtgtctgtta

SEQ ID NO: 174653 - DNA, 76 bp, Homo sapiens
ggccactgcagggattcctggaacctgttgggaaggtgtccggcgagctcactgtggtgtctgttaggaatctgga

SEQ ID NO: 174654 - DNA, 73 bp, Homo sapiens
gaacctgttgggaaggtgtccggcgagctcactgtggtgtctgttaggaatctggagcaaatcctatttcttt

SEQ ID NO: 174655 - DNA, 74 bp, Homo sapiens
actgtggtgtctgttaggaatctggagcaaatcctatttcttttgaaagcacagagaactgtgtttttacatta

SEQ ID NO: 174656 - DNA, 72 bp, Homo sapiens
gtctgttaggaatctggagcaaatcctatttcttttgaaagcacagagaactgtgtttttacattatacctt

SEQ ID NO: 174657 - DNA, 72 bp, Homo sapiens
tctggagcaaatcctatttcttttgaaagcacagagaactgtgtttttacattatacctttaggattttggc

SEQ ID NO: 174658 - DNA, 71 bp, Homo sapiens
gcaaatcctatttcttttgaaagcacagagaactgtgtttttacattatacctttaggattttggccatgg

SEQ ID NO: 174659 - DNA, 70 bp, Homo sapiens
cttttgaaagcacagagaactgtgtttttacattatacctttaggattttggccatggtttatatttcag

SEQ ID NO: 174660 - DNA, 71 bp, Homo sapiens
aagcacagagaactgtgtttttacattatacctttaggattttggccatggtttatatttcagtcaaaaca

SEQ ID NO: 174661 - DNA, 71 bp, Homo sapiens
ttacattatacctttaggattttggccatggtttatatttcagtcaaaacaaatcattatgttccctaggc

SEQ ID NO: 174662 - DNA, 70 bp, Homo sapiens
taggattttggccatggtttatatttcagtcaaaacaaatcattatgttccctaggcttttatataggtt

SEQ ID NO: 174663 - DNA, 71 bp, Homo sapiens
gccatggtttatatttcagtcaaaacaaatcattatgttccctaggcttttatataggttttcctggtcag

SEQ ID NO: 174664 - DNA, 69 bp, Homo sapiens
cagtcaaaacaaatcattatgttccctaggcttttatataggttttcctggtcaggttgcatttgtttt

SEQ ID NO: 174665 - DNA, 69 bp, Homo sapiens
cattatgttccctaggcttttatataggttttcctggtcaggttgcatttgtttttcaactttactatc

SEQ ID NO: 174666 - DNA, 70 bp, Homo sapiens
tgttccctaggcttttatataggttttcctggtcaggttgcatttgtttttcaactttactatctgtcat

SEQ ID NO: 174667 - DNA, 75 bp, Homo sapiens
tatataggttttcctggtcaggttgcatttgtttttcaactttactatctgtcattattgctgctcttattacag

SEQ ID NO: 174668 - DNA, 75 bp, Homo sapiens
tttcctggtcaggttgcatttgtttttcaactttactatctgtcattattgctgctcttattacaggttaacaga

SEQ ID NO: 174669 - DNA, 75 bp, Homo sapiens
ggtcaggttgcatttgtttttcaactttactatctgtcattattgctgctcttattacaggttaacagattatta

SEQ ID NO: 174670 - DNA, 74 bp, Homo sapiens
gtttttcaactttactatctgtcattattgctgctcttattacaggttaacagattattaaactgcacttttca

SEQ ID NO: 174671 - DNA, 76 bp, Homo sapiens
ctgtcattattgctgctcttattacaggttaacagattattaaactgcacttttcagtaccttgtagctaaagaca

SEQ ID NO: 174672 - DNA, 75 bp, Homo sapiens
tattgctgctcttattacaggttaacagattattaaactgcacttttcagtaccttgtagctaaagacagacaag

SEQ ID NO: 174673 - DNA, 73 bp, Homo sapiens
ttattacaggttaacagattattaaactgcacttttcagtaccttgtagctaaagacagacaagtgcagggtg

SEQ ID NO: 174674 - DNA, 76 bp, Homo sapiens
taacagattattaaactgcacttttcagtaccttgtagctaaagacagacaagtgcagggtgttccacatctgagt

SEQ ID NO: 174675 - DNA, 78 bp, Homo sapiens
cttttcagtaccttgtagctaaagacagacaagtgcagggtgttccacatctgagttcacccagcagtgctgtgttgt

SEQ ID NO: 174676 - DNA, 83 bp, Homo sapiens
taccttgtagctaaagacagacaagtgcagggtgttccacatctgagttcacccagcagtgctgtgttgttgcgttgcactga

SEQ ID NO: 174677 - DNA, 85 bp, Homo sapiens
ctaaagacagacaagtgcagggtgttccacatctgagttcacccagcagtgctgtgttgttgcgttgcactgagcaggcacagaa

SEQ ID NO: 174678 - DNA, 87 bp, Homo sapiens
acaagtgcagggtgttccacatctgagttcacccagcagtgctgtgttgttgcgttgcactgagcaggcacagaaggctctgagata

SEQ ID NO: 174679 - DNA, 89 bp, Homo sapiens
tgttccacatctgagttcacccagcagtgctgtgttgttgcgttgcactgagcaggcacagaaggctctgagatatgagagacttggtc

SEQ ID NO: 174680 - DNA, 87 bp, Homo sapiens
atctgagttcacccagcagtgctgtgttgttgcgttgcactgagcaggcacagaaggctctgagatatgagagacttggtctctacc

SEQ ID NO: 174681 - DNA, 85 bp, Homo sapiens
gcagtgctgtgttgttgcgttgcactgagcaggcacagaaggctctgagatatgagagacttggtctctaccccagaggagttta

SEQ ID NO: 174682 - DNA, 82 bp, Homo sapiens
tgttgttgcgttgcactgagcaggcacagaaggctctgagatatgagagacttggtctctaccccagaggagtttacattgt

SEQ ID NO: 174683 - DNA, 81 bp, Homo sapiens
cgttgcactgagcaggcacagaaggctctgagatatgagagacttggtctctaccccagaggagtttacattgttgtggtg

SEQ ID NO: 174684 - DNA, 79 bp, Homo sapiens
aggcacagaaggctctgagatatgagagacttggtctctaccccagaggagtttacattgttgtggtggcagaagagaa

SEQ ID NO: 174685 - DNA, 77 bp, Homo sapiens
aaggctctgagatatgagagacttggtctctaccccagaggagtttacattgttgtggtggcagaagagaaggcgtg

SEQ ID NO: 174686 - DNA, 77 bp, Homo sapiens
atatgagagacttggtctctaccccagaggagtttacattgttgtggtggcagaagagaaggcgtggcataagagaa

SEQ ID NO: 174687 - DNA, 74 bp, Homo sapiens
ttggtctctaccccagaggagtttacattgttgtggtggcagaagagaaggcgtggcataagagaagacgcggt

SEQ ID NO: 174688 - DNA, 75 bp, Homo sapiens
taccccagaggagtttacattgttgtggtggcagaagagaaggcgtggcataagagaagacgcggttgttctgta

SEQ ID NO: 174689 - DNA, 77 bp, Homo sapiens
agtttacattgttgtggtggcagaagagaaggcgtggcataagagaagacgcggttgttctgtagtgagcatcccag

SEQ ID NO: 174690 - DNA, 80 bp, Homo sapiens
attgttgtggtggcagaagagaaggcgtggcataagagaagacgcggttgttctgtagtgagcatcccagtgtcaggtgc

SEQ ID NO: 174691 - DNA, 81 bp, Homo sapiens
agaagagaaggcgtggcataagagaagacgcggttgttctgtagtgagcatcccagtgtcaggtgccacagttggcatcca

SEQ ID NO: 174692 - DNA, 82 bp, Homo sapiens
aaggcgtggcataagagaagacgcggttgttctgtagtgagcatcccagtgtcaggtgccacagttggcatccatgcagaaa

SEQ ID NO: 174693 - DNA, 86 bp, Homo sapiens
ataagagaagacgcggttgttctgtagtgagcatcccagtgtcaggtgccacagttggcatccatgcagaaattctctgcatgcag

SEQ ID NO: 174694 - DNA, 89 bp, Homo sapiens
ttctgtagtgagcatcccagtgtcaggtgccacagttggcatccatgcagaaattctctgcatgcaggattcattgagccctcccgaca

SEQ ID NO: 174695 - DNA, 85 bp, Homo sapiens
atcccagtgtcaggtgccacagttggcatccatgcagaaattctctgcatgcaggattcattgagccctcccgacagcccaacta

SEQ ID NO: 174696 - DNA, 85 bp, Homo sapiens
aggtgccacagttggcatccatgcagaaattctctgcatgcaggattcattgagccctcccgacagcccaactaggttgatgcca

SEQ ID NO: 174697 - DNA, 84 bp, Homo sapiens
gttggcatccatgcagaaattctctgcatgcaggattcattgagccctcccgacagcccaactaggttgatgccatgccgttgt

SEQ ID NO: 174698 - DNA, 82 bp, Homo sapiens
atgcagaaattctctgcatgcaggattcattgagccctcccgacagcccaactaggttgatgccatgccgttgttgccctgt

SEQ ID NO: 174699 - DNA, 82 bp, Homo sapiens
aaattctctgcatgcaggattcattgagccctcccgacagcccaactaggttgatgccatgccgttgttgccctgttgtgca

SEQ ID NO: 174700 - DNA, 80 bp, Homo sapiens
atgcaggattcattgagccctcccgacagcccaactaggttgatgccatgccgttgttgccctgttgtgcagttgagaaa

SEQ ID NO: 174701 - DNA, 80 bp, Homo sapiens
aactgaggctcagaaacaaatgtcttcaagacatgctggtgctgaggtttgaacaaggcctgtccacccagagcccatgc

SEQ ID NO: 174702 - DNA, 79 bp, Homo sapiens
tcagaaacaaatgtcttcaagacatgctggtgctgaggtttgaacaaggcctgtccacccagagcccatgctttttgta

SEQ ID NO: 174703 - DNA, 79 bp, Homo sapiens
acaaatgtcttcaagacatgctggtgctgaggtttgaacaaggcctgtccacccagagcccatgctttttgtactgctg

SEQ ID NO: 174704 - DNA, 79 bp, Homo sapiens
aagacatgctggtgctgaggtttgaacaaggcctgtccacccagagcccatgctttttgtactgctggggacatgtgaa

SEQ ID NO: 174705 - DNA, 79 bp, Homo sapiens
tgctgaggtttgaacaaggcctgtccacccagagcccatgctttttgtactgctggggacatgtgaacagattgcttac

SEQ ID NO: 174706 - DNA, 79 bp, Homo sapiens
ttgaacaaggcctgtccacccagagcccatgctttttgtactgctggggacatgtgaacagattgcttactgggtgata

SEQ ID NO: 174707 - DNA, 83 bp, Homo sapiens
agagcccatgctttttgtactgctggggacatgtgaacagattgcttactgggtgatagatgcagggtggtgatagagacaga

SEQ ID NO: 174708 - DNA, 81 bp, Homo sapiens
tttttgtactgctggggacatgtgaacagattgcttactgggtgatagatgcagggtggtgatagagacagacaccaggta

SEQ ID NO: 174709 - DNA, 81 bp, Homo sapiens
tactgctggggacatgtgaacagattgcttactgggtgatagatgcagggtggtgatagagacagacaccaggtacccaaa

SEQ ID NO: 174710 - DNA, 77 bp, Homo sapiens
atgtgaacagattgcttactgggtgatagatgcagggtggtgatagagacagacaccaggtacccaaatgggttaaa

SEQ ID NO: 174711 - DNA, 75 bp, Homo sapiens
agattgcttactgggtgatagatgcagggtggtgatagagacagacaccaggtacccaaatgggttaaaggagaa

SEQ ID NO: 174712 - DNA, 76 bp, Homo sapiens
tactgggtgatagatgcagggtggtgatagagacagacaccaggtacccaaatgggttaaaggagaagcatcctgt

SEQ ID NO: 174713 - DNA, 76 bp, Homo sapiens
tagatgcagggtggtgatagagacagacaccaggtacccaaatgggttaaaggagaagcatcctgttgtgggcgag

SEQ ID NO: 174714 - DNA, 74 bp, Homo sapiens
gtggtgatagagacagacaccaggtacccaaatgggttaaaggagaagcatcctgttgtgggcgaggtgatggg

SEQ ID NO: 174715 - DNA, 73 bp, Homo sapiens
atagagacagacaccaggtacccaaatgggttaaaggagaagcatcctgttgtgggcgaggtgatggggagga

SEQ ID NO: 174716 - DNA, 71 bp, Homo sapiens
acagacaccaggtacccaaatgggttaaaggagaagcatcctgttgtgggcgaggtgatggggaggaggaa

SEQ ID NO: 174717 - DNA, 69 bp, Homo sapiens
tacccaaatgggttaaaggagaagcatcctgttgtgggcgaggtgatggggaggaggaaggaccggtta

SEQ ID NO: 174718 - DNA, 69 bp, Homo sapiens
aaatgggttaaaggagaagcatcctgttgtgggcgaggtgatggggaggaggaaggaccggttagagaa

SEQ ID NO: 174719 - DNA, 70 bp, Homo sapiens
ttaaaggagaagcatcctgttgtgggcgaggtgatggggaggaggaaggaccggttagagaaggtttatg

SEQ ID NO: 174720 - DNA, 71 bp, Homo sapiens
agaagcatcctgttgtgggcgaggtgatggggaggaggaaggaccggttagagaaggtttatgggagatgg

SEQ ID NO: 174721 - DNA, 70 bp, Homo sapiens
aagcatcctgttgtgggcgaggtgatggggaggaggaaggaccggttagagaaggtttatgggagatggg

SEQ ID NO: 174722 - DNA, 70 bp, Homo sapiens
tcctgttgtgggcgaggtgatggggaggaggaaggaccggttagagaaggtttatgggagatggggaggc

SEQ ID NO: 174723 - DNA, 70 bp, Homo sapiens
ttgtgggcgaggtgatggggaggaggaaggaccggttagagaaggtttatgggagatggggaggccagga

SEQ ID NO: 174724 - DNA, 71 bp, Homo sapiens
ggtgatggggaggaggaaggaccggttagagaaggtttatgggagatggggaggccaggaagagcagaaga

SEQ ID NO: 174725 - DNA, 70 bp, Homo sapiens
gaaggaccggttagagaaggtttatgggagatggggaggccaggaagagcagaagaggctggggaacgaa

SEQ ID NO: 174726 - DNA, 70 bp, Homo sapiens
accggttagagaaggtttatgggagatggggaggccaggaagagcagaagaggctggggaacgaactcta

SEQ ID NO: 174727 - DNA, 70 bp, Homo sapiens
aaggtttatgggagatggggaggccaggaagagcagaagaggctggggaacgaactctagggagagtaaa

SEQ ID NO: 174728 - DNA, 77 bp, Homo sapiens
agatggggaggccaggaagagcagaagaggctggggaacgaactctagggagagtaaatggcacttgtcacagtgca

SEQ ID NO: 174729 - DNA, 78 bp, Homo sapiens
agaagaggctggggaacgaactctagggagagtaaatggcacttgtcacagtgcagtcaggagaggcaagcaacagga

SEQ ID NO: 174730 - DNA, 77 bp, Homo sapiens
aggctggggaacgaactctagggagagtaaatggcacttgtcacagtgcagtcaggagaggcaagcaacaggaggcc

SEQ ID NO: 174731 - DNA, 78 bp, Homo sapiens
aactctagggagagtaaatggcacttgtcacagtgcagtcaggagaggcaagcaacaggaggcctgggggatctgaaa

SEQ ID NO: 174732 - DNA, 78 bp, Homo sapiens
acttgtcacagtgcagtcaggagaggcaagcaacaggaggcctgggggatctgaaaggagtttggagaggctggaatg

SEQ ID NO: 174733 - DNA, 75 bp, Homo sapiens
aggagaggcaagcaacaggaggcctgggggatctgaaaggagtttggagaggctggaatggaaagcaggagtaga

SEQ ID NO: 174734 - DNA, 74 bp, Homo sapiens
aagcaacaggaggcctgggggatctgaaaggagtttggagaggctggaatggaaagcaggagtagagggccaga

SEQ ID NO: 174735 - DNA, 76 bp, Homo sapiens
cctgggggatctgaaaggagtttggagaggctggaatggaaagcaggagtagagggccagatgctcccagtctcaa

SEQ ID NO: 174736 - DNA, 77 bp, Homo sapiens
atctgaaaggagtttggagaggctggaatggaaagcaggagtagagggccagatgctcccagtctcaaccctgaaga

SEQ ID NO: 174737 - DNA, 78 bp, Homo sapiens
aggagtttggagaggctggaatggaaagcaggagtagagggccagatgctcccagtctcaaccctgaagagcctggca

SEQ ID NO: 174738 - DNA, 84 bp, Homo sapiens
ctggaatggaaagcaggagtagagggccagatgctcccagtctcaaccctgaagagcctggcatgcctgcttcaggagctcaga

SEQ ID NO: 174739 - DNA, 81 bp, Homo sapiens
agtagagggccagatgctcccagtctcaaccctgaagagcctggcatgcctgcttcaggagctcagacttttactatagtg

SEQ ID NO: 174740 - DNA, 80 bp, Homo sapiens
atgctcccagtctcaaccctgaagagcctggcatgcctgcttcaggagctcagacttttactatagtggtggaaggaata

SEQ ID NO: 174741 - DNA, 77 bp, Homo sapiens
agtctcaaccctgaagagcctggcatgcctgcttcaggagctcagacttttactatagtggtggaaggaataacaac

SEQ ID NO: 174742 - DNA, 75 bp, Homo sapiens
tggcatgcctgcttcaggagctcagacttttactatagtggtggaaggaataacaaccccagccattttttgagg

SEQ ID NO: 174743 - DNA, 73 bp, Homo sapiens
cttcaggagctcagacttttactatagtggtggaaggaataacaaccccagccattttttgagggcctgtgca

SEQ ID NO: 174744 - DNA, 73 bp, Homo sapiens
agctcagacttttactatagtggtggaaggaataacaaccccagccattttttgagggcctgtgcatgcctag

SEQ ID NO: 174745 - DNA, 72 bp, Homo sapiens
ttttactatagtggtggaaggaataacaaccccagccattttttgagggcctgtgcatgcctaggccctcaa

SEQ ID NO: 174746 - DNA, 73 bp, Homo sapiens
tggaaggaataacaaccccagccattttttgagggcctgtgcatgcctaggccctcaaaaacatgtcccatgt

SEQ ID NO: 174747 - DNA, 77 bp, Homo sapiens
agccattttttgagggcctgtgcatgcctaggccctcaaaaacatgtcccatgttagctgcaaactgccagctaccc

SEQ ID NO: 174748 - DNA, 81 bp, Homo sapiens
ttttgagggcctgtgcatgcctaggccctcaaaaacatgtcccatgttagctgcaaactgccagctaccctgcaaagcaca

SEQ ID NO: 174749 - DNA, 86 bp, Homo sapiens
ctgtgcatgcctaggccctcaaaaacatgtcccatgttagctgcaaactgccagctaccctgcaaagcacatcatgatcccagcat

SEQ ID NO: 174750 - DNA, 82 bp, Homo sapiens
ctaggccctcaaaaacatgtcccatgttagctgcaaactgccagctaccctgcaaagcacatcatgatcccagcattgcccc

SEQ ID NO: 174751 - DNA, 84 bp, Homo sapiens
aaaaacatgtcccatgttagctgcaaactgccagctaccctgcaaagcacatcatgatcccagcattgcccccgatgacactgc

SEQ ID NO: 174752 - DNA, 85 bp, Homo sapiens
ccatgttagctgcaaactgccagctaccctgcaaagcacatcatgatcccagcattgcccccgatgacactgccagtaagtggta

SEQ ID NO: 174753 - DNA, 83 bp, Homo sapiens
aaactgccagctaccctgcaaagcacatcatgatcccagcattgcccccgatgacactgccagtaagtggtagctgaccattg

SEQ ID NO: 174754 - DNA, 83 bp, Homo sapiens
agctaccctgcaaagcacatcatgatcccagcattgcccccgatgacactgccagtaagtggtagctgaccattgggagacag

SEQ ID NO: 174755 - DNA, 80 bp, Homo sapiens
atcatgatcccagcattgcccccgatgacactgccagtaagtggtagctgaccattgggagacagggccacctcccaagc

SEQ ID NO: 174756 - DNA, 79 bp, Homo sapiens
cccgatgacactgccagtaagtggtagctgaccattgggagacagggccacctcccaagcccatgctctcttctgcctc

SEQ ID NO: 174757 - DNA, 80 bp, Homo sapiens
agtaagtggtagctgaccattgggagacagggccacctcccaagcccatgctctcttctgcctctcggctggcagccatc

SEQ ID NO: 174758 - DNA, 81 bp, Homo sapiens
tagctgaccattgggagacagggccacctcccaagcccatgctctcttctgcctctcggctggcagccatctctaagggat

SEQ ID NO: 174759 - DNA, 80 bp, Homo sapiens
attgggagacagggccacctcccaagcccatgctctcttctgcctctcggctggcagccatctctaagggatttgaagca

SEQ ID NO: 174760 - DNA, 81 bp, Homo sapiens
acagggccacctcccaagcccatgctctcttctgcctctcggctggcagccatctctaagggatttgaagcaagagagtga

SEQ ID NO: 174761 - DNA, 84 bp, Homo sapiens
caagcccatgctctcttctgcctctcggctggcagccatctctaagggatttgaagcaagagagtgacctggtcaggtctgcat

SEQ ID NO: 174762 - DNA, 83 bp, Homo sapiens
ttctgcctctcggctggcagccatctctaagggatttgaagcaagagagtgacctggtcaggtctgcatttgagaaagatggc

SEQ ID NO: 174763 - DNA, 81 bp, Homo sapiens
tggcagccatctctaagggatttgaagcaagagagtgacctggtcaggtctgcatttgagaaagatggccctgatagtagg

SEQ ID NO: 174764 - DNA, 78 bp, Homo sapiens
atttgaagcaagagagtgacctggtcaggtctgcatttgagaaagatggccctgatagtagggagtggaggtggaatg

SEQ ID NO: 174765 - DNA, 76 bp, Homo sapiens
aagagagtgacctggtcaggtctgcatttgagaaagatggccctgatagtagggagtggaggtggaatggccaaag

SEQ ID NO: 174766 - DNA, 73 bp, Homo sapiens
acctggtcaggtctgcatttgagaaagatggccctgatagtagggagtggaggtggaatggccaaagggggac

SEQ ID NO: 174767 - DNA, 73 bp, Homo sapiens
ggtctgcatttgagaaagatggccctgatagtagggagtggaggtggaatggccaaagggggacccagccaag

SEQ ID NO: 174768 - DNA, 70 bp, Homo sapiens
aaagatggccctgatagtagggagtggaggtggaatggccaaagggggacccagccaagggcgtggtaga

SEQ ID NO: 174769 - DNA, 73 bp, Homo sapiens
tgatagtagggagtggaggtggaatggccaaagggggacccagccaagggcgtggtagagcatggaaaggaca

SEQ ID NO: 174770 - DNA, 75 bp, Homo sapiens
gagtggaggtggaatggccaaagggggacccagccaagggcgtggtagagcatggaaaggacagaagtgatgaga

SEQ ID NO: 174771 - DNA, 75 bp, Homo sapiens
aggtggaatggccaaagggggacccagccaagggcgtggtagagcatggaaaggacagaagtgatgagagattga

SEQ ID NO: 174772 - DNA, 72 bp, Homo sapiens
aaagggggacccagccaagggcgtggtagagcatggaaaggacagaagtgatgagagattgaggaggaaaag

SEQ ID NO: 174773 - DNA, 78 bp, Homo sapiens
acccagccaagggcgtggtagagcatggaaaggacagaagtgatgagagattgaggaggaaaagtgccaagatgcagg

SEQ ID NO: 174774 - DNA, 80 bp, Homo sapiens
cgtggtagagcatggaaaggacagaagtgatgagagattgaggaggaaaagtgccaagatgcagggtgggaactgacaga

SEQ ID NO: 174775 - DNA, 79 bp, Homo sapiens
aaaggacagaagtgatgagagattgaggaggaaaagtgccaagatgcagggtgggaactgacagaggatgacttccagc

SEQ ID NO: 174776 - DNA, 82 bp, Homo sapiens
agtgatgagagattgaggaggaaaagtgccaagatgcagggtgggaactgacagaggatgacttccagcctcagtcctgata

SEQ ID NO: 174777 - DNA, 80 bp, Homo sapiens
aaagtgccaagatgcagggtgggaactgacagaggatgacttccagcctcagtcctgatatgggcgtcaatggcaggtgt

SEQ ID NO: 174778 - DNA, 83 bp, Homo sapiens
aactgacagaggatgacttccagcctcagtcctgatatgggcgtcaatggcaggtgttcagaatggccttgaagatagtggca

SEQ ID NO: 174779 - DNA, 83 bp, Homo sapiens
ggatgacttccagcctcagtcctgatatgggcgtcaatggcaggtgttcagaatggccttgaagatagtggcatctctattta

SEQ ID NO: 174780 - DNA, 83 bp, Homo sapiens
cagcctcagtcctgatatgggcgtcaatggcaggtgttcagaatggccttgaagatagtggcatctctatttatgagtgtctt

SEQ ID NO: 174781 - DNA, 81 bp, Homo sapiens
agtcctgatatgggcgtcaatggcaggtgttcagaatggccttgaagatagtggcatctctatttatgagtgtctttgtac

SEQ ID NO: 174782 - DNA, 81 bp, Homo sapiens
tatgggcgtcaatggcaggtgttcagaatggccttgaagatagtggcatctctatttatgagtgtctttgtactccatttc

SEQ ID NO: 174783 - DNA, 78 bp, Homo sapiens
aatggcaggtgttcagaatggccttgaagatagtggcatctctatttatgagtgtctttgtactccatttccagtaat

SEQ ID NO: 174784 - DNA, 76 bp, Homo sapiens
tgaagatagtggcatctctatttatgagtgtctttgtactccatttccagtaattggagactttttcaccgtagat

SEQ ID NO: 174785 - DNA, 75 bp, Homo sapiens
tggcatctctatttatgagtgtctttgtactccatttccagtaattggagactttttcaccgtagattcttggaa

SEQ ID NO: 174786 - DNA, 73 bp, Homo sapiens
tctatttatgagtgtctttgtactccatttccagtaattggagactttttcaccgtagattcttggaaggtga

SEQ ID NO: 174787 - DNA, 69 bp, Homo sapiens
tctttgtactccatttccagtaattggagactttttcaccgtagattcttggaaggtgacacaattttt

SEQ ID NO: 174788 - DNA, 66 bp, Homo sapiens
actccatttccagtaattggagactttttcaccgtagattcttggaaggtgacacaattttttttt

SEQ ID NO: 174789 - DNA, 67 bp, Homo sapiens
tttttcctttttggttgagggagggggacagggactgtgtatcttcagaaaggttaatatttgaggc

SEQ ID NO: 174790 - DNA, 69 bp, Homo sapiens
cctttttggttgagggagggggacagggactgtgtatcttcagaaaggttaatatttgaggccaaggca

SEQ ID NO: 174791 - DNA, 70 bp, Homo sapiens
aacaaaaaaagaaatacctagtttctaccagagacagtcacaggcactgtacttctactctggtttgtta

SEQ ID NO: 174792 - DNA, 71 bp, Homo sapiens
aaaagaaatacctagtttctaccagagacagtcacaggcactgtacttctactctggtttgttacctgtgt

SEQ ID NO: 174793 - DNA, 71 bp, Homo sapiens
acctagtttctaccagagacagtcacaggcactgtacttctactctggtttgttacctgtgttcttaaaaa

SEQ ID NO: 174794 - DNA, 72 bp, Homo sapiens
agagacagtcacaggcactgtacttctactctggtttgttacctgtgttcttaaaaaaattaaatgctacat

SEQ ID NO: 174795 - DNA, 70 bp, Homo sapiens
gtcacaggcactgtacttctactctggtttgttacctgtgttcttaaaaaaattaaatgctacattttag

SEQ ID NO: 174796 - DNA, 67 bp, Homo sapiens
ctgtacttctactctggtttgttacctgtgttcttaaaaaaattaaatgctacattttagtaagagg

SEQ ID NO: 174797 - DNA, 67 bp, Homo sapiens
tactctggtttgttacctgtgttcttaaaaaaattaaatgctacattttagtaagaggttagtgaaa

SEQ ID NO: 174798 - DNA, 65 bp, Homo sapiens
tgttacctgtgttcttaaaaaaattaaatgctacattttagtaagaggttagtgaaataaaattt

SEQ ID NO: 174799 - DNA, 67 bp, Homo sapiens
aaattaaatgctacattttagtaagaggttagtgaaataaaattttaatttttcccatcagaggaca

SEQ ID NO: 174800 - DNA, 70 bp, Homo sapiens
gctacattttagtaagaggttagtgaaataaaattttaatttttcccatcagaggacatggagcccttga

SEQ ID NO: 174801 - DNA, 70 bp, Homo sapiens
gtaagaggttagtgaaataaaattttaatttttcccatcagaggacatggagcccttgaattctatccca

SEQ ID NO: 174802 - DNA, 70 bp, Homo sapiens
aaattttaatttttcccatcagaggacatggagcccttgaattctatcccagactcccagggtcttccag

SEQ ID NO: 174803 - DNA, 71 bp, Homo sapiens
aatttttcccatcagaggacatggagcccttgaattctatcccagactcccagggtcttccaggttaacaa

SEQ ID NO: 174804 - DNA, 72 bp, Homo sapiens
atggagcccttgaattctatcccagactcccagggtcttccaggttaacaagtcctgcactaaggaattggc

SEQ ID NO: 174805 - DNA, 72 bp, Homo sapiens
ttgaattctatcccagactcccagggtcttccaggttaacaagtcctgcactaaggaattggctcagtaaaa

SEQ ID NO: 174806 - DNA, 74 bp, Homo sapiens
agactcccagggtcttccaggttaacaagtcctgcactaaggaattggctcagtaaaacctcagcattctcaca

SEQ ID NO: 174807 - DNA, 75 bp, Homo sapiens
gtcttccaggttaacaagtcctgcactaaggaattggctcagtaaaacctcagcattctcacaggaagagcctaa

SEQ ID NO: 174808 - DNA, 74 bp, Homo sapiens
ttccaggttaacaagtcctgcactaaggaattggctcagtaaaacctcagcattctcacaggaagagcctaaaa

SEQ ID NO: 174809 - DNA, 72 bp, Homo sapiens
aggttaacaagtcctgcactaaggaattggctcagtaaaacctcagcattctcacaggaagagcctaaaaag

SEQ ID NO: 174810 - DNA, 74 bp, Homo sapiens
ttaacaagtcctgcactaaggaattggctcagtaaaacctcagcattctcacaggaagagcctaaaaaggagac

SEQ ID NO: 174811 - DNA, 74 bp, Homo sapiens
ctgcactaaggaattggctcagtaaaacctcagcattctcacaggaagagcctaaaaaggagactgggataaat

SEQ ID NO: 174812 - DNA, 72 bp, Homo sapiens
actaaggaattggctcagtaaaacctcagcattctcacaggaagagcctaaaaaggagactgggataaatta

SEQ ID NO: 174813 - DNA, 73 bp, Homo sapiens
aaggaattggctcagtaaaacctcagcattctcacaggaagagcctaaaaaggagactgggataaattagtga

SEQ ID NO: 174814 - DNA, 73 bp, Homo sapiens
aattggctcagtaaaacctcagcattctcacaggaagagcctaaaaaggagactgggataaattagtgagagg

SEQ ID NO: 174815 - DNA, 74 bp, Homo sapiens
aacctcagcattctcacaggaagagcctaaaaaggagactgggataaattagtgagaggtccaaattatgcaat

SEQ ID NO: 174816 - DNA, 69 bp, Homo sapiens
acaggaagagcctaaaaaggagactgggataaattagtgagaggtccaaattatgcaattttcttttaa

SEQ ID NO: 174817 - DNA, 69 bp, Homo sapiens
cctaaaaaggagactgggataaattagtgagaggtccaaattatgcaattttcttttaaaataaatgca

SEQ ID NO: 174818 - DNA, 71 bp, Homo sapiens
tccaaattatgcaattttcttttaaaataaatgcagttttattactttccacttgtagccattataggcag

SEQ ID NO: 174819 - DNA, 70 bp, Homo sapiens
gcaattttcttttaaaataaatgcagttttattactttccacttgtagccattataggcagtagattaaa

SEQ ID NO: 174820 - DNA, 72 bp, Homo sapiens
tgcagttttattactttccacttgtagccattataggcagtagattaaatgagtttctagagaaacctcctt

SEQ ID NO: 174821 - DNA, 70 bp, Homo sapiens
tttattactttccacttgtagccattataggcagtagattaaatgagtttctagagaaacctcctttaaa

SEQ ID NO: 174822 - DNA, 67 bp, Homo sapiens
agccattataggcagtagattaaatgagtttctagagaaacctcctttaaaaataaagttatttaat

SEQ ID NO: 174823 - DNA, 66 bp, Homo sapiens
gcagtagattaaatgagtttctagagaaacctcctttaaaaataaagttatttaattagtccaagg

SEQ ID NO: 174824 - DNA, 63 bp, Homo sapiens
aatgagtttctagagaaacctcctttaaaaataaagttatttaattagtccaaggtttaaata

SEQ ID NO: 174825 - DNA, 62 bp, Homo sapiens
gagaaacctcctttaaaaataaagttatttaattagtccaaggtttaaatatttcccctgga

SEQ ID NO: 174826 - DNA, 61 bp, Homo sapiens
cctcctttaaaaataaagttatttaattagtccaaggtttaaatatttcccctggaatctt

SEQ ID NO: 174827 - DNA, 68 bp, Homo sapiens
aagttatttaattagtccaaggtttaaatatttcccctggaatcttttacatgacaatgtcttagcca

SEQ ID NO: 174828 - DNA, 69 bp, Homo sapiens
ttaattagtccaaggtttaaatatttcccctggaatcttttacatgacaatgtcttagccagacaattt

SEQ ID NO: 174829 - DNA, 69 bp, Homo sapiens
tccaaggtttaaatatttcccctggaatcttttacatgacaatgtcttagccagacaatttttaagaaa

SEQ ID NO: 174830 - DNA, 70 bp, Homo sapiens
atttcccctggaatcttttacatgacaatgtcttagccagacaatttttaagaaacaaaattctccatcc

SEQ ID NO: 174831 - DNA, 71 bp, Homo sapiens
cctggaatcttttacatgacaatgtcttagccagacaatttttaagaaacaaaattctccatcctaactcc

SEQ ID NO: 174832 - DNA, 74 bp, Homo sapiens
ttacatgacaatgtcttagccagacaatttttaagaaacaaaattctccatcctaactcctatccccatcaaca

SEQ ID NO: 174833 - DNA, 71 bp, Homo sapiens
tcttagccagacaatttttaagaaacaaaattctccatcctaactcctatccccatcaacagtccaaatct

SEQ ID NO: 174834 - DNA, 69 bp, Homo sapiens
cagacaatttttaagaaacaaaattctccatcctaactcctatccccatcaacagtccaaatcttaacc

SEQ ID NO: 174835 - DNA, 66 bp, Homo sapiens
aagaaacaaaattctccatcctaactcctatccccatcaacagtccaaatcttaacctttcttttt

SEQ ID NO: 174836 - DNA, 78 bp, Homo sapiens
cacacctggccagaaaccaggtgtttgatatcaggtgacggttgtgatcattgttcgcaccactactttgaaatgaca

SEQ ID NO: 174837 - DNA, 78 bp, Homo sapiens
cagaaaccaggtgtttgatatcaggtgacggttgtgatcattgttcgcaccactactttgaaatgacatagttgccac

SEQ ID NO: 174838 - DNA, 77 bp, Homo sapiens
aaaccaggtgtttgatatcaggtgacggttgtgatcattgttcgcaccactactttgaaatgacatagttgccactg

SEQ ID NO: 174839 - DNA, 78 bp, Homo sapiens
gtgtttgatatcaggtgacggttgtgatcattgttcgcaccactactttgaaatgacatagttgccactggaccttgt

SEQ ID NO: 174840 - DNA, 79 bp, Homo sapiens
tgatatcaggtgacggttgtgatcattgttcgcaccactactttgaaatgacatagttgccactggaccttgttattta

SEQ ID NO: 174841 - DNA, 77 bp, Homo sapiens
atatcaggtgacggttgtgatcattgttcgcaccactactttgaaatgacatagttgccactggaccttgttattta

SEQ ID NO: 174842 - DNA, 75 bp, Homo sapiens
aggtgacggttgtgatcattgttcgcaccactactttgaaatgacatagttgccactggaccttgttatttaatg

SEQ ID NO: 174843 - DNA, 78 bp, Homo sapiens
ttgtgatcattgttcgcaccactactttgaaatgacatagttgccactggaccttgttatttaatgtgcgaataaaga

SEQ ID NO: 174844 - DNA, 77 bp, Homo sapiens
atcattgttcgcaccactactttgaaatgacatagttgccactggaccttgttatttaatgtgcgaataaagagaca

SEQ ID NO: 174845 - DNA, 75 bp, Homo sapiens
ttcgcaccactactttgaaatgacatagttgccactggaccttgttatttaatgtgcgaataaagagacagttat

SEQ ID NO: 174846 - DNA, 74 bp, Homo sapiens
caccactactttgaaatgacatagttgccactggaccttgttatttaatgtgcgaataaagagacagttattta

SEQ ID NO: 174847 - DNA, 74 bp, Homo sapiens
ctactttgaaatgacatagttgccactggaccttgttatttaatgtgcgaataaagagacagttatttaaggca

SEQ ID NO: 174848 - DNA, 74 bp, Homo sapiens
gttgccactggaccttgttatttaatgtgcgaataaagagacagttatttaaggcattaataagagctatatta

SEQ ID NO: 174849 - DNA, 71 bp, Homo sapiens
gaccttgttatttaatgtgcgaataaagagacagttatttaaggcattaataagagctatattacaagttt

SEQ ID NO: 174850 - DNA, 70 bp, Homo sapiens
tttaatgtgcgaataaagagacagttatttaaggcattaataagagctatattacaagtttttaaaagtc

SEQ ID NO: 174851 - DNA, 69 bp, Homo sapiens
taaagagacagttatttaaggcattaataagagctatattacaagtttttaaaagtcttttgaggactg

SEQ ID NO: 174852 - DNA, 68 bp, Homo sapiens
acagttatttaaggcattaataagagctatattacaagtttttaaaagtcttttgaggactgtttcaa

SEQ ID NO: 174853 - DNA, 68 bp, Homo sapiens
ggcattaataagagctatattacaagtttttaaaagtcttttgaggactgtttcaaaaagtcttttga

SEQ ID NO: 174854 - DNA, 67 bp, Homo sapiens
caagtttttaaaagtcttttgaggactgtttcaaaaagtcttttgaggactgttctcctttgcaatc

SEQ ID NO: 174855 - DNA, 72 bp, Homo sapiens
taaaagtcttttgaggactgtttcaaaaagtcttttgaggactgttctcctttgcaatcctctgtaaatgca

SEQ ID NO: 174856 - DNA, 73 bp, Homo sapiens
tgtttcaaaaagtcttttgaggactgttctcctttgcaatcctctgtaaatgcaccattgcattccaacccgg

SEQ ID NO: 174857 - DNA, 71 bp, Homo sapiens
aaaaaaaaattcatccacaggacagcgctggccttccgttagacttttgctgttgagtctgtaagttttca

SEQ ID NO: 174858 - DNA, 76 bp, Homo sapiens
aaattcatccacaggacagcgctggccttccgttagacttttgctgttgagtctgtaagttttcagcagctgtgtt

SEQ ID NO: 174859 - DNA, 76 bp, Homo sapiens
tagacttttgctgttgagtctgtaagttttcagcagctgtgtttctccaaggagcggggctactgctggttcttta

SEQ ID NO: 174860 - DNA, 75 bp, Homo sapiens
ttgctgttgagtctgtaagttttcagcagctgtgtttctccaaggagcggggctactgctggttctttacgtctt

SEQ ID NO: 174861 - DNA, 71 bp, Homo sapiens
agtctgtaagttttcagcagctgtgtttctccaaggagcggggctactgctggttctttacgtctttcccc

SEQ ID NO: 174862 - DNA, 73 bp, Homo sapiens
ttttcagcagctgtgtttctccaaggagcggggctactgctggttctttacgtctttcccccactgccctgcc

SEQ ID NO: 174863 - DNA, 69 bp, Homo sapiens
ctgtgtttctccaaggagcggggctactgctggttctttacgtctttcccccactgccctgcccctccc

SEQ ID NO: 174864 - DNA, 71 bp, Homo sapiens
ccaaggagcggggctactgctggttctttacgtctttcccccactgccctgcccctccctgcaccctagca

SEQ ID NO: 174865 - DNA, 74 bp, Homo sapiens
tactgctggttctttacgtctttcccccactgccctgcccctccctgcaccctagcagctgacacagtgttttg

SEQ ID NO: 174866 - DNA, 73 bp, Homo sapiens
ttctttacgtctttcccccactgccctgcccctccctgcaccctagcagctgacacagtgttttgggatttga

SEQ ID NO: 174867 - DNA, 74 bp, Homo sapiens
tttcccccactgccctgcccctccctgcaccctagcagctgacacagtgttttgggatttgaagataacacaaa

SEQ ID NO: 174868 - DNA, 77 bp, Homo sapiens
tgccctgcccctccctgcaccctagcagctgacacagtgttttgggatttgaagataacacaaaggctgtgttcagt

SEQ ID NO: 174869 - DNA, 76 bp, Homo sapiens
tgcccctccctgcaccctagcagctgacacagtgttttgggatttgaagataacacaaaggctgtgttcagttaaa

SEQ ID NO: 174870 - DNA, 76 bp, Homo sapiens
tccctgcaccctagcagctgacacagtgttttgggatttgaagataacacaaaggctgtgttcagttaaacgtatg

SEQ ID NO: 174871 - DNA, 78 bp, Homo sapiens
tgcaccctagcagctgacacagtgttttgggatttgaagataacacaaaggctgtgttcagttaaacgtatgtctgtg

SEQ ID NO: 174872 - DNA, 75 bp, Homo sapiens
accctagcagctgacacagtgttttgggatttgaagataacacaaaggctgtgttcagttaaacgtatgtctgtg

SEQ ID NO: 174873 - DNA, 78 bp, Homo sapiens
ctagcagctgacacagtgttttgggatttgaagataacacaaaggctgtgttcagttaaacgtatgtctgtgtgtgtg

SEQ ID NO: 174874 - DNA, 68 bp, Homo sapiens
gtgtgtgttttaataattttaacttctctgggtgaaggtgtaaattacaaaataaaggaccatgtaga

SEQ ID NO: 174875 - DNA, 68 bp, Homo sapiens
taataattttaacttctctgggtgaaggtgtaaattacaaaataaaggaccatgtagaaatagataaa

SEQ ID NO: 174876 - DNA, 71 bp, Homo sapiens
aacttctctgggtgaaggtgtaaattacaaaataaaggaccatgtagaaatagataaaatgactttcatca

SEQ ID NO: 174877 - DNA, 73 bp, Homo sapiens
ctctgggtgaaggtgtaaattacaaaataaaggaccatgtagaaatagataaaatgactttcatcaagctcaa

SEQ ID NO: 174878 - DNA, 72 bp, Homo sapiens
aggtgtaaattacaaaataaaggaccatgtagaaatagataaaatgactttcatcaagctcaaaatgtggga

SEQ ID NO: 174879 - DNA, 71 bp, Homo sapiens
aataaaggaccatgtagaaatagataaaatgactttcatcaagctcaaaatgtgggaaataatacttttcc

SEQ ID NO: 174880 - DNA, 75 bp, Homo sapiens
ggaccatgtagaaatagataaaatgactttcatcaagctcaaaatgtgggaaataatacttttcctctaagctca

SEQ ID NO: 174881 - DNA, 73 bp, Homo sapiens
tagataaaatgactttcatcaagctcaaaatgtgggaaataatacttttcctctaagctcatattttgaaaag

SEQ ID NO: 174882 - DNA, 73 bp, Homo sapiens
gactttcatcaagctcaaaatgtgggaaataatacttttcctctaagctcatattttgaaaagttgtttgaga

SEQ ID NO: 174883 - DNA, 73 bp, Homo sapiens
catcaagctcaaaatgtgggaaataatacttttcctctaagctcatattttgaaaagttgtttgagactgtta

SEQ ID NO: 174884 - DNA, 69 bp, Homo sapiens
tgtgggaaataatacttttcctctaagctcatattttgaaaagttgtttgagactgttataaaataact

SEQ ID NO: 174885 - DNA, 70 bp, Homo sapiens
aatacttttcctctaagctcatattttgaaaagttgtttgagactgttataaaataacttgagaatagtc

SEQ ID NO: 174886 - DNA, 76 bp, Homo sapiens
atattttgaaaagttgtttgagactgttataaaataacttgagaatagtctgagcatgatctcatccgctggaacg

SEQ ID NO: 174887 - DNA, 78 bp, Homo sapiens
aagttgtttgagactgttataaaataacttgagaatagtctgagcatgatctcatccgctggaacggagtatgaaata

SEQ ID NO: 174888 - DNA, 75 bp, Homo sapiens
aaaataacttgagaatagtctgagcatgatctcatccgctggaacggagtatgaaataaaacacgaagcctcttt

SEQ ID NO: 174889 - DNA, 77 bp, Homo sapiens
tctgagcatgatctcatccgctggaacggagtatgaaataaaacacgaagcctctttttagaaggatctgttttata

SEQ ID NO: 174890 - DNA, 68 bp, Homo sapiens
ccgctggaacggagtatgaaataaaacacgaagcctctttttagaaggatctgttttatagattttta

SEQ ID NO: 174891 - DNA, 69 bp, Homo sapiens
ggagtatgaaataaaacacgaagcctctttttagaaggatctgttttatagatttttaaattacagaga

SEQ ID NO: 174892 - DNA, 69 bp, Homo sapiens
acacgaagcctctttttagaaggatctgttttatagatttttaaattacagagattccttgaactggag

SEQ ID NO: 174893 - DNA, 71 bp, Homo sapiens
gcctctttttagaaggatctgttttatagatttttaaattacagagattccttgaactggaggataatagc

SEQ ID NO: 174894 - DNA, 71 bp, Homo sapiens
aggatctgttttatagatttttaaattacagagattccttgaactggaggataatagcgaaggacccacaa

SEQ ID NO: 174895 - DNA, 72 bp, Homo sapiens
ttatagatttttaaattacagagattccttgaactggaggataatagcgaaggacccacaaaggaaatatga

SEQ ID NO: 174896 - DNA, 72 bp, Homo sapiens
ttttaaattacagagattccttgaactggaggataatagcgaaggacccacaaaggaaatatgaataaagca

SEQ ID NO: 174897 - DNA, 73 bp, Homo sapiens
agagattccttgaactggaggataatagcgaaggacccacaaaggaaatatgaataaagcagcacaagtttaa

SEQ ID NO: 174898 - DNA, 72 bp, Homo sapiens
tccttgaactggaggataatagcgaaggacccacaaaggaaatatgaataaagcagcacaagtttaaataat

SEQ ID NO: 174899 - DNA, 75 bp, Homo sapiens
gaggataatagcgaaggacccacaaaggaaatatgaataaagcagcacaagtttaaataattgaatgtgagcaaa

SEQ ID NO: 174900 - DNA, 72 bp, Homo sapiens
gcgaaggacccacaaaggaaatatgaataaagcagcacaagtttaaataattgaatgtgagcaaaattaaag

SEQ ID NO: 174901 - DNA, 70 bp, Homo sapiens
ccacaaaggaaatatgaataaagcagcacaagtttaaataattgaatgtgagcaaaattaaagggaacgt

SEQ ID NO: 174902 - DNA, 75 bp, Homo sapiens
atgaataaagcagcacaagtttaaataattgaatgtgagcaaaattaaagggaacgtttgtcacgtctgacatgc

SEQ ID NO: 174903 - DNA, 75 bp, Homo sapiens
aagcagcacaagtttaaataattgaatgtgagcaaaattaaagggaacgtttgtcacgtctgacatgctccatcc

SEQ ID NO: 174904 - DNA, 73 bp, Homo sapiens
agtttaaataattgaatgtgagcaaaattaaagggaacgtttgtcacgtctgacatgctccatcctcctgtcc

SEQ ID NO: 174905 - DNA, 70 bp, Homo sapiens
aaaattaaagggaacgtttgtcacgtctgacatgctccatcctcctgtcccccccacactgaaccgtctc

SEQ ID NO: 174906 - DNA, 71 bp, Homo sapiens
aagggaacgtttgtcacgtctgacatgctccatcctcctgtcccccccacactgaaccgtctccaagaacc

SEQ ID NO: 174907 - DNA, 75 bp, Homo sapiens
ttgtcacgtctgacatgctccatcctcctgtcccccccacactgaaccgtctccaagaaccttccggagagccca

SEQ ID NO: 174908 - DNA, 74 bp, Homo sapiens
tgctccatcctcctgtcccccccacactgaaccgtctccaagaaccttccggagagcccacagtgtgaacagta

SEQ ID NO: 174909 - DNA, 71 bp, Homo sapiens
cctcctgtcccccccacactgaaccgtctccaagaaccttccggagagcccacagtgtgaacagtaatgaa

SEQ ID NO: 174910 - DNA, 77 bp, Homo sapiens
cccacactgaaccgtctccaagaaccttccggagagcccacagtgtgaacagtaatgaatgctccatagctggccgc

SEQ ID NO: 174911 - DNA, 78 bp, Homo sapiens
accgtctccaagaaccttccggagagcccacagtgtgaacagtaatgaatgctccatagctggccgccttgcactcta

SEQ ID NO: 174912 - DNA, 81 bp, Homo sapiens
cttccggagagcccacagtgtgaacagtaatgaatgctccatagctggccgccttgcactctagtgggaactatgatgttg

SEQ ID NO: 174913 - DNA, 81 bp, Homo sapiens
aacagtaatgaatgctccatagctggccgccttgcactctagtgggaactatgatgttgggcacaagtgccagcaggaagg

SEQ ID NO: 174914 - DNA, 80 bp, Homo sapiens
aatgctccatagctggccgccttgcactctagtgggaactatgatgttgggcacaagtgccagcaggaaggtgggaagct

SEQ ID NO: 174915 - DNA, 77 bp, Homo sapiens
atagctggccgccttgcactctagtgggaactatgatgttgggcacaagtgccagcaggaaggtgggaagcttcccg

SEQ ID NO: 174916 - DNA, 74 bp, Homo sapiens
ttgcactctagtgggaactatgatgttgggcacaagtgccagcaggaaggtgggaagcttcccggggatgtttt

SEQ ID NO: 174917 - DNA, 73 bp, Homo sapiens
tagtgggaactatgatgttgggcacaagtgccagcaggaaggtgggaagcttcccggggatgtttttcctgga

SEQ ID NO: 174918 - DNA, 73 bp, Homo sapiens
ctatgatgttgggcacaagtgccagcaggaaggtgggaagcttcccggggatgtttttcctggaggtcaagtc

SEQ ID NO: 174919 - DNA, 67 bp, Homo sapiens
acaagtgccagcaggaaggtgggaagcttcccggggatgtttttcctggaggtcaagtccccccttg

SEQ ID NO: 174920 - DNA, 66 bp, Homo sapiens
caggaaggtgggaagcttcccggggatgtttttcctggaggtcaagtccccccttgggctgtgaag

SEQ ID NO: 174921 - DNA, 67 bp, Homo sapiens
tgggaagcttcccggggatgtttttcctggaggtcaagtccccccttgggctgtgaagtagccggta

SEQ ID NO: 174922 - DNA, 65 bp, Homo sapiens
cttcccggggatgtttttcctggaggtcaagtccccccttgggctgtgaagtagccggtactggg

SEQ ID NO: 174923 - DNA, 70 bp, Homo sapiens
tggaggtcaagtccccccttgggctgtgaagtagccggtactggggttcatgggcatttcccttccctga

SEQ ID NO: 174924 - DNA, 77 bp, Homo sapiens
ggctgtgaagtagccggtactggggttcatgggcatttcccttccctgactgttcgccagcgtctggcacagcacca

SEQ ID NO: 174925 - DNA, 80 bp, Homo sapiens
gttcatgggcatttcccttccctgactgttcgccagcgtctggcacagcaccagcagcccctggaagtctaggccagata

SEQ ID NO: 174926 - DNA, 80 bp, Homo sapiens
atttcccttccctgactgttcgccagcgtctggcacagcaccagcagcccctggaagtctaggccagatatgccatgtcc

SEQ ID NO: 174927 - DNA, 81 bp, Homo sapiens
ttcgccagcgtctggcacagcaccagcagcccctggaagtctaggccagatatgccatgtccgagaatcttttgtaaacat

SEQ ID NO: 174928 - DNA, 81 bp, Homo sapiens
gtctggcacagcaccagcagcccctggaagtctaggccagatatgccatgtccgagaatcttttgtaaacatttttcatca

SEQ ID NO: 174929 - DNA, 79 bp, Homo sapiens
accagcagcccctggaagtctaggccagatatgccatgtccgagaatcttttgtaaacatttttcatcagtgactcaca

SEQ ID NO: 174930 - DNA, 79 bp, Homo sapiens
ctggaagtctaggccagatatgccatgtccgagaatcttttgtaaacatttttcatcagtgactcacagctttgagaaa

SEQ ID NO: 174931 - DNA, 78 bp, Homo sapiens
taggccagatatgccatgtccgagaatcttttgtaaacatttttcatcagtgactcacagctttgagaaaggattatt

SEQ ID NO: 174932 - DNA, 76 bp, Homo sapiens
agatatgccatgtccgagaatcttttgtaaacatttttcatcagtgactcacagctttgagaaaggattattttta

SEQ ID NO: 174933 - DNA, 73 bp, Homo sapiens
tgtccgagaatcttttgtaaacatttttcatcagtgactcacagctttgagaaaggattatttttatataaaa

SEQ ID NO: 174934 - DNA, 72 bp, Homo sapiens
tgtaaacatttttcatcagtgactcacagctttgagaaaggattatttttatataaaacgatctttcaattt

SEQ ID NO: 174935 - DNA, 71 bp, Homo sapiens
acatttttcatcagtgactcacagctttgagaaaggattatttttatataaaacgatctttcaattttact

SEQ ID NO: 174936 - DNA, 69 bp, Homo sapiens
gtgactcacagctttgagaaaggattatttttatataaaacgatctttcaattttactttaaagaccca

SEQ ID NO: 174937 - DNA, 72 bp, Homo sapiens
tttactttaaagacccaaaccattttcttagaatactgtctaaacaagttaatcatgcacagatccagtgaa

SEQ ID NO: 174938 - DNA, 74 bp, Homo sapiens
tttaaagacccaaaccattttcttagaatactgtctaaacaagttaatcatgcacagatccagtgaattctgtg

SEQ ID NO: 174939 - DNA, 76 bp, Homo sapiens
cattttcttagaatactgtctaaacaagttaatcatgcacagatccagtgaattctgtggcctggttcttataaaa

SEQ ID NO: 174940 - DNA, 78 bp, Homo sapiens
aatcatgcacagatccagtgaattctgtggcctggttcttataaaatttccaaataattttatactgtcatagacaga

SEQ ID NO: 174941 - DNA, 76 bp, Homo sapiens
acagatccagtgaattctgtggcctggttcttataaaatttccaaataattttatactgtcatagacagagccaga

SEQ ID NO: 174942 - DNA, 74 bp, Homo sapiens
cagtgaattctgtggcctggttcttataaaatttccaaataattttatactgtcatagacagagccagagcttt

SEQ ID NO: 174943 - DNA, 71 bp, Homo sapiens
gtggcctggttcttataaaatttccaaataattttatactgtcatagacagagccagagctttttagaggt

SEQ ID NO: 174944 - DNA, 71 bp, Homo sapiens
cttataaaatttccaaataattttatactgtcatagacagagccagagctttttagaggtttgaggcattt

SEQ ID NO: 174945 - DNA, 74 bp, Homo sapiens
caaataattttatactgtcatagacagagccagagctttttagaggtttgaggcattttttagatgtattactg

SEQ ID NO: 174946 - DNA, 74 bp, Homo sapiens
attttatactgtcatagacagagccagagctttttagaggtttgaggcattttttagatgtattactgttctcg

SEQ ID NO: 174947 - DNA, 76 bp, Homo sapiens
tagacagagccagagctttttagaggtttgaggcattttttagatgtattactgttctcggtgctcaactagctaa

SEQ ID NO: 174948 - DNA, 71 bp, Homo sapiens
ctttttagaggtttgaggcattttttagatgtattactgttctcggtgctcaactagctaattagtgattt

SEQ ID NO: 174949 - DNA, 73 bp, Homo sapiens
gaggcattttttagatgtattactgttctcggtgctcaactagctaattagtgattttttctgagtttagttg

SEQ ID NO: 174950 - DNA, 74 bp, Homo sapiens
ttagatgtattactgttctcggtgctcaactagctaattagtgattttttctgagtttagttggtgagtggaaa

SEQ ID NO: 174951 - DNA, 71 bp, Homo sapiens
tattactgttctcggtgctcaactagctaattagtgattttttctgagtttagttggtgagtggaaacctt

SEQ ID NO: 174952 - DNA, 70 bp, Homo sapiens
tctcggtgctcaactagctaattagtgattttttctgagtttagttggtgagtggaaacctttttgttaa

SEQ ID NO: 174953 - DNA, 70 bp, Homo sapiens
caactagctaattagtgattttttctgagtttagttggtgagtggaaacctttttgttaacattatgaca

SEQ ID NO: 174954 - DNA, 69 bp, Homo sapiens
gtgattttttctgagtttagttggtgagtggaaacctttttgttaacattatgacaaaataacaatatg

SEQ ID NO: 174955 - DNA, 67 bp, Homo sapiens
ctgagtttagttggtgagtggaaacctttttgttaacattatgacaaaataacaatatggttttaag

SEQ ID NO: 174956 - DNA, 71 bp, Homo sapiens
tggtgagtggaaacctttttgttaacattatgacaaaataacaatatggttttaagtggagtgagaggcac

SEQ ID NO: 174957 - DNA, 69 bp, Homo sapiens
ggaaacctttttgttaacattatgacaaaataacaatatggttttaagtggagtgagaggcacttttga

SEQ ID NO: 174958 - DNA, 75 bp, Homo sapiens
gttaacattatgacaaaataacaatatggttttaagtggagtgagaggcacttttgaagatccagatcttagatc

SEQ ID NO: 174959 - DNA, 76 bp, Homo sapiens
tgacaaaataacaatatggttttaagtggagtgagaggcacttttgaagatccagatcttagatccagatcttaaa

SEQ ID NO: 174960 - DNA, 75 bp, Homo sapiens
aataacaatatggttttaagtggagtgagaggcacttttgaagatccagatcttagatccagatcttaaatctgt

SEQ ID NO: 174961 - DNA, 74 bp, Homo sapiens
atggttttaagtggagtgagaggcacttttgaagatccagatcttagatccagatcttaaatctgtttaaagta

SEQ ID NO: 174962 - DNA, 78 bp, Homo sapiens
tggagtgagaggcacttttgaagatccagatcttagatccagatcttaaatctgtttaaagtatgactcagaaaggag

SEQ ID NO: 174963 - DNA, 76 bp, Homo sapiens
acttttgaagatccagatcttagatccagatcttaaatctgtttaaagtatgactcagaaaggaggctgcagaaaa

SEQ ID NO: 174964 - DNA, 77 bp, Homo sapiens
atccagatcttagatccagatcttaaatctgtttaaagtatgactcagaaaggaggctgcagaaaatgttcactaaa

SEQ ID NO: 174965 - DNA, 74 bp, Homo sapiens
atcttagatccagatcttaaatctgtttaaagtatgactcagaaaggaggctgcagaaaatgttcactaaaaaa

SEQ ID NO: 174966 - DNA, 72 bp, Homo sapiens
cagatcttaaatctgtttaaagtatgactcagaaaggaggctgcagaaaatgttcactaaaaaaatttaaga

SEQ ID NO: 174967 - DNA, 74 bp, Homo sapiens
ctgtttaaagtatgactcagaaaggaggctgcagaaaatgttcactaaaaaaatttaagaataatagcagatgc

SEQ ID NO: 174968 - DNA, 74 bp, Homo sapiens
gtatgactcagaaaggaggctgcagaaaatgttcactaaaaaaatttaagaataatagcagatgctaaaattta

SEQ ID NO: 174969 - DNA, 72 bp, Homo sapiens
ggaggctgcagaaaatgttcactaaaaaaatttaagaataatagcagatgctaaaatttatttcccaagaca

SEQ ID NO: 174970 - DNA, 72 bp, Homo sapiens
gcagaaaatgttcactaaaaaaatttaagaataatagcagatgctaaaatttatttcccaagacaatagcca

SEQ ID NO: 174971 - DNA, 72 bp, Homo sapiens
tcactaaaaaaatttaagaataatagcagatgctaaaatttatttcccaagacaatagccaaaaagatctgc

SEQ ID NO: 174972 - DNA, 74 bp, Homo sapiens
aataatagcagatgctaaaatttatttcccaagacaatagccaaaaagatctgctggaagaacagaagaaggga

SEQ ID NO: 174973 - DNA, 69 bp, Homo sapiens
ctaaaatttatttcccaagacaatagccaaaaagatctgctggaagaacagaagaagggaactagttgg

SEQ ID NO: 174974 - DNA, 71 bp, Homo sapiens
tatttcccaagacaatagccaaaaagatctgctggaagaacagaagaagggaactagttggggcatctttt

SEQ ID NO: 174975 - DNA, 68 bp, Homo sapiens
aagacaatagccaaaaagatctgctggaagaacagaagaagggaactagttggggcatcttttttttt

SEQ ID NO: 174976 - DNA, 68 bp, Homo sapiens
aaaaagatctgctggaagaacagaagaagggaactagttggggcatcttttttttttgaatgaagcct

SEQ ID NO: 174977 - DNA, 66 bp, Homo sapiens
aacagaagaagggaactagttggggcatcttttttttttgaatgaagccttcagccttctttaggg

SEQ ID NO: 174978 - DNA, 69 bp, Homo sapiens
aactagttggggcatcttttttttttgaatgaagccttcagccttctttaggggaatcttgcttcctga

SEQ ID NO: 174979 - DNA, 70 bp, Homo sapiens
gcatcttttttttttgaatgaagccttcagccttctttaggggaatcttgcttcctgacagagggaccgg

SEQ ID NO: 174980 - DNA, 69 bp, Homo sapiens
aagccttcagccttctttaggggaatcttgcttcctgacagagggaccggtggaaagtttgtgtcttaa

SEQ ID NO: 174981 - DNA, 69 bp, Homo sapiens
agccttctttaggggaatcttgcttcctgacagagggaccggtggaaagtttgtgtcttaagcaagaaa

SEQ ID NO: 174982 - DNA, 70 bp, Homo sapiens
gggaatcttgcttcctgacagagggaccggtggaaagtttgtgtcttaagcaagaaagatttaagtacat

SEQ ID NO: 174983 - DNA, 70 bp, Homo sapiens
cttcctgacagagggaccggtggaaagtttgtgtcttaagcaagaaagatttaagtacattctgcaactt

SEQ ID NO: 174984 - DNA, 70 bp, Homo sapiens
gagggaccggtggaaagtttgtgtcttaagcaagaaagatttaagtacattctgcaactttggccttgta

SEQ ID NO: 174985 - DNA, 74 bp, Homo sapiens
tggaaagtttgtgtcttaagcaagaaagatttaagtacattctgcaactttggccttgtaagctgtgatcattt

SEQ ID NO: 174986 - DNA, 75 bp, Homo sapiens
tgtgtcttaagcaagaaagatttaagtacattctgcaactttggccttgtaagctgtgatcatttttaaggttga

SEQ ID NO: 174987 - DNA, 74 bp, Homo sapiens
caagaaagatttaagtacattctgcaactttggccttgtaagctgtgatcatttttaaggttgacgagcatagt

SEQ ID NO: 174988 - DNA, 74 bp, Homo sapiens
aactttggccttgtaagctgtgatcatttttaaggttgacgagcatagttcactatgaaatgaagcaagtaact

SEQ ID NO: 174989 - DNA, 80 bp, Homo sapiens
taagctgtgatcatttttaaggttgacgagcatagttcactatgaaatgaagcaagtaacttggcatttatacattgtga

SEQ ID NO: 174990 - DNA, 81 bp, Homo sapiens
taaggttgacgagcatagttcactatgaaatgaagcaagtaacttggcatttatacattgtgagtcaattttgacatcagc

SEQ ID NO: 174991 - DNA, 79 bp, Homo sapiens
atagttcactatgaaatgaagcaagtaacttggcatttatacattgtgagtcaattttgacatcagcctggattgggaa

SEQ ID NO: 174992 - DNA, 74 bp, Homo sapiens
aacttggcatttatacattgtgagtcaattttgacatcagcctggattgggaattgactggaaggttttggtgt

SEQ ID NO: 174993 - DNA, 77 bp, Homo sapiens
ttatacattgtgagtcaattttgacatcagcctggattgggaattgactggaaggttttggtgttggactgtggcta

SEQ ID NO: 174994 - DNA, 75 bp, Homo sapiens
agtcaattttgacatcagcctggattgggaattgactggaaggttttggtgttggactgtggctacacttcagtg

SEQ ID NO: 174995 - DNA, 75 bp, Homo sapiens
atcagcctggattgggaattgactggaaggttttggtgttggactgtggctacacttcagtgtctcggtccagag

SEQ ID NO: 174996 - DNA, 79 bp, Homo sapiens
attgggaattgactggaaggttttggtgttggactgtggctacacttcagtgtctcggtccagaggcatgcatgagcaa

SEQ ID NO: 174997 - DNA, 79 bp, Homo sapiens
aattgactggaaggttttggtgttggactgtggctacacttcagtgtctcggtccagaggcatgcatgagcaatacttc

SEQ ID NO: 174998 - DNA, 78 bp, Homo sapiens
ttttggtgttggactgtggctacacttcagtgtctcggtccagaggcatgcatgagcaatacttccctttgggcttta

SEQ ID NO: 174999 - DNA, 79 bp, Homo sapiens
ttggactgtggctacacttcagtgtctcggtccagaggcatgcatgagcaatacttccctttgggctttagccattaat

SEQ ID NO: 175000 - DNA, 78 bp, Homo sapiens
ctacacttcagtgtctcggtccagaggcatgcatgagcaatacttccctttgggctttagccattaatttgtggaata

SEQ ID NO: 175001 - DNA, 78 bp, Homo sapiens
agtgtctcggtccagaggcatgcatgagcaatacttccctttgggctttagccattaatttgtggaatagagcaagaa

SEQ ID NO: 175002 - DNA, 78 bp, Homo sapiens
cagaggcatgcatgagcaatacttccctttgggctttagccattaatttgtggaatagagcaagaactggagaggaaa

SEQ ID NO: 175003 - DNA, 76 bp, Homo sapiens
atgcatgagcaatacttccctttgggctttagccattaatttgtggaatagagcaagaactggagaggaaagtcga

SEQ ID NO: 175004 - DNA, 71 bp, Homo sapiens
aatacttccctttgggctttagccattaatttgtggaatagagcaagaactggagaggaaagtcgagagac

SEQ ID NO: 175005 - DNA, 74 bp, Homo sapiens
cctttgggctttagccattaatttgtggaatagagcaagaactggagaggaaagtcgagagactgccttggatc

SEQ ID NO: 175006 - DNA, 77 bp, Homo sapiens
atttgtggaatagagcaagaactggagaggaaagtcgagagactgccttggatcgcctgacgtcctgttgaatcaaa

SEQ ID NO: 175007 - DNA, 78 bp, Homo sapiens
tagagcaagaactggagaggaaagtcgagagactgccttggatcgcctgacgtcctgttgaatcaaaaagcagtggga

SEQ ID NO: 175008 - DNA, 73 bp, Homo sapiens
agaggaaagtcgagagactgccttggatcgcctgacgtcctgttgaatcaaaaagcagtgggaggccctttcc

SEQ ID NO: 175009 - DNA, 73 bp, Homo sapiens
aagtcgagagactgccttggatcgcctgacgtcctgttgaatcaaaaagcagtgggaggccctttccttccta

SEQ ID NO: 175010 - DNA, 71 bp, Homo sapiens
actgccttggatcgcctgacgtcctgttgaatcaaaaagcagtgggaggccctttccttcctaacaaaggc

SEQ ID NO: 175011 - DNA, 73 bp, Homo sapiens
cctgacgtcctgttgaatcaaaaagcagtgggaggccctttccttcctaacaaaggcctcatcctcttgcata

SEQ ID NO: 175012 - DNA, 73 bp, Homo sapiens
ctgttgaatcaaaaagcagtgggaggccctttccttcctaacaaaggcctcatcctcttgcataacattccca

SEQ ID NO: 175013 - DNA, 74 bp, Homo sapiens
aatcaaaaagcagtgggaggccctttccttcctaacaaaggcctcatcctcttgcataacattcccagcatctg

SEQ ID NO: 175014 - DNA, 75 bp, Homo sapiens
agtgggaggccctttccttcctaacaaaggcctcatcctcttgcataacattcccagcatctgtcgacatgttcg

SEQ ID NO: 175015 - DNA, 77 bp, Homo sapiens
tccttcctaacaaaggcctcatcctcttgcataacattcccagcatctgtcgacatgttcgggaccatcccacttta

SEQ ID NO: 175016 - DNA, 77 bp, Homo sapiens
taacaaaggcctcatcctcttgcataacattcccagcatctgtcgacatgttcgggaccatcccactttaacccaca

SEQ ID NO: 175017 - DNA, 77 bp, Homo sapiens
atcctcttgcataacattcccagcatctgtcgacatgttcgggaccatcccactttaacccacacttcaagtggatg

SEQ ID NO: 175018 - DNA, 75 bp, Homo sapiens
ataacattcccagcatctgtcgacatgttcgggaccatcccactttaacccacacttcaagtggatggccacctc

SEQ ID NO: 175019 - DNA, 75 bp, Homo sapiens
attcccagcatctgtcgacatgttcgggaccatcccactttaacccacacttcaagtggatggccacctctgggc

SEQ ID NO: 175020 - DNA, 75 bp, Homo sapiens
tgtcgacatgttcgggaccatcccactttaacccacacttcaagtggatggccacctctgggcggggatctgcat

SEQ ID NO: 175021 - DNA, 74 bp, Homo sapiens
ttcgggaccatcccactttaacccacacttcaagtggatggccacctctgggcggggatctgcattctgcttat

SEQ ID NO: 175022 - DNA, 74 bp, Homo sapiens
cactttaacccacacttcaagtggatggccacctctgggcggggatctgcattctgcttattccaggtgttttc

SEQ ID NO: 175023 - DNA, 76 bp, Homo sapiens
taacccacacttcaagtggatggccacctctgggcggggatctgcattctgcttattccaggtgttttccaggcca

SEQ ID NO: 175024 - DNA, 74 bp, Homo sapiens
agtggatggccacctctgggcggggatctgcattctgcttattccaggtgttttccaggccacttccccgatta

SEQ ID NO: 175025 - DNA, 75 bp, Homo sapiens
ggggatctgcattctgcttattccaggtgttttccaggccacttccccgattatgtaactttgatcaaatccaga

SEQ ID NO: 175026 - DNA, 75 bp, Homo sapiens
attctgcttattccaggtgttttccaggccacttccccgattatgtaactttgatcaaatccagatgcggcagaa

SEQ ID NO: 175027 - DNA, 76 bp, Homo sapiens
tattccaggtgttttccaggccacttccccgattatgtaactttgatcaaatccagatgcggcagaatgtttgata

SEQ ID NO: 175028 - DNA, 76 bp, Homo sapiens
tttccaggccacttccccgattatgtaactttgatcaaatccagatgcggcagaatgtttgatagaagaggtcaaa

SEQ ID NO: 175029 - DNA, 77 bp, Homo sapiens
aggccacttccccgattatgtaactttgatcaaatccagatgcggcagaatgtttgatagaagaggtcaaatggcat

SEQ ID NO: 175030 - DNA, 80 bp, Homo sapiens
taactttgatcaaatccagatgcggcagaatgtttgatagaagaggtcaaatggcatttgagaagaaaagcatttctgta

SEQ ID NO: 175031 - DNA, 79 bp, Homo sapiens
aaatccagatgcggcagaatgtttgatagaagaggtcaaatggcatttgagaagaaaagcatttctgtattcatgactt

SEQ ID NO: 175032 - DNA, 76 bp, Homo sapiens
ggcagaatgtttgatagaagaggtcaaatggcatttgagaagaaaagcatttctgtattcatgactttggtttaat

SEQ ID NO: 175033 - DNA, 76 bp, Homo sapiens
ttgatagaagaggtcaaatggcatttgagaagaaaagcatttctgtattcatgactttggtttaatttcctgtgtg

SEQ ID NO: 175034 - DNA, 73 bp, Homo sapiens
aagaggtcaaatggcatttgagaagaaaagcatttctgtattcatgactttggtttaatttcctgtgtgggcc

SEQ ID NO: 175035 - DNA, 72 bp, Homo sapiens
atttgagaagaaaagcatttctgtattcatgactttggtttaatttcctgtgtgggcctggtctgccaaagt

SEQ ID NO: 175036 - DNA, 75 bp, Homo sapiens
aagaaaagcatttctgtattcatgactttggtttaatttcctgtgtgggcctggtctgccaaagttgtatgctca

SEQ ID NO: 175037 - DNA, 76 bp, Homo sapiens
atttctgtattcatgactttggtttaatttcctgtgtgggcctggtctgccaaagttgtatgctcatggccacgag

SEQ ID NO: 175038 - DNA, 77 bp, Homo sapiens
ttcatgactttggtttaatttcctgtgtgggcctggtctgccaaagttgtatgctcatggccacgaggttgacgcac

SEQ ID NO: 175039 - DNA, 76 bp, Homo sapiens
tggtttaatttcctgtgtgggcctggtctgccaaagttgtatgctcatggccacgaggttgacgcaccagagggag

SEQ ID NO: 175040 - DNA, 80 bp, Homo sapiens
tgtgggcctggtctgccaaagttgtatgctcatggccacgaggttgacgcaccagagggaggcactcaagtgccttttca

SEQ ID NO: 175041 - DNA, 79 bp, Homo sapiens
cctggtctgccaaagttgtatgctcatggccacgaggttgacgcaccagagggaggcactcaagtgccttttcaggaca

SEQ ID NO: 175042 - DNA, 78 bp, Homo sapiens
aaagttgtatgctcatggccacgaggttgacgcaccagagggaggcactcaagtgccttttcaggacagcctgaagga

SEQ ID NO: 175043 - DNA, 78 bp, Homo sapiens
atgctcatggccacgaggttgacgcaccagagggaggcactcaagtgccttttcaggacagcctgaaggaagcctccc

SEQ ID NO: 175044 - DNA, 74 bp, Homo sapiens
ccacgaggttgacgcaccagagggaggcactcaagtgccttttcaggacagcctgaaggaagcctccctcccca

SEQ ID NO: 175045 - DNA, 75 bp, Homo sapiens
accagagggaggcactcaagtgccttttcaggacagcctgaaggaagcctccctccccagcatgctttttcatgt

SEQ ID NO: 175046 - DNA, 76 bp, Homo sapiens
aggcactcaagtgccttttcaggacagcctgaaggaagcctccctccccagcatgctttttcatgttaaattatca

SEQ ID NO: 175047 - DNA, 75 bp, Homo sapiens
agtgccttttcaggacagcctgaaggaagcctccctccccagcatgctttttcatgttaaattatcaattatgta

SEQ ID NO: 175048 - DNA, 74 bp, Homo sapiens
tttcaggacagcctgaaggaagcctccctccccagcatgctttttcatgttaaattatcaattatgtaagttta

SEQ ID NO: 175049 - DNA, 72 bp, Homo sapiens
cctgaaggaagcctccctccccagcatgctttttcatgttaaattatcaattatgtaagtttagggccaggc

SEQ ID NO: 175050 - DNA, 66 bp, Homo sapiens
aaaaaaaatttcaattggcttctattaaagcttttttatgtttgtcattgttttctagtaataaca

SEQ ID NO: 175051 - DNA, 70 bp, Homo sapiens
ttcaattggcttctattaaagcttttttatgtttgtcattgttttctagtaataacaacaatccacattt

SEQ ID NO: 175052 - DNA, 70 bp, Homo sapiens
ggcttctattaaagcttttttatgtttgtcattgttttctagtaataacaacaatccacattttttgtga

SEQ ID NO: 175053 - DNA, 70 bp, Homo sapiens
aagcttttttatgtttgtcattgttttctagtaataacaacaatccacattttttgtgagaaatatacca

SEQ ID NO: 175054 - DNA, 73 bp, Homo sapiens
gtttgtcattgttttctagtaataacaacaatccacattttttgtgagaaatataccataatatagagaagta

SEQ ID NO: 175055 - DNA, 73 bp, Homo sapiens
cattgttttctagtaataacaacaatccacattttttgtgagaaatataccataatatagagaagtataaaga

SEQ ID NO: 175056 - DNA, 73 bp, Homo sapiens
ataacaacaatccacattttttgtgagaaatataccataatatagagaagtataaagaaaatgtaaggccaga

SEQ ID NO: 175057 - DNA, 73 bp, Homo sapiens
caatccacattttttgtgagaaatataccataatatagagaagtataaagaaaatgtaaggccagacacggtg

SEQ ID NO: 175058 - DNA, 64 bp, Homo sapiens
aaaaaagaaaagtaaatttaaagcacttaaaatcccaccaccctgagttaactactgttcacag

SEQ ID NO: 175059 - DNA, 67 bp, Homo sapiens
agtaaatttaaagcacttaaaatcccaccaccctgagttaactactgttcacagtttggtgaaattc

SEQ ID NO: 175060 - DNA, 68 bp, Homo sapiens
aaagcacttaaaatcccaccaccctgagttaactactgttcacagtttggtgaaattcctcctcgtct

SEQ ID NO: 175061 - DNA, 67 bp, Homo sapiens
aaatcccaccaccctgagttaactactgttcacagtttggtgaaattcctcctcgtcttctattttt

SEQ ID NO: 175062 - DNA, 69 bp, Homo sapiens
accaccctgagttaactactgttcacagtttggtgaaattcctcctcgtcttctattttttcatagttg

SEQ ID NO: 175063 - DNA, 73 bp, Homo sapiens
taactactgttcacagtttggtgaaattcctcctcgtcttctattttttcatagttgggaccatgcctatata

SEQ ID NO: 175064 - DNA, 72 bp, Homo sapiens
acagtttggtgaaattcctcctcgtcttctattttttcatagttgggaccatgcctatatactggaatgtaa

SEQ ID NO: 175065 - DNA, 73 bp, Homo sapiens
cctcctcgtcttctattttttcatagttgggaccatgcctatatactggaatgtaatataaacacttaatata

SEQ ID NO: 175066 - DNA, 75 bp, Homo sapiens
ctattttttcatagttgggaccatgcctatatactggaatgtaatataaacacttaatatattattgcgagtata

SEQ ID NO: 175067 - DNA, 75 bp, Homo sapiens
ggaccatgcctatatactggaatgtaatataaacacttaatatattattgcgagtatattctcaaacttaaatat

SEQ ID NO: 175068 - DNA, 73 bp, Homo sapiens
tatatactggaatgtaatataaacacttaatatattattgcgagtatattctcaaacttaaatattttttcca

SEQ ID NO: 175069 - DNA, 69 bp, Homo sapiens
aatgtaatataaacacttaatatattattgcgagtatattctcaaacttaaatattttttccaaaaata

SEQ ID NO: 175070 - DNA, 69 bp, Homo sapiens
cacttaatatattattgcgagtatattctcaaacttaaatattttttccaaaaatattttgagtggctt

SEQ ID NO: 175071 - DNA, 69 bp, Homo sapiens
tattgcgagtatattctcaaacttaaatattttttccaaaaatattttgagtggcttttaaaatatatc

SEQ ID NO: 175072 - DNA, 67 bp, Homo sapiens
cgagtatattctcaaacttaaatattttttccaaaaatattttgagtggcttttaaaatatatccta

SEQ ID NO: 175073 - DNA, 71 bp, Homo sapiens
caaacttaaatattttttccaaaaatattttgagtggcttttaaaatatatcctattttatgcatgcagca

SEQ ID NO: 175074 - DNA, 72 bp, Homo sapiens
tttttccaaaaatattttgagtggcttttaaaatatatcctattttatgcatgcagcataaactaacttatc

SEQ ID NO: 175075 - DNA, 77 bp, Homo sapiens
aatattttgagtggcttttaaaatatatcctattttatgcatgcagcataaactaacttatcctgtgttgatagata

SEQ ID NO: 175076 - DNA, 77 bp, Homo sapiens
gagtggcttttaaaatatatcctattttatgcatgcagcataaactaacttatcctgtgttgatagatattttgtac

SEQ ID NO: 175077 - DNA, 76 bp, Homo sapiens
aaatatatcctattttatgcatgcagcataaactaacttatcctgtgttgatagatattttgtacttgcccttttc

SEQ ID NO: 175078 - DNA, 79 bp, Homo sapiens
tatcctattttatgcatgcagcataaactaacttatcctgtgttgatagatattttgtacttgcccttttctgtgctgt

SEQ ID NO: 175079 - DNA, 78 bp, Homo sapiens
tatgcatgcagcataaactaacttatcctgtgttgatagatattttgtacttgcccttttctgtgctgttgtttaaaa

SEQ ID NO: 175080 - DNA, 72 bp, Homo sapiens
gcataaactaacttatcctgtgttgatagatattttgtacttgcccttttctgtgctgttgtttaaaattag

SEQ ID NO: 175081 - DNA, 72 bp, Homo sapiens
acttatcctgtgttgatagatattttgtacttgcccttttctgtgctgttgtttaaaattagtgtatagaaa

SEQ ID NO: 175082 - DNA, 74 bp, Homo sapiens
gatagatattttgtacttgcccttttctgtgctgttgtttaaaattagtgtatagaaataattgtgttgatcac

SEQ ID NO: 175083 - DNA, 72 bp, Homo sapiens
ttttgtacttgcccttttctgtgctgttgtttaaaattagtgtatagaaataattgtgttgatcacttagga

SEQ ID NO: 175084 - DNA, 72 bp, Homo sapiens
ttgcccttttctgtgctgttgtttaaaattagtgtatagaaataattgtgttgatcacttaggataaattcc

SEQ ID NO: 175085 - DNA, 73 bp, Homo sapiens
gctgttgtttaaaattagtgtatagaaataattgtgttgatcacttaggataaattcctagaggtaaatcaga

SEQ ID NO: 175086 - DNA, 72 bp, Homo sapiens
gtttaaaattagtgtatagaaataattgtgttgatcacttaggataaattcctagaggtaaatcagatatta

SEQ ID NO: 175087 - DNA, 74 bp, Homo sapiens
tgtatagaaataattgtgttgatcacttaggataaattcctagaggtaaatcagatattaaattctttatagac

SEQ ID NO: 175088 - DNA, 73 bp, Homo sapiens
aattgtgttgatcacttaggataaattcctagaggtaaatcagatattaaattctttatagacttctggttca

SEQ ID NO: 175089 - DNA, 73 bp, Homo sapiens
cacttaggataaattcctagaggtaaatcagatattaaattctttatagacttctggttcatattccagttgc

SEQ ID NO: 175090 - DNA, 73 bp, Homo sapiens
gataaattcctagaggtaaatcagatattaaattctttatagacttctggttcatattccagttgccctcaat

SEQ ID NO: 175091 - DNA, 73 bp, Homo sapiens
ctagaggtaaatcagatattaaattctttatagacttctggttcatattccagttgccctcaatttatacacc

SEQ ID NO: 175092 - DNA, 76 bp, Homo sapiens
atagacttctggttcatattccagttgccctcaatttatacacctactactagcattgtatgagagtgcccgtttc

SEQ ID NO: 175093 - DNA, 75 bp, Homo sapiens
agttgccctcaatttatacacctactactagcattgtatgagagtgcccgtttctctgaaatcttacccacactg

SEQ ID NO: 175094 - DNA, 78 bp, Homo sapiens
ttatacacctactactagcattgtatgagagtgcccgtttctctgaaatcttacccacactggctgtcagcgtcaaaa

SEQ ID NO: 175095 - DNA, 79 bp, Homo sapiens
ctactactagcattgtatgagagtgcccgtttctctgaaatcttacccacactggctgtcagcgtcaaaaagatgtatc

SEQ ID NO: 175096 - DNA, 81 bp, Homo sapiens
attgtatgagagtgcccgtttctctgaaatcttacccacactggctgtcagcgtcaaaaagatgtatctgcagatttggca

SEQ ID NO: 175097 - DNA, 77 bp, Homo sapiens
agtgcccgtttctctgaaatcttacccacactggctgtcagcgtcaaaaagatgtatctgcagatttggcaaggaat

SEQ ID NO: 175098 - DNA, 78 bp, Homo sapiens
cgtttctctgaaatcttacccacactggctgtcagcgtcaaaaagatgtatctgcagatttggcaaggaatttgcatt

SEQ ID NO: 175099 - DNA, 79 bp, Homo sapiens
aaatcttacccacactggctgtcagcgtcaaaaagatgtatctgcagatttggcaaggaatttgcatttcagtgattat

SEQ ID NO: 175100 - DNA, 83 bp, Homo sapiens
actggctgtcagcgtcaaaaagatgtatctgcagatttggcaaggaatttgcatttcagtgattattatcaagcgttcacaca

SEQ ID NO: 175101 - DNA, 80 bp, Homo sapiens
agcgtcaaaaagatgtatctgcagatttggcaaggaatttgcatttcagtgattattatcaagcgttcacacactttcca

SEQ ID NO: 175102 - DNA, 79 bp, Homo sapiens
aaaagatgtatctgcagatttggcaaggaatttgcatttcagtgattattatcaagcgttcacacactttccatgttta

SEQ ID NO: 175103 - DNA, 76 bp, Homo sapiens
gcagatttggcaaggaatttgcatttcagtgattattatcaagcgttcacacactttccatgtttaatggtaattt

SEQ ID NO: 175104 - DNA, 72 bp, Homo sapiens
ggcaaggaatttgcatttcagtgattattatcaagcgttcacacactttccatgtttaatggtaattttttt

SEQ ID NO: 175105 - DNA, 68 bp, Homo sapiens
accgcacctggcctttaatgataatgtaaattttttgtgaattgtttattcgtggctttgccccattt

SEQ ID NO: 175106 - DNA, 68 bp, Homo sapiens
cctggcctttaatgataatgtaaattttttgtgaattgtttattcgtggctttgccccattttttcca

SEQ ID NO: 175107 - DNA, 68 bp, Homo sapiens
gataatgtaaattttttgtgaattgtttattcgtggctttgccccattttttccatagtggagggatt

SEQ ID NO: 175108 - DNA, 66 bp, Homo sapiens
gtaaattttttgtgaattgtttattcgtggctttgccccattttttccatagtggagggatttttc

SEQ ID NO: 175109 - DNA, 75 bp, Homo sapiens
ttccatagtggagggatttttctttttcttgttggtatgtaaagtccttgtgtgtcaagaatgctctgcctcaca

SEQ ID NO: 175110 - DNA, 78 bp, Homo sapiens
aagtccttgtgtgtcaagaatgctctgcctcacagtttttctaatataatgacagtggaagctcgtaactggcttcca

SEQ ID NO: 175111 - DNA, 79 bp, Homo sapiens
aagaatgctctgcctcacagtttttctaatataatgacagtggaagctcgtaactggcttccacttgactgacttgcta

SEQ ID NO: 175112 - DNA, 78 bp, Homo sapiens
tctgcctcacagtttttctaatataatgacagtggaagctcgtaactggcttccacttgactgacttgctaaattgac

SEQ ID NO: 175113 - DNA, 75 bp, Homo sapiens
tttttctaatataatgacagtggaagctcgtaactggcttccacttgactgacttgctaaattgaccggcactct

SEQ ID NO: 175114 - DNA, 77 bp, Homo sapiens
ctaatataatgacagtggaagctcgtaactggcttccacttgactgacttgctaaattgaccggcactcttcacttc

SEQ ID NO: 175115 - DNA, 73 bp, Homo sapiens
agtggaagctcgtaactggcttccacttgactgacttgctaaattgaccggcactcttcacttccttataaaa

SEQ ID NO: 175116 - DNA, 76 bp, Homo sapiens
taactggcttccacttgactgacttgctaaattgaccggcactcttcacttccttataaaacatgcctccatagtc

SEQ ID NO: 175117 - DNA, 76 bp, Homo sapiens
ttccacttgactgacttgctaaattgaccggcactcttcacttccttataaaacatgcctccatagtccctgtgcc

SEQ ID NO: 175118 - DNA, 77 bp, Homo sapiens
actgacttgctaaattgaccggcactcttcacttccttataaaacatgcctccatagtccctgtgccccatggcaca

SEQ ID NO: 175119 - DNA, 76 bp, Homo sapiens
ctaaattgaccggcactcttcacttccttataaaacatgcctccatagtccctgtgccccatggcacatgggatgg

SEQ ID NO: 175120 - DNA, 76 bp, Homo sapiens
actcttcacttccttataaaacatgcctccatagtccctgtgccccatggcacatgggatggggtagccacactac

SEQ ID NO: 175121 - DNA, 76 bp, Homo sapiens
acttccttataaaacatgcctccatagtccctgtgccccatggcacatgggatggggtagccacactaccactgtc

SEQ ID NO: 175122 - DNA, 85 bp, Homo sapiens
tccatagtccctgtgccccatggcacatgggatggggtagccacactaccactgtctgctgctgcatatgttcctgtccacaaga

SEQ ID NO: 175123 - DNA, 86 bp, Homo sapiens
tgccccatggcacatgggatggggtagccacactaccactgtctgctgctgcatatgttcctgtccacaagagccagtcatgtttg

SEQ ID NO: 175124 - DNA, 83 bp, Homo sapiens
cacatgggatggggtagccacactaccactgtctgctgctgcatatgttcctgtccacaagagccagtcatgtttgtttccaa

SEQ ID NO: 175125 - DNA, 81 bp, Homo sapiens
atggggtagccacactaccactgtctgctgctgcatatgttcctgtccacaagagccagtcatgtttgtttccaagcctgg

SEQ ID NO: 175126 - DNA, 83 bp, Homo sapiens
cactaccactgtctgctgctgcatatgttcctgtccacaagagccagtcatgtttgtttccaagcctggttctttcagatata

SEQ ID NO: 175127 - DNA, 84 bp, Homo sapiens
tgtctgctgctgcatatgttcctgtccacaagagccagtcatgtttgtttccaagcctggttctttcagatatagctgttgttg

SEQ ID NO: 175128 - DNA, 80 bp, Homo sapiens
tgcatatgttcctgtccacaagagccagtcatgtttgtttccaagcctggttctttcagatatagctgttgttgtaatta

SEQ ID NO: 175129 - DNA, 76 bp, Homo sapiens
tgttcctgtccacaagagccagtcatgtttgtttccaagcctggttctttcagatatagctgttgttgtaattact

SEQ ID NO: 175130 - DNA, 76 bp, Homo sapiens
agagccagtcatgtttgtttccaagcctggttctttcagatatagctgttgttgtaattacttggttgatatgaaa

SEQ ID NO: 175131 - DNA, 76 bp, Homo sapiens
tcatgtttgtttccaagcctggttctttcagatatagctgttgttgtaattacttggttgatatgaaaccaatgaa

SEQ ID NO: 175132 - DNA, 77 bp, Homo sapiens
caagcctggttctttcagatatagctgttgttgtaattacttggttgatatgaaaccaatgaaatgcaagtgtgaaa

SEQ ID NO: 175133 - DNA, 77 bp, Homo sapiens
ctggttctttcagatatagctgttgttgtaattacttggttgatatgaaaccaatgaaatgcaagtgtgaaaagaga

SEQ ID NO: 175134 - DNA, 77 bp, Homo sapiens
cagatatagctgttgttgtaattacttggttgatatgaaaccaatgaaatgcaagtgtgaaaagagaattgtttcta

SEQ ID NO: 175135 - DNA, 72 bp, Homo sapiens
gttgttgtaattacttggttgatatgaaaccaatgaaatgcaagtgtgaaaagagaattgtttctaggaaaa

SEQ ID NO: 175136 - DNA, 75 bp, Homo sapiens
ttacttggttgatatgaaaccaatgaaatgcaagtgtgaaaagagaattgtttctaggaaaattaagatgaatgc

SEQ ID NO: 175137 - DNA, 75 bp, Homo sapiens
tgaaaccaatgaaatgcaagtgtgaaaagagaattgtttctaggaaaattaagatgaatgctttagaaagactca

SEQ ID NO: 175138 - DNA, 73 bp, Homo sapiens
gaaatgcaagtgtgaaaagagaattgtttctaggaaaattaagatgaatgctttagaaagactcagtaaagga

SEQ ID NO: 175139 - DNA, 73 bp, Homo sapiens
gcaagtgtgaaaagagaattgtttctaggaaaattaagatgaatgctttagaaagactcagtaaaggaagata

SEQ ID NO: 175140 - DNA, 70 bp, Homo sapiens
agagaattgtttctaggaaaattaagatgaatgctttagaaagactcagtaaaggaagataaatttaaca

SEQ ID NO: 175141 - DNA, 70 bp, Homo sapiens
ctaggaaaattaagatgaatgctttagaaagactcagtaaaggaagataaatttaacaaattactacaga

SEQ ID NO: 175142 - DNA, 70 bp, Homo sapiens
aagatgaatgctttagaaagactcagtaaaggaagataaatttaacaaattactacagaattaggtgtaa

SEQ ID NO: 175143 - DNA, 69 bp, Homo sapiens
gctttagaaagactcagtaaaggaagataaatttaacaaattactacagaattaggtgtaagacaacag

SEQ ID NO: 175144 - DNA, 71 bp, Homo sapiens
gactcagtaaaggaagataaatttaacaaattactacagaattaggtgtaagacaacagtaaatgattgga

SEQ ID NO: 175145 - DNA, 72 bp, Homo sapiens
ggaagataaatttaacaaattactacagaattaggtgtaagacaacagtaaatgattggaatgaattacaga

SEQ ID NO: 175146 - DNA, 72 bp, Homo sapiens
tttaacaaattactacagaattaggtgtaagacaacagtaaatgattggaatgaattacagaaatctagaaa

SEQ ID NO: 175147 - DNA, 75 bp, Homo sapiens
attaggtgtaagacaacagtaaatgattggaatgaattacagaaatctagaaagctttgacagtgggaatgcgta

SEQ ID NO: 175148 - DNA, 78 bp, Homo sapiens
gacaacagtaaatgattggaatgaattacagaaatctagaaagctttgacagtgggaatgcgtagtgaatggctctaa

SEQ ID NO: 175149 - DNA, 76 bp, Homo sapiens
agtaaatgattggaatgaattacagaaatctagaaagctttgacagtgggaatgcgtagtgaatggctctaagttc

SEQ ID NO: 175150 - DNA, 77 bp, Homo sapiens
aatgaattacagaaatctagaaagctttgacagtgggaatgcgtagtgaatggctctaagttctccctccatctgta

SEQ ID NO: 175151 - DNA, 77 bp, Homo sapiens
tagaaagctttgacagtgggaatgcgtagtgaatggctctaagttctccctccatctgtaggaaattgaagctggaa

SEQ ID NO: 175152 - DNA, 79 bp, Homo sapiens
acagtgggaatgcgtagtgaatggctctaagttctccctccatctgtaggaaattgaagctggaagtgagatgatatat

SEQ ID NO: 175153 - DNA, 80 bp, Homo sapiens
aatgcgtagtgaatggctctaagttctccctccatctgtaggaaattgaagctggaagtgagatgatatattcattatag

SEQ ID NO: 175154 - DNA, 78 bp, Homo sapiens
atggctctaagttctccctccatctgtaggaaattgaagctggaagtgagatgatatattcattatagggaggactta

SEQ ID NO: 175155 - DNA, 77 bp, Homo sapiens
ttctccctccatctgtaggaaattgaagctggaagtgagatgatatattcattatagggaggacttacagaagaaaa

SEQ ID NO: 175156 - DNA, 79 bp, Homo sapiens
atctgtaggaaattgaagctggaagtgagatgatatattcattatagggaggacttacagaagaaaacatcaagctcta

SEQ ID NO: 175157 - DNA, 80 bp, Homo sapiens
aaattgaagctggaagtgagatgatatattcattatagggaggacttacagaagaaaacatcaagctctaatcacatgtc

SEQ ID NO: 175158 - DNA, 79 bp, Homo sapiens
gaagtgagatgatatattcattatagggaggacttacagaagaaaacatcaagctctaatcacatgtccacatttcgtt

SEQ ID NO: 175159 - DNA, 77 bp, Homo sapiens
gatgatatattcattatagggaggacttacagaagaaaacatcaagctctaatcacatgtccacatttcgttttgtt

SEQ ID NO: 175160 - DNA, 73 bp, Homo sapiens
attcattatagggaggacttacagaagaaaacatcaagctctaatcacatgtccacatttcgttttgtttact

SEQ ID NO: 175161 - DNA, 70 bp, Homo sapiens
gggaggacttacagaagaaaacatcaagctctaatcacatgtccacatttcgttttgtttacttattttt

SEQ ID NO: 175162 - DNA, 71 bp, Homo sapiens
accgcacccagccccacatacctacatttcaaaggacagtctttggccctacagtcaagactaccaaacca

SEQ ID NO: 175163 - DNA, 71 bp, Homo sapiens
acccagccccacatacctacatttcaaaggacagtctttggccctacagtcaagactaccaaaccaatgta

SEQ ID NO: 175164 - DNA, 71 bp, Homo sapiens
acatacctacatttcaaaggacagtctttggccctacagtcaagactaccaaaccaatgtacactaaatgg

SEQ ID NO: 175165 - DNA, 70 bp, Homo sapiens
tacatttcaaaggacagtctttggccctacagtcaagactaccaaaccaatgtacactaaatgggggtgg

SEQ ID NO: 175166 - DNA, 68 bp, Homo sapiens
atttcaaaggacagtctttggccctacagtcaagactaccaaaccaatgtacactaaatgggggtggg

SEQ ID NO: 175167 - DNA, 69 bp, Homo sapiens
acagtctttggccctacagtcaagactaccaaaccaatgtacactaaatgggggtggggatcacgttgt

SEQ ID NO: 175168 - DNA, 69 bp, Homo sapiens
tctttggccctacagtcaagactaccaaaccaatgtacactaaatgggggtggggatcacgttgttgtt

SEQ ID NO: 175169 - DNA, 68 bp, Homo sapiens
tttggccctacagtcaagactaccaaaccaatgtacactaaatgggggtggggatcacgttgttgttt

SEQ ID NO: 175170 - DNA, 67 bp, Homo sapiens
ccctacagtcaagactaccaaaccaatgtacactaaatgggggtggggatcacgttgttgttttttg

SEQ ID NO: 175171 - DNA, 72 bp, Homo sapiens
ctcctgacctcggggatcacatattttaataaaattgataatccctaatagtgatggcgctaggtgtacttt

SEQ ID NO: 175172 - DNA, 74 bp, Homo sapiens
tcggggatcacatattttaataaaattgataatccctaatagtgatggcgctaggtgtacttttagagccaatg

SEQ ID NO: 175173 - DNA, 73 bp, Homo sapiens
catattttaataaaattgataatccctaatagtgatggcgctaggtgtacttttagagccaatgtaaatagtc

SEQ ID NO: 175174 - DNA, 71 bp, Homo sapiens
aaaattgataatccctaatagtgatggcgctaggtgtacttttagagccaatgtaaatagtcgagaaaggg

SEQ ID NO: 175175 - DNA, 71 bp, Homo sapiens
ataatccctaatagtgatggcgctaggtgtacttttagagccaatgtaaatagtcgagaaagggggccaaa

SEQ ID NO: 175176 - DNA, 74 bp, Homo sapiens
taatagtgatggcgctaggtgtacttttagagccaatgtaaatagtcgagaaagggggccaaacatatgactaa

SEQ ID NO: 175177 - DNA, 72 bp, Homo sapiens
taggtgtacttttagagccaatgtaaatagtcgagaaagggggccaaacatatgactaagcttcttctacac

SEQ ID NO: 175178 - DNA, 73 bp, Homo sapiens
tacttttagagccaatgtaaatagtcgagaaagggggccaaacatatgactaagcttcttctacactctagga

SEQ ID NO: 175179 - DNA, 76 bp, Homo sapiens
aatgtaaatagtcgagaaagggggccaaacatatgactaagcttcttctacactctaggagatgtcagtattgcaa

SEQ ID NO: 175180 - DNA, 77 bp, Homo sapiens
aatagtcgagaaagggggccaaacatatgactaagcttcttctacactctaggagatgtcagtattgcaagatcctg

SEQ ID NO: 175181 - DNA, 78 bp, Homo sapiens
gggccaaacatatgactaagcttcttctacactctaggagatgtcagtattgcaagatcctgttccttgaaattatct

SEQ ID NO: 175182 - DNA, 78 bp, Homo sapiens
aaacatatgactaagcttcttctacactctaggagatgtcagtattgcaagatcctgttccttgaaattatctttgcc

SEQ ID NO: 175183 - DNA, 76 bp, Homo sapiens
taagcttcttctacactctaggagatgtcagtattgcaagatcctgttccttgaaattatctttgccccccgccat

SEQ ID NO: 175184 - DNA, 74 bp, Homo sapiens
actctaggagatgtcagtattgcaagatcctgttccttgaaattatctttgccccccgccattcagaaaaatta

SEQ ID NO: 175185 - DNA, 72 bp, Homo sapiens
atgtcagtattgcaagatcctgttccttgaaattatctttgccccccgccattcagaaaaattaccaaatat

SEQ ID NO: 175186 - DNA, 71 bp, Homo sapiens
attgcaagatcctgttccttgaaattatctttgccccccgccattcagaaaaattaccaaatattgtaata

SEQ ID NO: 175187 - DNA, 68 bp, Homo sapiens
cttgaaattatctttgccccccgccattcagaaaaattaccaaatattgtaataatgtaatttaggac

SEQ ID NO: 175188 - DNA, 69 bp, Homo sapiens
tgccccccgccattcagaaaaattaccaaatattgtaataatgtaatttaggacttaccctttcagaga

SEQ ID NO: 175189 - DNA, 68 bp, Homo sapiens
ccgccattcagaaaaattaccaaatattgtaataatgtaatttaggacttaccctttcagagaaacag

SEQ ID NO: 175190 - DNA, 69 bp, Homo sapiens
attgtaataatgtaatttaggacttaccctttcagagaaacagttcctgaaggttgacttcagttagta

SEQ ID NO: 175191 - DNA, 70 bp, Homo sapiens
taatgtaatttaggacttaccctttcagagaaacagttcctgaaggttgacttcagttagtagtacagaa

SEQ ID NO: 175192 - DNA, 70 bp, Homo sapiens
tttaggacttaccctttcagagaaacagttcctgaaggttgacttcagttagtagtacagaagcgagact

SEQ ID NO: 175193 - DNA, 75 bp, Homo sapiens
tttcagagaaacagttcctgaaggttgacttcagttagtagtacagaagcgagacttgaagctcttcatggttta

SEQ ID NO: 175194 - DNA, 74 bp, Homo sapiens
aaacagttcctgaaggttgacttcagttagtagtacagaagcgagacttgaagctcttcatggtttatgttctg

SEQ ID NO: 175195 - DNA, 73 bp, Homo sapiens
aaggttgacttcagttagtagtacagaagcgagacttgaagctcttcatggtttatgttctgttggtttatcc

SEQ ID NO: 175196 - DNA, 75 bp, Homo sapiens
ttcagttagtagtacagaagcgagacttgaagctcttcatggtttatgttctgttggtttatcccaaagagatgt

SEQ ID NO: 175197 - DNA, 74 bp, Homo sapiens
agtagtacagaagcgagacttgaagctcttcatggtttatgttctgttggtttatcccaaagagatgttttaga

SEQ ID NO: 175198 - DNA, 76 bp, Homo sapiens
agacttgaagctcttcatggtttatgttctgttggtttatcccaaagagatgttttagagcacattcatttctgaa

SEQ ID NO: 175199 - DNA, 74 bp, Homo sapiens
aagctcttcatggtttatgttctgttggtttatcccaaagagatgttttagagcacattcatttctgaaagttc

SEQ ID NO: 175200 - DNA, 74 bp, Homo sapiens
tttatgttctgttggtttatcccaaagagatgttttagagcacattcatttctgaaagttctcggtcatgtttc

SEQ ID NO: 175201 - DNA, 72 bp, Homo sapiens
tgttggtttatcccaaagagatgttttagagcacattcatttctgaaagttctcggtcatgtttccggaagt

SEQ ID NO: 175202 - DNA, 74 bp, Homo sapiens
tttatcccaaagagatgttttagagcacattcatttctgaaagttctcggtcatgtttccggaagtttgatcag

SEQ ID NO: 175203 - DNA, 71 bp, Homo sapiens
atgttttagagcacattcatttctgaaagttctcggtcatgtttccggaagtttgatcaggtgggttcttt

SEQ ID NO: 175204 - DNA, 71 bp, Homo sapiens
tagagcacattcatttctgaaagttctcggtcatgtttccggaagtttgatcaggtgggttctttttcttt

SEQ ID NO: 175205 - DNA, 69 bp, Homo sapiens
tttttttttaaagataattcagaatcagtcccacccctgagatggtattattacccaggaaagaatgcg

SEQ ID NO: 175206 - DNA, 74 bp, Homo sapiens
aagataattcagaatcagtcccacccctgagatggtattattacccaggaaagaatgcgtgaggatcctctaaa

SEQ ID NO: 175207 - DNA, 75 bp, Homo sapiens
aattcagaatcagtcccacccctgagatggtattattacccaggaaagaatgcgtgaggatcctctaaatccata

SEQ ID NO: 175208 - DNA, 73 bp, Homo sapiens
tcccacccctgagatggtattattacccaggaaagaatgcgtgaggatcctctaaatccatagagaaggaaaa

SEQ ID NO: 175209 - DNA, 71 bp, Homo sapiens
agatggtattattacccaggaaagaatgcgtgaggatcctctaaatccatagagaaggaaaactaaaacaa

SEQ ID NO: 175210 - DNA, 69 bp, Homo sapiens
ttacccaggaaagaatgcgtgaggatcctctaaatccatagagaaggaaaactaaaacaattttgttac

SEQ ID NO: 175211 - DNA, 70 bp, Homo sapiens
caggaaagaatgcgtgaggatcctctaaatccatagagaaggaaaactaaaacaattttgttaccatttg

SEQ ID NO: 175212 - DNA, 73 bp, Homo sapiens
tgaggatcctctaaatccatagagaaggaaaactaaaacaattttgttaccatttgtttggctcaagcatctg

SEQ ID NO: 175213 - DNA, 71 bp, Homo sapiens
ctaaatccatagagaaggaaaactaaaacaattttgttaccatttgtttggctcaagcatctggtagatcc

SEQ ID NO: 175214 - DNA, 70 bp, Homo sapiens
gagaaggaaaactaaaacaattttgttaccatttgtttggctcaagcatctggtagatccttcagttctt

SEQ ID NO: 175215 - DNA, 70 bp, Homo sapiens
ggaaaactaaaacaattttgttaccatttgtttggctcaagcatctggtagatccttcagttcttttcaa

SEQ ID NO: 175216 - DNA, 72 bp, Homo sapiens
ttttgttaccatttgtttggctcaagcatctggtagatccttcagttcttttcaaattagaattttcctctc

SEQ ID NO: 175217 - DNA, 71 bp, Homo sapiens
ttaccatttgtttggctcaagcatctggtagatccttcagttcttttcaaattagaattttcctctctttt

SEQ ID NO: 175218 - DNA, 73 bp, Homo sapiens
catcataatgacatgatttgggattactctttcagagaaacagttcctaaaggtttacttcagttagtgattt

SEQ ID NO: 175219 - DNA, 70 bp, Homo sapiens
atgacatgatttgggattactctttcagagaaacagttcctaaaggtttacttcagttagtgatttttat

SEQ ID NO: 175220 - DNA, 65 bp, Homo sapiens
atttgggattactctttcagagaaacagttcctaaaggtttacttcagttagtgatttttatttt

SEQ ID NO: 175221 - DNA, 71 bp, Homo sapiens
gtgcctggcccagttagtgatttttaaattgtagttccttaaatgagtattttggatttcactccacaatg

SEQ ID NO: 175222 - DNA, 69 bp, Homo sapiens
ggcccagttagtgatttttaaattgtagttccttaaatgagtattttggatttcactccacaatgttct

SEQ ID NO: 175223 - DNA, 71 bp, Homo sapiens
gatttttaaattgtagttccttaaatgagtattttggatttcactccacaatgttcttcaactgtaagatc

SEQ ID NO: 175224 - DNA, 73 bp, Homo sapiens
tgtagttccttaaatgagtattttggatttcactccacaatgttcttcaactgtaagatctacttgaggttat

SEQ ID NO: 175225 - DNA, 74 bp, Homo sapiens
aaatgagtattttggatttcactccacaatgttcttcaactgtaagatctacttgaggttatttgatttgctgg

SEQ ID NO: 175226 - DNA, 75 bp, Homo sapiens
ttttggatttcactccacaatgttcttcaactgtaagatctacttgaggttatttgatttgctggtttgcaagaa

SEQ ID NO: 175227 - DNA, 76 bp, Homo sapiens
tttcactccacaatgttcttcaactgtaagatctacttgaggttatttgatttgctggtttgcaagaactcgtcta

SEQ ID NO: 175228 - DNA, 74 bp, Homo sapiens
tgttcttcaactgtaagatctacttgaggttatttgatttgctggtttgcaagaactcgtctacacgttgtctt

SEQ ID NO: 175229 - DNA, 74 bp, Homo sapiens
aactgtaagatctacttgaggttatttgatttgctggtttgcaagaactcgtctacacgttgtctttatcacaa

SEQ ID NO: 175230 - DNA, 73 bp, Homo sapiens
atctacttgaggttatttgatttgctggtttgcaagaactcgtctacacgttgtctttatcacaaagaaattc

SEQ ID NO: 175231 - DNA, 74 bp, Homo sapiens
gttatttgatttgctggtttgcaagaactcgtctacacgttgtctttatcacaaagaaattctggagcgtttga

SEQ ID NO: 175232 - DNA, 73 bp, Homo sapiens
ctggtttgcaagaactcgtctacacgttgtctttatcacaaagaaattctggagcgtttgagccctgttcaaa

SEQ ID NO: 175233 - DNA, 72 bp, Homo sapiens
ttgcaagaactcgtctacacgttgtctttatcacaaagaaattctggagcgtttgagccctgttcaaaaaaa

SEQ ID NO: 175234 - DNA, 70 bp, Homo sapiens
tcgtctacacgttgtctttatcacaaagaaattctggagcgtttgagccctgttcaaaaaaaaaaggcaa

SEQ ID NO: 175235 - DNA, 71 bp, Homo sapiens
ggcaagaagaaacttcaggaacaaataacctatttgaccctgtaatgaataatattcacacattttctaat

SEQ ID NO: 175236 - DNA, 71 bp, Homo sapiens
aacttcaggaacaaataacctatttgaccctgtaatgaataatattcacacattttctaatttaagagctg

SEQ ID NO: 175237 - DNA, 73 bp, Homo sapiens
taacctatttgaccctgtaatgaataatattcacacattttctaatttaagagctgttgattgatttccaact

SEQ ID NO: 175238 - DNA, 74 bp, Homo sapiens
gaataatattcacacattttctaatttaagagctgttgattgatttccaacttttagaatctgtttcagacaaa

SEQ ID NO: 175239 - DNA, 73 bp, Homo sapiens
cacacattttctaatttaagagctgttgattgatttccaacttttagaatctgtttcagacaaaacatggaag

SEQ ID NO: 175240 - DNA, 71 bp, Homo sapiens
atttaagagctgttgattgatttccaacttttagaatctgtttcagacaaaacatggaagtttagtaacag

SEQ ID NO: 175241 - DNA, 70 bp, Homo sapiens
gagctgttgattgatttccaacttttagaatctgtttcagacaaaacatggaagtttagtaacagttttt

SEQ ID NO: 175242 - DNA, 69 bp, Homo sapiens
ttgatttccaacttttagaatctgtttcagacaaaacatggaagtttagtaacagttttttctattctg

SEQ ID NO: 175243 - DNA, 72 bp, Homo sapiens
ttagaatctgtttcagacaaaacatggaagtttagtaacagttttttctattctgtaataataattgccaca

SEQ ID NO: 175244 - DNA, 69 bp, Homo sapiens
ctgtttcagacaaaacatggaagtttagtaacagttttttctattctgtaataataattgccacaaggt

SEQ ID NO: 175245 - DNA, 66 bp, Homo sapiens
acaaaacatggaagtttagtaacagttttttctattctgtaataataattgccacaaggttaaaaa

SEQ ID NO: 175246 - DNA, 66 bp, Homo sapiens
aaaaaaatttacagaagaacatatttgagggtggtcgtgggggcaagaaagctggaaggacgggtg

SEQ ID NO: 175247 - DNA, 70 bp, Homo sapiens
tacagaagaacatatttgagggtggtcgtgggggcaagaaagctggaaggacgggtggggtgtgttaata

SEQ ID NO: 175248 - DNA, 68 bp, Homo sapiens
atatttgagggtggtcgtgggggcaagaaagctggaaggacgggtggggtgtgttaatagccttgtct

SEQ ID NO: 175249 - DNA, 69 bp, Homo sapiens
gtggtcgtgggggcaagaaagctggaaggacgggtggggtgtgttaatagccttgtcttgtgaagtaag

SEQ ID NO: 175250 - DNA, 72 bp, Homo sapiens
gggcaagaaagctggaaggacgggtggggtgtgttaatagccttgtcttgtgaagtaagtcctcagagacgc

SEQ ID NO: 175251 - DNA, 72 bp, Homo sapiens
aaagctggaaggacgggtggggtgtgttaatagccttgtcttgtgaagtaagtcctcagagacgctgtccta

SEQ ID NO: 175252 - DNA, 72 bp, Homo sapiens
acgggtggggtgtgttaatagccttgtcttgtgaagtaagtcctcagagacgctgtcctagttggaagaaca

SEQ ID NO: 175253 - DNA, 75 bp, Homo sapiens
gggtgtgttaatagccttgtcttgtgaagtaagtcctcagagacgctgtcctagttggaagaacaggcagtgaag

SEQ ID NO: 175254 - DNA, 78 bp, Homo sapiens
tagccttgtcttgtgaagtaagtcctcagagacgctgtcctagttggaagaacaggcagtgaaggtgtgcgtctgtta

SEQ ID NO: 175255 - DNA, 77 bp, Homo sapiens
ttgtgaagtaagtcctcagagacgctgtcctagttggaagaacaggcagtgaaggtgtgcgtctgttacggagaata

SEQ ID NO: 175256 - DNA, 77 bp, Homo sapiens
taagtcctcagagacgctgtcctagttggaagaacaggcagtgaaggtgtgcgtctgttacggagaataggactcca

SEQ ID NO: 175257 - DNA, 78 bp, Homo sapiens
agacgctgtcctagttggaagaacaggcagtgaaggtgtgcgtctgttacggagaataggactccagtgatctagctg

SEQ ID NO: 175258 - DNA, 78 bp, Homo sapiens
tagttggaagaacaggcagtgaaggtgtgcgtctgttacggagaataggactccagtgatctagctggtacttagaga

SEQ ID NO: 175259 - DNA, 76 bp, Homo sapiens
agaacaggcagtgaaggtgtgcgtctgttacggagaataggactccagtgatctagctggtacttagagaggtggg

SEQ ID NO: 175260 - DNA, 75 bp, Homo sapiens
aaggtgtgcgtctgttacggagaataggactccagtgatctagctggtacttagagaggtgggggtgatcaccaa

SEQ ID NO: 175261 - DNA, 73 bp, Homo sapiens
gtctgttacggagaataggactccagtgatctagctggtacttagagaggtgggggtgatcaccaaaaaaaca

SEQ ID NO: 175262 - DNA, 75 bp, Homo sapiens
cggagaataggactccagtgatctagctggtacttagagaggtgggggtgatcaccaaaaaaacagctctgcctc

SEQ ID NO: 175263 - DNA, 76 bp, Homo sapiens
actccagtgatctagctggtacttagagaggtgggggtgatcaccaaaaaaacagctctgcctctgggagcggaga

SEQ ID NO: 175264 - DNA, 75 bp, Homo sapiens
tagctggtacttagagaggtgggggtgatcaccaaaaaaacagctctgcctctgggagcggagaggactgggata

SEQ ID NO: 175265 - DNA, 73 bp, Homo sapiens
tagagaggtgggggtgatcaccaaaaaaacagctctgcctctgggagcggagaggactgggatagaaagtatt

SEQ ID NO: 175266 - DNA, 73 bp, Homo sapiens
gggtgatcaccaaaaaaacagctctgcctctgggagcggagaggactgggatagaaagtatttgtctttcatt

SEQ ID NO: 175267 - DNA, 72 bp, Homo sapiens
atcaccaaaaaaacagctctgcctctgggagcggagaggactgggatagaaagtatttgtctttcattttaa

SEQ ID NO: 175268 - DNA, 73 bp, Homo sapiens
aaacagctctgcctctgggagcggagaggactgggatagaaagtatttgtctttcattttaagcccttctgta

SEQ ID NO: 175269 - DNA, 70 bp, Homo sapiens
tgggagcggagaggactgggatagaaagtatttgtctttcattttaagcccttctgtacgatttgacttt

SEQ ID NO: 175270 - DNA, 68 bp, Homo sapiens
ggagaggactgggatagaaagtatttgtctttcattttaagcccttctgtacgatttgacttttcttt

SEQ ID NO: 175271 - DNA, 65 bp, Homo sapiens
ctgggatagaaagtatttgtctttcattttaagcccttctgtacgatttgacttttctttttttt

SEQ ID NO: 175272 - DNA, 77 bp, Homo sapiens
catgcccggctaaagcaagaaattttcattgcatattttaagcaaaggcaaatgcatatgtggatagactgttttaa

SEQ ID NO: 175273 - DNA, 74 bp, Homo sapiens
ccggctaaagcaagaaattttcattgcatattttaagcaaaggcaaatgcatatgtggatagactgttttaatt

SEQ ID NO: 175274 - DNA, 76 bp, Homo sapiens
caagaaattttcattgcatattttaagcaaaggcaaatgcatatgtggatagactgttttaatttgactaaagtca

SEQ ID NO: 175275 - DNA, 80 bp, Homo sapiens
cattgcatattttaagcaaaggcaaatgcatatgtggatagactgttttaatttgactaaagtcatattgaatccatgaa

SEQ ID NO: 175276 - DNA, 79 bp, Homo sapiens
agcaaaggcaaatgcatatgtggatagactgttttaatttgactaaagtcatattgaatccatgaattttagaagctca

SEQ ID NO: 175277 - DNA, 77 bp, Homo sapiens
aggcaaatgcatatgtggatagactgttttaatttgactaaagtcatattgaatccatgaattttagaagctcaaac

SEQ ID NO: 175278 - DNA, 74 bp, Homo sapiens
atatgtggatagactgttttaatttgactaaagtcatattgaatccatgaattttagaagctcaaactattggg

SEQ ID NO: 175279 - DNA, 72 bp, Homo sapiens
gactgttttaatttgactaaagtcatattgaatccatgaattttagaagctcaaactattggggaacaataa

SEQ ID NO: 175280 - DNA, 72 bp, Homo sapiens
gactaaagtcatattgaatccatgaattttagaagctcaaactattggggaacaataattaccaccttggag

SEQ ID NO: 175281 - DNA, 72 bp, Homo sapiens
aagtcatattgaatccatgaattttagaagctcaaactattggggaacaataattaccaccttggagtgaaa

SEQ ID NO: 175282 - DNA, 70 bp, Homo sapiens
gaatccatgaattttagaagctcaaactattggggaacaataattaccaccttggagtgaaaatacttaa

SEQ ID NO: 175283 - DNA, 68 bp, Homo sapiens
gaattttagaagctcaaactattggggaacaataattaccaccttggagtgaaaatacttaatttcca

SEQ ID NO: 175284 - DNA, 69 bp, Homo sapiens
tttagaagctcaaactattggggaacaataattaccaccttggagtgaaaatacttaatttccacaaga

SEQ ID NO: 175285 - DNA, 68 bp, Homo sapiens
agaagctcaaactattggggaacaataattaccaccttggagtgaaaatacttaatttccacaagatt

SEQ ID NO: 175286 - DNA, 68 bp, Homo sapiens
ctcaaactattggggaacaataattaccaccttggagtgaaaatacttaatttccacaagatttagta

SEQ ID NO: 175287 - DNA, 65 bp, Homo sapiens
aacaataattaccaccttggagtgaaaatacttaatttccacaagatttagtaaaggaagagttt

SEQ ID NO: 175288 - DNA, 64 bp, Homo sapiens
aattaccaccttggagtgaaaatacttaatttccacaagatttagtaaaggaagagttttttaa

SEQ ID NO: 175289 - DNA, 63 bp, Homo sapiens
ccaccttggagtgaaaatacttaatttccacaagatttagtaaaggaagagttttttaaaaac

SEQ ID NO: 175290 - DNA, 64 bp, Homo sapiens
gtgaaaatacttaatttccacaagatttagtaaaggaagagttttttaaaaaccaccttaatga

SEQ ID NO: 175291 - DNA, 68 bp, Homo sapiens
tttccacaagatttagtaaaggaagagttttttaaaaaccaccttaatgataatagtatgtacagatg

SEQ ID NO: 175292 - DNA, 68 bp, Homo sapiens
caagatttagtaaaggaagagttttttaaaaaccaccttaatgataatagtatgtacagatgttaaga

SEQ ID NO: 175293 - DNA, 69 bp, Homo sapiens
ggaagagttttttaaaaaccaccttaatgataatagtatgtacagatgttaagaaatgaaataggaatg

SEQ ID NO: 175294 - DNA, 72 bp, Homo sapiens
tttaaaaaccaccttaatgataatagtatgtacagatgttaagaaatgaaataggaatgtgtaatgttggaa

SEQ ID NO: 175295 - DNA, 73 bp, Homo sapiens
aaaccaccttaatgataatagtatgtacagatgttaagaaatgaaataggaatgtgtaatgttggaaacacaa

SEQ ID NO: 175296 - DNA, 77 bp, Homo sapiens
tgataatagtatgtacagatgttaagaaatgaaataggaatgtgtaatgttggaaacacaaatatttttgcttctga

SEQ ID NO: 175297 - DNA, 70 bp, Homo sapiens
gttaagaaatgaaataggaatgtgtaatgttggaaacacaaatatttttgcttctgagaataaaactaat

SEQ ID NO: 175298 - DNA, 70 bp, Homo sapiens
tgaaataggaatgtgtaatgttggaaacacaaatatttttgcttctgagaataaaactaattttttctcc

SEQ ID NO: 175299 - DNA, 66 bp, Homo sapiens
gttggaaacacaaatatttttgcttctgagaataaaactaattttttctcccaattttctcttcct

SEQ ID NO: 175300 - DNA, 64 bp, Homo sapiens
caaatatttttgcttctgagaataaaactaattttttctcccaattttctcttcctttttcttt

SEQ ID NO: 175301 - DNA, 71 bp, Homo sapiens
tttttcttttttctgttcccccctttctcttccagaagcccttcagcggccagtagcatctgactttgagc

SEQ ID NO: 175302 - DNA, 73 bp, Homo sapiens
tttttctgttcccccctttctcttccagaagcccttcagcggccagtagcatctgactttgagcctcagggtc

SEQ ID NO: 175303 - DNA, 79 bp, Homo sapiens
ttccagaagcccttcagcggccagtagcatctgactttgagcctcagggtctgagtgaagccgctcgttggaactccaa

SEQ ID NO: 175304 - DNA, 76 bp, Homo sapiens
cccttcagcggccagtagcatctgactttgagcctcagggtctgagtgaagccgctcgttggaactccaaggaaaa

SEQ ID NO: 175305 - DNA, 77 bp, Homo sapiens
cagtagcatctgactttgagcctcagggtctgagtgaagccgctcgttggaactccaaggaaaaccttctcgctgga

SEQ ID NO: 175306 - DNA, 75 bp, Homo sapiens
tgactttgagcctcagggtctgagtgaagccgctcgttggaactccaaggaaaaccttctcgctggacccagtga

SEQ ID NO: 175307 - DNA, 73 bp, Homo sapiens
agcctcagggtctgagtgaagccgctcgttggaactccaaggaaaaccttctcgctggacccagtgaaaatga

SEQ ID NO: 175308 - DNA, 66 bp, Homo sapiens
aagccgctcgttggaactccaaggaaaaccttctcgctggacccagtgaaaatgaccccaaccttt

SEQ ID NO: 175309 - DNA, 69 bp, Homo sapiens
aactccaaggaaaaccttctcgctggacccagtgaaaatgaccccaaccttttcgttgcactgtatgat

SEQ ID NO: 175310 - DNA, 69 bp, Homo sapiens
aaggaaaaccttctcgctggacccagtgaaaatgaccccaaccttttcgttgcactgtatgattttgtg

SEQ ID NO: 175311 - DNA, 75 bp, Homo sapiens
ttctcgctggacccagtgaaaatgaccccaaccttttcgttgcactgtatgattttgtggccagtggagataaca

SEQ ID NO: 175312 - DNA, 74 bp, Homo sapiens
agtgaaaatgaccccaaccttttcgttgcactgtatgattttgtggccagtggagataacactctaagcataac

SEQ ID NO: 175313 - DNA, 71 bp, Homo sapiens
aaccttttcgttgcactgtatgattttgtggccagtggagataacactctaagcataactaaaggtaaaag

SEQ ID NO: 175314 - DNA, 73 bp, Homo sapiens
actgtatgattttgtggccagtggagataacactctaagcataactaaaggtaaaagggttgtgggcagctag

SEQ ID NO: 175315 - DNA, 71 bp, Homo sapiens
ttttgtggccagtggagataacactctaagcataactaaaggtaaaagggttgtgggcagctagtggtggt

SEQ ID NO: 175316 - DNA, 74 bp, Homo sapiens
tggagataacactctaagcataactaaaggtaaaagggttgtgggcagctagtggtggttgcaggagatagaaa

SEQ ID NO: 175317 - DNA, 73 bp, Homo sapiens
ataacactctaagcataactaaaggtaaaagggttgtgggcagctagtggtggttgcaggagatagaaatctg

SEQ ID NO: 175318 - DNA, 70 bp, Homo sapiens
taactaaaggtaaaagggttgtgggcagctagtggtggttgcaggagatagaaatctgggaattgcggtt

SEQ ID NO: 175319 - DNA, 71 bp, Homo sapiens
aaggtaaaagggttgtgggcagctagtggtggttgcaggagatagaaatctgggaattgcggtttgaccta

SEQ ID NO: 175320 - DNA, 75 bp, Homo sapiens
tgtgggcagctagtggtggttgcaggagatagaaatctgggaattgcggtttgacctaccaccctttgctcgtta

SEQ ID NO: 175321 - DNA, 71 bp, Homo sapiens
ctagtggtggttgcaggagatagaaatctgggaattgcggtttgacctaccaccctttgctcgttaaagga

SEQ ID NO: 175322 - DNA, 73 bp, Homo sapiens
ttgcaggagatagaaatctgggaattgcggtttgacctaccaccctttgctcgttaaaggagcagctttgaaa

SEQ ID NO: 175323 - DNA, 71 bp, Homo sapiens
atagaaatctgggaattgcggtttgacctaccaccctttgctcgttaaaggagcagctttgaaatctggac

SEQ ID NO: 175324 - DNA, 73 bp, Homo sapiens
aattgcggtttgacctaccaccctttgctcgttaaaggagcagctttgaaatctggactgcagggatatccaa

SEQ ID NO: 175325 - DNA, 75 bp, Homo sapiens
accctttgctcgttaaaggagcagctttgaaatctggactgcagggatatccaaaacaacaactgcatgtttcta

SEQ ID NO: 175326 - DNA, 76 bp, Homo sapiens
tcgttaaaggagcagctttgaaatctggactgcagggatatccaaaacaacaactgcatgtttctaagggagtcga

SEQ ID NO: 175327 - DNA, 75 bp, Homo sapiens
ttgaaatctggactgcagggatatccaaaacaacaactgcatgtttctaagggagtcgactctccttagaggagt

SEQ ID NO: 175328 - DNA, 73 bp, Homo sapiens
atatccaaaacaacaactgcatgtttctaagggagtcgactctccttagaggagttcttgtacaatagccctg

SEQ ID NO: 175329 - DNA, 72 bp, Homo sapiens
aacaactgcatgtttctaagggagtcgactctccttagaggagttcttgtacaatagccctgggcaaaaaca

SEQ ID NO: 175330 - DNA, 71 bp, Homo sapiens
atgtttctaagggagtcgactctccttagaggagttcttgtacaatagccctgggcaaaaacagaacttgc

SEQ ID NO: 175331 - DNA, 69 bp, Homo sapiens
ggagtcgactctccttagaggagttcttgtacaatagccctgggcaaaaacagaacttgccctattttt

SEQ ID NO: 175332 - DNA, 69 bp, Homo sapiens
tccttagaggagttcttgtacaatagccctgggcaaaaacagaacttgccctattttttatactgaaaa

SEQ ID NO: 175333 - DNA, 71 bp, Homo sapiens
ttcttgtacaatagccctgggcaaaaacagaacttgccctattttttatactgaaaaggacagctggacaa

SEQ ID NO: 175334 - DNA, 70 bp, Homo sapiens
tacaatagccctgggcaaaaacagaacttgccctattttttatactgaaaaggacagctggacaaaatac

SEQ ID NO: 175335 - DNA, 69 bp, Homo sapiens
ggcaaaaacagaacttgccctattttttatactgaaaaggacagctggacaaaatactgaacgcaattt

SEQ ID NO: 175336 - DNA, 68 bp, Homo sapiens
agaacttgccctattttttatactgaaaaggacagctggacaaaatactgaacgcaatttttccccta

SEQ ID NO: 175337 - DNA, 69 bp, Homo sapiens
tatactgaaaaggacagctggacaaaatactgaacgcaatttttcccctaagaaaaagcattatttccc

SEQ ID NO: 175338 - DNA, 68 bp, Homo sapiens
aggacagctggacaaaatactgaacgcaatttttcccctaagaaaaagcattatttccctaaaatgtc

SEQ ID NO: 175339 - DNA, 67 bp, Homo sapiens
caaaatactgaacgcaatttttcccctaagaaaaagcattatttccctaaaatgtcttatattagga

SEQ ID NO: 175340 - DNA, 71 bp, Homo sapiens
ccctaagaaaaagcattatttccctaaaatgtcttatattaggaacagagcacttgaataaacataattga

SEQ ID NO: 175341 - DNA, 74 bp, Homo sapiens
tccctaaaatgtcttatattaggaacagagcacttgaataaacataattgatttataaaaactgaggctataca

SEQ ID NO: 175342 - DNA, 74 bp, Homo sapiens
gtcttatattaggaacagagcacttgaataaacataattgatttataaaaactgaggctatacacttacctatc

SEQ ID NO: 175343 - DNA, 75 bp, Homo sapiens
aggaacagagcacttgaataaacataattgatttataaaaactgaggctatacacttacctatctgttcagtaca

SEQ ID NO: 175344 - DNA, 75 bp, Homo sapiens
gagcacttgaataaacataattgatttataaaaactgaggctatacacttacctatctgttcagtacaaacagga

SEQ ID NO: 175345 - DNA, 73 bp, Homo sapiens
gatttataaaaactgaggctatacacttacctatctgttcagtacaaacaggaagcttcaaatgtaaacgtga

SEQ ID NO: 175346 - DNA, 74 bp, Homo sapiens
aaaactgaggctatacacttacctatctgttcagtacaaacaggaagcttcaaatgtaaacgtgaattctcata

SEQ ID NO: 175347 - DNA, 75 bp, Homo sapiens
ggctatacacttacctatctgttcagtacaaacaggaagcttcaaatgtaaacgtgaattctcatacacttataa

SEQ ID NO: 175348 - DNA, 76 bp, Homo sapiens
gttcagtacaaacaggaagcttcaaatgtaaacgtgaattctcatacacttataaatgcatatctttatgtggact

SEQ ID NO: 175349 - DNA, 76 bp, Homo sapiens
acaggaagcttcaaatgtaaacgtgaattctcatacacttataaatgcatatctttatgtggacttgttaaaatga

SEQ ID NO: 175350 - DNA, 75 bp, Homo sapiens
ttcaaatgtaaacgtgaattctcatacacttataaatgcatatctttatgtggacttgttaaaatgaaattggta

SEQ ID NO: 175351 - DNA, 73 bp, Homo sapiens
aacgtgaattctcatacacttataaatgcatatctttatgtggacttgttaaaatgaaattggtatttaggaa

SEQ ID NO: 175352 - DNA, 73 bp, Homo sapiens
ctcatacacttataaatgcatatctttatgtggacttgttaaaatgaaattggtatttaggaatttggagatt

SEQ ID NO: 175353 - DNA, 71 bp, Homo sapiens
atgcatatctttatgtggacttgttaaaatgaaattggtatttaggaatttggagatttttagtagttaca

SEQ ID NO: 175354 - DNA, 70 bp, Homo sapiens
ttatgtggacttgttaaaatgaaattggtatttaggaatttggagatttttagtagttacacaagaatca

SEQ ID NO: 175355 - DNA, 70 bp, Homo sapiens
tggacttgttaaaatgaaattggtatttaggaatttggagatttttagtagttacacaagaatcaatgaa

SEQ ID NO: 175356 - DNA, 69 bp, Homo sapiens
gaaattggtatttaggaatttggagatttttagtagttacacaagaatcaatgaaaaagaacgaagctg

SEQ ID NO: 175357 - DNA, 69 bp, Homo sapiens
gtatttaggaatttggagatttttagtagttacacaagaatcaatgaaaaagaacgaagctggtttcca

SEQ ID NO: 175358 - DNA, 74 bp, Homo sapiens
tggagatttttagtagttacacaagaatcaatgaaaaagaacgaagctggtttccaaagctgatatgtctgatt

SEQ ID NO: 175359 - DNA, 73 bp, Homo sapiens
tttagtagttacacaagaatcaatgaaaaagaacgaagctggtttccaaagctgatatgtctgatttggttcc

SEQ ID NO: 175360 - DNA, 75 bp, Homo sapiens
ttacacaagaatcaatgaaaaagaacgaagctggtttccaaagctgatatgtctgatttggttcctttcttctca

SEQ ID NO: 175361 - DNA, 73 bp, Homo sapiens
atcaatgaaaaagaacgaagctggtttccaaagctgatatgtctgatttggttcctttcttctcaggtgaaaa

SEQ ID NO: 175362 - DNA, 72 bp, Homo sapiens
acgaagctggtttccaaagctgatatgtctgatttggttcctttcttctcaggtgaaaagctccgggtctta

SEQ ID NO: 175363 - DNA, 75 bp, Homo sapiens
tttccaaagctgatatgtctgatttggttcctttcttctcaggtgaaaagctccgggtcttaggctataatcaca

SEQ ID NO: 175364 - DNA, 74 bp, Homo sapiens
aaagctgatatgtctgatttggttcctttcttctcaggtgaaaagctccgggtcttaggctataatcacaatgg

SEQ ID NO: 175365 - DNA, 73 bp, Homo sapiens
tgatttggttcctttcttctcaggtgaaaagctccgggtcttaggctataatcacaatggggaatggtgtgaa

SEQ ID NO: 175366 - DNA, 72 bp, Homo sapiens
ctttcttctcaggtgaaaagctccgggtcttaggctataatcacaatggggaatggtgtgaagcccaaacca

SEQ ID NO: 175367 - DNA, 71 bp, Homo sapiens
ttctcaggtgaaaagctccgggtcttaggctataatcacaatggggaatggtgtgaagcccaaaccaaaaa

SEQ ID NO: 175368 - DNA, 69 bp, Homo sapiens
aaaagctccgggtcttaggctataatcacaatggggaatggtgtgaagcccaaaccaaaaatggccaag

SEQ ID NO: 175369 - DNA, 73 bp, Homo sapiens
tcttaggctataatcacaatggggaatggtgtgaagcccaaaccaaaaatggccaaggctgggtcccaagcaa

SEQ ID NO: 175370 - DNA, 74 bp, Homo sapiens
tataatcacaatggggaatggtgtgaagcccaaaccaaaaatggccaaggctgggtcccaagcaactacatcac

SEQ ID NO: 175371 - DNA, 75 bp, Homo sapiens
gaatggtgtgaagcccaaaccaaaaatggccaaggctgggtcccaagcaactacatcacgccagtcaacagtctg

SEQ ID NO: 175372 - DNA, 73 bp, Homo sapiens
aaaccaaaaatggccaaggctgggtcccaagcaactacatcacgccagtcaacagtctggagaaacactcctg

SEQ ID NO: 175373 - DNA, 77 bp, Homo sapiens
caaggctgggtcccaagcaactacatcacgccagtcaacagtctggagaaacactcctggtaccatgggcctgtgtc

SEQ ID NO: 175374 - DNA, 77 bp, Homo sapiens
tgggtcccaagcaactacatcacgccagtcaacagtctggagaaacactcctggtaccatgggcctgtgtcccgcaa

SEQ ID NO: 175375 - DNA, 79 bp, Homo sapiens
aactacatcacgccagtcaacagtctggagaaacactcctggtaccatgggcctgtgtcccgcaatgccgctgagtatc

SEQ ID NO: 175376 - DNA, 83 bp, Homo sapiens
agaaacactcctggtaccatgggcctgtgtcccgcaatgccgctgagtatctgctgagcagcgggatcaatggcagcttcttg

SEQ ID NO: 175377 - DNA, 88 bp, Homo sapiens
tggtaccatgggcctgtgtcccgcaatgccgctgagtatctgctgagcagcgggatcaatggcagcttcttggtgcgtgagagtgaga

SEQ ID NO: 175378 - DNA, 89 bp, Homo sapiens
tgggcctgtgtcccgcaatgccgctgagtatctgctgagcagcgggatcaatggcagcttcttggtgcgtgagagtgagagcagtcctg

SEQ ID NO: 175379 - DNA, 90 bp, Homo sapiens
caatgccgctgagtatctgctgagcagcgggatcaatggcagcttcttggtgcgtgagagtgagagcagtcctggccagaggtccatctc

SEQ ID NO: 175380 - DNA, 91 bp, Homo sapiens
tgagtatctgctgagcagcgggatcaatggcagcttcttggtgcgtgagagtgagagcagtcctggccagaggtccatctcgctgagatac

SEQ ID NO: 175381 - DNA, 87 bp, Homo sapiens
tgagcagcgggatcaatggcagcttcttggtgcgtgagagtgagagcagtcctggccagaggtccatctcgctgagatacgaaggga

SEQ ID NO: 175382 - DNA, 84 bp, Homo sapiens
gatcaatggcagcttcttggtgcgtgagagtgagagcagtcctggccagaggtccatctcgctgagatacgaagggagggtgta

SEQ ID NO: 175383 - DNA, 80 bp, Homo sapiens
agcttcttggtgcgtgagagtgagagcagtcctggccagaggtccatctcgctgagatacgaagggagggtgtaccatta

SEQ ID NO: 175384 - DNA, 82 bp, Homo sapiens
ttggtgcgtgagagtgagagcagtcctggccagaggtccatctcgctgagatacgaagggagggtgtaccattacaggatca

SEQ ID NO: 175385 - DNA, 80 bp, Homo sapiens
agtgagagcagtcctggccagaggtccatctcgctgagatacgaagggagggtgtaccattacaggatcaacactgcttc

SEQ ID NO: 175386 - DNA, 80 bp, Homo sapiens
agtcctggccagaggtccatctcgctgagatacgaagggagggtgtaccattacaggatcaacactgcttctgatggcaa

SEQ ID NO: 175387 - DNA, 77 bp, Homo sapiens
agaggtccatctcgctgagatacgaagggagggtgtaccattacaggatcaacactgcttctgatggcaaggtaggg

SEQ ID NO: 175388 - DNA, 75 bp, Homo sapiens
atctcgctgagatacgaagggagggtgtaccattacaggatcaacactgcttctgatggcaaggtaggggaccct

SEQ ID NO: 175389 - DNA, 72 bp, Homo sapiens
atacgaagggagggtgtaccattacaggatcaacactgcttctgatggcaaggtaggggacccttggcaggg

SEQ ID NO: 175390 - DNA, 75 bp, Homo sapiens
agggtgtaccattacaggatcaacactgcttctgatggcaaggtaggggacccttggcagggggcgctgatgggc

SEQ ID NO: 175391 - DNA, 75 bp, Homo sapiens
attacaggatcaacactgcttctgatggcaaggtaggggacccttggcagggggcgctgatgggcccagggcagg

SEQ ID NO: 175392 - DNA, 75 bp, Homo sapiens
tcaacactgcttctgatggcaaggtaggggacccttggcagggggcgctgatgggcccagggcaggggaaccaga

SEQ ID NO: 175393 - DNA, 73 bp, Homo sapiens
ttctgatggcaaggtaggggacccttggcagggggcgctgatgggcccagggcaggggaaccagaggtcctgc

SEQ ID NO: 175394 - DNA, 73 bp, Homo sapiens
taggggacccttggcagggggcgctgatgggcccagggcaggggaaccagaggtcctgctgtcggattgataa

SEQ ID NO: 175395 - DNA, 76 bp, Homo sapiens
ttggcagggggcgctgatgggcccagggcaggggaaccagaggtcctgctgtcggattgataaattattgcaagaa

SEQ ID NO: 175396 - DNA, 74 bp, Homo sapiens
cccagggcaggggaaccagaggtcctgctgtcggattgataaattattgcaagaaagctcaaccaagaagatgt

SEQ ID NO: 175397 - DNA, 74 bp, Homo sapiens
gggaaccagaggtcctgctgtcggattgataaattattgcaagaaagctcaaccaagaagatgtttaaagaatc

SEQ ID NO: 175398 - DNA, 75 bp, Homo sapiens
tgtcggattgataaattattgcaagaaagctcaaccaagaagatgtttaaagaatctttcaggtgggagtcattc

SEQ ID NO: 175399 - DNA, 73 bp, Homo sapiens
taaattattgcaagaaagctcaaccaagaagatgtttaaagaatctttcaggtgggagtcattccattagcct

SEQ ID NO: 175400 - DNA, 75 bp, Homo sapiens
attgcaagaaagctcaaccaagaagatgtttaaagaatctttcaggtgggagtcattccattagccttatgaaga

SEQ ID NO: 175401 - DNA, 71 bp, Homo sapiens
aaccaagaagatgtttaaagaatctttcaggtgggagtcattccattagccttatgaagaccctttattga

SEQ ID NO: 175402 - DNA, 71 bp, Homo sapiens
atgtttaaagaatctttcaggtgggagtcattccattagccttatgaagaccctttattgaggatccgttc

SEQ ID NO: 175403 - DNA, 74 bp, Homo sapiens
aagaatctttcaggtgggagtcattccattagccttatgaagaccctttattgaggatccgttctgtgatatta

SEQ ID NO: 175404 - DNA, 74 bp, Homo sapiens
ttcaggtgggagtcattccattagccttatgaagaccctttattgaggatccgttctgtgatattacaagttcc

SEQ ID NO: 175405 - DNA, 73 bp, Homo sapiens
ccttatgaagaccctttattgaggatccgttctgtgatattacaagttcctgggactggtatgattctcttat

SEQ ID NO: 175406 - DNA, 76 bp, Homo sapiens
tattgaggatccgttctgtgatattacaagttcctgggactggtatgattctcttattgtcttgctagagttttgt

SEQ ID NO: 175407 - DNA, 76 bp, Homo sapiens
ttctgtgatattacaagttcctgggactggtatgattctcttattgtcttgctagagttttgttgttagcaagtta

SEQ ID NO: 175408 - DNA, 73 bp, Homo sapiens
atattacaagttcctgggactggtatgattctcttattgtcttgctagagttttgttgttagcaagttactta

SEQ ID NO: 175409 - DNA, 72 bp, Homo sapiens
ttcctgggactggtatgattctcttattgtcttgctagagttttgttgttagcaagttacttaaaataggag

SEQ ID NO: 175410 - DNA, 69 bp, Homo sapiens
ctcttattgtcttgctagagttttgttgttagcaagttacttaaaataggaggaatatctgttgggttt

SEQ ID NO: 175411 - DNA, 66 bp, Homo sapiens
ttaaaataggaggaatatctgttgggttttggacacattttttacaataagattcttcctttaaaa

SEQ ID NO: 175412 - DNA, 64 bp, Homo sapiens
aggaatatctgttgggttttggacacattttttacaataagattcttcctttaaaaaaaatatt

SEQ ID NO: 175413 - DNA, 68 bp, Homo sapiens
aaaaatattttataatgatagaaatcatccccaacgagaaaaattcaaataatagataacctttctta

SEQ ID NO: 175414 - DNA, 72 bp, Homo sapiens
tataatgatagaaatcatccccaacgagaaaaattcaaataatagataacctttcttagagcgaaagaccac

SEQ ID NO: 175415 - DNA, 69 bp, Homo sapiens
gaaatcatccccaacgagaaaaattcaaataatagataacctttcttagagcgaaagaccactttacta

SEQ ID NO: 175416 - DNA, 68 bp, Homo sapiens
catccccaacgagaaaaattcaaataatagataacctttcttagagcgaaagaccactttactatccc

SEQ ID NO: 175417 - DNA, 67 bp, Homo sapiens
aaaattcaaataatagataacctttcttagagcgaaagaccactttactatcccctcccccacagac

SEQ ID NO: 175418 - DNA, 69 bp, Homo sapiens
aaataatagataacctttcttagagcgaaagaccactttactatcccctcccccacagacgcctggcac

SEQ ID NO: 175419 - DNA, 69 bp, Homo sapiens
taacctttcttagagcgaaagaccactttactatcccctcccccacagacgcctggcacgtgggcttct

SEQ ID NO: 175420 - DNA, 73 bp, Homo sapiens
ttagagcgaaagaccactttactatcccctcccccacagacgcctggcacgtgggcttcttcctgcggatgaa

SEQ ID NO: 175421 - DNA, 75 bp, Homo sapiens
agaccactttactatcccctcccccacagacgcctggcacgtgggcttcttcctgcggatgaacacattcatgga

SEQ ID NO: 175422 - DNA, 79 bp, Homo sapiens
tatcccctcccccacagacgcctggcacgtgggcttcttcctgcggatgaacacattcatggagaggtgtgtggacata

SEQ ID NO: 175423 - DNA, 85 bp, Homo sapiens
acagacgcctggcacgtgggcttcttcctgcggatgaacacattcatggagaggtgtgtggacatacgtgcatacacgcatgcag

SEQ ID NO: 175424 - DNA, 84 bp, Homo sapiens
cctggcacgtgggcttcttcctgcggatgaacacattcatggagaggtgtgtggacatacgtgcatacacgcatgcagttttca

SEQ ID NO: 175425 - DNA, 83 bp, Homo sapiens
gtgggcttcttcctgcggatgaacacattcatggagaggtgtgtggacatacgtgcatacacgcatgcagttttcagtgaaaa

SEQ ID NO: 175426 - DNA, 79 bp, Homo sapiens
aacacattcatggagaggtgtgtggacatacgtgcatacacgcatgcagttttcagtgaaaaccgggatcaaacccaca

SEQ ID NO: 175427 - DNA, 76 bp, Homo sapiens
agaggtgtgtggacatacgtgcatacacgcatgcagttttcagtgaaaaccgggatcaaacccacagcttaccaaa

SEQ ID NO: 175428 - DNA, 75 bp, Homo sapiens
tgtggacatacgtgcatacacgcatgcagttttcagtgaaaaccgggatcaaacccacagcttaccaaacccaaa

SEQ ID NO: 175429 - DNA, 72 bp, Homo sapiens
catacacgcatgcagttttcagtgaaaaccgggatcaaacccacagcttaccaaacccaaagtgtggtgttg

SEQ ID NO: 175430 - DNA, 67 bp, Homo sapiens
tttcagtgaaaaccgggatcaaacccacagcttaccaaacccaaagtgtggtgttgtaagggaggtg

SEQ ID NO: 175431 - DNA, 68 bp, Homo sapiens
aaaccgggatcaaacccacagcttaccaaacccaaagtgtggtgttgtaagggaggtggcctatatga

SEQ ID NO: 175432 - DNA, 72 bp, Homo sapiens
ccacagcttaccaaacccaaagtgtggtgttgtaagggaggtggcctatatgattttgtggtcttcatataa

SEQ ID NO: 175433 - DNA, 70 bp, Homo sapiens
cttaccaaacccaaagtgtggtgttgtaagggaggtggcctatatgattttgtggtcttcatataaataa

SEQ ID NO: 175434 - DNA, 73 bp, Homo sapiens
aagtgtggtgttgtaagggaggtggcctatatgattttgtggtcttcatataaataatccttaagagtccata

SEQ ID NO: 175435 - DNA, 73 bp, Homo sapiens
gtgttgtaagggaggtggcctatatgattttgtggtcttcatataaataatccttaagagtccataaagagaa

SEQ ID NO: 175436 - DNA, 73 bp, Homo sapiens
gtggcctatatgattttgtggtcttcatataaataatccttaagagtccataaagagaagggaggagttaaca

SEQ ID NO: 175437 - DNA, 73 bp, Homo sapiens
tgattttgtggtcttcatataaataatccttaagagtccataaagagaagggaggagttaacattgactgagg

SEQ ID NO: 175438 - DNA, 75 bp, Homo sapiens
tggtcttcatataaataatccttaagagtccataaagagaagggaggagttaacattgactgaggtattgctata

SEQ ID NO: 175439 - DNA, 75 bp, Homo sapiens
tataaataatccttaagagtccataaagagaagggaggagttaacattgactgaggtattgctataatacctgca

SEQ ID NO: 175440 - DNA, 76 bp, Homo sapiens
ttaagagtccataaagagaagggaggagttaacattgactgaggtattgctataatacctgcatctttgcattaaa

SEQ ID NO: 175441 - DNA, 74 bp, Homo sapiens
ataaagagaagggaggagttaacattgactgaggtattgctataatacctgcatctttgcattaaagaaaggga

SEQ ID NO: 175442 - DNA, 77 bp, Homo sapiens
agttaacattgactgaggtattgctataatacctgcatctttgcattaaagaaagggaggcataaagagatcttgcc

SEQ ID NO: 175443 - DNA, 76 bp, Homo sapiens
aggtattgctataatacctgcatctttgcattaaagaaagggaggcataaagagatcttgcccgatgtcaacctag

SEQ ID NO: 175444 - DNA, 76 bp, Homo sapiens
attaaagaaagggaggcataaagagatcttgcccgatgtcaacctagtgagtcactgatggaataggcttggatcc

SEQ ID NO: 175445 - DNA, 79 bp, Homo sapiens
ggaggcataaagagatcttgcccgatgtcaacctagtgagtcactgatggaataggcttggatcccacagtttattcta

SEQ ID NO: 175446 - DNA, 79 bp, Homo sapiens
ataaagagatcttgcccgatgtcaacctagtgagtcactgatggaataggcttggatcccacagtttattctactgcac

SEQ ID NO: 175447 - DNA, 79 bp, Homo sapiens
ttgcccgatgtcaacctagtgagtcactgatggaataggcttggatcccacagtttattctactgcaccaggctgtagt

SEQ ID NO: 175448 - DNA, 77 bp, Homo sapiens
aacctagtgagtcactgatggaataggcttggatcccacagtttattctactgcaccaggctgtagttgaggtacag

SEQ ID NO: 175449 - DNA, 78 bp, Homo sapiens
agtcactgatggaataggcttggatcccacagtttattctactgcaccaggctgtagttgaggtacagtgttgatagg

SEQ ID NO: 175450 - DNA, 76 bp, Homo sapiens
atggaataggcttggatcccacagtttattctactgcaccaggctgtagttgaggtacagtgttgataggtggtcc

SEQ ID NO: 175451 - DNA, 76 bp, Homo sapiens
gatcccacagtttattctactgcaccaggctgtagttgaggtacagtgttgataggtggtcccgatggtgtatgtt

SEQ ID NO: 175452 - DNA, 74 bp, Homo sapiens
acagtttattctactgcaccaggctgtagttgaggtacagtgttgataggtggtcccgatggtgtatgtttgtt

SEQ ID NO: 175453 - DNA, 65 bp, Homo sapiens
taaaaaaaatcaaaagaacaaaatgaattacagtaaaaagtaatcgtctcctaattcacttttcc

SEQ ID NO: 175454 - DNA, 71 bp, Homo sapiens
caaaagaacaaaatgaattacagtaaaaagtaatcgtctcctaattcacttttcctgcccagaggcaagca

SEQ ID NO: 175455 - DNA, 71 bp, Homo sapiens
aaaatgaattacagtaaaaagtaatcgtctcctaattcacttttcctgcccagaggcaagcactggtacta

SEQ ID NO: 175456 - DNA, 71 bp, Homo sapiens
acagtaaaaagtaatcgtctcctaattcacttttcctgcccagaggcaagcactggtactagttccttcta

SEQ ID NO: 175457 - DNA, 71 bp, Homo sapiens
aaaagtaatcgtctcctaattcacttttcctgcccagaggcaagcactggtactagttccttctagagtta

SEQ ID NO: 175458 - DNA, 76 bp, Homo sapiens
tcctaattcacttttcctgcccagaggcaagcactggtactagttccttctagagttacctggacacagatggatg

SEQ ID NO: 175459 - DNA, 77 bp, Homo sapiens
tttcctgcccagaggcaagcactggtactagttccttctagagttacctggacacagatggatggtatatagatgtt

SEQ ID NO: 175460 - DNA, 78 bp, Homo sapiens
agaggcaagcactggtactagttccttctagagttacctggacacagatggatggtatatagatgtttatgtggatgt

SEQ ID NO: 175461 - DNA, 77 bp, Homo sapiens
aagcactggtactagttccttctagagttacctggacacagatggatggtatatagatgtttatgtggatgtttata

SEQ ID NO: 175462 - DNA, 75 bp, Homo sapiens
ctagttccttctagagttacctggacacagatggatggtatatagatgtttatgtggatgtttatattcaaaaag

SEQ ID NO: 175463 - DNA, 80 bp, Homo sapiens
tagagttacctggacacagatggatggtatatagatgtttatgtggatgtttatattcaaaaaggcacgcaaatgataca

SEQ ID NO: 175464 - DNA, 87 bp, Homo sapiens
tggacacagatggatggtatatagatgtttatgtggatgtttatattcaaaaaggcacgcaaatgatacatgcacgcgaatgcatca

SEQ ID NO: 175465 - DNA, 86 bp, Homo sapiens
agatggatggtatatagatgtttatgtggatgtttatattcaaaaaggcacgcaaatgatacatgcacgcgaatgcatcatgcttc

SEQ ID NO: 175466 - DNA, 84 bp, Homo sapiens
tttatgtggatgtttatattcaaaaaggcacgcaaatgatacatgcacgcgaatgcatcatgcttctcccgtgtgataatacac

SEQ ID NO: 175467 - DNA, 83 bp, Homo sapiens
tatattcaaaaaggcacgcaaatgatacatgcacgcgaatgcatcatgcttctcccgtgtgataatacaccttcgagattgtt

SEQ ID NO: 175468 - DNA, 81 bp, Homo sapiens
aaaaaggcacgcaaatgatacatgcacgcgaatgcatcatgcttctcccgtgtgataatacaccttcgagattgttttatg

SEQ ID NO: 175469 - DNA, 81 bp, Homo sapiens
aaatgatacatgcacgcgaatgcatcatgcttctcccgtgtgataatacaccttcgagattgttttatggcaacaggttta

SEQ ID NO: 175470 - DNA, 81 bp, Homo sapiens
cacgcgaatgcatcatgcttctcccgtgtgataatacaccttcgagattgttttatggcaacaggtttagagctgcctcat

SEQ ID NO: 175471 - DNA, 76 bp, Homo sapiens
cttctcccgtgtgataatacaccttcgagattgttttatggcaacaggtttagagctgcctcattcttaccagtga

SEQ ID NO: 175472 - DNA, 75 bp, Homo sapiens
ataatacaccttcgagattgttttatggcaacaggtttagagctgcctcattcttaccagtgactgtgtaccgtg

SEQ ID NO: 175473 - DNA, 76 bp, Homo sapiens
acaccttcgagattgttttatggcaacaggtttagagctgcctcattcttaccagtgactgtgtaccgtggatgga

SEQ ID NO: 175474 - DNA, 76 bp, Homo sapiens
ttgttttatggcaacaggtttagagctgcctcattcttaccagtgactgtgtaccgtggatggactgtcacttatt

SEQ ID NO: 175475 - DNA, 75 bp, Homo sapiens
aacaggtttagagctgcctcattcttaccagtgactgtgtaccgtggatggactgtcacttatttcagtagtccc

SEQ ID NO: 175476 - DNA, 77 bp, Homo sapiens
agctgcctcattcttaccagtgactgtgtaccgtggatggactgtcacttatttcagtagtcccctgctggttgact

SEQ ID NO: 175477 - DNA, 73 bp, Homo sapiens
attcttaccagtgactgtgtaccgtggatggactgtcacttatttcagtagtcccctgctggttgacttttag

SEQ ID NO: 175478 - DNA, 72 bp, Homo sapiens
accagtgactgtgtaccgtggatggactgtcacttatttcagtagtcccctgctggttgacttttaggttgt

SEQ ID NO: 175479 - DNA, 71 bp, Homo sapiens
taccgtggatggactgtcacttatttcagtagtcccctgctggttgacttttaggttgtttccaatcttta

SEQ ID NO: 175480 - DNA, 68 bp, Homo sapiens
cacttatttcagtagtcccctgctggttgacttttaggttgtttccaatctttagttattgtaaataa

SEQ ID NO: 175481 - DNA, 71 bp, Homo sapiens
agtagtcccctgctggttgacttttaggttgtttccaatctttagttattgtaaataatgctgatatgagg

SEQ ID NO: 175482 - DNA, 72 bp, Homo sapiens
gctggttgacttttaggttgtttccaatctttagttattgtaaataatgctgatatgaggtggctttcaaac

SEQ ID NO: 175483 - DNA, 69 bp, Homo sapiens
aggttgtttccaatctttagttattgtaaataatgctgatatgaggtggctttcaaaccttttcaaaaa

SEQ ID NO: 175484 - DNA, 72 bp, Homo sapiens
ttattgtaaataatgctgatatgaggtggctttcaaaccttttcaaaaatctggttctgctgtaagaaaaac

SEQ ID NO: 175485 - DNA, 72 bp, Homo sapiens
gtaaataatgctgatatgaggtggctttcaaaccttttcaaaaatctggttctgctgtaagaaaaactcatt

SEQ ID NO: 175486 - DNA, 70 bp, Homo sapiens
atatgaggtggctttcaaaccttttcaaaaatctggttctgctgtaagaaaaactcattttacaccacca

SEQ ID NO: 175487 - DNA, 69 bp, Homo sapiens
tttcaaaccttttcaaaaatctggttctgctgtaagaaaaactcattttacaccaccacccagccctca

SEQ ID NO: 175488 - DNA, 71 bp, Homo sapiens
tttcaaaaatctggttctgctgtaagaaaaactcattttacaccaccacccagccctcacaatataacaaa

SEQ ID NO: 175489 - DNA, 69 bp, Homo sapiens
aaaatctggttctgctgtaagaaaaactcattttacaccaccacccagccctcacaatataacaaaagt

SEQ ID NO: 175490 - DNA, 70 bp, Homo sapiens
tgtaagaaaaactcattttacaccaccacccagccctcacaatataacaaaagtttcatgaagtcttacc

SEQ ID NO: 175491 - DNA, 69 bp, Homo sapiens
aactcattttacaccaccacccagccctcacaatataacaaaagtttcatgaagtcttacctaccctta

SEQ ID NO: 175492 - DNA, 71 bp, Homo sapiens
tttacaccaccacccagccctcacaatataacaaaagtttcatgaagtcttacctacccttactgtatgta

SEQ ID NO: 175493 - DNA, 73 bp, Homo sapiens
cagccctcacaatataacaaaagtttcatgaagtcttacctacccttactgtatgtaacgcactctgatagtt

SEQ ID NO: 175494 - DNA, 73 bp, Homo sapiens
ctcacaatataacaaaagtttcatgaagtcttacctacccttactgtatgtaacgcactctgatagtttgtat

SEQ ID NO: 175495 - DNA, 72 bp, Homo sapiens
aaaagtttcatgaagtcttacctacccttactgtatgtaacgcactctgatagtttgtatttcattctgttc

SEQ ID NO: 175496 - DNA, 75 bp, Homo sapiens
tcatgaagtcttacctacccttactgtatgtaacgcactctgatagtttgtatttcattctgttctatttcattt

SEQ ID NO: 175497 - DNA, 71 bp, Homo sapiens
ttacctacccttactgtatgtaacgcactctgatagtttgtatttcattctgttctatttcattttttaaa

SEQ ID NO: 175498 - DNA, 70 bp, Homo sapiens
cattttttaaaaattctggttgtaatccactaaatttatttcatagactgactagtggcccatggcctgg

SEQ ID NO: 175499 - DNA, 70 bp, Homo sapiens
aaaaattctggttgtaatccactaaatttatttcatagactgactagtggcccatggcctggtttgaaaa

SEQ ID NO: 175500 - DNA, 76 bp, Homo sapiens
tgtaatccactaaatttatttcatagactgactagtggcccatggcctggtttgaaaatgcgttgcacgtgcttct

SEQ ID NO: 175501 - DNA, 75 bp, Homo sapiens
actaaatttatttcatagactgactagtggcccatggcctggtttgaaaatgcgttgcacgtgcttctttatgtg

SEQ ID NO: 175502 - DNA, 76 bp, Homo sapiens
ttatttcatagactgactagtggcccatggcctggtttgaaaatgcgttgcacgtgcttctttatgtgggtgtaag

SEQ ID NO: 175503 - DNA, 76 bp, Homo sapiens
actagtggcccatggcctggtttgaaaatgcgttgcacgtgcttctttatgtgggtgtaagtgtgtgcagataagt

SEQ ID NO: 175504 - DNA, 79 bp, Homo sapiens
catggcctggtttgaaaatgcgttgcacgtgcttctttatgtgggtgtaagtgtgtgcagataagttgccagaactgac

SEQ ID NO: 175505 - DNA, 78 bp, Homo sapiens
tttgaaaatgcgttgcacgtgcttctttatgtgggtgtaagtgtgtgcagataagttgccagaactgactgaaggtta

SEQ ID NO: 175506 - DNA, 82 bp, Homo sapiens
aaatgcgttgcacgtgcttctttatgtgggtgtaagtgtgtgcagataagttgccagaactgactgaaggttatgtgcatca

SEQ ID NO: 175507 - DNA, 80 bp, Homo sapiens
acgtgcttctttatgtgggtgtaagtgtgtgcagataagttgccagaactgactgaaggttatgtgcatcaccaggtcac

SEQ ID NO: 175508 - DNA, 81 bp, Homo sapiens
tgtaagtgtgtgcagataagttgccagaactgactgaaggttatgtgcatcaccaggtcaccctctatagaaattgtacaa

SEQ ID NO: 175509 - DNA, 79 bp, Homo sapiens
tgtgcagataagttgccagaactgactgaaggttatgtgcatcaccaggtcaccctctatagaaattgtacaaatttgt

SEQ ID NO: 175510 - DNA, 76 bp, Homo sapiens
agataagttgccagaactgactgaaggttatgtgcatcaccaggtcaccctctatagaaattgtacaaatttgttc

SEQ ID NO: 175511 - DNA, 75 bp, Homo sapiens
agaactgactgaaggttatgtgcatcaccaggtcaccctctatagaaattgtacaaatttgttctcccacaaaca

SEQ ID NO: 175512 - DNA, 74 bp, Homo sapiens
aactgactgaaggttatgtgcatcaccaggtcaccctctatagaaattgtacaaatttgttctcccacaaacaa

SEQ ID NO: 175513 - DNA, 76 bp, Homo sapiens
tgaaggttatgtgcatcaccaggtcaccctctatagaaattgtacaaatttgttctcccacaaacaatccatgaaa

SEQ ID NO: 175514 - DNA, 74 bp, Homo sapiens
aaggttatgtgcatcaccaggtcaccctctatagaaattgtacaaatttgttctcccacaaacaatccatgaaa

SEQ ID NO: 175515 - DNA, 75 bp, Homo sapiens
ttatgtgcatcaccaggtcaccctctatagaaattgtacaaatttgttctcccacaaacaatccatgaaagggct

SEQ ID NO: 175516 - DNA, 71 bp, Homo sapiens
atcaccaggtcaccctctatagaaattgtacaaatttgttctcccacaaacaatccatgaaagggcttgtt

SEQ ID NO: 175517 - DNA, 68 bp, Homo sapiens
accctctatagaaattgtacaaatttgttctcccacaaacaatccatgaaagggcttgtttcccctta

SEQ ID NO: 175518 - DNA, 69 bp, Homo sapiens
tatagaaattgtacaaatttgttctcccacaaacaatccatgaaagggcttgtttccccttaacccaca

SEQ ID NO: 175519 - DNA, 66 bp, Homo sapiens
aatttgttctcccacaaacaatccatgaaagggcttgtttccccttaacccacaccaacagtttat

SEQ ID NO: 175520 - DNA, 69 bp, Homo sapiens
ttctcccacaaacaatccatgaaagggcttgtttccccttaacccacaccaacagtttattattagaca

SEQ ID NO: 175521 - DNA, 68 bp, Homo sapiens
acaatccatgaaagggcttgtttccccttaacccacaccaacagtttattattagacatgtaaaaaca

SEQ ID NO: 175522 - DNA, 64 bp, Homo sapiens
aaagggcttgtttccccttaacccacaccaacagtttattattagacatgtaaaaacacctttg

SEQ ID NO: 175523 - DNA, 69 bp, Homo sapiens
tccccttaacccacaccaacagtttattattagacatgtaaaaacacctttgtcactctgactggtaaa

SEQ ID NO: 175524 - DNA, 73 bp, Homo sapiens
taacccacaccaacagtttattattagacatgtaaaaacacctttgtcactctgactggtaaagaatggcatc

SEQ ID NO: 175525 - DNA, 76 bp, Homo sapiens
caacagtttattattagacatgtaaaaacacctttgtcactctgactggtaaagaatggcatctcattatgttgaa

SEQ ID NO: 175526 - DNA, 78 bp, Homo sapiens
aaaaacacctttgtcactctgactggtaaagaatggcatctcattatgttgaatatccatgtggcatattttgggtca

SEQ ID NO: 175527 - DNA, 82 bp, Homo sapiens
tttgtcactctgactggtaaagaatggcatctcattatgttgaatatccatgtggcatattttgggtcatctttatgccatt

SEQ ID NO: 175528 - DNA, 78 bp, Homo sapiens
actggtaaagaatggcatctcattatgttgaatatccatgtggcatattttgggtcatctttatgccatttagtaaat

SEQ ID NO: 175529 - DNA, 79 bp, Homo sapiens
atggcatctcattatgttgaatatccatgtggcatattttgggtcatctttatgccatttagtaaattcatctttttcc

SEQ ID NO: 175530 - DNA, 79 bp, Homo sapiens
tctcattatgttgaatatccatgtggcatattttgggtcatctttatgccatttagtaaattcatctttttcctacatg

SEQ ID NO: 175531 - DNA, 76 bp, Homo sapiens
gttgaatatccatgtggcatattttgggtcatctttatgccatttagtaaattcatctttttcctacatgttagaa

SEQ ID NO: 175532 - DNA, 73 bp, Homo sapiens
ggcatattttgggtcatctttatgccatttagtaaattcatctttttcctacatgttagaaatataccaagtg

SEQ ID NO: 175533 - DNA, 75 bp, Homo sapiens
gggtcatctttatgccatttagtaaattcatctttttcctacatgttagaaatataccaagtgtatatgtgtatc

SEQ ID NO: 175534 - DNA, 77 bp, Homo sapiens
tatgccatttagtaaattcatctttttcctacatgttagaaatataccaagtgtatatgtgtatctaggcctgttga

SEQ ID NO: 175535 - DNA, 76 bp, Homo sapiens
tagtaaattcatctttttcctacatgttagaaatataccaagtgtatatgtgtatctaggcctgttgacctctctg

SEQ ID NO: 175536 - DNA, 76 bp, Homo sapiens
attcatctttttcctacatgttagaaatataccaagtgtatatgtgtatctaggcctgttgacctctctgttctct

SEQ ID NO: 175537 - DNA, 80 bp, Homo sapiens
tacatgttagaaatataccaagtgtatatgtgtatctaggcctgttgacctctctgttctcttccattggtctgtctatc

SEQ ID NO: 175538 - DNA, 78 bp, Homo sapiens
ttagaaatataccaagtgtatatgtgtatctaggcctgttgacctctctgttctcttccattggtctgtctatccgta

SEQ ID NO: 175539 - DNA, 78 bp, Homo sapiens
aagtgtatatgtgtatctaggcctgttgacctctctgttctcttccattggtctgtctatccgtatgccagtaccaaa

SEQ ID NO: 175540 - DNA, 79 bp, Homo sapiens
ctgttgacctctctgttctcttccattggtctgtctatccgtatgccagtaccaaacttgtaattgctatggcttcata

SEQ ID NO: 175541 - DNA, 79 bp, Homo sapiens
ctctgttctcttccattggtctgtctatccgtatgccagtaccaaacttgtaattgctatggcttcataccatgttgtg

SEQ ID NO: 175542 - DNA, 80 bp, Homo sapiens
ttggtctgtctatccgtatgccagtaccaaacttgtaattgctatggcttcataccatgttgtggtatctgataggctag

SEQ ID NO: 175543 - DNA, 74 bp, Homo sapiens
taccaaacttgtaattgctatggcttcataccatgttgtggtatctgataggctagtccccacttaccttttta

SEQ ID NO: 175544 - DNA, 72 bp, Homo sapiens
acttgtaattgctatggcttcataccatgttgtggtatctgataggctagtccccacttacctttttaactt

SEQ ID NO: 175545 - DNA, 73 bp, Homo sapiens
ttttttttggctgtcttcacacattcacttgtaccatatgaacatacatatacttcctttttaatgttcttat

SEQ ID NO: 175546 - DNA, 77 bp, Homo sapiens
tggctgtcttcacacattcacttgtaccatatgaacatacatatacttcctttttaatgttcttatttttcttcaca

SEQ ID NO: 175547 - DNA, 74 bp, Homo sapiens
gtaccatatgaacatacatatacttcctttttaatgttcttatttttcttcacatcccaaagtcttctggctga

SEQ ID NO: 175548 - DNA, 72 bp, Homo sapiens
gaacatacatatacttcctttttaatgttcttatttttcttcacatcccaaagtcttctggctgaaatccta

SEQ ID NO: 175549 - DNA, 72 bp, Homo sapiens
tacttcctttttaatgttcttatttttcttcacatcccaaagtcttctggctgaaatcctattgcccatatc

SEQ ID NO: 175550 - DNA, 75 bp, Homo sapiens
tttttaatgttcttatttttcttcacatcccaaagtcttctggctgaaatcctattgcccatatctgatgctttc

SEQ ID NO: 175551 - DNA, 79 bp, Homo sapiens
tatttttcttcacatcccaaagtcttctggctgaaatcctattgcccatatctgatgctttccaccactgcagaattct

SEQ ID NO: 175552 - DNA, 80 bp, Homo sapiens
ttcttcacatcccaaagtcttctggctgaaatcctattgcccatatctgatgctttccaccactgcagaattctttagta

SEQ ID NO: 175553 - DNA, 82 bp, Homo sapiens
ctgaaatcctattgcccatatctgatgctttccaccactgcagaattctttagtaccaacactgcagtgtgcgtgacggaca

SEQ ID NO: 175554 - DNA, 80 bp, Homo sapiens
atcctattgcccatatctgatgctttccaccactgcagaattctttagtaccaacactgcagtgtgcgtgacggacaaaa

SEQ ID NO: 175555 - DNA, 80 bp, Homo sapiens
atatctgatgctttccaccactgcagaattctttagtaccaacactgcagtgtgcgtgacggacaaaagagcctgttatc

SEQ ID NO: 175556 - DNA, 78 bp, Homo sapiens
tttccaccactgcagaattctttagtaccaacactgcagtgtgcgtgacggacaaaagagcctgttatccctgtgtga

SEQ ID NO: 175557 - DNA, 76 bp, Homo sapiens
cagaattctttagtaccaacactgcagtgtgcgtgacggacaaaagagcctgttatccctgtgtgactagacgtgg

SEQ ID NO: 175558 - DNA, 76 bp, Homo sapiens
ttctttagtaccaacactgcagtgtgcgtgacggacaaaagagcctgttatccctgtgtgactagacgtgggcctg

SEQ ID NO: 175559 - DNA, 77 bp, Homo sapiens
aacactgcagtgtgcgtgacggacaaaagagcctgttatccctgtgtgactagacgtgggcctgtcagcttgctttt

SEQ ID NO: 175560 - DNA, 75 bp, Homo sapiens
tgtgcgtgacggacaaaagagcctgttatccctgtgtgactagacgtgggcctgtcagcttgctttttgggttat

SEQ ID NO: 175561 - DNA, 73 bp, Homo sapiens
acaaaagagcctgttatccctgtgtgactagacgtgggcctgtcagcttgctttttgggttattgttcttatc

SEQ ID NO: 175562 - DNA, 74 bp, Homo sapiens
ctgttatccctgtgtgactagacgtgggcctgtcagcttgctttttgggttattgttcttatcccagaggtgga

SEQ ID NO: 175563 - DNA, 76 bp, Homo sapiens
tgtgtgactagacgtgggcctgtcagcttgctttttgggttattgttcttatcccagaggtggagctgcgttcttc

SEQ ID NO: 175564 - DNA, 73 bp, Homo sapiens
actagacgtgggcctgtcagcttgctttttgggttattgttcttatcccagaggtggagctgcgttcttccat

SEQ ID NO: 175565 - DNA, 73 bp, Homo sapiens
ttattgttcttatcccagaggtggagctgcgttcttccattctgagggacgtacttcaggacattgggccctt

SEQ ID NO: 175566 - DNA, 75 bp, Homo sapiens
gtggagctgcgttcttccattctgagggacgtacttcaggacattgggccctttgaaagagccttcagaccacaa

SEQ ID NO: 175567 - DNA, 71 bp, Homo sapiens
tcttccattctgagggacgtacttcaggacattgggccctttgaaagagccttcagaccacaagggtacct

SEQ ID NO: 175568 - DNA, 70 bp, Homo sapiens
attctgagggacgtacttcaggacattgggccctttgaaagagccttcagaccacaagggtacctttcta

SEQ ID NO: 175569 - DNA, 71 bp, Homo sapiens
acgtacttcaggacattgggccctttgaaagagccttcagaccacaagggtacctttctagtgaatcagaa

SEQ ID NO: 175570 - DNA, 71 bp, Homo sapiens
cttcagaccacaagggtacctttctagtgaatcagaacaccagggtgcaccgcccatggggggtgattttc

SEQ ID NO: 175571 - DNA, 72 bp, Homo sapiens
accacaagggtacctttctagtgaatcagaacaccagggtgcaccgcccatggggggtgattttctggagca

SEQ ID NO: 175572 - DNA, 76 bp, Homo sapiens
gtacctttctagtgaatcagaacaccagggtgcaccgcccatggggggtgattttctggagcagacagcttgcttc

SEQ ID NO: 175573 - DNA, 78 bp, Homo sapiens
aatcagaacaccagggtgcaccgcccatggggggtgattttctggagcagacagcttgcttcccatgtgtgctattta

SEQ ID NO: 175574 - DNA, 77 bp, Homo sapiens
aacaccagggtgcaccgcccatggggggtgattttctggagcagacagcttgcttcccatgtgtgctatttatccaa

SEQ ID NO: 175575 - DNA, 81 bp, Homo sapiens
accgcccatggggggtgattttctggagcagacagcttgcttcccatgtgtgctatttatccaaggcaagtcatgctgcac

SEQ ID NO: 175576 - DNA, 85 bp, Homo sapiens
gggtgattttctggagcagacagcttgcttcccatgtgtgctatttatccaaggcaagtcatgctgcaccgagatagtcacttga

SEQ ID NO: 175577 - DNA, 83 bp, Homo sapiens
ttttctggagcagacagcttgcttcccatgtgtgctatttatccaaggcaagtcatgctgcaccgagatagtcacttgaggtt

SEQ ID NO: 175578 - DNA, 83 bp, Homo sapiens
agacagcttgcttcccatgtgtgctatttatccaaggcaagtcatgctgcaccgagatagtcacttgaggtttgcaccgaaca

SEQ ID NO: 175579 - DNA, 81 bp, Homo sapiens
tcccatgtgtgctatttatccaaggcaagtcatgctgcaccgagatagtcacttgaggtttgcaccgaacaggataatggt

SEQ ID NO: 175580 - DNA, 77 bp, Homo sapiens
tatccaaggcaagtcatgctgcaccgagatagtcacttgaggtttgcaccgaacaggataatggtttcttttcccta

SEQ ID NO: 175581 - DNA, 73 bp, Homo sapiens
accgagatagtcacttgaggtttgcaccgaacaggataatggtttcttttccctagagctgtttaatcagcaa

SEQ ID NO: 175582 - DNA, 71 bp, Homo sapiens
acttgaggtttgcaccgaacaggataatggtttcttttccctagagctgtttaatcagcaaccttggaaca

SEQ ID NO: 175583 - DNA, 75 bp, Homo sapiens
ggtttgcaccgaacaggataatggtttcttttccctagagctgtttaatcagcaaccttggaacagatgcaggca

SEQ ID NO: 175584 - DNA, 78 bp, Homo sapiens
aacaggataatggtttcttttccctagagctgtttaatcagcaaccttggaacagatgcaggcaggcatgatctagtg

SEQ ID NO: 175585 - DNA, 85 bp, Homo sapiens
tagagctgtttaatcagcaaccttggaacagatgcaggcaggcatgatctagtgtgacagctcattagctaggggttgatctaaa

SEQ ID NO: 175586 - DNA, 83 bp, Homo sapiens
tgtttaatcagcaaccttggaacagatgcaggcaggcatgatctagtgtgacagctcattagctaggggttgatctaaaatac

SEQ ID NO: 175587 - DNA, 81 bp, Homo sapiens
aaccttggaacagatgcaggcaggcatgatctagtgtgacagctcattagctaggggttgatctaaaatactgttcaaatg

SEQ ID NO: 175588 - DNA, 81 bp, Homo sapiens
agatgcaggcaggcatgatctagtgtgacagctcattagctaggggttgatctaaaatactgttcaaatgggcaaggaaag

SEQ ID NO: 175589 - DNA, 78 bp, Homo sapiens
aggcaggcatgatctagtgtgacagctcattagctaggggttgatctaaaatactgttcaaatgggcaaggaaaggcc

SEQ ID NO: 175590 - DNA, 77 bp, Homo sapiens
tagtgtgacagctcattagctaggggttgatctaaaatactgttcaaatgggcaaggaaaggcctgcgtatgggata

SEQ ID NO: 175591 - DNA, 75 bp, Homo sapiens
agctcattagctaggggttgatctaaaatactgttcaaatgggcaaggaaaggcctgcgtatgggatatgtgatt

SEQ ID NO: 175592 - DNA, 80 bp, Homo sapiens
ttgatctaaaatactgttcaaatgggcaaggaaaggcctgcgtatgggatatgtgatttgcagaatttgagattcatcca

SEQ ID NO: 175593 - DNA, 78 bp, Homo sapiens
atactgttcaaatgggcaaggaaaggcctgcgtatgggatatgtgatttgcagaatttgagattcatccaaagaggga

SEQ ID NO: 175594 - DNA, 79 bp, Homo sapiens
atgggcaaggaaaggcctgcgtatgggatatgtgatttgcagaatttgagattcatccaaagagggagaatctgcctaa

SEQ ID NO: 175595 - DNA, 82 bp, Homo sapiens
gcctgcgtatgggatatgtgatttgcagaatttgagattcatccaaagagggagaatctgcctaagatgcctctgtctaaaa

SEQ ID NO: 175596 - DNA, 82 bp, Homo sapiens
tatgggatatgtgatttgcagaatttgagattcatccaaagagggagaatctgcctaagatgcctctgtctaaaagctagta

SEQ ID NO: 175597 - DNA, 76 bp, Homo sapiens
attcatccaaagagggagaatctgcctaagatgcctctgtctaaaagctagtatgtgccaggtgggtttgtttcat

SEQ ID NO: 175598 - DNA, 75 bp, Homo sapiens
aagagggagaatctgcctaagatgcctctgtctaaaagctagtatgtgccaggtgggtttgtttcattccaggta

SEQ ID NO: 175599 - DNA, 76 bp, Homo sapiens
cctaagatgcctctgtctaaaagctagtatgtgccaggtgggtttgtttcattccaggtagagcacagggagctta

SEQ ID NO: 175600 - DNA, 78 bp, Homo sapiens
atgcctctgtctaaaagctagtatgtgccaggtgggtttgtttcattccaggtagagcacagggagcttatgtgacca

SEQ ID NO: 175601 - DNA, 79 bp, Homo sapiens
tatgtgccaggtgggtttgtttcattccaggtagagcacagggagcttatgtgaccaggcagtgtccaccattgggcaa

SEQ ID NO: 175602 - DNA, 78 bp, Homo sapiens
gggtttgtttcattccaggtagagcacagggagcttatgtgaccaggcagtgtccaccattgggcaacacatcacact

SEQ ID NO: 175603 - DNA, 79 bp, Homo sapiens
gtttcattccaggtagagcacagggagcttatgtgaccaggcagtgtccaccattgggcaacacatcacacttcccttg

SEQ ID NO: 175604 - DNA, 77 bp, Homo sapiens
agggagcttatgtgaccaggcagtgtccaccattgggcaacacatcacacttcccttggcgtcttgcctcctccctc

SEQ ID NO: 175605 - DNA, 76 bp, Homo sapiens
atgtgaccaggcagtgtccaccattgggcaacacatcacacttcccttggcgtcttgcctcctccctccccgtctg

SEQ ID NO: 175606 - DNA, 76 bp, Homo sapiens
agtgtccaccattgggcaacacatcacacttcccttggcgtcttgcctcctccctccccgtctggcacagactctc

SEQ ID NO: 175607 - DNA, 76 bp, Homo sapiens
tgggcaacacatcacacttcccttggcgtcttgcctcctccctccccgtctggcacagactctcccatcagccgtt

SEQ ID NO: 175608 - DNA, 76 bp, Homo sapiens
acacatcacacttcccttggcgtcttgcctcctccctccccgtctggcacagactctcccatcagccgtttgggca

SEQ ID NO: 175609 - DNA, 72 bp, Homo sapiens
cttcccttggcgtcttgcctcctccctccccgtctggcacagactctcccatcagccgtttgggcacctggg

SEQ ID NO: 175610 - DNA, 76 bp, Homo sapiens
tcttgcctcctccctccccgtctggcacagactctcccatcagccgtttgggcacctggggacttctgagcccaca

SEQ ID NO: 175611 - DNA, 79 bp, Homo sapiens
ctccccgtctggcacagactctcccatcagccgtttgggcacctggggacttctgagcccacagcgtcatccagcagac

SEQ ID NO: 175612 - DNA, 77 bp, Homo sapiens
actctcccatcagccgtttgggcacctggggacttctgagcccacagcgtcatccagcagaccgtctgcggaggttc

SEQ ID NO: 175613 - DNA, 76 bp, Homo sapiens
atcagccgtttgggcacctggggacttctgagcccacagcgtcatccagcagaccgtctgcggaggttccttcctg

SEQ ID NO: 175614 - DNA, 74 bp, Homo sapiens
acagcgtcatccagcagaccgtctgcggaggttccttcctgtgagggccgcactcgagggggtgtattgggtgg

SEQ ID NO: 175615 - DNA, 74 bp, Homo sapiens
cgtctgcggaggttccttcctgtgagggccgcactcgagggggtgtattgggtgggatcgtatcactggaatga

SEQ ID NO: 175616 - DNA, 74 bp, Homo sapiens
gttccttcctgtgagggccgcactcgagggggtgtattgggtgggatcgtatcactggaatgagtgaacatcgt

SEQ ID NO: 175617 - DNA, 78 bp, Homo sapiens
cactcgagggggtgtattgggtgggatcgtatcactggaatgagtgaacatcgttagagggagctcccacagctatgc

SEQ ID NO: 175618 - DNA, 79 bp, Homo sapiens
ggtgtattgggtgggatcgtatcactggaatgagtgaacatcgttagagggagctcccacagctatgcgtgtgaccgtg

SEQ ID NO: 175619 - DNA, 80 bp, Homo sapiens
attgggtgggatcgtatcactggaatgagtgaacatcgttagagggagctcccacagctatgcgtgtgaccgtgtggctc

SEQ ID NO: 175620 - DNA, 85 bp, Homo sapiens
aatgagtgaacatcgttagagggagctcccacagctatgcgtgtgaccgtgtggctcgccgctgaaaaatgctgctcacatagca

SEQ ID NO: 175621 - DNA, 82 bp, Homo sapiens
aacatcgttagagggagctcccacagctatgcgtgtgaccgtgtggctcgccgctgaaaaatgctgctcacatagcagaact

SEQ ID NO: 175622 - DNA, 84 bp, Homo sapiens
gagctcccacagctatgcgtgtgaccgtgtggctcgccgctgaaaaatgctgctcacatagcagaacttcgatgcaatcctttt

SEQ ID NO: 175623 - DNA, 82 bp, Homo sapiens
acagctatgcgtgtgaccgtgtggctcgccgctgaaaaatgctgctcacatagcagaacttcgatgcaatcctttttggatt

SEQ ID NO: 175624 - DNA, 79 bp, Homo sapiens
cgtgtgaccgtgtggctcgccgctgaaaaatgctgctcacatagcagaacttcgatgcaatcctttttggatttctaag

SEQ ID NO: 175625 - DNA, 76 bp, Homo sapiens
tggctcgccgctgaaaaatgctgctcacatagcagaacttcgatgcaatcctttttggatttctaaggggaaattt

SEQ ID NO: 175626 - DNA, 70 bp, Homo sapiens
acatagcagaacttcgatgcaatcctttttggatttctaaggggaaattttaagaccgataggaggaata

SEQ ID NO: 175627 - DNA, 67 bp, Homo sapiens
acttcgatgcaatcctttttggatttctaaggggaaattttaagaccgataggaggaataggctggg

SEQ ID NO: 175628 - DNA, 64 bp, Homo sapiens
tttttggatttctaaggggaaattttaagaccgataggaggaataggctggggttgaataagtt

SEQ ID NO: 175629 - DNA, 65 bp, Homo sapiens
ttctaaggggaaattttaagaccgataggaggaataggctggggttgaataagtttggttcttat

SEQ ID NO: 175630 - DNA, 69 bp, Homo sapiens
gaccgataggaggaataggctggggttgaataagtttggttcttatttttaaattagctcatctttaga

SEQ ID NO: 175631 - DNA, 67 bp, Homo sapiens
aggaggaataggctggggttgaataagtttggttcttatttttaaattagctcatctttagaaaaca

SEQ ID NO: 175632 - DNA, 67 bp, Homo sapiens
gggttgaataagtttggttcttatttttaaattagctcatctttagaaaacaactgaatttagaaga

SEQ ID NO: 175633 - DNA, 68 bp, Homo sapiens
ggttcttatttttaaattagctcatctttagaaaacaactgaatttagaagattcttctgtaaggccc

SEQ ID NO: 175634 - DNA, 71 bp, Homo sapiens
attagctcatctttagaaaacaactgaatttagaagattcttctgtaaggccccaaaggatttctttctgc

SEQ ID NO: 175635 - DNA, 68 bp, Homo sapiens
atctttagaaaacaactgaatttagaagattcttctgtaaggccccaaaggatttctttctgcctccc

SEQ ID NO: 175636 - DNA, 68 bp, Homo sapiens
aaaacaactgaatttagaagattcttctgtaaggccccaaaggatttctttctgcctccccgctcttg

SEQ ID NO: 175637 - DNA, 69 bp, Homo sapiens
aatttagaagattcttctgtaaggccccaaaggatttctttctgcctccccgctcttggctcttatttg

SEQ ID NO: 175638 - DNA, 73 bp, Homo sapiens
ccccaaaggatttctttctgcctccccgctcttggctcttatttgtgtctctcctcgtgttctgagcttttca

SEQ ID NO: 175639 - DNA, 80 bp, Homo sapiens
ttctgcctccccgctcttggctcttatttgtgtctctcctcgtgttctgagcttttcagcagcccttgtgggtcatcagc

SEQ ID NO: 175640 - DNA, 82 bp, Homo sapiens
tcttggctcttatttgtgtctctcctcgtgttctgagcttttcagcagcccttgtgggtcatcagccgaggaccatcagctc

SEQ ID NO: 175641 - DNA, 79 bp, Homo sapiens
ctcttatttgtgtctctcctcgtgttctgagcttttcagcagcccttgtgggtcatcagccgaggaccatcagctcggg

SEQ ID NO: 175642 - DNA, 81 bp, Homo sapiens
tgtctctcctcgtgttctgagcttttcagcagcccttgtgggtcatcagccgaggaccatcagctcggggcccagagctgg

SEQ ID NO: 175643 - DNA, 79 bp, Homo sapiens
tctgagcttttcagcagcccttgtgggtcatcagccgaggaccatcagctcggggcccagagctggggactgggagtta

SEQ ID NO: 175644 - DNA, 79 bp, Homo sapiens
ttttcagcagcccttgtgggtcatcagccgaggaccatcagctcggggcccagagctggggactgggagttatgagctg

SEQ ID NO: 175645 - DNA, 78 bp, Homo sapiens
ccttgtgggtcatcagccgaggaccatcagctcggggcccagagctggggactgggagttatgagctggactcttgaa

SEQ ID NO: 175646 - DNA, 79 bp, Homo sapiens
tcatcagccgaggaccatcagctcggggcccagagctggggactgggagttatgagctggactcttgaaggggccaata

SEQ ID NO: 175647 - DNA, 74 bp, Homo sapiens
aggaccatcagctcggggcccagagctggggactgggagttatgagctggactcttgaaggggccaatactaaa

SEQ ID NO: 175648 - DNA, 72 bp, Homo sapiens
agctggggactgggagttatgagctggactcttgaaggggccaatactaaaccgagccgttgccatttccta

SEQ ID NO: 175649 - DNA, 71 bp, Homo sapiens
actgggagttatgagctggactcttgaaggggccaatactaaaccgagccgttgccatttcctaggagcct

SEQ ID NO: 175650 - DNA, 75 bp, Homo sapiens
ttatgagctggactcttgaaggggccaatactaaaccgagccgttgccatttcctaggagccttgacaggctcaa

SEQ ID NO: 175651 - DNA, 73 bp, Homo sapiens
actcttgaaggggccaatactaaaccgagccgttgccatttcctaggagccttgacaggctcaaacatctctg

SEQ ID NO: 175652 - DNA, 70 bp, Homo sapiens
ccaatactaaaccgagccgttgccatttcctaggagccttgacaggctcaaacatctctgggtacccggg

SEQ ID NO: 175653 - DNA, 69 bp, Homo sapiens
actaaaccgagccgttgccatttcctaggagccttgacaggctcaaacatctctgggtacccggggatt

SEQ ID NO: 175654 - DNA, 76 bp, Homo sapiens
tgccatttcctaggagccttgacaggctcaaacatctctgggtacccggggatttgactgtcattgttctgatcct

SEQ ID NO: 175655 - DNA, 73 bp, Homo sapiens
ttgacaggctcaaacatctctgggtacccggggatttgactgtcattgttctgatcctttcccaaagttgtaa

SEQ ID NO: 175656 - DNA, 69 bp, Homo sapiens
aacatctctgggtacccggggatttgactgtcattgttctgatcctttcccaaagttgtaaccctctgt

SEQ ID NO: 175657 - DNA, 71 bp, Homo sapiens
ctctgggtacccggggatttgactgtcattgttctgatcctttcccaaagttgtaaccctctgttgacata

SEQ ID NO: 175658 - DNA, 73 bp, Homo sapiens
actgtcattgttctgatcctttcccaaagttgtaaccctctgttgacatagcggaattgaagattgatttttc

SEQ ID NO: 175659 - DNA, 72 bp, Homo sapiens
tctgatcctttcccaaagttgtaaccctctgttgacatagcggaattgaagattgatttttcttcaccacct

SEQ ID NO: 175660 - DNA, 71 bp, Homo sapiens
caaagttgtaaccctctgttgacatagcggaattgaagattgatttttcttcaccaccttctgcctaaagt

SEQ ID NO: 175661 - DNA, 72 bp, Homo sapiens
ttgtaaccctctgttgacatagcggaattgaagattgatttttcttcaccaccttctgcctaaagttcttag

SEQ ID NO: 175662 - DNA, 76 bp, Homo sapiens
tgttgacatagcggaattgaagattgatttttcttcaccaccttctgcctaaagttcttagttctgaatgtgtcca

SEQ ID NO: 175663 - DNA, 74 bp, Homo sapiens
aattgaagattgatttttcttcaccaccttctgcctaaagttcttagttctgaatgtgtccacacctcattgac

SEQ ID NO: 175664 - DNA, 76 bp, Homo sapiens
attgatttttcttcaccaccttctgcctaaagttcttagttctgaatgtgtccacacctcattgacttctatgaga

SEQ ID NO: 175665 - DNA, 77 bp, Homo sapiens
tttcttcaccaccttctgcctaaagttcttagttctgaatgtgtccacacctcattgacttctatgagatgcccctg

SEQ ID NO: 175666 - DNA, 79 bp, Homo sapiens
ttctgaatgtgtccacacctcattgacttctatgagatgcccctgtcacgttcctcgattccttctagtccttaataga

SEQ ID NO: 175667 - DNA, 75 bp, Homo sapiens
cacacctcattgacttctatgagatgcccctgtcacgttcctcgattccttctagtccttaatagagtctttcct

SEQ ID NO: 175668 - DNA, 72 bp, Homo sapiens
attgacttctatgagatgcccctgtcacgttcctcgattccttctagtccttaatagagtctttccttttct

SEQ ID NO: 175669 - DNA, 73 bp, Homo sapiens
tctatgagatgcccctgtcacgttcctcgattccttctagtccttaatagagtctttccttttcttgaaagaa

SEQ ID NO: 175670 - DNA, 69 bp, Homo sapiens
tgtcacgttcctcgattccttctagtccttaatagagtctttccttttcttgaaagaaatttgcccagt

SEQ ID NO: 175671 - DNA, 70 bp, Homo sapiens
tcctcgattccttctagtccttaatagagtctttccttttcttgaaagaaatttgcccagttgacattta

SEQ ID NO: 175672 - DNA, 72 bp, Homo sapiens
tctagtccttaatagagtctttccttttcttgaaagaaatttgcccagttgacatttattttcatcgtctgc

SEQ ID NO: 175673 - DNA, 75 bp, Homo sapiens
taatagagtctttccttttcttgaaagaaatttgcccagttgacatttattttcatcgtctgctgaagtgacaga

SEQ ID NO: 175674 - DNA, 79 bp, Homo sapiens
ttgaaagaaatttgcccagttgacatttattttcatcgtctgctgaagtgacagatccaaggccctaagcttcagcaga

SEQ ID NO: 175675 - DNA, 79 bp, Homo sapiens
aaatttgcccagttgacatttattttcatcgtctgctgaagtgacagatccaaggccctaagcttcagcagagttgcag

SEQ ID NO: 175676 - DNA, 79 bp, Homo sapiens
gacatttattttcatcgtctgctgaagtgacagatccaaggccctaagcttcagcagagttgcaggaagggaccattta

SEQ ID NO: 175677 - DNA, 80 bp, Homo sapiens
ttattttcatcgtctgctgaagtgacagatccaaggccctaagcttcagcagagttgcaggaagggaccatttacacagc

SEQ ID NO: 175678 - DNA, 80 bp, Homo sapiens
tgctgaagtgacagatccaaggccctaagcttcagcagagttgcaggaagggaccatttacacagcctcttagatgttta

SEQ ID NO: 175679 - DNA, 74 bp, Homo sapiens
acagatccaaggccctaagcttcagcagagttgcaggaagggaccatttacacagcctcttagatgtttaaggt

SEQ ID NO: 175680 - DNA, 73 bp, Homo sapiens
aagcttcagcagagttgcaggaagggaccatttacacagcctcttagatgtttaaggtttacccgccctgaca

SEQ ID NO: 175681 - DNA, 74 bp, Homo sapiens
agagttgcaggaagggaccatttacacagcctcttagatgtttaaggtttacccgccctgacagtggctcagca

SEQ ID NO: 175682 - DNA, 72 bp, Homo sapiens
aagggaccatttacacagcctcttagatgtttaaggtttacccgccctgacagtggctcagcaggcgtaggc

SEQ ID NO: 175683 - DNA, 74 bp, Homo sapiens
tacacagcctcttagatgtttaaggtttacccgccctgacagtggctcagcaggcgtaggcctcctggtgaaaa

SEQ ID NO: 175684 - DNA, 74 bp, Homo sapiens
tttaaggtttacccgccctgacagtggctcagcaggcgtaggcctcctggtgaaaagccgagcacatggctaac

SEQ ID NO: 175685 - DNA, 78 bp, Homo sapiens
acccgccctgacagtggctcagcaggcgtaggcctcctggtgaaaagccgagcacatggctaacctgctctggtggag

SEQ ID NO: 175686 - DNA, 78 bp, Homo sapiens
acagtggctcagcaggcgtaggcctcctggtgaaaagccgagcacatggctaacctgctctggtggaggggctttgga

SEQ ID NO: 175687 - DNA, 72 bp, Homo sapiens
aggcgtaggcctcctggtgaaaagccgagcacatggctaacctgctctggtggaggggctttggaccgttct

SEQ ID NO: 175688 - DNA, 75 bp, Homo sapiens
ctcctggtgaaaagccgagcacatggctaacctgctctggtggaggggctttggaccgttcttgtgtactgcgag

SEQ ID NO: 175689 - DNA, 74 bp, Homo sapiens
aaaagccgagcacatggctaacctgctctggtggaggggctttggaccgttcttgtgtactgcgaggcttgcct

SEQ ID NO: 175690 - DNA, 77 bp, Homo sapiens
atggctaacctgctctggtggaggggctttggaccgttcttgtgtactgcgaggcttgccttcctgctggtgtgtga

SEQ ID NO: 175691 - DNA, 79 bp, Homo sapiens
tgctctggtggaggggctttggaccgttcttgtgtactgcgaggcttgccttcctgctggtgtgtgagcagctctcggg

SEQ ID NO: 175692 - DNA, 75 bp, Homo sapiens
gaggggctttggaccgttcttgtgtactgcgaggcttgccttcctgctggtgtgtgagcagctctcgggggaact

SEQ ID NO: 175693 - DNA, 77 bp, Homo sapiens
tttggaccgttcttgtgtactgcgaggcttgccttcctgctggtgtgtgagcagctctcgggggaacttgcttcctg

SEQ ID NO: 175694 - DNA, 81 bp, Homo sapiens
ttgtgtactgcgaggcttgccttcctgctggtgtgtgagcagctctcgggggaacttgcttcctggctgagcaacctgtaa

SEQ ID NO: 175695 - DNA, 80 bp, Homo sapiens
gaggcttgccttcctgctggtgtgtgagcagctctcgggggaacttgcttcctggctgagcaacctgtaaacagtatgtc

SEQ ID NO: 175696 - DNA, 80 bp, Homo sapiens
ttcctgctggtgtgtgagcagctctcgggggaacttgcttcctggctgagcaacctgtaaacagtatgtctgaggtggga

SEQ ID NO: 175697 - DNA, 78 bp, Homo sapiens
tggtgtgtgagcagctctcgggggaacttgcttcctggctgagcaacctgtaaacagtatgtctgaggtgggactccc

SEQ ID NO: 175698 - DNA, 73 bp, Homo sapiens
agctctcgggggaacttgcttcctggctgagcaacctgtaaacagtatgtctgaggtgggactcccgggccca

SEQ ID NO: 175699 - DNA, 74 bp, Homo sapiens
ggaacttgcttcctggctgagcaacctgtaaacagtatgtctgaggtgggactcccgggcccaaagcagccaaa

SEQ ID NO: 175700 - DNA, 75 bp, Homo sapiens
ttcctggctgagcaacctgtaaacagtatgtctgaggtgggactcccgggcccaaagcagccaaaggttgcacaa

SEQ ID NO: 175701 - DNA, 74 bp, Homo sapiens
ctgagcaacctgtaaacagtatgtctgaggtgggactcccgggcccaaagcagccaaaggttgcacaagtctaa

SEQ ID NO: 175702 - DNA, 73 bp, Homo sapiens
atgtctgaggtgggactcccgggcccaaagcagccaaaggttgcacaagtctaagctccgttaggcctgtcag

SEQ ID NO: 175703 - DNA, 73 bp, Homo sapiens
actcccgggcccaaagcagccaaaggttgcacaagtctaagctccgttaggcctgtcagtgtggctgtcaaaa

SEQ ID NO: 175704 - DNA, 75 bp, Homo sapiens
caaagcagccaaaggttgcacaagtctaagctccgttaggcctgtcagtgtggctgtcaaaagaaacgctgtttc

SEQ ID NO: 175705 - DNA, 71 bp, Homo sapiens
aaaggttgcacaagtctaagctccgttaggcctgtcagtgtggctgtcaaaagaaacgctgtttcttttct

SEQ ID NO: 175706 - DNA, 78 bp, Homo sapiens
ccactgctcctggcaaaatgctgtttctaagcgtttctttgacaagtcccatccttcaggttcatgcatgattaggga

SEQ ID NO: 175707 - DNA, 78 bp, Homo sapiens
ctcctggcaaaatgctgtttctaagcgtttctttgacaagtcccatccttcaggttcatgcatgattagggagaggca

SEQ ID NO: 175708 - DNA, 79 bp, Homo sapiens
aaatgctgtttctaagcgtttctttgacaagtcccatccttcaggttcatgcatgattagggagaggcagcagccctga

SEQ ID NO: 175709 - DNA, 82 bp, Homo sapiens
tctaagcgtttctttgacaagtcccatccttcaggttcatgcatgattagggagaggcagcagccctgactgagcacctgag

SEQ ID NO: 175710 - DNA, 84 bp, Homo sapiens
ttctttgacaagtcccatccttcaggttcatgcatgattagggagaggcagcagccctgactgagcacctgagtgttcatggaa

SEQ ID NO: 175711 - DNA, 84 bp, Homo sapiens
tctttgacaagtcccatccttcaggttcatgcatgattagggagaggcagcagccctgactgagcacctgagtgttcatggaac

SEQ ID NO: 175712 - DNA, 85 bp, Homo sapiens
agtcccatccttcaggttcatgcatgattagggagaggcagcagccctgactgagcacctgagtgttcatggaaccaggtgcata

SEQ ID NO: 175713 - DNA, 85 bp, Homo sapiens
atccttcaggttcatgcatgattagggagaggcagcagccctgactgagcacctgagtgttcatggaaccaggtgcatagcgtaa

SEQ ID NO: 175714 - DNA, 89 bp, Homo sapiens
ttcaggttcatgcatgattagggagaggcagcagccctgactgagcacctgagtgttcatggaaccaggtgcatagcgtaatgacatgc

SEQ ID NO: 175715 - DNA, 92 bp, Homo sapiens
ttcatgcatgattagggagaggcagcagccctgactgagcacctgagtgttcatggaaccaggtgcatagcgtaatgacatgccattcatga

SEQ ID NO: 175716 - DNA, 87 bp, Homo sapiens
attagggagaggcagcagccctgactgagcacctgagtgttcatggaaccaggtgcatagcgtaatgacatgccattcatgacacta

SEQ ID NO: 175717 - DNA, 87 bp, Homo sapiens
ggagaggcagcagccctgactgagcacctgagtgttcatggaaccaggtgcatagcgtaatgacatgccattcatgacactactttc

SEQ ID NO: 175718 - DNA, 84 bp, Homo sapiens
agtgttcatggaaccaggtgcatagcgtaatgacatgccattcatgacactactttcttccctgaacatgccatgaattcctga

SEQ ID NO: 175719 - DNA, 85 bp, Homo sapiens
atggaaccaggtgcatagcgtaatgacatgccattcatgacactactttcttccctgaacatgccatgaattcctgatgattaca

SEQ ID NO: 175720 - DNA, 84 bp, Homo sapiens
aggtgcatagcgtaatgacatgccattcatgacactactttcttccctgaacatgccatgaattcctgatgattacacagttcc

SEQ ID NO: 175721 - DNA, 81 bp, Homo sapiens
cgtaatgacatgccattcatgacactactttcttccctgaacatgccatgaattcctgatgattacacagttccccaacaa

SEQ ID NO: 175722 - DNA, 80 bp, Homo sapiens
attcatgacactactttcttccctgaacatgccatgaattcctgatgattacacagttccccaacaagtgctgctcaaaa

SEQ ID NO: 175723 - DNA, 77 bp, Homo sapiens
acactactttcttccctgaacatgccatgaattcctgatgattacacagttccccaacaagtgctgctcaaaacctg

SEQ ID NO: 175724 - DNA, 79 bp, Homo sapiens
acatgccatgaattcctgatgattacacagttccccaacaagtgctgctcaaaacctggaactaatcagaaggaagcac

SEQ ID NO: 175725 - DNA, 75 bp, Homo sapiens
aattcctgatgattacacagttccccaacaagtgctgctcaaaacctggaactaatcagaaggaagcaccagcct

SEQ ID NO: 175726 - DNA, 73 bp, Homo sapiens
cccaacaagtgctgctcaaaacctggaactaatcagaaggaagcaccagccttgactgttagtgggacacggg

SEQ ID NO: 175727 - DNA, 72 bp, Homo sapiens
aaaacctggaactaatcagaaggaagcaccagccttgactgttagtgggacacggggaagatggctgtgaac

SEQ ID NO: 175728 - DNA, 75 bp, Homo sapiens
atcagaaggaagcaccagccttgactgttagtgggacacggggaagatggctgtgaaccaaatatgcggtgcctt

SEQ ID NO: 175729 - DNA, 73 bp, Homo sapiens
aggaagcaccagccttgactgttagtgggacacggggaagatggctgtgaaccaaatatgcggtgcctttggg

SEQ ID NO: 175730 - DNA, 71 bp, Homo sapiens
ttgactgttagtgggacacggggaagatggctgtgaaccaaatatgcggtgcctttgggggagaatggttt

SEQ ID NO: 175731 - DNA, 70 bp, Homo sapiens
ttagtgggacacggggaagatggctgtgaaccaaatatgcggtgcctttgggggagaatggttttagtat

SEQ ID NO: 175732 - DNA, 72 bp, Homo sapiens
ggaagatggctgtgaaccaaatatgcggtgcctttgggggagaatggttttagtatttagtaagtgtcagta

SEQ ID NO: 175733 - DNA, 70 bp, Homo sapiens
tgtgaaccaaatatgcggtgcctttgggggagaatggttttagtatttagtaagtgtcagtatgtaagtt

SEQ ID NO: 175734 - DNA, 68 bp, Homo sapiens
accaaatatgcggtgcctttgggggagaatggttttagtatttagtaagtgtcagtatgtaagtttta

SEQ ID NO: 175735 - DNA, 69 bp, Homo sapiens
gttttagtatttagtaagtgtcagtatgtaagttttatgttgaaaaatgaactaagtcacaacaaggtc

SEQ ID NO: 175736 - DNA, 70 bp, Homo sapiens
ttagtaagtgtcagtatgtaagttttatgttgaaaaatgaactaagtcacaacaaggtctataaatttaa

SEQ ID NO: 175737 - DNA, 70 bp, Homo sapiens
gtcagtatgtaagttttatgttgaaaaatgaactaagtcacaacaaggtctataaatttaattattgaaa

SEQ ID NO: 175738 - DNA, 68 bp, Homo sapiens
ttatgttgaaaaatgaactaagtcacaacaaggtctataaatttaattattgaaaaggataaagttgg

SEQ ID NO: 175739 - DNA, 70 bp, Homo sapiens
aaatgaactaagtcacaacaaggtctataaatttaattattgaaaaggataaagttgggccattcagtga

SEQ ID NO: 175740 - DNA, 69 bp, Homo sapiens
agtcacaacaaggtctataaatttaattattgaaaaggataaagttgggccattcagtgaaacctcctg

SEQ ID NO: 175741 - DNA, 69 bp, Homo sapiens
acaaggtctataaatttaattattgaaaaggataaagttgggccattcagtgaaacctcctgtaactga

SEQ ID NO: 175742 - DNA, 72 bp, Homo sapiens
attattgaaaaggataaagttgggccattcagtgaaacctcctgtaactgaagtctctaacacagtagccaa

SEQ ID NO: 175743 - DNA, 75 bp, Homo sapiens
cattcagtgaaacctcctgtaactgaagtctctaacacagtagccaatgggggaatcaaatgagcccaagaagaa

SEQ ID NO: 175744 - DNA, 72 bp, Homo sapiens
agtgaaacctcctgtaactgaagtctctaacacagtagccaatgggggaatcaaatgagcccaagaagaaat

SEQ ID NO: 175745 - DNA, 72 bp, Homo sapiens
aagtctctaacacagtagccaatgggggaatcaaatgagcccaagaagaaattctgcgtaaactaggactta

SEQ ID NO: 175746 - DNA, 70 bp, Homo sapiens
gtagccaatgggggaatcaaatgagcccaagaagaaattctgcgtaaactaggacttaggggagccctta

SEQ ID NO: 175747 - DNA, 70 bp, Homo sapiens
gggaatcaaatgagcccaagaagaaattctgcgtaaactaggacttaggggagcccttagcattccactt

SEQ ID NO: 175748 - DNA, 68 bp, Homo sapiens
aagaaattctgcgtaaactaggacttaggggagcccttagcattccactttggagtgaaggaacccga

SEQ ID NO: 175749 - DNA, 70 bp, Homo sapiens
attctgcgtaaactaggacttaggggagcccttagcattccactttggagtgaaggaacccgatccgcca

SEQ ID NO: 175750 - DNA, 68 bp, Homo sapiens
actaggacttaggggagcccttagcattccactttggagtgaaggaacccgatccgccagttggggaa

SEQ ID NO: 175751 - DNA, 71 bp, Homo sapiens
gagcccttagcattccactttggagtgaaggaacccgatccgccagttggggaacgctcctttgaggccca

SEQ ID NO: 175752 - DNA, 73 bp, Homo sapiens
ttagcattccactttggagtgaaggaacccgatccgccagttggggaacgctcctttgaggcccatgtgcttc

SEQ ID NO: 175753 - DNA, 72 bp, Homo sapiens
actttggagtgaaggaacccgatccgccagttggggaacgctcctttgaggcccatgtgcttcctgctccga

SEQ ID NO: 175754 - DNA, 71 bp, Homo sapiens
aaggaacccgatccgccagttggggaacgctcctttgaggcccatgtgcttcctgctccgacgggagagag

SEQ ID NO: 175755 - DNA, 74 bp, Homo sapiens
atccgccagttggggaacgctcctttgaggcccatgtgcttcctgctccgacgggagagagggataatgagact

SEQ ID NO: 175756 - DNA, 76 bp, Homo sapiens
gggaacgctcctttgaggcccatgtgcttcctgctccgacgggagagagggataatgagacttgctcccaggtgcc

SEQ ID NO: 175757 - DNA, 78 bp, Homo sapiens
tcctttgaggcccatgtgcttcctgctccgacgggagagagggataatgagacttgctcccaggtgccctgccctgga

SEQ ID NO: 175758 - DNA, 80 bp, Homo sapiens
atgtgcttcctgctccgacgggagagagggataatgagacttgctcccaggtgccctgccctggagcccagcaggccaca

SEQ ID NO: 175759 - DNA, 77 bp, Homo sapiens
cttcctgctccgacgggagagagggataatgagacttgctcccaggtgccctgccctggagcccagcaggccacacg

SEQ ID NO: 175760 - DNA, 79 bp, Homo sapiens
ggagagagggataatgagacttgctcccaggtgccctgccctggagcccagcaggccacacgggctctttgactctgta

SEQ ID NO: 175761 - DNA, 81 bp, Homo sapiens
ataatgagacttgctcccaggtgccctgccctggagcccagcaggccacacgggctctttgactctgtactgtgccagtga

SEQ ID NO: 175762 - DNA, 80 bp, Homo sapiens
ttgctcccaggtgccctgccctggagcccagcaggccacacgggctctttgactctgtactgtgccagtgatttccaaga

SEQ ID NO: 175763 - DNA, 83 bp, Homo sapiens
ctggagcccagcaggccacacgggctctttgactctgtactgtgccagtgatttccaagatgggagtggtgctctgattgcag

SEQ ID NO: 175764 - DNA, 82 bp, Homo sapiens
agcaggccacacgggctctttgactctgtactgtgccagtgatttccaagatgggagtggtgctctgattgcaggaatgtct

SEQ ID NO: 175765 - DNA, 80 bp, Homo sapiens
acgggctctttgactctgtactgtgccagtgatttccaagatgggagtggtgctctgattgcaggaatgtcttcttggaa

SEQ ID NO: 175766 - DNA, 82 bp, Homo sapiens
tactgtgccagtgatttccaagatgggagtggtgctctgattgcaggaatgtcttcttggaatggcttttctcacttctcta

SEQ ID NO: 175767 - DNA, 78 bp, Homo sapiens
atttccaagatgggagtggtgctctgattgcaggaatgtcttcttggaatggcttttctcacttctctagagtccttg

SEQ ID NO: 175768 - DNA, 77 bp, Homo sapiens
aagatgggagtggtgctctgattgcaggaatgtcttcttggaatggcttttctcacttctctagagtccttggtagg

SEQ ID NO: 175769 - DNA, 86 bp, Homo sapiens
tgctctgattgcaggaatgtcttcttggaatggcttttctcacttctctagagtccttggtagggagcacatcatcagctgagcta

SEQ ID NO: 175770 - DNA, 81 bp, Homo sapiens
attgcaggaatgtcttcttggaatggcttttctcacttctctagagtccttggtagggagcacatcatcagctgagctaac

SEQ ID NO: 175771 - DNA, 81 bp, Homo sapiens
atgtcttcttggaatggcttttctcacttctctagagtccttggtagggagcacatcatcagctgagctaacgtgagaaca

SEQ ID NO: 175772 - DNA, 78 bp, Homo sapiens
aatggcttttctcacttctctagagtccttggtagggagcacatcatcagctgagctaacgtgagaacaggggttgga

SEQ ID NO: 175773 - DNA, 81 bp, Homo sapiens
ttctcacttctctagagtccttggtagggagcacatcatcagctgagctaacgtgagaacaggggttggagcacttgccac

SEQ ID NO: 175774 - DNA, 80 bp, Homo sapiens
ttggtagggagcacatcatcagctgagctaacgtgagaacaggggttggagcacttgccaccggcagtgaagtaatcgga

SEQ ID NO: 175775 - DNA, 80 bp, Homo sapiens
atcatcagctgagctaacgtgagaacaggggttggagcacttgccaccggcagtgaagtaatcggacagctgacagtctt

SEQ ID NO: 175776 - DNA, 77 bp, Homo sapiens
agctgagctaacgtgagaacaggggttggagcacttgccaccggcagtgaagtaatcggacagctgacagtcttttc

SEQ ID NO: 175777 - DNA, 74 bp, Homo sapiens
acgtgagaacaggggttggagcacttgccaccggcagtgaagtaatcggacagctgacagtcttttccagaggg

SEQ ID NO: 175778 - DNA, 77 bp, Homo sapiens
ttggagcacttgccaccggcagtgaagtaatcggacagctgacagtcttttccagagggtcggggattgggagctga

SEQ ID NO: 175779 - DNA, 73 bp, Homo sapiens
acttgccaccggcagtgaagtaatcggacagctgacagtcttttccagagggtcggggattgggagctgaccc

SEQ ID NO: 175780 - DNA, 72 bp, Homo sapiens
agtgaagtaatcggacagctgacagtcttttccagagggtcggggattgggagctgaccccaggtcccgctc

SEQ ID NO: 175781 - DNA, 70 bp, Homo sapiens
taatcggacagctgacagtcttttccagagggtcggggattgggagctgaccccaggtcccgctccgttt

SEQ ID NO: 175782 - DNA, 69 bp, Homo sapiens
agctgacagtcttttccagagggtcggggattgggagctgaccccaggtcccgctccgttttctttgtg

SEQ ID NO: 175783 - DNA, 71 bp, Homo sapiens
ttttccagagggtcggggattgggagctgaccccaggtcccgctccgttttctttgtgtgcagcacttgtg

SEQ ID NO: 175784 - DNA, 71 bp, Homo sapiens
agggtcggggattgggagctgaccccaggtcccgctccgttttctttgtgtgcagcacttgtgttggtgac

SEQ ID NO: 175785 - DNA, 76 bp, Homo sapiens
attgggagctgaccccaggtcccgctccgttttctttgtgtgcagcacttgtgttggtgaccagcagtgaagagag

SEQ ID NO: 175786 - DNA, 77 bp, Homo sapiens
caggtcccgctccgttttctttgtgtgcagcacttgtgttggtgaccagcagtgaagagagtgcgtggacgtcaccg

SEQ ID NO: 175787 - DNA, 76 bp, Homo sapiens
agtgaagagagtgcgtggacgtcaccgtgtggttatgaagctaacggcagccctcagcggtgccgacttccgctcc

SEQ ID NO: 175788 - DNA, 75 bp, Homo sapiens
agagagtgcgtggacgtcaccgtgtggttatgaagctaacggcagccctcagcggtgccgacttccgctccccga

SEQ ID NO: 175789 - DNA, 74 bp, Homo sapiens
acgtcaccgtgtggttatgaagctaacggcagccctcagcggtgccgacttccgctccccgacacattcctgtg

SEQ ID NO: 175790 - DNA, 76 bp, Homo sapiens
aagctaacggcagccctcagcggtgccgacttccgctccccgacacattcctgtgtgcacgttcgtgggtctgagc

SEQ ID NO: 175791 - DNA, 78 bp, Homo sapiens
agccctcagcggtgccgacttccgctccccgacacattcctgtgtgcacgttcgtgggtctgagcgtgactcatggtg

SEQ ID NO: 175792 - DNA, 79 bp, Homo sapiens
gtgccgacttccgctccccgacacattcctgtgtgcacgttcgtgggtctgagcgtgactcatggtgtgtgtccctaga

SEQ ID NO: 175793 - DNA, 82 bp, Homo sapiens
acacattcctgtgtgcacgttcgtgggtctgagcgtgactcatggtgtgtgtccctagagcagttcactcagaggcttctct

SEQ ID NO: 175794 - DNA, 84 bp, Homo sapiens
tgtgcacgttcgtgggtctgagcgtgactcatggtgtgtgtccctagagcagttcactcagaggcttctcttccgtgctctcaa

SEQ ID NO: 175795 - DNA, 82 bp, Homo sapiens
ttcgtgggtctgagcgtgactcatggtgtgtgtccctagagcagttcactcagaggcttctcttccgtgctctcaagaataa

SEQ ID NO: 175796 - DNA, 82 bp, Homo sapiens
gtctgagcgtgactcatggtgtgtgtccctagagcagttcactcagaggcttctcttccgtgctctcaagaataaaagcagg

SEQ ID NO: 175797 - DNA, 80 bp, Homo sapiens
actcatggtgtgtgtccctagagcagttcactcagaggcttctcttccgtgctctcaagaataaaagcagggccgccaca

SEQ ID NO: 175798 - DNA, 79 bp, Homo sapiens
tccctagagcagttcactcagaggcttctcttccgtgctctcaagaataaaagcagggccgccacatcctgataagtct

SEQ ID NO: 175799 - DNA, 81 bp, Homo sapiens
agcagttcactcagaggcttctcttccgtgctctcaagaataaaagcagggccgccacatcctgataagtcttgccattca

SEQ ID NO: 175800 - DNA, 78 bp, Homo sapiens
agaggcttctcttccgtgctctcaagaataaaagcagggccgccacatcctgataagtcttgccattcagcggtcctg

SEQ ID NO: 175801 - DNA, 81 bp, Homo sapiens
ttctcttccgtgctctcaagaataaaagcagggccgccacatcctgataagtcttgccattcagcggtcctgtcttgcaga

SEQ ID NO: 175802 - DNA, 78 bp, Homo sapiens
aataaaagcagggccgccacatcctgataagtcttgccattcagcggtcctgtcttgcagagggataagccagtgtcc

SEQ ID NO: 175803 - DNA, 80 bp, Homo sapiens
gccacatcctgataagtcttgccattcagcggtcctgtcttgcagagggataagccagtgtccccaggccacagtcctta

SEQ ID NO: 175804 - DNA, 78 bp, Homo sapiens
tcttgccattcagcggtcctgtcttgcagagggataagccagtgtccccaggccacagtccttacaccttgagcaagt

SEQ ID NO: 175805 - DNA, 76 bp, Homo sapiens
ggtcctgtcttgcagagggataagccagtgtccccaggccacagtccttacaccttgagcaagttccccagagtga

SEQ ID NO: 175806 - DNA, 76 bp, Homo sapiens
ttgcagagggataagccagtgtccccaggccacagtccttacaccttgagcaagttccccagagtgaagcaatctt

SEQ ID NO: 175807 - DNA, 75 bp, Homo sapiens
ataagccagtgtccccaggccacagtccttacaccttgagcaagttccccagagtgaagcaatctttctagacaa

SEQ ID NO: 175808 - DNA, 73 bp, Homo sapiens
acagtccttacaccttgagcaagttccccagagtgaagcaatctttctagacaagttttgcgtttctcagaat

SEQ ID NO: 175809 - DNA, 72 bp, Homo sapiens
ttacaccttgagcaagttccccagagtgaagcaatctttctagacaagttttgcgtttctcagaattttatt

SEQ ID NO: 175810 - DNA, 74 bp, Homo sapiens
tgagcaagttccccagagtgaagcaatctttctagacaagttttgcgtttctcagaattttattttagtgatat

SEQ ID NO: 175811 - DNA, 72 bp, Homo sapiens
cccagagtgaagcaatctttctagacaagttttgcgtttctcagaattttattttagtgatattgttaccaa

SEQ ID NO: 175812 - DNA, 71 bp, Homo sapiens
agcaatctttctagacaagttttgcgtttctcagaattttattttagtgatattgttaccaaaagattgta

SEQ ID NO: 175813 - DNA, 69 bp, Homo sapiens
gcgtttctcagaattttattttagtgatattgttaccaaaagattgtaaccccaaaatgtgtgcctttg

SEQ ID NO: 175814 - DNA, 69 bp, Homo sapiens
gaattttattttagtgatattgttaccaaaagattgtaaccccaaaatgtgtgcctttggcttgcctgt

SEQ ID NO: 175815 - DNA, 69 bp, Homo sapiens
tttagtgatattgttaccaaaagattgtaaccccaaaatgtgtgcctttggcttgcctgttttaggaat

SEQ ID NO: 175816 - DNA, 69 bp, Homo sapiens
atattgttaccaaaagattgtaaccccaaaatgtgtgcctttggcttgcctgttttaggaattcacttg

SEQ ID NO: 175817 - DNA, 70 bp, Homo sapiens
cccaaaatgtgtgcctttggcttgcctgttttaggaattcacttgtgttatctccccaagcaaaacaaaa

SEQ ID NO: 175818 - DNA, 68 bp, Homo sapiens
ttttaggaattcacttgtgttatctccccaagcaaaacaaaagaaagagaaaccttcctgttgacgaa

SEQ ID NO: 175819 - DNA, 66 bp, Homo sapiens
aaaacaaaagaaagagaaaccttcctgttgacgaatcctttttaccttcttgagagttgtcaatgg

SEQ ID NO: 175820 - DNA, 68 bp, Homo sapiens
aaagagaaaccttcctgttgacgaatcctttttaccttcttgagagttgtcaatgggactaacttgta

SEQ ID NO: 175821 - DNA, 68 bp, Homo sapiens
aaaccttcctgttgacgaatcctttttaccttcttgagagttgtcaatgggactaacttgtatatttc

SEQ ID NO: 175822 - DNA, 70 bp, Homo sapiens
ttgacgaatcctttttaccttcttgagagttgtcaatgggactaacttgtatatttctttgctaccttct

SEQ ID NO: 175823 - DNA, 67 bp, Homo sapiens
cctttttaccttcttgagagttgtcaatgggactaacttgtatatttctttgctaccttcttttaaa

SEQ ID NO: 175824 - DNA, 68 bp, Homo sapiens
cttcttgagagttgtcaatgggactaacttgtatatttctttgctaccttcttttaaaaacatttttc

SEQ ID NO: 175825 - DNA, 69 bp, Homo sapiens
ctttgctaccttcttttaaaaacatttttcttatttactattacagacgtatagtaatggtgcctgaca

SEQ ID NO: 175826 - DNA, 71 bp, Homo sapiens
tcttttaaaaacatttttcttatttactattacagacgtatagtaatggtgcctgacataacccacagcca

SEQ ID NO: 175827 - DNA, 70 bp, Homo sapiens
cttttaaaaacatttttcttatttactattacagacgtatagtaatggtgcctgacataacccacagcca

SEQ ID NO: 175828 - DNA, 70 bp, Homo sapiens
aaacatttttcttatttactattacagacgtatagtaatggtgcctgacataacccacagccaaaggcct

SEQ ID NO: 175829 - DNA, 76 bp, Homo sapiens
tatttactattacagacgtatagtaatggtgcctgacataacccacagccaaaggccttggccttgctgtgtgtat

SEQ ID NO: 175830 - DNA, 77 bp, Homo sapiens
tattacagacgtatagtaatggtgcctgacataacccacagccaaaggccttggccttgctgtgtgtatttcaggct

SEQ ID NO: 175831 - DNA, 74 bp, Homo sapiens
cgtatagtaatggtgcctgacataacccacagccaaaggccttggccttgctgtgtgtatttcaggctttttct

SEQ ID NO: 175832 - DNA, 73 bp, Homo sapiens
tggtgcctgacataacccacagccaaaggccttggccttgctgtgtgtatttcaggctttttcttcccttttc

SEQ ID NO: 175833 - DNA, 67 bp, Homo sapiens
ataacccacagccaaaggccttggccttgctgtgtgtatttcaggctttttcttcccttttcttttt

SEQ ID NO: 175834 - DNA, 69 bp, Homo sapiens
ttctttttttttaagtaataagatattacagttatagctgaagcctgatcctgttcccttttctccctc

SEQ ID NO: 175835 - DNA, 71 bp, Homo sapiens
tttttaagtaataagatattacagttatagctgaagcctgatcctgttcccttttctccctctcgtcccaa

SEQ ID NO: 175836 - DNA, 77 bp, Homo sapiens
taataagatattacagttatagctgaagcctgatcctgttcccttttctccctctcgtcccaagcatcaccactgtc

SEQ ID NO: 175837 - DNA, 77 bp, Homo sapiens
ttacagttatagctgaagcctgatcctgttcccttttctccctctcgtcccaagcatcaccactgtcccaaatctgc

SEQ ID NO: 175838 - DNA, 76 bp, Homo sapiens
agctgaagcctgatcctgttcccttttctccctctcgtcccaagcatcaccactgtcccaaatctgctccttcttc

SEQ ID NO: 175839 - DNA, 73 bp, Homo sapiens
atcctgttcccttttctccctctcgtcccaagcatcaccactgtcccaaatctgctccttcttcccacatctt

SEQ ID NO: 175840 - DNA, 76 bp, Homo sapiens
ttttctccctctcgtcccaagcatcaccactgtcccaaatctgctccttcttcccacatctttgcagtttgggcaa

SEQ ID NO: 175841 - DNA, 78 bp, Homo sapiens
ctctcgtcccaagcatcaccactgtcccaaatctgctccttcttcccacatctttgcagtttgggcaagtcttctgaa

SEQ ID NO: 175842 - DNA, 79 bp, Homo sapiens
atcaccactgtcccaaatctgctccttcttcccacatctttgcagtttgggcaagtcttctgaatgcctagtcatgatt

SEQ ID NO: 175843 - DNA, 77 bp, Homo sapiens
actgtcccaaatctgctccttcttcccacatctttgcagtttgggcaagtcttctgaatgcctagtcatgattttaa

SEQ ID NO: 175844 - DNA, 76 bp, Homo sapiens
aatctgctccttcttcccacatctttgcagtttgggcaagtcttctgaatgcctagtcatgattttaagtcttctt

SEQ ID NO: 175845 - DNA, 76 bp, Homo sapiens
ttcttcccacatctttgcagtttgggcaagtcttctgaatgcctagtcatgattttaagtcttctttccaccttca

SEQ ID NO: 175846 - DNA, 78 bp, Homo sapiens
ttctgaatgcctagtcatgattttaagtcttctttccaccttcagtgatggttggctaccctgagcaagccagtagat

SEQ ID NO: 175847 - DNA, 77 bp, Homo sapiens
ctagtcatgattttaagtcttctttccaccttcagtgatggttggctaccctgagcaagccagtagattcagttatg

SEQ ID NO: 175848 - DNA, 79 bp, Homo sapiens
ttggctaccctgagcaagccagtagattcagttatgtgcctggagtccagatgttttatgtggatttttcatgtggaat

SEQ ID NO: 175849 - DNA, 76 bp, Homo sapiens
agcaagccagtagattcagttatgtgcctggagtccagatgttttatgtggatttttcatgtggaattgtttttgg

SEQ ID NO: 175850 - DNA, 74 bp, Homo sapiens
agtagattcagttatgtgcctggagtccagatgttttatgtggatttttcatgtggaattgtttttggtaagga

SEQ ID NO: 175851 - DNA, 72 bp, Homo sapiens
agttatgtgcctggagtccagatgttttatgtggatttttcatgtggaattgtttttggtaaggaagtattc

SEQ ID NO: 175852 - DNA, 72 bp, Homo sapiens
tggagtccagatgttttatgtggatttttcatgtggaattgtttttggtaaggaagtattcccttgccacac

SEQ ID NO: 175853 - DNA, 71 bp, Homo sapiens
gatgttttatgtggatttttcatgtggaattgtttttggtaaggaagtattcccttgccacaccaatgaaa

SEQ ID NO: 175854 - DNA, 70 bp, Homo sapiens
tggatttttcatgtggaattgtttttggtaaggaagtattcccttgccacaccaatgaaaagagaagaaa

SEQ ID NO: 175855 - DNA, 70 bp, Homo sapiens
ttcatgtggaattgtttttggtaaggaagtattcccttgccacaccaatgaaaagagaagaaaacaggta

SEQ ID NO: 175856 - DNA, 69 bp, Homo sapiens
attgtttttggtaaggaagtattcccttgccacaccaatgaaaagagaagaaaacaggtagctggcacc

SEQ ID NO: 175857 - DNA, 74 bp, Homo sapiens
taaggaagtattcccttgccacaccaatgaaaagagaagaaaacaggtagctggcacccactgcattgttgctt

SEQ ID NO: 175858 - DNA, 78 bp, Homo sapiens
attcccttgccacaccaatgaaaagagaagaaaacaggtagctggcacccactgcattgttgctttctgccagcctgc

SEQ ID NO: 175859 - DNA, 77 bp, Homo sapiens
acaccaatgaaaagagaagaaaacaggtagctggcacccactgcattgttgctttctgccagcctgctccttctcct

SEQ ID NO: 175860 - DNA, 77 bp, Homo sapiens
aaaagagaagaaaacaggtagctggcacccactgcattgttgctttctgccagcctgctccttctccttcctctcca

SEQ ID NO: 175861 - DNA, 81 bp, Homo sapiens
attgttgctttctgccagcctgctccttctccttcctctccagctctgttgtgtccagatgcaaactctacatgcagggtt

SEQ ID NO: 175862 - DNA, 80 bp, Homo sapiens
ccttcctctccagctctgttgtgtccagatgcaaactctacatgcagggtttgaccctaggtcctcacctgctgtagctc

SEQ ID NO: 175863 - DNA, 81 bp, Homo sapiens
tccagctctgttgtgtccagatgcaaactctacatgcagggtttgaccctaggtcctcacctgctgtagctctcacacggg

SEQ ID NO: 175864 - DNA, 78 bp, Homo sapiens
ttgtgtccagatgcaaactctacatgcagggtttgaccctaggtcctcacctgctgtagctctcacacggggaccgaa

SEQ ID NO: 175865 - DNA, 78 bp, Homo sapiens
atgcaaactctacatgcagggtttgaccctaggtcctcacctgctgtagctctcacacggggaccgaatgctcttgtg

SEQ ID NO: 175866 - DNA, 74 bp, Homo sapiens
cctaggtcctcacctgctgtagctctcacacggggaccgaatgctcttgtgtcgtaaatccttccttttgcttc

SEQ ID NO: 175867 - DNA, 76 bp, Homo sapiens
tgctgtagctctcacacggggaccgaatgctcttgtgtcgtaaatccttccttttgcttcctcgtgttggatgtgt

SEQ ID NO: 175868 - DNA, 73 bp, Homo sapiens
agctctcacacggggaccgaatgctcttgtgtcgtaaatccttccttttgcttcctcgtgttggatgtgttta

SEQ ID NO: 175869 - DNA, 71 bp, Homo sapiens
accgaatgctcttgtgtcgtaaatccttccttttgcttcctcgtgttggatgtgtttagtggttttcatct

SEQ ID NO: 175870 - DNA, 73 bp, Homo sapiens
tcttgtgtcgtaaatccttccttttgcttcctcgtgttggatgtgtttagtggttttcatcttctggtcacta

SEQ ID NO: 175871 - DNA, 73 bp, Homo sapiens
taaatccttccttttgcttcctcgtgttggatgtgtttagtggttttcatcttctggtcactatttcattcta

SEQ ID NO: 175872 - DNA, 72 bp, Homo sapiens
ttccttttgcttcctcgtgttggatgtgtttagtggttttcatcttctggtcactatttcattctaggttta

SEQ ID NO: 175873 - DNA, 70 bp, Homo sapiens
tcgtgttggatgtgtttagtggttttcatcttctggtcactatttcattctaggtttatcccctttaaat

SEQ ID NO: 175874 - DNA, 70 bp, Homo sapiens
ttggatgtgtttagtggttttcatcttctggtcactatttcattctaggtttatcccctttaaattataa

SEQ ID NO: 175875 - DNA, 69 bp, Homo sapiens
ttagtggttttcatcttctggtcactatttcattctaggtttatcccctttaaattataaattaaatga

SEQ ID NO: 175876 - DNA, 66 bp, Homo sapiens
taggtttatcccctttaaattataaattaaatgaattcttcgcttttcctaccagcaactacccac

SEQ ID NO: 175877 - DNA, 71 bp, Homo sapiens
ttaaatgaattcttcgcttttcctaccagcaactacccaccaagttctaccatgtgttaatttaatcaaca

SEQ ID NO: 175878 - DNA, 70 bp, Homo sapiens
ttcttcgcttttcctaccagcaactacccaccaagttctaccatgtgttaatttaatcaacagttattta

SEQ ID NO: 175879 - DNA, 71 bp, Homo sapiens
ttcctaccagcaactacccaccaagttctaccatgtgttaatttaatcaacagttatttattgagtactta

SEQ ID NO: 175880 - DNA, 72 bp, Homo sapiens
caactacccaccaagttctaccatgtgttaatttaatcaacagttatttattgagtacttattacatgttga

SEQ ID NO: 175881 - DNA, 72 bp, Homo sapiens
ccaagttctaccatgtgttaatttaatcaacagttatttattgagtacttattacatgttgatttcctgttc

SEQ ID NO: 175882 - DNA, 76 bp, Homo sapiens
catgtgttaatttaatcaacagttatttattgagtacttattacatgttgatttcctgttctcaacattggaatga

SEQ ID NO: 175883 - DNA, 75 bp, Homo sapiens
atcaacagttatttattgagtacttattacatgttgatttcctgttctcaacattggaatgaagacagcttaggg

SEQ ID NO: 175884 - DNA, 76 bp, Homo sapiens
atttattgagtacttattacatgttgatttcctgttctcaacattggaatgaagacagcttagggttctgctttca

SEQ ID NO: 175885 - DNA, 78 bp, Homo sapiens
ttgagtacttattacatgttgatttcctgttctcaacattggaatgaagacagcttagggttctgctttcatgaagct

SEQ ID NO: 175886 - DNA, 81 bp, Homo sapiens
attacatgttgatttcctgttctcaacattggaatgaagacagcttagggttctgctttcatgaagcttgcatgctcttag

SEQ ID NO: 175887 - DNA, 81 bp, Homo sapiens
atttcctgttctcaacattggaatgaagacagcttagggttctgctttcatgaagcttgcatgctcttaggtggagacaga

SEQ ID NO: 175888 - DNA, 82 bp, Homo sapiens
tctcaacattggaatgaagacagcttagggttctgctttcatgaagcttgcatgctcttaggtggagacagacagtaattaa

SEQ ID NO: 175889 - DNA, 81 bp, Homo sapiens
aatgaagacagcttagggttctgctttcatgaagcttgcatgctcttaggtggagacagacagtaattaagcagataaaca

SEQ ID NO: 175890 - DNA, 80 bp, Homo sapiens
ttagggttctgctttcatgaagcttgcatgctcttaggtggagacagacagtaattaagcagataaacaggaaattatga

SEQ ID NO: 175891 - DNA, 78 bp, Homo sapiens
aagcttgcatgctcttaggtggagacagacagtaattaagcagataaacaggaaattatgagctagtagtgggtccat

SEQ ID NO: 175892 - DNA, 78 bp, Homo sapiens
tcttaggtggagacagacagtaattaagcagataaacaggaaattatgagctagtagtgggtccattgctgagaagta

SEQ ID NO: 175893 - DNA, 75 bp, Homo sapiens
agtaattaagcagataaacaggaaattatgagctagtagtgggtccattgctgagaagtaagacaggtggtagga

SEQ ID NO: 175894 - DNA, 75 bp, Homo sapiens
aagcagataaacaggaaattatgagctagtagtgggtccattgctgagaagtaagacaggtggtaggatgacccg

SEQ ID NO: 175895 - DNA, 78 bp, Homo sapiens
atgagctagtagtgggtccattgctgagaagtaagacaggtggtaggatgacccgtgccgtgtgatgactttagattg

SEQ ID NO: 175896 - DNA, 74 bp, Homo sapiens
tgagaagtaagacaggtggtaggatgacccgtgccgtgtgatgactttagattgggtggttggggaagacttca

SEQ ID NO: 175897 - DNA, 70 bp, Homo sapiens
taggatgacccgtgccgtgtgatgactttagattgggtggttggggaagacttcacggaccttaaaactg

SEQ ID NO: 175898 - DNA, 69 bp, Homo sapiens
cgtgccgtgtgatgactttagattgggtggttggggaagacttcacggaccttaaaactggccttggaa

SEQ ID NO: 175899 - DNA, 68 bp, Homo sapiens
tgtgatgactttagattgggtggttggggaagacttcacggaccttaaaactggccttggaacgggaa

SEQ ID NO: 175900 - DNA, 66 bp, Homo sapiens
ttagattgggtggttggggaagacttcacggaccttaaaactggccttggaacgggaagcgagaac

SEQ ID NO: 175901 - DNA, 69 bp, Homo sapiens
ttggggaagacttcacggaccttaaaactggccttggaacgggaagcgagaactgggcacggaagatga

SEQ ID NO: 175902 - DNA, 69 bp, Homo sapiens
agacttcacggaccttaaaactggccttggaacgggaagcgagaactgggcacggaagatgagggagtg

SEQ ID NO: 175903 - DNA, 77 bp, Homo sapiens
cttggaacgggaagcgagaactgggcacggaagatgagggagtgggagatttcaggcagagggagcagcagcaggta

SEQ ID NO: 175904 - DNA, 77 bp, Homo sapiens
aacgggaagcgagaactgggcacggaagatgagggagtgggagatttcaggcagagggagcagcagcaggtacagag

SEQ ID NO: 175905 - DNA, 78 bp, Homo sapiens
ctgggcacggaagatgagggagtgggagatttcaggcagagggagcagcagcaggtacagaggccctgaggcctttta

SEQ ID NO: 175906 - DNA, 77 bp, Homo sapiens
aagatgagggagtgggagatttcaggcagagggagcagcagcaggtacagaggccctgaggccttttattgtgtctt

SEQ ID NO: 175907 - DNA, 78 bp, Homo sapiens
ggagtgggagatttcaggcagagggagcagcagcaggtacagaggccctgaggccttttattgtgtctttttgcttga

SEQ ID NO: 175908 - DNA, 78 bp, Homo sapiens
ttcaggcagagggagcagcagcaggtacagaggccctgaggccttttattgtgtctttttgcttgagcgagtaactta

SEQ ID NO: 175909 - DNA, 75 bp, Homo sapiens
gcaggtacagaggccctgaggccttttattgtgtctttttgcttgagcgagtaacttagagcacacgtagagaaa

SEQ ID NO: 175910 - DNA, 75 bp, Homo sapiens
aggccctgaggccttttattgtgtctttttgcttgagcgagtaacttagagcacacgtagagaaagacagcagaa

SEQ ID NO: 175911 - DNA, 77 bp, Homo sapiens
gccttttattgtgtctttttgcttgagcgagtaacttagagcacacgtagagaaagacagcagaagtgatcttctaa

SEQ ID NO: 175912 - DNA, 78 bp, Homo sapiens
attgtgtctttttgcttgagcgagtaacttagagcacacgtagagaaagacagcagaagtgatcttctaaacactctg

SEQ ID NO: 175913 - DNA, 79 bp, Homo sapiens
agtaacttagagcacacgtagagaaagacagcagaagtgatcttctaaacactctgtcctgtgtggagagctccttatg

SEQ ID NO: 175914 - DNA, 81 bp, Homo sapiens
ttagagcacacgtagagaaagacagcagaagtgatcttctaaacactctgtcctgtgtggagagctccttatgtgagattt

SEQ ID NO: 175915 - DNA, 81 bp, Homo sapiens
agaaagacagcagaagtgatcttctaaacactctgtcctgtgtggagagctccttatgtgagattttgctgtgtagtgaat

SEQ ID NO: 175916 - DNA, 79 bp, Homo sapiens
atcttctaaacactctgtcctgtgtggagagctccttatgtgagattttgctgtgtagtgaattaaggctcagccaaac

SEQ ID NO: 175917 - DNA, 80 bp, Homo sapiens
aaacactctgtcctgtgtggagagctccttatgtgagattttgctgtgtagtgaattaaggctcagccaaactggctcac

SEQ ID NO: 175918 - DNA, 83 bp, Homo sapiens
tgtgtggagagctccttatgtgagattttgctgtgtagtgaattaaggctcagccaaactggctcacgtgagctctttgagct

SEQ ID NO: 175919 - DNA, 82 bp, Homo sapiens
agattttgctgtgtagtgaattaaggctcagccaaactggctcacgtgagctctttgagcttgcctgtctctgtgggctgaa

SEQ ID NO: 175920 - DNA, 78 bp, Homo sapiens
aattaaggctcagccaaactggctcacgtgagctctttgagcttgcctgtctctgtgggctgaaggctgttccctgtt

SEQ ID NO: 175921 - DNA, 80 bp, Homo sapiens
agccaaactggctcacgtgagctctttgagcttgcctgtctctgtgggctgaaggctgttccctgtttccttcagctcta

SEQ ID NO: 175922 - DNA, 80 bp, Homo sapiens
actggctcacgtgagctctttgagcttgcctgtctctgtgggctgaaggctgttccctgtttccttcagctctacgtctc

SEQ ID NO: 175923 - DNA, 78 bp, Homo sapiens
agctctttgagcttgcctgtctctgtgggctgaaggctgttccctgtttccttcagctctacgtctcctccgagagcc

SEQ ID NO: 175924 - DNA, 78 bp, Homo sapiens
agcttgcctgtctctgtgggctgaaggctgttccctgtttccttcagctctacgtctcctccgagagccgcttcaaca

SEQ ID NO: 175925 - DNA, 77 bp, Homo sapiens
tgtctctgtgggctgaaggctgttccctgtttccttcagctctacgtctcctccgagagccgcttcaacaccctggc

SEQ ID NO: 175926 - DNA, 71 bp, Homo sapiens
aaggctgttccctgtttccttcagctctacgtctcctccgagagccgcttcaacaccctggccgagttggt

SEQ ID NO: 175927 - DNA, 76 bp, Homo sapiens
cctgtttccttcagctctacgtctcctccgagagccgcttcaacaccctggccgagttggttcatcatcattcaac

SEQ ID NO: 175928 - DNA, 76 bp, Homo sapiens
tacgtctcctccgagagccgcttcaacaccctggccgagttggttcatcatcattcaacggtggccgacgggctca

SEQ ID NO: 175929 - DNA, 77 bp, Homo sapiens
agagccgcttcaacaccctggccgagttggttcatcatcattcaacggtggccgacgggctcatcaccacgctccat

SEQ ID NO: 175930 - DNA, 76 bp, Homo sapiens
ccctggccgagttggttcatcatcattcaacggtggccgacgggctcatcaccacgctccattatccagccccaaa

SEQ ID NO: 175931 - DNA, 79 bp, Homo sapiens
ttggttcatcatcattcaacggtggccgacgggctcatcaccacgctccattatccagccccaaagcgcaacaagccca

SEQ ID NO: 175932 - DNA, 78 bp, Homo sapiens
atcattcaacggtggccgacgggctcatcaccacgctccattatccagccccaaagcgcaacaagcccactgtctatg

SEQ ID NO: 175933 - DNA, 77 bp, Homo sapiens
cggtggccgacgggctcatcaccacgctccattatccagccccaaagcgcaacaagcccactgtctatggtgtgtcc

SEQ ID NO: 175934 - DNA, 77 bp, Homo sapiens
ctcatcaccacgctccattatccagccccaaagcgcaacaagcccactgtctatggtgtgtcccccaactacgacaa

SEQ ID NO: 175935 - DNA, 74 bp, Homo sapiens
acgctccattatccagccccaaagcgcaacaagcccactgtctatggtgtgtcccccaactacgacaagtggga

SEQ ID NO: 175936 - DNA, 76 bp, Homo sapiens
tatccagccccaaagcgcaacaagcccactgtctatggtgtgtcccccaactacgacaagtgggagatggaacgca

SEQ ID NO: 175937 - DNA, 78 bp, Homo sapiens
tgtctatggtgtgtcccccaactacgacaagtgggagatggaacgcacggacatcaccatgaagcacaagctgggcgg

SEQ ID NO: 175938 - DNA, 76 bp, Homo sapiens
tgtcccccaactacgacaagtgggagatggaacgcacggacatcaccatgaagcacaagctgggcgggggccagta

SEQ ID NO: 175939 - DNA, 74 bp, Homo sapiens
aactacgacaagtgggagatggaacgcacggacatcaccatgaagcacaagctgggcgggggccagtacgggga

SEQ ID NO: 175940 - DNA, 74 bp, Homo sapiens
agtgggagatggaacgcacggacatcaccatgaagcacaagctgggcgggggccagtacggggaggtgtacgag

SEQ ID NO: 175941 - DNA, 74 bp, Homo sapiens
acatcaccatgaagcacaagctgggcgggggccagtacggggaggtgtacgagggcgtgtggaagaaatacagc

SEQ ID NO: 175942 - DNA, 70 bp, Homo sapiens
aagcacaagctgggcgggggccagtacggggaggtgtacgagggcgtgtggaagaaatacagcctgacgg

SEQ ID NO: 175943 - DNA, 70 bp, Homo sapiens
tgggcgggggccagtacggggaggtgtacgagggcgtgtggaagaaatacagcctgacggtggccgtgaa

SEQ ID NO: 175944 - DNA, 70 bp, Homo sapiens
gtacggggaggtgtacgagggcgtgtggaagaaatacagcctgacggtggccgtgaagaccttgaaggta

SEQ ID NO: 175945 - DNA, 71 bp, Homo sapiens
aggtgtacgagggcgtgtggaagaaatacagcctgacggtggccgtgaagaccttgaaggtaggctgggac

SEQ ID NO: 175946 - DNA, 71 bp, Homo sapiens
cgagggcgtgtggaagaaatacagcctgacggtggccgtgaagaccttgaaggtaggctgggactgccggg

SEQ ID NO: 175947 - DNA, 70 bp, Homo sapiens
agaaatacagcctgacggtggccgtgaagaccttgaaggtaggctgggactgccgggggtgcccagggta

SEQ ID NO: 175948 - DNA, 69 bp, Homo sapiens
acagcctgacggtggccgtgaagaccttgaaggtaggctgggactgccgggggtgcccagggtacgtgg

SEQ ID NO: 175949 - DNA, 70 bp, Homo sapiens
ccgtgaagaccttgaaggtaggctgggactgccgggggtgcccagggtacgtggggcaaggcgtctgctg

SEQ ID NO: 175950 - DNA, 71 bp, Homo sapiens
aagaccttgaaggtaggctgggactgccgggggtgcccagggtacgtggggcaaggcgtctgctggcatta

SEQ ID NO: 175951 - DNA, 76 bp, Homo sapiens
aggtaggctgggactgccgggggtgcccagggtacgtggggcaaggcgtctgctggcattaggcgatgcatctgcc

SEQ ID NO: 175952 - DNA, 76 bp, Homo sapiens
actgccgggggtgcccagggtacgtggggcaaggcgtctgctggcattaggcgatgcatctgcctggaagtctacc

SEQ ID NO: 175953 - DNA, 80 bp, Homo sapiens
gggtgcccagggtacgtggggcaaggcgtctgctggcattaggcgatgcatctgcctggaagtctacctcctgcctgctg

SEQ ID NO: 175954 - DNA, 82 bp, Homo sapiens
tacgtggggcaaggcgtctgctggcattaggcgatgcatctgcctggaagtctacctcctgcctgctgtccgagggcttcat

SEQ ID NO: 175955 - DNA, 83 bp, Homo sapiens
gcgtctgctggcattaggcgatgcatctgcctggaagtctacctcctgcctgctgtccgagggcttcattggcgccacggaat

SEQ ID NO: 175956 - DNA, 77 bp, Homo sapiens
atgcatctgcctggaagtctacctcctgcctgctgtccgagggcttcattggcgccacggaattgacttttccgtct

SEQ ID NO: 175957 - DNA, 75 bp, Homo sapiens
cctgctgtccgagggcttcattggcgccacggaattgacttttccgtcttatatcattcctgtgtctttgtagga

SEQ ID NO: 175958 - DNA, 76 bp, Homo sapiens
attggcgccacggaattgacttttccgtcttatatcattcctgtgtctttgtaggagtggaatcattctcatagtc

SEQ ID NO: 175959 - DNA, 75 bp, Homo sapiens
aattgacttttccgtcttatatcattcctgtgtctttgtaggagtggaatcattctcatagtccgagtgtgtttc

SEQ ID NO: 175960 - DNA, 76 bp, Homo sapiens
acttttccgtcttatatcattcctgtgtctttgtaggagtggaatcattctcatagtccgagtgtgtttccacata

SEQ ID NO: 175961 - DNA, 82 bp, Homo sapiens
cttatatcattcctgtgtctttgtaggagtggaatcattctcatagtccgagtgtgtttccacatatggtgagagctgacaa

SEQ ID NO: 175962 - DNA, 79 bp, Homo sapiens
ggagtggaatcattctcatagtccgagtgtgtttccacatatggtgagagctgacaagcatggaggggttttggtgtaa

SEQ ID NO: 175963 - DNA, 78 bp, Homo sapiens
tcattctcatagtccgagtgtgtttccacatatggtgagagctgacaagcatggaggggttttggtgtaaaaagatta

SEQ ID NO: 175964 - DNA, 74 bp, Homo sapiens
tgtttccacatatggtgagagctgacaagcatggaggggttttggtgtaaaaagattagtcatttggagaggtt

SEQ ID NO: 175965 - DNA, 73 bp, Homo sapiens
atatggtgagagctgacaagcatggaggggttttggtgtaaaaagattagtcatttggagaggttttctcatt

SEQ ID NO: 175966 - DNA, 67 bp, Homo sapiens
tggaggggttttggtgtaaaaagattagtcatttggagaggttttctcattttatggcaaggttctt

SEQ ID NO: 175967 - DNA, 73 bp, Homo sapiens
tagtcatttggagaggttttctcattttatggcaaggttcttttaaagccgtggatttccatgctgttcgtgc

SEQ ID NO: 175968 - DNA, 73 bp, Homo sapiens
ttttaaagccgtggatttccatgctgttcgtgcggcatggagatcacttcctaccgagagttaaggaggaaaa

SEQ ID NO: 175969 - DNA, 74 bp, Homo sapiens
tttccatgctgttcgtgcggcatggagatcacttcctaccgagagttaaggaggaaaaaaagatctctgagttt

SEQ ID NO: 175970 - DNA, 73 bp, Homo sapiens
tgttcgtgcggcatggagatcacttcctaccgagagttaaggaggaaaaaaagatctctgagttttgaaagaa

SEQ ID NO: 175971 - DNA, 70 bp, Homo sapiens
catggagatcacttcctaccgagagttaaggaggaaaaaaagatctctgagttttgaaagaagatttaac

SEQ ID NO: 175972 - DNA, 68 bp, Homo sapiens
agatcacttcctaccgagagttaaggaggaaaaaaagatctctgagttttgaaagaagatttaaccaa

SEQ ID NO: 175973 - DNA, 69 bp, Homo sapiens
ccgagagttaaggaggaaaaaaagatctctgagttttgaaagaagatttaaccaaaatgcatttgactc

SEQ ID NO: 175974 - DNA, 70 bp, Homo sapiens
ggaggaaaaaaagatctctgagttttgaaagaagatttaaccaaaatgcatttgactcttctgtggattt

SEQ ID NO: 175975 - DNA, 74 bp, Homo sapiens
agatctctgagttttgaaagaagatttaaccaaaatgcatttgactcttctgtggatttttgttggctgatttg

SEQ ID NO: 175976 - DNA, 72 bp, Homo sapiens
agttttgaaagaagatttaaccaaaatgcatttgactcttctgtggatttttgttggctgatttggaaggca

SEQ ID NO: 175977 - DNA, 72 bp, Homo sapiens
aaagaagatttaaccaaaatgcatttgactcttctgtggatttttgttggctgatttggaaggcaggtgccc

SEQ ID NO: 175978 - DNA, 75 bp, Homo sapiens
ttaaccaaaatgcatttgactcttctgtggatttttgttggctgatttggaaggcaggtgccctgggcatcccca

SEQ ID NO: 175979 - DNA, 73 bp, Homo sapiens
tttgactcttctgtggatttttgttggctgatttggaaggcaggtgccctgggcatccccagtgggttccaat

SEQ ID NO: 175980 - DNA, 78 bp, Homo sapiens
tcttctgtggatttttgttggctgatttggaaggcaggtgccctgggcatccccagtgggttccaattctgcagctgc

SEQ ID NO: 175981 - DNA, 76 bp, Homo sapiens
atttttgttggctgatttggaaggcaggtgccctgggcatccccagtgggttccaattctgcagctgcccagactc

SEQ ID NO: 175982 - DNA, 79 bp, Homo sapiens
aaggcaggtgccctgggcatccccagtgggttccaattctgcagctgcccagactcctgcaggcagaggtggaagtgtc

SEQ ID NO: 175983 - DNA, 78 bp, Homo sapiens
tgggcatccccagtgggttccaattctgcagctgcccagactcctgcaggcagaggtggaagtgtccccgctagaaag

SEQ ID NO: 175984 - DNA, 79 bp, Homo sapiens
attctgcagctgcccagactcctgcaggcagaggtggaagtgtccccgctagaaaggcatccaggaaactcgcttttga

SEQ ID NO: 175985 - DNA, 77 bp, Homo sapiens
tgcccagactcctgcaggcagaggtggaagtgtccccgctagaaaggcatccaggaaactcgcttttgaccaactca

SEQ ID NO: 175986 - DNA, 73 bp, Homo sapiens
agaggtggaagtgtccccgctagaaaggcatccaggaaactcgcttttgaccaactcagatacagtctggtct

SEQ ID NO: 175987 - DNA, 72 bp, Homo sapiens
aagtgtccccgctagaaaggcatccaggaaactcgcttttgaccaactcagatacagtctggtctttcttgt

SEQ ID NO: 175988 - DNA, 72 bp, Homo sapiens
tagaaaggcatccaggaaactcgcttttgaccaactcagatacagtctggtctttcttgttaactgggactt

SEQ ID NO: 175989 - DNA, 70 bp, Homo sapiens
atccaggaaactcgcttttgaccaactcagatacagtctggtctttcttgttaactgggactttaccctc

SEQ ID NO: 175990 - DNA, 73 bp, Homo sapiens
tcgcttttgaccaactcagatacagtctggtctttcttgttaactgggactttaccctctccactaatgaata

SEQ ID NO: 175991 - DNA, 70 bp, Homo sapiens
agatacagtctggtctttcttgttaactgggactttaccctctccactaatgaatagtgtttgtagtttc

SEQ ID NO: 175992 - DNA, 67 bp, Homo sapiens
ctttcttgttaactgggactttaccctctccactaatgaatagtgtttgtagtttccaggcaggttt

SEQ ID NO: 175993 - DNA, 67 bp, Homo sapiens
ttgttaactgggactttaccctctccactaatgaatagtgtttgtagtttccaggcaggtttttttc

SEQ ID NO: 175994 - DNA, 64 bp, Homo sapiens
ttcttttgaagttctttgaaacccttaggacgccaagggaaggaagttttcattttcagccctt

SEQ ID NO: 175995 - DNA, 67 bp, Homo sapiens
ttctttgaaacccttaggacgccaagggaaggaagttttcattttcagccctttgcattcttcaaaa

SEQ ID NO: 175996 - DNA, 69 bp, Homo sapiens
aaacccttaggacgccaagggaaggaagttttcattttcagccctttgcattcttcaaaatgtgatcca

SEQ ID NO: 175997 - DNA, 70 bp, Homo sapiens
acgccaagggaaggaagttttcattttcagccctttgcattcttcaaaatgtgatccaggcttttccctg

SEQ ID NO: 175998 - DNA, 71 bp, Homo sapiens
aaggaagttttcattttcagccctttgcattcttcaaaatgtgatccaggcttttccctgtggcgagggtg

SEQ ID NO: 175999 - DNA, 73 bp, Homo sapiens
attttcagccctttgcattcttcaaaatgtgatccaggcttttccctgtggcgagggtgtcccctagtgttga

SEQ ID NO: 176000 - DNA, 73 bp, Homo sapiens
tttgcattcttcaaaatgtgatccaggcttttccctgtggcgagggtgtcccctagtgttgacttacattatt

SEQ ID NO: 176001 - DNA, 71 bp, Homo sapiens
caaaatgtgatccaggcttttccctgtggcgagggtgtcccctagtgttgacttacattatttccacttgt

SEQ ID NO: 176002 - DNA, 68 bp, Homo sapiens
atccaggcttttccctgtggcgagggtgtcccctagtgttgacttacattatttccacttgttttaaa

SEQ ID NO: 176003 - DNA, 67 bp, Homo sapiens
ttttccctgtggcgagggtgtcccctagtgttgacttacattatttccacttgttttaaatgaactt

SEQ ID NO: 176004 - DNA, 68 bp, Homo sapiens
cgagggtgtcccctagtgttgacttacattatttccacttgttttaaatgaactttgattaccttgac

SEQ ID NO: 176005 - DNA, 71 bp, Homo sapiens
ccctagtgttgacttacattatttccacttgttttaaatgaactttgattaccttgacctgtgcacagaaa

SEQ ID NO: 176006 - DNA, 73 bp, Homo sapiens
cctagtgttgacttacattatttccacttgttttaaatgaactttgattaccttgacctgtgcacagaaatca

SEQ ID NO: 176007 - DNA, 75 bp, Homo sapiens
ttgacttacattatttccacttgttttaaatgaactttgattaccttgacctgtgcacagaaatcaagagaggca

SEQ ID NO: 176008 - DNA, 74 bp, Homo sapiens
acttacattatttccacttgttttaaatgaactttgattaccttgacctgtgcacagaaatcaagagaggcagc

SEQ ID NO: 176009 - DNA, 71 bp, Homo sapiens
tttccacttgttttaaatgaactttgattaccttgacctgtgcacagaaatcaagagaggcagcccctttt

SEQ ID NO: 176010 - DNA, 72 bp, Homo sapiens
ttccacttgttttaaatgaactttgattaccttgacctgtgcacagaaatcaagagaggcagccccttttta

SEQ ID NO: 176011 - DNA, 74 bp, Homo sapiens
ttttaaatgaactttgattaccttgacctgtgcacagaaatcaagagaggcagcccctttttagagctgttaga

SEQ ID NO: 176012 - DNA, 74 bp, Homo sapiens
taaatgaactttgattaccttgacctgtgcacagaaatcaagagaggcagcccctttttagagctgttagaaaa

SEQ ID NO: 176013 - DNA, 74 bp, Homo sapiens
attaccttgacctgtgcacagaaatcaagagaggcagcccctttttagagctgttagaaaagaactgaaacatc

SEQ ID NO: 176014 - DNA, 76 bp, Homo sapiens
ttgacctgtgcacagaaatcaagagaggcagcccctttttagagctgttagaaaagaactgaaacatccacctctg

SEQ ID NO: 176015 - DNA, 69 bp, Homo sapiens
agaggcagcccctttttagagctgttagaaaagaactgaaacatccacctctgggaaaaatagagttta

SEQ ID NO: 176016 - DNA, 70 bp, Homo sapiens
cctttttagagctgttagaaaagaactgaaacatccacctctgggaaaaatagagtttagtttgtgcatg

SEQ ID NO: 176017 - DNA, 75 bp, Homo sapiens
ttagagctgttagaaaagaactgaaacatccacctctgggaaaaatagagtttagtttgtgcatgtgtctcagaa

SEQ ID NO: 176018 - DNA, 76 bp, Homo sapiens
aaagaactgaaacatccacctctgggaaaaatagagtttagtttgtgcatgtgtctcagaagtcaggtgcacacat

SEQ ID NO: 176019 - DNA, 82 bp, Homo sapiens
acctctgggaaaaatagagtttagtttgtgcatgtgtctcagaagtcaggtgcacacattgagactggtgcagccacatgcc

SEQ ID NO: 176020 - DNA, 82 bp, Homo sapiens
aaaaatagagtttagtttgtgcatgtgtctcagaagtcaggtgcacacattgagactggtgcagccacatgcctgcctttta

SEQ ID NO: 176021 - DNA, 86 bp, Homo sapiens
tgtctcagaagtcaggtgcacacattgagactggtgcagccacatgcctgccttttagggactccttgactgacctgatgccttca

SEQ ID NO: 176022 - DNA, 82 bp, Homo sapiens
gtcaggtgcacacattgagactggtgcagccacatgcctgccttttagggactccttgactgacctgatgccttcacccaaa

SEQ ID NO: 176023 - DNA, 80 bp, Homo sapiens
acacattgagactggtgcagccacatgcctgccttttagggactccttgactgacctgatgccttcacccaaaggcatag

SEQ ID NO: 176024 - DNA, 79 bp, Homo sapiens
agactggtgcagccacatgcctgccttttagggactccttgactgacctgatgccttcacccaaaggcatagtgaaatg

SEQ ID NO: 176025 - DNA, 74 bp, Homo sapiens
ccttttagggactccttgactgacctgatgccttcacccaaaggcatagtgaaatgggaagtatgatttctgac

SEQ ID NO: 176026 - DNA, 78 bp, Homo sapiens
tagggactccttgactgacctgatgccttcacccaaaggcatagtgaaatgggaagtatgatttctgactggtatgaa

SEQ ID NO: 176027 - DNA, 80 bp, Homo sapiens
ttgactgacctgatgccttcacccaaaggcatagtgaaatgggaagtatgatttctgactggtatgaagtggctgcttta

SEQ ID NO: 176028 - DNA, 77 bp, Homo sapiens
atgccttcacccaaaggcatagtgaaatgggaagtatgatttctgactggtatgaagtggctgctttagagaaaaga

SEQ ID NO: 176029 - DNA, 77 bp, Homo sapiens
aaaggcatagtgaaatgggaagtatgatttctgactggtatgaagtggctgctttagagaaaagatcacattcttta

SEQ ID NO: 176030 - DNA, 77 bp, Homo sapiens
tgaaatgggaagtatgatttctgactggtatgaagtggctgctttagagaaaagatcacattctttagtcctagaaa

SEQ ID NO: 176031 - DNA, 74 bp, Homo sapiens
aagtatgatttctgactggtatgaagtggctgctttagagaaaagatcacattctttagtcctagaaaccaaag

SEQ ID NO: 176032 - DNA, 75 bp, Homo sapiens
ctgactggtatgaagtggctgctttagagaaaagatcacattctttagtcctagaaaccaaaggtggcttcctga

SEQ ID NO: 176033 - DNA, 76 bp, Homo sapiens
tatgaagtggctgctttagagaaaagatcacattctttagtcctagaaaccaaaggtggcttcctgatgctcttat

SEQ ID NO: 176034 - DNA, 75 bp, Homo sapiens
ctttagagaaaagatcacattctttagtcctagaaaccaaaggtggcttcctgatgctcttattcagcacgtgcc

SEQ ID NO: 176035 - DNA, 76 bp, Homo sapiens
attctttagtcctagaaaccaaaggtggcttcctgatgctcttattcagcacgtgcctgtctttgaggcaggactg

SEQ ID NO: 176036 - DNA, 77 bp, Homo sapiens
agtcctagaaaccaaaggtggcttcctgatgctcttattcagcacgtgcctgtctttgaggcaggactggcactggg

SEQ ID NO: 176037 - DNA, 78 bp, Homo sapiens
accaaaggtggcttcctgatgctcttattcagcacgtgcctgtctttgaggcaggactggcactggggtgggggcatg

SEQ ID NO: 176038 - DNA, 77 bp, Homo sapiens
ttcctgatgctcttattcagcacgtgcctgtctttgaggcaggactggcactggggtgggggcatggtttggggtta

SEQ ID NO: 176039 - DNA, 68 bp, Homo sapiens
acgtgcctgtctttgaggcaggactggcactggggtgggggcatggtttggggttaccttaaggaccc

SEQ ID NO: 176040 - DNA, 70 bp, Homo sapiens
tttgaggcaggactggcactggggtgggggcatggtttggggttaccttaaggaccctggatatttctca

SEQ ID NO: 176041 - DNA, 68 bp, Homo sapiens
actggcactggggtgggggcatggtttggggttaccttaaggaccctggatatttctcagataggact

SEQ ID NO: 176042 - DNA, 65 bp, Homo sapiens
gggtgggggcatggtttggggttaccttaaggaccctggatatttctcagataggactttttctt

SEQ ID NO: 176043 - DNA, 65 bp, Homo sapiens
ggggcatggtttggggttaccttaaggaccctggatatttctcagataggactttttcttttctt

SEQ ID NO: 176044 - DNA, 68 bp, Homo sapiens
cacacccggccctggactttttcttaattgaataaatatttatcaagttcttcacttctatttgacgg

SEQ ID NO: 176045 - DNA, 69 bp, Homo sapiens
gccctggactttttcttaattgaataaatatttatcaagttcttcacttctatttgacggttcctgggc

SEQ ID NO: 176046 - DNA, 73 bp, Homo sapiens
ttcttaattgaataaatatttatcaagttcttcacttctatttgacggttcctgggctcaacactggattaga

SEQ ID NO: 176047 - DNA, 73 bp, Homo sapiens
gaataaatatttatcaagttcttcacttctatttgacggttcctgggctcaacactggattagaaaatgaatg

SEQ ID NO: 176048 - DNA, 74 bp, Homo sapiens
atatttatcaagttcttcacttctatttgacggttcctgggctcaacactggattagaaaatgaatgggacaga

SEQ ID NO: 176049 - DNA, 78 bp, Homo sapiens
ttcacttctatttgacggttcctgggctcaacactggattagaaaatgaatgggacagagttcttcatctgagacata

SEQ ID NO: 176050 - DNA, 76 bp, Homo sapiens
ttctatttgacggttcctgggctcaacactggattagaaaatgaatgggacagagttcttcatctgagacataggg

SEQ ID NO: 176051 - DNA, 76 bp, Homo sapiens
tttgacggttcctgggctcaacactggattagaaaatgaatgggacagagttcttcatctgagacatagggtggtc

SEQ ID NO: 176052 - DNA, 77 bp, Homo sapiens
ttcctgggctcaacactggattagaaaatgaatgggacagagttcttcatctgagacatagggtggtccaggtagta

SEQ ID NO: 176053 - DNA, 77 bp, Homo sapiens
gctcaacactggattagaaaatgaatgggacagagttcttcatctgagacatagggtggtccaggtagtaggaggaa

SEQ ID NO: 176054 - DNA, 75 bp, Homo sapiens
aacactggattagaaaatgaatgggacagagttcttcatctgagacatagggtggtccaggtagtaggaggaaga

SEQ ID NO: 176055 - DNA, 75 bp, Homo sapiens
acactggattagaaaatgaatgggacagagttcttcatctgagacatagggtggtccaggtagtaggaggaagaa

SEQ ID NO: 176056 - DNA, 76 bp, Homo sapiens
attagaaaatgaatgggacagagttcttcatctgagacatagggtggtccaggtagtaggaggaagaaggattgca

SEQ ID NO: 176057 - DNA, 79 bp, Homo sapiens
acagagttcttcatctgagacatagggtggtccaggtagtaggaggaagaaggattgcagcgcagcagtcctcgggaca

SEQ ID NO: 176058 - DNA, 78 bp, Homo sapiens
agttcttcatctgagacatagggtggtccaggtagtaggaggaagaaggattgcagcgcagcagtcctcgggacacca

SEQ ID NO: 176059 - DNA, 79 bp, Homo sapiens
ttcttcatctgagacatagggtggtccaggtagtaggaggaagaaggattgcagcgcagcagtcctcgggacaccacca

SEQ ID NO: 176060 - DNA, 73 bp, Homo sapiens
atagggtggtccaggtagtaggaggaagaaggattgcagcgcagcagtcctcgggacaccaccagggggtgaa

SEQ ID NO: 176061 - DNA, 74 bp, Homo sapiens
tggtccaggtagtaggaggaagaaggattgcagcgcagcagtcctcgggacaccaccagggggtgaacgaagga

SEQ ID NO: 176062 - DNA, 72 bp, Homo sapiens
tagtaggaggaagaaggattgcagcgcagcagtcctcgggacaccaccagggggtgaacgaaggagggacgg

SEQ ID NO: 176063 - DNA, 73 bp, Homo sapiens
agcgcagcagtcctcgggacaccaccagggggtgaacgaaggagggacgggggagctgtgcaggtgccccagc

SEQ ID NO: 176064 - DNA, 69 bp, Homo sapiens
agtcctcgggacaccaccagggggtgaacgaaggagggacgggggagctgtgcaggtgccccagctcct

SEQ ID NO: 176065 - DNA, 69 bp, Homo sapiens
accagggggtgaacgaaggagggacgggggagctgtgcaggtgccccagctccttgggttgcacagggt

SEQ ID NO: 176066 - DNA, 73 bp, Homo sapiens
ggtgaacgaaggagggacgggggagctgtgcaggtgccccagctccttgggttgcacagggttgaagaccaga

SEQ ID NO: 176067 - DNA, 72 bp, Homo sapiens
agggacgggggagctgtgcaggtgccccagctccttgggttgcacagggttgaagaccagacccaagaaatg

SEQ ID NO: 176068 - DNA, 74 bp, Homo sapiens
ggtgccccagctccttgggttgcacagggttgaagaccagacccaagaaatggggccttgaccagctcagcaaa

SEQ ID NO: 176069 - DNA, 75 bp, Homo sapiens
agctccttgggttgcacagggttgaagaccagacccaagaaatggggccttgaccagctcagcaaactgagaatg

SEQ ID NO: 176070 - DNA, 77 bp, Homo sapiens
gttgcacagggttgaagaccagacccaagaaatggggccttgaccagctcagcaaactgagaatggcctagatttca

SEQ ID NO: 176071 - DNA, 78 bp, Homo sapiens
gttgaagaccagacccaagaaatggggccttgaccagctcagcaaactgagaatggcctagatttcagcacactttca

SEQ ID NO: 176072 - DNA, 76 bp, Homo sapiens
acccaagaaatggggccttgaccagctcagcaaactgagaatggcctagatttcagcacactttcaccaggatttg

SEQ ID NO: 176073 - DNA, 78 bp, Homo sapiens
aaatggggccttgaccagctcagcaaactgagaatggcctagatttcagcacactttcaccaggatttgtcaaatgaa

SEQ ID NO: 176074 - DNA, 80 bp, Homo sapiens
ttgaccagctcagcaaactgagaatggcctagatttcagcacactttcaccaggatttgtcaaatgaaggaagattccaa

SEQ ID NO: 176075 - DNA, 76 bp, Homo sapiens
aaactgagaatggcctagatttcagcacactttcaccaggatttgtcaaatgaaggaagattccaagcgcaaaata

SEQ ID NO: 176076 - DNA, 75 bp, Homo sapiens
agaatggcctagatttcagcacactttcaccaggatttgtcaaatgaaggaagattccaagcgcaaaatacccta

SEQ ID NO: 176077 - DNA, 75 bp, Homo sapiens
tagatttcagcacactttcaccaggatttgtcaaatgaaggaagattccaagcgcaaaataccctagatttcaac

SEQ ID NO: 176078 - DNA, 70 bp, Homo sapiens
actttcaccaggatttgtcaaatgaaggaagattccaagcgcaaaataccctagatttcaaccagtaaaa

SEQ ID NO: 176079 - DNA, 71 bp, Homo sapiens
atttgtcaaatgaaggaagattccaagcgcaaaataccctagatttcaaccagtaaaagcttgtctgaaaa

SEQ ID NO: 176080 - DNA, 70 bp, Homo sapiens
aatgaaggaagattccaagcgcaaaataccctagatttcaaccagtaaaagcttgtctgaaaacttccaa

SEQ ID NO: 176081 - DNA, 70 bp, Homo sapiens
ttccaagcgcaaaataccctagatttcaaccagtaaaagcttgtctgaaaacttccaagatcgggttgta

SEQ ID NO: 176082 - DNA, 68 bp, Homo sapiens
aaaataccctagatttcaaccagtaaaagcttgtctgaaaacttccaagatcgggttgtacaacttga

SEQ ID NO: 176083 - DNA, 70 bp, Homo sapiens
accctagatttcaaccagtaaaagcttgtctgaaaacttccaagatcgggttgtacaacttgacatttga

SEQ ID NO: 176084 - DNA, 72 bp, Homo sapiens
aaagcttgtctgaaaacttccaagatcgggttgtacaacttgacatttgaggaaacgctacttcagtagatg

SEQ ID NO: 176085 - DNA, 76 bp, Homo sapiens
aagatcgggttgtacaacttgacatttgaggaaacgctacttcagtagatggtgctgtggcattgttttctgaaca

SEQ ID NO: 176086 - DNA, 77 bp, Homo sapiens
ttgtacaacttgacatttgaggaaacgctacttcagtagatggtgctgtggcattgttttctgaacaactgaaggag

SEQ ID NO: 176087 - DNA, 77 bp, Homo sapiens
atttgaggaaacgctacttcagtagatggtgctgtggcattgttttctgaacaactgaaggaggagactccagagaa

SEQ ID NO: 176088 - DNA, 78 bp, Homo sapiens
cttcagtagatggtgctgtggcattgttttctgaacaactgaaggaggagactccagagaagggtacctgctggagac

SEQ ID NO: 176089 - DNA, 75 bp, Homo sapiens
ctgtggcattgttttctgaacaactgaaggaggagactccagagaagggtacctgctggagacctgtgtggtttg

SEQ ID NO: 176090 - DNA, 72 bp, Homo sapiens
attgttttctgaacaactgaaggaggagactccagagaagggtacctgctggagacctgtgtggtttgtggg

SEQ ID NO: 176091 - DNA, 73 bp, Homo sapiens
aggagactccagagaagggtacctgctggagacctgtgtggtttgtggggtgggtttcttatatcactgaatc

SEQ ID NO: 176092 - DNA, 72 bp, Homo sapiens
actccagagaagggtacctgctggagacctgtgtggtttgtggggtgggtttcttatatcactgaatctaaa

SEQ ID NO: 176093 - DNA, 74 bp, Homo sapiens
tacctgctggagacctgtgtggtttgtggggtgggtttcttatatcactgaatctaaagtgggtgcctttcaga

SEQ ID NO: 176094 - DNA, 73 bp, Homo sapiens
gacctgtgtggtttgtggggtgggtttcttatatcactgaatctaaagtgggtgcctttcagaatgtgcttta

SEQ ID NO: 176095 - DNA, 75 bp, Homo sapiens
tgggtttcttatatcactgaatctaaagtgggtgcctttcagaatgtgctttactaataatgtgttactctgctt

SEQ ID NO: 176096 - DNA, 73 bp, Homo sapiens
actgaatctaaagtgggtgcctttcagaatgtgctttactaataatgtgttactctgcttttaattatacttc

SEQ ID NO: 176097 - DNA, 73 bp, Homo sapiens
tcagaatgtgctttactaataatgtgttactctgcttttaattatacttctaataatttttcccaagagccta

SEQ ID NO: 176098 - DNA, 70 bp, Homo sapiens
gtgctttactaataatgtgttactctgcttttaattatacttctaataatttttcccaagagcctaatta

SEQ ID NO: 176099 - DNA, 71 bp, Homo sapiens
tgtgttactctgcttttaattatacttctaataatttttcccaagagcctaattaacttacgatctcacag

SEQ ID NO: 176100 - DNA, 70 bp, Homo sapiens
ctctgcttttaattatacttctaataatttttcccaagagcctaattaacttacgatctcacagttggta

SEQ ID NO: 176101 - DNA, 70 bp, Homo sapiens
tatacttctaataatttttcccaagagcctaattaacttacgatctcacagttggtaaagaattacagga

SEQ ID NO: 176102 - DNA, 72 bp, Homo sapiens
ataatttttcccaagagcctaattaacttacgatctcacagttggtaaagaattacaggatgtcattgcgtg

SEQ ID NO: 176103 - DNA, 73 bp, Homo sapiens
ttttcccaagagcctaattaacttacgatctcacagttggtaaagaattacaggatgtcattgcgtggatttc

SEQ ID NO: 176104 - DNA, 78 bp, Homo sapiens
tacgatctcacagttggtaaagaattacaggatgtcattgcgtggatttctgtgggcagtcacccggagtggtatcta

SEQ ID NO: 176105 - DNA, 74 bp, Homo sapiens
acagttggtaaagaattacaggatgtcattgcgtggatttctgtgggcagtcacccggagtggtatctaattag

SEQ ID NO: 176106 - DNA, 72 bp, Homo sapiens
aaagaattacaggatgtcattgcgtggatttctgtgggcagtcacccggagtggtatctaattagggaaaag

SEQ ID NO: 176107 - DNA, 73 bp, Homo sapiens
atgtcattgcgtggatttctgtgggcagtcacccggagtggtatctaattagggaaaaggcagtatgtccctt

SEQ ID NO: 176108 - DNA, 72 bp, Homo sapiens
tggatttctgtgggcagtcacccggagtggtatctaattagggaaaaggcagtatgtccctttctggaagtg

SEQ ID NO: 176109 - DNA, 72 bp, Homo sapiens
tgggcagtcacccggagtggtatctaattagggaaaaggcagtatgtccctttctggaagtgtgttaactga

SEQ ID NO: 176110 - DNA, 68 bp, Homo sapiens
acccggagtggtatctaattagggaaaaggcagtatgtccctttctggaagtgtgttaactgaaaata

SEQ ID NO: 176111 - DNA, 70 bp, Homo sapiens
tatctaattagggaaaaggcagtatgtccctttctggaagtgtgttaactgaaaatacggtactaagcaa

SEQ ID NO: 176112 - DNA, 70 bp, Homo sapiens
gggaaaaggcagtatgtccctttctggaagtgtgttaactgaaaatacggtactaagcaactgctaaata

SEQ ID NO: 176113 - DNA, 70 bp, Homo sapiens
aaggcagtatgtccctttctggaagtgtgttaactgaaaatacggtactaagcaactgctaaataaatta

SEQ ID NO: 176114 - DNA, 69 bp, Homo sapiens
ctttctggaagtgtgttaactgaaaatacggtactaagcaactgctaaataaattagccctccttcctc

SEQ ID NO: 176115 - DNA, 72 bp, Homo sapiens
taactgaaaatacggtactaagcaactgctaaataaattagccctccttcctcctggccgtgcgcagaaaca

SEQ ID NO: 176116 - DNA, 74 bp, Homo sapiens
aaataaattagccctccttcctcctggccgtgcgcagaaacatccctgcagtatgttgcctatttgtcaaataa

SEQ ID NO: 176117 - DNA, 76 bp, Homo sapiens
ccttcctcctggccgtgcgcagaaacatccctgcagtatgttgcctatttgtcaaataagattagtgtaaatatgg

SEQ ID NO: 176118 - DNA, 78 bp, Homo sapiens
tcctggccgtgcgcagaaacatccctgcagtatgttgcctatttgtcaaataagattagtgtaaatatggggcattta

SEQ ID NO: 176119 - DNA, 75 bp, Homo sapiens
agaaacatccctgcagtatgttgcctatttgtcaaataagattagtgtaaatatggggcatttacctttgctata

SEQ ID NO: 176120 - DNA, 76 bp, Homo sapiens
ctgcagtatgttgcctatttgtcaaataagattagtgtaaatatggggcatttacctttgctatagaagctgaaat

SEQ ID NO: 176121 - DNA, 76 bp, Homo sapiens
tatgttgcctatttgtcaaataagattagtgtaaatatggggcatttacctttgctatagaagctgaaattgccag

SEQ ID NO: 176122 - DNA, 75 bp, Homo sapiens
tatttgtcaaataagattagtgtaaatatggggcatttacctttgctatagaagctgaaattgccaggcacggtg

SEQ ID NO: 176123 - DNA, 76 bp, Homo sapiens
aaaaaaaaaagctgaaatccttgagtggattctaaatcatggcagtggctaacattcagcttcatcgtgcccttgc

SEQ ID NO: 176124 - DNA, 81 bp, Homo sapiens
aaaaagctgaaatccttgagtggattctaaatcatggcagtggctaacattcagcttcatcgtgcccttgctgtgtgcctg

SEQ ID NO: 176125 - DNA, 84 bp, Homo sapiens
aatccttgagtggattctaaatcatggcagtggctaacattcagcttcatcgtgcccttgctgtgtgcctggcagagacctctg

SEQ ID NO: 176126 - DNA, 86 bp, Homo sapiens
attctaaatcatggcagtggctaacattcagcttcatcgtgcccttgctgtgtgcctggcagagacctctgtgcttactacatgtc

SEQ ID NO: 176127 - DNA, 89 bp, Homo sapiens
atggcagtggctaacattcagcttcatcgtgcccttgctgtgtgcctggcagagacctctgtgcttactacatgtcgcatctcattgaa

SEQ ID NO: 176128 - DNA, 88 bp, Homo sapiens
ctaacattcagcttcatcgtgcccttgctgtgtgcctggcagagacctctgtgcttactacatgtcgcatctcattgaatcctcacaa

SEQ ID NO: 176129 - DNA, 86 bp, Homo sapiens
ttcatcgtgcccttgctgtgtgcctggcagagacctctgtgcttactacatgtcgcatctcattgaatcctcacaaccttaagatc

SEQ ID NO: 176130 - DNA, 83 bp, Homo sapiens
ccttgctgtgtgcctggcagagacctctgtgcttactacatgtcgcatctcattgaatcctcacaaccttaagatccttccag

SEQ ID NO: 176131 - DNA, 85 bp, Homo sapiens
tgtgcctggcagagacctctgtgcttactacatgtcgcatctcattgaatcctcacaaccttaagatccttccaggttgagcatc

SEQ ID NO: 176132 - DNA, 80 bp, Homo sapiens
agagacctctgtgcttactacatgtcgcatctcattgaatcctcacaaccttaagatccttccaggttgagcatcccgga

SEQ ID NO: 176133 - DNA, 77 bp, Homo sapiens
tgcttactacatgtcgcatctcattgaatcctcacaaccttaagatccttccaggttgagcatcccggaccctaaaa

SEQ ID NO: 176134 - DNA, 74 bp, Homo sapiens
atgtcgcatctcattgaatcctcacaaccttaagatccttccaggttgagcatcccggaccctaaaatcccaaa

SEQ ID NO: 176135 - DNA, 70 bp, Homo sapiens
cattgaatcctcacaaccttaagatccttccaggttgagcatcccggaccctaaaatcccaaatcctaaa

SEQ ID NO: 176136 - DNA, 70 bp, Homo sapiens
aatcctcacaaccttaagatccttccaggttgagcatcccggaccctaaaatcccaaatcctaaatgctc

SEQ ID NO: 176137 - DNA, 69 bp, Homo sapiens
ttaagatccttccaggttgagcatcccggaccctaaaatcccaaatcctaaatgctcccaaatccaaaa

SEQ ID NO: 176138 - DNA, 66 bp, Homo sapiens
ccttccaggttgagcatcccggaccctaaaatcccaaatcctaaatgctcccaaatccaaaacttt

SEQ ID NO: 176139 - DNA, 76 bp, Homo sapiens
ctaaaatcccaaatcctaaatgctcccaaatccaaaactttttgagcaccggcatgcagctcagaggaaatgcata

SEQ ID NO: 176140 - DNA, 76 bp, Homo sapiens
aaatcctaaatgctcccaaatccaaaactttttgagcaccggcatgcagctcagaggaaatgcatactggaacatt

SEQ ID NO: 176141 - DNA, 78 bp, Homo sapiens
taaatgctcccaaatccaaaactttttgagcaccggcatgcagctcagaggaaatgcatactggaacatttcagattt

SEQ ID NO: 176142 - DNA, 75 bp, Homo sapiens
aaaactttttgagcaccggcatgcagctcagaggaaatgcatactggaacatttcagattttggattttctaatt

SEQ ID NO: 176143 - DNA, 81 bp, Homo sapiens
atgcagctcagaggaaatgcatactggaacatttcagattttggattttctaatttggagtgctcatctggtaatatagtg

SEQ ID NO: 176144 - DNA, 77 bp, Homo sapiens
aggaaatgcatactggaacatttcagattttggattttctaatttggagtgctcatctggtaatatagtgtggatat

SEQ ID NO: 176145 - DNA, 75 bp, Homo sapiens
atactggaacatttcagattttggattttctaatttggagtgctcatctggtaatatagtgtggatattccccaa

SEQ ID NO: 176146 - DNA, 76 bp, Homo sapiens
aacatttcagattttggattttctaatttggagtgctcatctggtaatatagtgtggatattccccaatctgcaaa

SEQ ID NO: 176147 - DNA, 78 bp, Homo sapiens
attttggattttctaatttggagtgctcatctggtaatatagtgtggatattccccaatctgcaaagatctgagctcc

SEQ ID NO: 176148 - DNA, 79 bp, Homo sapiens
ggattttctaatttggagtgctcatctggtaatatagtgtggatattccccaatctgcaaagatctgagctccgaaaca

SEQ ID NO: 176149 - DNA, 80 bp, Homo sapiens
ttctaatttggagtgctcatctggtaatatagtgtggatattccccaatctgcaaagatctgagctccgaaacacttgta

SEQ ID NO: 176150 - DNA, 79 bp, Homo sapiens
tgctcatctggtaatatagtgtggatattccccaatctgcaaagatctgagctccgaaacacttgtagccccaagcctt

SEQ ID NO: 176151 - DNA, 77 bp, Homo sapiens
atctggtaatatagtgtggatattccccaatctgcaaagatctgagctccgaaacacttgtagccccaagcctttca

SEQ ID NO: 176152 - DNA, 75 bp, Homo sapiens
aatatagtgtggatattccccaatctgcaaagatctgagctccgaaacacttgtagccccaagcctttcagttaa

SEQ ID NO: 176153 - DNA, 74 bp, Homo sapiens
atattccccaatctgcaaagatctgagctccgaaacacttgtagccccaagcctttcagttaagggacattcac

SEQ ID NO: 176154 - DNA, 75 bp, Homo sapiens
tgcaaagatctgagctccgaaacacttgtagccccaagcctttcagttaagggacattcaccctgtatcaacatt

SEQ ID NO: 176155 - DNA, 72 bp, Homo sapiens
atctgagctccgaaacacttgtagccccaagcctttcagttaagggacattcaccctgtatcaacattttaa

SEQ ID NO: 176156 - DNA, 71 bp, Homo sapiens
aaacacttgtagccccaagcctttcagttaagggacattcaccctgtatcaacattttaatgctgagaaaa

SEQ ID NO: 176157 - DNA, 73 bp, Homo sapiens
aagcctttcagttaagggacattcaccctgtatcaacattttaatgctgagaaaatggaagagagagaggtta

SEQ ID NO: 176158 - DNA, 75 bp, Homo sapiens
ttaagggacattcaccctgtatcaacattttaatgctgagaaaatggaagagagagaggttaagtgactgacctg

SEQ ID NO: 176159 - DNA, 80 bp, Homo sapiens
attcaccctgtatcaacattttaatgctgagaaaatggaagagagagaggttaagtgactgacctggcatcacacagcca

SEQ ID NO: 176160 - DNA, 85 bp, Homo sapiens
tatcaacattttaatgctgagaaaatggaagagagagaggttaagtgactgacctggcatcacacagccaggagtggcagcatca

SEQ ID NO: 176161 - DNA, 84 bp, Homo sapiens
ttaatgctgagaaaatggaagagagagaggttaagtgactgacctggcatcacacagccaggagtggcagcatcaggatttgaa

SEQ ID NO: 176162 - DNA, 81 bp, Homo sapiens
aaaatggaagagagagaggttaagtgactgacctggcatcacacagccaggagtggcagcatcaggatttgaactggggca

SEQ ID NO: 176163 - DNA, 84 bp, Homo sapiens
agaggttaagtgactgacctggcatcacacagccaggagtggcagcatcaggatttgaactggggcactcagctccaaagctca

SEQ ID NO: 176164 - DNA, 85 bp, Homo sapiens
tgactgacctggcatcacacagccaggagtggcagcatcaggatttgaactggggcactcagctccaaagctcagctcttctttt

SEQ ID NO: 176165 - DNA, 82 bp, Homo sapiens
ctggcatcacacagccaggagtggcagcatcaggatttgaactggggcactcagctccaaagctcagctcttcttttttaaa

SEQ ID NO: 176166 - DNA, 78 bp, Homo sapiens
acagccaggagtggcagcatcaggatttgaactggggcactcagctccaaagctcagctcttcttttttaaaattgaa

SEQ ID NO: 176167 - DNA, 77 bp, Homo sapiens
tggcagcatcaggatttgaactggggcactcagctccaaagctcagctcttcttttttaaaattgaacccagattct

SEQ ID NO: 176168 - DNA, 71 bp, Homo sapiens
aggatttgaactggggcactcagctccaaagctcagctcttcttttttaaaattgaacccagattcttatt

SEQ ID NO: 176169 - DNA, 71 bp, Homo sapiens
gctcagctcttcttttttaaaattgaacccagattcttatttctcaaataccataaaatatttacataagc

SEQ ID NO: 176170 - DNA, 68 bp, Homo sapiens
acccagattcttatttctcaaataccataaaatatttacataagccacagttatgccttttaaaaaaa

SEQ ID NO: 176171 - DNA, 67 bp, Homo sapiens
taaaaaaaaatcaccttttccccccactctcccatttacttcctttgcagtttgtggctacgatcta

SEQ ID NO: 176172 - DNA, 69 bp, Homo sapiens
cccccactctcccatttacttcctttgcagtttgtggctacgatctaccttcctcttcaaaacccttga

SEQ ID NO: 176173 - DNA, 68 bp, Homo sapiens
tcccatttacttcctttgcagtttgtggctacgatctaccttcctcttcaaaacccttgaaaaatcct

SEQ ID NO: 176174 - DNA, 70 bp, Homo sapiens
ttacttcctttgcagtttgtggctacgatctaccttcctcttcaaaacccttgaaaaatccttgcagcct

SEQ ID NO: 176175 - DNA, 71 bp, Homo sapiens
tttgtggctacgatctaccttcctcttcaaaacccttgaaaaatccttgcagccttgcccaagcgtccttc

SEQ ID NO: 176176 - DNA, 71 bp, Homo sapiens
ggctacgatctaccttcctcttcaaaacccttgaaaaatccttgcagccttgcccaagcgtccttccctca

SEQ ID NO: 176177 - DNA, 69 bp, Homo sapiens
taccttcctcttcaaaacccttgaaaaatccttgcagccttgcccaagcgtccttccctcagccgattt

SEQ ID NO: 176178 - DNA, 71 bp, Homo sapiens
tcttcaaaacccttgaaaaatccttgcagccttgcccaagcgtccttccctcagccgatttttgggcctca

SEQ ID NO: 176179 - DNA, 69 bp, Homo sapiens
aacccttgaaaaatccttgcagccttgcccaagcgtccttccctcagccgatttttgggcctcagtttc

SEQ ID NO: 176180 - DNA, 78 bp, Homo sapiens
ctcagtttcctcccatccagcctgtttcctatcgctggcttctccaagggcagagccagagtcctcttttgccagcag

SEQ ID NO: 176181 - DNA, 76 bp, Homo sapiens
tttcctcccatccagcctgtttcctatcgctggcttctccaagggcagagccagagtcctcttttgccagcagggg

SEQ ID NO: 176182 - DNA, 76 bp, Homo sapiens
agcctgtttcctatcgctggcttctccaagggcagagccagagtcctcttttgccagcagggggagcaagggccta

SEQ ID NO: 176183 - DNA, 75 bp, Homo sapiens
ttcctatcgctggcttctccaagggcagagccagagtcctcttttgccagcagggggagcaagggcctactttta

SEQ ID NO: 176184 - DNA, 74 bp, Homo sapiens
tctccaagggcagagccagagtcctcttttgccagcagggggagcaagggcctacttttaaccgcaactccata

SEQ ID NO: 176185 - DNA, 73 bp, Homo sapiens
cagagccagagtcctcttttgccagcagggggagcaagggcctacttttaaccgcaactccatagtgaacaag

SEQ ID NO: 176186 - DNA, 72 bp, Homo sapiens
agtcctcttttgccagcagggggagcaagggcctacttttaaccgcaactccatagtgaacaagtcaagcaa

SEQ ID NO: 176187 - DNA, 71 bp, Homo sapiens
cttttgccagcagggggagcaagggcctacttttaaccgcaactccatagtgaacaagtcaagcaaccttg

SEQ ID NO: 176188 - DNA, 71 bp, Homo sapiens
aagggcctacttttaaccgcaactccatagtgaacaagtcaagcaaccttgggtcattcatataccttcca

SEQ ID NO: 176189 - DNA, 74 bp, Homo sapiens
ttttaaccgcaactccatagtgaacaagtcaagcaaccttgggtcattcatataccttccaggcagaaggaaga

SEQ ID NO: 176190 - DNA, 76 bp, Homo sapiens
aactccatagtgaacaagtcaagcaaccttgggtcattcatataccttccaggcagaaggaagacagaagagaaca

SEQ ID NO: 176191 - DNA, 72 bp, Homo sapiens
aacaagtcaagcaaccttgggtcattcatataccttccaggcagaaggaagacagaagagaacaggaaaaaa

SEQ ID NO: 176192 - DNA, 72 bp, Homo sapiens
aaccttgggtcattcatataccttccaggcagaaggaagacagaagagaacaggaaaaaagcaggacactag

SEQ ID NO: 176193 - DNA, 74 bp, Homo sapiens
gggtcattcatataccttccaggcagaaggaagacagaagagaacaggaaaaaagcaggacactaggctgaccc

SEQ ID NO: 176194 - DNA, 76 bp, Homo sapiens
attcatataccttccaggcagaaggaagacagaagagaacaggaaaaaagcaggacactaggctgacccctgcaga

SEQ ID NO: 176195 - DNA, 76 bp, Homo sapiens
tataccttccaggcagaaggaagacagaagagaacaggaaaaaagcaggacactaggctgacccctgcagatggga

SEQ ID NO: 176196 - DNA, 75 bp, Homo sapiens
aggcagaaggaagacagaagagaacaggaaaaaagcaggacactaggctgacccctgcagatgggaagctggaat

SEQ ID NO: 176197 - DNA, 75 bp, Homo sapiens
agaaggaagacagaagagaacaggaaaaaagcaggacactaggctgacccctgcagatgggaagctggaattaca

SEQ ID NO: 176198 - DNA, 78 bp, Homo sapiens
aaaaagcaggacactaggctgacccctgcagatgggaagctggaattacagcaaaggctcattgattgggaactgcac

SEQ ID NO: 176199 - DNA, 77 bp, Homo sapiens
acactaggctgacccctgcagatgggaagctggaattacagcaaaggctcattgattgggaactgcacccttgaatt

SEQ ID NO: 176200 - DNA, 76 bp, Homo sapiens
acccctgcagatgggaagctggaattacagcaaaggctcattgattgggaactgcacccttgaattttgatagtat

SEQ ID NO: 176201 - DNA, 77 bp, Homo sapiens
atgggaagctggaattacagcaaaggctcattgattgggaactgcacccttgaattttgatagtattgggcaggaca

SEQ ID NO: 176202 - DNA, 79 bp, Homo sapiens
tggaattacagcaaaggctcattgattgggaactgcacccttgaattttgatagtattgggcaggacatagtcttgcta

SEQ ID NO: 176203 - DNA, 78 bp, Homo sapiens
caaaggctcattgattgggaactgcacccttgaattttgatagtattgggcaggacatagtcttgctatctgtgttaa

SEQ ID NO: 176204 - DNA, 75 bp, Homo sapiens
attgattgggaactgcacccttgaattttgatagtattgggcaggacatagtcttgctatctgtgttaaagggag

SEQ ID NO: 176205 - DNA, 75 bp, Homo sapiens
actgcacccttgaattttgatagtattgggcaggacatagtcttgctatctgtgttaaagggaggacgtgcttaa

SEQ ID NO: 176206 - DNA, 74 bp, Homo sapiens
tgaattttgatagtattgggcaggacatagtcttgctatctgtgttaaagggaggacgtgcttaagaaaaccaa

SEQ ID NO: 176207 - DNA, 75 bp, Homo sapiens
tttgatagtattgggcaggacatagtcttgctatctgtgttaaagggaggacgtgcttaagaaaaccaacagtca

SEQ ID NO: 176208 - DNA, 74 bp, Homo sapiens
ttgggcaggacatagtcttgctatctgtgttaaagggaggacgtgcttaagaaaaccaacagtcaagtacaaga

SEQ ID NO: 176209 - DNA, 71 bp, Homo sapiens
tcttgctatctgtgttaaagggaggacgtgcttaagaaaaccaacagtcaagtacaagaagctctaatttt

SEQ ID NO: 176210 - DNA, 68 bp, Homo sapiens
ctatctgtgttaaagggaggacgtgcttaagaaaaccaacagtcaagtacaagaagctctaatttttt

SEQ ID NO: 176211 - DNA, 67 bp, Homo sapiens
taaagggaggacgtgcttaagaaaaccaacagtcaagtacaagaagctctaattttttttgaggtgg

SEQ ID NO: 176212 - DNA, 65 bp, Homo sapiens
acgtgcttaagaaaaccaacagtcaagtacaagaagctctaattttttttgaggtgggggaacgg

SEQ ID NO: 176213 - DNA, 75 bp, Homo sapiens
ctgtgcccagctaagaggctgcaattttttaatgaactgtattcagagtttgtacatcagtgtcttttttttcta

SEQ ID NO: 176214 - DNA, 74 bp, Homo sapiens
cccagctaagaggctgcaattttttaatgaactgtattcagagtttgtacatcagtgtcttttttttctatgaa

SEQ ID NO: 176215 - DNA, 75 bp, Homo sapiens
gctgcaattttttaatgaactgtattcagagtttgtacatcagtgtcttttttttctatgaatcagttctctaag

SEQ ID NO: 176216 - DNA, 75 bp, Homo sapiens
taatgaactgtattcagagtttgtacatcagtgtcttttttttctatgaatcagttctctaagtaatagaatttg

SEQ ID NO: 176217 - DNA, 74 bp, Homo sapiens
gaactgtattcagagtttgtacatcagtgtcttttttttctatgaatcagttctctaagtaatagaatttggaa

SEQ ID NO: 176218 - DNA, 73 bp, Homo sapiens
actgtattcagagtttgtacatcagtgtcttttttttctatgaatcagttctctaagtaatagaatttggaaa

SEQ ID NO: 176219 - DNA, 73 bp, Homo sapiens
tcagagtttgtacatcagtgtcttttttttctatgaatcagttctctaagtaatagaatttggaaaagaccgc

SEQ ID NO: 176220 - DNA, 75 bp, Homo sapiens
tgtacatcagtgtcttttttttctatgaatcagttctctaagtaatagaatttggaaaagaccgctggtgatcta

SEQ ID NO: 176221 - DNA, 75 bp, Homo sapiens
tacatcagtgtcttttttttctatgaatcagttctctaagtaatagaatttggaaaagaccgctggtgatctagc

SEQ ID NO: 176222 - DNA, 77 bp, Homo sapiens
tttttctatgaatcagttctctaagtaatagaatttggaaaagaccgctggtgatctagctgtggcatttagattga

SEQ ID NO: 176223 - DNA, 81 bp, Homo sapiens
ttctatgaatcagttctctaagtaatagaatttggaaaagaccgctggtgatctagctgtggcatttagattgactcatga

SEQ ID NO: 176224 - DNA, 80 bp, Homo sapiens
tctctaagtaatagaatttggaaaagaccgctggtgatctagctgtggcatttagattgactcatgagctaactgacaaa

SEQ ID NO: 176225 - DNA, 78 bp, Homo sapiens
aatagaatttggaaaagaccgctggtgatctagctgtggcatttagattgactcatgagctaactgacaaatttacta

SEQ ID NO: 176226 - DNA, 77 bp, Homo sapiens
tttggaaaagaccgctggtgatctagctgtggcatttagattgactcatgagctaactgacaaatttactacttaaa

SEQ ID NO: 176227 - DNA, 78 bp, Homo sapiens
ctggtgatctagctgtggcatttagattgactcatgagctaactgacaaatttactacttaaacagtggaaaataatg

SEQ ID NO: 176228 - DNA, 71 bp, Homo sapiens
gctaactgacaaatttactacttaaacagtggaaaataatgtgcaggatatatttttttgaataggttgtc

SEQ ID NO: 176229 - DNA, 69 bp, Homo sapiens
ttactacttaaacagtggaaaataatgtgcaggatatatttttttgaataggttgtcccaccctcgagt

SEQ ID NO: 176230 - DNA, 72 bp, Homo sapiens
aggatatatttttttgaataggttgtcccaccctcgagttctgtgtctttcctgagtccgcatatgtgaacc

SEQ ID NO: 176231 - DNA, 71 bp, Homo sapiens
tttttgaataggttgtcccaccctcgagttctgtgtctttcctgagtccgcatatgtgaaccttgttttaa

SEQ ID NO: 176232 - DNA, 70 bp, Homo sapiens
aataggttgtcccaccctcgagttctgtgtctttcctgagtccgcatatgtgaaccttgttttaaccagg

SEQ ID NO: 176233 - DNA, 76 bp, Homo sapiens
tcccaccctcgagttctgtgtctttcctgagtccgcatatgtgaaccttgttttaaccaggtgacagcatcccata

SEQ ID NO: 176234 - DNA, 78 bp, Homo sapiens
ctgtgtctttcctgagtccgcatatgtgaaccttgttttaaccaggtgacagcatcccataggcacggatctctgtct

SEQ ID NO: 176235 - DNA, 78 bp, Homo sapiens
tctttcctgagtccgcatatgtgaaccttgttttaaccaggtgacagcatcccataggcacggatctctgtcttctgt

SEQ ID NO: 176236 - DNA, 81 bp, Homo sapiens
catatgtgaaccttgttttaaccaggtgacagcatcccataggcacggatctctgtcttctgttgtccacatcatgtgtct

SEQ ID NO: 176237 - DNA, 79 bp, Homo sapiens
accttgttttaaccaggtgacagcatcccataggcacggatctctgtcttctgttgtccacatcatgtgtcttggcagt

SEQ ID NO: 176238 - DNA, 81 bp, Homo sapiens
ttaaccaggtgacagcatcccataggcacggatctctgtcttctgttgtccacatcatgtgtcttggcagttgttccttat

SEQ ID NO: 176239 - DNA, 80 bp, Homo sapiens
ataggcacggatctctgtcttctgttgtccacatcatgtgtcttggcagttgttccttattgatatacataaggttgtct

SEQ ID NO: 176240 - DNA, 78 bp, Homo sapiens
atctctgtcttctgttgtccacatcatgtgtcttggcagttgttccttattgatatacataaggttgtcttgtttttg

SEQ ID NO: 176241 - DNA, 79 bp, Homo sapiens
ttctgttgtccacatcatgtgtcttggcagttgttccttattgatatacataaggttgtcttgtttttgtatggatata

SEQ ID NO: 176242 - DNA, 77 bp, Homo sapiens
tccacatcatgtgtcttggcagttgttccttattgatatacataaggttgtcttgtttttgtatggatatattttaa

SEQ ID NO: 176243 - DNA, 73 bp, Homo sapiens
cttggcagttgttccttattgatatacataaggttgtcttgtttttgtatggatatattttaacatgtaccag

SEQ ID NO: 176244 - DNA, 74 bp, Homo sapiens
ttccttattgatatacataaggttgtcttgtttttgtatggatatattttaacatgtaccagtgttcagtgggc

SEQ ID NO: 176245 - DNA, 73 bp, Homo sapiens
gatatacataaggttgtcttgtttttgtatggatatattttaacatgtaccagtgttcagtgggcctttctct

SEQ ID NO: 176246 - DNA, 71 bp, Homo sapiens
aggttgtcttgtttttgtatggatatattttaacatgtaccagtgttcagtgggcctttctcttatttcca

SEQ ID NO: 176247 - DNA, 75 bp, Homo sapiens
tggatatattttaacatgtaccagtgttcagtgggcctttctcttatttccaatattttgctgttctaaacagca

SEQ ID NO: 176248 - DNA, 74 bp, Homo sapiens
attttaacatgtaccagtgttcagtgggcctttctcttatttccaatattttgctgttctaaacagcagcacag

SEQ ID NO: 176249 - DNA, 77 bp, Homo sapiens
agtgttcagtgggcctttctcttatttccaatattttgctgttctaaacagcagcacagtgattcccctcatttgca

SEQ ID NO: 176250 - DNA, 79 bp, Homo sapiens
tgggcctttctcttatttccaatattttgctgttctaaacagcagcacagtgattcccctcatttgcatgtatgtgaaa

SEQ ID NO: 176251 - DNA, 79 bp, Homo sapiens
tttctcttatttccaatattttgctgttctaaacagcagcacagtgattcccctcatttgcatgtatgtgaaactatcc

SEQ ID NO: 176252 - DNA, 78 bp, Homo sapiens
aatattttgctgttctaaacagcagcacagtgattcccctcatttgcatgtatgtgaaactatcctggtgggtccgct

SEQ ID NO: 176253 - DNA, 78 bp, Homo sapiens
aaacagcagcacagtgattcccctcatttgcatgtatgtgaaactatcctggtgggtccgcttccagaaactactgga

SEQ ID NO: 176254 - DNA, 76 bp, Homo sapiens
acagtgattcccctcatttgcatgtatgtgaaactatcctggtgggtccgcttccagaaactactggatcagggac

SEQ ID NO: 176255 - DNA, 79 bp, Homo sapiens
cctcatttgcatgtatgtgaaactatcctggtgggtccgcttccagaaactactggatcagggaccatgtgcatttatg

SEQ ID NO: 176256 - DNA, 76 bp, Homo sapiens
aaactatcctggtgggtccgcttccagaaactactggatcagggaccatgtgcatttatggccttgaccatactgc

SEQ ID NO: 176257 - DNA, 77 bp, Homo sapiens
ggtccgcttccagaaactactggatcagggaccatgtgcatttatggccttgaccatactgccagagtaccttccaa

SEQ ID NO: 176258 - DNA, 76 bp, Homo sapiens
agaaactactggatcagggaccatgtgcatttatggccttgaccatactgccagagtaccttccaaggagtttgtg

SEQ ID NO: 176259 - DNA, 78 bp, Homo sapiens
agggaccatgtgcatttatggccttgaccatactgccagagtaccttccaaggagtttgtgtcatcaatttgcactcc

SEQ ID NO: 176260 - DNA, 75 bp, Homo sapiens
atttatggccttgaccatactgccagagtaccttccaaggagtttgtgtcatcaatttgcactccccagtggtgt

SEQ ID NO: 176261 - DNA, 79 bp, Homo sapiens
tgaccatactgccagagtaccttccaaggagtttgtgtcatcaatttgcactccccagtggtgttgagagagtgcctgt

SEQ ID NO: 176262 - DNA, 77 bp, Homo sapiens
tactgccagagtaccttccaaggagtttgtgtcatcaatttgcactccccagtggtgttgagagagtgcctgtttcc

SEQ ID NO: 176263 - DNA, 75 bp, Homo sapiens
gtaccttccaaggagtttgtgtcatcaatttgcactccccagtggtgttgagagagtgcctgtttcctccaccca

SEQ ID NO: 176264 - DNA, 74 bp, Homo sapiens
tcaatttgcactccccagtggtgttgagagagtgcctgtttcctccacccagcacagtgtgtttcggttttatt

SEQ ID NO: 176265 - DNA, 72 bp, Homo sapiens
actccccagtggtgttgagagagtgcctgtttcctccacccagcacagtgtgtttcggttttatttctccca

SEQ ID NO: 176266 - DNA, 72 bp, Homo sapiens
agtggtgttgagagagtgcctgtttcctccacccagcacagtgtgtttcggttttatttctcccaggaaatg

SEQ ID NO: 176267 - DNA, 69 bp, Homo sapiens
agtgcctgtttcctccacccagcacagtgtgtttcggttttatttctcccaggaaatgggtgttagttg

SEQ ID NO: 176268 - DNA, 69 bp, Homo sapiens
tttcctccacccagcacagtgtgtttcggttttatttctcccaggaaatgggtgttagttggggagctc

SEQ ID NO: 176269 - DNA, 69 bp, Homo sapiens
acccagcacagtgtgtttcggttttatttctcccaggaaatgggtgttagttggggagctccagaaaga

SEQ ID NO: 176270 - DNA, 68 bp, Homo sapiens
tgtttcggttttatttctcccaggaaatgggtgttagttggggagctccagaaagaagccgagaagaa

SEQ ID NO: 176271 - DNA, 70 bp, Homo sapiens
tttatttctcccaggaaatgggtgttagttggggagctccagaaagaagccgagaagaagggcagtcgta

SEQ ID NO: 176272 - DNA, 69 bp, Homo sapiens
aggaaatgggtgttagttggggagctccagaaagaagccgagaagaagggcagtcgtacccttggcagt

SEQ ID NO: 176273 - DNA, 77 bp, Homo sapiens
gagctccagaaagaagccgagaagaagggcagtcgtacccttggcagttgtacgcagtggctctctggccgcacaag

SEQ ID NO: 176274 - DNA, 74 bp, Homo sapiens
agaaagaagccgagaagaagggcagtcgtacccttggcagttgtacgcagtggctctctggccgcacaaggagg

SEQ ID NO: 176275 - DNA, 77 bp, Homo sapiens
gaagaagggcagtcgtacccttggcagttgtacgcagtggctctctggccgcacaaggagggctcggagcctgctgt

SEQ ID NO: 176276 - DNA, 79 bp, Homo sapiens
agtcgtacccttggcagttgtacgcagtggctctctggccgcacaaggagggctcggagcctgctgttgccaggttgca

SEQ ID NO: 176277 - DNA, 84 bp, Homo sapiens
ttggcagttgtacgcagtggctctctggccgcacaaggagggctcggagcctgctgttgccaggttgcacttgctcttgcaaga

SEQ ID NO: 176278 - DNA, 82 bp, Homo sapiens
agttgtacgcagtggctctctggccgcacaaggagggctcggagcctgctgttgccaggttgcacttgctcttgcaagacag

SEQ ID NO: 176279 - DNA, 84 bp, Homo sapiens
agtggctctctggccgcacaaggagggctcggagcctgctgttgccaggttgcacttgctcttgcaagacaggcattccttgca

SEQ ID NO: 176280 - DNA, 81 bp, Homo sapiens
aggagggctcggagcctgctgttgccaggttgcacttgctcttgcaagacaggcattccttgcagtgggttctcctctggc

SEQ ID NO: 176281 - DNA, 83 bp, Homo sapiens
ctgctgttgccaggttgcacttgctcttgcaagacaggcattccttgcagtgggttctcctctggccagggagatgagttctg

SEQ ID NO: 176282 - DNA, 80 bp, Homo sapiens
gttgccaggttgcacttgctcttgcaagacaggcattccttgcagtgggttctcctctggccagggagatgagttctggg

SEQ ID NO: 176283 - DNA, 78 bp, Homo sapiens
acttgctcttgcaagacaggcattccttgcagtgggttctcctctggccagggagatgagttctgggggctcctctac

SEQ ID NO: 176284 - DNA, 75 bp, Homo sapiens
aagacaggcattccttgcagtgggttctcctctggccagggagatgagttctgggggctcctctacgaggtggtc

SEQ ID NO: 176285 - DNA, 74 bp, Homo sapiens
attccttgcagtgggttctcctctggccagggagatgagttctgggggctcctctacgaggtggtctctcctgg

SEQ ID NO: 176286 - DNA, 72 bp, Homo sapiens
agtgggttctcctctggccagggagatgagttctgggggctcctctacgaggtggtctctcctgggctttcc

SEQ ID NO: 176287 - DNA, 76 bp, Homo sapiens
tctggccagggagatgagttctgggggctcctctacgaggtggtctctcctgggctttcctctcgagcttcaagtc

SEQ ID NO: 176288 - DNA, 73 bp, Homo sapiens
agggagatgagttctgggggctcctctacgaggtggtctctcctgggctttcctctcgagcttcaagtcccac

SEQ ID NO: 176289 - DNA, 72 bp, Homo sapiens
agttctgggggctcctctacgaggtggtctctcctgggctttcctctcgagcttcaagtcccacctctggag

SEQ ID NO: 176290 - DNA, 76 bp, Homo sapiens
ctctacgaggtggtctctcctgggctttcctctcgagcttcaagtcccacctctggagtgtgaatcgccttcctca

SEQ ID NO: 176291 - DNA, 77 bp, Homo sapiens
tggtctctcctgggctttcctctcgagcttcaagtcccacctctggagtgtgaatcgccttcctcagtctaactcta

SEQ ID NO: 176292 - DNA, 76 bp, Homo sapiens
tgggctttcctctcgagcttcaagtcccacctctggagtgtgaatcgccttcctcagtctaactctatccctccag

SEQ ID NO: 176293 - DNA, 74 bp, Homo sapiens
tctcgagcttcaagtcccacctctggagtgtgaatcgccttcctcagtctaactctatccctccagtggttttt

SEQ ID NO: 176294 - DNA, 71 bp, Homo sapiens
agcttcaagtcccacctctggagtgtgaatcgccttcctcagtctaactctatccctccagtggttttttt

SEQ ID NO: 176295 - DNA, 81 bp, Homo sapiens
ccaccacacccagcagtctcttcagtgtatttagctgtgttgatcctgattcatctgatgggtgaaggaatattggaaata

SEQ ID NO: 176296 - DNA, 81 bp, Homo sapiens
caccacacccagcagtctcttcagtgtatttagctgtgttgatcctgattcatctgatgggtgaaggaatattggaaataa

SEQ ID NO: 176297 - DNA, 80 bp, Homo sapiens
agcagtctcttcagtgtatttagctgtgttgatcctgattcatctgatgggtgaaggaatattggaaataaggataatcc

SEQ ID NO: 176298 - DNA, 79 bp, Homo sapiens
tcagtgtatttagctgtgttgatcctgattcatctgatgggtgaaggaatattggaaataaggataatccctgtggtgt

SEQ ID NO: 176299 - DNA, 78 bp, Homo sapiens
tatttagctgtgttgatcctgattcatctgatgggtgaaggaatattggaaataaggataatccctgtggtgtttcac

SEQ ID NO: 176300 - DNA, 79 bp, Homo sapiens
tgttgatcctgattcatctgatgggtgaaggaatattggaaataaggataatccctgtggtgtttcactgtgcctgtaa

SEQ ID NO: 176301 - DNA, 77 bp, Homo sapiens
attcatctgatgggtgaaggaatattggaaataaggataatccctgtggtgtttcactgtgcctgtaacctctctca

SEQ ID NO: 176302 - DNA, 75 bp, Homo sapiens
gtgaaggaatattggaaataaggataatccctgtggtgtttcactgtgcctgtaacctctctcacctagcatttg

SEQ ID NO: 176303 - DNA, 73 bp, Homo sapiens
aatattggaaataaggataatccctgtggtgtttcactgtgcctgtaacctctctcacctagcatttggttaa

SEQ ID NO: 176304 - DNA, 72 bp, Homo sapiens
aaataaggataatccctgtggtgtttcactgtgcctgtaacctctctcacctagcatttggttaaccagaaa

SEQ ID NO: 176305 - DNA, 74 bp, Homo sapiens
aatccctgtggtgtttcactgtgcctgtaacctctctcacctagcatttggttaaccagaaacagatgtggaaa

SEQ ID NO: 176306 - DNA, 79 bp, Homo sapiens
ttcactgtgcctgtaacctctctcacctagcatttggttaaccagaaacagatgtggaaactgatctatctgtagataa

SEQ ID NO: 176307 - DNA, 80 bp, Homo sapiens
tgtaacctctctcacctagcatttggttaaccagaaacagatgtggaaactgatctatctgtagataatggccctgctca

SEQ ID NO: 176308 - DNA, 79 bp, Homo sapiens
cctctctcacctagcatttggttaaccagaaacagatgtggaaactgatctatctgtagataatggccctgctcaggga

SEQ ID NO: 176309 - DNA, 76 bp, Homo sapiens
tagcatttggttaaccagaaacagatgtggaaactgatctatctgtagataatggccctgctcagggagggggtcc

SEQ ID NO: 176310 - DNA, 79 bp, Homo sapiens
ttaaccagaaacagatgtggaaactgatctatctgtagataatggccctgctcagggagggggtccctgctgagagcga

SEQ ID NO: 176311 - DNA, 81 bp, Homo sapiens
atgtggaaactgatctatctgtagataatggccctgctcagggagggggtccctgctgagagcgagacattgaaagcctgc

SEQ ID NO: 176312 - DNA, 82 bp, Homo sapiens
gaaactgatctatctgtagataatggccctgctcagggagggggtccctgctgagagcgagacattgaaagcctgctacaca

SEQ ID NO: 176313 - DNA, 81 bp, Homo sapiens
aaactgatctatctgtagataatggccctgctcagggagggggtccctgctgagagcgagacattgaaagcctgctacaca

SEQ ID NO: 176314 - DNA, 80 bp, Homo sapiens
atctatctgtagataatggccctgctcagggagggggtccctgctgagagcgagacattgaaagcctgctacacagaaac

SEQ ID NO: 176315 - DNA, 81 bp, Homo sapiens
tgtagataatggccctgctcagggagggggtccctgctgagagcgagacattgaaagcctgctacacagaaactgctggaa

SEQ ID NO: 176316 - DNA, 80 bp, Homo sapiens
gtagataatggccctgctcagggagggggtccctgctgagagcgagacattgaaagcctgctacacagaaactgctggaa

SEQ ID NO: 176317 - DNA, 80 bp, Homo sapiens
taatggccctgctcagggagggggtccctgctgagagcgagacattgaaagcctgctacacagaaactgctggaaggcca

SEQ ID NO: 176318 - DNA, 80 bp, Homo sapiens
tgctcagggagggggtccctgctgagagcgagacattgaaagcctgctacacagaaactgctggaaggccaagccatttc

SEQ ID NO: 176319 - DNA, 76 bp, Homo sapiens
gggagggggtccctgctgagagcgagacattgaaagcctgctacacagaaactgctggaaggccaagccatttctt

SEQ ID NO: 176320 - DNA, 75 bp, Homo sapiens
agggggtccctgctgagagcgagacattgaaagcctgctacacagaaactgctggaaggccaagccatttctttt

SEQ ID NO: 176321 - DNA, 76 bp, Homo sapiens
gggtccctgctgagagcgagacattgaaagcctgctacacagaaactgctggaaggccaagccatttcttttttct

SEQ ID NO: 176322 - DNA, 71 bp, Homo sapiens
aagttatctgcctgtctcggccccccagagaggccaagccatttttaaaaacagtgttctttttcatgctg

SEQ ID NO: 176323 - DNA, 70 bp, Homo sapiens
cctgtctcggccccccagagaggccaagccatttttaaaaacagtgttctttttcatgctgtagaatacc

SEQ ID NO: 176324 - DNA, 70 bp, Homo sapiens
ccccccagagaggccaagccatttttaaaaacagtgttctttttcatgctgtagaatacctgtgcttggg

SEQ ID NO: 176325 - DNA, 71 bp, Homo sapiens
aggccaagccatttttaaaaacagtgttctttttcatgctgtagaatacctgtgcttgggggtgagcaaaa

SEQ ID NO: 176326 - DNA, 69 bp, Homo sapiens
atttttaaaaacagtgttctttttcatgctgtagaatacctgtgcttgggggtgagcaaaaaggaggaa

SEQ ID NO: 176327 - DNA, 69 bp, Homo sapiens
tttttaaaaacagtgttctttttcatgctgtagaatacctgtgcttgggggtgagcaaaaaggaggaaa

SEQ ID NO: 176328 - DNA, 72 bp, Homo sapiens
taaaaacagtgttctttttcatgctgtagaatacctgtgcttgggggtgagcaaaaaggaggaaactgatta

SEQ ID NO: 176329 - DNA, 72 bp, Homo sapiens
agtgttctttttcatgctgtagaatacctgtgcttgggggtgagcaaaaaggaggaaactgattagaaaata

SEQ ID NO: 176330 - DNA, 72 bp, Homo sapiens
ttctttttcatgctgtagaatacctgtgcttgggggtgagcaaaaaggaggaaactgattagaaaataccta

SEQ ID NO: 176331 - DNA, 73 bp, Homo sapiens
ttttcatgctgtagaatacctgtgcttgggggtgagcaaaaaggaggaaactgattagaaaatacctatgagg

SEQ ID NO: 176332 - DNA, 72 bp, Homo sapiens
atgctgtagaatacctgtgcttgggggtgagcaaaaaggaggaaactgattagaaaatacctatgagggccg

SEQ ID NO: 176333 - DNA, 71 bp, Homo sapiens
atacctgtgcttgggggtgagcaaaaaggaggaaactgattagaaaatacctatgagggccgggtgcagtg

SEQ ID NO: 176334 - DNA, 75 bp, Homo sapiens
aaaagaaaatacctgtgagatgttgagtctgggagaatgtatctgtgagaagacaaacaaccctagtattcatta

SEQ ID NO: 176335 - DNA, 75 bp, Homo sapiens
aaaatacctgtgagatgttgagtctgggagaatgtatctgtgagaagacaaacaaccctagtattcattaaagaa

SEQ ID NO: 176336 - DNA, 73 bp, Homo sapiens
atgttgagtctgggagaatgtatctgtgagaagacaaacaaccctagtattcattaaagaaccagcctttgtt

SEQ ID NO: 176337 - DNA, 72 bp, Homo sapiens
agtctgggagaatgtatctgtgagaagacaaacaaccctagtattcattaaagaaccagcctttgttttcta

SEQ ID NO: 176338 - DNA, 73 bp, Homo sapiens
tctgggagaatgtatctgtgagaagacaaacaaccctagtattcattaaagaaccagcctttgttttctacaa

SEQ ID NO: 176339 - DNA, 73 bp, Homo sapiens
aatgtatctgtgagaagacaaacaaccctagtattcattaaagaaccagcctttgttttctacaagctatctg

SEQ ID NO: 176340 - DNA, 73 bp, Homo sapiens
atgtatctgtgagaagacaaacaaccctagtattcattaaagaaccagcctttgttttctacaagctatctgt

SEQ ID NO: 176341 - DNA, 72 bp, Homo sapiens
tgagaagacaaacaaccctagtattcattaaagaaccagcctttgttttctacaagctatctgttcggtcta

SEQ ID NO: 176342 - DNA, 69 bp, Homo sapiens
aagacaaacaaccctagtattcattaaagaaccagcctttgttttctacaagctatctgttcggtctac

SEQ ID NO: 176343 - DNA, 70 bp, Homo sapiens
aacaaccctagtattcattaaagaaccagcctttgttttctacaagctatctgttcggtctactcaggaa

SEQ ID NO: 176344 - DNA, 71 bp, Homo sapiens
acaaccctagtattcattaaagaaccagcctttgttttctacaagctatctgttcggtctactcaggaata

SEQ ID NO: 176345 - DNA, 73 bp, Homo sapiens
taaagaaccagcctttgttttctacaagctatctgttcggtctactcaggaatagagataaactgccttaata

SEQ ID NO: 176346 - DNA, 72 bp, Homo sapiens
agcctttgttttctacaagctatctgttcggtctactcaggaatagagataaactgccttaatagtaataaa

SEQ ID NO: 176347 - DNA, 74 bp, Homo sapiens
ttttctacaagctatctgttcggtctactcaggaatagagataaactgccttaatagtaataaaagcaagcacc

SEQ ID NO: 176348 - DNA, 78 bp, Homo sapiens
ctatctgttcggtctactcaggaatagagataaactgccttaatagtaataaaagcaagcaccgctgagtgagtgctg

SEQ ID NO: 176349 - DNA, 81 bp, Homo sapiens
tctactcaggaatagagataaactgccttaatagtaataaaagcaagcaccgctgagtgagtgctggcctcatgccaggaa

SEQ ID NO: 176350 - DNA, 81 bp, Homo sapiens
ataaactgccttaatagtaataaaagcaagcaccgctgagtgagtgctggcctcatgccaggaactgctcttggcactctg

SEQ ID NO: 176351 - DNA, 84 bp, Homo sapiens
aatagtaataaaagcaagcaccgctgagtgagtgctggcctcatgccaggaactgctcttggcactctgtgcacaagggagata

SEQ ID NO: 176352 - DNA, 90 bp, Homo sapiens
ctgagtgagtgctggcctcatgccaggaactgctcttggcactctgtgcacaagggagatactgacattctttctgttgtgcagatgaga

SEQ ID NO: 176353 - DNA, 86 bp, Homo sapiens
agtgctggcctcatgccaggaactgctcttggcactctgtgcacaagggagatactgacattctttctgttgtgcagatgagaaaa

SEQ ID NO: 176354 - DNA, 86 bp, Homo sapiens
cctcatgccaggaactgctcttggcactctgtgcacaagggagatactgacattctttctgttgtgcagatgagaaaacaggctca

SEQ ID NO: 176355 - DNA, 85 bp, Homo sapiens
tgctcttggcactctgtgcacaagggagatactgacattctttctgttgtgcagatgagaaaacaggctcagagaaggtgagtaa

SEQ ID NO: 176356 - DNA, 79 bp, Homo sapiens
acaagggagatactgacattctttctgttgtgcagatgagaaaacaggctcagagaaggtgagtaacttaccatggtca

SEQ ID NO: 176357 - DNA, 84 bp, Homo sapiens
agatactgacattctttctgttgtgcagatgagaaaacaggctcagagaaggtgagtaacttaccatggtcacacagcagcaga

SEQ ID NO: 176358 - DNA, 83 bp, Homo sapiens
gcagatgagaaaacaggctcagagaaggtgagtaacttaccatggtcacacagcagcagagctaggtcagtataatccacaag

SEQ ID NO: 176359 - DNA, 80 bp, Homo sapiens
aaaacaggctcagagaaggtgagtaacttaccatggtcacacagcagcagagctaggtcagtataatccacaagtcattc

SEQ ID NO: 176360 - DNA, 79 bp, Homo sapiens
agagaaggtgagtaacttaccatggtcacacagcagcagagctaggtcagtataatccacaagtcattctcttaaccgc

SEQ ID NO: 176361 - DNA, 80 bp, Homo sapiens
catggtcacacagcagcagagctaggtcagtataatccacaagtcattctcttaaccgctccgccgtaccgcccagaatg

SEQ ID NO: 176362 - DNA, 81 bp, Homo sapiens
acagcagcagagctaggtcagtataatccacaagtcattctcttaaccgctccgccgtaccgcccagaatgttcatctgca

SEQ ID NO: 176363 - DNA, 78 bp, Homo sapiens
agagctaggtcagtataatccacaagtcattctcttaaccgctccgccgtaccgcccagaatgttcatctgcatctgg

SEQ ID NO: 176364 - DNA, 77 bp, Homo sapiens
agtataatccacaagtcattctcttaaccgctccgccgtaccgcccagaatgttcatctgcatctgggccagcctcg

SEQ ID NO: 176365 - DNA, 80 bp, Homo sapiens
aatgttcatctgcatctgggccagcctcgtcagtccgtgcaaagaggccagttgacccatctccctccctaacaagcaca

SEQ ID NO: 176366 - DNA, 77 bp, Homo sapiens
atctgggccagcctcgtcagtccgtgcaaagaggccagttgacccatctccctccctaacaagcacagaagagacca

SEQ ID NO: 176367 - DNA, 75 bp, Homo sapiens
cctcgtcagtccgtgcaaagaggccagttgacccatctccctccctaacaagcacagaagagaccaggctgaaaa

SEQ ID NO: 176368 - DNA, 76 bp, Homo sapiens
tccgtgcaaagaggccagttgacccatctccctccctaacaagcacagaagagaccaggctgaaaattcatagctt

SEQ ID NO: 176369 - DNA, 76 bp, Homo sapiens
aagaggccagttgacccatctccctccctaacaagcacagaagagaccaggctgaaaattcatagctttcactcaa

SEQ ID NO: 176370 - DNA, 74 bp, Homo sapiens
agttgacccatctccctccctaacaagcacagaagagaccaggctgaaaattcatagctttcactcaaagtgtt

SEQ ID NO: 176371 - DNA, 77 bp, Homo sapiens
ctccctaacaagcacagaagagaccaggctgaaaattcatagctttcactcaaagtgtttccttcacctcattcatc

SEQ ID NO: 176372 - DNA, 79 bp, Homo sapiens
taacaagcacagaagagaccaggctgaaaattcatagctttcactcaaagtgtttccttcacctcattcatctgagtta

SEQ ID NO: 176373 - DNA, 75 bp, Homo sapiens
agaccaggctgaaaattcatagctttcactcaaagtgtttccttcacctcattcatctgagttagctttatttta

SEQ ID NO: 176374 - DNA, 75 bp, Homo sapiens
aggctgaaaattcatagctttcactcaaagtgtttccttcacctcattcatctgagttagctttattttactata

SEQ ID NO: 176375 - DNA, 75 bp, Homo sapiens
ttcatagctttcactcaaagtgtttccttcacctcattcatctgagttagctttattttactatataaagagaat

SEQ ID NO: 176376 - DNA, 75 bp, Homo sapiens
cactcaaagtgtttccttcacctcattcatctgagttagctttattttactatataaagagaattttcttcagca

SEQ ID NO: 176377 - DNA, 71 bp, Homo sapiens
tctgagttagctttattttactatataaagagaattttcttcagcaaaatgataggaatttttttaatgaa

SEQ ID NO: 176378 - DNA, 68 bp, Homo sapiens
ttttactatataaagagaattttcttcagcaaaatgataggaatttttttaatgaaagtaaaggaatg

SEQ ID NO: 176379 - DNA, 71 bp, Homo sapiens
taaagagaattttcttcagcaaaatgataggaatttttttaatgaaagtaaaggaatgtcacagaattgcg

SEQ ID NO: 176380 - DNA, 72 bp, Homo sapiens
gaattttcttcagcaaaatgataggaatttttttaatgaaagtaaaggaatgtcacagaattgcgtcaggga

SEQ ID NO: 176381 - DNA, 73 bp, Homo sapiens
tcagcaaaatgataggaatttttttaatgaaagtaaaggaatgtcacagaattgcgtcagggatatttccagt

SEQ ID NO: 176382 - DNA, 71 bp, Homo sapiens
ttaatgaaagtaaaggaatgtcacagaattgcgtcagggatatttccagtttaacacaactacaaacgtag

SEQ ID NO: 176383 - DNA, 71 bp, Homo sapiens
taaaggaatgtcacagaattgcgtcagggatatttccagtttaacacaactacaaacgtaggctgttttgt

SEQ ID NO: 176384 - DNA, 72 bp, Homo sapiens
agccaccacactcggccagctgttgttaatagttaaaattataaattggacaaggtctgattccagcagggg

SEQ ID NO: 176385 - DNA, 73 bp, Homo sapiens
tcggccagctgttgttaatagttaaaattataaattggacaaggtctgattccagcagggggagacaaattca

SEQ ID NO: 176386 - DNA, 72 bp, Homo sapiens
ctgttgttaatagttaaaattataaattggacaaggtctgattccagcagggggagacaaattcacattgat

SEQ ID NO: 176387 - DNA, 72 bp, Homo sapiens
gttaaaattataaattggacaaggtctgattccagcagggggagacaaattcacattgatttttctataaga

SEQ ID NO: 176388 - DNA, 72 bp, Homo sapiens
ttataaattggacaaggtctgattccagcagggggagacaaattcacattgatttttctataagaaaaggaa

SEQ ID NO: 176389 - DNA, 71 bp, Homo sapiens
acaaggtctgattccagcagggggagacaaattcacattgatttttctataagaaaaggaattatttgtac

SEQ ID NO: 176390 - DNA, 70 bp, Homo sapiens
gattccagcagggggagacaaattcacattgatttttctataagaaaaggaattatttgtactttcctcc

SEQ ID NO: 176391 - DNA, 69 bp, Homo sapiens
ggagacaaattcacattgatttttctataagaaaaggaattatttgtactttcctcccttgtgtgtttg

SEQ ID NO: 176392 - DNA, 83 bp, Homo sapiens
gtgtttgtgtgtatgtaagagagacagatgagaagagggctgcctttgagagccatgttccttttgcatgtacatacctctca

SEQ ID NO: 176393 - DNA, 83 bp, Homo sapiens
tgtatgtaagagagacagatgagaagagggctgcctttgagagccatgttccttttgcatgtacatacctctcaagattatta

SEQ ID NO: 176394 - DNA, 82 bp, Homo sapiens
taagagagacagatgagaagagggctgcctttgagagccatgttccttttgcatgtacatacctctcaagattattacatgg

SEQ ID NO: 176395 - DNA, 77 bp, Homo sapiens
agaagagggctgcctttgagagccatgttccttttgcatgtacatacctctcaagattattacatgggtcttttaga

SEQ ID NO: 176396 - DNA, 77 bp, Homo sapiens
tgcctttgagagccatgttccttttgcatgtacatacctctcaagattattacatgggtcttttagaagagggtcag

SEQ ID NO: 176397 - DNA, 76 bp, Homo sapiens
agccatgttccttttgcatgtacatacctctcaagattattacatgggtcttttagaagagggtcagtagctataa

SEQ ID NO: 176398 - DNA, 74 bp, Homo sapiens
ccttttgcatgtacatacctctcaagattattacatgggtcttttagaagagggtcagtagctataaaagcaaa

SEQ ID NO: 176399 - DNA, 77 bp, Homo sapiens
gcatgtacatacctctcaagattattacatgggtcttttagaagagggtcagtagctataaaagcaaatgatattta

SEQ ID NO: 176400 - DNA, 75 bp, Homo sapiens
acctctcaagattattacatgggtcttttagaagagggtcagtagctataaaagcaaatgatatttatgaaatga

SEQ ID NO: 176401 - DNA, 76 bp, Homo sapiens
tacatgggtcttttagaagagggtcagtagctataaaagcaaatgatatttatgaaatgatttcattgtatgtggt

SEQ ID NO: 176402 - DNA, 74 bp, Homo sapiens
gggtcttttagaagagggtcagtagctataaaagcaaatgatatttatgaaatgatttcattgtatgtggttta

SEQ ID NO: 176403 - DNA, 78 bp, Homo sapiens
gaagagggtcagtagctataaaagcaaatgatatttatgaaatgatttcattgtatgtggtttattatgtagtcttca

SEQ ID NO: 176404 - DNA, 76 bp, Homo sapiens
agtagctataaaagcaaatgatatttatgaaatgatttcattgtatgtggtttattatgtagtcttcaaaacagaa

SEQ ID NO: 176405 - DNA, 72 bp, Homo sapiens
aaagcaaatgatatttatgaaatgatttcattgtatgtggtttattatgtagtcttcaaaacagaaaaaccc

SEQ ID NO: 176406 - DNA, 73 bp, Homo sapiens
tatgaaatgatttcattgtatgtggtttattatgtagtcttcaaaacagaaaaaccccacttgcttcgaaagc

SEQ ID NO: 176407 - DNA, 70 bp, Homo sapiens
gatttcattgtatgtggtttattatgtagtcttcaaaacagaaaaaccccacttgcttcgaaagcttcct

SEQ ID NO: 176408 - DNA, 72 bp, Homo sapiens
tgtatgtggtttattatgtagtcttcaaaacagaaaaaccccacttgcttcgaaagcttcctttgagagcta

SEQ ID NO: 176409 - DNA, 68 bp, Homo sapiens
ttatgtagtcttcaaaacagaaaaaccccacttgcttcgaaagcttcctttgagagctactttttaac

SEQ ID NO: 176410 - DNA, 70 bp, Homo sapiens
aaaaaccccacttgcttcgaaagcttcctttgagagctactttttaaccatattgttgatcaagcaagat

SEQ ID NO: 176411 - DNA, 72 bp, Homo sapiens
acttgcttcgaaagcttcctttgagagctactttttaaccatattgttgatcaagcaagattcttaaagccc

SEQ ID NO: 176412 - DNA, 72 bp, Homo sapiens
aaagcttcctttgagagctactttttaaccatattgttgatcaagcaagattcttaaagccccagtcctata

SEQ ID NO: 176413 - DNA, 78 bp, Homo sapiens
ttgagagctactttttaaccatattgttgatcaagcaagattcttaaagccccagtcctatacgtgagcagcattgaa

SEQ ID NO: 176414 - DNA, 75 bp, Homo sapiens
ctactttttaaccatattgttgatcaagcaagattcttaaagccccagtcctatacgtgagcagcattgaatccc

SEQ ID NO: 176415 - DNA, 78 bp, Homo sapiens
accatattgttgatcaagcaagattcttaaagccccagtcctatacgtgagcagcattgaatccccggatactggcag

SEQ ID NO: 176416 - DNA, 75 bp, Homo sapiens
attcttaaagccccagtcctatacgtgagcagcattgaatccccggatactggcaggcgttcactgtccagcctt

SEQ ID NO: 176417 - DNA, 81 bp, Homo sapiens
cccagtcctatacgtgagcagcattgaatccccggatactggcaggcgttcactgtccagcctttgacattagcatgtcac

SEQ ID NO: 176418 - DNA, 81 bp, Homo sapiens
tatacgtgagcagcattgaatccccggatactggcaggcgttcactgtccagcctttgacattagcatgtcaccctggtaa

SEQ ID NO: 176419 - DNA, 79 bp, Homo sapiens
attgaatccccggatactggcaggcgttcactgtccagcctttgacattagcatgtcaccctggtaaatcagagcactc

SEQ ID NO: 176420 - DNA, 80 bp, Homo sapiens
cggatactggcaggcgttcactgtccagcctttgacattagcatgtcaccctggtaaatcagagcactccatgccaaaaa

SEQ ID NO: 176421 - DNA, 81 bp, Homo sapiens
actggcaggcgttcactgtccagcctttgacattagcatgtcaccctggtaaatcagagcactccatgccaaaaaacagca

SEQ ID NO: 176422 - DNA, 85 bp, Homo sapiens
ctgtccagcctttgacattagcatgtcaccctggtaaatcagagcactccatgccaaaaaacagcatggtctgctgagcacatta

SEQ ID NO: 176423 - DNA, 83 bp, Homo sapiens
agcctttgacattagcatgtcaccctggtaaatcagagcactccatgccaaaaaacagcatggtctgctgagcacattaagga

SEQ ID NO: 176424 - DNA, 84 bp, Homo sapiens
attagcatgtcaccctggtaaatcagagcactccatgccaaaaaacagcatggtctgctgagcacattaaggagcagagagggc

SEQ ID NO: 176425 - DNA, 83 bp, Homo sapiens
ctggtaaatcagagcactccatgccaaaaaacagcatggtctgctgagcacattaaggagcagagagggctcagaagaattaa

SEQ ID NO: 176426 - DNA, 81 bp, Homo sapiens
aaatcagagcactccatgccaaaaaacagcatggtctgctgagcacattaaggagcagagagggctcagaagaattaaacg

SEQ ID NO: 176427 - DNA, 79 bp, Homo sapiens
actccatgccaaaaaacagcatggtctgctgagcacattaaggagcagagagggctcagaagaattaaacggccaatgg

SEQ ID NO: 176428 - DNA, 78 bp, Homo sapiens
aaaaacagcatggtctgctgagcacattaaggagcagagagggctcagaagaattaaacggccaatggggtggtgaca

SEQ ID NO: 176429 - DNA, 80 bp, Homo sapiens
tctgctgagcacattaaggagcagagagggctcagaagaattaaacggccaatggggtggtgacagaggtgagctctttc

SEQ ID NO: 176430 - DNA, 75 bp, Homo sapiens
agcacattaaggagcagagagggctcagaagaattaaacggccaatggggtggtgacagaggtgagctctttccc

SEQ ID NO: 176431 - DNA, 73 bp, Homo sapiens
cagagagggctcagaagaattaaacggccaatggggtggtgacagaggtgagctctttccccctcggacagct

SEQ ID NO: 176432 - DNA, 75 bp, Homo sapiens
ctcagaagaattaaacggccaatggggtggtgacagaggtgagctctttccccctcggacagcttggcatggtga

SEQ ID NO: 176433 - DNA, 73 bp, Homo sapiens
agaattaaacggccaatggggtggtgacagaggtgagctctttccccctcggacagcttggcatggtgactac

SEQ ID NO: 176434 - DNA, 77 bp, Homo sapiens
tggtgacagaggtgagctctttccccctcggacagcttggcatggtgactaccaatgaggtttaattgacattaaga

SEQ ID NO: 176435 - DNA, 76 bp, Homo sapiens
gcttggcatggtgactaccaatgaggtttaattgacattaagagcagctcaccatttttaaagagcgataaattgt

SEQ ID NO: 176436 - DNA, 74 bp, Homo sapiens
atggtgactaccaatgaggtttaattgacattaagagcagctcaccatttttaaagagcgataaattgtttcca

SEQ ID NO: 176437 - DNA, 74 bp, Homo sapiens
atgaggtttaattgacattaagagcagctcaccatttttaaagagcgataaattgtttccaagtttcagcctca

SEQ ID NO: 176438 - DNA, 74 bp, Homo sapiens
attaagagcagctcaccatttttaaagagcgataaattgtttccaagtttcagcctcacggagccctgagctaa

SEQ ID NO: 176439 - DNA, 72 bp, Homo sapiens
accatttttaaagagcgataaattgtttccaagtttcagcctcacggagccctgagctaagagataatgggc

SEQ ID NO: 176440 - DNA, 76 bp, Homo sapiens
ttttaaagagcgataaattgtttccaagtttcagcctcacggagccctgagctaagagataatgggctgacacata

SEQ ID NO: 176441 - DNA, 78 bp, Homo sapiens
ataaattgtttccaagtttcagcctcacggagccctgagctaagagataatgggctgacacatagcctcattggtcac

SEQ ID NO: 176442 - DNA, 79 bp, Homo sapiens
aagtttcagcctcacggagccctgagctaagagataatgggctgacacatagcctcattggtcacgcttcacttgtaaa

SEQ ID NO: 176443 - DNA, 80 bp, Homo sapiens
agcctcacggagccctgagctaagagataatgggctgacacatagcctcattggtcacgcttcacttgtaaacaggattg

SEQ ID NO: 176444 - DNA, 80 bp, Homo sapiens
agccctgagctaagagataatgggctgacacatagcctcattggtcacgcttcacttgtaaacaggattggccaaagcaa

SEQ ID NO: 176445 - DNA, 77 bp, Homo sapiens
aatgggctgacacatagcctcattggtcacgcttcacttgtaaacaggattggccaaagcaagaaggctgtaagtaa

SEQ ID NO: 176446 - DNA, 74 bp, Homo sapiens
acatagcctcattggtcacgcttcacttgtaaacaggattggccaaagcaagaaggctgtaagtaaaggttggc

SEQ ID NO: 176447 - DNA, 71 bp, Homo sapiens
ttcacttgtaaacaggattggccaaagcaagaaggctgtaagtaaaggttggcccgtcctctggaagcctc

SEQ ID NO: 176448 - DNA, 70 bp, Homo sapiens
taaacaggattggccaaagcaagaaggctgtaagtaaaggttggcccgtcctctggaagcctcccccaca

SEQ ID NO: 176449 - DNA, 70 bp, Homo sapiens
tggccaaagcaagaaggctgtaagtaaaggttggcccgtcctctggaagcctcccccacagcagggtggg

SEQ ID NO: 176450 - DNA, 67 bp, Homo sapiens
aagaaggctgtaagtaaaggttggcccgtcctctggaagcctcccccacagcagggtggggaactgg

SEQ ID NO: 176451 - DNA, 71 bp, Homo sapiens
taagtaaaggttggcccgtcctctggaagcctcccccacagcagggtggggaactggggcagccatagcaa

SEQ ID NO: 176452 - DNA, 76 bp, Homo sapiens
gaagcctcccccacagcagggtggggaactggggcagccatagcaagcaggaccatcaggacacggtgtctcccaa

SEQ ID NO: 176453 - DNA, 74 bp, Homo sapiens
ccacagcagggtggggaactggggcagccatagcaagcaggaccatcaggacacggtgtctcccaaacgggccg

SEQ ID NO: 176454 - DNA, 74 bp, Homo sapiens
gtggggaactggggcagccatagcaagcaggaccatcaggacacggtgtctcccaaacgggccggaacatacaa

SEQ ID NO: 176455 - DNA, 71 bp, Homo sapiens
atagcaagcaggaccatcaggacacggtgtctcccaaacgggccggaacatacaaggttctacgtttaata

SEQ ID NO: 176456 - DNA, 67 bp, Homo sapiens
acacggtgtctcccaaacgggccggaacatacaaggttctacgtttaatagaaagttgatcaagcct

SEQ ID NO: 176457 - DNA, 68 bp, Homo sapiens
gccggaacatacaaggttctacgtttaatagaaagttgatcaagccttcctctttggggagcctaatt

SEQ ID NO: 176458 - DNA, 67 bp, Homo sapiens
atacaaggttctacgtttaatagaaagttgatcaagccttcctctttggggagcctaatttttaagc

SEQ ID NO: 176459 - DNA, 70 bp, Homo sapiens
ttctacgtttaatagaaagttgatcaagccttcctctttggggagcctaatttttaagccattcactctc

SEQ ID NO: 176460 - DNA, 73 bp, Homo sapiens
taatagaaagttgatcaagccttcctctttggggagcctaatttttaagccattcactctctgttcccctgca

SEQ ID NO: 176461 - DNA, 73 bp, Homo sapiens
ttgatcaagccttcctctttggggagcctaatttttaagccattcactctctgttcccctgcagtcttttctc

SEQ ID NO: 176462 - DNA, 73 bp, Homo sapiens
tctttggggagcctaatttttaagccattcactctctgttcccctgcagtcttttctctccaaactctgttga

SEQ ID NO: 176463 - DNA, 72 bp, Homo sapiens
agcctaatttttaagccattcactctctgttcccctgcagtcttttctctccaaactctgttgaaacttgga

SEQ ID NO: 176464 - DNA, 74 bp, Homo sapiens
attcactctctgttcccctgcagtcttttctctccaaactctgttgaaacttggaggcatctcgcttcctcctt

SEQ ID NO: 176465 - DNA, 73 bp, Homo sapiens
ttcccctgcagtcttttctctccaaactctgttgaaacttggaggcatctcgcttcctcctttggcctttgta

SEQ ID NO: 176466 - DNA, 74 bp, Homo sapiens
caaactctgttgaaacttggaggcatctcgcttcctcctttggcctttgtagccaggttttcgcagcaaacaga

SEQ ID NO: 176467 - DNA, 76 bp, Homo sapiens
tgaaacttggaggcatctcgcttcctcctttggcctttgtagccaggttttcgcagcaaacagaccatatcattta

SEQ ID NO: 176468 - DNA, 75 bp, Homo sapiens
cttggaggcatctcgcttcctcctttggcctttgtagccaggttttcgcagcaaacagaccatatcatttaacac

SEQ ID NO: 176469 - DNA, 75 bp, Homo sapiens
ctttggcctttgtagccaggttttcgcagcaaacagaccatatcatttaacacccacctgcttcttgttctgata

SEQ ID NO: 176470 - DNA, 78 bp, Homo sapiens
ttgtagccaggttttcgcagcaaacagaccatatcatttaacacccacctgcttcttgttctgatagtcagttcagta

SEQ ID NO: 176471 - DNA, 75 bp, Homo sapiens
aaacagaccatatcatttaacacccacctgcttcttgttctgatagtcagttcagtagacagtagcattttttaa

SEQ ID NO: 176472 - DNA, 75 bp, Homo sapiens
catatcatttaacacccacctgcttcttgttctgatagtcagttcagtagacagtagcattttttaagtcaaaaa

SEQ ID NO: 176473 - DNA, 76 bp, Homo sapiens
ccacctgcttcttgttctgatagtcagttcagtagacagtagcattttttaagtcaaaaagaggcttagtgatgta

SEQ ID NO: 176474 - DNA, 74 bp, Homo sapiens
atagtcagttcagtagacagtagcattttttaagtcaaaaagaggcttagtgatgtaggccaaggtcaaggctc

SEQ ID NO: 176475 - DNA, 75 bp, Homo sapiens
agttcagtagacagtagcattttttaagtcaaaaagaggcttagtgatgtaggccaaggtcaaggctctgtgtca

SEQ ID NO: 176476 - DNA, 74 bp, Homo sapiens
agtagcattttttaagtcaaaaagaggcttagtgatgtaggccaaggtcaaggctctgtgtcatggggctctcc

SEQ ID NO: 176477 - DNA, 73 bp, Homo sapiens
tttttaagtcaaaaagaggcttagtgatgtaggccaaggtcaaggctctgtgtcatggggctctccccagggc

SEQ ID NO: 176478 - DNA, 77 bp, Homo sapiens
aaaaagaggcttagtgatgtaggccaaggtcaaggctctgtgtcatggggctctccccagggctcagtgccacggca

SEQ ID NO: 176479 - DNA, 77 bp, Homo sapiens
aaggtcaaggctctgtgtcatggggctctccccagggctcagtgccacggcacttcagacttgaccccagactgaaa

SEQ ID NO: 176480 - DNA, 79 bp, Homo sapiens
aaggctctgtgtcatggggctctccccagggctcagtgccacggcacttcagacttgaccccagactgaaaagatgaga

SEQ ID NO: 176481 - DNA, 74 bp, Homo sapiens
acggcacttcagacttgaccccagactgaaaagatgagaggacctgtagaagtcacggcctgtctgtcccgggc

SEQ ID NO: 176482 - DNA, 75 bp, Homo sapiens
ttgaccccagactgaaaagatgagaggacctgtagaagtcacggcctgtctgtcccgggcccatgctcctatctt

SEQ ID NO: 176483 - DNA, 73 bp, Homo sapiens
actgaaaagatgagaggacctgtagaagtcacggcctgtctgtcccgggcccatgctcctatctttttctccc

SEQ ID NO: 176484 - DNA, 71 bp, Homo sapiens
aaagatgagaggacctgtagaagtcacggcctgtctgtcccgggcccatgctcctatctttttctccccct

SEQ ID NO: 176485 - DNA, 72 bp, Homo sapiens
acctgtagaagtcacggcctgtctgtcccgggcccatgctcctatctttttctcccccttggcatttagata

SEQ ID NO: 176486 - DNA, 71 bp, Homo sapiens
acggcctgtctgtcccgggcccatgctcctatctttttctcccccttggcatttagataccatggacttgt

SEQ ID NO: 176487 - DNA, 72 bp, Homo sapiens
tgtctgtcccgggcccatgctcctatctttttctcccccttggcatttagataccatggacttgttaaaatg

SEQ ID NO: 176488 - DNA, 77 bp, Homo sapiens
ccatgctcctatctttttctcccccttggcatttagataccatggacttgttaaaatgtgacatgtactgatgatcc

SEQ ID NO: 176489 - DNA, 75 bp, Homo sapiens
atctttttctcccccttggcatttagataccatggacttgttaaaatgtgacatgtactgatgatccttatgaat

SEQ ID NO: 176490 - DNA, 76 bp, Homo sapiens
tttctcccccttggcatttagataccatggacttgttaaaatgtgacatgtactgatgatccttatgaatttgttg

SEQ ID NO: 176491 - DNA, 77 bp, Homo sapiens
atttagataccatggacttgttaaaatgtgacatgtactgatgatccttatgaatttgttggtaggggagctgctgg

SEQ ID NO: 176492 - DNA, 79 bp, Homo sapiens
atgtgacatgtactgatgatccttatgaatttgttggtaggggagctgctggtgaggattattttagactgtgagtaat

SEQ ID NO: 176493 - DNA, 79 bp, Homo sapiens
ttatgaatttgttggtaggggagctgctggtgaggattattttagactgtgagtaattgacctgacagacagtgatgac

SEQ ID NO: 176494 - DNA, 81 bp, Homo sapiens
ctgctggtgaggattattttagactgtgagtaattgacctgacagacagtgatgactgcttcattaagagcccacgaccac

SEQ ID NO: 176495 - DNA, 80 bp, Homo sapiens
ggattattttagactgtgagtaattgacctgacagacagtgatgactgcttcattaagagcccacgaccacgtgccagaa

SEQ ID NO: 176496 - DNA, 81 bp, Homo sapiens
ttttagactgtgagtaattgacctgacagacagtgatgactgcttcattaagagcccacgaccacgtgccagaatagttca

SEQ ID NO: 176497 - DNA, 83 bp, Homo sapiens
gtgagtaattgacctgacagacagtgatgactgcttcattaagagcccacgaccacgtgccagaatagttcagcatcctctgt

SEQ ID NO: 176498 - DNA, 85 bp, Homo sapiens
tgacagacagtgatgactgcttcattaagagcccacgaccacgtgccagaatagttcagcatcctctgttgctactgtactttga

SEQ ID NO: 176499 - DNA, 83 bp, Homo sapiens
tgatgactgcttcattaagagcccacgaccacgtgccagaatagttcagcatcctctgttgctactgtactttgagacatcgt

SEQ ID NO: 176500 - DNA, 79 bp, Homo sapiens
tcattaagagcccacgaccacgtgccagaatagttcagcatcctctgttgctactgtactttgagacatcgttcttctt

SEQ ID NO: 176501 - DNA, 79 bp, Homo sapiens
aagagcccacgaccacgtgccagaatagttcagcatcctctgttgctactgtactttgagacatcgttcttctttgtga

SEQ ID NO: 176502 - DNA, 79 bp, Homo sapiens
atcctctgttgctactgtactttgagacatcgttcttctttgtgatgcaatacctctttcttgtcatgagggtctcttc

SEQ ID NO: 176503 - DNA, 75 bp, Homo sapiens
ctactgtactttgagacatcgttcttctttgtgatgcaatacctctttcttgtcatgagggtctcttcccttaaa

SEQ ID NO: 176504 - DNA, 76 bp, Homo sapiens
tactttgagacatcgttcttctttgtgatgcaatacctctttcttgtcatgagggtctcttcccttaaatcaggta

SEQ ID NO: 176505 - DNA, 78 bp, Homo sapiens
tctttgtgatgcaatacctctttcttgtcatgagggtctcttcccttaaatcaggtacatttcagattcttcaggtga

SEQ ID NO: 176506 - DNA, 72 bp, Homo sapiens
atacctctttcttgtcatgagggtctcttcccttaaatcaggtacatttcagattcttcaggtgatgttttt

SEQ ID NO: 176507 - DNA, 73 bp, Homo sapiens
ttaaatcaggtacatttcagattcttcaggtgatgttttttaggctgagtgtgttagcaccccttggaaacca

SEQ ID NO: 176508 - DNA, 68 bp, Homo sapiens
attcttcaggtgatgttttttaggctgagtgtgttagcaccccttggaaaccaggttccctggggaaa

SEQ ID NO: 176509 - DNA, 69 bp, Homo sapiens
tgatgttttttaggctgagtgtgttagcaccccttggaaaccaggttccctggggaaagtgtgtcacgt

SEQ ID NO: 176510 - DNA, 68 bp, Homo sapiens
tttttaggctgagtgtgttagcaccccttggaaaccaggttccctggggaaagtgtgtcacgtttgtg

SEQ ID NO: 176511 - DNA, 68 bp, Homo sapiens
tgtgttagcaccccttggaaaccaggttccctggggaaagtgtgtcacgtttgtggtgtttgcccgta

SEQ ID NO: 176512 - DNA, 68 bp, Homo sapiens
cccttggaaaccaggttccctggggaaagtgtgtcacgtttgtggtgtttgcccgtatagctctccca

SEQ ID NO: 176513 - DNA, 68 bp, Homo sapiens
ggaaaccaggttccctggggaaagtgtgtcacgtttgtggtgtttgcccgtatagctctcccacaccc

SEQ ID NO: 176514 - DNA, 72 bp, Homo sapiens
tggggaaagtgtgtcacgtttgtggtgtttgcccgtatagctctcccacacccccacgagctccaagaggtg

SEQ ID NO: 176515 - DNA, 71 bp, Homo sapiens
aaagtgtgtcacgtttgtggtgtttgcccgtatagctctcccacacccccacgagctccaagaggtgggga

SEQ ID NO: 176516 - DNA, 73 bp, Homo sapiens
acgtttgtggtgtttgcccgtatagctctcccacacccccacgagctccaagaggtggggaagcacatgtggc

SEQ ID NO: 176517 - DNA, 78 bp, Homo sapiens
tgtttgcccgtatagctctcccacacccccacgagctccaagaggtggggaagcacatgtggcctgcctagcaggcac

SEQ ID NO: 176518 - DNA, 79 bp, Homo sapiens
tatagctctcccacacccccacgagctccaagaggtggggaagcacatgtggcctgcctagcaggcaccagaagcaggt

SEQ ID NO: 176519 - DNA, 80 bp, Homo sapiens
acccccacgagctccaagaggtggggaagcacatgtggcctgcctagcaggcaccagaagcaggttgtcggcacatgcaa

SEQ ID NO: 176520 - DNA, 82 bp, Homo sapiens
acgagctccaagaggtggggaagcacatgtggcctgcctagcaggcaccagaagcaggttgtcggcacatgcaagccagctt

SEQ ID NO: 176521 - DNA, 81 bp, Homo sapiens
acatgtggcctgcctagcaggcaccagaagcaggttgtcggcacatgcaagccagctttgccctgttgcctgggggagaat

SEQ ID NO: 176522 - DNA, 79 bp, Homo sapiens
tgcctagcaggcaccagaagcaggttgtcggcacatgcaagccagctttgccctgttgcctgggggagaattgaaaagt

SEQ ID NO: 176523 - DNA, 76 bp, Homo sapiens
aggcaccagaagcaggttgtcggcacatgcaagccagctttgccctgttgcctgggggagaattgaaaagtttggc

SEQ ID NO: 176524 - DNA, 70 bp, Homo sapiens
cacatgcaagccagctttgccctgttgcctgggggagaattgaaaagtttggccccaaaggggaaaattc

SEQ ID NO: 176525 - DNA, 65 bp, Homo sapiens
aagccagctttgccctgttgcctgggggagaattgaaaagtttggccccaaaggggaaaattctt

SEQ ID NO: 176526 - DNA, 68 bp, Homo sapiens
tttgccctgttgcctgggggagaattgaaaagtttggccccaaaggggaaaattctttctgccatcaa

SEQ ID NO: 176527 - DNA, 72 bp, Homo sapiens
tgggggagaattgaaaagtttggccccaaaggggaaaattctttctgccatcaagttgctggtcagctgtca

SEQ ID NO: 176528 - DNA, 71 bp, Homo sapiens
aattgaaaagtttggccccaaaggggaaaattctttctgccatcaagttgctggtcagctgtcatggaacc

SEQ ID NO: 176529 - DNA, 77 bp, Homo sapiens
agtttggccccaaaggggaaaattctttctgccatcaagttgctggtcagctgtcatggaacctgtctgcagcaatg

SEQ ID NO: 176530 - DNA, 84 bp, Homo sapiens
aattctttctgccatcaagttgctggtcagctgtcatggaacctgtctgcagcaatgtggctgtcacaaaacgcagcccaggac

SEQ ID NO: 176531 - DNA, 87 bp, Homo sapiens
atcaagttgctggtcagctgtcatggaacctgtctgcagcaatgtggctgtcacaaaacgcagcccaggacgagtatgcgctgaagc

SEQ ID NO: 176532 - DNA, 85 bp, Homo sapiens
ctggtcagctgtcatggaacctgtctgcagcaatgtggctgtcacaaaacgcagcccaggacgagtatgcgctgaagctccattt

SEQ ID NO: 176533 - DNA, 83 bp, Homo sapiens
atggaacctgtctgcagcaatgtggctgtcacaaaacgcagcccaggacgagtatgcgctgaagctccattttgcattaacta

SEQ ID NO: 176534 - DNA, 83 bp, Homo sapiens
tctgcagcaatgtggctgtcacaaaacgcagcccaggacgagtatgcgctgaagctccattttgcattaactagtcaagtact

SEQ ID NO: 176535 - DNA, 78 bp, Homo sapiens
aatgtggctgtcacaaaacgcagcccaggacgagtatgcgctgaagctccattttgcattaactagtcaagtacttac

SEQ ID NO: 176536 - DNA, 75 bp, Homo sapiens
acaaaacgcagcccaggacgagtatgcgctgaagctccattttgcattaactagtcaagtacttacccactgaaa

SEQ ID NO: 176537 - DNA, 74 bp, Homo sapiens
agtatgcgctgaagctccattttgcattaactagtcaagtacttacccactgaaaagcacttcctgaaataatt

SEQ ID NO: 176538 - DNA, 72 bp, Homo sapiens
ctgaagctccattttgcattaactagtcaagtacttacccactgaaaagcacttcctgaaataatttcacct

SEQ ID NO: 176539 - DNA, 70 bp, Homo sapiens
tccattttgcattaactagtcaagtacttacccactgaaaagcacttcctgaaataatttcaccttcgtt

SEQ ID NO: 176540 - DNA, 66 bp, Homo sapiens
actagtcaagtacttacccactgaaaagcacttcctgaaataatttcaccttcgtttttttccttc

SEQ ID NO: 176541 - DNA, 67 bp, Homo sapiens
aagtacttacccactgaaaagcacttcctgaaataatttcaccttcgtttttttccttctgcaggag

SEQ ID NO: 176542 - DNA, 71 bp, Homo sapiens
tgaaaagcacttcctgaaataatttcaccttcgtttttttccttctgcaggaggacaccatggaggtggaa

SEQ ID NO: 176543 - DNA, 71 bp, Homo sapiens
ttcctgaaataatttcaccttcgtttttttccttctgcaggaggacaccatggaggtggaagagttcttga

SEQ ID NO: 176544 - DNA, 69 bp, Homo sapiens
aataatttcaccttcgtttttttccttctgcaggaggacaccatggaggtggaagagttcttgaaagaa

SEQ ID NO: 176545 - DNA, 76 bp, Homo sapiens
ttcgtttttttccttctgcaggaggacaccatggaggtggaagagttcttgaaagaagctgcagtcatgaaagaga

SEQ ID NO: 176546 - DNA, 78 bp, Homo sapiens
tttttccttctgcaggaggacaccatggaggtggaagagttcttgaaagaagctgcagtcatgaaagagatcaaacac

SEQ ID NO: 176547 - DNA, 75 bp, Homo sapiens
aggaggacaccatggaggtggaagagttcttgaaagaagctgcagtcatgaaagagatcaaacaccctaacctgg

SEQ ID NO: 176548 - DNA, 77 bp, Homo sapiens
atggaggtggaagagttcttgaaagaagctgcagtcatgaaagagatcaaacaccctaacctggtgcagctccttgg

SEQ ID NO: 176549 - DNA, 77 bp, Homo sapiens
aagagttcttgaaagaagctgcagtcatgaaagagatcaaacaccctaacctggtgcagctccttggtgagtaagcc

SEQ ID NO: 176550 - DNA, 77 bp, Homo sapiens
aaagaagctgcagtcatgaaagagatcaaacaccctaacctggtgcagctccttggtgagtaagcccggggctctga

SEQ ID NO: 176551 - DNA, 78 bp, Homo sapiens
agctgcagtcatgaaagagatcaaacaccctaacctggtgcagctccttggtgagtaagcccggggctctgaagagag

SEQ ID NO: 176552 - DNA, 74 bp, Homo sapiens
atgaaagagatcaaacaccctaacctggtgcagctccttggtgagtaagcccggggctctgaagagagggtctc

SEQ ID NO: 176553 - DNA, 72 bp, Homo sapiens
aaacaccctaacctggtgcagctccttggtgagtaagcccggggctctgaagagagggtctcgcgccgcacc

SEQ ID NO: 176554 - DNA, 74 bp, Homo sapiens
taacctggtgcagctccttggtgagtaagcccggggctctgaagagagggtctcgcgccgcacccccagggtga

SEQ ID NO: 176555 - DNA, 74 bp, Homo sapiens
agctccttggtgagtaagcccggggctctgaagagagggtctcgcgccgcacccccagggtgacacaggcgctg

SEQ ID NO: 176556 - DNA, 75 bp, Homo sapiens
tgagtaagcccggggctctgaagagagggtctcgcgccgcacccccagggtgacacaggcgctggggaagacgca

SEQ ID NO: 176557 - DNA, 79 bp, Homo sapiens
gctctgaagagagggtctcgcgccgcacccccagggtgacacaggcgctggggaagacgcacgggcggctcactgcaca

SEQ ID NO: 176558 - DNA, 75 bp, Homo sapiens
agagagggtctcgcgccgcacccccagggtgacacaggcgctggggaagacgcacgggcggctcactgcacaaaa

SEQ ID NO: 176559 - DNA, 73 bp, Homo sapiens
cgccgcacccccagggtgacacaggcgctggggaagacgcacgggcggctcactgcacaaaacctcgttggaa

SEQ ID NO: 176560 - DNA, 75 bp, Homo sapiens
cccagggtgacacaggcgctggggaagacgcacgggcggctcactgcacaaaacctcgttggaatatttgtgctc

SEQ ID NO: 176561 - DNA, 76 bp, Homo sapiens
acaggcgctggggaagacgcacgggcggctcactgcacaaaacctcgttggaatatttgtgctctgccgacgttca

SEQ ID NO: 176562 - DNA, 74 bp, Homo sapiens
gggaagacgcacgggcggctcactgcacaaaacctcgttggaatatttgtgctctgccgacgttcagccgcggg

SEQ ID NO: 176563 - DNA, 73 bp, Homo sapiens
acgggcggctcactgcacaaaacctcgttggaatatttgtgctctgccgacgttcagccgcgggtaaaatgag

SEQ ID NO: 176564 - DNA, 76 bp, Homo sapiens
tcactgcacaaaacctcgttggaatatttgtgctctgccgacgttcagccgcgggtaaaatgaggcctgtatggga

SEQ ID NO: 176565 - DNA, 76 bp, Homo sapiens
cgttggaatatttgtgctctgccgacgttcagccgcgggtaaaatgaggcctgtatgggatgggtgtgtgcgtgtg

SEQ ID NO: 176566 - DNA, 86 bp, Homo sapiens
gtgtgcgtgtgtgcacatatgcacatgtatgtatgagagggagaatgtgattattttaagtggatacctaaaagcagtcaaatgca

SEQ ID NO: 176567 - DNA, 85 bp, Homo sapiens
tgtgcacatatgcacatgtatgtatgagagggagaatgtgattattttaagtggatacctaaaagcagtcaaatgcaaatctgaa

SEQ ID NO: 176568 - DNA, 79 bp, Homo sapiens
gcacatgtatgtatgagagggagaatgtgattattttaagtggatacctaaaagcagtcaaatgcaaatctgaaattag

SEQ ID NO: 176569 - DNA, 73 bp, Homo sapiens
gagggagaatgtgattattttaagtggatacctaaaagcagtcaaatgcaaatctgaaattagtttctgaaac

SEQ ID NO: 176570 - DNA, 72 bp, Homo sapiens
gtgattattttaagtggatacctaaaagcagtcaaatgcaaatctgaaattagtttctgaaacttgggcatt

SEQ ID NO: 176571 - DNA, 72 bp, Homo sapiens
ttaagtggatacctaaaagcagtcaaatgcaaatctgaaattagtttctgaaacttgggcattttccagagt

SEQ ID NO: 176572 - DNA, 75 bp, Homo sapiens
taaaagcagtcaaatgcaaatctgaaattagtttctgaaacttgggcattttccagagttttctcactgaagtga

SEQ ID NO: 176573 - DNA, 75 bp, Homo sapiens
tcaaatgcaaatctgaaattagtttctgaaacttgggcattttccagagttttctcactgaagtgattctgtaag

SEQ ID NO: 176574 - DNA, 75 bp, Homo sapiens
tctgaaattagtttctgaaacttgggcattttccagagttttctcactgaagtgattctgtaagtagacacataa

SEQ ID NO: 176575 - DNA, 76 bp, Homo sapiens
ttagtttctgaaacttgggcattttccagagttttctcactgaagtgattctgtaagtagacacataaccatcaga

SEQ ID NO: 176576 - DNA, 74 bp, Homo sapiens
aacttgggcattttccagagttttctcactgaagtgattctgtaagtagacacataaccatcagacctaaccat

SEQ ID NO: 176577 - DNA, 74 bp, Homo sapiens
ttttctcactgaagtgattctgtaagtagacacataaccatcagacctaaccattcaggggtaaactgacggtg

SEQ ID NO: 176578 - DNA, 75 bp, Homo sapiens
tgattctgtaagtagacacataaccatcagacctaaccattcaggggtaaactgacggtggtgaaggtcatttga

SEQ ID NO: 176579 - DNA, 71 bp, Homo sapiens
acacataaccatcagacctaaccattcaggggtaaactgacggtggtgaaggtcatttgaggtggggccag

SEQ ID NO: 176580 - DNA, 70 bp, Homo sapiens
acctaaccattcaggggtaaactgacggtggtgaaggtcatttgaggtggggccaggtctgcgtctgaat

SEQ ID NO: 176581 - DNA, 74 bp, Homo sapiens
accattcaggggtaaactgacggtggtgaaggtcatttgaggtggggccaggtctgcgtctgaattctgtggca

SEQ ID NO: 176582 - DNA, 77 bp, Homo sapiens
taaactgacggtggtgaaggtcatttgaggtggggccaggtctgcgtctgaattctgtggcagcctctccctgcgta

SEQ ID NO: 176583 - DNA, 78 bp, Homo sapiens
tggtgaaggtcatttgaggtggggccaggtctgcgtctgaattctgtggcagcctctccctgcgtaaattcaagttca

SEQ ID NO: 176584 - DNA, 77 bp, Homo sapiens
gggccaggtctgcgtctgaattctgtggcagcctctccctgcgtaaattcaagttcactggcttgagaagaagaaaa

SEQ ID NO: 176585 - DNA, 78 bp, Homo sapiens
ggtctgcgtctgaattctgtggcagcctctccctgcgtaaattcaagttcactggcttgagaagaagaaaagagcctg

SEQ ID NO: 176586 - DNA, 76 bp, Homo sapiens
aattctgtggcagcctctccctgcgtaaattcaagttcactggcttgagaagaagaaaagagcctggccatgtccc

SEQ ID NO: 176587 - DNA, 75 bp, Homo sapiens
agcctctccctgcgtaaattcaagttcactggcttgagaagaagaaaagagcctggccatgtccctcccacacga

SEQ ID NO: 176588 - DNA, 77 bp, Homo sapiens
cgtaaattcaagttcactggcttgagaagaagaaaagagcctggccatgtccctcccacacgagcacagtctcagga

SEQ ID NO: 176589 - DNA, 81 bp, Homo sapiens
attcaagttcactggcttgagaagaagaaaagagcctggccatgtccctcccacacgagcacagtctcaggatgcaggtgc

SEQ ID NO: 176590 - DNA, 80 bp, Homo sapiens
cttgagaagaagaaaagagcctggccatgtccctcccacacgagcacagtctcaggatgcaggtgcttgggaccatgttg

SEQ ID NO: 176591 - DNA, 80 bp, Homo sapiens
ctggccatgtccctcccacacgagcacagtctcaggatgcaggtgcttgggaccatgttggaagttgggcccaggactga

SEQ ID NO: 176592 - DNA, 80 bp, Homo sapiens
atgtccctcccacacgagcacagtctcaggatgcaggtgcttgggaccatgttggaagttgggcccaggactgaggagca

SEQ ID NO: 176593 - DNA, 80 bp, Homo sapiens
acagtctcaggatgcaggtgcttgggaccatgttggaagttgggcccaggactgaggagcagagtcagaatccttcagaa

SEQ ID NO: 176594 - DNA, 76 bp, Homo sapiens
atgcaggtgcttgggaccatgttggaagttgggcccaggactgaggagcagagtcagaatccttcagaaggctttt

SEQ ID NO: 176595 - DNA, 74 bp, Homo sapiens
ttgggaccatgttggaagttgggcccaggactgaggagcagagtcagaatccttcagaaggctttttctttaga

SEQ ID NO: 176596 - DNA, 74 bp, Homo sapiens
gaagttgggcccaggactgaggagcagagtcagaatccttcagaaggctttttctttagacagttgtttgttca

SEQ ID NO: 176597 - DNA, 74 bp, Homo sapiens
ccaggactgaggagcagagtcagaatccttcagaaggctttttctttagacagttgtttgttcagttgggagcg

SEQ ID NO: 176598 - DNA, 75 bp, Homo sapiens
actgaggagcagagtcagaatccttcagaaggctttttctttagacagttgtttgttcagttgggagcggagcca

SEQ ID NO: 176599 - DNA, 72 bp, Homo sapiens
agtcagaatccttcagaaggctttttctttagacagttgtttgttcagttgggagcggagccacgtgttgaa

SEQ ID NO: 176600 - DNA, 71 bp, Homo sapiens
ttcagaaggctttttctttagacagttgtttgttcagttgggagcggagccacgtgttgaagtcctcgttg

SEQ ID NO: 176601 - DNA, 75 bp, Homo sapiens
ttagacagttgtttgttcagttgggagcggagccacgtgttgaagtcctcgttgtcttgttggcaggggtctgca

SEQ ID NO: 176602 - DNA, 72 bp, Homo sapiens
gtttgttcagttgggagcggagccacgtgttgaagtcctcgttgtcttgttggcaggggtctgcacccggga

SEQ ID NO: 176603 - DNA, 71 bp, Homo sapiens
agcggagccacgtgttgaagtcctcgttgtcttgttggcaggggtctgcacccgggagcccccgttctata

SEQ ID NO: 176604 - DNA, 73 bp, Homo sapiens
acgtgttgaagtcctcgttgtcttgttggcaggggtctgcacccgggagcccccgttctatatcatcactgag

SEQ ID NO: 176605 - DNA, 75 bp, Homo sapiens
agtcctcgttgtcttgttggcaggggtctgcacccgggagcccccgttctatatcatcactgagttcatgaccta

SEQ ID NO: 176606 - DNA, 74 bp, Homo sapiens
ttgtcttgttggcaggggtctgcacccgggagcccccgttctatatcatcactgagttcatgacctacgggaac

SEQ ID NO: 176607 - DNA, 72 bp, Homo sapiens
aggggtctgcacccgggagcccccgttctatatcatcactgagttcatgacctacgggaacctcctggacta

SEQ ID NO: 176608 - DNA, 71 bp, Homo sapiens
acccgggagcccccgttctatatcatcactgagttcatgacctacgggaacctcctggactacctgaggga

SEQ ID NO: 176609 - DNA, 75 bp, Homo sapiens
cccgttctatatcatcactgagttcatgacctacgggaacctcctggactacctgagggagtgcaaccggcagga

SEQ ID NO: 176610 - DNA, 77 bp, Homo sapiens
tctatatcatcactgagttcatgacctacgggaacctcctggactacctgagggagtgcaaccggcaggaggtgaac

SEQ ID NO: 176611 - DNA, 72 bp, Homo sapiens
actgagttcatgacctacgggaacctcctggactacctgagggagtgcaaccggcaggaggtgaacgccgtg

SEQ ID NO: 176612 - DNA, 74 bp, Homo sapiens
atgacctacgggaacctcctggactacctgagggagtgcaaccggcaggaggtgaacgccgtggtgctgctgta

SEQ ID NO: 176613 - DNA, 83 bp, Homo sapiens
tacctgagggagtgcaaccggcaggaggtgaacgccgtggtgctgctgtacatggccactcagatctcgtcagccatggagta

SEQ ID NO: 176614 - DNA, 81 bp, Homo sapiens
agggagtgcaaccggcaggaggtgaacgccgtggtgctgctgtacatggccactcagatctcgtcagccatggagtacctg

SEQ ID NO: 176615 - DNA, 80 bp, Homo sapiens
accggcaggaggtgaacgccgtggtgctgctgtacatggccactcagatctcgtcagccatggagtacctggagaagaaa

SEQ ID NO: 176616 - DNA, 80 bp, Homo sapiens
aacgccgtggtgctgctgtacatggccactcagatctcgtcagccatggagtacctggagaagaaaaacttcatccacag

SEQ ID NO: 176617 - DNA, 80 bp, Homo sapiens
gtggtgctgctgtacatggccactcagatctcgtcagccatggagtacctggagaagaaaaacttcatccacaggtaggg

SEQ ID NO: 176618 - DNA, 79 bp, Homo sapiens
tgtacatggccactcagatctcgtcagccatggagtacctggagaagaaaaacttcatccacaggtaggggcctggcca

SEQ ID NO: 176619 - DNA, 74 bp, Homo sapiens
aagtggaaggttggccaggagctctcatgggtgaacattttcctttcttagagatcttgctgcccgaaactgcc

SEQ ID NO: 176620 - DNA, 75 bp, Homo sapiens
caggagctctcatgggtgaacattttcctttcttagagatcttgctgcccgaaactgcctggtaggggagaacca

SEQ ID NO: 176621 - DNA, 74 bp, Homo sapiens
tcatgggtgaacattttcctttcttagagatcttgctgcccgaaactgcctggtaggggagaaccacttggtga

SEQ ID NO: 176622 - DNA, 73 bp, Homo sapiens
cattttcctttcttagagatcttgctgcccgaaactgcctggtaggggagaaccacttggtgaaggtagctga

SEQ ID NO: 176623 - DNA, 73 bp, Homo sapiens
tcctttcttagagatcttgctgcccgaaactgcctggtaggggagaaccacttggtgaaggtagctgattttg

SEQ ID NO: 176624 - DNA, 74 bp, Homo sapiens
agatcttgctgcccgaaactgcctggtaggggagaaccacttggtgaaggtagctgattttggcctgagcaggt

SEQ ID NO: 176625 - DNA, 73 bp, Homo sapiens
cccgaaactgcctggtaggggagaaccacttggtgaaggtagctgattttggcctgagcaggttgatgacagg

SEQ ID NO: 176626 - DNA, 75 bp, Homo sapiens
ctggtaggggagaaccacttggtgaaggtagctgattttggcctgagcaggttgatgacaggggacacctacaca

SEQ ID NO: 176627 - DNA, 79 bp, Homo sapiens
ggagaaccacttggtgaaggtagctgattttggcctgagcaggttgatgacaggggacacctacacagcccatgctgga

SEQ ID NO: 176628 - DNA, 79 bp, Homo sapiens
cttggtgaaggtagctgattttggcctgagcaggttgatgacaggggacacctacacagcccatgctggagccaagttc

SEQ ID NO: 176629 - DNA, 81 bp, Homo sapiens
tagctgattttggcctgagcaggttgatgacaggggacacctacacagcccatgctggagccaagttccccatcaaatgga

SEQ ID NO: 176630 - DNA, 80 bp, Homo sapiens
cctgagcaggttgatgacaggggacacctacacagcccatgctggagccaagttccccatcaaatggactgcacccgaga

SEQ ID NO: 176631 - DNA, 78 bp, Homo sapiens
aggttgatgacaggggacacctacacagcccatgctggagccaagttccccatcaaatggactgcacccgagagcctg

SEQ ID NO: 176632 - DNA, 77 bp, Homo sapiens
ggacacctacacagcccatgctggagccaagttccccatcaaatggactgcacccgagagcctggcctacaacaagt

SEQ ID NO: 176633 - DNA, 80 bp, Homo sapiens
tacacagcccatgctggagccaagttccccatcaaatggactgcacccgagagcctggcctacaacaagttctccatcaa

SEQ ID NO: 176634 - DNA, 77 bp, Homo sapiens
atgctggagccaagttccccatcaaatggactgcacccgagagcctggcctacaacaagttctccatcaagtccgac

SEQ ID NO: 176635 - DNA, 73 bp, Homo sapiens
aagttccccatcaaatggactgcacccgagagcctggcctacaacaagttctccatcaagtccgacgtctggg

SEQ ID NO: 176636 - DNA, 75 bp, Homo sapiens
atcaaatggactgcacccgagagcctggcctacaacaagttctccatcaagtccgacgtctggggtaagggctgc

SEQ ID NO: 176637 - DNA, 78 bp, Homo sapiens
actgcacccgagagcctggcctacaacaagttctccatcaagtccgacgtctggggtaagggctgctgctgcactgaa

SEQ ID NO: 176638 - DNA, 76 bp, Homo sapiens
agcctggcctacaacaagttctccatcaagtccgacgtctggggtaagggctgctgctgcactgaagtggtccttc

SEQ ID NO: 176639 - DNA, 72 bp, Homo sapiens
aaatgctacacatcttgaacagcctttctctttcggttttctttcagcatttggagtattgctttgggaaat

SEQ ID NO: 176640 - DNA, 72 bp, Homo sapiens
acatcttgaacagcctttctctttcggttttctttcagcatttggagtattgctttgggaaattgctaccta

SEQ ID NO: 176641 - DNA, 73 bp, Homo sapiens
aacagcctttctctttcggttttctttcagcatttggagtattgctttgggaaattgctacctatggcatgtc

SEQ ID NO: 176642 - DNA, 72 bp, Homo sapiens
tctctttcggttttctttcagcatttggagtattgctttgggaaattgctacctatggcatgtccccttacc

SEQ ID NO: 176643 - DNA, 73 bp, Homo sapiens
tttcagcatttggagtattgctttgggaaattgctacctatggcatgtccccttacccgggaattgacctgtc

SEQ ID NO: 176644 - DNA, 70 bp, Homo sapiens
atttggagtattgctttgggaaattgctacctatggcatgtccccttacccgggaattgacctgtcccag

SEQ ID NO: 176645 - DNA, 74 bp, Homo sapiens
ctttgggaaattgctacctatggcatgtccccttacccgggaattgacctgtcccaggtgtatgagctgctaga

SEQ ID NO: 176646 - DNA, 75 bp, Homo sapiens
aattgctacctatggcatgtccccttacccgggaattgacctgtcccaggtgtatgagctgctagagaaggacta

SEQ ID NO: 176647 - DNA, 75 bp, Homo sapiens
acctatggcatgtccccttacccgggaattgacctgtcccaggtgtatgagctgctagagaaggactaccgcatg

SEQ ID NO: 176648 - DNA, 74 bp, Homo sapiens
cccttacccgggaattgacctgtcccaggtgtatgagctgctagagaaggactaccgcatggagcgcccagaag

SEQ ID NO: 176649 - DNA, 79 bp, Homo sapiens
cgggaattgacctgtcccaggtgtatgagctgctagagaaggactaccgcatggagcgcccagaaggctgcccagagaa

SEQ ID NO: 176650 - DNA, 80 bp, Homo sapiens
acctgtcccaggtgtatgagctgctagagaaggactaccgcatggagcgcccagaaggctgcccagagaaggtctatgaa

SEQ ID NO: 176651 - DNA, 86 bp, Homo sapiens
gtgtatgagctgctagagaaggactaccgcatggagcgcccagaaggctgcccagagaaggtctatgaactcatgcgagcatgtaa

SEQ ID NO: 176652 - DNA, 83 bp, Homo sapiens
tagagaaggactaccgcatggagcgcccagaaggctgcccagagaaggtctatgaactcatgcgagcatgtaagccttcctca

SEQ ID NO: 176653 - DNA, 81 bp, Homo sapiens
aaggactaccgcatggagcgcccagaaggctgcccagagaaggtctatgaactcatgcgagcatgtaagccttcctcagcc

SEQ ID NO: 176654 - DNA, 84 bp, Homo sapiens
gagcgcccagaaggctgcccagagaaggtctatgaactcatgcgagcatgtaagccttcctcagcctgttctcacgagtatatg

SEQ ID NO: 176655 - DNA, 80 bp, Homo sapiens
cccgtattgctagccagatctcatggatgatctgacttgggtttcatctgtccaggttggcagtggaatccctctgaccg

SEQ ID NO: 176656 - DNA, 79 bp, Homo sapiens
tagccagatctcatggatgatctgacttgggtttcatctgtccaggttggcagtggaatccctctgaccggccctcctt

SEQ ID NO: 176657 - DNA, 77 bp, Homo sapiens
atggatgatctgacttgggtttcatctgtccaggttggcagtggaatccctctgaccggccctcctttgctgaaatc

SEQ ID NO: 176658 - DNA, 75 bp, Homo sapiens
tctgacttgggtttcatctgtccaggttggcagtggaatccctctgaccggccctcctttgctgaaatccaccaa

SEQ ID NO: 176659 - DNA, 74 bp, Homo sapiens
tttcatctgtccaggttggcagtggaatccctctgaccggccctcctttgctgaaatccaccaagcctttgaaa

SEQ ID NO: 176660 - DNA, 72 bp, Homo sapiens
aggttggcagtggaatccctctgaccggccctcctttgctgaaatccaccaagcctttgaaacaatgttcca

SEQ ID NO: 176661 - DNA, 73 bp, Homo sapiens
tggaatccctctgaccggccctcctttgctgaaatccaccaagcctttgaaacaatgttccaggaatccagta

SEQ ID NO: 176662 - DNA, 74 bp, Homo sapiens
tgaccggccctcctttgctgaaatccaccaagcctttgaaacaatgttccaggaatccagtatctcagacggta

SEQ ID NO: 176663 - DNA, 73 bp, Homo sapiens
tcctttgctgaaatccaccaagcctttgaaacaatgttccaggaatccagtatctcagacggtaaagtaccca

SEQ ID NO: 176664 - DNA, 69 bp, Homo sapiens
aaatccaccaagcctttgaaacaatgttccaggaatccagtatctcagacggtaaagtacccatcccgg

SEQ ID NO: 176665 - DNA, 70 bp, Homo sapiens
aagcctttgaaacaatgttccaggaatccagtatctcagacggtaaagtacccatcccggggtacctgca

SEQ ID NO: 176666 - DNA, 70 bp, Homo sapiens
aacaatgttccaggaatccagtatctcagacggtaaagtacccatcccggggtacctgcagtggggtgaa

SEQ ID NO: 176667 - DNA, 74 bp, Homo sapiens
agtactgatggctgctggatttttgtttctgtccctgtatgattcttagaagtggaaaaggagctggggaaaca

SEQ ID NO: 176668 - DNA, 71 bp, Homo sapiens
tgctggatttttgtttctgtccctgtatgattcttagaagtggaaaaggagctggggaaacaaggcgtccg

SEQ ID NO: 176669 - DNA, 68 bp, Homo sapiens
atttttgtttctgtccctgtatgattcttagaagtggaaaaggagctggggaaacaaggcgtccgtgg

SEQ ID NO: 176670 - DNA, 71 bp, Homo sapiens
tgtccctgtatgattcttagaagtggaaaaggagctggggaaacaaggcgtccgtggggctgtgagtacct

SEQ ID NO: 176671 - DNA, 73 bp, Homo sapiens
atgattcttagaagtggaaaaggagctggggaaacaaggcgtccgtggggctgtgagtaccttgctgcaggcc

SEQ ID NO: 176672 - DNA, 73 bp, Homo sapiens
aagtggaaaaggagctggggaaacaaggcgtccgtggggctgtgagtaccttgctgcaggccccagagctgcc

SEQ ID NO: 176673 - DNA, 75 bp, Homo sapiens
agctggggaaacaaggcgtccgtggggctgtgagtaccttgctgcaggccccagagctgcccaccaagacgagga

SEQ ID NO: 176674 - DNA, 74 bp, Homo sapiens
aaacaaggcgtccgtggggctgtgagtaccttgctgcaggccccagagctgcccaccaagacgaggacctccag

SEQ ID NO: 176675 - DNA, 83 bp, Homo sapiens
tccgtggggctgtgagtaccttgctgcaggccccagagctgcccaccaagacgaggacctccaggagagctgcagagcacaga

SEQ ID NO: 176676 - DNA, 85 bp, Homo sapiens
ctgtgagtaccttgctgcaggccccagagctgcccaccaagacgaggacctccaggagagctgcagagcacagagacaccactga

SEQ ID NO: 176677 - DNA, 88 bp, Homo sapiens
tgcaggccccagagctgcccaccaagacgaggacctccaggagagctgcagagcacagagacaccactgacgtgcctgagatgcctca

SEQ ID NO: 176678 - DNA, 85 bp, Homo sapiens
agagctgcccaccaagacgaggacctccaggagagctgcagagcacagagacaccactgacgtgcctgagatgcctcactccaag

SEQ ID NO: 176679 - DNA, 82 bp, Homo sapiens
accaagacgaggacctccaggagagctgcagagcacagagacaccactgacgtgcctgagatgcctcactccaagggccagg

SEQ ID NO: 176680 - DNA, 84 bp, Homo sapiens
ggacctccaggagagctgcagagcacagagacaccactgacgtgcctgagatgcctcactccaagggccagggagagagcggta

SEQ ID NO: 176681 - DNA, 82 bp, Homo sapiens
aggagagctgcagagcacagagacaccactgacgtgcctgagatgcctcactccaagggccagggagagagcggtaagtccc

SEQ ID NO: 176682 - DNA, 78 bp, Homo sapiens
agagcacagagacaccactgacgtgcctgagatgcctcactccaagggccagggagagagcggtaagtcccccgcttc

SEQ ID NO: 176683 - DNA, 74 bp, Homo sapiens
agagacaccactgacgtgcctgagatgcctcactccaagggccagggagagagcggtaagtcccccgcttcccc

SEQ ID NO: 176684 - DNA, 71 bp, Homo sapiens
actgacgtgcctgagatgcctcactccaagggccagggagagagcggtaagtcccccgcttcccccaaccc

SEQ ID NO: 176685 - DNA, 79 bp, Homo sapiens
cctctagagttgtctggagttgtcagctcttccccttgcgtttcagatcctctggaccatgagcctgccgtgtctccat

SEQ ID NO: 176686 - DNA, 80 bp, Homo sapiens
agagttgtctggagttgtcagctcttccccttgcgtttcagatcctctggaccatgagcctgccgtgtctccattgctcc

SEQ ID NO: 176687 - DNA, 78 bp, Homo sapiens
agttgtcagctcttccccttgcgtttcagatcctctggaccatgagcctgccgtgtctccattgctccctcgaaaaga

SEQ ID NO: 176688 - DNA, 77 bp, Homo sapiens
ctcttccccttgcgtttcagatcctctggaccatgagcctgccgtgtctccattgctccctcgaaaagagcgaggtc

SEQ ID NO: 176689 - DNA, 76 bp, Homo sapiens
ttgcgtttcagatcctctggaccatgagcctgccgtgtctccattgctccctcgaaaagagcgaggtcccccggag

SEQ ID NO: 176690 - DNA, 76 bp, Homo sapiens
tctggaccatgagcctgccgtgtctccattgctccctcgaaaagagcgaggtcccccggagggcggcctgaatgaa

SEQ ID NO: 176691 - DNA, 76 bp, Homo sapiens
accatgagcctgccgtgtctccattgctccctcgaaaagagcgaggtcccccggagggcggcctgaatgaagatga

SEQ ID NO: 176692 - DNA, 74 bp, Homo sapiens
cgtgtctccattgctccctcgaaaagagcgaggtcccccggagggcggcctgaatgaagatgagcgccttctcc

SEQ ID NO: 176693 - DNA, 72 bp, Homo sapiens
ccattgctccctcgaaaagagcgaggtcccccggagggcggcctgaatgaagatgagcgccttctccccaaa

SEQ ID NO: 176694 - DNA, 70 bp, Homo sapiens
ctcgaaaagagcgaggtcccccggagggcggcctgaatgaagatgagcgccttctccccaaagacaaaaa

SEQ ID NO: 176695 - DNA, 68 bp, Homo sapiens
aggtcccccggagggcggcctgaatgaagatgagcgccttctccccaaagacaaaaagaccaacttgt

SEQ ID NO: 176696 - DNA, 75 bp, Homo sapiens
gggcggcctgaatgaagatgagcgccttctccccaaagacaaaaagaccaacttgttcagcgccttgatcaagaa

SEQ ID NO: 176697 - DNA, 75 bp, Homo sapiens
cctgaatgaagatgagcgccttctccccaaagacaaaaagaccaacttgttcagcgccttgatcaagaagaagaa

SEQ ID NO: 176698 - DNA, 74 bp, Homo sapiens
gaagaagaagacagccccaacccctcccaaacgcagcagctccttccgggagatggacggccagccggagcgca

SEQ ID NO: 176699 - DNA, 73 bp, Homo sapiens
agaagacagccccaacccctcccaaacgcagcagctccttccgggagatggacggccagccggagcgcagagg

SEQ ID NO: 176700 - DNA, 72 bp, Homo sapiens
cccaacccctcccaaacgcagcagctccttccgggagatggacggccagccggagcgcagaggggccggcga

SEQ ID NO: 176701 - DNA, 72 bp, Homo sapiens
aacccctcccaaacgcagcagctccttccgggagatggacggccagccggagcgcagaggggccggcgagga

SEQ ID NO: 176702 - DNA, 73 bp, Homo sapiens
cctcccaaacgcagcagctccttccgggagatggacggccagccggagcgcagaggggccggcgaggaagagg

SEQ ID NO: 176703 - DNA, 74 bp, Homo sapiens
aaacgcagcagctccttccgggagatggacggccagccggagcgcagaggggccggcgaggaagagggccgaga

SEQ ID NO: 176704 - DNA, 75 bp, Homo sapiens
agctccttccgggagatggacggccagccggagcgcagaggggccggcgaggaagagggccgagacatcagcaac

SEQ ID NO: 176705 - DNA, 74 bp, Homo sapiens
tccttccgggagatggacggccagccggagcgcagaggggccggcgaggaagagggccgagacatcagcaacgg

SEQ ID NO: 176706 - DNA, 75 bp, Homo sapiens
agatggacggccagccggagcgcagaggggccggcgaggaagagggccgagacatcagcaacggggcactggctt

SEQ ID NO: 176707 - DNA, 74 bp, Homo sapiens
acggccagccggagcgcagaggggccggcgaggaagagggccgagacatcagcaacggggcactggctttcacc

SEQ ID NO: 176708 - DNA, 72 bp, Homo sapiens
agccggagcgcagaggggccggcgaggaagagggccgagacatcagcaacggggcactggctttcaccccct

SEQ ID NO: 176709 - DNA, 74 bp, Homo sapiens
agaggggccggcgaggaagagggccgagacatcagcaacggggcactggctttcacccccttggacacagctga

SEQ ID NO: 176710 - DNA, 75 bp, Homo sapiens
cgaggaagagggccgagacatcagcaacggggcactggctttcacccccttggacacagctgacccagccaagtc

SEQ ID NO: 176711 - DNA, 73 bp, Homo sapiens
agggccgagacatcagcaacggggcactggctttcacccccttggacacagctgacccagccaagtccccaaa

SEQ ID NO: 176712 - DNA, 75 bp, Homo sapiens
acatcagcaacggggcactggctttcacccccttggacacagctgacccagccaagtccccaaagcccagcaatg

SEQ ID NO: 176713 - DNA, 72 bp, Homo sapiens
acggggcactggctttcacccccttggacacagctgacccagccaagtccccaaagcccagcaatggggctg

SEQ ID NO: 176714 - DNA, 71 bp, Homo sapiens
tttcacccccttggacacagctgacccagccaagtccccaaagcccagcaatggggctggggtccccaatg

SEQ ID NO: 176715 - DNA, 72 bp, Homo sapiens
ttggacacagctgacccagccaagtccccaaagcccagcaatggggctggggtccccaatggagccctccgg

SEQ ID NO: 176716 - DNA, 70 bp, Homo sapiens
agctgacccagccaagtccccaaagcccagcaatggggctggggtccccaatggagccctccgggagtcc

SEQ ID NO: 176717 - DNA, 67 bp, Homo sapiens
aagtccccaaagcccagcaatggggctggggtccccaatggagccctccgggagtccgggggctcag

SEQ ID NO: 176718 - DNA, 67 bp, Homo sapiens
aaagcccagcaatggggctggggtccccaatggagccctccgggagtccgggggctcaggcttccgg

SEQ ID NO: 176719 - DNA, 66 bp, Homo sapiens
aatggggctggggtccccaatggagccctccgggagtccgggggctcaggcttccggtctccccac

SEQ ID NO: 176720 - DNA, 69 bp, Homo sapiens
tccccaatggagccctccgggagtccgggggctcaggcttccggtctccccacctgtggaagaagtcca

SEQ ID NO: 176721 - DNA, 70 bp, Homo sapiens
aatggagccctccgggagtccgggggctcaggcttccggtctccccacctgtggaagaagtccagcacgc

SEQ ID NO: 176722 - DNA, 77 bp, Homo sapiens
ggctcaggcttccggtctccccacctgtggaagaagtccagcacgctgaccagcagccgcctagccaccggcgagga

SEQ ID NO: 176723 - DNA, 74 bp, Homo sapiens
cttccggtctccccacctgtggaagaagtccagcacgctgaccagcagccgcctagccaccggcgaggaggagg

SEQ ID NO: 176724 - DNA, 80 bp, Homo sapiens
cacctgtggaagaagtccagcacgctgaccagcagccgcctagccaccggcgaggaggagggcggtggcagctccagcaa

SEQ ID NO: 176725 - DNA, 79 bp, Homo sapiens
aagaagtccagcacgctgaccagcagccgcctagccaccggcgaggaggagggcggtggcagctccagcaagcgcttcc

SEQ ID NO: 176726 - DNA, 83 bp, Homo sapiens
agcacgctgaccagcagccgcctagccaccggcgaggaggagggcggtggcagctccagcaagcgcttcctgcgctcttgctc

SEQ ID NO: 176727 - DNA, 77 bp, Homo sapiens
accggcgaggaggagggcggtggcagctccagcaagcgcttcctgcgctcttgctccgcctcctgcgttccccatgg

SEQ ID NO: 176728 - DNA, 78 bp, Homo sapiens
agctccagcaagcgcttcctgcgctcttgctccgcctcctgcgttccccatggggccaaggacacggagtggaggtca

SEQ ID NO: 176729 - DNA, 77 bp, Homo sapiens
tcctgcgctcttgctccgcctcctgcgttccccatggggccaaggacacggagtggaggtcagtcacgctgcctcgg

SEQ ID NO: 176730 - DNA, 75 bp, Homo sapiens
tgcgttccccatggggccaaggacacggagtggaggtcagtcacgctgcctcgggacttgcagtccacgggaaga

SEQ ID NO: 176731 - DNA, 75 bp, Homo sapiens
ccatggggccaaggacacggagtggaggtcagtcacgctgcctcgggacttgcagtccacgggaagacagtttga

SEQ ID NO: 176732 - DNA, 76 bp, Homo sapiens
agtggaggtcagtcacgctgcctcgggacttgcagtccacgggaagacagtttgactcgtccacatttggagggca

SEQ ID NO: 176733 - DNA, 74 bp, Homo sapiens
acgctgcctcgggacttgcagtccacgggaagacagtttgactcgtccacatttggagggcacaaaagtgagaa

SEQ ID NO: 176734 - DNA, 72 bp, Homo sapiens
cctcgggacttgcagtccacgggaagacagtttgactcgtccacatttggagggcacaaaagtgagaagccg

SEQ ID NO: 176735 - DNA, 73 bp, Homo sapiens
agtccacgggaagacagtttgactcgtccacatttggagggcacaaaagtgagaagccggctctgcctcggaa

SEQ ID NO: 176736 - DNA, 73 bp, Homo sapiens
aagacagtttgactcgtccacatttggagggcacaaaagtgagaagccggctctgcctcggaagagggcaggg

SEQ ID NO: 176737 - DNA, 74 bp, Homo sapiens
gtttgactcgtccacatttggagggcacaaaagtgagaagccggctctgcctcggaagagggcaggggagaaca

SEQ ID NO: 176738 - DNA, 74 bp, Homo sapiens
atttggagggcacaaaagtgagaagccggctctgcctcggaagagggcaggggagaacaggtctgaccaggtga

SEQ ID NO: 176739 - DNA, 75 bp, Homo sapiens
cacaaaagtgagaagccggctctgcctcggaagagggcaggggagaacaggtctgaccaggtgacccgaggcaca

SEQ ID NO: 176740 - DNA, 74 bp, Homo sapiens
aagtgagaagccggctctgcctcggaagagggcaggggagaacaggtctgaccaggtgacccgaggcacagtaa

SEQ ID NO: 176741 - DNA, 71 bp, Homo sapiens
aagagggcaggggagaacaggtctgaccaggtgacccgaggcacagtaacgcctccccccaggctggtgaa

SEQ ID NO: 176742 - DNA, 71 bp, Homo sapiens
aacaggtctgaccaggtgacccgaggcacagtaacgcctccccccaggctggtgaaaaagaatgaggaagc

SEQ ID NO: 176743 - DNA, 75 bp, Homo sapiens
gtgacccgaggcacagtaacgcctccccccaggctggtgaaaaagaatgaggaagctgctgatgaggtcttcaaa

SEQ ID NO: 176744 - DNA, 78 bp, Homo sapiens
aggcacagtaacgcctccccccaggctggtgaaaaagaatgaggaagctgctgatgaggtcttcaaagacatcatgga

SEQ ID NO: 176745 - DNA, 79 bp, Homo sapiens
aggctggtgaaaaagaatgaggaagctgctgatgaggtcttcaaagacatcatggagtccagcccgggctccagcccgc

SEQ ID NO: 176746 - DNA, 78 bp, Homo sapiens
aaaagaatgaggaagctgctgatgaggtcttcaaagacatcatggagtccagcccgggctccagcccgcccaacctga

SEQ ID NO: 176747 - DNA, 77 bp, Homo sapiens
aggaagctgctgatgaggtcttcaaagacatcatggagtccagcccgggctccagcccgcccaacctgactccaaaa

SEQ ID NO: 176748 - DNA, 74 bp, Homo sapiens
ctgatgaggtcttcaaagacatcatggagtccagcccgggctccagcccgcccaacctgactccaaaacccctc

SEQ ID NO: 176749 - DNA, 73 bp, Homo sapiens
tcttcaaagacatcatggagtccagcccgggctccagcccgcccaacctgactccaaaacccctccggcggca

SEQ ID NO: 176750 - DNA, 71 bp, Homo sapiens
acatcatggagtccagcccgggctccagcccgcccaacctgactccaaaacccctccggcggcaggtcacc

SEQ ID NO: 176751 - DNA, 68 bp, Homo sapiens
agtccagcccgggctccagcccgcccaacctgactccaaaacccctccggcggcaggtcaccgtggcc

SEQ ID NO: 176752 - DNA, 68 bp, Homo sapiens
gggctccagcccgcccaacctgactccaaaacccctccggcggcaggtcaccgtggcccctgcctcgg

SEQ ID NO: 176753 - DNA, 66 bp, Homo sapiens
ccgcccaacctgactccaaaacccctccggcggcaggtcaccgtggcccctgcctcgggcctcccc

SEQ ID NO: 176754 - DNA, 66 bp, Homo sapiens
actccaaaacccctccggcggcaggtcaccgtggcccctgcctcgggcctcccccacaaggaagaa

SEQ ID NO: 176755 - DNA, 69 bp, Homo sapiens
aggtcaccgtggcccctgcctcgggcctcccccacaaggaagaagctggaaagggcagtgccttaggga

SEQ ID NO: 176756 - DNA, 72 bp, Homo sapiens
gtggcccctgcctcgggcctcccccacaaggaagaagctggaaagggcagtgccttagggacccctgctgca

SEQ ID NO: 176757 - DNA, 75 bp, Homo sapiens
tcgggcctcccccacaaggaagaagctggaaagggcagtgccttagggacccctgctgcagctgagccagtgacc

SEQ ID NO: 176758 - DNA, 76 bp, Homo sapiens
ccacaaggaagaagctggaaagggcagtgccttagggacccctgctgcagctgagccagtgacccccaccagcaaa

SEQ ID NO: 176759 - DNA, 81 bp, Homo sapiens
tgccttagggacccctgctgcagctgagccagtgacccccaccagcaaagcaggctcaggtgcaccagggggcaccagcaa

SEQ ID NO: 176760 - DNA, 80 bp, Homo sapiens
cctgctgcagctgagccagtgacccccaccagcaaagcaggctcaggtgcaccagggggcaccagcaagggccccgccga

SEQ ID NO: 176761 - DNA, 78 bp, Homo sapiens
aggctcaggtgcaccagggggcaccagcaagggccccgccgaggagtccagagtgaggaggcacaagcactcctctga

SEQ ID NO: 176762 - DNA, 75 bp, Homo sapiens
accagcaagggccccgccgaggagtccagagtgaggaggcacaagcactcctctgagtcgccagggagggacaag

SEQ ID NO: 176763 - DNA, 74 bp, Homo sapiens
gccccgccgaggagtccagagtgaggaggcacaagcactcctctgagtcgccagggagggacaaggggaaattg

SEQ ID NO: 176764 - DNA, 76 bp, Homo sapiens
aggagtccagagtgaggaggcacaagcactcctctgagtcgccagggagggacaaggggaaattgtccaggctcaa

SEQ ID NO: 176765 - DNA, 75 bp, Homo sapiens
agagtgaggaggcacaagcactcctctgagtcgccagggagggacaaggggaaattgtccaggctcaaacctgcc

SEQ ID NO: 176766 - DNA, 71 bp, Homo sapiens
acaagcactcctctgagtcgccagggagggacaaggggaaattgtccaggctcaaacctgccccgccgccc

SEQ ID NO: 176767 - DNA, 69 bp, Homo sapiens
actcctctgagtcgccagggagggacaaggggaaattgtccaggctcaaacctgccccgccgcccccac

SEQ ID NO: 176768 - DNA, 70 bp, Homo sapiens
agtcgccagggagggacaaggggaaattgtccaggctcaaacctgccccgccgcccccaccagcagcctc

SEQ ID NO: 176769 - DNA, 72 bp, Homo sapiens
acaaggggaaattgtccaggctcaaacctgccccgccgcccccaccagcagcctctgcagggaaggctggag

SEQ ID NO: 176770 - DNA, 72 bp, Homo sapiens
aaattgtccaggctcaaacctgccccgccgcccccaccagcagcctctgcagggaaggctggaggaaagccc

SEQ ID NO: 176771 - DNA, 74 bp, Homo sapiens
aggctcaaacctgccccgccgcccccaccagcagcctctgcagggaaggctggaggaaagccctcgcagagccc

SEQ ID NO: 176772 - DNA, 76 bp, Homo sapiens
cccaccagcagcctctgcagggaaggctggaggaaagccctcgcagagcccgagccaggaggcggccggggaggca

SEQ ID NO: 176773 - DNA, 74 bp, Homo sapiens
agcctctgcagggaaggctggaggaaagccctcgcagagcccgagccaggaggcggccggggaggcagtcctgg

SEQ ID NO: 176774 - DNA, 73 bp, Homo sapiens
ctggaggaaagccctcgcagagcccgagccaggaggcggccggggaggcagtcctgggcgcaaagacaaaagc

SEQ ID NO: 176775 - DNA, 75 bp, Homo sapiens
ctcgcagagcccgagccaggaggcggccggggaggcagtcctgggcgcaaagacaaaagccacgagtctggttga

SEQ ID NO: 176776 - DNA, 76 bp, Homo sapiens
ccgagccaggaggcggccggggaggcagtcctgggcgcaaagacaaaagccacgagtctggttgatgctgtgaaca

SEQ ID NO: 176777 - DNA, 78 bp, Homo sapiens
ggcggccggggaggcagtcctgggcgcaaagacaaaagccacgagtctggttgatgctgtgaacagtgacgctgccaa

SEQ ID NO: 176778 - DNA, 81 bp, Homo sapiens
gaggcagtcctgggcgcaaagacaaaagccacgagtctggttgatgctgtgaacagtgacgctgccaagcccagccagccg

SEQ ID NO: 176779 - DNA, 77 bp, Homo sapiens
aagccacgagtctggttgatgctgtgaacagtgacgctgccaagcccagccagccgggagagggcctcaaaaagccc

SEQ ID NO: 176780 - DNA, 78 bp, Homo sapiens
ttgatgctgtgaacagtgacgctgccaagcccagccagccgggagagggcctcaaaaagcccgtgctcccggccactc

SEQ ID NO: 176781 - DNA, 75 bp, Homo sapiens
tgtgaacagtgacgctgccaagcccagccagccgggagagggcctcaaaaagcccgtgctcccggccactccaaa

SEQ ID NO: 176782 - DNA, 75 bp, Homo sapiens
tgacgctgccaagcccagccagccgggagagggcctcaaaaagcccgtgctcccggccactccaaagccacagtc

SEQ ID NO: 176783 - DNA, 71 bp, Homo sapiens
aagcccagccagccgggagagggcctcaaaaagcccgtgctcccggccactccaaagccacagtccgccaa

SEQ ID NO: 176784 - DNA, 69 bp, Homo sapiens
agccgggagagggcctcaaaaagcccgtgctcccggccactccaaagccacagtccgccaagccgtcgg

SEQ ID NO: 176785 - DNA, 67 bp, Homo sapiens
agggcctcaaaaagcccgtgctcccggccactccaaagccacagtccgccaagccgtcggggacccc

SEQ ID NO: 176786 - DNA, 70 bp, Homo sapiens
aaagcccgtgctcccggccactccaaagccacagtccgccaagccgtcggggacccccatcagcccagcc

SEQ ID NO: 176787 - DNA, 69 bp, Homo sapiens
cggccactccaaagccacagtccgccaagccgtcggggacccccatcagcccagcccccgttccctcca

SEQ ID NO: 176788 - DNA, 70 bp, Homo sapiens
aaagccacagtccgccaagccgtcggggacccccatcagcccagcccccgttccctccacgttgccatca

SEQ ID NO: 176789 - DNA, 72 bp, Homo sapiens
acagtccgccaagccgtcggggacccccatcagcccagcccccgttccctccacgttgccatcagcatcctc

SEQ ID NO: 176790 - DNA, 74 bp, Homo sapiens
cccatcagcccagcccccgttccctccacgttgccatcagcatcctcggccctggcaggggaccagccgtcttc

SEQ ID NO: 176791 - DNA, 72 bp, Homo sapiens
cagcccccgttccctccacgttgccatcagcatcctcggccctggcaggggaccagccgtcttccaccgcct

SEQ ID NO: 176792 - DNA, 77 bp, Homo sapiens
ttccctccacgttgccatcagcatcctcggccctggcaggggaccagccgtcttccaccgccttcatccctctcata

SEQ ID NO: 176793 - DNA, 78 bp, Homo sapiens
ttgccatcagcatcctcggccctggcaggggaccagccgtcttccaccgccttcatccctctcatatcaacccgagtg

SEQ ID NO: 176794 - DNA, 72 bp, Homo sapiens
cctggcaggggaccagccgtcttccaccgccttcatccctctcatatcaacccgagtgtctcttcggaaaac

SEQ ID NO: 176795 - DNA, 73 bp, Homo sapiens
gaccagccgtcttccaccgccttcatccctctcatatcaacccgagtgtctcttcggaaaacccgccagcctc

SEQ ID NO: 176796 - DNA, 75 bp, Homo sapiens
tcttccaccgccttcatccctctcatatcaacccgagtgtctcttcggaaaacccgccagcctccagagcggatc

SEQ ID NO: 176797 - DNA, 77 bp, Homo sapiens
cttcatccctctcatatcaacccgagtgtctcttcggaaaacccgccagcctccagagcggatcgccagcggcgcca

SEQ ID NO: 176798 - DNA, 74 bp, Homo sapiens
atcaacccgagtgtctcttcggaaaacccgccagcctccagagcggatcgccagcggcgccatcaccaagggcg

SEQ ID NO: 176799 - DNA, 76 bp, Homo sapiens
gtgtctcttcggaaaacccgccagcctccagagcggatcgccagcggcgccatcaccaagggcgtggtcctggaca

SEQ ID NO: 176800 - DNA, 76 bp, Homo sapiens
aaaacccgccagcctccagagcggatcgccagcggcgccatcaccaagggcgtggtcctggacagcaccgaggcgc

SEQ ID NO: 176801 - DNA, 82 bp, Homo sapiens
cctccagagcggatcgccagcggcgccatcaccaagggcgtggtcctggacagcaccgaggcgctgtgcctcgccatctcta

SEQ ID NO: 176802 - DNA, 80 bp, Homo sapiens
agcggatcgccagcggcgccatcaccaagggcgtggtcctggacagcaccgaggcgctgtgcctcgccatctctaggaac

SEQ ID NO: 176803 - DNA, 81 bp, Homo sapiens
agcggcgccatcaccaagggcgtggtcctggacagcaccgaggcgctgtgcctcgccatctctaggaactccgagcagatg

SEQ ID NO: 176804 - DNA, 85 bp, Homo sapiens
cgtggtcctggacagcaccgaggcgctgtgcctcgccatctctaggaactccgagcagatggccagccacagcgcagtgctggag

SEQ ID NO: 176805 - DNA, 83 bp, Homo sapiens
agcaccgaggcgctgtgcctcgccatctctaggaactccgagcagatggccagccacagcgcagtgctggaggccggcaaaaa

SEQ ID NO: 176806 - DNA, 85 bp, Homo sapiens
agcagatggccagccacagcgcagtgctggaggccggcaaaaacctctacacgttctgcgtgagctatgtggattccatccagca

SEQ ID NO: 176807 - DNA, 82 bp, Homo sapiens
atggccagccacagcgcagtgctggaggccggcaaaaacctctacacgttctgcgtgagctatgtggattccatccagcaaa

SEQ ID NO: 176808 - DNA, 80 bp, Homo sapiens
agcgcagtgctggaggccggcaaaaacctctacacgttctgcgtgagctatgtggattccatccagcaaatgaggaacaa

SEQ ID NO: 176809 - DNA, 75 bp, Homo sapiens
aggccggcaaaaacctctacacgttctgcgtgagctatgtggattccatccagcaaatgaggaacaagtttgcct

SEQ ID NO: 176810 - DNA, 80 bp, Homo sapiens
tctacacgttctgcgtgagctatgtggattccatccagcaaatgaggaacaagtttgccttccgagaggccatcaacaaa

SEQ ID NO: 176811 - DNA, 76 bp, Homo sapiens
atccagcaaatgaggaacaagtttgccttccgagaggccatcaacaaactggagaataatctccgggagcttcaga

SEQ ID NO: 176812 - DNA, 75 bp, Homo sapiens
aatgaggaacaagtttgccttccgagaggccatcaacaaactggagaataatctccgggagcttcagatctgccc

SEQ ID NO: 176813 - DNA, 76 bp, Homo sapiens
aagtttgccttccgagaggccatcaacaaactggagaataatctccgggagcttcagatctgcccggcgacagcag

SEQ ID NO: 176814 - DNA, 80 bp, Homo sapiens
agaggccatcaacaaactggagaataatctccgggagcttcagatctgcccggcgacagcaggcagtggtccagcggcca

SEQ ID NO: 176815 - DNA, 80 bp, Homo sapiens
atcaacaaactggagaataatctccgggagcttcagatctgcccggcgacagcaggcagtggtccagcggccactcagga

SEQ ID NO: 176816 - DNA, 81 bp, Homo sapiens
agaataatctccgggagcttcagatctgcccggcgacagcaggcagtggtccagcggccactcaggacttcagcaagctcc

SEQ ID NO: 176817 - DNA, 82 bp, Homo sapiens
atctccgggagcttcagatctgcccggcgacagcaggcagtggtccagcggccactcaggacttcagcaagctcctcagttc

SEQ ID NO: 176818 - DNA, 81 bp, Homo sapiens
ttcagatctgcccggcgacagcaggcagtggtccagcggccactcaggacttcagcaagctcctcagttcggtgaaggaaa

SEQ ID NO: 176819 - DNA, 81 bp, Homo sapiens
ccggcgacagcaggcagtggtccagcggccactcaggacttcagcaagctcctcagttcggtgaaggaaatcagtgacata

SEQ ID NO: 176820 - DNA, 81 bp, Homo sapiens
aggcagtggtccagcggccactcaggacttcagcaagctcctcagttcggtgaaggaaatcagtgacatagtgcagaggta

SEQ ID NO: 176821 - DNA, 85 bp, Homo sapiens
tggtccagcggccactcaggacttcagcaagctcctcagttcggtgaaggaaatcagtgacatagtgcagaggtagcagcagtca

SEQ ID NO: 176822 - DNA, 84 bp, Homo sapiens
tcaggacttcagcaagctcctcagttcggtgaaggaaatcagtgacatagtgcagaggtagcagcagtcaggggtcaggtgtca

SEQ ID NO: 176823 - DNA, 82 bp, Homo sapiens
acttcagcaagctcctcagttcggtgaaggaaatcagtgacatagtgcagaggtagcagcagtcaggggtcaggtgtcaggc

SEQ ID NO: 176824 - DNA, 79 bp, Homo sapiens
ctcctcagttcggtgaaggaaatcagtgacatagtgcagaggtagcagcagtcaggggtcaggtgtcaggcccgtcgga

SEQ ID NO: 176825 - DNA, 85 bp, Homo sapiens
tcggtgaaggaaatcagtgacatagtgcagaggtagcagcagtcaggggtcaggtgtcaggcccgtcggagctgcctgcagcaca

SEQ ID NO: 176826 - DNA, 83 bp, Homo sapiens
atagtgcagaggtagcagcagtcaggggtcaggtgtcaggcccgtcggagctgcctgcagcacatgcgggctcgcccataccc

SEQ ID NO: 176827 - DNA, 85 bp, Homo sapiens
tagcagcagtcaggggtcaggtgtcaggcccgtcggagctgcctgcagcacatgcgggctcgcccatacccgtgacagtggctga

SEQ ID NO: 176828 - DNA, 81 bp, Homo sapiens
agtcaggggtcaggtgtcaggcccgtcggagctgcctgcagcacatgcgggctcgcccatacccgtgacagtggctgacaa

SEQ ID NO: 176829 - DNA, 83 bp, Homo sapiens
gtgtcaggcccgtcggagctgcctgcagcacatgcgggctcgcccatacccgtgacagtggctgacaagggactagtgagtca

SEQ ID NO: 176830 - DNA, 82 bp, Homo sapiens
ccgtcggagctgcctgcagcacatgcgggctcgcccatacccgtgacagtggctgacaagggactagtgagtcagcaccttg

SEQ ID NO: 176831 - DNA, 82 bp, Homo sapiens
cctgcagcacatgcgggctcgcccatacccgtgacagtggctgacaagggactagtgagtcagcaccttggcccaggagctc

SEQ ID NO: 176832 - DNA, 81 bp, Homo sapiens
acatgcgggctcgcccatacccgtgacagtggctgacaagggactagtgagtcagcaccttggcccaggagctctgcgcca

SEQ ID NO: 176833 - DNA, 83 bp, Homo sapiens
ctcgcccatacccgtgacagtggctgacaagggactagtgagtcagcaccttggcccaggagctctgcgccaggcagagctga

SEQ ID NO: 176834 - DNA, 83 bp, Homo sapiens
tgacaagggactagtgagtcagcaccttggcccaggagctctgcgccaggcagagctgagggccctgtggagtccagctctac

SEQ ID NO: 176835 - DNA, 81 bp, Homo sapiens
agtcagcaccttggcccaggagctctgcgccaggcagagctgagggccctgtggagtccagctctactacctacgtttgca

SEQ ID NO: 176836 - DNA, 79 bp, Homo sapiens
cccaggagctctgcgccaggcagagctgagggccctgtggagtccagctctactacctacgtttgcaccgcctgccctc

SEQ ID NO: 176837 - DNA, 78 bp, Homo sapiens
tctgcgccaggcagagctgagggccctgtggagtccagctctactacctacgtttgcaccgcctgccctcccgcacct

SEQ ID NO: 176838 - DNA, 75 bp, Homo sapiens
cagagctgagggccctgtggagtccagctctactacctacgtttgcaccgcctgccctcccgcaccttcctcctc

SEQ ID NO: 176839 - DNA, 72 bp, Homo sapiens
ctgagggccctgtggagtccagctctactacctacgtttgcaccgcctgccctcccgcaccttcctcctccc

SEQ ID NO: 176840 - DNA, 72 bp, Homo sapiens
agtccagctctactacctacgtttgcaccgcctgccctcccgcaccttcctcctccccgctccgtctctgtc

SEQ ID NO: 176841 - DNA, 70 bp, Homo sapiens
tactacctacgtttgcaccgcctgccctcccgcaccttcctcctccccgctccgtctctgtcctcgaatt

SEQ ID NO: 176842 - DNA, 72 bp, Homo sapiens
tacgtttgcaccgcctgccctcccgcaccttcctcctccccgctccgtctctgtcctcgaattttatctgtg

SEQ ID NO: 176843 - DNA, 70 bp, Homo sapiens
accgcctgccctcccgcaccttcctcctccccgctccgtctctgtcctcgaattttatctgtggagttcc

SEQ ID NO: 176844 - DNA, 75 bp, Homo sapiens
cgcaccttcctcctccccgctccgtctctgtcctcgaattttatctgtggagttcctgctccgtggactgcagtc

SEQ ID NO: 176845 - DNA, 78 bp, Homo sapiens
tcctccccgctccgtctctgtcctcgaattttatctgtggagttcctgctccgtggactgcagtcggcatgccaggac

SEQ ID NO: 176846 - DNA, 78 bp, Homo sapiens
tccgtctctgtcctcgaattttatctgtggagttcctgctccgtggactgcagtcggcatgccaggacccgccagccc

SEQ ID NO: 176847 - DNA, 78 bp, Homo sapiens
ctctgtcctcgaattttatctgtggagttcctgctccgtggactgcagtcggcatgccaggacccgccagccccgctc

SEQ ID NO: 176848 - DNA, 75 bp, Homo sapiens
aattttatctgtggagttcctgctccgtggactgcagtcggcatgccaggacccgccagccccgctcccacctag

SEQ ID NO: 176849 - DNA, 79 bp, Homo sapiens
tgtggagttcctgctccgtggactgcagtcggcatgccaggacccgccagccccgctcccacctagtgccccagactga

SEQ ID NO: 176850 - DNA, 81 bp, Homo sapiens
tgctccgtggactgcagtcggcatgccaggacccgccagccccgctcccacctagtgccccagactgagctctccaggcca

SEQ ID NO: 176851 - DNA, 78 bp, Homo sapiens
actgcagtcggcatgccaggacccgccagccccgctcccacctagtgccccagactgagctctccaggccaggtggga

SEQ ID NO: 176852 - DNA, 76 bp, Homo sapiens
atgccaggacccgccagccccgctcccacctagtgccccagactgagctctccaggccaggtgggaacggctgatg

SEQ ID NO: 176853 - DNA, 76 bp, Homo sapiens
gccagccccgctcccacctagtgccccagactgagctctccaggccaggtgggaacggctgatgtggactgtcttt

SEQ ID NO: 176854 - DNA, 74 bp, Homo sapiens
ctcccacctagtgccccagactgagctctccaggccaggtgggaacggctgatgtggactgtctttttcatttt

SEQ ID NO: 176855 - DNA, 73 bp, Homo sapiens
acctagtgccccagactgagctctccaggccaggtgggaacggctgatgtggactgtctttttcatttttttc

SEQ ID NO: 176856 - DNA, 75 bp, Homo sapiens
ccagactgagctctccaggccaggtgggaacggctgatgtggactgtctttttcatttttttctctctggagccc

SEQ ID NO: 176857 - DNA, 69 bp, Homo sapiens
tttcatttttttctctctggagcccctcctcccccggctgggcctccttcttccacttctccaagaatg

SEQ ID NO: 176858 - DNA, 71 bp, Homo sapiens
ttttctctctggagcccctcctcccccggctgggcctccttcttccacttctccaagaatggaagcctgaa

SEQ ID NO: 176859 - DNA, 70 bp, Homo sapiens
agcccctcctcccccggctgggcctccttcttccacttctccaagaatggaagcctgaactgaggccttg

SEQ ID NO: 176860 - DNA, 73 bp, Homo sapiens
ctcctcccccggctgggcctccttcttccacttctccaagaatggaagcctgaactgaggccttgtgtgtcag

SEQ ID NO: 176861 - DNA, 78 bp, Homo sapiens
ctgggcctccttcttccacttctccaagaatggaagcctgaactgaggccttgtgtgtcaggccctctgcctgcactc

SEQ ID NO: 176862 - DNA, 78 bp, Homo sapiens
ttctccaagaatggaagcctgaactgaggccttgtgtgtcaggccctctgcctgcactccctggccttgcccgtcgtg

SEQ ID NO: 176863 - DNA, 79 bp, Homo sapiens
aagcctgaactgaggccttgtgtgtcaggccctctgcctgcactccctggccttgcccgtcgtgtgctgaagacatgtt

SEQ ID NO: 176864 - DNA, 79 bp, Homo sapiens
aactgaggccttgtgtgtcaggccctctgcctgcactccctggccttgcccgtcgtgtgctgaagacatgtttcaagaa

SEQ ID NO: 176865 - DNA, 78 bp, Homo sapiens
ccttgtgtgtcaggccctctgcctgcactccctggccttgcccgtcgtgtgctgaagacatgtttcaagaaccgcatt

SEQ ID NO: 176866 - DNA, 79 bp, Homo sapiens
ttgtgtgtcaggccctctgcctgcactccctggccttgcccgtcgtgtgctgaagacatgtttcaagaaccgcatttcg

SEQ ID NO: 176867 - DNA, 78 bp, Homo sapiens
tgtcaggccctctgcctgcactccctggccttgcccgtcgtgtgctgaagacatgtttcaagaaccgcatttcgggaa

SEQ ID NO: 176868 - DNA, 79 bp, Homo sapiens
cctctgcctgcactccctggccttgcccgtcgtgtgctgaagacatgtttcaagaaccgcatttcgggaagggcatgca

SEQ ID NO: 176869 - DNA, 79 bp, Homo sapiens
cactccctggccttgcccgtcgtgtgctgaagacatgtttcaagaaccgcatttcgggaagggcatgcacgggcatgca

SEQ ID NO: 176870 - DNA, 78 bp, Homo sapiens
ccctggccttgcccgtcgtgtgctgaagacatgtttcaagaaccgcatttcgggaagggcatgcacgggcatgcacac

SEQ ID NO: 176871 - DNA, 79 bp, Homo sapiens
cccgtcgtgtgctgaagacatgtttcaagaaccgcatttcgggaagggcatgcacgggcatgcacacggctggtcactc

SEQ ID NO: 176872 - DNA, 81 bp, Homo sapiens
cgtgtgctgaagacatgtttcaagaaccgcatttcgggaagggcatgcacgggcatgcacacggctggtcactctgccctc

SEQ ID NO: 176873 - DNA, 82 bp, Homo sapiens
agacatgtttcaagaaccgcatttcgggaagggcatgcacgggcatgcacacggctggtcactctgccctctgctgctgccc

SEQ ID NO: 176874 - DNA, 80 bp, Homo sapiens
atttcgggaagggcatgcacgggcatgcacacggctggtcactctgccctctgctgctgcccggggtggggtgcactcgc

SEQ ID NO: 176875 - DNA, 80 bp, Homo sapiens
tggtcactctgccctctgctgctgcccggggtggggtgcactcgccatttcctcacgtgcaggacagctcttgatttggg

SEQ ID NO: 176876 - DNA, 75 bp, Homo sapiens
ggtggggtgcactcgccatttcctcacgtgcaggacagctcttgatttgggtggaaaacagggtgctaaagccaa

SEQ ID NO: 176877 - DNA, 73 bp, Homo sapiens
actcgccatttcctcacgtgcaggacagctcttgatttgggtggaaaacagggtgctaaagccaaccagcctt

SEQ ID NO: 176878 - DNA, 72 bp, Homo sapiens
atttcctcacgtgcaggacagctcttgatttgggtggaaaacagggtgctaaagccaaccagcctttgggtc

SEQ ID NO: 176879 - DNA, 70 bp, Homo sapiens
aggacagctcttgatttgggtggaaaacagggtgctaaagccaaccagcctttgggtcctgggcaggtgg

SEQ ID NO: 176880 - DNA, 70 bp, Homo sapiens
ttgatttgggtggaaaacagggtgctaaagccaaccagcctttgggtcctgggcaggtgggagctgaaaa

SEQ ID NO: 176881 - DNA, 73 bp, Homo sapiens
aacagggtgctaaagccaaccagcctttgggtcctgggcaggtgggagctgaaaaggatcgaggcatggggca

SEQ ID NO: 176882 - DNA, 74 bp, Homo sapiens
taaagccaaccagcctttgggtcctgggcaggtgggagctgaaaaggatcgaggcatggggcatgtcctttcca

SEQ ID NO: 176883 - DNA, 76 bp, Homo sapiens
agcctttgggtcctgggcaggtgggagctgaaaaggatcgaggcatggggcatgtcctttccatctgtccacatcc

SEQ ID NO: 176884 - DNA, 79 bp, Homo sapiens
ctgggcaggtgggagctgaaaaggatcgaggcatggggcatgtcctttccatctgtccacatccccagagcccagctct

SEQ ID NO: 176885 - DNA, 83 bp, Homo sapiens
tgggagctgaaaaggatcgaggcatggggcatgtcctttccatctgtccacatccccagagcccagctcttgctctcttgtga

SEQ ID NO: 176886 - DNA, 81 bp, Homo sapiens
aaaaggatcgaggcatggggcatgtcctttccatctgtccacatccccagagcccagctcttgctctcttgtgacgtgcac

SEQ ID NO: 176887 - DNA, 83 bp, Homo sapiens
atctgtccacatccccagagcccagctcttgctctcttgtgacgtgcactgtgaatcctggcaagaaagcttgagtctcaagg

SEQ ID NO: 176888 - DNA, 82 bp, Homo sapiens
ccccagagcccagctcttgctctcttgtgacgtgcactgtgaatcctggcaagaaagcttgagtctcaagggtggcaggtca

SEQ ID NO: 176889 - DNA, 84 bp, Homo sapiens
ttgctctcttgtgacgtgcactgtgaatcctggcaagaaagcttgagtctcaagggtggcaggtcactgtcactgccgacatcc

SEQ ID NO: 176890 - DNA, 79 bp, Homo sapiens
actgtgaatcctggcaagaaagcttgagtctcaagggtggcaggtcactgtcactgccgacatccctcccccagcagaa

SEQ ID NO: 176891 - DNA, 77 bp, Homo sapiens
agcttgagtctcaagggtggcaggtcactgtcactgccgacatccctcccccagcagaatggaggcaggggacaagg

SEQ ID NO: 176892 - DNA, 77 bp, Homo sapiens
agggtggcaggtcactgtcactgccgacatccctcccccagcagaatggaggcaggggacaagggaggcagtggcta

SEQ ID NO: 176893 - DNA, 78 bp, Homo sapiens
tcactgtcactgccgacatccctcccccagcagaatggaggcaggggacaagggaggcagtggctagtggggtgaaca

SEQ ID NO: 176894 - DNA, 77 bp, Homo sapiens
tcactgccgacatccctcccccagcagaatggaggcaggggacaagggaggcagtggctagtggggtgaacagctgg

SEQ ID NO: 176895 - DNA, 75 bp, Homo sapiens
atccctcccccagcagaatggaggcaggggacaagggaggcagtggctagtggggtgaacagctggtgccaaata

SEQ ID NO: 176896 - DNA, 76 bp, Homo sapiens
agcagaatggaggcaggggacaagggaggcagtggctagtggggtgaacagctggtgccaaatagccccagactgg

SEQ ID NO: 176897 - DNA, 75 bp, Homo sapiens
aggcaggggacaagggaggcagtggctagtggggtgaacagctggtgccaaatagccccagactgggcccaggca

SEQ ID NO: 176898 - DNA, 76 bp, Homo sapiens
acaagggaggcagtggctagtggggtgaacagctggtgccaaatagccccagactgggcccaggcaggtctgcaag

SEQ ID NO: 176899 - DNA, 77 bp, Homo sapiens
agtggctagtggggtgaacagctggtgccaaatagccccagactgggcccaggcaggtctgcaagggcccagagtga

SEQ ID NO: 176900 - DNA, 76 bp, Homo sapiens
gtgaacagctggtgccaaatagccccagactgggcccaggcaggtctgcaagggcccagagtgaaccgtcctttca

SEQ ID NO: 176901 - DNA, 74 bp, Homo sapiens
aaatagccccagactgggcccaggcaggtctgcaagggcccagagtgaaccgtcctttcacacatctgggtgcc

SEQ ID NO: 176902 - DNA, 73 bp, Homo sapiens
tgggcccaggcaggtctgcaagggcccagagtgaaccgtcctttcacacatctgggtgccctgaaagggccct

SEQ ID NO: 176903 - DNA, 72 bp, Homo sapiens
ccaggcaggtctgcaagggcccagagtgaaccgtcctttcacacatctgggtgccctgaaagggcccttccc

SEQ ID NO: 176904 - DNA, 69 bp, Homo sapiens
agagtgaaccgtcctttcacacatctgggtgccctgaaagggcccttcccctcccccactcctctaaga

SEQ ID NO: 176905 - DNA, 69 bp, Homo sapiens
ctttcacacatctgggtgccctgaaagggcccttcccctcccccactcctctaagacaaagtagattct

SEQ ID NO: 176906 - DNA, 69 bp, Homo sapiens
acacatctgggtgccctgaaagggcccttcccctcccccactcctctaagacaaagtagattcttacaa

SEQ ID NO: 176907 - DNA, 65 bp, Homo sapiens
ctgaaagggcccttcccctcccccactcctctaagacaaagtagattcttacaaggccctttcct

SEQ ID NO: 176908 - DNA, 66 bp, Homo sapiens
ccttcccctcccccactcctctaagacaaagtagattcttacaaggccctttcctttggaacaaga

SEQ ID NO: 176909 - DNA, 68 bp, Homo sapiens
ccccactcctctaagacaaagtagattcttacaaggccctttcctttggaacaagacagccttcactt

SEQ ID NO: 176910 - DNA, 70 bp, Homo sapiens
tctaagacaaagtagattcttacaaggccctttcctttggaacaagacagccttcacttttctgagttct

SEQ ID NO: 176911 - DNA, 70 bp, Homo sapiens
aaagtagattcttacaaggccctttcctttggaacaagacagccttcacttttctgagttcttgaagcat

SEQ ID NO: 176912 - DNA, 71 bp, Homo sapiens
ttcttacaaggccctttcctttggaacaagacagccttcacttttctgagttcttgaagcatttcaaagcc

SEQ ID NO: 176913 - DNA, 78 bp, Homo sapiens
acaagacagccttcacttttctgagttcttgaagcatttcaaagccctgcctctgtgtagccgccctgagagagaata

SEQ ID NO: 176914 - DNA, 80 bp, Homo sapiens
ttttctgagttcttgaagcatttcaaagccctgcctctgtgtagccgccctgagagagaatagagctgccactgggcacc

SEQ ID NO: 176915 - DNA, 83 bp, Homo sapiens
ttcttgaagcatttcaaagccctgcctctgtgtagccgccctgagagagaatagagctgccactgggcacctgcgcacaggtg

SEQ ID NO: 176916 - DNA, 80 bp, Homo sapiens
atttcaaagccctgcctctgtgtagccgccctgagagagaatagagctgccactgggcacctgcgcacaggtgggaggaa

SEQ ID NO: 176917 - DNA, 80 bp, Homo sapiens
ctctgtgtagccgccctgagagagaatagagctgccactgggcacctgcgcacaggtgggaggaaagggcctggccagtc

SEQ ID NO: 176918 - DNA, 79 bp, Homo sapiens
tgtagccgccctgagagagaatagagctgccactgggcacctgcgcacaggtgggaggaaagggcctggccagtcctgg

SEQ ID NO: 176919 - DNA, 79 bp, Homo sapiens
agagaatagagctgccactgggcacctgcgcacaggtgggaggaaagggcctggccagtcctggtcctggctgcactct

SEQ ID NO: 176920 - DNA, 79 bp, Homo sapiens
atagagctgccactgggcacctgcgcacaggtgggaggaaagggcctggccagtcctggtcctggctgcactcttgaac

SEQ ID NO: 176921 - DNA, 77 bp, Homo sapiens
ggcacctgcgcacaggtgggaggaaagggcctggccagtcctggtcctggctgcactcttgaactgggcgaatgtct

SEQ ID NO: 176922 - DNA, 74 bp, Homo sapiens
cacaggtgggaggaaagggcctggccagtcctggtcctggctgcactcttgaactgggcgaatgtcttatttaa

SEQ ID NO: 176923 - DNA, 79 bp, Homo sapiens
ctggccagtcctggtcctggctgcactcttgaactgggcgaatgtcttatttaattaccgtgagtgacatagcctcatg

SEQ ID NO: 176924 - DNA, 78 bp, Homo sapiens
agtcctggtcctggctgcactcttgaactgggcgaatgtcttatttaattaccgtgagtgacatagcctcatgttctg

SEQ ID NO: 176925 - DNA, 78 bp, Homo sapiens
ctgcactcttgaactgggcgaatgtcttatttaattaccgtgagtgacatagcctcatgttctgtgggggtcatcagg

SEQ ID NO: 176926 - DNA, 72 bp, Homo sapiens
ttatttaattaccgtgagtgacatagcctcatgttctgtgggggtcatcagggagggttaggaaaaccacaa

SEQ ID NO: 176927 - DNA, 72 bp, Homo sapiens
taccgtgagtgacatagcctcatgttctgtgggggtcatcagggagggttaggaaaaccacaaacggagccc

SEQ ID NO: 176928 - DNA, 71 bp, Homo sapiens
atagcctcatgttctgtgggggtcatcagggagggttaggaaaaccacaaacggagcccctgaaagcctca

SEQ ID NO: 176929 - DNA, 69 bp, Homo sapiens
ttctgtgggggtcatcagggagggttaggaaaaccacaaacggagcccctgaaagcctcacgtatttca

SEQ ID NO: 176930 - DNA, 74 bp, Homo sapiens
tcatcagggagggttaggaaaaccacaaacggagcccctgaaagcctcacgtatttcacagagcacgcctgcca

SEQ ID NO: 176931 - DNA, 72 bp, Homo sapiens
agggttaggaaaaccacaaacggagcccctgaaagcctcacgtatttcacagagcacgcctgccatcttctc

SEQ ID NO: 176932 - DNA, 72 bp, Homo sapiens
aggaaaaccacaaacggagcccctgaaagcctcacgtatttcacagagcacgcctgccatcttctccccgag

SEQ ID NO: 176933 - DNA, 74 bp, Homo sapiens
aaacggagcccctgaaagcctcacgtatttcacagagcacgcctgccatcttctccccgaggctgccccaggcc

SEQ ID NO: 176934 - DNA, 75 bp, Homo sapiens
aaagcctcacgtatttcacagagcacgcctgccatcttctccccgaggctgccccaggccggagcccagatacgg

SEQ ID NO: 176935 - DNA, 76 bp, Homo sapiens
acgtatttcacagagcacgcctgccatcttctccccgaggctgccccaggccggagcccagatacgggggctgtga

SEQ ID NO: 176936 - DNA, 79 bp, Homo sapiens
tcacagagcacgcctgccatcttctccccgaggctgccccaggccggagcccagatacgggggctgtgactctgggcag

SEQ ID NO: 176937 - DNA, 73 bp, Homo sapiens
tgccatcttctccccgaggctgccccaggccggagcccagatacgggggctgtgactctgggcagggacccgg

SEQ ID NO: 176938 - DNA, 70 bp, Homo sapiens
ttctccccgaggctgccccaggccggagcccagatacgggggctgtgactctgggcagggacccggggtc

SEQ ID NO: 176939 - DNA, 72 bp, Homo sapiens
tgccccaggccggagcccagatacgggggctgtgactctgggcagggacccggggtctcctggaccttgaca

SEQ ID NO: 176940 - DNA, 77 bp, Homo sapiens
tgtgactctgggcagggacccggggtctcctggaccttgacagagcagctaactccgagagcagtgggcaggtggcc

SEQ ID NO: 176941 - DNA, 75 bp, Homo sapiens
tctgggcagggacccggggtctcctggaccttgacagagcagctaactccgagagcagtgggcaggtggccgccc

SEQ ID NO: 176942 - DNA, 75 bp, Homo sapiens
acccggggtctcctggaccttgacagagcagctaactccgagagcagtgggcaggtggccgcccctgaggcttca

SEQ ID NO: 176943 - DNA, 78 bp, Homo sapiens
tggaccttgacagagcagctaactccgagagcagtgggcaggtggccgcccctgaggcttcacgccgggagaagccac

SEQ ID NO: 176944 - DNA, 77 bp, Homo sapiens
ttgacagagcagctaactccgagagcagtgggcaggtggccgcccctgaggcttcacgccgggagaagccaccttcc

SEQ ID NO: 176945 - DNA, 72 bp, Homo sapiens
agctaactccgagagcagtgggcaggtggccgcccctgaggcttcacgccgggagaagccaccttcccaccc

SEQ ID NO: 176946 - DNA, 71 bp, Homo sapiens
cagtgggcaggtggccgcccctgaggcttcacgccgggagaagccaccttcccaccccttcataccgcctc

SEQ ID NO: 176947 - DNA, 72 bp, Homo sapiens
aggtggccgcccctgaggcttcacgccgggagaagccaccttcccaccccttcataccgcctcgtgccagca

SEQ ID NO: 176948 - DNA, 75 bp, Homo sapiens
cctgaggcttcacgccgggagaagccaccttcccaccccttcataccgcctcgtgccagcagcctcgcacaggcc

SEQ ID NO: 176949 - DNA, 75 bp, Homo sapiens
tcacgccgggagaagccaccttcccaccccttcataccgcctcgtgccagcagcctcgcacaggccctagcttta

SEQ ID NO: 176950 - DNA, 76 bp, Homo sapiens
aagccaccttcccaccccttcataccgcctcgtgccagcagcctcgcacaggccctagctttacgctcatcaccta

SEQ ID NO: 176951 - DNA, 76 bp, Homo sapiens
ttcccaccccttcataccgcctcgtgccagcagcctcgcacaggccctagctttacgctcatcacctaaacttgta

SEQ ID NO: 176952 - DNA, 77 bp, Homo sapiens
tcgtgccagcagcctcgcacaggccctagctttacgctcatcacctaaacttgtactttatttttctgatagaaatg

SEQ ID NO: 176953 - DNA, 72 bp, Homo sapiens
agcctcgcacaggccctagctttacgctcatcacctaaacttgtactttatttttctgatagaaatggtttc

SEQ ID NO: 176954 - DNA, 71 bp, Homo sapiens
acaggccctagctttacgctcatcacctaaacttgtactttatttttctgatagaaatggtttcctctgga

SEQ ID NO: 176955 - DNA, 70 bp, Homo sapiens
ctcatcacctaaacttgtactttatttttctgatagaaatggtttcctctggatcgttttatgcggttct

SEQ ID NO: 176956 - DNA, 73 bp, Homo sapiens
tttatttttctgatagaaatggtttcctctggatcgttttatgcggttcttacagcacatcacctctttgccc

SEQ ID NO: 176957 - DNA, 74 bp, Homo sapiens
atagaaatggtttcctctggatcgttttatgcggttcttacagcacatcacctctttgcccccgacggctgtga

SEQ ID NO: 176958 - DNA, 75 bp, Homo sapiens
tttcctctggatcgttttatgcggttcttacagcacatcacctctttgcccccgacggctgtgacgcagccggag

SEQ ID NO: 176959 - DNA, 77 bp, Homo sapiens
atgcggttcttacagcacatcacctctttgcccccgacggctgtgacgcagccggagggaggcactagtcaccgaca

SEQ ID NO: 176960 - DNA, 77 bp, Homo sapiens
cacatcacctctttgcccccgacggctgtgacgcagccggagggaggcactagtcaccgacagcggccttgaagaca

SEQ ID NO: 176961 - DNA, 76 bp, Homo sapiens
acctctttgcccccgacggctgtgacgcagccggagggaggcactagtcaccgacagcggccttgaagacagagca

SEQ ID NO: 176962 - DNA, 77 bp, Homo sapiens
ccgacggctgtgacgcagccggagggaggcactagtcaccgacagcggccttgaagacagagcaaagcgcccaccca

SEQ ID NO: 176963 - DNA, 76 bp, Homo sapiens
ctgtgacgcagccggagggaggcactagtcaccgacagcggccttgaagacagagcaaagcgcccacccaggtccc

SEQ ID NO: 176964 - DNA, 74 bp, Homo sapiens
agggaggcactagtcaccgacagcggccttgaagacagagcaaagcgcccacccaggtcccccgactgcctgtc

SEQ ID NO: 176965 - DNA, 76 bp, Homo sapiens
ctagtcaccgacagcggccttgaagacagagcaaagcgcccacccaggtcccccgactgcctgtctccatgaggta

SEQ ID NO: 176966 - DNA, 74 bp, Homo sapiens
accgacagcggccttgaagacagagcaaagcgcccacccaggtcccccgactgcctgtctccatgaggtactgg

SEQ ID NO: 176967 - DNA, 72 bp, Homo sapiens
ttgaagacagagcaaagcgcccacccaggtcccccgactgcctgtctccatgaggtactggtcccttccttt

SEQ ID NO: 176968 - DNA, 70 bp, Homo sapiens
agagcaaagcgcccacccaggtcccccgactgcctgtctccatgaggtactggtcccttccttttgttaa

SEQ ID NO: 176969 - DNA, 71 bp, Homo sapiens
acccaggtcccccgactgcctgtctccatgaggtactggtcccttccttttgttaacgtgatgtgccacta

SEQ ID NO: 176970 - DNA, 72 bp, Homo sapiens
cccgactgcctgtctccatgaggtactggtcccttccttttgttaacgtgatgtgccactatattttacacg

SEQ ID NO: 176971 - DNA, 74 bp, Homo sapiens
tgtctccatgaggtactggtcccttccttttgttaacgtgatgtgccactatattttacacgtatctcttggta

SEQ ID NO: 176972 - DNA, 74 bp, Homo sapiens
cccttccttttgttaacgtgatgtgccactatattttacacgtatctcttggtatgcatcttttatagacgctc

SEQ ID NO: 176973 - DNA, 75 bp, Homo sapiens
tttgttaacgtgatgtgccactatattttacacgtatctcttggtatgcatcttttatagacgctcttttctaag

SEQ ID NO: 176974 - DNA, 80 bp, Homo sapiens
cgtgatgtgccactatattttacacgtatctcttggtatgcatcttttatagacgctcttttctaagtggcgtgtgcata

SEQ ID NO: 176975 - DNA, 78 bp, Homo sapiens
actatattttacacgtatctcttggtatgcatcttttatagacgctcttttctaagtggcgtgtgcatagcgtcctgc

SEQ ID NO: 176976 - DNA, 78 bp, Homo sapiens
ttacacgtatctcttggtatgcatcttttatagacgctcttttctaagtggcgtgtgcatagcgtcctgccctgcccc

SEQ ID NO: 176977 - DNA, 75 bp, Homo sapiens
ctcttggtatgcatcttttatagacgctcttttctaagtggcgtgtgcatagcgtcctgccctgccccctcgggg

SEQ ID NO: 176978 - DNA, 73 bp, Homo sapiens
atcttttatagacgctcttttctaagtggcgtgtgcatagcgtcctgccctgccccctcgggggcctgtggtg

SEQ ID NO: 176979 - DNA, 73 bp, Homo sapiens
tagacgctcttttctaagtggcgtgtgcatagcgtcctgccctgccccctcgggggcctgtggtggctccccc

SEQ ID NO: 176980 - DNA, 74 bp, Homo sapiens
tttctaagtggcgtgtgcatagcgtcctgccctgccccctcgggggcctgtggtggctccccctctgcttctcg

SEQ ID NO: 176981 - DNA, 74 bp, Homo sapiens
tgcatagcgtcctgccctgccccctcgggggcctgtggtggctccccctctgcttctcggggtccagtgcattt

SEQ ID NO: 176982 - DNA, 71 bp, Homo sapiens
tcctgccctgccccctcgggggcctgtggtggctccccctctgcttctcggggtccagtgcattttgtttc

SEQ ID NO: 176983 - DNA, 72 bp, Homo sapiens
cccctcgggggcctgtggtggctccccctctgcttctcggggtccagtgcattttgtttctgtatatgattc

SEQ ID NO: 176984 - DNA, 75 bp, Homo sapiens
ctctgcttctcggggtccagtgcattttgtttctgtatatgattctctgtggttttttttgaatccaaatctgtc

SEQ ID NO: 176985 - DNA, 74 bp, Homo sapiens
ggtccagtgcattttgtttctgtatatgattctctgtggttttttttgaatccaaatctgtcctctgtagtatt

SEQ ID NO: 176986 - DNA, 72 bp, Homo sapiens
agtgcattttgtttctgtatatgattctctgtggttttttttgaatccaaatctgtcctctgtagtattttt

SEQ ID NO: 176987 - DNA, 70 bp, Homo sapiens
gtttctgtatatgattctctgtggttttttttgaatccaaatctgtcctctgtagtattttttaaataaa

SEQ ID NO: 176988 - DNA, 71 bp, Homo sapiens
tgattctctgtggttttttttgaatccaaatctgtcctctgtagtattttttaaataaatcagtgtttaca

SEQ ID NO: 176989 - DNA, 78 bp, Homo sapiens
ctctgaccaagcttgacgtcaccaaagcgcgccggaaatgcgaggtcaactgcgcgccgctggcgctgaggggaggaa

SEQ ID NO: 176990 - DNA, 76 bp, Homo sapiens
aagcttgacgtcaccaaagcgcgccggaaatgcgaggtcaactgcgcgccgctggcgctgaggggaggaagtttgc

SEQ ID NO: 176991 - DNA, 78 bp, Homo sapiens
tcaccaaagcgcgccggaaatgcgaggtcaactgcgcgccgctggcgctgaggggaggaagtttgctgtcgagcggcc

SEQ ID NO: 176992 - DNA, 75 bp, Homo sapiens
cggaaatgcgaggtcaactgcgcgccgctggcgctgaggggaggaagtttgctgtcgagcggcctgggttccgtg

SEQ ID NO: 176993 - DNA, 74 bp, Homo sapiens
aggtcaactgcgcgccgctggcgctgaggggaggaagtttgctgtcgagcggcctgggttccgtgggcaaggcc

SEQ ID NO: 176994 - DNA, 74 bp, Homo sapiens
actgcgcgccgctggcgctgaggggaggaagtttgctgtcgagcggcctgggttccgtgggcaaggccgtggga

SEQ ID NO: 176995 - DNA, 73 bp, Homo sapiens
ctggcgctgaggggaggaagtttgctgtcgagcggcctgggttccgtgggcaaggccgtgggaggcagcgttg

SEQ ID NO: 176996 - DNA, 74 bp, Homo sapiens
aggaagtttgctgtcgagcggcctgggttccgtgggcaaggccgtgggaggcagcgttggctgcttcgacacac

SEQ ID NO: 176997 - DNA, 76 bp, Homo sapiens
gtttgctgtcgagcggcctgggttccgtgggcaaggccgtgggaggcagcgttggctgcttcgacacactgagggc

SEQ ID NO: 176998 - DNA, 76 bp, Homo sapiens
gcctgggttccgtgggcaaggccgtgggaggcagcgttggctgcttcgacacactgagggcggcgcgatgggagac

SEQ ID NO: 176999 - DNA, 78 bp, Homo sapiens
gttccgtgggcaaggccgtgggaggcagcgttggctgcttcgacacactgagggcggcgcgatgggagacgagatgga

SEQ ID NO: 177000 - DNA, 80 bp, Homo sapiens
aaggccgtgggaggcagcgttggctgcttcgacacactgagggcggcgcgatgggagacgagatggatgccatgattccc

SEQ ID NO: 177001 - DNA, 83 bp, Homo sapiens
aggcagcgttggctgcttcgacacactgagggcggcgcgatgggagacgagatggatgccatgattcccgagcgggagatgaa

SEQ ID NO: 177002 - DNA, 83 bp, Homo sapiens
gttggctgcttcgacacactgagggcggcgcgatgggagacgagatggatgccatgattcccgagcgggagatgaaggtcaga

SEQ ID NO: 177003 - DNA, 79 bp, Homo sapiens
acacactgagggcggcgcgatgggagacgagatggatgccatgattcccgagcgggagatgaaggtcagagactaaccg

SEQ ID NO: 177004 - DNA, 76 bp, Homo sapiens
agggcggcgcgatgggagacgagatggatgccatgattcccgagcgggagatgaaggtcagagactaaccggggcc

SEQ ID NO: 177005 - DNA, 74 bp, Homo sapiens
atgggagacgagatggatgccatgattcccgagcgggagatgaaggtcagagactaaccggggcctccctccct

SEQ ID NO: 177006 - DNA, 72 bp, Homo sapiens
atttctttctttattgaattgatctcgttttgattcttcacaacaggattttcagtttagagcgctaaagaa

SEQ ID NO: 177007 - DNA, 75 bp, Homo sapiens
tctttattgaattgatctcgttttgattcttcacaacaggattttcagtttagagcgctaaagaaggtgagaatc

SEQ ID NO: 177008 - DNA, 74 bp, Homo sapiens
aattgatctcgttttgattcttcacaacaggattttcagtttagagcgctaaagaaggtgagaatctttgactc

SEQ ID NO: 177009 - DNA, 73 bp, Homo sapiens
tttgattcttcacaacaggattttcagtttagagcgctaaagaaggtgagaatctttgactcccctgaggaat

SEQ ID NO: 177010 - DNA, 73 bp, Homo sapiens
cttcacaacaggattttcagtttagagcgctaaagaaggtgagaatctttgactcccctgaggaattgcccaa

SEQ ID NO: 177011 - DNA, 72 bp, Homo sapiens
attttcagtttagagcgctaaagaaggtgagaatctttgactcccctgaggaattgcccaaggaacgctcga

SEQ ID NO: 177012 - DNA, 76 bp, Homo sapiens
tttagagcgctaaagaaggtgagaatctttgactcccctgaggaattgcccaaggaacgctcgagtctgcttgctg

SEQ ID NO: 177013 - DNA, 76 bp, Homo sapiens
aaggtgagaatctttgactcccctgaggaattgcccaaggaacgctcgagtctgcttgctgtgtccaacaaatatg

SEQ ID NO: 177014 - DNA, 76 bp, Homo sapiens
aatctttgactcccctgaggaattgcccaaggaacgctcgagtctgcttgctgtgtccaacaaatatggtctggtc

SEQ ID NO: 177015 - DNA, 78 bp, Homo sapiens
ccctgaggaattgcccaaggaacgctcgagtctgcttgctgtgtccaacaaatatggtctggtcttcgctggtggagc

SEQ ID NO: 177016 - DNA, 78 bp, Homo sapiens
aattgcccaaggaacgctcgagtctgcttgctgtgtccaacaaatatggtctggtcttcgctggtggagccagtggct

SEQ ID NO: 177017 - DNA, 79 bp, Homo sapiens
aaggaacgctcgagtctgcttgctgtgtccaacaaatatggtctggtcttcgctggtggagccagtggcttgcagattt

SEQ ID NO: 177018 - DNA, 78 bp, Homo sapiens
tctgcttgctgtgtccaacaaatatggtctggtcttcgctggtggagccagtggcttgcagatttttcctactaaaaa

SEQ ID NO: 177019 - DNA, 75 bp, Homo sapiens
tgtgtccaacaaatatggtctggtcttcgctggtggagccagtggcttgcagatttttcctactaaaaatcttct

SEQ ID NO: 177020 - DNA, 73 bp, Homo sapiens
aaatatggtctggtcttcgctggtggagccagtggcttgcagatttttcctactaaaaatcttcttattcaaa

SEQ ID NO: 177021 - DNA, 72 bp, Homo sapiens
ggtctggtcttcgctggtggagccagtggcttgcagatttttcctactaaaaatcttcttattcaaaataaa

SEQ ID NO: 177022 - DNA, 72 bp, Homo sapiens
tggtggagccagtggcttgcagatttttcctactaaaaatcttcttattcaaaataaacccggagatgatcc

SEQ ID NO: 177023 - DNA, 70 bp, Homo sapiens
cagtggcttgcagatttttcctactaaaaatcttcttattcaaaataaacccggagatgatcccaacaaa

SEQ ID NO: 177024 - DNA, 68 bp, Homo sapiens
gcagatttttcctactaaaaatcttcttattcaaaataaacccggagatgatcccaacaaaataggta

SEQ ID NO: 177025 - DNA, 68 bp, Homo sapiens
cttcttattcaaaataaacccggagatgatcccaacaaaataggtaagttccctggtttatgttgcaa

SEQ ID NO: 177026 - DNA, 68 bp, Homo sapiens
attcaaaataaacccggagatgatcccaacaaaataggtaagttccctggtttatgttgcaaagtaga

SEQ ID NO: 177027 - DNA, 72 bp, Homo sapiens
tgtatttttttgttttcatagttgataaagtccaaggcttgctagttcctatgaaattcccaatccatcacc

SEQ ID NO: 177028 - DNA, 72 bp, Homo sapiens
tttttgttttcatagttgataaagtccaaggcttgctagttcctatgaaattcccaatccatcacctggcct

SEQ ID NO: 177029 - DNA, 76 bp, Homo sapiens
atagttgataaagtccaaggcttgctagttcctatgaaattcccaatccatcacctggccttgagctgtgataacc

SEQ ID NO: 177030 - DNA, 78 bp, Homo sapiens
taaagtccaaggcttgctagttcctatgaaattcccaatccatcacctggccttgagctgtgataacctcacactctc

SEQ ID NO: 177031 - DNA, 86 bp, Homo sapiens
tgctagttcctatgaaattcccaatccatcacctggccttgagctgtgataacctcacactctctgcgtgcatgatgtccagtgaa

SEQ ID NO: 177032 - DNA, 86 bp, Homo sapiens
tatgaaattcccaatccatcacctggccttgagctgtgataacctcacactctctgcgtgcatgatgtccagtgaatatggttcca

SEQ ID NO: 177033 - DNA, 84 bp, Homo sapiens
attcccaatccatcacctggccttgagctgtgataacctcacactctctgcgtgcatgatgtccagtgaatatggttccattat

SEQ ID NO: 177034 - DNA, 82 bp, Homo sapiens
atcacctggccttgagctgtgataacctcacactctctgcgtgcatgatgtccagtgaatatggttccattattgctttttt

SEQ ID NO: 177035 - DNA, 85 bp, Homo sapiens
ttgagctgtgataacctcacactctctgcgtgcatgatgtccagtgaatatggttccattattgctttttttgatgttcgcacat

SEQ ID NO: 177036 - DNA, 82 bp, Homo sapiens
ataacctcacactctctgcgtgcatgatgtccagtgaatatggttccattattgctttttttgatgttcgcacattctcaaa

SEQ ID NO: 177037 - DNA, 82 bp, Homo sapiens
acactctctgcgtgcatgatgtccagtgaatatggttccattattgctttttttgatgttcgcacattctcaaatgaggtaa

SEQ ID NO: 177038 - DNA, 79 bp, Homo sapiens
atgatgtccagtgaatatggttccattattgctttttttgatgttcgcacattctcaaatgaggtaagctactgttata

SEQ ID NO: 177039 - DNA, 78 bp, Homo sapiens
agtgaatatggttccattattgctttttttgatgttcgcacattctcaaatgaggtaagctactgttatactgtgatg

SEQ ID NO: 177040 - DNA, 81 bp, Homo sapiens
tatggttccattattgctttttttgatgttcgcacattctcaaatgaggtaagctactgttatactgtgatgtcaacatga

SEQ ID NO: 177041 - DNA, 67 bp, Homo sapiens
ttactatttgttaacttatttcacttttgcatatttgttttaaaaggctaaacagcaaaaacgccca

SEQ ID NO: 177042 - DNA, 69 bp, Homo sapiens
gttaacttatttcacttttgcatatttgttttaaaaggctaaacagcaaaaacgcccatttgcctatca

SEQ ID NO: 177043 - DNA, 71 bp, Homo sapiens
tcacttttgcatatttgttttaaaaggctaaacagcaaaaacgcccatttgcctatcataagcttttgaaa

SEQ ID NO: 177044 - DNA, 71 bp, Homo sapiens
atatttgttttaaaaggctaaacagcaaaaacgcccatttgcctatcataagcttttgaaagatgcaggag

SEQ ID NO: 177045 - DNA, 77 bp, Homo sapiens
ttaaaaggctaaacagcaaaaacgcccatttgcctatcataagcttttgaaagatgcaggaggcatggtgattgata

SEQ ID NO: 177046 - DNA, 79 bp, Homo sapiens
taaacagcaaaaacgcccatttgcctatcataagcttttgaaagatgcaggaggcatggtgattgatatgaagtggaac

SEQ ID NO: 177047 - DNA, 76 bp, Homo sapiens
aaaaacgcccatttgcctatcataagcttttgaaagatgcaggaggcatggtgattgatatgaagtggaaccccac

SEQ ID NO: 177048 - DNA, 79 bp, Homo sapiens
atttgcctatcataagcttttgaaagatgcaggaggcatggtgattgatatgaagtggaaccccactgtcccctccatg

SEQ ID NO: 177049 - DNA, 77 bp, Homo sapiens
ataagcttttgaaagatgcaggaggcatggtgattgatatgaagtggaaccccactgtcccctccatggtggcagtt

SEQ ID NO: 177050 - DNA, 81 bp, Homo sapiens
aagatgcaggaggcatggtgattgatatgaagtggaaccccactgtcccctccatggtggcagtttgtctggctgatggta

SEQ ID NO: 177051 - DNA, 78 bp, Homo sapiens
aggaggcatggtgattgatatgaagtggaaccccactgtcccctccatggtggcagtttgtctggctgatggtagtat

SEQ ID NO: 177052 - DNA, 79 bp, Homo sapiens
attgatatgaagtggaaccccactgtcccctccatggtggcagtttgtctggctgatggtagtattgctgtcctgcaag

SEQ ID NO: 177053 - DNA, 78 bp, Homo sapiens
atgaagtggaaccccactgtcccctccatggtggcagtttgtctggctgatggtagtattgctgtcctgcaagtcacg

SEQ ID NO: 177054 - DNA, 78 bp, Homo sapiens
actgtcccctccatggtggcagtttgtctggctgatggtagtattgctgtcctgcaagtcacggaaacagtgaaagta

SEQ ID NO: 177055 - DNA, 82 bp, Homo sapiens
tccatggtggcagtttgtctggctgatggtagtattgctgtcctgcaagtcacggaaacagtgaaagtatgtgcaactcttc

SEQ ID NO: 177056 - DNA, 78 bp, Homo sapiens
agtttgtctggctgatggtagtattgctgtcctgcaagtcacggaaacagtgaaagtatgtgcaactcttccttccac

SEQ ID NO: 177057 - DNA, 79 bp, Homo sapiens
gctgatggtagtattgctgtcctgcaagtcacggaaacagtgaaagtatgtgcaactcttccttccacggtagcagtaa

SEQ ID NO: 177058 - DNA, 76 bp, Homo sapiens
gtagtattgctgtcctgcaagtcacggaaacagtgaaagtatgtgcaactcttccttccacggtagcagtaacctc

SEQ ID NO: 177059 - DNA, 76 bp, Homo sapiens
tcctgcaagtcacggaaacagtgaaagtatgtgcaactcttccttccacggtagcagtaacctctggtgagtaata

SEQ ID NO: 177060 - DNA, 72 bp, Homo sapiens
aagtcacggaaacagtgaaagtatgtgcaactcttccttccacggtagcagtaacctctggtgagtaataaa

SEQ ID NO: 177061 - DNA, 74 bp, Homo sapiens
agtgaaagtatgtgcaactcttccttccacggtagcagtaacctctggtgagtaataaaggctttcacactgta

SEQ ID NO: 177062 - DNA, 78 bp, Homo sapiens
gtgtgatagatcttattggtttgctccattttcttgttttcatttggtaatactgtctttgctcagtgtgctggagcc

SEQ ID NO: 177063 - DNA, 74 bp, Homo sapiens
tcttattggtttgctccattttcttgttttcatttggtaatactgtctttgctcagtgtgctggagccccaaag

SEQ ID NO: 177064 - DNA, 77 bp, Homo sapiens
tccattttcttgttttcatttggtaatactgtctttgctcagtgtgctggagccccaaaggaaagcagctggcagtg

SEQ ID NO: 177065 - DNA, 76 bp, Homo sapiens
ttgttttcatttggtaatactgtctttgctcagtgtgctggagccccaaaggaaagcagctggcagtgggaaaaca

SEQ ID NO: 177066 - DNA, 76 bp, Homo sapiens
atttggtaatactgtctttgctcagtgtgctggagccccaaaggaaagcagctggcagtgggaaaacagaatggaa

SEQ ID NO: 177067 - DNA, 78 bp, Homo sapiens
tctttgctcagtgtgctggagccccaaaggaaagcagctggcagtgggaaaacagaatggaactgtggtccagtatct

SEQ ID NO: 177068 - DNA, 76 bp, Homo sapiens
agtgtgctggagccccaaaggaaagcagctggcagtgggaaaacagaatggaactgtggtccagtatcttcctgta

SEQ ID NO: 177069 - DNA, 73 bp, Homo sapiens
gccccaaaggaaagcagctggcagtgggaaaacagaatggaactgtggtccagtatcttcctgtaagttctta

SEQ ID NO: 177070 - DNA, 75 bp, Homo sapiens
aaagcagctggcagtgggaaaacagaatggaactgtggtccagtatcttcctgtaagttcttatcttgaacttca

SEQ ID NO: 177071 - DNA, 72 bp, Homo sapiens
gcagtgggaaaacagaatggaactgtggtccagtatcttcctgtaagttcttatcttgaacttcagaatttt

SEQ ID NO: 177072 - DNA, 71 bp, Homo sapiens
ggaaaacagaatggaactgtggtccagtatcttcctgtaagttcttatcttgaacttcagaatttttctta

SEQ ID NO: 177073 - DNA, 69 bp, Homo sapiens
aactgtggtccagtatcttcctgtaagttcttatcttgaacttcagaatttttcttaagttgcccactt

SEQ ID NO: 177074 - DNA, 69 bp, Homo sapiens
gacagtttgattggtttaggatttgtttcatttgatactttattttcccctccaaatctctttcagact

SEQ ID NO: 177075 - DNA, 70 bp, Homo sapiens
gattggtttaggatttgtttcatttgatactttattttcccctccaaatctctttcagactttgcaggaa

SEQ ID NO: 177076 - DNA, 67 bp, Homo sapiens
ggatttgtttcatttgatactttattttcccctccaaatctctttcagactttgcaggaaaaaaaag

SEQ ID NO: 177077 - DNA, 69 bp, Homo sapiens
ttgatactttattttcccctccaaatctctttcagactttgcaggaaaaaaaagtcattccttgtcctc

SEQ ID NO: 177078 - DNA, 67 bp, Homo sapiens
tattttcccctccaaatctctttcagactttgcaggaaaaaaaagtcattccttgtcctccgtttta

SEQ ID NO: 177079 - DNA, 75 bp, Homo sapiens
caaatctctttcagactttgcaggaaaaaaaagtcattccttgtcctccgttttatgagtcagatcatcctgtca

SEQ ID NO: 177080 - DNA, 74 bp, Homo sapiens
tttcagactttgcaggaaaaaaaagtcattccttgtcctccgttttatgagtcagatcatcctgtcagaggtaa

SEQ ID NO: 177081 - DNA, 72 bp, Homo sapiens
caggaaaaaaaagtcattccttgtcctccgttttatgagtcagatcatcctgtcagaggtaacaactgcttt

SEQ ID NO: 177082 - DNA, 73 bp, Homo sapiens
aaaaagtcattccttgtcctccgttttatgagtcagatcatcctgtcagaggtaacaactgcttttcttattg

SEQ ID NO: 177083 - DNA, 78 bp, Homo sapiens
ttgtcctccgttttatgagtcagatcatcctgtcagaggtaacaactgcttttcttattgggctgacctctaatgaca

SEQ ID NO: 177084 - DNA, 80 bp, Homo sapiens
ttttatgagtcagatcatcctgtcagaggtaacaactgcttttcttattgggctgacctctaatgacatgttatgtatat

SEQ ID NO: 177085 - DNA, 81 bp, Homo sapiens
tatctggttgctgtcatttttatgagctactgattaagatgtgtctttcagttctggatgtgctgtggattggtacctacg

SEQ ID NO: 177086 - DNA, 78 bp, Homo sapiens
atttttatgagctactgattaagatgtgtctttcagttctggatgtgctgtggattggtacctacgtcttcgccatag

SEQ ID NO: 177087 - DNA, 87 bp, Homo sapiens
tatgagctactgattaagatgtgtctttcagttctggatgtgctgtggattggtacctacgtcttcgccatagtgtatgctgctgca

SEQ ID NO: 177088 - DNA, 83 bp, Homo sapiens
attaagatgtgtctttcagttctggatgtgctgtggattggtacctacgtcttcgccatagtgtatgctgctgcagatgggac

SEQ ID NO: 177089 - DNA, 80 bp, Homo sapiens
tttcagttctggatgtgctgtggattggtacctacgtcttcgccatagtgtatgctgctgcagatgggaccctggaaacg

SEQ ID NO: 177090 - DNA, 82 bp, Homo sapiens
ttctggatgtgctgtggattggtacctacgtcttcgccatagtgtatgctgctgcagatgggaccctggaaacgtctccaga

SEQ ID NO: 177091 - DNA, 81 bp, Homo sapiens
ctgtggattggtacctacgtcttcgccatagtgtatgctgctgcagatgggaccctggaaacgtctccagatgtggtgatg

SEQ ID NO: 177092 - DNA, 82 bp, Homo sapiens
tggtacctacgtcttcgccatagtgtatgctgctgcagatgggaccctggaaacgtctccagatgtggtgatggctctacta

SEQ ID NO: 177093 - DNA, 83 bp, Homo sapiens
tcttcgccatagtgtatgctgctgcagatgggaccctggaaacgtctccagatgtggtgatggctctactaccggtatgcctg

SEQ ID NO: 177094 - DNA, 80 bp, Homo sapiens
tatgctgctgcagatgggaccctggaaacgtctccagatgtggtgatggctctactaccggtatgcctgtggaagaaatt

SEQ ID NO: 177095 - DNA, 76 bp, Homo sapiens
cagatgggaccctggaaacgtctccagatgtggtgatggctctactaccggtatgcctgtggaagaaatttcattg

SEQ ID NO: 177096 - DNA, 75 bp, Homo sapiens
cctggaaacgtctccagatgtggtgatggctctactaccggtatgcctgtggaagaaatttcattgtttgagaat

SEQ ID NO: 177097 - DNA, 71 bp, Homo sapiens
ttttcttgctttgttcattgtagaaaaaagaagaaaagcacccagagatatttgtgaactttatggagccc

SEQ ID NO: 177098 - DNA, 73 bp, Homo sapiens
ctttgttcattgtagaaaaaagaagaaaagcacccagagatatttgtgaactttatggagccctgttatggca

SEQ ID NO: 177099 - DNA, 76 bp, Homo sapiens
ttgtagaaaaaagaagaaaagcacccagagatatttgtgaactttatggagccctgttatggcagctgcacggaga

SEQ ID NO: 177100 - DNA, 81 bp, Homo sapiens
agaagaaaagcacccagagatatttgtgaactttatggagccctgttatggcagctgcacggagagacagcatcattacta

SEQ ID NO: 177101 - DNA, 83 bp, Homo sapiens
cagagatatttgtgaactttatggagccctgttatggcagctgcacggagagacagcatcattactacctcagttacattgag

SEQ ID NO: 177102 - DNA, 81 bp, Homo sapiens
atatttgtgaactttatggagccctgttatggcagctgcacggagagacagcatcattactacctcagttacattgaggaa

SEQ ID NO: 177103 - DNA, 84 bp, Homo sapiens
actttatggagccctgttatggcagctgcacggagagacagcatcattactacctcagttacattgaggaatggtgagcagaga

SEQ ID NO: 177104 - DNA, 87 bp, Homo sapiens
tgttatggcagctgcacggagagacagcatcattactacctcagttacattgaggaatggtgagcagagagtctggacagggcattc

SEQ ID NO: 177105 - DNA, 87 bp, Homo sapiens
agctgcacggagagacagcatcattactacctcagttacattgaggaatggtgagcagagagtctggacagggcattcctgctctca

SEQ ID NO: 177106 - DNA, 68 bp, Homo sapiens
acccaggttagcttagaactattgctgtatttgaacgtaatggtctctggttttattctttaagggat

SEQ ID NO: 177107 - DNA, 71 bp, Homo sapiens
gttagcttagaactattgctgtatttgaacgtaatggtctctggttttattctttaagggatttagtgctg

SEQ ID NO: 177108 - DNA, 77 bp, Homo sapiens
tattgctgtatttgaacgtaatggtctctggttttattctttaagggatttagtgctggcagcatctgcggcttcaa

SEQ ID NO: 177109 - DNA, 75 bp, Homo sapiens
tatttgaacgtaatggtctctggttttattctttaagggatttagtgctggcagcatctgcggcttcaacagaag

SEQ ID NO: 177110 - DNA, 75 bp, Homo sapiens
taatggtctctggttttattctttaagggatttagtgctggcagcatctgcggcttcaacagaagttagtatcct

SEQ ID NO: 177111 - DNA, 79 bp, Homo sapiens
tttattctttaagggatttagtgctggcagcatctgcggcttcaacagaagttagtatccttgctcgacaaagtgatca

SEQ ID NO: 177112 - DNA, 78 bp, Homo sapiens
tttaagggatttagtgctggcagcatctgcggcttcaacagaagttagtatccttgctcgacaaagtgatcaggtaaa

SEQ ID NO: 177113 - DNA, 78 bp, Homo sapiens
atttagtgctggcagcatctgcggcttcaacagaagttagtatccttgctcgacaaagtgatcaggtaaatctctttt

SEQ ID NO: 177114 - DNA, 77 bp, Homo sapiens
agcatctgcggcttcaacagaagttagtatccttgctcgacaaagtgatcaggtaaatctcttttttgtcacttctg

SEQ ID NO: 177115 - DNA, 75 bp, Homo sapiens
ttcaacagaagttagtatccttgctcgacaaagtgatcaggtaaatctcttttttgtcacttctgtggtgctttc

SEQ ID NO: 177116 - DNA, 71 bp, Homo sapiens
aagttagtatccttgctcgacaaagtgatcaggtaaatctcttttttgtcacttctgtggtgctttctttt

SEQ ID NO: 177117 - DNA, 71 bp, Homo sapiens
atccttgctcgacaaagtgatcaggtaaatctcttttttgtcacttctgtggtgctttcttttttaaatta

SEQ ID NO: 177118 - DNA, 75 bp, Homo sapiens
tttttttttagattaattgggaatcttggctactggaggattctagtcgagctgaattgcctgtgacagacaaga

SEQ ID NO: 177119 - DNA, 80 bp, Homo sapiens
ttttagattaattgggaatcttggctactggaggattctagtcgagctgaattgcctgtgacagacaagagtgatgactc

SEQ ID NO: 177120 - DNA, 81 bp, Homo sapiens
attgggaatcttggctactggaggattctagtcgagctgaattgcctgtgacagacaagagtgatgactccttgcccatgg

SEQ ID NO: 177121 - DNA, 82 bp, Homo sapiens
tactggaggattctagtcgagctgaattgcctgtgacagacaagagtgatgactccttgcccatgggagttgtcgtagacta

SEQ ID NO: 177122 - DNA, 80 bp, Homo sapiens
attctagtcgagctgaattgcctgtgacagacaagagtgatgactccttgcccatgggagttgtcgtagactatacaaac

SEQ ID NO: 177123 - DNA, 79 bp, Homo sapiens
agctgaattgcctgtgacagacaagagtgatgactccttgcccatgggagttgtcgtagactatacaaaccaagtggaa

SEQ ID NO: 177124 - DNA, 78 bp, Homo sapiens
attgcctgtgacagacaagagtgatgactccttgcccatgggagttgtcgtagactatacaaaccaagtggaaatcac

SEQ ID NO: 177125 - DNA, 77 bp, Homo sapiens
caagagtgatgactccttgcccatgggagttgtcgtagactatacaaaccaagtggaaatcaccatcagtaagtgta

SEQ ID NO: 177126 - DNA, 76 bp, Homo sapiens
tgactccttgcccatgggagttgtcgtagactatacaaaccaagtggaaatcaccatcagtaagtgtagcctggta

SEQ ID NO: 177127 - DNA, 74 bp, Homo sapiens
ttgcccatgggagttgtcgtagactatacaaaccaagtggaaatcaccatcagtaagtgtagcctggtagttag

SEQ ID NO: 177128 - DNA, 74 bp, Homo sapiens
agttgtcgtagactatacaaaccaagtggaaatcaccatcagtaagtgtagcctggtagttagtgcagaaatag

SEQ ID NO: 177129 - DNA, 73 bp, Homo sapiens
ttttcttttttaacaggtgatgaaaagactcttcctcctgctccagttctcatgttactttcaacagatggtg

SEQ ID NO: 177130 - DNA, 76 bp, Homo sapiens
tttttaacaggtgatgaaaagactcttcctcctgctccagttctcatgttactttcaacagatggtgtgctttgtc

SEQ ID NO: 177131 - DNA, 78 bp, Homo sapiens
atgaaaagactcttcctcctgctccagttctcatgttactttcaacagatggtgtgctttgtccattttatatgatta

SEQ ID NO: 177132 - DNA, 77 bp, Homo sapiens
cttcctcctgctccagttctcatgttactttcaacagatggtgtgctttgtccattttatatgattaatcaaaatcc

SEQ ID NO: 177133 - DNA, 75 bp, Homo sapiens
ctccagttctcatgttactttcaacagatggtgtgctttgtccattttatatgattaatcaaaatcctggggtta

SEQ ID NO: 177134 - DNA, 75 bp, Homo sapiens
ttctcatgttactttcaacagatggtgtgctttgtccattttatatgattaatcaaaatcctggggttaagtctc

SEQ ID NO: 177135 - DNA, 75 bp, Homo sapiens
tttcaacagatggtgtgctttgtccattttatatgattaatcaaaatcctggggttaagtctctcatcaaaacac

SEQ ID NO: 177136 - DNA, 74 bp, Homo sapiens
gtgtgctttgtccattttatatgattaatcaaaatcctggggttaagtctctcatcaaaacaccagagcgactt

SEQ ID NO: 177137 - DNA, 75 bp, Homo sapiens
tgtccattttatatgattaatcaaaatcctggggttaagtctctcatcaaaacaccagagcgactttcattagaa

SEQ ID NO: 177138 - DNA, 75 bp, Homo sapiens
tttatatgattaatcaaaatcctggggttaagtctctcatcaaaacaccagagcgactttcattagaaggagagc

SEQ ID NO: 177139 - DNA, 75 bp, Homo sapiens
taatcaaaatcctggggttaagtctctcatcaaaacaccagagcgactttcattagaaggagagcgacagcccaa

SEQ ID NO: 177140 - DNA, 77 bp, Homo sapiens
gggttaagtctctcatcaaaacaccagagcgactttcattagaaggagagcgacagcccaagtcaccaggtatgtgc

SEQ ID NO: 177141 - DNA, 81 bp, Homo sapiens
tctcatcaaaacaccagagcgactttcattagaaggagagcgacagcccaagtcaccaggtatgtgcctctgcctgcttta

SEQ ID NO: 177142 - DNA, 79 bp, Homo sapiens
aaacaccagagcgactttcattagaaggagagcgacagcccaagtcaccaggtatgtgcctctgcctgctttatcagta

SEQ ID NO: 177143 - DNA, 68 bp, Homo sapiens
acctccactgttacagtgttaacattttccttcctttttttgtcactgcaggaagtactcccactacc

SEQ ID NO: 177144 - DNA, 67 bp, Homo sapiens
ttacagtgttaacattttccttcctttttttgtcactgcaggaagtactcccactaccccaacctcc

SEQ ID NO: 177145 - DNA, 67 bp, Homo sapiens
aacattttccttcctttttttgtcactgcaggaagtactcccactaccccaacctcctctcaagccc

SEQ ID NO: 177146 - DNA, 75 bp, Homo sapiens
ttttttgtcactgcaggaagtactcccactaccccaacctcctctcaagccccacagaaactggatgcttctgca

SEQ ID NO: 177147 - DNA, 80 bp, Homo sapiens
tgtcactgcaggaagtactcccactaccccaacctcctctcaagccccacagaaactggatgcttctgcagctgcagccc

SEQ ID NO: 177148 - DNA, 77 bp, Homo sapiens
aagtactcccactaccccaacctcctctcaagccccacagaaactggatgcttctgcagctgcagcccctgcctctc

SEQ ID NO: 177149 - DNA, 81 bp, Homo sapiens
actaccccaacctcctctcaagccccacagaaactggatgcttctgcagctgcagcccctgcctctctgccaccttcatca

SEQ ID NO: 177150 - DNA, 84 bp, Homo sapiens
aacctcctctcaagccccacagaaactggatgcttctgcagctgcagcccctgcctctctgccaccttcatcacctgctgctcc

SEQ ID NO: 177151 - DNA, 84 bp, Homo sapiens
cccacagaaactggatgcttctgcagctgcagcccctgcctctctgccaccttcatcacctgctgctcccattgccactttttc

SEQ ID NO: 177152 - DNA, 83 bp, Homo sapiens
aaactggatgcttctgcagctgcagcccctgcctctctgccaccttcatcacctgctgctcccattgccactttttctttgct

SEQ ID NO: 177153 - DNA, 85 bp, Homo sapiens
ttctgcagctgcagcccctgcctctctgccaccttcatcacctgctgctcccattgccactttttctttgcttcctgctggtgga

SEQ ID NO: 177154 - DNA, 81 bp, Homo sapiens
ctgcagcccctgcctctctgccaccttcatcacctgctgctcccattgccactttttctttgcttcctgctggtggagccc

SEQ ID NO: 177155 - DNA, 80 bp, Homo sapiens
tctctgccaccttcatcacctgctgctcccattgccactttttctttgcttcctgctggtggagcccccactgtgttctc

SEQ ID NO: 177156 - DNA, 76 bp, Homo sapiens
tgctgctcccattgccactttttctttgcttcctgctggtggagcccccactgtgttctcctttggttcttcatct

SEQ ID NO: 177157 - DNA, 72 bp, Homo sapiens
attgccactttttctttgcttcctgctggtggagcccccactgtgttctcctttggttcttcatctttgaag

SEQ ID NO: 177158 - DNA, 75 bp, Homo sapiens
tttttctttgcttcctgctggtggagcccccactgtgttctcctttggttcttcatctttgaagtcatctgctac

SEQ ID NO: 177159 - DNA, 77 bp, Homo sapiens
ttgcttcctgctggtggagcccccactgtgttctcctttggttcttcatctttgaagtcatctgctacggtcactgg

SEQ ID NO: 177160 - DNA, 74 bp, Homo sapiens
ctggtggagcccccactgtgttctcctttggttcttcatctttgaagtcatctgctacggtcactggggagccc

SEQ ID NO: 177161 - DNA, 74 bp, Homo sapiens
actgtgttctcctttggttcttcatctttgaagtcatctgctacggtcactggggagcccccttcatattccag

SEQ ID NO: 177162 - DNA, 76 bp, Homo sapiens
tcctttggttcttcatctttgaagtcatctgctacggtcactggggagcccccttcatattccagtggctccgaca

SEQ ID NO: 177163 - DNA, 77 bp, Homo sapiens
gttcttcatctttgaagtcatctgctacggtcactggggagcccccttcatattccagtggctccgacagctccaaa

SEQ ID NO: 177164 - DNA, 77 bp, Homo sapiens
tttgaagtcatctgctacggtcactggggagcccccttcatattccagtggctccgacagctccaaagcagccccag

SEQ ID NO: 177165 - DNA, 76 bp, Homo sapiens
tctgctacggtcactggggagcccccttcatattccagtggctccgacagctccaaagcagccccaggccctggcc

SEQ ID NO: 177166 - DNA, 73 bp, Homo sapiens
actggggagcccccttcatattccagtggctccgacagctccaaagcagccccaggccctggcccatcaacct

SEQ ID NO: 177167 - DNA, 72 bp, Homo sapiens
tattccagtggctccgacagctccaaagcagccccaggccctggcccatcaaccttctcttttgttccccct

SEQ ID NO: 177168 - DNA, 67 bp, Homo sapiens
aaagcagccccaggccctggcccatcaaccttctcttttgttcccccttctaaagcctccctagccc

SEQ ID NO: 177169 - DNA, 65 bp, Homo sapiens
cccaggccctggcccatcaaccttctcttttgttcccccttctaaagcctccctagcccccaccc

SEQ ID NO: 177170 - DNA, 69 bp, Homo sapiens
ccatcaaccttctcttttgttcccccttctaaagcctccctagcccccacccctgcagcgtctcctgtg

SEQ ID NO: 177171 - DNA, 68 bp, Homo sapiens
aaccttctcttttgttcccccttctaaagcctccctagcccccacccctgcagcgtctcctgtggctc

SEQ ID NO: 177172 - DNA, 75 bp, Homo sapiens
tttgttcccccttctaaagcctccctagcccccacccctgcagcgtctcctgtggctccatcagctgcttcattc

SEQ ID NO: 177173 - DNA, 80 bp, Homo sapiens
ttctaaagcctccctagcccccacccctgcagcgtctcctgtggctccatcagctgcttcattctcctttggatcatctg

SEQ ID NO: 177174 - DNA, 79 bp, Homo sapiens
tagcccccacccctgcagcgtctcctgtggctccatcagctgcttcattctcctttggatcatctggttttaagcctac

SEQ ID NO: 177175 - DNA, 80 bp, Homo sapiens
ccctgcagcgtctcctgtggctccatcagctgcttcattctcctttggatcatctggttttaagcctaccctggaaagca

SEQ ID NO: 177176 - DNA, 79 bp, Homo sapiens
agcgtctcctgtggctccatcagctgcttcattctcctttggatcatctggttttaagcctaccctggaaagcacacca

SEQ ID NO: 177177 - DNA, 79 bp, Homo sapiens
ctccatcagctgcttcattctcctttggatcatctggttttaagcctaccctggaaagcacaccagtgccaagtgtgtc

SEQ ID NO: 177178 - DNA, 78 bp, Homo sapiens
tgcttcattctcctttggatcatctggttttaagcctaccctggaaagcacaccagtgccaagtgtgtctgctccaaa

SEQ ID NO: 177179 - DNA, 76 bp, Homo sapiens
attctcctttggatcatctggttttaagcctaccctggaaagcacaccagtgccaagtgtgtctgctccaaatata

SEQ ID NO: 177180 - DNA, 75 bp, Homo sapiens
ggttttaagcctaccctggaaagcacaccagtgccaagtgtgtctgctccaaatatagcaatgaagccctccttc

SEQ ID NO: 177181 - DNA, 76 bp, Homo sapiens
ctaccctggaaagcacaccagtgccaagtgtgtctgctccaaatatagcaatgaagccctccttcccaccctcaac

SEQ ID NO: 177182 - DNA, 79 bp, Homo sapiens
aagcacaccagtgccaagtgtgtctgctccaaatatagcaatgaagccctccttcccaccctcaacctctgctgtcaaa

SEQ ID NO: 177183 - DNA, 75 bp, Homo sapiens
tgctccaaatatagcaatgaagccctccttcccaccctcaacctctgctgtcaaagtcaaccttagtgaaaagta

SEQ ID NO: 177184 - DNA, 71 bp, Homo sapiens
aaatatagcaatgaagccctccttcccaccctcaacctctgctgtcaaagtcaaccttagtgaaaagtaag

SEQ ID NO: 177185 - DNA, 69 bp, Homo sapiens
aagccctccttcccaccctcaacctctgctgtcaaagtcaaccttagtgaaaagtaagtcacttctaaa

SEQ ID NO: 177186 - DNA, 70 bp, Homo sapiens
ttcccaccctcaacctctgctgtcaaagtcaaccttagtgaaaagtaagtcacttctaaagtttgattct

SEQ ID NO: 177187 - DNA, 79 bp, Homo sapiens
aatcttctagcaggctcttctgaggccttcaggctgccatttttcaggtttactgctgcagctacctctactcctgtta

SEQ ID NO: 177188 - DNA, 78 bp, Homo sapiens
aggctcttctgaggccttcaggctgccatttttcaggtttactgctgcagctacctctactcctgttagtagctccca

SEQ ID NO: 177189 - DNA, 80 bp, Homo sapiens
ttctgaggccttcaggctgccatttttcaggtttactgctgcagctacctctactcctgttagtagctcccagagcgcac

SEQ ID NO: 177190 - DNA, 77 bp, Homo sapiens
aggctgccatttttcaggtttactgctgcagctacctctactcctgttagtagctcccagagcgcacccccgatgtc

SEQ ID NO: 177191 - DNA, 77 bp, Homo sapiens
ttttcaggtttactgctgcagctacctctactcctgttagtagctcccagagcgcacccccgatgtcgccattctct

SEQ ID NO: 177192 - DNA, 79 bp, Homo sapiens
ggtttactgctgcagctacctctactcctgttagtagctcccagagcgcacccccgatgtcgccattctcttctgcctc

SEQ ID NO: 177193 - DNA, 79 bp, Homo sapiens
agctacctctactcctgttagtagctcccagagcgcacccccgatgtcgccattctcttctgcctccaagccagctgct

SEQ ID NO: 177194 - DNA, 81 bp, Homo sapiens
tctactcctgttagtagctcccagagcgcacccccgatgtcgccattctcttctgcctccaagccagctgcttctggacca

SEQ ID NO: 177195 - DNA, 81 bp, Homo sapiens
ttagtagctcccagagcgcacccccgatgtcgccattctcttctgcctccaagccagctgcttctggaccactcagccacc

SEQ ID NO: 177196 - DNA, 81 bp, Homo sapiens
agcgcacccccgatgtcgccattctcttctgcctccaagccagctgcttctggaccactcagccaccccacacctctctca

SEQ ID NO: 177197 - DNA, 82 bp, Homo sapiens
gatgtcgccattctcttctgcctccaagccagctgcttctggaccactcagccaccccacacctctctcagcaccacctagt

SEQ ID NO: 177198 - DNA, 80 bp, Homo sapiens
attctcttctgcctccaagccagctgcttctggaccactcagccaccccacacctctctcagcaccacctagttccgtgc

SEQ ID NO: 177199 - DNA, 81 bp, Homo sapiens
ttctgcctccaagccagctgcttctggaccactcagccaccccacacctctctcagcaccacctagttccgtgccattgaa

SEQ ID NO: 177200 - DNA, 80 bp, Homo sapiens
agctgcttctggaccactcagccaccccacacctctctcagcaccacctagttccgtgccattgaagtcctcagtcttgc

SEQ ID NO: 177201 - DNA, 79 bp, Homo sapiens
ttctggaccactcagccaccccacacctctctcagcaccacctagttccgtgccattgaagtcctcagtcttgccctca

SEQ ID NO: 177202 - DNA, 79 bp, Homo sapiens
gccaccccacacctctctcagcaccacctagttccgtgccattgaagtcctcagtcttgccctcaccatcaggtatgat

SEQ ID NO: 177203 - DNA, 79 bp, Homo sapiens
acacctctctcagcaccacctagttccgtgccattgaagtcctcagtcttgccctcaccatcaggtatgattttaagca

SEQ ID NO: 177204 - DNA, 76 bp, Homo sapiens
agcaccacctagttccgtgccattgaagtcctcagtcttgccctcaccatcaggtatgattttaagcagacaactt

SEQ ID NO: 177205 - DNA, 75 bp, Homo sapiens
acctagttccgtgccattgaagtcctcagtcttgccctcaccatcaggtatgattttaagcagacaactttagac

SEQ ID NO: 177206 - DNA, 74 bp, Homo sapiens
aataaaggtaataaatgccatctattttaactgacttctttttcaagcaggacgatctgctcagggcagttcaa

SEQ ID NO: 177207 - DNA, 75 bp, Homo sapiens
aggtaataaatgccatctattttaactgacttctttttcaagcaggacgatctgctcagggcagttcaagcccag

SEQ ID NO: 177208 - DNA, 77 bp, Homo sapiens
atctattttaactgacttctttttcaagcaggacgatctgctcagggcagttcaagcccagtgccctcaatggtaca

SEQ ID NO: 177209 - DNA, 78 bp, Homo sapiens
tttaactgacttctttttcaagcaggacgatctgctcagggcagttcaagcccagtgccctcaatggtacagaaatca

SEQ ID NO: 177210 - DNA, 78 bp, Homo sapiens
ttctttttcaagcaggacgatctgctcagggcagttcaagcccagtgccctcaatggtacagaaatcacccaggataa

SEQ ID NO: 177211 - DNA, 78 bp, Homo sapiens
agcaggacgatctgctcagggcagttcaagcccagtgccctcaatggtacagaaatcacccaggataacccctccagc

SEQ ID NO: 177212 - DNA, 78 bp, Homo sapiens
tctgctcagggcagttcaagcccagtgccctcaatggtacagaaatcacccaggataacccctccagcggcaaagcca

SEQ ID NO: 177213 - DNA, 74 bp, Homo sapiens
agttcaagcccagtgccctcaatggtacagaaatcacccaggataacccctccagcggcaaagccaggctctcc

SEQ ID NO: 177214 - DNA, 74 bp, Homo sapiens
tgccctcaatggtacagaaatcacccaggataacccctccagcggcaaagccaggctctccccaggtatgttta

SEQ ID NO: 177215 - DNA, 70 bp, Homo sapiens
aatggtacagaaatcacccaggataacccctccagcggcaaagccaggctctccccaggtatgtttaaat

SEQ ID NO: 177216 - DNA, 73 bp, Homo sapiens
atcacccaggataacccctccagcggcaaagccaggctctccccaggtatgtttaaattcagcttgcaatgtt

SEQ ID NO: 177217 - DNA, 72 bp, Homo sapiens
ataacccctccagcggcaaagccaggctctccccaggtatgtttaaattcagcttgcaatgtttgtgtttat

SEQ ID NO: 177218 - DNA, 74 bp, Homo sapiens
tataattgcttgtagaagctatgacttgcagtttttaaaccttttccttccatttcaggcaaagtcacttcagc

SEQ ID NO: 177219 - DNA, 74 bp, Homo sapiens
aagctatgacttgcagtttttaaaccttttccttccatttcaggcaaagtcacttcagcctgctgttgcagaaa

SEQ ID NO: 177220 - DNA, 74 bp, Homo sapiens
atgacttgcagtttttaaaccttttccttccatttcaggcaaagtcacttcagcctgctgttgcagaaaagcag

SEQ ID NO: 177221 - DNA, 74 bp, Homo sapiens
tttttaaaccttttccttccatttcaggcaaagtcacttcagcctgctgttgcagaaaagcagggacatcagtg

SEQ ID NO: 177222 - DNA, 81 bp, Homo sapiens
tccttccatttcaggcaaagtcacttcagcctgctgttgcagaaaagcagggacatcagtggaaagattcagatcctgtaa

SEQ ID NO: 177223 - DNA, 82 bp, Homo sapiens
tttcaggcaaagtcacttcagcctgctgttgcagaaaagcagggacatcagtggaaagattcagatcctgtaatggctggaa

SEQ ID NO: 177224 - DNA, 79 bp, Homo sapiens
aaagtcacttcagcctgctgttgcagaaaagcagggacatcagtggaaagattcagatcctgtaatggctggaattggg

SEQ ID NO: 177225 - DNA, 77 bp, Homo sapiens
tgctgttgcagaaaagcagggacatcagtggaaagattcagatcctgtaatggctggaattggggaggaggtaaatt

SEQ ID NO: 177226 - DNA, 72 bp, Homo sapiens
agaaaagcagggacatcagtggaaagattcagatcctgtaatggctggaattggggaggaggtaaatttgtt

SEQ ID NO: 177227 - DNA, 73 bp, Homo sapiens
gacatcagtggaaagattcagatcctgtaatggctggaattggggaggaggtaaatttgtttcctgagggtgt

SEQ ID NO: 177228 - DNA, 71 bp, Homo sapiens
gaaagattcagatcctgtaatggctggaattggggaggaggtaaatttgtttcctgagggtgtttttctga

SEQ ID NO: 177229 - DNA, 69 bp, Homo sapiens
attcagatcctgtaatggctggaattggggaggaggtaaatttgtttcctgagggtgtttttctgaaag

SEQ ID NO: 177230 - DNA, 77 bp, Homo sapiens
ttactgtttgtccttcagactgagtagttcctcacttgtggcttctacagattgcacactttcagaaggagttggaa

SEQ ID NO: 177231 - DNA, 76 bp, Homo sapiens
tccttcagactgagtagttcctcacttgtggcttctacagattgcacactttcagaaggagttggaagagttaaaa

SEQ ID NO: 177232 - DNA, 73 bp, Homo sapiens
tagttcctcacttgtggcttctacagattgcacactttcagaaggagttggaagagttaaaagcccgaacttc

SEQ ID NO: 177233 - DNA, 71 bp, Homo sapiens
acttgtggcttctacagattgcacactttcagaaggagttggaagagttaaaagcccgaacttccaaagcc

SEQ ID NO: 177234 - DNA, 71 bp, Homo sapiens
ttctacagattgcacactttcagaaggagttggaagagttaaaagcccgaacttccaaagcctgtttccaa

SEQ ID NO: 177235 - DNA, 70 bp, Homo sapiens
attgcacactttcagaaggagttggaagagttaaaagcccgaacttccaaagcctgtttccaagtgggca

SEQ ID NO: 177236 - DNA, 69 bp, Homo sapiens
tttcagaaggagttggaagagttaaaagcccgaacttccaaagcctgtttccaagtgggcacttctgag

SEQ ID NO: 177237 - DNA, 72 bp, Homo sapiens
agttggaagagttaaaagcccgaacttccaaagcctgtttccaagtgggcacttctgaggagatgaagatgc

SEQ ID NO: 177238 - DNA, 77 bp, Homo sapiens
ttaaaagcccgaacttccaaagcctgtttccaagtgggcacttctgaggagatgaagatgctgcgaacagaatcaga

SEQ ID NO: 177239 - DNA, 81 bp, Homo sapiens
ttccaaagcctgtttccaagtgggcacttctgaggagatgaagatgctgcgaacagaatcagatgacttgcatacctttct

SEQ ID NO: 177240 - DNA, 80 bp, Homo sapiens
aagcctgtttccaagtgggcacttctgaggagatgaagatgctgcgaacagaatcagatgacttgcatacctttcttttg

SEQ ID NO: 177241 - DNA, 81 bp, Homo sapiens
aagtgggcacttctgaggagatgaagatgctgcgaacagaatcagatgacttgcatacctttcttttggagattaaagaga

SEQ ID NO: 177242 - DNA, 81 bp, Homo sapiens
tgaggagatgaagatgctgcgaacagaatcagatgacttgcatacctttcttttggagattaaagagaccacagaggtttg

SEQ ID NO: 177243 - DNA, 77 bp, Homo sapiens
aagatgctgcgaacagaatcagatgacttgcatacctttcttttggagattaaagagaccacagaggtttgtgttta

SEQ ID NO: 177244 - DNA, 75 bp, Homo sapiens
gaacagaatcagatgacttgcatacctttcttttggagattaaagagaccacagaggtttgtgtttatggatact

SEQ ID NO: 177245 - DNA, 73 bp, Homo sapiens
aatcagatgacttgcatacctttcttttggagattaaagagaccacagaggtttgtgtttatggatacttttc

SEQ ID NO: 177246 - DNA, 70 bp, Homo sapiens
catacctttcttttggagattaaagagaccacagaggtttgtgtttatggatacttttcctgagttgaat

SEQ ID NO: 177247 - DNA, 72 bp, Homo sapiens
ttggacgtaacaactttttgtaccaacacattattgtactttttctagtcgcttcatggagatataagtagc

SEQ ID NO: 177248 - DNA, 71 bp, Homo sapiens
actttttgtaccaacacattattgtactttttctagtcgcttcatggagatataagtagcctgaaaacaac

SEQ ID NO: 177249 - DNA, 72 bp, Homo sapiens
accaacacattattgtactttttctagtcgcttcatggagatataagtagcctgaaaacaactttacttgag

SEQ ID NO: 177250 - DNA, 72 bp, Homo sapiens
attattgtactttttctagtcgcttcatggagatataagtagcctgaaaacaactttacttgagggctttgc

SEQ ID NO: 177251 - DNA, 73 bp, Homo sapiens
ctttttctagtcgcttcatggagatataagtagcctgaaaacaactttacttgagggctttgctggtgttgag

SEQ ID NO: 177252 - DNA, 75 bp, Homo sapiens
ttcatggagatataagtagcctgaaaacaactttacttgagggctttgctggtgttgaggaagccagagaacaaa

SEQ ID NO: 177253 - DNA, 72 bp, Homo sapiens
atataagtagcctgaaaacaactttacttgagggctttgctggtgttgaggaagccagagaacaaaatgaaa

SEQ ID NO: 177254 - DNA, 73 bp, Homo sapiens
tgaaaacaactttacttgagggctttgctggtgttgaggaagccagagaacaaaatgaaagaaatcgtgactc

SEQ ID NO: 177255 - DNA, 72 bp, Homo sapiens
aactttacttgagggctttgctggtgttgaggaagccagagaacaaaatgaaagaaatcgtgactctggtta

SEQ ID NO: 177256 - DNA, 77 bp, Homo sapiens
ggctttgctggtgttgaggaagccagagaacaaaatgaaagaaatcgtgactctggttatctgcatttgctttataa

SEQ ID NO: 177257 - DNA, 76 bp, Homo sapiens
tggtgttgaggaagccagagaacaaaatgaaagaaatcgtgactctggttatctgcatttgctttataaaagacca

SEQ ID NO: 177258 - DNA, 75 bp, Homo sapiens
agccagagaacaaaatgaaagaaatcgtgactctggttatctgcatttgctttataaaagaccactggatcccaa

SEQ ID NO: 177259 - DNA, 74 bp, Homo sapiens
aacaaaatgaaagaaatcgtgactctggttatctgcatttgctttataaaagaccactggatcccaagagtgaa

SEQ ID NO: 177260 - DNA, 77 bp, Homo sapiens
aaagaaatcgtgactctggttatctgcatttgctttataaaagaccactggatcccaagagtgaagctcagcttcag

SEQ ID NO: 177261 - DNA, 80 bp, Homo sapiens
ctctggttatctgcatttgctttataaaagaccactggatcccaagagtgaagctcagcttcaggtaggagatctatgta

SEQ ID NO: 177262 - DNA, 80 bp, Homo sapiens
tatctgcatttgctttataaaagaccactggatcccaagagtgaagctcagcttcaggtaggagatctatgtaaatctgt

SEQ ID NO: 177263 - DNA, 74 bp, Homo sapiens
ctttataaaagaccactggatcccaagagtgaagctcagcttcaggtaggagatctatgtaaatctgtttaaaa

SEQ ID NO: 177264 - DNA, 74 bp, Homo sapiens
aaaagaccactggatcccaagagtgaagctcagcttcaggtaggagatctatgtaaatctgtttaaaagattta

SEQ ID NO: 177265 - DNA, 76 bp, Homo sapiens
tcccaagagtgaagctcagcttcaggtaggagatctatgtaaatctgtttaaaagatttaaaaacaagctcatgta

SEQ ID NO: 177266 - DNA, 76 bp, Homo sapiens
gtgaagctcagcttcaggtaggagatctatgtaaatctgtttaaaagatttaaaaacaagctcatgtaacaattgc

SEQ ID NO: 177267 - DNA, 74 bp, Homo sapiens
cagcttcaggtaggagatctatgtaaatctgtttaaaagatttaaaaacaagctcatgtaacaattgctacctc

SEQ ID NO: 177268 - DNA, 73 bp, Homo sapiens
aggagatctatgtaaatctgtttaaaagatttaaaaacaagctcatgtaacaattgctacctctttttgcata

SEQ ID NO: 177269 - DNA, 74 bp, Homo sapiens
aatctgtttaaaagatttaaaaacaagctcatgtaacaattgctacctctttttgcatatagatttggatgatg

SEQ ID NO: 177270 - DNA, 75 bp, Homo sapiens
aaagatttaaaaacaagctcatgtaacaattgctacctctttttgcatatagatttggatgatggctctttttga

SEQ ID NO: 177271 - DNA, 76 bp, Homo sapiens
aaaaacaagctcatgtaacaattgctacctctttttgcatatagatttggatgatggctctttttgaagttgttga

SEQ ID NO: 177272 - DNA, 78 bp, Homo sapiens
ctcatgtaacaattgctacctctttttgcatatagatttggatgatggctctttttgaagttgttgattttctgctta

SEQ ID NO: 177273 - DNA, 77 bp, Homo sapiens
tgctacctctttttgcatatagatttggatgatggctctttttgaagttgttgattttctgcttataatttaccaca

SEQ ID NO: 177274 - DNA, 74 bp, Homo sapiens
ttttgcatatagatttggatgatggctctttttgaagttgttgattttctgcttataatttaccacatttcccg

SEQ ID NO: 177275 - DNA, 70 bp, Homo sapiens
agatttggatgatggctctttttgaagttgttgattttctgcttataatttaccacatttcccgtaaact

SEQ ID NO: 177276 - DNA, 70 bp, Homo sapiens
ggatgatggctctttttgaagttgttgattttctgcttataatttaccacatttcccgtaaacttcctta

SEQ ID NO: 177277 - DNA, 69 bp, Homo sapiens
tttgaagttgttgattttctgcttataatttaccacatttcccgtaaacttccttaactgtggcaaaca

SEQ ID NO: 177278 - DNA, 71 bp, Homo sapiens
ttgattttctgcttataatttaccacatttcccgtaaacttccttaactgtggcaaacagtacacttcatg

SEQ ID NO: 177279 - DNA, 71 bp, Homo sapiens
ctgcttataatttaccacatttcccgtaaacttccttaactgtggcaaacagtacacttcatgtaattatg

SEQ ID NO: 177280 - DNA, 68 bp, Homo sapiens
aatttaccacatttcccgtaaacttccttaactgtggcaaacagtacacttcatgtaattatgtaatt

SEQ ID NO: 177281 - DNA, 68 bp, Homo sapiens
catttcccgtaaacttccttaactgtggcaaacagtacacttcatgtaattatgtaatttttttcact

SEQ ID NO: 177282 - DNA, 69 bp, Homo sapiens
aaacttccttaactgtggcaaacagtacacttcatgtaattatgtaatttttttcacttaaaacataga

SEQ ID NO: 177283 - DNA, 68 bp, Homo sapiens
aactgtggcaaacagtacacttcatgtaattatgtaatttttttcacttaaaacatagatttttttta

SEQ ID NO: 177284 - DNA, 71 bp, Homo sapiens
gctggaattacacgcgtgactggccaaaattttttattaaaccttaagcttaatagagaatactctgttga

SEQ ID NO: 177285 - DNA, 70 bp, Homo sapiens
ttacacgcgtgactggccaaaattttttattaaaccttaagcttaatagagaatactctgttgaaacatg

SEQ ID NO: 177286 - DNA, 70 bp, Homo sapiens
gtgactggccaaaattttttattaaaccttaagcttaatagagaatactctgttgaaacatgtaagttga

SEQ ID NO: 177287 - DNA, 69 bp, Homo sapiens
tttttattaaaccttaagcttaatagagaatactctgttgaaacatgtaagttgaattataaataaata

SEQ ID NO: 177288 - DNA, 73 bp, Homo sapiens
aaataaataataattattaaagtggcaactatttcttgagtgccatttaatctgctaggtgtttcttatgcat

SEQ ID NO: 177289 - DNA, 75 bp, Homo sapiens
taattattaaagtggcaactatttcttgagtgccatttaatctgctaggtgtttcttatgcattatttctagcct

SEQ ID NO: 177290 - DNA, 75 bp, Homo sapiens
attaaagtggcaactatttcttgagtgccatttaatctgctaggtgtttcttatgcattatttctagccttcaaa

SEQ ID NO: 177291 - DNA, 80 bp, Homo sapiens
aactatttcttgagtgccatttaatctgctaggtgtttcttatgcattatttctagccttcaaagccagctgctctgcaa

SEQ ID NO: 177292 - DNA, 79 bp, Homo sapiens
agtgccatttaatctgctaggtgtttcttatgcattatttctagccttcaaagccagctgctctgcaaggtaagagtta

SEQ ID NO: 177293 - DNA, 78 bp, Homo sapiens
tttaatctgctaggtgtttcttatgcattatttctagccttcaaagccagctgctctgcaaggtaagagttactggtc

SEQ ID NO: 177294 - DNA, 78 bp, Homo sapiens
tgtttcttatgcattatttctagccttcaaagccagctgctctgcaaggtaagagttactggtccctgtagcccatta

SEQ ID NO: 177295 - DNA, 76 bp, Homo sapiens
cattatttctagccttcaaagccagctgctctgcaaggtaagagttactggtccctgtagcccattatacaggtaa

SEQ ID NO: 177296 - DNA, 75 bp, Homo sapiens
tagccttcaaagccagctgctctgcaaggtaagagttactggtccctgtagcccattatacaggtaactggaaat

SEQ ID NO: 177297 - DNA, 72 bp, Homo sapiens
aaagccagctgctctgcaaggtaagagttactggtccctgtagcccattatacaggtaactggaaattaaat

SEQ ID NO: 177298 - DNA, 72 bp, Homo sapiens
tctgcaaggtaagagttactggtccctgtagcccattatacaggtaactggaaattaaatttcataggctaa

SEQ ID NO: 177299 - DNA, 69 bp, Homo sapiens
aggtaagagttactggtccctgtagcccattatacaggtaactggaaattaaatttcataggctaagta

SEQ ID NO: 177300 - DNA, 71 bp, Homo sapiens
tactggtccctgtagcccattatacaggtaactggaaattaaatttcataggctaagtagcttgtccaaag

SEQ ID NO: 177301 - DNA, 74 bp, Homo sapiens
tgtagcccattatacaggtaactggaaattaaatttcataggctaagtagcttgtccaaagtcatgttggctag

SEQ ID NO: 177302 - DNA, 71 bp, Homo sapiens
tatacaggtaactggaaattaaatttcataggctaagtagcttgtccaaagtcatgttggctaggaaacgg

SEQ ID NO: 177303 - DNA, 70 bp, Homo sapiens
aaattaaatttcataggctaagtagcttgtccaaagtcatgttggctaggaaacggggaaccagaattga

SEQ ID NO: 177304 - DNA, 69 bp, Homo sapiens
aaatttcataggctaagtagcttgtccaaagtcatgttggctaggaaacggggaaccagaattgaaacc

SEQ ID NO: 177305 - DNA, 72 bp, Homo sapiens
agtagcttgtccaaagtcatgttggctaggaaacggggaaccagaattgaaacctccatttgcctgagctct

SEQ ID NO: 177306 - DNA, 73 bp, Homo sapiens
tgtccaaagtcatgttggctaggaaacggggaaccagaattgaaacctccatttgcctgagctcttttctgta

SEQ ID NO: 177307 - DNA, 73 bp, Homo sapiens
aaagtcatgttggctaggaaacggggaaccagaattgaaacctccatttgcctgagctcttttctgtatgcta

SEQ ID NO: 177308 - DNA, 73 bp, Homo sapiens
tgttggctaggaaacggggaaccagaattgaaacctccatttgcctgagctcttttctgtatgctacacttaa

SEQ ID NO: 177309 - DNA, 70 bp, Homo sapiens
ctaggaaacggggaaccagaattgaaacctccatttgcctgagctcttttctgtatgctacacttaactt

SEQ ID NO: 177310 - DNA, 70 bp, Homo sapiens
taggaaacggggaaccagaattgaaacctccatttgcctgagctcttttctgtatgctacacttaacttt

SEQ ID NO: 177311 - DNA, 72 bp, Homo sapiens
gggaaccagaattgaaacctccatttgcctgagctcttttctgtatgctacacttaacttttctcttgaaaa

SEQ ID NO: 177312 - DNA, 72 bp, Homo sapiens
ggaaccagaattgaaacctccatttgcctgagctcttttctgtatgctacacttaacttttctcttgaaaaa

SEQ ID NO: 177313 - DNA, 71 bp, Homo sapiens
ccagaattgaaacctccatttgcctgagctcttttctgtatgctacacttaacttttctcttgaaaaaaaa

SEQ ID NO: 177314 - DNA, 69 bp, Homo sapiens
attgaaacctccatttgcctgagctcttttctgtatgctacacttaacttttctcttgaaaaaaaattt

SEQ ID NO: 177315 - DNA, 67 bp, Homo sapiens
aacctccatttgcctgagctcttttctgtatgctacacttaacttttctcttgaaaaaaaatttttt

SEQ ID NO: 177316 - DNA, 77 bp, Homo sapiens
tgtgagccactattcttaattattcttaatctctgcttttgctaatcggattttgctttccatctttcagtgtacac

SEQ ID NO: 177317 - DNA, 74 bp, Homo sapiens
ccactattcttaattattcttaatctctgcttttgctaatcggattttgctttccatctttcagtgtacaccga

SEQ ID NO: 177318 - DNA, 77 bp, Homo sapiens
ttaattattcttaatctctgcttttgctaatcggattttgctttccatctttcagtgtacaccgaatcattgtgtca

SEQ ID NO: 177319 - DNA, 77 bp, Homo sapiens
ttaatctctgcttttgctaatcggattttgctttccatctttcagtgtacaccgaatcattgtgtcactggccttag

SEQ ID NO: 177320 - DNA, 77 bp, Homo sapiens
tctgcttttgctaatcggattttgctttccatctttcagtgtacaccgaatcattgtgtcactggccttagtgtggg

SEQ ID NO: 177321 - DNA, 74 bp, Homo sapiens
cttttgctaatcggattttgctttccatctttcagtgtacaccgaatcattgtgtcactggccttagtgtgggg

SEQ ID NO: 177322 - DNA, 74 bp, Homo sapiens
taatcggattttgctttccatctttcagtgtacaccgaatcattgtgtcactggccttagtgtgggggtcctct

SEQ ID NO: 177323 - DNA, 76 bp, Homo sapiens
attttgctttccatctttcagtgtacaccgaatcattgtgtcactggccttagtgtgggggtcctcttctgctatc

SEQ ID NO: 177324 - DNA, 78 bp, Homo sapiens
tttccatctttcagtgtacaccgaatcattgtgtcactggccttagtgtgggggtcctcttctgctatctcacatttg

SEQ ID NO: 177325 - DNA, 78 bp, Homo sapiens
tttcagtgtacaccgaatcattgtgtcactggccttagtgtgggggtcctcttctgctatctcacatttgtctggaat

SEQ ID NO: 177326 - DNA, 79 bp, Homo sapiens
ttcagtgtacaccgaatcattgtgtcactggccttagtgtgggggtcctcttctgctatctcacatttgtctggaattc

SEQ ID NO: 177327 - DNA, 79 bp, Homo sapiens
tgtacaccgaatcattgtgtcactggccttagtgtgggggtcctcttctgctatctcacatttgtctggaattccagcg

SEQ ID NO: 177328 - DNA, 77 bp, Homo sapiens
accgaatcattgtgtcactggccttagtgtgggggtcctcttctgctatctcacatttgtctggaattccagcggga

SEQ ID NO: 177329 - DNA, 77 bp, Homo sapiens
attgtgtcactggccttagtgtgggggtcctcttctgctatctcacatttgtctggaattccagcgggaagcgttca

SEQ ID NO: 177330 - DNA, 77 bp, Homo sapiens
actggccttagtgtgggggtcctcttctgctatctcacatttgtctggaattccagcgggaagcgttcactggcatc

SEQ ID NO: 177331 - DNA, 78 bp, Homo sapiens
agtgtgggggtcctcttctgctatctcacatttgtctggaattccagcgggaagcgttcactggcatctctggtcttc

SEQ ID NO: 177332 - DNA, 84 bp, Homo sapiens
tcctcttctgctatctcacatttgtctggaattccagcgggaagcgttcactggcatctctggtcttcctcatgacatctgtgg

SEQ ID NO: 177333 - DNA, 83 bp, Homo sapiens
tctggaattccagcgggaagcgttcactggcatctctggtcttcctcatgacatctgtggggtttgcaggtgtgatgaatcat

SEQ ID NO: 177334 - DNA, 83 bp, Homo sapiens
attccagcgggaagcgttcactggcatctctggtcttcctcatgacatctgtggggtttgcaggtgtgatgaatcattcttgc

SEQ ID NO: 177335 - DNA, 83 bp, Homo sapiens
aagcgttcactggcatctctggtcttcctcatgacatctgtggggtttgcaggtgtgatgaatcattcttgcctcagagaatt

SEQ ID NO: 177336 - DNA, 82 bp, Homo sapiens
atctctggtcttcctcatgacatctgtggggtttgcaggtgtgatgaatcattcttgcctcagagaatttgaggcctcaaac

SEQ ID NO: 177337 - DNA, 80 bp, Homo sapiens
ttcctcatgacatctgtggggtttgcaggtgtgatgaatcattcttgcctcagagaatttgaggcctcaaactttattgt

SEQ ID NO: 177338 - DNA, 78 bp, Homo sapiens
atgacatctgtggggtttgcaggtgtgatgaatcattcttgcctcagagaatttgaggcctcaaactttattgttccc

SEQ ID NO: 177339 - DNA, 77 bp, Homo sapiens
gtttgcaggtgtgatgaatcattcttgcctcagagaatttgaggcctcaaactttattgttccccagtgtttctgtc

SEQ ID NO: 177340 - DNA, 76 bp, Homo sapiens
aggtgtgatgaatcattcttgcctcagagaatttgaggcctcaaactttattgttccccagtgtttctgtcccaca

SEQ ID NO: 177341 - DNA, 74 bp, Homo sapiens
aatcattcttgcctcagagaatttgaggcctcaaactttattgttccccagtgtttctgtcccacacctggtca

SEQ ID NO: 177342 - DNA, 72 bp, Homo sapiens
tcagagaatttgaggcctcaaactttattgttccccagtgtttctgtcccacacctggtcaacttactgaaa

SEQ ID NO: 177343 - DNA, 69 bp, Homo sapiens
atttgaggcctcaaactttattgttccccagtgtttctgtcccacacctggtcaacttactgaaaatta

SEQ ID NO: 177344 - DNA, 66 bp, Homo sapiens
ctcaaactttattgttccccagtgtttctgtcccacacctggtcaacttactgaaaattaaaaaaa

SEQ ID NO: 177345 - DNA, 77 bp, Homo sapiens
aaaaaagaaaaatggttccttcttcaagatagattgcagagcccttgctgtgatctgcagccctctggtattcctga

SEQ ID NO: 177346 - DNA, 80 bp, Homo sapiens
aaaatggttccttcttcaagatagattgcagagcccttgctgtgatctgcagccctctggtattcctgatgcgtcctctt

SEQ ID NO: 177347 - DNA, 83 bp, Homo sapiens
aagatagattgcagagcccttgctgtgatctgcagccctctggtattcctgatgcgtcctctttccactgtggatattacctc

SEQ ID NO: 177348 - DNA, 83 bp, Homo sapiens
agagcccttgctgtgatctgcagccctctggtattcctgatgcgtcctctttccactgtggatattacctctcagcaagagag

SEQ ID NO: 177349 - DNA, 84 bp, Homo sapiens
ccctctggtattcctgatgcgtcctctttccactgtggatattacctctcagcaagagagtgctgcctgcctactgctcatcaa

SEQ ID NO: 177350 - DNA, 85 bp, Homo sapiens
atgcgtcctctttccactgtggatattacctctcagcaagagagtgctgcctgcctactgctcatcaaattacaggcatccgctc

SEQ ID NO: 177351 - DNA, 88 bp, Homo sapiens
tttccactgtggatattacctctcagcaagagagtgctgcctgcctactgctcatcaaattacaggcatccgctctgcatccgagcta

SEQ ID NO: 177352 - DNA, 88 bp, Homo sapiens
tattacctctcagcaagagagtgctgcctgcctactgctcatcaaattacaggcatccgctctgcatccgagctacatgttgttccta

SEQ ID NO: 177353 - DNA, 87 bp, Homo sapiens
agcaagagagtgctgcctgcctactgctcatcaaattacaggcatccgctctgcatccgagctacatgttgttcctatgtgcctttc

SEQ ID NO: 177354 - DNA, 85 bp, Homo sapiens
tgctgcctgcctactgctcatcaaattacaggcatccgctctgcatccgagctacatgttgttcctatgtgcctttccacctctt

SEQ ID NO: 177355 - DNA, 82 bp, Homo sapiens
ctactgctcatcaaattacaggcatccgctctgcatccgagctacatgttgttcctatgtgcctttccacctctttctctat

SEQ ID NO: 177356 - DNA, 80 bp, Homo sapiens
atcaaattacaggcatccgctctgcatccgagctacatgttgttcctatgtgcctttccacctctttctctattgacaaa

SEQ ID NO: 177357 - DNA, 80 bp, Homo sapiens
ttacaggcatccgctctgcatccgagctacatgttgttcctatgtgcctttccacctctttctctattgacaaactaaga

SEQ ID NO: 177358 - DNA, 79 bp, Homo sapiens
ctctgcatccgagctacatgttgttcctatgtgcctttccacctctttctctattgacaaactaagaggaaagcataca

SEQ ID NO: 177359 - DNA, 75 bp, Homo sapiens
agctacatgttgttcctatgtgcctttccacctctttctctattgacaaactaagaggaaagcatacagctttag

SEQ ID NO: 177360 - DNA, 74 bp, Homo sapiens
atgttgttcctatgtgcctttccacctctttctctattgacaaactaagaggaaagcatacagctttagggaga

SEQ ID NO: 177361 - DNA, 75 bp, Homo sapiens
tatgtgcctttccacctctttctctattgacaaactaagaggaaagcatacagctttagggagacacttattcag

SEQ ID NO: 177362 - DNA, 72 bp, Homo sapiens
ctctttctctattgacaaactaagaggaaagcatacagctttagggagacacttattcaggagggaataatt

SEQ ID NO: 177363 - DNA, 70 bp, Homo sapiens
caaactaagaggaaagcatacagctttagggagacacttattcaggagggaataattttcttttttcatg

SEQ ID NO: 177364 - DNA, 72 bp, Homo sapiens
aagcatacagctttagggagacacttattcaggagggaataattttcttttttcatggtgctaagtagataa

SEQ ID NO: 177365 - DNA, 73 bp, Homo sapiens
ttcaggagggaataattttcttttttcatggtgctaagtagataatactagttagcatgtattgagtgtttac

SEQ ID NO: 177366 - DNA, 81 bp, Homo sapiens
ttttcttttttcatggtgctaagtagataatactagttagcatgtattgagtgtttactatggacaatgcacagatgatga

SEQ ID NO: 177367 - DNA, 82 bp, Homo sapiens
tgctaagtagataatactagttagcatgtattgagtgtttactatggacaatgcacagatgatgaaaccaagataactgaaa

SEQ ID NO: 177368 - DNA, 79 bp, Homo sapiens
ttagcatgtattgagtgtttactatggacaatgcacagatgatgaaaccaagataactgaaactgcccaggttttacca

SEQ ID NO: 177369 - DNA, 74 bp, Homo sapiens
agtgtttactatggacaatgcacagatgatgaaaccaagataactgaaactgcccaggttttaccactaataaa

SEQ ID NO: 177370 - DNA, 75 bp, Homo sapiens
tactatggacaatgcacagatgatgaaaccaagataactgaaactgcccaggttttaccactaataaaccttgaa

SEQ ID NO: 177371 - DNA, 69 bp, Homo sapiens
acagatgatgaaaccaagataactgaaactgcccaggttttaccactaataaaccttgaaaccttgaac

SEQ ID NO: 177372 - DNA, 66 bp, Homo sapiens
atgaaaccaagataactgaaactgcccaggttttaccactaataaaccttgaaaccttgaacctgg

SEQ ID NO: 177373 - DNA, 69 bp, Homo sapiens
ataactgaaactgcccaggttttaccactaataaaccttgaaaccttgaacctgggcagtctgactcaa

SEQ ID NO: 177374 - DNA, 69 bp, Homo sapiens
aaactgcccaggttttaccactaataaaccttgaaaccttgaacctgggcagtctgactcaagagcctg

SEQ ID NO: 177375 - DNA, 75 bp, Homo sapiens
taataaaccttgaaaccttgaacctgggcagtctgactcaagagcctgtgctcgtactcaagagtctggtttaca

SEQ ID NO: 177376 - DNA, 77 bp, Homo sapiens
aaccttgaacctgggcagtctgactcaagagcctgtgctcgtactcaagagtctggtttacagttcatgcaggttta

SEQ ID NO: 177377 - DNA, 78 bp, Homo sapiens
tgactcaagagcctgtgctcgtactcaagagtctggtttacagttcatgcaggtttacaattcactcgggtttgcaat

SEQ ID NO: 177378 - DNA, 75 bp, Homo sapiens
aagagcctgtgctcgtactcaagagtctggtttacagttcatgcaggtttacaattcactcgggtttgcaattcc

SEQ ID NO: 177379 - DNA, 74 bp, Homo sapiens
tactcaagagtctggtttacagttcatgcaggtttacaattcactcgggtttgcaattcctgcagttgggtaag

SEQ ID NO: 177380 - DNA, 74 bp, Homo sapiens
aagagtctggtttacagttcatgcaggtttacaattcactcgggtttgcaattcctgcagttgggtaagtgaca

SEQ ID NO: 177381 - DNA, 75 bp, Homo sapiens
acaattcactcgggtttgcaattcctgcagttgggtaagtgacagagagaaagacgaacatgtaaatgtagtgtg

SEQ ID NO: 177382 - DNA, 79 bp, Homo sapiens
tttgcaattcctgcagttgggtaagtgacagagagaaagacgaacatgtaaatgtagtgtgggatatgttgctatggga

SEQ ID NO: 177383 - DNA, 78 bp, Homo sapiens
attcctgcagttgggtaagtgacagagagaaagacgaacatgtaaatgtagtgtgggatatgttgctatgggaccaca

SEQ ID NO: 177384 - DNA, 77 bp, Homo sapiens
ttgggtaagtgacagagagaaagacgaacatgtaaatgtagtgtgggatatgttgctatgggaccacaggtgaggga

SEQ ID NO: 177385 - DNA, 79 bp, Homo sapiens
agagaaagacgaacatgtaaatgtagtgtgggatatgttgctatgggaccacaggtgagggagcagccgagccagagaa

SEQ ID NO: 177386 - DNA, 79 bp, Homo sapiens
taaatgtagtgtgggatatgttgctatgggaccacaggtgagggagcagccgagccagagaaaagaagtatttgtgata

SEQ ID NO: 177387 - DNA, 73 bp, Homo sapiens
ctatgggaccacaggtgagggagcagccgagccagagaaaagaagtatttgtgataggctttaaaagaagaat

SEQ ID NO: 177388 - DNA, 71 bp, Homo sapiens
acaggtgagggagcagccgagccagagaaaagaagtatttgtgataggctttaaaagaagaattgtttttg

SEQ ID NO: 177389 - DNA, 71 bp, Homo sapiens
agggagcagccgagccagagaaaagaagtatttgtgataggctttaaaagaagaattgtttttggctggtg

SEQ ID NO: 177390 - DNA, 70 bp, Homo sapiens
agccagagaaaagaagtatttgtgataggctttaaaagaagaattgtttttggctggtgggcacaattgg

SEQ ID NO: 177391 - DNA, 69 bp, Homo sapiens
aaagaagtatttgtgataggctttaaaagaagaattgtttttggctggtgggcacaattgggagggcat

SEQ ID NO: 177392 - DNA, 71 bp, Homo sapiens
tatttgtgataggctttaaaagaagaattgtttttggctggtgggcacaattgggagggcattccaaagaa

SEQ ID NO: 177393 - DNA, 75 bp, Homo sapiens
aagaattgtttttggctggtgggcacaattgggagggcattccaaagaaacagcagcagctaacgcagaggtgtg

SEQ ID NO: 177394 - DNA, 78 bp, Homo sapiens
ttgggagggcattccaaagaaacagcagcagctaacgcagaggtgtggttgtatctgaagtgatcaaaggaaagagcc

SEQ ID NO: 177395 - DNA, 77 bp, Homo sapiens
aaagaaacagcagcagctaacgcagaggtgtggttgtatctgaagtgatcaaaggaaagagcctcggtgagttgaaa

SEQ ID NO: 177396 - DNA, 73 bp, Homo sapiens
tggttgtatctgaagtgatcaaaggaaagagcctcggtgagttgaaagttacatttgctactaaggttacttc

SEQ ID NO: 177397 - DNA, 73 bp, Homo sapiens
tatctgaagtgatcaaaggaaagagcctcggtgagttgaaagttacatttgctactaaggttacttctacttc

SEQ ID NO: 177398 - DNA, 72 bp, Homo sapiens
atcaaaggaaagagcctcggtgagttgaaagttacatttgctactaaggttacttctacttctcttgaatca

SEQ ID NO: 177399 - DNA, 72 bp, Homo sapiens
agcctcggtgagttgaaagttacatttgctactaaggttacttctacttctcttgaatcatcttggctcttt

SEQ ID NO: 177400 - DNA, 71 bp, Homo sapiens
ggtgagttgaaagttacatttgctactaaggttacttctacttctcttgaatcatcttggctcttttaaaa

SEQ ID NO: 177401 - DNA, 69 bp, Homo sapiens
aagttacatttgctactaaggttacttctacttctcttgaatcatcttggctcttttaaaattacattt

SEQ ID NO: 177402 - DNA, 71 bp, Homo sapiens
gctactaaggttacttctacttctcttgaatcatcttggctcttttaaaattacattttctctttttcaga

SEQ ID NO: 177403 - DNA, 72 bp, Homo sapiens
cttctacttctcttgaatcatcttggctcttttaaaattacattttctctttttcagataggacatagaccc

SEQ ID NO: 177404 - DNA, 73 bp, Homo sapiens
ctcttgaatcatcttggctcttttaaaattacattttctctttttcagataggacatagacccttatccacaa

SEQ ID NO: 177405 - DNA, 71 bp, Homo sapiens
atcatcttggctcttttaaaattacattttctctttttcagataggacatagacccttatccacaaaataa

SEQ ID NO: 177406 - DNA, 66 bp, Homo sapiens
ctcttttaaaattacattttctctttttcagataggacatagacccttatccacaaaataattttt

SEQ ID NO: 177407 - DNA, 68 bp, Homo sapiens
cagtgtacactgtaccccaatgtgtagtattttagcccttaccgccctctctcctttccccccaagtc

SEQ ID NO: 177408 - DNA, 69 bp, Homo sapiens
tacactgtaccccaatgtgtagtattttagcccttaccgccctctctcctttccccccaagtctccaga

SEQ ID NO: 177409 - DNA, 69 bp, Homo sapiens
cccaatgtgtagtattttagcccttaccgccctctctcctttccccccaagtctccagagtccattgta

SEQ ID NO: 177410 - DNA, 74 bp, Homo sapiens
tcttttccattggtctgtctgcctatttttgtacctgtaccatggtgttttggtgactataggcttgtagtata

SEQ ID NO: 177411 - DNA, 71 bp, Homo sapiens
ctttagggttttttaggtacatgatcataacatcggcaaacagcgacagtttgactttctctttatcagtt

SEQ ID NO: 177412 - DNA, 72 bp, Homo sapiens
tttagggttttttaggtacatgatcataacatcggcaaacagcgacagtttgactttctctttatcagtttg

SEQ ID NO: 177413 - DNA, 75 bp, Homo sapiens
tttaggtacatgatcataacatcggcaaacagcgacagtttgactttctctttatcagtttggacgcgctttatt

SEQ ID NO: 177414 - DNA, 76 bp, Homo sapiens
tacatgatcataacatcggcaaacagcgacagtttgactttctctttatcagtttggacgcgctttattttttctc

SEQ ID NO: 177415 - DNA, 72 bp, Homo sapiens
ataacatcggcaaacagcgacagtttgactttctctttatcagtttggacgcgctttattttttctcttgtc

SEQ ID NO: 177416 - DNA, 74 bp, Homo sapiens
agcgacagtttgactttctctttatcagtttggacgcgctttattttttctcttgtctgtgccagctacacaaa

SEQ ID NO: 177417 - DNA, 74 bp, Homo sapiens
tgactttctctttatcagtttggacgcgctttattttttctcttgtctgtgccagctacacaaataattttgaa

SEQ ID NO: 177418 - DNA, 73 bp, Homo sapiens
ctctttatcagtttggacgcgctttattttttctcttgtctgtgccagctacacaaataattttgaaaataca

SEQ ID NO: 177419 - DNA, 71 bp, Homo sapiens
cagtttggacgcgctttattttttctcttgtctgtgccagctacacaaataattttgaaaatacatttaaa

SEQ ID NO: 177420 - DNA, 73 bp, Homo sapiens
gcgctttattttttctcttgtctgtgccagctacacaaataattttgaaaatacatttaaacataataagatc

SEQ ID NO: 177421 - DNA, 78 bp, Homo sapiens
tcttgtctgtgccagctacacaaataattttgaaaatacatttaaacataataagatctctctacagatgtaaactgc

SEQ ID NO: 177422 - DNA, 76 bp, Homo sapiens
tctgtgccagctacacaaataattttgaaaatacatttaaacataataagatctctctacagatgtaaactgcttt

SEQ ID NO: 177423 - DNA, 72 bp, Homo sapiens
acacaaataattttgaaaatacatttaaacataataagatctctctacagatgtaaactgcttttcctagtg

SEQ ID NO: 177424 - DNA, 78 bp, Homo sapiens
tgaaaatacatttaaacataataagatctctctacagatgtaaactgcttttcctagtgtatagcacattatctccat

SEQ ID NO: 177425 - DNA, 79 bp, Homo sapiens
catttaaacataataagatctctctacagatgtaaactgcttttcctagtgtatagcacattatctccatttgtagaca

SEQ ID NO: 177426 - DNA, 79 bp, Homo sapiens
cataataagatctctctacagatgtaaactgcttttcctagtgtatagcacattatctccatttgtagacatacttaat

SEQ ID NO: 177427 - DNA, 79 bp, Homo sapiens
tctacagatgtaaactgcttttcctagtgtatagcacattatctccatttgtagacatacttaattgaatgcctcagtt

SEQ ID NO: 177428 - DNA, 78 bp, Homo sapiens
tacagatgtaaactgcttttcctagtgtatagcacattatctccatttgtagacatacttaattgaatgcctcagttt

SEQ ID NO: 177429 - DNA, 77 bp, Homo sapiens
agatgtaaactgcttttcctagtgtatagcacattatctccatttgtagacatacttaattgaatgcctcagtttta

SEQ ID NO: 177430 - DNA, 74 bp, Homo sapiens
aaactgcttttcctagtgtatagcacattatctccatttgtagacatacttaattgaatgcctcagttttattt

SEQ ID NO: 177431 - DNA, 74 bp, Homo sapiens
gcttttcctagtgtatagcacattatctccatttgtagacatacttaattgaatgcctcagttttattttattt

SEQ ID NO: 177432 - DNA, 81 bp, Homo sapiens
gacagagttttgctatgtagcccaggagtgcaaaggctattcacaggcatgattatggtgcacaaaagcctcgaattcctg

SEQ ID NO: 177433 - DNA, 79 bp, Homo sapiens
agttttgctatgtagcccaggagtgcaaaggctattcacaggcatgattatggtgcacaaaagcctcgaattcctgggc

SEQ ID NO: 177434 - DNA, 80 bp, Homo sapiens
tgtagcccaggagtgcaaaggctattcacaggcatgattatggtgcacaaaagcctcgaattcctgggcccaggtgatcc

SEQ ID NO: 177435 - DNA, 80 bp, Homo sapiens
gctattcacaggcatgattatggtgcacaaaagcctcgaattcctgggcccaggtgatcctcctaactcatcctcctgag

SEQ ID NO: 177436 - DNA, 73 bp, Homo sapiens
ttgttttttaattttggacacggtctttctctgttgcttgggccagagtgtgtggtgcggtggcacgatccta

SEQ ID NO: 177437 - DNA, 74 bp, Homo sapiens
acagcgcccagccacctggcctgtttttaatttttgagaatcaagttgcatagccatgaaggttaacagtcgcc

SEQ ID NO: 177438 - DNA, 71 bp, Homo sapiens
gccacctggcctgtttttaatttttgagaatcaagttgcatagccatgaaggttaacagtcgcccaaaatt

SEQ ID NO: 177439 - DNA, 70 bp, Homo sapiens
ctggcctgtttttaatttttgagaatcaagttgcatagccatgaaggttaacagtcgcccaaaatttaaa

SEQ ID NO: 177440 - DNA, 72 bp, Homo sapiens
tttttgagaatcaagttgcatagccatgaaggttaacagtcgcccaaaatttaaataaaattattgcaggcc

SEQ ID NO: 177441 - DNA, 74 bp, Homo sapiens
gagaatcaagttgcatagccatgaaggttaacagtcgcccaaaatttaaataaaattattgcaggcctataata

SEQ ID NO: 177442 - DNA, 71 bp, Homo sapiens
ttgcatagccatgaaggttaacagtcgcccaaaatttaaataaaattattgcaggcctataataagttaaa

SEQ ID NO: 177443 - DNA, 67 bp, Homo sapiens
gaaggttaacagtcgcccaaaatttaaataaaattattgcaggcctataataagttaaatagctaaa

SEQ ID NO: 177444 - DNA, 66 bp, Homo sapiens
acagtcgcccaaaatttaaataaaattattgcaggcctataataagttaaatagctaaaattttaa

SEQ ID NO: 177445 - DNA, 69 bp, Homo sapiens
ttaaataaaattattgcaggcctataataagttaaatagctaaaattttaaataatgacagattcagtt

SEQ ID NO: 177446 - DNA, 73 bp, Homo sapiens
ttattgcaggcctataataagttaaatagctaaaattttaaataatgacagattcagtttttagtgctgatag

SEQ ID NO: 177447 - DNA, 73 bp, Homo sapiens
gcaggcctataataagttaaatagctaaaattttaaataatgacagattcagtttttagtgctgatagtgttc

SEQ ID NO: 177448 - DNA, 73 bp, Homo sapiens
taagttaaatagctaaaattttaaataatgacagattcagtttttagtgctgatagtgttctttgattttgca

SEQ ID NO: 177449 - DNA, 74 bp, Homo sapiens
gctaaaattttaaataatgacagattcagtttttagtgctgatagtgttctttgattttgcaaacaaatgagta

SEQ ID NO: 177450 - DNA, 75 bp, Homo sapiens
ttttaaataatgacagattcagtttttagtgctgatagtgttctttgattttgcaaacaaatgagtatttctcaa

SEQ ID NO: 177451 - DNA, 76 bp, Homo sapiens
aataatgacagattcagtttttagtgctgatagtgttctttgattttgcaaacaaatgagtatttctcaaatggga

SEQ ID NO: 177452 - DNA, 78 bp, Homo sapiens
tgacagattcagtttttagtgctgatagtgttctttgattttgcaaacaaatgagtatttctcaaatgggaagatgac

SEQ ID NO: 177453 - DNA, 77 bp, Homo sapiens
tcagtttttagtgctgatagtgttctttgattttgcaaacaaatgagtatttctcaaatgggaagatgacttatatg

SEQ ID NO: 177454 - DNA, 80 bp, Homo sapiens
ttagtgctgatagtgttctttgattttgcaaacaaatgagtatttctcaaatgggaagatgacttatatgttctatgctg

SEQ ID NO: 177455 - DNA, 81 bp, Homo sapiens
gctgatagtgttctttgattttgcaaacaaatgagtatttctcaaatgggaagatgacttatatgttctatgctgtgaata

SEQ ID NO: 177456 - DNA, 78 bp, Homo sapiens
gttctttgattttgcaaacaaatgagtatttctcaaatgggaagatgacttatatgttctatgctgtgaatagatagg

SEQ ID NO: 177457 - DNA, 79 bp, Homo sapiens
ttgattttgcaaacaaatgagtatttctcaaatgggaagatgacttatatgttctatgctgtgaatagataggtttaga

SEQ ID NO: 177458 - DNA, 78 bp, Homo sapiens
ttgcaaacaaatgagtatttctcaaatgggaagatgacttatatgttctatgctgtgaatagataggtttagaattac

SEQ ID NO: 177459 - DNA, 78 bp, Homo sapiens
atgagtatttctcaaatgggaagatgacttatatgttctatgctgtgaatagataggtttagaattactttcagcacc

SEQ ID NO: 177460 - DNA, 76 bp, Homo sapiens
ttctcaaatgggaagatgacttatatgttctatgctgtgaatagataggtttagaattactttcagcaccgttttg

SEQ ID NO: 177461 - DNA, 72 bp, Homo sapiens
ctatgctgtgaatagataggtttagaattactttcagcaccgttttgtctccattacagttaattttatggg

SEQ ID NO: 177462 - DNA, 70 bp, Homo sapiens
gaatagataggtttagaattactttcagcaccgttttgtctccattacagttaattttatgggtgggaga

SEQ ID NO: 177463 - DNA, 70 bp, Homo sapiens
agaattactttcagcaccgttttgtctccattacagttaattttatgggtgggagagcaaaatctaaatg

SEQ ID NO: 177464 - DNA, 74 bp, Homo sapiens
tactttcagcaccgttttgtctccattacagttaattttatgggtgggagagcaaaatctaaatggatgcactg

SEQ ID NO: 177465 - DNA, 76 bp, Homo sapiens
ttttgtctccattacagttaattttatgggtgggagagcaaaatctaaatggatgcactgtctgagtaccagaatg

SEQ ID NO: 177466 - DNA, 75 bp, Homo sapiens
attacagttaattttatgggtgggagagcaaaatctaaatggatgcactgtctgagtaccagaatggaatggaaa

SEQ ID NO: 177467 - DNA, 75 bp, Homo sapiens
ttaattttatgggtgggagagcaaaatctaaatggatgcactgtctgagtaccagaatggaatggaaaattccca

SEQ ID NO: 177468 - DNA, 79 bp, Homo sapiens
tgggagagcaaaatctaaatggatgcactgtctgagtaccagaatggaatggaaaattcccagaccatggaactgagaa

SEQ ID NO: 177469 - DNA, 77 bp, Homo sapiens
aaaatctaaatggatgcactgtctgagtaccagaatggaatggaaaattcccagaccatggaactgagaaatgagaa

SEQ ID NO: 177470 - DNA, 78 bp, Homo sapiens
aaatggatgcactgtctgagtaccagaatggaatggaaaattcccagaccatggaactgagaaatgagaattaagcaa

SEQ ID NO: 177471 - DNA, 76 bp, Homo sapiens
tgtctgagtaccagaatggaatggaaaattcccagaccatggaactgagaaatgagaattaagcaagaacatttgt

SEQ ID NO: 177472 - DNA, 72 bp, Homo sapiens
agaatggaatggaaaattcccagaccatggaactgagaaatgagaattaagcaagaacatttgttccctggg

SEQ ID NO: 177473 - DNA, 71 bp, Homo sapiens
aatggaaaattcccagaccatggaactgagaaatgagaattaagcaagaacatttgttccctgggggccta

SEQ ID NO: 177474 - DNA, 74 bp, Homo sapiens
agaccatggaactgagaaatgagaattaagcaagaacatttgttccctgggggcctaggcagccatacccattc

SEQ ID NO: 177475 - DNA, 73 bp, Homo sapiens
atggaactgagaaatgagaattaagcaagaacatttgttccctgggggcctaggcagccatacccattctgtt

SEQ ID NO: 177476 - DNA, 69 bp, Homo sapiens
aaatgagaattaagcaagaacatttgttccctgggggcctaggcagccatacccattctgtttcccttt

SEQ ID NO: 177477 - DNA, 71 bp, Homo sapiens
ttaagcaagaacatttgttccctgggggcctaggcagccatacccattctgtttcccttttcattgtacca

SEQ ID NO: 177478 - DNA, 72 bp, Homo sapiens
acatttgttccctgggggcctaggcagccatacccattctgtttcccttttcattgtaccacctctctgcca

SEQ ID NO: 177479 - DNA, 73 bp, Homo sapiens
cctgggggcctaggcagccatacccattctgtttcccttttcattgtaccacctctctgccacctctgcctcc

SEQ ID NO: 177480 - DNA, 66 bp, Homo sapiens
ttttcattttaattataaagtttttttatgtaacttttttatttgtatacattattagagacagag

SEQ ID NO: 177481 - DNA, 66 bp, Homo sapiens
gagccactacacccggcctcattttaattatatagttttaaaaatcgtattaaaacctattctgtt

SEQ ID NO: 177482 - DNA, 64 bp, Homo sapiens
ctacacccggcctcattttaattatatagttttaaaaatcgtattaaaacctattctgttttcc

SEQ ID NO: 177483 - DNA, 67 bp, Homo sapiens
gcctcattttaattatatagttttaaaaatcgtattaaaacctattctgttttccttgttcattatg

SEQ ID NO: 177484 - DNA, 67 bp, Homo sapiens
tatagttttaaaaatcgtattaaaacctattctgttttccttgttcattatggttcttaatatagaa

SEQ ID NO: 177485 - DNA, 67 bp, Homo sapiens
aaaatcgtattaaaacctattctgttttccttgttcattatggttcttaatatagaagtattttaga

SEQ ID NO: 177486 - DNA, 67 bp, Homo sapiens
cgtattaaaacctattctgttttccttgttcattatggttcttaatatagaagtattttagaattct

SEQ ID NO: 177487 - DNA, 72 bp, Homo sapiens
tctgttttccttgttcattatggttcttaatatagaagtattttagaattcttttgactgttttgatacatc

SEQ ID NO: 177488 - DNA, 71 bp, Homo sapiens
ttccttgttcattatggttcttaatatagaagtattttagaattcttttgactgttttgatacatcttccc

SEQ ID NO: 177489 - DNA, 71 bp, Homo sapiens
tggttcttaatatagaagtattttagaattcttttgactgttttgatacatcttcccccaaactatcagaa

SEQ ID NO: 177490 - DNA, 69 bp, Homo sapiens
tatagaagtattttagaattcttttgactgttttgatacatcttcccccaaactatcagaaaaacaagt

SEQ ID NO: 177491 - DNA, 68 bp, Homo sapiens
atagaagtattttagaattcttttgactgttttgatacatcttcccccaaactatcagaaaaacaagt

SEQ ID NO: 177492 - DNA, 68 bp, Homo sapiens
ttttagaattcttttgactgttttgatacatcttcccccaaactatcagaaaaacaagttatttgcct

SEQ ID NO: 177493 - DNA, 68 bp, Homo sapiens
ttagaattcttttgactgttttgatacatcttcccccaaactatcagaaaaacaagttatttgccttt

SEQ ID NO: 177494 - DNA, 68 bp, Homo sapiens
gaattcttttgactgttttgatacatcttcccccaaactatcagaaaaacaagttatttgccttttaa

SEQ ID NO: 177495 - DNA, 66 bp, Homo sapiens
cttttgactgttttgatacatcttcccccaaactatcagaaaaacaagttatttgccttttaattt

SEQ ID NO: 177496 - DNA, 66 bp, Homo sapiens
gactgttttgatacatcttcccccaaactatcagaaaaacaagttatttgccttttaatttttttc

SEQ ID NO: 177497 - DNA, 72 bp, Homo sapiens
ccttttaatttttttcttataggaaattcggcgccttcatcagtatgtgaaatttgctgtccaagatgtgaa

SEQ ID NO: 177498 - DNA, 78 bp, Homo sapiens
tttttcttataggaaattcggcgccttcatcagtatgtgaaatttgctgtccaagatgtgaatgatgttctagacttg

SEQ ID NO: 177499 - DNA, 79 bp, Homo sapiens
cttataggaaattcggcgccttcatcagtatgtgaaatttgctgtccaagatgtgaatgatgttctagacttggagtgg

SEQ ID NO: 177500 - DNA, 84 bp, Homo sapiens
gcgccttcatcagtatgtgaaatttgctgtccaagatgtgaatgatgttctagacttggagtgggatcagcatctggaacaaaa

SEQ ID NO: 177501 - DNA, 83 bp, Homo sapiens
ttcatcagtatgtgaaatttgctgtccaagatgtgaatgatgttctagacttggagtgggatcagcatctggaacaaaagaaa

SEQ ID NO: 177502 - DNA, 79 bp, Homo sapiens
tgtgaaatttgctgtccaagatgtgaatgatgttctagacttggagtgggatcagcatctggaacaaaagaaaaaacaa

SEQ ID NO: 177503 - DNA, 79 bp, Homo sapiens
tgtccaagatgtgaatgatgttctagacttggagtgggatcagcatctggaacaaaagaaaaaacaaaggtgaatgaga

SEQ ID NO: 177504 - DNA, 80 bp, Homo sapiens
atgtgaatgatgttctagacttggagtgggatcagcatctggaacaaaagaaaaaacaaaggtgaatgagatctctcatc

SEQ ID NO: 177505 - DNA, 80 bp, Homo sapiens
tgttctagacttggagtgggatcagcatctggaacaaaagaaaaaacaaaggtgaatgagatctctcatctgcaatgtgt

SEQ ID NO: 177506 - DNA, 82 bp, Homo sapiens
gtgggatcagcatctggaacaaaagaaaaaacaaaggtgaatgagatctctcatctgcaatgtgttggaatagatattgcta

SEQ ID NO: 177507 - DNA, 80 bp, Homo sapiens
catctggaacaaaagaaaaaacaaaggtgaatgagatctctcatctgcaatgtgttggaatagatattgctattgccatt

SEQ ID NO: 177508 - DNA, 78 bp, Homo sapiens
ggaacaaaagaaaaaacaaaggtgaatgagatctctcatctgcaatgtgttggaatagatattgctattgccatttta

SEQ ID NO: 177509 - DNA, 77 bp, Homo sapiens
acaaaggtgaatgagatctctcatctgcaatgtgttggaatagatattgctattgccattttaaaaaggttatttag

SEQ ID NO: 177510 - DNA, 79 bp, Homo sapiens
ggtgaatgagatctctcatctgcaatgtgttggaatagatattgctattgccattttaaaaaggttatttaggaacata

SEQ ID NO: 177511 - DNA, 76 bp, Homo sapiens
tcatctgcaatgtgttggaatagatattgctattgccattttaaaaaggttatttaggaacatatgaaaatcccag

SEQ ID NO: 177512 - DNA, 71 bp, Homo sapiens
tgtgttggaatagatattgctattgccattttaaaaaggttatttaggaacatatgaaaatcccaggccgg

SEQ ID NO: 177513 - DNA, 71 bp, Homo sapiens
tggaatagatattgctattgccattttaaaaaggttatttaggaacatatgaaaatcccaggccgggtgcg

SEQ ID NO: 177514 - DNA, 67 bp, Homo sapiens
aaaaaacaagaaagagaaaatctctacaaaacgttcattctttttaacagtcattctacttgaaata

SEQ ID NO: 177515 - DNA, 68 bp, Homo sapiens
acaagaaagagaaaatctctacaaaacgttcattctttttaacagtcattctacttgaaatatttttc

SEQ ID NO: 177516 - DNA, 71 bp, Homo sapiens
tctctacaaaacgttcattctttttaacagtcattctacttgaaatatttttctatagaaacaacaaatga

SEQ ID NO: 177517 - DNA, 70 bp, Homo sapiens
ctctacaaaacgttcattctttttaacagtcattctacttgaaatatttttctatagaaacaacaaatga

SEQ ID NO: 177518 - DNA, 70 bp, Homo sapiens
aaacgttcattctttttaacagtcattctacttgaaatatttttctatagaaacaacaaatgatactcag

SEQ ID NO: 177519 - DNA, 71 bp, Homo sapiens
cgttcattctttttaacagtcattctacttgaaatatttttctatagaaacaacaaatgatactcagtaat

SEQ ID NO: 177520 - DNA, 72 bp, Homo sapiens
cattctttttaacagtcattctacttgaaatatttttctatagaaacaacaaatgatactcagtaatttaca

SEQ ID NO: 177521 - DNA, 71 bp, Homo sapiens
tttttaacagtcattctacttgaaatatttttctatagaaacaacaaatgatactcagtaatttacataaa

SEQ ID NO: 177522 - DNA, 73 bp, Homo sapiens
tctacttgaaatatttttctatagaaacaacaaatgatactcagtaatttacataaaataatttatattgcag

SEQ ID NO: 177523 - DNA, 74 bp, Homo sapiens
tatttttctatagaaacaacaaatgatactcagtaatttacataaaataatttatattgcagtataatttatga

SEQ ID NO: 177524 - DNA, 76 bp, Homo sapiens
tttctatagaaacaacaaatgatactcagtaatttacataaaataatttatattgcagtataatttatgatagtga

SEQ ID NO: 177525 - DNA, 76 bp, Homo sapiens
ttctatagaaacaacaaatgatactcagtaatttacataaaataatttatattgcagtataatttatgatagtgaa

SEQ ID NO: 177526 - DNA, 76 bp, Homo sapiens
caaatgatactcagtaatttacataaaataatttatattgcagtataatttatgatagtgaaaaattggattcagc

SEQ ID NO: 177527 - DNA, 74 bp, Homo sapiens
cataaaataatttatattgcagtataatttatgatagtgaaaaattggattcagcctaattatctaaaggtaca

SEQ ID NO: 177528 - DNA, 74 bp, Homo sapiens
gcagtataatttatgatagtgaaaaattggattcagcctaattatctaaaggtacaggagtggctaaataaata

SEQ ID NO: 177529 - DNA, 72 bp, Homo sapiens
atgatagtgaaaaattggattcagcctaattatctaaaggtacaggagtggctaaataaatatggtcgcttt

SEQ ID NO: 177530 - DNA, 69 bp, Homo sapiens
agtgaaaaattggattcagcctaattatctaaaggtacaggagtggctaaataaatatggtcgcttttt

SEQ ID NO: 177531 - DNA, 70 bp, Homo sapiens
ggattcagcctaattatctaaaggtacaggagtggctaaataaatatggtcgctttttttcttaactaca

SEQ ID NO: 177532 - DNA, 70 bp, Homo sapiens
gtacaggagtggctaaataaatatggtcgctttttttcttaactacagaataccctgtaaccattgacta

SEQ ID NO: 177533 - DNA, 72 bp, Homo sapiens
gctaaataaatatggtcgctttttttcttaactacagaataccctgtaaccattgactagcatgttctccaa

SEQ ID NO: 177534 - DNA, 72 bp, Homo sapiens
ttttttcttaactacagaataccctgtaaccattgactagcatgttctccaataaattatttaatatattga

SEQ ID NO: 177535 - DNA, 76 bp, Homo sapiens
actacagaataccctgtaaccattgactagcatgttctccaataaattatttaatatattgaatacatattctatg

SEQ ID NO: 177536 - DNA, 77 bp, Homo sapiens
gaataccctgtaaccattgactagcatgttctccaataaattatttaatatattgaatacatattctatgttctaca

SEQ ID NO: 177537 - DNA, 78 bp, Homo sapiens
gtaaccattgactagcatgttctccaataaattatttaatatattgaatacatattctatgttctacaaaatgtatga

SEQ ID NO: 177538 - DNA, 77 bp, Homo sapiens
actagcatgttctccaataaattatttaatatattgaatacatattctatgttctacaaaatgtatgaatatataac

SEQ ID NO: 177539 - DNA, 77 bp, Homo sapiens
tctccaataaattatttaatatattgaatacatattctatgttctacaaaatgtatgaatatataactatttcgcta

SEQ ID NO: 177540 - DNA, 78 bp, Homo sapiens
ttaatatattgaatacatattctatgttctacaaaatgtatgaatatataactatttcgctataattattagatgtaa

SEQ ID NO: 177541 - DNA, 77 bp, Homo sapiens
attgaatacatattctatgttctacaaaatgtatgaatatataactatttcgctataattattagatgtaatataaa

SEQ ID NO: 177542 - DNA, 75 bp, Homo sapiens
catattctatgttctacaaaatgtatgaatatataactatttcgctataattattagatgtaatataaaaattta

SEQ ID NO: 177543 - DNA, 72 bp, Homo sapiens
gttctacaaaatgtatgaatatataactatttcgctataattattagatgtaatataaaaatttaataagta

SEQ ID NO: 177544 - DNA, 71 bp, Homo sapiens
tgaatatataactatttcgctataattattagatgtaatataaaaatttaataagtaaaaagacaaaagca

SEQ ID NO: 177545 - DNA, 71 bp, Homo sapiens
ttcgctataattattagatgtaatataaaaatttaataagtaaaaagacaaaagcatattggctaataaga

SEQ ID NO: 177546 - DNA, 71 bp, Homo sapiens
tagatgtaatataaaaatttaataagtaaaaagacaaaagcatattggctaataagaatgtggaggtacaa

SEQ ID NO: 177547 - DNA, 67 bp, Homo sapiens
taaaaatttaataagtaaaaagacaaaagcatattggctaataagaatgtggaggtacaaaagtaaa

SEQ ID NO: 177548 - DNA, 71 bp, Homo sapiens
agacaaaagcatattggctaataagaatgtggaggtacaaaagtaaatagatgtaacaaaatattcgtagt

SEQ ID NO: 177549 - DNA, 71 bp, Homo sapiens
gctaataagaatgtggaggtacaaaagtaaatagatgtaacaaaatattcgtagttatatctgcaaaacgg

SEQ ID NO: 177550 - DNA, 70 bp, Homo sapiens
gtggaggtacaaaagtaaatagatgtaacaaaatattcgtagttatatctgcaaaacgggattaaggaga

SEQ ID NO: 177551 - DNA, 70 bp, Homo sapiens
gatgtaacaaaatattcgtagttatatctgcaaaacgggattaaggagaattttccgtaatactcttctg

SEQ ID NO: 177552 - DNA, 69 bp, Homo sapiens
acaaaatattcgtagttatatctgcaaaacgggattaaggagaattttccgtaatactcttctgtatat

SEQ ID NO: 177553 - DNA, 68 bp, Homo sapiens
cgtagttatatctgcaaaacgggattaaggagaattttccgtaatactcttctgtatatttcaaattt

SEQ ID NO: 177554 - DNA, 67 bp, Homo sapiens
tctgcaaaacgggattaaggagaattttccgtaatactcttctgtatatttcaaattttctttttta

SEQ ID NO: 177555 - DNA, 65 bp, Homo sapiens
gggattaaggagaattttccgtaatactcttctgtatatttcaaattttcttttttagaaaacat

SEQ ID NO: 177556 - DNA, 68 bp, Homo sapiens
tttccgtaatactcttctgtatatttcaaattttcttttttagaaaacatttgtaattagtgtggata

SEQ ID NO: 177557 - DNA, 68 bp, Homo sapiens
gtaatactcttctgtatatttcaaattttcttttttagaaaacatttgtaattagtgtggataattaa

SEQ ID NO: 177558 - DNA, 71 bp, Homo sapiens
tagaaaacatttgtaattagtgtggataattaaaaagatgagagaaatgatggcaaagtaatgggaaaacc

SEQ ID NO: 177559 - DNA, 72 bp, Homo sapiens
ttgtaattagtgtggataattaaaaagatgagagaaatgatggcaaagtaatgggaaaaccttttagcatag

SEQ ID NO: 177560 - DNA, 70 bp, Homo sapiens
attagtgtggataattaaaaagatgagagaaatgatggcaaagtaatgggaaaaccttttagcatagttt

SEQ ID NO: 177561 - DNA, 70 bp, Homo sapiens
taaaaagatgagagaaatgatggcaaagtaatgggaaaaccttttagcatagttttttatccctagatat

SEQ ID NO: 177562 - DNA, 70 bp, Homo sapiens
gatgagagaaatgatggcaaagtaatgggaaaaccttttagcatagttttttatccctagatatttggtt

SEQ ID NO: 177563 - DNA, 67 bp, Homo sapiens
atgggaaaaccttttagcatagttttttatccctagatatttggttttaagccacatattttccaca

SEQ ID NO: 177564 - DNA, 69 bp, Homo sapiens
cttttagcatagttttttatccctagatatttggttttaagccacatattttccacaaggagtagaatg

SEQ ID NO: 177565 - DNA, 74 bp, Homo sapiens
agttttttatccctagatatttggttttaagccacatattttccacaaggagtagaatgtcatgcaccatgaga

SEQ ID NO: 177566 - DNA, 80 bp, Homo sapiens
tttatccctagatatttggttttaagccacatattttccacaaggagtagaatgtcatgcaccatgagagcatgaagtgc

SEQ ID NO: 177567 - DNA, 79 bp, Homo sapiens
tatttggttttaagccacatattttccacaaggagtagaatgtcatgcaccatgagagcatgaagtgcccattagaaat

SEQ ID NO: 177568 - DNA, 79 bp, Homo sapiens
tttaagccacatattttccacaaggagtagaatgtcatgcaccatgagagcatgaagtgcccattagaaatttgaaaaa

SEQ ID NO: 177569 - DNA, 83 bp, Homo sapiens
tattttccacaaggagtagaatgtcatgcaccatgagagcatgaagtgcccattagaaatttgaaaaatgaatcagccatgaa

SEQ ID NO: 177570 - DNA, 84 bp, Homo sapiens
agtagaatgtcatgcaccatgagagcatgaagtgcccattagaaatttgaaaaatgaatcagccatgaaatgttagatttctga

SEQ ID NO: 177571 - DNA, 83 bp, Homo sapiens
aatgtcatgcaccatgagagcatgaagtgcccattagaaatttgaaaaatgaatcagccatgaaatgttagatttctgaaaca

SEQ ID NO: 177572 - DNA, 78 bp, Homo sapiens
atgagagcatgaagtgcccattagaaatttgaaaaatgaatcagccatgaaatgttagatttctgaaacacctacact

SEQ ID NO: 177573 - DNA, 77 bp, Homo sapiens
catgaagtgcccattagaaatttgaaaaatgaatcagccatgaaatgttagatttctgaaacacctacacttgatta

SEQ ID NO: 177574 - DNA, 76 bp, Homo sapiens
agaaatttgaaaaatgaatcagccatgaaatgttagatttctgaaacacctacacttgattaatgattagctagcc

SEQ ID NO: 177575 - DNA, 78 bp, Homo sapiens
gaaaaatgaatcagccatgaaatgttagatttctgaaacacctacacttgattaatgattagctagccctgtatgaaa

SEQ ID NO: 177576 - DNA, 76 bp, Homo sapiens
aatcagccatgaaatgttagatttctgaaacacctacacttgattaatgattagctagccctgtatgaaaacaaac

SEQ ID NO: 177577 - DNA, 74 bp, Homo sapiens
tgttagatttctgaaacacctacacttgattaatgattagctagccctgtatgaaaacaaaccaagaaatggtc

SEQ ID NO: 177578 - DNA, 76 bp, Homo sapiens
tctgaaacacctacacttgattaatgattagctagccctgtatgaaaacaaaccaagaaatggtctatttgatgta

SEQ ID NO: 177579 - DNA, 75 bp, Homo sapiens
ttgattaatgattagctagccctgtatgaaaacaaaccaagaaatggtctatttgatgtacttttcagtgggaca

SEQ ID NO: 177580 - DNA, 74 bp, Homo sapiens
tatgaaaacaaaccaagaaatggtctatttgatgtacttttcagtgggacaacctgggtgtgatatcagggaca

SEQ ID NO: 177581 - DNA, 74 bp, Homo sapiens
accaagaaatggtctatttgatgtacttttcagtgggacaacctgggtgtgatatcagggacaggactataata

SEQ ID NO: 177582 - DNA, 76 bp, Homo sapiens
aaatggtctatttgatgtacttttcagtgggacaacctgggtgtgatatcagggacaggactataatatgcttata

SEQ ID NO: 177583 - DNA, 75 bp, Homo sapiens
atttgatgtacttttcagtgggacaacctgggtgtgatatcagggacaggactataatatgcttataatttagta

SEQ ID NO: 177584 - DNA, 76 bp, Homo sapiens
ggacaacctgggtgtgatatcagggacaggactataatatgcttataatttagtaagcacaattcaataaattaca

SEQ ID NO: 177585 - DNA, 79 bp, Homo sapiens
gtgtgatatcagggacaggactataatatgcttataatttagtaagcacaattcaataaattacattgtgttatgtgga

SEQ ID NO: 177586 - DNA, 75 bp, Homo sapiens
gggacaggactataatatgcttataatttagtaagcacaattcaataaattacattgtgttatgtggagaaaggc

SEQ ID NO: 177587 - DNA, 74 bp, Homo sapiens
taatatgcttataatttagtaagcacaattcaataaattacattgtgttatgtggagaaaggctaaaaatccca

SEQ ID NO: 177588 - DNA, 72 bp, Homo sapiens
taatttagtaagcacaattcaataaattacattgtgttatgtggagaaaggctaaaaatcccaactggagga

SEQ ID NO: 177589 - DNA, 73 bp, Homo sapiens
tagtaagcacaattcaataaattacattgtgttatgtggagaaaggctaaaaatcccaactggaggaccctca

SEQ ID NO: 177590 - DNA, 75 bp, Homo sapiens
aataaattacattgtgttatgtggagaaaggctaaaaatcccaactggaggaccctcagcttgcagcatagatag

SEQ ID NO: 177591 - DNA, 76 bp, Homo sapiens
attacattgtgttatgtggagaaaggctaaaaatcccaactggaggaccctcagcttgcagcatagataggtatag

SEQ ID NO: 177592 - DNA, 76 bp, Homo sapiens
ttatgtggagaaaggctaaaaatcccaactggaggaccctcagcttgcagcatagataggtatagggagatagaag

SEQ ID NO: 177593 - DNA, 76 bp, Homo sapiens
aaaggctaaaaatcccaactggaggaccctcagcttgcagcatagataggtatagggagatagaagtgagaagctc

SEQ ID NO: 177594 - DNA, 79 bp, Homo sapiens
gaccctcagcttgcagcatagataggtatagggagatagaagtgagaagctctcctccgccactatctaaggggagaat

SEQ ID NO: 177595 - DNA, 80 bp, Homo sapiens
agcttgcagcatagataggtatagggagatagaagtgagaagctctcctccgccactatctaaggggagaattctgtggc

SEQ ID NO: 177596 - DNA, 77 bp, Homo sapiens
atagataggtatagggagatagaagtgagaagctctcctccgccactatctaaggggagaattctgtggcctgtgga

SEQ ID NO: 177597 - DNA, 79 bp, Homo sapiens
atagaagtgagaagctctcctccgccactatctaaggggagaattctgtggcctgtggactggagcacttgtctccatg

SEQ ID NO: 177598 - DNA, 77 bp, Homo sapiens
aagctctcctccgccactatctaaggggagaattctgtggcctgtggactggagcacttgtctccatgggcagtggg

SEQ ID NO: 177599 - DNA, 78 bp, Homo sapiens
attctgtggcctgtggactggagcacttgtctccatgggcagtggggccccattagagaactagctcacacacctggt

SEQ ID NO: 177600 - DNA, 80 bp, Homo sapiens
tggactggagcacttgtctccatgggcagtggggccccattagagaactagctcacacacctggttctgattcatgttta

SEQ ID NO: 177601 - DNA, 78 bp, Homo sapiens
agcacttgtctccatgggcagtggggccccattagagaactagctcacacacctggttctgattcatgtttaaccata

SEQ ID NO: 177602 - DNA, 76 bp, Homo sapiens
catgggcagtggggccccattagagaactagctcacacacctggttctgattcatgtttaaccatatggtttgctt

SEQ ID NO: 177603 - DNA, 74 bp, Homo sapiens
agtggggccccattagagaactagctcacacacctggttctgattcatgtttaaccatatggtttgctttccca

SEQ ID NO: 177604 - DNA, 74 bp, Homo sapiens
attagagaactagctcacacacctggttctgattcatgtttaaccatatggtttgctttcccacaagggaaaca

SEQ ID NO: 177605 - DNA, 74 bp, Homo sapiens
tagctcacacacctggttctgattcatgtttaaccatatggtttgctttcccacaagggaaacaatggtctaac

SEQ ID NO: 177606 - DNA, 70 bp, Homo sapiens
acctggttctgattcatgtttaaccatatggtttgctttcccacaagggaaacaatggtctaaccttaca

SEQ ID NO: 177607 - DNA, 70 bp, Homo sapiens
gtttaaccatatggtttgctttcccacaagggaaacaatggtctaaccttacagtgggtacattctgctc

SEQ ID NO: 177608 - DNA, 73 bp, Homo sapiens
tttgctttcccacaagggaaacaatggtctaaccttacagtgggtacattctgctctgctcaatggttgtatt

SEQ ID NO: 177609 - DNA, 72 bp, Homo sapiens
ttcccacaagggaaacaatggtctaaccttacagtgggtacattctgctctgctcaatggttgtatttcttt

SEQ ID NO: 177610 - DNA, 71 bp, Homo sapiens
aaacaatggtctaaccttacagtgggtacattctgctctgctcaatggttgtatttctttttggtaattaa

SEQ ID NO: 177611 - DNA, 71 bp, Homo sapiens
agtgggtacattctgctctgctcaatggttgtatttctttttggtaattaacaagttagccttgtaagaaa

SEQ ID NO: 177612 - DNA, 76 bp, Homo sapiens
tctgctctgctcaatggttgtatttctttttggtaattaacaagttagccttgtaagaaagtgcatgatgcttaaa

SEQ ID NO: 177613 - DNA, 73 bp, Homo sapiens
gctcaatggttgtatttctttttggtaattaacaagttagccttgtaagaaagtgcatgatgcttaaagagaa

SEQ ID NO: 177614 - DNA, 71 bp, Homo sapiens
gtatttctttttggtaattaacaagttagccttgtaagaaagtgcatgatgcttaaagagaagccaagctt

SEQ ID NO: 177615 - DNA, 70 bp, Homo sapiens
tttggtaattaacaagttagccttgtaagaaagtgcatgatgcttaaagagaagccaagcttttttttcc

SEQ ID NO: 177616 - DNA, 71 bp, Homo sapiens
ccttgtaagaaagtgcatgatgcttaaagagaagccaagcttttttttcctttgtaacaattctgtggatt

SEQ ID NO: 177617 - DNA, 73 bp, Homo sapiens
aagtgcatgatgcttaaagagaagccaagcttttttttcctttgtaacaattctgtggatttactacttatgc

SEQ ID NO: 177618 - DNA, 70 bp, Homo sapiens
gcttaaagagaagccaagcttttttttcctttgtaacaattctgtggatttactacttatgcttttctga

SEQ ID NO: 177619 - DNA, 72 bp, Homo sapiens
gccaagcttttttttcctttgtaacaattctgtggatttactacttatgcttttctgagttctctttctgca

SEQ ID NO: 177620 - DNA, 73 bp, Homo sapiens
ttttcctttgtaacaattctgtggatttactacttatgcttttctgagttctctttctgcagagttcaaattc

SEQ ID NO: 177621 - DNA, 75 bp, Homo sapiens
ttgtaacaattctgtggatttactacttatgcttttctgagttctctttctgcagagttcaaattcttaaatctg

SEQ ID NO: 177622 - DNA, 74 bp, Homo sapiens
ctgtggatttactacttatgcttttctgagttctctttctgcagagttcaaattcttaaatctgtacaattttc

SEQ ID NO: 177623 - DNA, 76 bp, Homo sapiens
tacttatgcttttctgagttctctttctgcagagttcaaattcttaaatctgtacaattttctattttgatagcac

SEQ ID NO: 177624 - DNA, 76 bp, Homo sapiens
gcttttctgagttctctttctgcagagttcaaattcttaaatctgtacaattttctattttgatagcacttctctg

SEQ ID NO: 177625 - DNA, 76 bp, Homo sapiens
ttctctttctgcagagttcaaattcttaaatctgtacaattttctattttgatagcacttctctgtttcagggcca

SEQ ID NO: 177626 - DNA, 75 bp, Homo sapiens
cagagttcaaattcttaaatctgtacaattttctattttgatagcacttctctgtttcagggccatccctgaata

SEQ ID NO: 177627 - DNA, 74 bp, Homo sapiens
ttcttaaatctgtacaattttctattttgatagcacttctctgtttcagggccatccctgaatattaccttgaa

SEQ ID NO: 177628 - DNA, 74 bp, Homo sapiens
tgtacaattttctattttgatagcacttctctgtttcagggccatccctgaatattaccttgaaccctattgaa

SEQ ID NO: 177629 - DNA, 73 bp, Homo sapiens
ttctattttgatagcacttctctgtttcagggccatccctgaatattaccttgaaccctattgaaatgccttt

SEQ ID NO: 177630 - DNA, 71 bp, Homo sapiens
tttgatagcacttctctgtttcagggccatccctgaatattaccttgaaccctattgaaatgccttttttt

SEQ ID NO: 177631 - DNA, 74 bp, Homo sapiens
cgcgcctggcctgaaatgccttttaaaaattatatgttgaactaccttgttaccagaggcagtcattcaagtca

SEQ ID NO: 177632 - DNA, 73 bp, Homo sapiens
ctgaaatgccttttaaaaattatatgttgaactaccttgttaccagaggcagtcattcaagtcagccctgaac

SEQ ID NO: 177633 - DNA, 72 bp, Homo sapiens
ttttaaaaattatatgttgaactaccttgttaccagaggcagtcattcaagtcagccctgaactcaaagagg

SEQ ID NO: 177634 - DNA, 74 bp, Homo sapiens
aattatatgttgaactaccttgttaccagaggcagtcattcaagtcagccctgaactcaaagaggtaatgggaa

SEQ ID NO: 177635 - DNA, 71 bp, Homo sapiens
gttgaactaccttgttaccagaggcagtcattcaagtcagccctgaactcaaagaggtaatgggaaaaagg

SEQ ID NO: 177636 - DNA, 72 bp, Homo sapiens
ttgttaccagaggcagtcattcaagtcagccctgaactcaaagaggtaatgggaaaaagggaaataaatcca

SEQ ID NO: 177637 - DNA, 69 bp, Homo sapiens
agtcattcaagtcagccctgaactcaaagaggtaatgggaaaaagggaaataaatccagaggtttctgt

SEQ ID NO: 177638 - DNA, 68 bp, Homo sapiens
aagtcagccctgaactcaaagaggtaatgggaaaaagggaaataaatccagaggtttctgtttagcaa

SEQ ID NO: 177639 - DNA, 69 bp, Homo sapiens
ctgaactcaaagaggtaatgggaaaaagggaaataaatccagaggtttctgtttagcaagcatttttca

SEQ ID NO: 177640 - DNA, 70 bp, Homo sapiens
ggtaatgggaaaaagggaaataaatccagaggtttctgtttagcaagcatttttcattccatgatttgtg

SEQ ID NO: 177641 - DNA, 71 bp, Homo sapiens
aaaagggaaataaatccagaggtttctgtttagcaagcatttttcattccatgatttgtgttgaggcaaaa

SEQ ID NO: 177642 - DNA, 77 bp, Homo sapiens
taaatccagaggtttctgtttagcaagcatttttcattccatgatttgtgttgaggcaaaatatacatagagtcact

SEQ ID NO: 177643 - DNA, 77 bp, Homo sapiens
ggtttctgtttagcaagcatttttcattccatgatttgtgttgaggcaaaatatacatagagtcacttgttgcttaa

SEQ ID NO: 177644 - DNA, 78 bp, Homo sapiens
tttagcaagcatttttcattccatgatttgtgttgaggcaaaatatacatagagtcacttgttgcttaacgtgcgttc

SEQ ID NO: 177645 - DNA, 76 bp, Homo sapiens
atttttcattccatgatttgtgttgaggcaaaatatacatagagtcacttgttgcttaacgtgcgttctgagaatt

SEQ ID NO: 177646 - DNA, 78 bp, Homo sapiens
ttttcattccatgatttgtgttgaggcaaaatatacatagagtcacttgttgcttaacgtgcgttctgagaatttcat

SEQ ID NO: 177647 - DNA, 78 bp, Homo sapiens
attccatgatttgtgttgaggcaaaatatacatagagtcacttgttgcttaacgtgcgttctgagaatttcattgtta

SEQ ID NO: 177648 - DNA, 76 bp, Homo sapiens
atttgtgttgaggcaaaatatacatagagtcacttgttgcttaacgtgcgttctgagaatttcattgttaggcgat

SEQ ID NO: 177649 - DNA, 76 bp, Homo sapiens
ttgtgttgaggcaaaatatacatagagtcacttgttgcttaacgtgcgttctgagaatttcattgttaggcgattt

SEQ ID NO: 177650 - DNA, 79 bp, Homo sapiens
aaatatacatagagtcacttgttgcttaacgtgcgttctgagaatttcattgttaggcgattttgtcattatatgatca

SEQ ID NO: 177651 - DNA, 82 bp, Homo sapiens
atatacatagagtcacttgttgcttaacgtgcgttctgagaatttcattgttaggcgattttgtcattatatgatcatcaca

SEQ ID NO: 177652 - DNA, 81 bp, Homo sapiens
acttgttgcttaacgtgcgttctgagaatttcattgttaggcgattttgtcattatatgatcatcacagaatgtgcttaca

SEQ ID NO: 177653 - DNA, 82 bp, Homo sapiens
ttgttgcttaacgtgcgttctgagaatttcattgttaggcgattttgtcattatatgatcatcacagaatgtgcttacacta

SEQ ID NO: 177654 - DNA, 82 bp, Homo sapiens
cttaacgtgcgttctgagaatttcattgttaggcgattttgtcattatatgatcatcacagaatgtgcttacactatgtgta

SEQ ID NO: 177655 - DNA, 83 bp, Homo sapiens
tctgagaatttcattgttaggcgattttgtcattatatgatcatcacagaatgtgcttacactatgtgtacttattacctaga

SEQ ID NO: 177656 - DNA, 84 bp, Homo sapiens
atttcattgttaggcgattttgtcattatatgatcatcacagaatgtgcttacactatgtgtacttattacctagatgacatca

SEQ ID NO: 177657 - DNA, 83 bp, Homo sapiens
attatatgatcatcacagaatgtgcttacactatgtgtacttattacctagatgacatcacctattacacacctaggcgctta

SEQ ID NO: 177658 - DNA, 83 bp, Homo sapiens
tcatcacagaatgtgcttacactatgtgtacttattacctagatgacatcacctattacacacctaggcgcttatggtgtata

SEQ ID NO: 177659 - DNA, 79 bp, Homo sapiens
aatgtgcttacactatgtgtacttattacctagatgacatcacctattacacacctaggcgcttatggtgtatagcctg

SEQ ID NO: 177660 - DNA, 79 bp, Homo sapiens
ttacactatgtgtacttattacctagatgacatcacctattacacacctaggcgcttatggtgtatagcctgttgctcc

SEQ ID NO: 177661 - DNA, 79 bp, Homo sapiens
tacttattacctagatgacatcacctattacacacctaggcgcttatggtgtatagcctgttgctcctagaccacagta

SEQ ID NO: 177662 - DNA, 80 bp, Homo sapiens
atcacctattacacacctaggcgcttatggtgtatagcctgttgctcctagaccacagtaccatacagcaagcttgtcca

SEQ ID NO: 177663 - DNA, 78 bp, Homo sapiens
tacacacctaggcgcttatggtgtatagcctgttgctcctagaccacagtaccatacagcaagcttgtccaacccacg

SEQ ID NO: 177664 - DNA, 81 bp, Homo sapiens
ttatggtgtatagcctgttgctcctagaccacagtaccatacagcaagcttgtccaacccacggcctgcaggcttcatgtg

SEQ ID NO: 177665 - DNA, 81 bp, Homo sapiens
gtgtatagcctgttgctcctagaccacagtaccatacagcaagcttgtccaacccacggcctgcaggcttcatgtggccca

SEQ ID NO: 177666 - DNA, 75 bp, Homo sapiens
agtgtggcccagggaagcaaaagattagacacccctgctgtacagcatggttttgtactgactactatagacaat

SEQ ID NO: 177667 - DNA, 75 bp, Homo sapiens
cccagggaagcaaaagattagacacccctgctgtacagcatggttttgtactgactactatagacaattgtaaca

SEQ ID NO: 177668 - DNA, 75 bp, Homo sapiens
aaaagattagacacccctgctgtacagcatggttttgtactgactactatagacaattgtaacacaaatcactag

SEQ ID NO: 177669 - DNA, 78 bp, Homo sapiens
tagacacccctgctgtacagcatggttttgtactgactactatagacaattgtaacacaaatcactaggcaataggaa

SEQ ID NO: 177670 - DNA, 79 bp, Homo sapiens
tacagcatggttttgtactgactactatagacaattgtaacacaaatcactaggcaataggaattcagctctactgtaa

SEQ ID NO: 177671 - DNA, 76 bp, Homo sapiens
atggttttgtactgactactatagacaattgtaacacaaatcactaggcaataggaattcagctctactgtaatct

SEQ ID NO: 177672 - DNA, 78 bp, Homo sapiens
actactatagacaattgtaacacaaatcactaggcaataggaattcagctctactgtaatcttataggatcatcgttg

SEQ ID NO: 177673 - DNA, 82 bp, Homo sapiens
tatagacaattgtaacacaaatcactaggcaataggaattcagctctactgtaatcttataggatcatcgttgtatatgcag

SEQ ID NO: 177674 - DNA, 84 bp, Homo sapiens
tgtaacacaaatcactaggcaataggaattcagctctactgtaatcttataggatcatcgttgtatatgcagtccatcattgac

SEQ ID NO: 177675 - DNA, 82 bp, Homo sapiens
taggcaataggaattcagctctactgtaatcttataggatcatcgttgtatatgcagtccatcattgaccaaaatgtcgtta

SEQ ID NO: 177676 - DNA, 78 bp, Homo sapiens
atcattgaccaaaatgtcgttatgtggcacatgactgtattgacataccatagcaaagaaaatttggtttataactga

SEQ ID NO: 177677 - DNA, 76 bp, Homo sapiens
aaaatgtcgttatgtggcacatgactgtattgacataccatagcaaagaaaatttggtttataactgatgtgggat

SEQ ID NO: 177678 - DNA, 78 bp, Homo sapiens
tatgtggcacatgactgtattgacataccatagcaaagaaaatttggtttataactgatgtgggattattccttatgt

SEQ ID NO: 177679 - DNA, 75 bp, Homo sapiens
ggcacatgactgtattgacataccatagcaaagaaaatttggtttataactgatgtgggattattccttatgttt

SEQ ID NO: 177680 - DNA, 74 bp, Homo sapiens
tgtattgacataccatagcaaagaaaatttggtttataactgatgtgggattattccttatgtttttatatgta

SEQ ID NO: 177681 - DNA, 71 bp, Homo sapiens
catagcaaagaaaatttggtttataactgatgtgggattattccttatgtttttatatgtatgatttttcc

SEQ ID NO: 177682 - DNA, 69 bp, Homo sapiens
agaaaatttggtttataactgatgtgggattattccttatgtttttatatgtatgatttttcctatccc

SEQ ID NO: 177683 - DNA, 77 bp, Homo sapiens
tataactgatgtgggattattccttatgtttttatatgtatgatttttcctatcccctctgcaaattaatgcagtca

SEQ ID NO: 177684 - DNA, 75 bp, Homo sapiens
gatgtgggattattccttatgtttttatatgtatgatttttcctatcccctctgcaaattaatgcagtcagaaaa

SEQ ID NO: 177685 - DNA, 72 bp, Homo sapiens
attccttatgtttttatatgtatgatttttcctatcccctctgcaaattaatgcagtcagaaaaaaatttca

SEQ ID NO: 177686 - DNA, 73 bp, Homo sapiens
ttatatgtatgatttttcctatcccctctgcaaattaatgcagtcagaaaaaaatttcaaagctacttaaaga

SEQ ID NO: 177687 - DNA, 70 bp, Homo sapiens
gatttttcctatcccctctgcaaattaatgcagtcagaaaaaaatttcaaagctacttaaagatttctac

SEQ ID NO: 177688 - DNA, 71 bp, Homo sapiens
atcccctctgcaaattaatgcagtcagaaaaaaatttcaaagctacttaaagatttctactgaaaagcgga

SEQ ID NO: 177689 - DNA, 72 bp, Homo sapiens
ctctgcaaattaatgcagtcagaaaaaaatttcaaagctacttaaagatttctactgaaaagcggaagcaaa

SEQ ID NO: 177690 - DNA, 72 bp, Homo sapiens
atgcagtcagaaaaaaatttcaaagctacttaaagatttctactgaaaagcggaagcaaatagacctgtcgc

SEQ ID NO: 177691 - DNA, 71 bp, Homo sapiens
aaagctacttaaagatttctactgaaaagcggaagcaaatagacctgtcgccctctacagtcagacctact

SEQ ID NO: 177692 - DNA, 77 bp, Homo sapiens
tctactgaaaagcggaagcaaatagacctgtcgccctctacagtcagacctacttcccagaggcagctactgttgtc

SEQ ID NO: 177693 - DNA, 76 bp, Homo sapiens
aagcaaatagacctgtcgccctctacagtcagacctacttcccagaggcagctactgttgtctctgtcttgtttta

SEQ ID NO: 177694 - DNA, 74 bp, Homo sapiens
ctctacagtcagacctacttcccagaggcagctactgttgtctctgtcttgttttagttcttttgggcaggtta

SEQ ID NO: 177695 - DNA, 71 bp, Homo sapiens
agtcagacctacttcccagaggcagctactgttgtctctgtcttgttttagttcttttgggcaggttacct

SEQ ID NO: 177696 - DNA, 74 bp, Homo sapiens
tcccagaggcagctactgttgtctctgtcttgttttagttcttttgggcaggttaccttcctgatgctaaatct

SEQ ID NO: 177697 - DNA, 74 bp, Homo sapiens
agctactgttgtctctgtcttgttttagttcttttgggcaggttaccttcctgatgctaaatcttatgctgtcc

SEQ ID NO: 177698 - DNA, 72 bp, Homo sapiens
tctctgtcttgttttagttcttttgggcaggttaccttcctgatgctaaatcttatgctgtccccctatttc

SEQ ID NO: 177699 - DNA, 71 bp, Homo sapiens
gttttagttcttttgggcaggttaccttcctgatgctaaatcttatgctgtccccctatttcttgacaata

SEQ ID NO: 177700 - DNA, 74 bp, Homo sapiens
ttttgggcaggttaccttcctgatgctaaatcttatgctgtccccctatttcttgacaatagtctgaagaatta

SEQ ID NO: 177701 - DNA, 74 bp, Homo sapiens
aggttaccttcctgatgctaaatcttatgctgtccccctatttcttgacaatagtctgaagaattaactgactc

SEQ ID NO: 177702 - DNA, 77 bp, Homo sapiens
ttcctgatgctaaatcttatgctgtccccctatttcttgacaatagtctgaagaattaactgactcccatagacttc

SEQ ID NO: 177703 - DNA, 75 bp, Homo sapiens
ctaaatcttatgctgtccccctatttcttgacaatagtctgaagaattaactgactcccatagacttccagtgaa

SEQ ID NO: 177704 - DNA, 70 bp, Homo sapiens
ctgtccccctatttcttgacaatagtctgaagaattaactgactcccatagacttccagtgaaccttttt

SEQ ID NO: 177705 - DNA, 69 bp, Homo sapiens
ctatttcttgacaatagtctgaagaattaactgactcccatagacttccagtgaaccttttttttttaa

SEQ ID NO: 177706 - DNA, 69 bp, Homo sapiens
tttttttaattgaatataatttacattcagaaaaacagataaattctaagtagaaagctgactggcttt

SEQ ID NO: 177707 - DNA, 71 bp, Homo sapiens
ataaattctaagtagaaagctgactggctttttcctggttcctgactcacacctcactcctgcccttttct

SEQ ID NO: 177708 - DNA, 71 bp, Homo sapiens
ctaagtagaaagctgactggctttttcctggttcctgactcacacctcactcctgcccttttcttcccagg

SEQ ID NO: 177709 - DNA, 70 bp, Homo sapiens
actggctttttcctggttcctgactcacacctcactcctgcccttttcttcccagggcctctctcaggtt

SEQ ID NO: 177710 - DNA, 73 bp, Homo sapiens
ttcctggttcctgactcacacctcactcctgcccttttcttcccagggcctctctcaggtttcacctaatgta

SEQ ID NO: 177711 - DNA, 77 bp, Homo sapiens
tgactcacacctcactcctgcccttttcttcccagggcctctctcaggtttcacctaatgtatgctgtcctttgcta

SEQ ID NO: 177712 - DNA, 75 bp, Homo sapiens
actcacacctcactcctgcccttttcttcccagggcctctctcaggtttcacctaatgtatgctgtcctttgcta

SEQ ID NO: 177713 - DNA, 74 bp, Homo sapiens
acctcactcctgcccttttcttcccagggcctctctcaggtttcacctaatgtatgctgtcctttgctacagga

SEQ ID NO: 177714 - DNA, 75 bp, Homo sapiens
ctcactcctgcccttttcttcccagggcctctctcaggtttcacctaatgtatgctgtcctttgctacaggactg

SEQ ID NO: 177715 - DNA, 74 bp, Homo sapiens
cccttttcttcccagggcctctctcaggtttcacctaatgtatgctgtcctttgctacaggactggcctgcctg

SEQ ID NO: 177716 - DNA, 75 bp, Homo sapiens
ttttcttcccagggcctctctcaggtttcacctaatgtatgctgtcctttgctacaggactggcctgcctgtttc

SEQ ID NO: 177717 - DNA, 76 bp, Homo sapiens
agggcctctctcaggtttcacctaatgtatgctgtcctttgctacaggactggcctgcctgtttccagctgttttc

SEQ ID NO: 177718 - DNA, 79 bp, Homo sapiens
tctctcaggtttcacctaatgtatgctgtcctttgctacaggactggcctgcctgtttccagctgttttctccacattc

SEQ ID NO: 177719 - DNA, 77 bp, Homo sapiens
tttcacctaatgtatgctgtcctttgctacaggactggcctgcctgtttccagctgttttctccacattccatttta

SEQ ID NO: 177720 - DNA, 76 bp, Homo sapiens
acctaatgtatgctgtcctttgctacaggactggcctgcctgtttccagctgttttctccacattccattttatct

SEQ ID NO: 177721 - DNA, 77 bp, Homo sapiens
tgtcctttgctacaggactggcctgcctgtttccagctgttttctccacattccattttatcttcattaggctttca

SEQ ID NO: 177722 - DNA, 75 bp, Homo sapiens
tacaggactggcctgcctgtttccagctgttttctccacattccattttatcttcattaggctttcatctccttt

SEQ ID NO: 177723 - DNA, 73 bp, Homo sapiens
tggcctgcctgtttccagctgttttctccacattccattttatcttcattaggctttcatctcctttttattt

SEQ ID NO: 177724 - DNA, 71 bp, Homo sapiens
cctgtttccagctgttttctccacattccattttatcttcattaggctttcatctcctttttattttctag

SEQ ID NO: 177725 - DNA, 71 bp, Homo sapiens
gctgttttctccacattccattttatcttcattaggctttcatctcctttttattttctagtaatttctta

SEQ ID NO: 177726 - DNA, 72 bp, Homo sapiens
tcttcattaggctttcatctcctttttattttctagtaatttcttaatggttcttgtccagtgctggttctc

SEQ ID NO: 177727 - DNA, 69 bp, Homo sapiens
aggctttcatctcctttttattttctagtaatttcttaatggttcttgtccagtgctggttctccattt

SEQ ID NO: 177728 - DNA, 69 bp, Homo sapiens
cctttttattttctagtaatttcttaatggttcttgtccagtgctggttctccattttatcattttcac

SEQ ID NO: 177729 - DNA, 71 bp, Homo sapiens
aatggttcttgtccagtgctggttctccattttatcattttcactgttaccattgtagtcttgtttgtttt

SEQ ID NO: 177730 - DNA, 71 bp, Homo sapiens
cagtgctggttctccattttatcattttcactgttaccattgtagtcttgtttgtttttttactgggagat

SEQ ID NO: 177731 - DNA, 68 bp, Homo sapiens
ggttctccattttatcattttcactgttaccattgtagtcttgtttgtttttttactgggagattcct

SEQ ID NO: 177732 - DNA, 69 bp, Homo sapiens
cattttcactgttaccattgtagtcttgtttgtttttttactgggagattcctttacttgaaccattca

SEQ ID NO: 177733 - DNA, 69 bp, Homo sapiens
cactgttaccattgtagtcttgtttgtttttttactgggagattcctttacttgaaccattcatgttta

SEQ ID NO: 177734 - DNA, 69 bp, Homo sapiens
tgtagtcttgtttgtttttttactgggagattcctttacttgaaccattcatgtttaattcttttctca

SEQ ID NO: 177735 - DNA, 70 bp, Homo sapiens
tgtttttttactgggagattcctttacttgaaccattcatgtttaattcttttctcattgttgtcaacag

SEQ ID NO: 177736 - DNA, 73 bp, Homo sapiens
tttactgggagattcctttacttgaaccattcatgtttaattcttttctcattgttgtcaacaggcacctgct

SEQ ID NO: 177737 - DNA, 79 bp, Homo sapiens
ttgaaccattcatgtttaattcttttctcattgttgtcaacaggcacctgcttgtgccagagcgagagacactgtttaa

SEQ ID NO: 177738 - DNA, 78 bp, Homo sapiens
ttcatgtttaattcttttctcattgttgtcaacaggcacctgcttgtgccagagcgagagacactgtttaacacccta

SEQ ID NO: 177739 - DNA, 78 bp, Homo sapiens
tttctcattgttgtcaacaggcacctgcttgtgccagagcgagagacactgtttaacaccctagccaacaatcgggaa

SEQ ID NO: 177740 - DNA, 79 bp, Homo sapiens
ttgttgtcaacaggcacctgcttgtgccagagcgagagacactgtttaacaccctagccaacaatcgggaaatcatcaa

SEQ ID NO: 177741 - DNA, 77 bp, Homo sapiens
aacaggcacctgcttgtgccagagcgagagacactgtttaacaccctagccaacaatcgggaaatcatcaaccaaca

SEQ ID NO: 177742 - DNA, 76 bp, Homo sapiens
cttgtgccagagcgagagacactgtttaacaccctagccaacaatcgggaaatcatcaaccaacagaggaagaggc

SEQ ID NO: 177743 - DNA, 76 bp, Homo sapiens
agagcgagagacactgtttaacaccctagccaacaatcgggaaatcatcaaccaacagaggaagaggctgaatcac

SEQ ID NO: 177744 - DNA, 74 bp, Homo sapiens
actgtttaacaccctagccaacaatcgggaaatcatcaaccaacagaggaagaggctgaatcacctggtggata

SEQ ID NO: 177745 - DNA, 78 bp, Homo sapiens
acaccctagccaacaatcgggaaatcatcaaccaacagaggaagaggctgaatcacctggtggatagtcttcagcagc

SEQ ID NO: 177746 - DNA, 77 bp, Homo sapiens
aacaatcgggaaatcatcaaccaacagaggaagaggctgaatcacctggtggatagtcttcagcagctccgccttta

SEQ ID NO: 177747 - DNA, 77 bp, Homo sapiens
aaatcatcaaccaacagaggaagaggctgaatcacctggtggatagtcttcagcagctccgcctttacaaacagact

SEQ ID NO: 177748 - DNA, 76 bp, Homo sapiens
accaacagaggaagaggctgaatcacctggtggatagtcttcagcagctccgcctttacaaacagacttccctgtg

SEQ ID NO: 177749 - DNA, 77 bp, Homo sapiens
aagaggctgaatcacctggtggatagtcttcagcagctccgcctttacaaacagacttccctgtggagcctgtcctc

SEQ ID NO: 177750 - DNA, 76 bp, Homo sapiens
aatcacctggtggatagtcttcagcagctccgcctttacaaacagacttccctgtggagcctgtcctcggctgttc

SEQ ID NO: 177751 - DNA, 76 bp, Homo sapiens
agctccgcctttacaaacagacttccctgtggagcctgtcctcggctgttccttcccagagcagcattcacaggtg

SEQ ID NO: 177752 - DNA, 81 bp, Homo sapiens
tggagcctgtcctcggctgttccttcccagagcagcattcacaggtgtggagaggacttgcactcaataaatatgggtgaa

SEQ ID NO: 177753 - DNA, 75 bp, Homo sapiens
agcctccgatctttcagctcctagttggtctgtatctaacactgttctgtttcagttttgacagtgacctggaaa

SEQ ID NO: 177754 - DNA, 77 bp, Homo sapiens
atctttcagctcctagttggtctgtatctaacactgttctgtttcagttttgacagtgacctggaaagcctgtgcaa

SEQ ID NO: 177755 - DNA, 77 bp, Homo sapiens
tagttggtctgtatctaacactgttctgtttcagttttgacagtgacctggaaagcctgtgcaatgctttgttgaaa

SEQ ID NO: 177756 - DNA, 77 bp, Homo sapiens
tgtatctaacactgttctgtttcagttttgacagtgacctggaaagcctgtgcaatgctttgttgaaaaccaccata

SEQ ID NO: 177757 - DNA, 77 bp, Homo sapiens
actgttctgtttcagttttgacagtgacctggaaagcctgtgcaatgctttgttgaaaaccaccatagaatctcaca

SEQ ID NO: 177758 - DNA, 77 bp, Homo sapiens
tgtttcagttttgacagtgacctggaaagcctgtgcaatgctttgttgaaaaccaccatagaatctcacaccaaatc

SEQ ID NO: 177759 - DNA, 75 bp, Homo sapiens
agtgacctggaaagcctgtgcaatgctttgttgaaaaccaccatagaatctcacaccaaatccttgcccaaagta

SEQ ID NO: 177760 - DNA, 73 bp, Homo sapiens
aaagcctgtgcaatgctttgttgaaaaccaccatagaatctcacaccaaatccttgcccaaagtaccaggtaa

SEQ ID NO: 177761 - DNA, 74 bp, Homo sapiens
caatgctttgttgaaaaccaccatagaatctcacaccaaatccttgcccaaagtaccaggtaattgcatccttc

SEQ ID NO: 177762 - DNA, 72 bp, Homo sapiens
ttgaaaaccaccatagaatctcacaccaaatccttgcccaaagtaccaggtaattgcatccttcccagtctt

SEQ ID NO: 177763 - DNA, 71 bp, Homo sapiens
aaccaccatagaatctcacaccaaatccttgcccaaagtaccaggtaattgcatccttcccagtcttttaa

SEQ ID NO: 177764 - DNA, 69 bp, Homo sapiens
aatctcacaccaaatccttgcccaaagtaccaggtaattgcatccttcccagtcttttaactcccttta

SEQ ID NO: 177765 - DNA, 72 bp, Homo sapiens
agtactgatatcttaaaaactgagtcttaatcatttatgggtttatggatttcttgcagccaaactgtcccc

SEQ ID NO: 177766 - DNA, 72 bp, Homo sapiens
tcttaaaaactgagtcttaatcatttatgggtttatggatttcttgcagccaaactgtcccccatgaaacag

SEQ ID NO: 177767 - DNA, 74 bp, Homo sapiens
tcttaatcatttatgggtttatggatttcttgcagccaaactgtcccccatgaaacaggcacaactgagaaact

SEQ ID NO: 177768 - DNA, 73 bp, Homo sapiens
atttatgggtttatggatttcttgcagccaaactgtcccccatgaaacaggcacaactgagaaacttcttggc

SEQ ID NO: 177769 - DNA, 74 bp, Homo sapiens
gtttatggatttcttgcagccaaactgtcccccatgaaacaggcacaactgagaaacttcttggccaagaggaa

SEQ ID NO: 177770 - DNA, 74 bp, Homo sapiens
ttcttgcagccaaactgtcccccatgaaacaggcacaactgagaaacttcttggccaagaggaagaccccacca

SEQ ID NO: 177771 - DNA, 73 bp, Homo sapiens
aaactgtcccccatgaaacaggcacaactgagaaacttcttggccaagaggaagaccccaccagtgagatcca

SEQ ID NO: 177772 - DNA, 75 bp, Homo sapiens
atgaaacaggcacaactgagaaacttcttggccaagaggaagaccccaccagtgagatccactgctccaggtaaa

SEQ ID NO: 177773 - DNA, 74 bp, Homo sapiens
caactgagaaacttcttggccaagaggaagaccccaccagtgagatccactgctccaggtaaagagaaccagta

SEQ ID NO: 177774 - DNA, 72 bp, Homo sapiens
agaaacttcttggccaagaggaagaccccaccagtgagatccactgctccaggtaaagagaaccagtaactg

SEQ ID NO: 177775 - DNA, 76 bp, Homo sapiens
caagaggaagaccccaccagtgagatccactgctccaggtaaagagaaccagtaactgggcctgtacatagtgata

SEQ ID NO: 177776 - DNA, 74 bp, Homo sapiens
aagaccccaccagtgagatccactgctccaggtaaagagaaccagtaactgggcctgtacatagtgatagggtg

SEQ ID NO: 177777 - DNA, 74 bp, Homo sapiens
cttgctttgagttgtctaaattgtgttttgtttggggcttttgtagccagcctgtctcgatcagcctttctgtc

SEQ ID NO: 177778 - DNA, 76 bp, Homo sapiens
aattgtgttttgtttggggcttttgtagccagcctgtctcgatcagcctttctgtctcagagatattatgaagact

SEQ ID NO: 177779 - DNA, 78 bp, Homo sapiens
ttttgtttggggcttttgtagccagcctgtctcgatcagcctttctgtctcagagatattatgaagacttggatgaag

SEQ ID NO: 177780 - DNA, 85 bp, Homo sapiens
ttttgtagccagcctgtctcgatcagcctttctgtctcagagatattatgaagacttggatgaagtcagctcaacgtcatctgtc

SEQ ID NO: 177781 - DNA, 85 bp, Homo sapiens
ccagcctgtctcgatcagcctttctgtctcagagatattatgaagacttggatgaagtcagctcaacgtcatctgtctcccagtc

SEQ ID NO: 177782 - DNA, 85 bp, Homo sapiens
atcagcctttctgtctcagagatattatgaagacttggatgaagtcagctcaacgtcatctgtctcccagtctctggagagtgaa

SEQ ID NO: 177783 - DNA, 86 bp, Homo sapiens
tttctgtctcagagatattatgaagacttggatgaagtcagctcaacgtcatctgtctcccagtctctggagagtgaagatgcacg

SEQ ID NO: 177784 - DNA, 83 bp, Homo sapiens
atattatgaagacttggatgaagtcagctcaacgtcatctgtctcccagtctctggagagtgaagatgcacggacgtcctgta

SEQ ID NO: 177785 - DNA, 82 bp, Homo sapiens
aagacttggatgaagtcagctcaacgtcatctgtctcccagtctctggagagtgaagatgcacggacgtcctgtaaagatga

SEQ ID NO: 177786 - DNA, 83 bp, Homo sapiens
atgaagtcagctcaacgtcatctgtctcccagtctctggagagtgaagatgcacggacgtcctgtaaagatgacgaggcagtg

SEQ ID NO: 177787 - DNA, 81 bp, Homo sapiens
agctcaacgtcatctgtctcccagtctctggagagtgaagatgcacggacgtcctgtaaagatgacgaggcagtggttcag

SEQ ID NO: 177788 - DNA, 78 bp, Homo sapiens
gtctcccagtctctggagagtgaagatgcacggacgtcctgtaaagatgacgaggcagtggttcaggcccctcggcac

SEQ ID NO: 177789 - DNA, 77 bp, Homo sapiens
ccagtctctggagagtgaagatgcacggacgtcctgtaaagatgacgaggcagtggttcaggcccctcggcacgccc

SEQ ID NO: 177790 - DNA, 73 bp, Homo sapiens
agtgaagatgcacggacgtcctgtaaagatgacgaggcagtggttcaggcccctcggcacgcccccgtggttc

SEQ ID NO: 177791 - DNA, 70 bp, Homo sapiens
acggacgtcctgtaaagatgacgaggcagtggttcaggcccctcggcacgcccccgtggttcgcactcct

SEQ ID NO: 177792 - DNA, 74 bp, Homo sapiens
gtcctgtaaagatgacgaggcagtggttcaggcccctcggcacgcccccgtggttcgcactccttccatccagc

SEQ ID NO: 177793 - DNA, 75 bp, Homo sapiens
atgacgaggcagtggttcaggcccctcggcacgcccccgtggttcgcactccttccatccagcccagtctcttgc

SEQ ID NO: 177794 - DNA, 76 bp, Homo sapiens
agtggttcaggcccctcggcacgcccccgtggttcgcactccttccatccagcccagtctcttgccccatgcagca

SEQ ID NO: 177795 - DNA, 76 bp, Homo sapiens
ctcggcacgcccccgtggttcgcactccttccatccagcccagtctcttgccccatgcagcaccttttgctaaatc

SEQ ID NO: 177796 - DNA, 75 bp, Homo sapiens
ccccgtggttcgcactccttccatccagcccagtctcttgccccatgcagcaccttttgctaaatctcacctggt

SEQ ID NO: 177797 - DNA, 80 bp, Homo sapiens
ttcgcactccttccatccagcccagtctcttgccccatgcagcaccttttgctaaatctcacctggttcatggttcttca

SEQ ID NO: 177798 - DNA, 80 bp, Homo sapiens
ttccatccagcccagtctcttgccccatgcagcaccttttgctaaatctcacctggttcatggttcttcacctggtgtga

SEQ ID NO: 177799 - DNA, 79 bp, Homo sapiens
cagtctcttgccccatgcagcaccttttgctaaatctcacctggttcatggttcttcacctggtgtgatgggaacttca

SEQ ID NO: 177800 - DNA, 77 bp, Homo sapiens
ttgccccatgcagcaccttttgctaaatctcacctggttcatggttcttcacctggtgtgatgggaacttcaggtaa

SEQ ID NO: 177801 - DNA, 73 bp, Homo sapiens
agcaccttttgctaaatctcacctggttcatggttcttcacctggtgtgatgggaacttcaggtaagtaaaca

SEQ ID NO: 177802 - DNA, 73 bp, Homo sapiens
ttgctaaatctcacctggttcatggttcttcacctggtgtgatgggaacttcaggtaagtaaacagtgggaaa

SEQ ID NO: 177803 - DNA, 69 bp, Homo sapiens
ctggttcatggttcttcacctggtgtgatgggaacttcaggtaagtaaacagtgggaaaggaaactgtt

SEQ ID NO: 177804 - DNA, 73 bp, Homo sapiens
tttcctgttctctcacccactcacacttaatttttcttttcctcttagtggctacatctgctagcaaaattat

SEQ ID NO: 177805 - DNA, 74 bp, Homo sapiens
tctctcacccactcacacttaatttttcttttcctcttagtggctacatctgctagcaaaattattcctcaagg

SEQ ID NO: 177806 - DNA, 72 bp, Homo sapiens
actcacacttaatttttcttttcctcttagtggctacatctgctagcaaaattattcctcaaggggccgata

SEQ ID NO: 177807 - DNA, 77 bp, Homo sapiens
ttcttttcctcttagtggctacatctgctagcaaaattattcctcaaggggccgatagcacaatgcttgccacgaaa

SEQ ID NO: 177808 - DNA, 77 bp, Homo sapiens
tcttagtggctacatctgctagcaaaattattcctcaaggggccgatagcacaatgcttgccacgaaaaccgtgaaa

SEQ ID NO: 177809 - DNA, 78 bp, Homo sapiens
ctacatctgctagcaaaattattcctcaaggggccgatagcacaatgcttgccacgaaaaccgtgaaacatggtgcac

SEQ ID NO: 177810 - DNA, 74 bp, Homo sapiens
gcaaaattattcctcaaggggccgatagcacaatgcttgccacgaaaaccgtgaaacatggtgcacctagtcct

SEQ ID NO: 177811 - DNA, 74 bp, Homo sapiens
attattcctcaaggggccgatagcacaatgcttgccacgaaaaccgtgaaacatggtgcacctagtccttccca

SEQ ID NO: 177812 - DNA, 75 bp, Homo sapiens
gggccgatagcacaatgcttgccacgaaaaccgtgaaacatggtgcacctagtccttcccaccccatctcagccc

SEQ ID NO: 177813 - DNA, 78 bp, Homo sapiens
tagcacaatgcttgccacgaaaaccgtgaaacatggtgcacctagtccttcccaccccatctcagccccgcaggcagc

SEQ ID NO: 177814 - DNA, 78 bp, Homo sapiens
cttgccacgaaaaccgtgaaacatggtgcacctagtccttcccaccccatctcagccccgcaggcagctgccgcagca

SEQ ID NO: 177815 - DNA, 79 bp, Homo sapiens
aaaccgtgaaacatggtgcacctagtccttcccaccccatctcagccccgcaggcagctgccgcagcagcactcaggcg

SEQ ID NO: 177816 - DNA, 85 bp, Homo sapiens
acatggtgcacctagtccttcccaccccatctcagccccgcaggcagctgccgcagcagcactcaggcggcagatggccagtcag

SEQ ID NO: 177817 - DNA, 83 bp, Homo sapiens
tccttcccaccccatctcagccccgcaggcagctgccgcagcagcactcaggcggcagatggccagtcaggcaccaggtaaaa

SEQ ID NO: 177818 - DNA, 84 bp, Homo sapiens
accccatctcagccccgcaggcagctgccgcagcagcactcaggcggcagatggccagtcaggcaccaggtaaaagctgtagcc

SEQ ID NO: 177819 - DNA, 83 bp, Homo sapiens
ccccgcaggcagctgccgcagcagcactcaggcggcagatggccagtcaggcaccaggtaaaagctgtagccccatacctgta

SEQ ID NO: 177820 - DNA, 84 bp, Homo sapiens
agctgccgcagcagcactcaggcggcagatggccagtcaggcaccaggtaaaagctgtagccccatacctgtacagaggctgat

SEQ ID NO: 177821 - DNA, 84 bp, Homo sapiens
agcagcactcaggcggcagatggccagtcaggcaccaggtaaaagctgtagccccatacctgtacagaggctgattatgagctg

SEQ ID NO: 177822 - DNA, 83 bp, Homo sapiens
actcaggcggcagatggccagtcaggcaccaggtaaaagctgtagccccatacctgtacagaggctgattatgagctgtctga

SEQ ID NO: 177823 - DNA, 83 bp, Homo sapiens
agatggccagtcaggcaccaggtaaaagctgtagccccatacctgtacagaggctgattatgagctgtctgagtcacaggcca

SEQ ID NO: 177824 - DNA, 83 bp, Homo sapiens
gtcaggcaccaggtaaaagctgtagccccatacctgtacagaggctgattatgagctgtctgagtcacaggccaggacagcag

SEQ ID NO: 177825 - DNA, 83 bp, Homo sapiens
taaaagctgtagccccatacctgtacagaggctgattatgagctgtctgagtcacaggccaggacagcaggtggcaagaaaca

SEQ ID NO: 177826 - DNA, 82 bp, Homo sapiens
ccccatacctgtacagaggctgattatgagctgtctgagtcacaggccaggacagcaggtggcaagaaacagtgggcgctct

SEQ ID NO: 177827 - DNA, 84 bp, Homo sapiens
tacctgtacagaggctgattatgagctgtctgagtcacaggccaggacagcaggtggcaagaaacagtgggcgctctttggtgc

SEQ ID NO: 177828 - DNA, 83 bp, Homo sapiens
tgattatgagctgtctgagtcacaggccaggacagcaggtggcaagaaacagtgggcgctctttggtgcccttcagaagagaa

SEQ ID NO: 177829 - DNA, 81 bp, Homo sapiens
atgagctgtctgagtcacaggccaggacagcaggtggcaagaaacagtgggcgctctttggtgcccttcagaagagaagat

SEQ ID NO: 177830 - DNA, 81 bp, Homo sapiens
agtcacaggccaggacagcaggtggcaagaaacagtgggcgctctttggtgcccttcagaagagaagattgatgtgacagc

SEQ ID NO: 177831 - DNA, 78 bp, Homo sapiens
aggacagcaggtggcaagaaacagtgggcgctctttggtgcccttcagaagagaagattgatgtgacagccctctccc

SEQ ID NO: 177832 - DNA, 76 bp, Homo sapiens
agtgggcgctctttggtgcccttcagaagagaagattgatgtgacagccctctcccctttgtggagagagttctaa

SEQ ID NO: 177833 - DNA, 78 bp, Homo sapiens
tctttggtgcccttcagaagagaagattgatgtgacagccctctcccctttgtggagagagttctaagaaagcagaga

SEQ ID NO: 177834 - DNA, 78 bp, Homo sapiens
cttcagaagagaagattgatgtgacagccctctcccctttgtggagagagttctaagaaagcagagactaggtctgaa

SEQ ID NO: 177835 - DNA, 75 bp, Homo sapiens
agaagattgatgtgacagccctctcccctttgtggagagagttctaagaaagcagagactaggtctgaaaatctt

SEQ ID NO: 177836 - DNA, 75 bp, Homo sapiens
ttgatgtgacagccctctcccctttgtggagagagttctaagaaagcagagactaggtctgaaaatctttgcttt

SEQ ID NO: 177837 - DNA, 70 bp, Homo sapiens
agccctctcccctttgtggagagagttctaagaaagcagagactaggtctgaaaatctttgcttttaagg

SEQ ID NO: 177838 - DNA, 71 bp, Homo sapiens
ttctaagaaagcagagactaggtctgaaaatctttgcttttaaggggagggattagaactgccacatttag

SEQ ID NO: 177839 - DNA, 69 bp, Homo sapiens
aaagcagagactaggtctgaaaatctttgcttttaaggggagggattagaactgccacatttagttaag

SEQ ID NO: 177840 - DNA, 67 bp, Homo sapiens
actaggtctgaaaatctttgcttttaaggggagggattagaactgccacatttagttaaggtggaaa

SEQ ID NO: 177841 - DNA, 67 bp, Homo sapiens
tctttgcttttaaggggagggattagaactgccacatttagttaaggtggaaatcagtggggtttgt

SEQ ID NO: 177842 - DNA, 64 bp, Homo sapiens
ttttaaggggagggattagaactgccacatttagttaaggtggaaatcagtggggtttgttttt

SEQ ID NO: 177843 - DNA, 67 bp, Homo sapiens
tttttttaaacaaaattgctaatcctacttttgaataatgtctgcttagagccctaaaattataacc

SEQ ID NO: 177844 - DNA, 72 bp, Homo sapiens
caaaattgctaatcctacttttgaataatgtctgcttagagccctaaaattataacctttgaaattcgatca

SEQ ID NO: 177845 - DNA, 73 bp, Homo sapiens
gctaatcctacttttgaataatgtctgcttagagccctaaaattataacctttgaaattcgatcatcgaataa

SEQ ID NO: 177846 - DNA, 76 bp, Homo sapiens
ttgaataatgtctgcttagagccctaaaattataacctttgaaattcgatcatcgaataacactagcgtcatctct

SEQ ID NO: 177847 - DNA, 76 bp, Homo sapiens
taatgtctgcttagagccctaaaattataacctttgaaattcgatcatcgaataacactagcgtcatctcttagta

SEQ ID NO: 177848 - DNA, 76 bp, Homo sapiens
agccctaaaattataacctttgaaattcgatcatcgaataacactagcgtcatctcttagtatcttacagattgca

SEQ ID NO: 177849 - DNA, 76 bp, Homo sapiens
aaaattataacctttgaaattcgatcatcgaataacactagcgtcatctcttagtatcttacagattgcagctacc

SEQ ID NO: 177850 - DNA, 78 bp, Homo sapiens
tttgaaattcgatcatcgaataacactagcgtcatctcttagtatcttacagattgcagctaccccaagaggtaggta

SEQ ID NO: 177851 - DNA, 79 bp, Homo sapiens
atcatcgaataacactagcgtcatctcttagtatcttacagattgcagctaccccaagaggtaggtatttgaatggcta

SEQ ID NO: 177852 - DNA, 75 bp, Homo sapiens
aataacactagcgtcatctcttagtatcttacagattgcagctaccccaagaggtaggtatttgaatggctattt

SEQ ID NO: 177853 - DNA, 79 bp, Homo sapiens
ttagtatcttacagattgcagctaccccaagaggtaggtatttgaatggctattttggctgggcatagtgactcatgcc

SEQ ID NO: 177854 - DNA, 71 bp, Homo sapiens
aacaaacaaaaagaatgaccattttgtgtttgagtaatctgaagttcagagaggtgaaggttatcccacca

SEQ ID NO: 177855 - DNA, 71 bp, Homo sapiens
aaaaagaatgaccattttgtgtttgagtaatctgaagttcagagaggtgaaggttatcccaccaataagta

SEQ ID NO: 177856 - DNA, 73 bp, Homo sapiens
attttgtgtttgagtaatctgaagttcagagaggtgaaggttatcccaccaataagtagcagaacccagactc

SEQ ID NO: 177857 - DNA, 73 bp, Homo sapiens
tttgagtaatctgaagttcagagaggtgaaggttatcccaccaataagtagcagaacccagactctaaccctc

SEQ ID NO: 177858 - DNA, 73 bp, Homo sapiens
gaagttcagagaggtgaaggttatcccaccaataagtagcagaacccagactctaaccctctgctctttttca

SEQ ID NO: 177859 - DNA, 74 bp, Homo sapiens
ttcagagaggtgaaggttatcccaccaataagtagcagaacccagactctaaccctctgctctttttcagttga

SEQ ID NO: 177860 - DNA, 73 bp, Homo sapiens
agaggtgaaggttatcccaccaataagtagcagaacccagactctaaccctctgctctttttcagttgagcat

SEQ ID NO: 177861 - DNA, 72 bp, Homo sapiens
tgaaggttatcccaccaataagtagcagaacccagactctaaccctctgctctttttcagttgagcattttt

SEQ ID NO: 177862 - DNA, 70 bp, Homo sapiens
aaggttatcccaccaataagtagcagaacccagactctaaccctctgctctttttcagttgagcattttt

SEQ ID NO: 177863 - DNA, 73 bp, Homo sapiens
ttatcccaccaataagtagcagaacccagactctaaccctctgctctttttcagttgagcattttttcttctc

SEQ ID NO: 177864 - DNA, 73 bp, Homo sapiens
aataagtagcagaacccagactctaaccctctgctctttttcagttgagcattttttcttctccaactatatc

SEQ ID NO: 177865 - DNA, 73 bp, Homo sapiens
ataagtagcagaacccagactctaaccctctgctctttttcagttgagcattttttcttctccaactatatct

SEQ ID NO: 177866 - DNA, 74 bp, Homo sapiens
ccagactctaaccctctgctctttttcagttgagcattttttcttctccaactatatcttgcatgaagcttttt

SEQ ID NO: 177867 - DNA, 72 bp, Homo sapiens
ctctaaccctctgctctttttcagttgagcattttttcttctccaactatatcttgcatgaagctttttttt

SEQ ID NO: 177868 - DNA, 78 bp, Homo sapiens
gttgcctaggctgaaggacactggtgcgatcacggctcgctgcagcctccgtgatctcccgaacccaggtgaccttcc

SEQ ID NO: 177869 - DNA, 79 bp, Homo sapiens
taggctgaaggacactggtgcgatcacggctcgctgcagcctccgtgatctcccgaacccaggtgaccttcccacctca

SEQ ID NO: 177870 - DNA, 68 bp, Homo sapiens
gccactgctcctgaccaaagctttttttttaacattgtaaaatttaacttttacagaaggaagcgcta

SEQ ID NO: 177871 - DNA, 65 bp, Homo sapiens
gaccaaagctttttttttaacattgtaaaatttaacttttacagaaggaagcgctaataagtcag

SEQ ID NO: 177872 - DNA, 66 bp, Homo sapiens
ttttttttaacattgtaaaatttaacttttacagaaggaagcgctaataagtcagttagcacttaa

SEQ ID NO: 177873 - DNA, 71 bp, Homo sapiens
cattgtaaaatttaacttttacagaaggaagcgctaataagtcagttagcacttaacatttcgtcagtggc

SEQ ID NO: 177874 - DNA, 73 bp, Homo sapiens
atttaacttttacagaaggaagcgctaataagtcagttagcacttaacatttcgtcagtggcttgtcattatc

SEQ ID NO: 177875 - DNA, 73 bp, Homo sapiens
tttacagaaggaagcgctaataagtcagttagcacttaacatttcgtcagtggcttgtcattatcccaaactt

SEQ ID NO: 177876 - DNA, 72 bp, Homo sapiens
aagcgctaataagtcagttagcacttaacatttcgtcagtggcttgtcattatcccaaactttctactactt

SEQ ID NO: 177877 - DNA, 72 bp, Homo sapiens
taagtcagttagcacttaacatttcgtcagtggcttgtcattatcccaaactttctactactttctacgtta

SEQ ID NO: 177878 - DNA, 72 bp, Homo sapiens
cacttaacatttcgtcagtggcttgtcattatcccaaactttctactactttctacgttaatgtacattgta

SEQ ID NO: 177879 - DNA, 72 bp, Homo sapiens
acatttcgtcagtggcttgtcattatcccaaactttctactactttctacgttaatgtacattgtacattag

SEQ ID NO: 177880 - DNA, 73 bp, Homo sapiens
gcttgtcattatcccaaactttctactactttctacgttaatgtacattgtacattaggattttacagtctgc

SEQ ID NO: 177881 - DNA, 72 bp, Homo sapiens
ttctactactttctacgttaatgtacattgtacattaggattttacagtctgcgtagttggtctcaaggact

SEQ ID NO: 177882 - DNA, 73 bp, Homo sapiens
tactttctacgttaatgtacattgtacattaggattttacagtctgcgtagttggtctcaaggacttcagtta

SEQ ID NO: 177883 - DNA, 75 bp, Homo sapiens
tgtacattgtacattaggattttacagtctgcgtagttggtctcaaggacttcagttatcactagttatcagttt

SEQ ID NO: 177884 - DNA, 74 bp, Homo sapiens
attgtacattaggattttacagtctgcgtagttggtctcaaggacttcagttatcactagttatcagttttata

SEQ ID NO: 177885 - DNA, 73 bp, Homo sapiens
attttacagtctgcgtagttggtctcaaggacttcagttatcactagttatcagttttataagctagtagttc

SEQ ID NO: 177886 - DNA, 74 bp, Homo sapiens
gttggtctcaaggacttcagttatcactagttatcagttttataagctagtagttctcaactagaggctgcccc

SEQ ID NO: 177887 - DNA, 72 bp, Homo sapiens
aggacttcagttatcactagttatcagttttataagctagtagttctcaactagaggctgcccccacttccc

SEQ ID NO: 177888 - DNA, 73 bp, Homo sapiens
ttatcactagttatcagttttataagctagtagttctcaactagaggctgcccccacttccctgtcctccacc

SEQ ID NO: 177889 - DNA, 72 bp, Homo sapiens
ttatcagttttataagctagtagttctcaactagaggctgcccccacttccctgtcctccacccctgaaaca

SEQ ID NO: 177890 - DNA, 73 bp, Homo sapiens
tataagctagtagttctcaactagaggctgcccccacttccctgtcctccacccctgaaacagttggcagtgt

SEQ ID NO: 177891 - DNA, 75 bp, Homo sapiens
tagttctcaactagaggctgcccccacttccctgtcctccacccctgaaacagttggcagtgttgctggcattta

SEQ ID NO: 177892 - DNA, 74 bp, Homo sapiens
ctagaggctgcccccacttccctgtcctccacccctgaaacagttggcagtgttgctggcatttagtgggtaga

SEQ ID NO: 177893 - DNA, 75 bp, Homo sapiens
cctgtcctccacccctgaaacagttggcagtgttgctggcatttagtgggtagaggccaggaatgctgcaaaaaa

SEQ ID NO: 177894 - DNA, 70 bp, Homo sapiens
aaaatctttaaaatgcataagacacccccacaacaaagggttatctagccccaaaatgtcagtagtgcca

SEQ ID NO: 177895 - DNA, 71 bp, Homo sapiens
aaatgcataagacacccccacaacaaagggttatctagccccaaaatgtcagtagtgccagggtcaagaaa

SEQ ID NO: 177896 - DNA, 71 bp, Homo sapiens
ccccacaacaaagggttatctagccccaaaatgtcagtagtgccagggtcaagaaacagatataagccaaa

SEQ ID NO: 177897 - DNA, 70 bp, Homo sapiens
aacaaagggttatctagccccaaaatgtcagtagtgccagggtcaagaaacagatataagccaaatattt

SEQ ID NO: 177898 - DNA, 74 bp, Homo sapiens
tagccccaaaatgtcagtagtgccagggtcaagaaacagatataagccaaatattttcattttagctgagtaaa

SEQ ID NO: 177899 - DNA, 73 bp, Homo sapiens
ccaaaatgtcagtagtgccagggtcaagaaacagatataagccaaatattttcattttagctgagtaaaatta

SEQ ID NO: 177900 - DNA, 73 bp, Homo sapiens
gggtcaagaaacagatataagccaaatattttcattttagctgagtaaaattattttttagatgtatcactgc

SEQ ID NO: 177901 - DNA, 74 bp, Homo sapiens
gaaacagatataagccaaatattttcattttagctgagtaaaattattttttagatgtatcactgcttacaaca

SEQ ID NO: 177902 - DNA, 75 bp, Homo sapiens
gatataagccaaatattttcattttagctgagtaaaattattttttagatgtatcactgcttacaacacttatca

SEQ ID NO: 177903 - DNA, 73 bp, Homo sapiens
gccaaatattttcattttagctgagtaaaattattttttagatgtatcactgcttacaacacttatcaattta

SEQ ID NO: 177904 - DNA, 72 bp, Homo sapiens
atattttcattttagctgagtaaaattattttttagatgtatcactgcttacaacacttatcaatttagagt

SEQ ID NO: 177905 - DNA, 71 bp, Homo sapiens
tttcattttagctgagtaaaattattttttagatgtatcactgcttacaacacttatcaatttagagtttt

SEQ ID NO: 177906 - DNA, 71 bp, Homo sapiens
ttcattttagctgagtaaaattattttttagatgtatcactgcttacaacacttatcaatttagagttttt

SEQ ID NO: 177907 - DNA, 69 bp, Homo sapiens
ctgagtaaaattattttttagatgtatcactgcttacaacacttatcaatttagagttttttttaaaga

SEQ ID NO: 177908 - DNA, 68 bp, Homo sapiens
ttattttttagatgtatcactgcttacaacacttatcaatttagagttttttttaaagactaaaaaga

SEQ ID NO: 177909 - DNA, 69 bp, Homo sapiens
tcactgcttacaacacttatcaatttagagttttttttaaagactaaaaagacataatagtttgattta

SEQ ID NO: 177910 - DNA, 65 bp, Homo sapiens
acaacacttatcaatttagagttttttttaaagactaaaaagacataatagtttgatttaggaaa

SEQ ID NO: 177911 - DNA, 68 bp, Homo sapiens
gactaaaaagacataatagtttgatttaggaaaaaagaactaacattaaacagtgataagtcaaaaga

SEQ ID NO: 177912 - DNA, 69 bp, Homo sapiens
agacataatagtttgatttaggaaaaaagaactaacattaaacagtgataagtcaaaagattgtaaaga

SEQ ID NO: 177913 - DNA, 67 bp, Homo sapiens
gtttgatttaggaaaaaagaactaacattaaacagtgataagtcaaaagattgtaaagaaaaattca

SEQ ID NO: 177914 - DNA, 68 bp, Homo sapiens
cattaaacagtgataagtcaaaagattgtaaagaaaaattcaaatattaaaacctttattaagacatc

SEQ ID NO: 177915 - DNA, 70 bp, Homo sapiens
gtcaaaagattgtaaagaaaaattcaaatattaaaacctttattaagacatctaacatatatattgaaga

SEQ ID NO: 177916 - DNA, 68 bp, Homo sapiens
aagaaaaattcaaatattaaaacctttattaagacatctaacatatatattgaagaacaaaacaaaga

SEQ ID NO: 177917 - DNA, 70 bp, Homo sapiens
tcaaatattaaaacctttattaagacatctaacatatatattgaagaacaaaacaaagataacttttgag

SEQ ID NO: 177918 - DNA, 68 bp, Homo sapiens
aacctttattaagacatctaacatatatattgaagaacaaaacaaagataacttttgaggtacctttg

SEQ ID NO: 177919 - DNA, 69 bp, Homo sapiens
aagacatctaacatatatattgaagaacaaaacaaagataacttttgaggtacctttgggctttctaaa

SEQ ID NO: 177920 - DNA, 68 bp, Homo sapiens
ctaacatatatattgaagaacaaaacaaagataacttttgaggtacctttgggctttctaaaaataga

SEQ ID NO: 177921 - DNA, 68 bp, Homo sapiens
tgaagaacaaaacaaagataacttttgaggtacctttgggctttctaaaaatagaattctttgatctc

SEQ ID NO: 177922 - DNA, 66 bp, Homo sapiens
caaaacaaagataacttttgaggtacctttgggctttctaaaaatagaattctttgatctctttaa

SEQ ID NO: 177923 - DNA, 66 bp, Homo sapiens
acttttgaggtacctttgggctttctaaaaatagaattctttgatctctttaaatattacttggac

SEQ ID NO: 177924 - DNA, 69 bp, Homo sapiens
tgaggtacctttgggctttctaaaaatagaattctttgatctctttaaatattacttggaccaggtaga

SEQ ID NO: 177925 - DNA, 72 bp, Homo sapiens
gggctttctaaaaatagaattctttgatctctttaaatattacttggaccaggtagaatcttgccattgtgc

SEQ ID NO: 177926 - DNA, 75 bp, Homo sapiens
aatagaattctttgatctctttaaatattacttggaccaggtagaatcttgccattgtgctgaacaggcctgaaa

SEQ ID NO: 177927 - DNA, 78 bp, Homo sapiens
tttgatctctttaaatattacttggaccaggtagaatcttgccattgtgctgaacaggcctgaaatcaagttgatcaa

SEQ ID NO: 177928 - DNA, 81 bp, Homo sapiens
taaatattacttggaccaggtagaatcttgccattgtgctgaacaggcctgaaatcaagttgatcaagtcaatgatctgta

SEQ ID NO: 177929 - DNA, 79 bp, Homo sapiens
attacttggaccaggtagaatcttgccattgtgctgaacaggcctgaaatcaagttgatcaagtcaatgatctgtaaaa

SEQ ID NO: 177930 - DNA, 79 bp, Homo sapiens
tagaatcttgccattgtgctgaacaggcctgaaatcaagttgatcaagtcaatgatctgtaaaacgttaaaatctatta

SEQ ID NO: 177931 - DNA, 79 bp, Homo sapiens
ttgccattgtgctgaacaggcctgaaatcaagttgatcaagtcaatgatctgtaaaacgttaaaatctattaggattga

SEQ ID NO: 177932 - DNA, 76 bp, Homo sapiens
aatgatctgtaaaacgttaaaatctattaggattgaggattgttccactcagcagaaggtggtgtgatctgtatta

SEQ ID NO: 177933 - DNA, 77 bp, Homo sapiens
tctgtaaaacgttaaaatctattaggattgaggattgttccactcagcagaaggtggtgtgatctgtattatcatgt

SEQ ID NO: 177934 - DNA, 79 bp, Homo sapiens
ttaaaatctattaggattgaggattgttccactcagcagaaggtggtgtgatctgtattatcatgttggatgcaaaaat

SEQ ID NO: 177935 - DNA, 79 bp, Homo sapiens
ttaggattgaggattgttccactcagcagaaggtggtgtgatctgtattatcatgttggatgcaaaaatttctaaggta

SEQ ID NO: 177936 - DNA, 78 bp, Homo sapiens
agcagaaggtggtgtgatctgtattatcatgttggatgcaaaaatttctaaggtataggcacctttgaatatgaaata

SEQ ID NO: 177937 - DNA, 77 bp, Homo sapiens
aaggtggtgtgatctgtattatcatgttggatgcaaaaatttctaaggtataggcacctttgaatatgaaatatgaa

SEQ ID NO: 177938 - DNA, 80 bp, Homo sapiens
tctgtattatcatgttggatgcaaaaatttctaaggtataggcacctttgaatatgaaatatgaaagatgtgcagtcgtg

SEQ ID NO: 177939 - DNA, 78 bp, Homo sapiens
tgttggatgcaaaaatttctaaggtataggcacctttgaatatgaaatatgaaagatgtgcagtcgtgggcaagatgt

SEQ ID NO: 177940 - DNA, 76 bp, Homo sapiens
aaaaatttctaaggtataggcacctttgaatatgaaatatgaaagatgtgcagtcgtgggcaagatgttctggtca

SEQ ID NO: 177941 - DNA, 78 bp, Homo sapiens
taaggtataggcacctttgaatatgaaatatgaaagatgtgcagtcgtgggcaagatgttctggtcacttctttgaaa

SEQ ID NO: 177942 - DNA, 76 bp, Homo sapiens
acctttgaatatgaaatatgaaagatgtgcagtcgtgggcaagatgttctggtcacttctttgaaagagggaataa

SEQ ID NO: 177943 - DNA, 77 bp, Homo sapiens
tatgaaatatgaaagatgtgcagtcgtgggcaagatgttctggtcacttctttgaaagagggaataaaagagaatta

SEQ ID NO: 177944 - DNA, 75 bp, Homo sapiens
atatgaaagatgtgcagtcgtgggcaagatgttctggtcacttctttgaaagagggaataaaagagaattaacta

SEQ ID NO: 177945 - DNA, 75 bp, Homo sapiens
aagatgttctggtcacttctttgaaagagggaataaaagagaattaactacaggtctgtcattctgcttgtgata

SEQ ID NO: 177946 - DNA, 72 bp, Homo sapiens
ttctttgaaagagggaataaaagagaattaactacaggtctgtcattctgcttgtgataaccactttcacct

SEQ ID NO: 177947 - DNA, 77 bp, Homo sapiens
gaataaaagagaattaactacaggtctgtcattctgcttgtgataaccactttcaccttggccagtgatgcagttag

SEQ ID NO: 177948 - DNA, 79 bp, Homo sapiens
aactacaggtctgtcattctgcttgtgataaccactttcaccttggccagtgatgcagttagtaatgagccacaagctt

SEQ ID NO: 177949 - DNA, 80 bp, Homo sapiens
attctgcttgtgataaccactttcaccttggccagtgatgcagttagtaatgagccacaagctttgctcaggcttcctta

SEQ ID NO: 177950 - DNA, 79 bp, Homo sapiens
tgataaccactttcaccttggccagtgatgcagttagtaatgagccacaagctttgctcaggcttccttaattgctaat

SEQ ID NO: 177951 - DNA, 78 bp, Homo sapiens
actttcaccttggccagtgatgcagttagtaatgagccacaagctttgctcaggcttccttaattgctaattatagaa

SEQ ID NO: 177952 - DNA, 80 bp, Homo sapiens
gccagtgatgcagttagtaatgagccacaagctttgctcaggcttccttaattgctaattatagaatgtcattaagtctt

SEQ ID NO: 177953 - DNA, 77 bp, Homo sapiens
atgcagttagtaatgagccacaagctttgctcaggcttccttaattgctaattatagaatgtcattaagtcttttgg

SEQ ID NO: 177954 - DNA, 76 bp, Homo sapiens
taatgagccacaagctttgctcaggcttccttaattgctaattatagaatgtcattaagtcttttgggatacaatt

SEQ ID NO: 177955 - DNA, 74 bp, Homo sapiens
cacaagctttgctcaggcttccttaattgctaattatagaatgtcattaagtcttttgggatacaatttacaat

SEQ ID NO: 177956 - DNA, 74 bp, Homo sapiens
gctcaggcttccttaattgctaattatagaatgtcattaagtcttttgggatacaatttacaattataagacga

SEQ ID NO: 177957 - DNA, 78 bp, Homo sapiens
atagaatgtcattaagtcttttgggatacaatttacaattataagacgaaagctgatgaggaggtgtcagatatatgc

SEQ ID NO: 177958 - DNA, 75 bp, Homo sapiens
attaagtcttttgggatacaatttacaattataagacgaaagctgatgaggaggtgtcagatatatgcctcttag

SEQ ID NO: 177959 - DNA, 78 bp, Homo sapiens
atttacaattataagacgaaagctgatgaggaggtgtcagatatatgcctcttagtctcttctcccattattgtccaa

SEQ ID NO: 177960 - DNA, 79 bp, Homo sapiens
aattataagacgaaagctgatgaggaggtgtcagatatatgcctcttagtctcttctcccattattgtccaagctccat

SEQ ID NO: 177961 - DNA, 78 bp, Homo sapiens
aaagctgatgaggaggtgtcagatatatgcctcttagtctcttctcccattattgtccaagctccattttccacattt

SEQ ID NO: 177962 - DNA, 76 bp, Homo sapiens
cctcttagtctcttctcccattattgtccaagctccattttccacattttattcattatgcctttctgtctcacta

SEQ ID NO: 177963 - DNA, 77 bp, Homo sapiens
tctcccattattgtccaagctccattttccacattttattcattatgcctttctgtctcactaggccatgagtttct

SEQ ID NO: 177964 - DNA, 76 bp, Homo sapiens
tccattttccacattttattcattatgcctttctgtctcactaggccatgagtttctttagagaagaaactataga

SEQ ID NO: 177965 - DNA, 76 bp, Homo sapiens
cacattttattcattatgcctttctgtctcactaggccatgagtttctttagagaagaaactatagatacattttg

SEQ ID NO: 177966 - DNA, 78 bp, Homo sapiens
ttattcattatgcctttctgtctcactaggccatgagtttctttagagaagaaactatagatacattttgtattcgca

SEQ ID NO: 177967 - DNA, 76 bp, Homo sapiens
tttctgtctcactaggccatgagtttctttagagaagaaactatagatacattttgtattcgcagcccctaacaca

SEQ ID NO: 177968 - DNA, 76 bp, Homo sapiens
atgagtttctttagagaagaaactatagatacattttgtattcgcagcccctaacacagagcctggcacataataa

SEQ ID NO: 177969 - DNA, 77 bp, Homo sapiens
tagagaagaaactatagatacattttgtattcgcagcccctaacacagagcctggcacataataagcccatgttaaa

SEQ ID NO: 177970 - DNA, 75 bp, Homo sapiens
aaactatagatacattttgtattcgcagcccctaacacagagcctggcacataataagcccatgttaaagaaaga

SEQ ID NO: 177971 - DNA, 77 bp, Homo sapiens
atacattttgtattcgcagcccctaacacagagcctggcacataataagcccatgttaaagaaagacagtgaatgag

SEQ ID NO: 177972 - DNA, 79 bp, Homo sapiens
tattcgcagcccctaacacagagcctggcacataataagcccatgttaaagaaagacagtgaatgagtggcagaaatcc

SEQ ID NO: 177973 - DNA, 82 bp, Homo sapiens
acacagagcctggcacataataagcccatgttaaagaaagacagtgaatgagtggcagaaatcctgagtctagatgctgtta

SEQ ID NO: 177974 - DNA, 82 bp, Homo sapiens
tggcacataataagcccatgttaaagaaagacagtgaatgagtggcagaaatcctgagtctagatgctgttaatcctctagc

SEQ ID NO: 177975 - DNA, 80 bp, Homo sapiens
ataataagcccatgttaaagaaagacagtgaatgagtggcagaaatcctgagtctagatgctgttaatcctctagctcaa

SEQ ID NO: 177976 - DNA, 79 bp, Homo sapiens
atgttaaagaaagacagtgaatgagtggcagaaatcctgagtctagatgctgttaatcctctagctcaagctgcccttt

SEQ ID NO: 177977 - DNA, 81 bp, Homo sapiens
aaagacagtgaatgagtggcagaaatcctgagtctagatgctgttaatcctctagctcaagctgcccttttccaggacaga

SEQ ID NO: 177978 - DNA, 82 bp, Homo sapiens
aatgagtggcagaaatcctgagtctagatgctgttaatcctctagctcaagctgcccttttccaggacagaccagcagtgtg

SEQ ID NO: 177979 - DNA, 84 bp, Homo sapiens
tagatgctgttaatcctctagctcaagctgcccttttccaggacagaccagcagtgtggcaggtgtctcagctctgtgtagaaa

SEQ ID NO: 177980 - DNA, 82 bp, Homo sapiens
tgttaatcctctagctcaagctgcccttttccaggacagaccagcagtgtggcaggtgtctcagctctgtgtagaaaagctg

SEQ ID NO: 177981 - DNA, 83 bp, Homo sapiens
tctagctcaagctgcccttttccaggacagaccagcagtgtggcaggtgtctcagctctgtgtagaaaagctggccagagaat

SEQ ID NO: 177982 - DNA, 77 bp, Homo sapiens
cccttttccaggacagaccagcagtgtggcaggtgtctcagctctgtgtagaaaagctggccagagaattcttttcc

SEQ ID NO: 177983 - DNA, 78 bp, Homo sapiens
agcagtgtggcaggtgtctcagctctgtgtagaaaagctggccagagaattcttttcccctactctagtacattcgat

SEQ ID NO: 177984 - DNA, 76 bp, Homo sapiens
aggtgtctcagctctgtgtagaaaagctggccagagaattcttttcccctactctagtacattcgattcagttaca

SEQ ID NO: 177985 - DNA, 74 bp, Homo sapiens
gctctgtgtagaaaagctggccagagaattcttttcccctactctagtacattcgattcagttacaggaagcct

SEQ ID NO: 177986 - DNA, 73 bp, Homo sapiens
tgtagaaaagctggccagagaattcttttcccctactctagtacattcgattcagttacaggaagccttgttc

SEQ ID NO: 177987 - DNA, 73 bp, Homo sapiens
ccagagaattcttttcccctactctagtacattcgattcagttacaggaagccttgttccatcacctgtgtta

SEQ ID NO: 177988 - DNA, 72 bp, Homo sapiens
aattcttttcccctactctagtacattcgattcagttacaggaagccttgttccatcacctgtgttaatgga

SEQ ID NO: 177989 - DNA, 75 bp, Homo sapiens
ctactctagtacattcgattcagttacaggaagccttgttccatcacctgtgttaatggagtaggccaggtgttc

SEQ ID NO: 177990 - DNA, 75 bp, Homo sapiens
tacattcgattcagttacaggaagccttgttccatcacctgtgttaatggagtaggccaggtgttcctttgaaca

SEQ ID NO: 177991 - DNA, 77 bp, Homo sapiens
ttcagttacaggaagccttgttccatcacctgtgttaatggagtaggccaggtgttcctttgaacacaatgctgcaa

SEQ ID NO: 177992 - DNA, 76 bp, Homo sapiens
ttccatcacctgtgttaatggagtaggccaggtgttcctttgaacacaatgctgcaagaactacctagagtagatt

SEQ ID NO: 177993 - DNA, 77 bp, Homo sapiens
ttaatggagtaggccaggtgttcctttgaacacaatgctgcaagaactacctagagtagatttccttcacatgataa

SEQ ID NO: 177994 - DNA, 78 bp, Homo sapiens
taggccaggtgttcctttgaacacaatgctgcaagaactacctagagtagatttccttcacatgataaggctctaatc

SEQ ID NO: 177995 - DNA, 78 bp, Homo sapiens
aggtgttcctttgaacacaatgctgcaagaactacctagagtagatttccttcacatgataaggctctaatctgcttg

SEQ ID NO: 177996 - DNA, 80 bp, Homo sapiens
acacaatgctgcaagaactacctagagtagatttccttcacatgataaggctctaatctgcttgggctcatgtcttggtt

SEQ ID NO: 177997 - DNA, 76 bp, Homo sapiens
caagaactacctagagtagatttccttcacatgataaggctctaatctgcttgggctcatgtcttggtttttcatt

SEQ ID NO: 177998 - DNA, 77 bp, Homo sapiens
actacctagagtagatttccttcacatgataaggctctaatctgcttgggctcatgtcttggtttttcatttatatg

SEQ ID NO: 177999 - DNA, 76 bp, Homo sapiens
tttccttcacatgataaggctctaatctgcttgggctcatgtcttggtttttcatttatatgtggctagaactttt

SEQ ID NO: 178000 - DNA, 75 bp, Homo sapiens
acatgataaggctctaatctgcttgggctcatgtcttggtttttcatttatatgtggctagaactttttatcctt

SEQ ID NO: 178001 - DNA, 75 bp, Homo sapiens
tctaatctgcttgggctcatgtcttggtttttcatttatatgtggctagaactttttatcctttgctggaattaa

SEQ ID NO: 178002 - DNA, 73 bp, Homo sapiens
ttgggctcatgtcttggtttttcatttatatgtggctagaactttttatcctttgctggaattaatatggtgt

SEQ ID NO: 178003 - DNA, 74 bp, Homo sapiens
ctcatgtcttggtttttcatttatatgtggctagaactttttatcctttgctggaattaatatggtgttctctc

SEQ ID NO: 178004 - DNA, 72 bp, Homo sapiens
ggtttttcatttatatgtggctagaactttttatcctttgctggaattaatatggtgttctctcttctctgt

SEQ ID NO: 178005 - DNA, 74 bp, Homo sapiens
ttatatgtggctagaactttttatcctttgctggaattaatatggtgttctctcttctctgtttaaattagctg

SEQ ID NO: 178006 - DNA, 71 bp, Homo sapiens
ctagaactttttatcctttgctggaattaatatggtgttctctcttctctgtttaaattagctgtaaacac

SEQ ID NO: 178007 - DNA, 74 bp, Homo sapiens
ctggaattaatatggtgttctctcttctctgtttaaattagctgtaaacactttgactgaatcaacgttgaaga

SEQ ID NO: 178008 - DNA, 75 bp, Homo sapiens
tatggtgttctctcttctctgtttaaattagctgtaaacactttgactgaatcaacgttgaagaatgtccctcaa

SEQ ID NO: 178009 - DNA, 72 bp, Homo sapiens
cttctctgtttaaattagctgtaaacactttgactgaatcaacgttgaagaatgtccctcaagtggtaaatg

SEQ ID NO: 178010 - DNA, 73 bp, Homo sapiens
tttaaattagctgtaaacactttgactgaatcaacgttgaagaatgtccctcaagtggtaaatgtgcaggaat

SEQ ID NO: 178011 - DNA, 74 bp, Homo sapiens
tgtaaacactttgactgaatcaacgttgaagaatgtccctcaagtggtaaatgtgcaggaattgaagaataacc

SEQ ID NO: 178012 - DNA, 74 bp, Homo sapiens
tttgactgaatcaacgttgaagaatgtccctcaagtggtaaatgtgcaggaattgaagaataaccctgcaaccc

SEQ ID NO: 178013 - DNA, 73 bp, Homo sapiens
atgtccctcaagtggtaaatgtgcaggaattgaagaataaccctgcaaccccttctacagccatggggtatgt

SEQ ID NO: 178014 - DNA, 75 bp, Homo sapiens
aagtggtaaatgtgcaggaattgaagaataaccctgcaaccccttctacagccatggggtatgttctgactgcag

SEQ ID NO: 178015 - DNA, 77 bp, Homo sapiens
aaatgtgcaggaattgaagaataaccctgcaaccccttctacagccatggggtatgttctgactgcagtgtgtttca

SEQ ID NO: 178016 - DNA, 75 bp, Homo sapiens
aattgaagaataaccctgcaaccccttctacagccatggggtatgttctgactgcagtgtgtttcagcccctggc

SEQ ID NO: 178017 - DNA, 77 bp, Homo sapiens
aatgaatgtgatttttacctagtcatgcctttctctgagtgtatgctttgtgtgtttttcagttcttcagtgcccta

SEQ ID NO: 178018 - DNA, 76 bp, Homo sapiens
atttttacctagtcatgcctttctctgagtgtatgctttgtgtgtttttcagttcttcagtgccctactccacagc

SEQ ID NO: 178019 - DNA, 79 bp, Homo sapiens
tagtcatgcctttctctgagtgtatgctttgtgtgtttttcagttcttcagtgccctactccacagccaaaacacctca

SEQ ID NO: 178020 - DNA, 76 bp, Homo sapiens
ttctctgagtgtatgctttgtgtgtttttcagttcttcagtgccctactccacagccaaaacacctcacccagtgt

SEQ ID NO: 178021 - DNA, 75 bp, Homo sapiens
tgtatgctttgtgtgtttttcagttcttcagtgccctactccacagccaaaacacctcacccagtgttgacccca

SEQ ID NO: 178022 - DNA, 74 bp, Homo sapiens
tttttcagttcttcagtgccctactccacagccaaaacacctcacccagtgttgaccccagtggctgctaacca

SEQ ID NO: 178023 - DNA, 74 bp, Homo sapiens
agttcttcagtgccctactccacagccaaaacacctcacccagtgttgaccccagtggctgctaaccaagccaa

SEQ ID NO: 178024 - DNA, 73 bp, Homo sapiens
ctactccacagccaaaacacctcacccagtgttgaccccagtggctgctaaccaagccaagcaggtaacttac

SEQ ID NO: 178025 - DNA, 71 bp, Homo sapiens
agccaaaacacctcacccagtgttgaccccagtggctgctaaccaagccaagcaggtaacttactgatttt

SEQ ID NO: 178026 - DNA, 70 bp, Homo sapiens
aacacctcacccagtgttgaccccagtggctgctaaccaagccaagcaggtaacttactgatttttactt

SEQ ID NO: 178027 - DNA, 70 bp, Homo sapiens
ctttgttacaaagaatggttagtggtttaacataaacattttgcttgcattctgttataggggtctctaa

SEQ ID NO: 178028 - DNA, 69 bp, Homo sapiens
aagaatggttagtggtttaacataaacattttgcttgcattctgttataggggtctctaataaattccc

SEQ ID NO: 178029 - DNA, 71 bp, Homo sapiens
agtggtttaacataaacattttgcttgcattctgttataggggtctctaataaattcccttaagccatctg

SEQ ID NO: 178030 - DNA, 72 bp, Homo sapiens
aacataaacattttgcttgcattctgttataggggtctctaataaattcccttaagccatctgggcctacac

SEQ ID NO: 178031 - DNA, 74 bp, Homo sapiens
cttgcattctgttataggggtctctaataaattcccttaagccatctgggcctacaccagcatccggtcagtta

SEQ ID NO: 178032 - DNA, 74 bp, Homo sapiens
attctgttataggggtctctaataaattcccttaagccatctgggcctacaccagcatccggtcagttatcatc

SEQ ID NO: 178033 - DNA, 77 bp, Homo sapiens
ggtctctaataaattcccttaagccatctgggcctacaccagcatccggtcagttatcatctggtgacaaagcttca

SEQ ID NO: 178034 - DNA, 76 bp, Homo sapiens
taaattcccttaagccatctgggcctacaccagcatccggtcagttatcatctggtgacaaagcttcaggtcagtt

SEQ ID NO: 178035 - DNA, 78 bp, Homo sapiens
ttaagccatctgggcctacaccagcatccggtcagttatcatctggtgacaaagcttcaggtcagtttgcatttttgt

SEQ ID NO: 178036 - DNA, 75 bp, Homo sapiens
cctacaccagcatccggtcagttatcatctggtgacaaagcttcaggtcagtttgcatttttgttttcttgaaaa

SEQ ID NO: 178037 - DNA, 74 bp, Homo sapiens
catccggtcagttatcatctggtgacaaagcttcaggtcagtttgcatttttgttttcttgaaaagtgaaagaa

SEQ ID NO: 178038 - DNA, 75 bp, Homo sapiens
agttatcatctggtgacaaagcttcaggtcagtttgcatttttgttttcttgaaaagtgaaagaagcactccaca

SEQ ID NO: 178039 - DNA, 78 bp, Homo sapiens
aaggaagccattattgcataagccagagttgtattctagaattcggagtgatatggaaccacagttggtatcatgtac

SEQ ID NO: 178040 - DNA, 82 bp, Homo sapiens
ttattgcataagccagagttgtattctagaattcggagtgatatggaaccacagttggtatcatgtacgcctcacatgagaa

SEQ ID NO: 178041 - DNA, 80 bp, Homo sapiens
cagagttgtattctagaattcggagtgatatggaaccacagttggtatcatgtacgcctcacatgagaaggaggtatcta

SEQ ID NO: 178042 - DNA, 80 bp, Homo sapiens
ttgtattctagaattcggagtgatatggaaccacagttggtatcatgtacgcctcacatgagaaggaggtatctagcact

SEQ ID NO: 178043 - DNA, 78 bp, Homo sapiens
aattcggagtgatatggaaccacagttggtatcatgtacgcctcacatgagaaggaggtatctagcacttctcgaccg

SEQ ID NO: 178044 - DNA, 76 bp, Homo sapiens
atatggaaccacagttggtatcatgtacgcctcacatgagaaggaggtatctagcacttctcgaccggggcctaaa

SEQ ID NO: 178045 - DNA, 75 bp, Homo sapiens
agttggtatcatgtacgcctcacatgagaaggaggtatctagcacttctcgaccggggcctaaagctttatgtta

SEQ ID NO: 178046 - DNA, 75 bp, Homo sapiens
tatcatgtacgcctcacatgagaaggaggtatctagcacttctcgaccggggcctaaagctttatgttaaaagga

SEQ ID NO: 178047 - DNA, 70 bp, Homo sapiens
acatgagaaggaggtatctagcacttctcgaccggggcctaaagctttatgttaaaaggaaaattatata

SEQ ID NO: 178048 - DNA, 68 bp, Homo sapiens
agaaggaggtatctagcacttctcgaccggggcctaaagctttatgttaaaaggaaaattatatagta

SEQ ID NO: 178049 - DNA, 69 bp, Homo sapiens
atctagcacttctcgaccggggcctaaagctttatgttaaaaggaaaattatatagtagaactgtcaaa

SEQ ID NO: 178050 - DNA, 69 bp, Homo sapiens
tctcgaccggggcctaaagctttatgttaaaaggaaaattatatagtagaactgtcaaagacttgagta

SEQ ID NO: 178051 - DNA, 68 bp, Homo sapiens
ggcctaaagctttatgttaaaaggaaaattatatagtagaactgtcaaagacttgagtattttacaaa

SEQ ID NO: 178052 - DNA, 65 bp, Homo sapiens
gttaaaaggaaaattatatagtagaactgtcaaagacttgagtattttacaaaaaggttttgaaa

SEQ ID NO: 178053 - DNA, 70 bp, Homo sapiens
ggaaaattatatagtagaactgtcaaagacttgagtattttacaaaaaggttttgaaagatcatatactc

SEQ ID NO: 178054 - DNA, 69 bp, Homo sapiens
gtagaactgtcaaagacttgagtattttacaaaaaggttttgaaagatcatatactcttttttcaagga

SEQ ID NO: 178055 - DNA, 69 bp, Homo sapiens
actgtcaaagacttgagtattttacaaaaaggttttgaaagatcatatactcttttttcaaggacttca

SEQ ID NO: 178056 - DNA, 68 bp, Homo sapiens
cttgagtattttacaaaaaggttttgaaagatcatatactcttttttcaaggacttcattggagaggt

SEQ ID NO: 178057 - DNA, 69 bp, Homo sapiens
caaaaaggttttgaaagatcatatactcttttttcaaggacttcattggagaggtttttgtcactcttg

SEQ ID NO: 178058 - DNA, 71 bp, Homo sapiens
ggttttgaaagatcatatactcttttttcaaggacttcattggagaggtttttgtcactcttggagttaga

SEQ ID NO: 178059 - DNA, 70 bp, Homo sapiens
catatactcttttttcaaggacttcattggagaggtttttgtcactcttggagttagaatcaaagaaacc

SEQ ID NO: 178060 - DNA, 68 bp, Homo sapiens
tttcaaggacttcattggagaggtttttgtcactcttggagttagaatcaaagaaacctaaggaactt

SEQ ID NO: 178061 - DNA, 68 bp, Homo sapiens
aggacttcattggagaggtttttgtcactcttggagttagaatcaaagaaacctaaggaactttgctt

SEQ ID NO: 178062 - DNA, 72 bp, Homo sapiens
agaggtttttgtcactcttggagttagaatcaaagaaacctaaggaactttgctttatgcatgtctgggcaa

SEQ ID NO: 178063 - DNA, 75 bp, Homo sapiens
ttgtcactcttggagttagaatcaaagaaacctaaggaactttgctttatgcatgtctgggcaagtagtgtgact

SEQ ID NO: 178064 - DNA, 73 bp, Homo sapiens
agttagaatcaaagaaacctaaggaactttgctttatgcatgtctgggcaagtagtgtgacttgcaagaaatt

SEQ ID NO: 178065 - DNA, 74 bp, Homo sapiens
aaagaaacctaaggaactttgctttatgcatgtctgggcaagtagtgtgacttgcaagaaatttccgagattca

SEQ ID NO: 178066 - DNA, 76 bp, Homo sapiens
acctaaggaactttgctttatgcatgtctgggcaagtagtgtgacttgcaagaaatttccgagattcaccattcat

SEQ ID NO: 178067 - DNA, 84 bp, Homo sapiens
tttgctttatgcatgtctgggcaagtagtgtgacttgcaagaaatttccgagattcaccattcattgctgatcatgaaatcctc

SEQ ID NO: 178068 - DNA, 80 bp, Homo sapiens
atgtctgggcaagtagtgtgacttgcaagaaatttccgagattcaccattcattgctgatcatgaaatcctctcttttgt

SEQ ID NO: 178069 - DNA, 77 bp, Homo sapiens
aagtagtgtgacttgcaagaaatttccgagattcaccattcattgctgatcatgaaatcctctcttttgttacgagg

SEQ ID NO: 178070 - DNA, 78 bp, Homo sapiens
ttgcaagaaatttccgagattcaccattcattgctgatcatgaaatcctctcttttgttacgaggtgttcacttctgt

SEQ ID NO: 178071 - DNA, 75 bp, Homo sapiens
agaaatttccgagattcaccattcattgctgatcatgaaatcctctcttttgttacgaggtgttcacttctgttt

SEQ ID NO: 178072 - DNA, 77 bp, Homo sapiens
attcaccattcattgctgatcatgaaatcctctcttttgttacgaggtgttcacttctgttttcacttgccaggtaa

SEQ ID NO: 178073 - DNA, 75 bp, Homo sapiens
ttgctgatcatgaaatcctctcttttgttacgaggtgttcacttctgttttcacttgccaggtaatcaaggttta

SEQ ID NO: 178074 - DNA, 70 bp, Homo sapiens
atgaaatcctctcttttgttacgaggtgttcacttctgttttcacttgccaggtaatcaaggtttagaaa

SEQ ID NO: 178075 - DNA, 66 bp, Homo sapiens
gttacgaggtgttcacttctgttttcacttgccaggtaatcaaggtttagaaaagaacttttttct

SEQ ID NO: 178076 - DNA, 81 bp, Homo sapiens
acagaaggcacatgtggtgctaagcagcacctcacaggctgagctacagggaattatacactggaacagtgtttctgtctt

SEQ ID NO: 178077 - DNA, 79 bp, Homo sapiens
atgtggtgctaagcagcacctcacaggctgagctacagggaattatacactggaacagtgtttctgtctttttgtaata

SEQ ID NO: 178078 - DNA, 76 bp, Homo sapiens
taagcagcacctcacaggctgagctacagggaattatacactggaacagtgtttctgtctttttgtaatattcttt

SEQ ID NO: 178079 - DNA, 71 bp, Homo sapiens
acctcacaggctgagctacagggaattatacactggaacagtgtttctgtctttttgtaatattctttttt

SEQ ID NO: 178080 - DNA, 74 bp, Homo sapiens
ttttttttccataatttcagggacagccaagatagaaacagctgtgacttcaaccccatctgcttctgggcagt

SEQ ID NO: 178081 - DNA, 78 bp, Homo sapiens
ataatttcagggacagccaagatagaaacagctgtgacttcaaccccatctgcttctgggcagttcagcaagcctttc

SEQ ID NO: 178082 - DNA, 79 bp, Homo sapiens
ttcagggacagccaagatagaaacagctgtgacttcaaccccatctgcttctgggcagttcagcaagcctttctcattt

SEQ ID NO: 178083 - DNA, 78 bp, Homo sapiens
aagatagaaacagctgtgacttcaaccccatctgcttctgggcagttcagcaagcctttctcattttctccatcaggg

SEQ ID NO: 178084 - DNA, 78 bp, Homo sapiens
aaacagctgtgacttcaaccccatctgcttctgggcagttcagcaagcctttctcattttctccatcagggtcagtaa

SEQ ID NO: 178085 - DNA, 76 bp, Homo sapiens
ttcaaccccatctgcttctgggcagttcagcaagcctttctcattttctccatcagggtcagtaatgaacttaagt

SEQ ID NO: 178086 - DNA, 76 bp, Homo sapiens
tgcttctgggcagttcagcaagcctttctcattttctccatcagggtcagtaatgaacttaagttttatggcaaat

SEQ ID NO: 178087 - DNA, 64 bp, Homo sapiens
gtgccttggtttgttcctttttaatttctctttttccacttgttaggactggctttaattttgg

SEQ ID NO: 178088 - DNA, 68 bp, Homo sapiens
ttaatttctctttttccacttgttaggactggctttaattttgggataatcacaccaacaccgtcttc

SEQ ID NO: 178089 - DNA, 68 bp, Homo sapiens
ctttttccacttgttaggactggctttaattttgggataatcacaccaacaccgtcttctaatttcac

SEQ ID NO: 178090 - DNA, 74 bp, Homo sapiens
ttgttaggactggctttaattttgggataatcacaccaacaccgtcttctaatttcactgctgcacaaggtaca

SEQ ID NO: 178091 - DNA, 77 bp, Homo sapiens
tggctttaattttgggataatcacaccaacaccgtcttctaatttcactgctgcacaaggtacagactctgtgttga

SEQ ID NO: 178092 - DNA, 78 bp, Homo sapiens
attttgggataatcacaccaacaccgtcttctaatttcactgctgcacaaggtacagactctgtgttgagtagcatta

SEQ ID NO: 178093 - DNA, 80 bp, Homo sapiens
ataatcacaccaacaccgtcttctaatttcactgctgcacaaggtacagactctgtgttgagtagcattactcatgtgtt

SEQ ID NO: 178094 - DNA, 78 bp, Homo sapiens
accgtcttctaatttcactgctgcacaaggtacagactctgtgttgagtagcattactcatgtgttttctctaaataa

SEQ ID NO: 178095 - DNA, 78 bp, Homo sapiens
atttcactgctgcacaaggtacagactctgtgttgagtagcattactcatgtgttttctctaaataagtacaggttat

SEQ ID NO: 178096 - DNA, 76 bp, Homo sapiens
actgctgcacaaggtacagactctgtgttgagtagcattactcatgtgttttctctaaataagtacaggttatttt

SEQ ID NO: 178097 - DNA, 75 bp, Homo sapiens
tgtgttgagtagcattactcatgtgttttctctaaataagtacaggttatttttgcccacatgttagtatttgac

SEQ ID NO: 178098 - DNA, 74 bp, Homo sapiens
gcattactcatgtgttttctctaaataagtacaggttatttttgcccacatgttagtatttgacttgttcctga

SEQ ID NO: 178099 - DNA, 70 bp, Homo sapiens
gtgttttctctaaataagtacaggttatttttgcccacatgttagtatttgacttgttcctgaatcttac

SEQ ID NO: 178100 - DNA, 74 bp, Homo sapiens
taaataagtacaggttatttttgcccacatgttagtatttgacttgttcctgaatcttacttacagtatctgca

SEQ ID NO: 178101 - DNA, 74 bp, Homo sapiens
agtacaggttatttttgcccacatgttagtatttgacttgttcctgaatcttacttacagtatctgcaataagc

SEQ ID NO: 178102 - DNA, 77 bp, Homo sapiens
atttttgcccacatgttagtatttgacttgttcctgaatcttacttacagtatctgcaataagctcagtgttgataa

SEQ ID NO: 178103 - DNA, 81 bp, Homo sapiens
cacatgttagtatttgacttgttcctgaatcttacttacagtatctgcaataagctcagtgttgataatgtgcattagaaa

SEQ ID NO: 178104 - DNA, 80 bp, Homo sapiens
tttgacttgttcctgaatcttacttacagtatctgcaataagctcagtgttgataatgtgcattagaaatatgcttaatt

SEQ ID NO: 178105 - DNA, 80 bp, Homo sapiens
cctgaatcttacttacagtatctgcaataagctcagtgttgataatgtgcattagaaatatgcttaatttaagaaactga

SEQ ID NO: 178106 - DNA, 80 bp, Homo sapiens
cttacttacagtatctgcaataagctcagtgttgataatgtgcattagaaatatgcttaatttaagaaactgatgtgaag

SEQ ID NO: 178107 - DNA, 80 bp, Homo sapiens
gtatctgcaataagctcagtgttgataatgtgcattagaaatatgcttaatttaagaaactgatgtgaaggatttctatt

SEQ ID NO: 178108 - DNA, 77 bp, Homo sapiens
taagctcagtgttgataatgtgcattagaaatatgcttaatttaagaaactgatgtgaaggatttctatttttataa

SEQ ID NO: 178109 - DNA, 74 bp, Homo sapiens
gttgataatgtgcattagaaatatgcttaatttaagaaactgatgtgaaggatttctatttttataattaagga

SEQ ID NO: 178110 - DNA, 72 bp, Homo sapiens
tgcattagaaatatgcttaatttaagaaactgatgtgaaggatttctatttttataattaaggacaaggaaa

SEQ ID NO: 178111 - DNA, 69 bp, Homo sapiens
gcttaatttaagaaactgatgtgaaggatttctatttttataattaaggacaaggaaaggatttgcttc

SEQ ID NO: 178112 - DNA, 70 bp, Homo sapiens
gaaactgatgtgaaggatttctatttttataattaaggacaaggaaaggatttgcttctagaaaatcagg

SEQ ID NO: 178113 - DNA, 72 bp, Homo sapiens
gatgtgaaggatttctatttttataattaaggacaaggaaaggatttgcttctagaaaatcagggctgtgct

SEQ ID NO: 178114 - DNA, 69 bp, Homo sapiens
ctatttttataattaaggacaaggaaaggatttgcttctagaaaatcagggctgtgctttaacatttaa

SEQ ID NO: 178115 - DNA, 70 bp, Homo sapiens
aattaaggacaaggaaaggatttgcttctagaaaatcagggctgtgctttaacatttaaatgttaacatg

SEQ ID NO: 178116 - DNA, 72 bp, Homo sapiens
ggacaaggaaaggatttgcttctagaaaatcagggctgtgctttaacatttaaatgttaacatgtgaattaa

SEQ ID NO: 178117 - DNA, 72 bp, Homo sapiens
aggatttgcttctagaaaatcagggctgtgctttaacatttaaatgttaacatgtgaattaaaatttctcca

SEQ ID NO: 178118 - DNA, 71 bp, Homo sapiens
tctagaaaatcagggctgtgctttaacatttaaatgttaacatgtgaattaaaatttctccattttttgtc

SEQ ID NO: 178119 - DNA, 70 bp, Homo sapiens
cagggctgtgctttaacatttaaatgttaacatgtgaattaaaatttctccattttttgtctgtaattta

SEQ ID NO: 178120 - DNA, 67 bp, Homo sapiens
tgttaacatgtgaattaaaatttctccattttttgtctgtaatttaaaatttcttcaatttataggg

SEQ ID NO: 178121 - DNA, 69 bp, Homo sapiens
catgtgaattaaaatttctccattttttgtctgtaatttaaaatttcttcaatttatagggtgattctg

SEQ ID NO: 178122 - DNA, 71 bp, Homo sapiens
tttctccattttttgtctgtaatttaaaatttcttcaatttatagggtgattctgtagggcaagatagaca

SEQ ID NO: 178123 - DNA, 73 bp, Homo sapiens
ttttgtctgtaatttaaaatttcttcaatttatagggtgattctgtagggcaagatagacatggtaatagata

SEQ ID NO: 178124 - DNA, 74 bp, Homo sapiens
gtaatttaaaatttcttcaatttatagggtgattctgtagggcaagatagacatggtaatagatagactgtaga

SEQ ID NO: 178125 - DNA, 76 bp, Homo sapiens
tttcttcaatttatagggtgattctgtagggcaagatagacatggtaatagatagactgtagaaatgaaagaccaa

SEQ ID NO: 178126 - DNA, 74 bp, Homo sapiens
tatagggtgattctgtagggcaagatagacatggtaatagatagactgtagaaatgaaagaccaaactcgtttt

SEQ ID NO: 178127 - DNA, 71 bp, Homo sapiens
attctgtagggcaagatagacatggtaatagatagactgtagaaatgaaagaccaaactcgtttttttcct

SEQ ID NO: 178128 - DNA, 72 bp, Homo sapiens
agggcaagatagacatggtaatagatagactgtagaaatgaaagaccaaactcgtttttttccttgataaca

SEQ ID NO: 178129 - DNA, 76 bp, Homo sapiens
tgcttcctccactcccacatccaccagtggaagtgtctttggtgccgcctcaagtaccagtagctccagttccttc

SEQ ID NO: 178130 - DNA, 75 bp, Homo sapiens
ctccactcccacatccaccagtggaagtgtctttggtgccgcctcaagtaccagtagctccagttccttctcatt

SEQ ID NO: 178131 - DNA, 75 bp, Homo sapiens
acatccaccagtggaagtgtctttggtgccgcctcaagtaccagtagctccagttccttctcatttggacagtct

SEQ ID NO: 178132 - DNA, 74 bp, Homo sapiens
aagtgtctttggtgccgcctcaagtaccagtagctccagttccttctcatttggacagtcttctcccaacacag

SEQ ID NO: 178133 - DNA, 74 bp, Homo sapiens
tctttggtgccgcctcaagtaccagtagctccagttccttctcatttggacagtcttctcccaacacaggaggg

SEQ ID NO: 178134 - DNA, 72 bp, Homo sapiens
cctcaagtaccagtagctccagttccttctcatttggacagtcttctcccaacacaggaggggggctgtttg

SEQ ID NO: 178135 - DNA, 72 bp, Homo sapiens
agtagctccagttccttctcatttggacagtcttctcccaacacaggaggggggctgtttggccaaagcaac

SEQ ID NO: 178136 - DNA, 73 bp, Homo sapiens
tccttctcatttggacagtcttctcccaacacaggaggggggctgtttggccaaagcaacgctcctgcttttg

SEQ ID NO: 178137 - DNA, 72 bp, Homo sapiens
atttggacagtcttctcccaacacaggaggggggctgtttggccaaagcaacgctcctgcttttgggcagag

SEQ ID NO: 178138 - DNA, 73 bp, Homo sapiens
ttctcccaacacaggaggggggctgtttggccaaagcaacgctcctgcttttgggcagagtcctggctttgga

SEQ ID NO: 178139 - DNA, 72 bp, Homo sapiens
aacacaggaggggggctgtttggccaaagcaacgctcctgcttttgggcagagtcctggctttggacaggga

SEQ ID NO: 178140 - DNA, 75 bp, Homo sapiens
ggctgtttggccaaagcaacgctcctgcttttgggcagagtcctggctttggacagggaggctctgtctttggtg

SEQ ID NO: 178141 - DNA, 74 bp, Homo sapiens
tttggccaaagcaacgctcctgcttttgggcagagtcctggctttggacagggaggctctgtctttggtggtac

SEQ ID NO: 178142 - DNA, 76 bp, Homo sapiens
aacgctcctgcttttgggcagagtcctggctttggacagggaggctctgtctttggtggtacctcagctgccacca

SEQ ID NO: 178143 - DNA, 78 bp, Homo sapiens
cttttgggcagagtcctggctttggacagggaggctctgtctttggtggtacctcagctgccaccacaacagcagcaa

SEQ ID NO: 178144 - DNA, 76 bp, Homo sapiens
agtcctggctttggacagggaggctctgtctttggtggtacctcagctgccaccacaacagcagcaacctctgggt

SEQ ID NO: 178145 - DNA, 76 bp, Homo sapiens
ctttggacagggaggctctgtctttggtggtacctcagctgccaccacaacagcagcaacctctgggttcagcttt

SEQ ID NO: 178146 - DNA, 79 bp, Homo sapiens
gctctgtctttggtggtacctcagctgccaccacaacagcagcaacctctgggttcagcttttgccaagcttcaggtaa

SEQ ID NO: 178147 - DNA, 76 bp, Homo sapiens
tttggtggtacctcagctgccaccacaacagcagcaacctctgggttcagcttttgccaagcttcaggtaagaatt

SEQ ID NO: 178148 - DNA, 77 bp, Homo sapiens
tcagctgccaccacaacagcagcaacctctgggttcagcttttgccaagcttcaggtaagaatttgtggaagctttt

SEQ ID NO: 178149 - DNA, 72 bp, Homo sapiens
accacaacagcagcaacctctgggttcagcttttgccaagcttcaggtaagaatttgtggaagctttttact

SEQ ID NO: 178150 - DNA, 69 bp, Homo sapiens
agcaacctctgggttcagcttttgccaagcttcaggtaagaatttgtggaagctttttacttgtttccc

SEQ ID NO: 178151 - DNA, 71 bp, Homo sapiens
tgggttcagcttttgccaagcttcaggtaagaatttgtggaagctttttacttgtttccctctctgctatt

SEQ ID NO: 178152 - DNA, 71 bp, Homo sapiens
ttttgccaagcttcaggtaagaatttgtggaagctttttacttgtttccctctctgctatttgaaacatta

SEQ ID NO: 178153 - DNA, 72 bp, Homo sapiens
aagcttcaggtaagaatttgtggaagctttttacttgtttccctctctgctatttgaaacattagcaacaga

SEQ ID NO: 178154 - DNA, 70 bp, Homo sapiens
aagaatttgtggaagctttttacttgtttccctctctgctatttgaaacattagcaacagacccctatta

SEQ ID NO: 178155 - DNA, 70 bp, Homo sapiens
tggaagctttttacttgtttccctctctgctatttgaaacattagcaacagacccctattacttttgtaa

SEQ ID NO: 178156 - DNA, 68 bp, Homo sapiens
ttacttgtttccctctctgctatttgaaacattagcaacagacccctattacttttgtaattaaaggg

SEQ ID NO: 178157 - DNA, 70 bp, Homo sapiens
tctctgctatttgaaacattagcaacagacccctattacttttgtaattaaaggggagactcaaaaccca

SEQ ID NO: 178158 - DNA, 66 bp, Homo sapiens
ctatttgaaacattagcaacagacccctattacttttgtaattaaaggggagactcaaaacccaaa

SEQ ID NO: 178159 - DNA, 65 bp, Homo sapiens
agcaacagacccctattacttttgtaattaaaggggagactcaaaacccaaaaataatctgtagg

SEQ ID NO: 178160 - DNA, 63 bp, Homo sapiens
ccctattacttttgtaattaaaggggagactcaaaacccaaaaataatctgtaggttaaagaa

SEQ ID NO: 178161 - DNA, 69 bp, Homo sapiens
tttgtaattaaaggggagactcaaaacccaaaaataatctgtaggttaaagaagacagcttggagcaca

SEQ ID NO: 178162 - DNA, 70 bp, Homo sapiens
attaaaggggagactcaaaacccaaaaataatctgtaggttaaagaagacagcttggagcacatgtggtc

SEQ ID NO: 178163 - DNA, 71 bp, Homo sapiens
actcaaaacccaaaaataatctgtaggttaaagaagacagcttggagcacatgtggtctcaggaacttgtt

SEQ ID NO: 178164 - DNA, 73 bp, Homo sapiens
aaaaataatctgtaggttaaagaagacagcttggagcacatgtggtctcaggaacttgtttggcctaattggc

SEQ ID NO: 178165 - DNA, 77 bp, Homo sapiens
atctgtaggttaaagaagacagcttggagcacatgtggtctcaggaacttgtttggcctaattggctggatctgtta

SEQ ID NO: 178166 - DNA, 81 bp, Homo sapiens
taaagaagacagcttggagcacatgtggtctcaggaacttgtttggcctaattggctggatctgttacagcttaatgcagc

SEQ ID NO: 178167 - DNA, 79 bp, Homo sapiens
agcttggagcacatgtggtctcaggaacttgtttggcctaattggctggatctgttacagcttaatgcagctccagttt

SEQ ID NO: 178168 - DNA, 78 bp, Homo sapiens
acatgtggtctcaggaacttgtttggcctaattggctggatctgttacagcttaatgcagctccagttttgcttctta

SEQ ID NO: 178169 - DNA, 76 bp, Homo sapiens
aggaacttgtttggcctaattggctggatctgttacagcttaatgcagctccagttttgcttcttagcaaattgtc

SEQ ID NO: 178170 - DNA, 81 bp, Homo sapiens
tttggcctaattggctggatctgttacagcttaatgcagctccagttttgcttcttagcaaattgtccactctgcaagcca

SEQ ID NO: 178171 - DNA, 82 bp, Homo sapiens
ctggatctgttacagcttaatgcagctccagttttgcttcttagcaaattgtccactctgcaagccaccagagtgtgtttca

SEQ ID NO: 178172 - DNA, 81 bp, Homo sapiens
tctgttacagcttaatgcagctccagttttgcttcttagcaaattgtccactctgcaagccaccagagtgtgtttcatggg

SEQ ID NO: 178173 - DNA, 76 bp, Homo sapiens
agttttgcttcttagcaaattgtccactctgcaagccaccagagtgtgtttcatggggaaaaatcaagcatcttta

SEQ ID NO: 178174 - DNA, 77 bp, Homo sapiens
ttcttagcaaattgtccactctgcaagccaccagagtgtgtttcatggggaaaaatcaagcatctttagttgaggtc

SEQ ID NO: 178175 - DNA, 76 bp, Homo sapiens
aaattgtccactctgcaagccaccagagtgtgtttcatggggaaaaatcaagcatctttagttgaggtcctgccaa

SEQ ID NO: 178176 - DNA, 74 bp, Homo sapiens
caagccaccagagtgtgtttcatggggaaaaatcaagcatctttagttgaggtcctgccaagtaatttaatgaa

SEQ ID NO: 178177 - DNA, 72 bp, Homo sapiens
agagtgtgtttcatggggaaaaatcaagcatctttagttgaggtcctgccaagtaatttaatgaacaataaa

SEQ ID NO: 178178 - DNA, 71 bp, Homo sapiens
gtttcatggggaaaaatcaagcatctttagttgaggtcctgccaagtaatttaatgaacaataaataggaa

SEQ ID NO: 178179 - DNA, 71 bp, Homo sapiens
gcatctttagttgaggtcctgccaagtaatttaatgaacaataaataggaaatttcaaatttggaaggcac

SEQ ID NO: 178180 - DNA, 73 bp, Homo sapiens
gttgaggtcctgccaagtaatttaatgaacaataaataggaaatttcaaatttggaaggcactgtagagatca

SEQ ID NO: 178181 - DNA, 75 bp, Homo sapiens
atgaacaataaataggaaatttcaaatttggaaggcactgtagagatcattatacccaaagctgtcaagcctcaa

SEQ ID NO: 178182 - DNA, 74 bp, Homo sapiens
aataaataggaaatttcaaatttggaaggcactgtagagatcattatacccaaagctgtcaagcctcaaggaga

SEQ ID NO: 178183 - DNA, 78 bp, Homo sapiens
aaatttcaaatttggaaggcactgtagagatcattatacccaaagctgtcaagcctcaaggagactgctctaatgtca

SEQ ID NO: 178184 - DNA, 81 bp, Homo sapiens
aaggcactgtagagatcattatacccaaagctgtcaagcctcaaggagactgctctaatgtcaggatagtgccagtggaac

SEQ ID NO: 178185 - DNA, 82 bp, Homo sapiens
actgtagagatcattatacccaaagctgtcaagcctcaaggagactgctctaatgtcaggatagtgccagtggaaccagcag

SEQ ID NO: 178186 - DNA, 80 bp, Homo sapiens
attatacccaaagctgtcaagcctcaaggagactgctctaatgtcaggatagtgccagtggaaccagcaggagagtccaa

SEQ ID NO: 178187 - DNA, 83 bp, Homo sapiens
aaagctgtcaagcctcaaggagactgctctaatgtcaggatagtgccagtggaaccagcaggagagtccaagtgtcatcatag

SEQ ID NO: 178188 - DNA, 82 bp, Homo sapiens
aagcctcaaggagactgctctaatgtcaggatagtgccagtggaaccagcaggagagtccaagtgtcatcatagtccaccgc

SEQ ID NO: 178189 - DNA, 81 bp, Homo sapiens
ctgctctaatgtcaggatagtgccagtggaaccagcaggagagtccaagtgtcatcatagtccaccgccctgccagtgttt

SEQ ID NO: 178190 - DNA, 81 bp, Homo sapiens
taatgtcaggatagtgccagtggaaccagcaggagagtccaagtgtcatcatagtccaccgccctgccagtgttttctgtc

SEQ ID NO: 178191 - DNA, 81 bp, Homo sapiens
atagtgccagtggaaccagcaggagagtccaagtgtcatcatagtccaccgccctgccagtgttttctgtctcctctgaca

SEQ ID NO: 178192 - DNA, 78 bp, Homo sapiens
agagtccaagtgtcatcatagtccaccgccctgccagtgttttctgtctcctctgacaccatctttcttactgtaatg

SEQ ID NO: 178193 - DNA, 81 bp, Homo sapiens
tcatcatagtccaccgccctgccagtgttttctgtctcctctgacaccatctttcttactgtaatggcagtcactgacatt

SEQ ID NO: 178194 - DNA, 79 bp, Homo sapiens
atagtccaccgccctgccagtgttttctgtctcctctgacaccatctttcttactgtaatggcagtcactgacatttga

SEQ ID NO: 178195 - DNA, 77 bp, Homo sapiens
tgccagtgttttctgtctcctctgacaccatctttcttactgtaatggcagtcactgacatttgatttgggttcttt

SEQ ID NO: 178196 - DNA, 75 bp, Homo sapiens
ttttctgtctcctctgacaccatctttcttactgtaatggcagtcactgacatttgatttgggttcttttctatt

SEQ ID NO: 178197 - DNA, 71 bp, Homo sapiens
ctgtaatggcagtcactgacatttgatttgggttcttttctattttcagtgttatgactttttgtaaaaac

SEQ ID NO: 178198 - DNA, 70 bp, Homo sapiens
ggcagtcactgacatttgatttgggttcttttctattttcagtgttatgactttttgtaaaaactacagt

SEQ ID NO: 178199 - DNA, 67 bp, Homo sapiens
gacatttgatttgggttcttttctattttcagtgttatgactttttgtaaaaactacagtttactgt

SEQ ID NO: 178200 - DNA, 67 bp, Homo sapiens
ttcttttctattttcagtgttatgactttttgtaaaaactacagtttactgtttttgacagtgaaac

SEQ ID NO: 178201 - DNA, 67 bp, Homo sapiens
ttttcagtgttatgactttttgtaaaaactacagtttactgtttttgacagtgaaacctaattcttc

SEQ ID NO: 178202 - DNA, 70 bp, Homo sapiens
gtgttatgactttttgtaaaaactacagtttactgtttttgacagtgaaacctaattcttctctattgca

SEQ ID NO: 178203 - DNA, 68 bp, Homo sapiens
ctttttgtaaaaactacagtttactgtttttgacagtgaaacctaattcttctctattgcattttcca

SEQ ID NO: 178204 - DNA, 71 bp, Homo sapiens
aactacagtttactgtttttgacagtgaaacctaattcttctctattgcattttccattttagcagctact

SEQ ID NO: 178205 - DNA, 71 bp, Homo sapiens
actgtttttgacagtgaaacctaattcttctctattgcattttccattttagcagctacttttacttctaa

SEQ ID NO: 178206 - DNA, 72 bp, Homo sapiens
gacagtgaaacctaattcttctctattgcattttccattttagcagctacttttacttctaaaagttatcaa

SEQ ID NO: 178207 - DNA, 73 bp, Homo sapiens
cctaattcttctctattgcattttccattttagcagctacttttacttctaaaagttatcaataagcaaggca

SEQ ID NO: 178208 - DNA, 72 bp, Homo sapiens
ctctattgcattttccattttagcagctacttttacttctaaaagttatcaataagcaaggcaatttgaaaa

SEQ ID NO: 178209 - DNA, 72 bp, Homo sapiens
ccattttagcagctacttttacttctaaaagttatcaataagcaaggcaatttgaaaatctgtcctgagatt

SEQ ID NO: 178210 - DNA, 75 bp, Homo sapiens
agcagctacttttacttctaaaagttatcaataagcaaggcaatttgaaaatctgtcctgagatttgctttctga

SEQ ID NO: 178211 - DNA, 73 bp, Homo sapiens
aaagttatcaataagcaaggcaatttgaaaatctgtcctgagatttgctttctgaaagttatcttatgaaagg

SEQ ID NO: 178212 - DNA, 75 bp, Homo sapiens
aagcaaggcaatttgaaaatctgtcctgagatttgctttctgaaagttatcttatgaaaggtaattcttcagcaa

SEQ ID NO: 178213 - DNA, 76 bp, Homo sapiens
ggcaatttgaaaatctgtcctgagatttgctttctgaaagttatcttatgaaaggtaattcttcagcaatagactc

SEQ ID NO: 178214 - DNA, 77 bp, Homo sapiens
gatttgctttctgaaagttatcttatgaaaggtaattcttcagcaatagactctaggagaaaagcaaggatcaatga

SEQ ID NO: 178215 - DNA, 77 bp, Homo sapiens
ttctgaaagttatcttatgaaaggtaattcttcagcaatagactctaggagaaaagcaaggatcaatgatttcatgg

SEQ ID NO: 178216 - DNA, 79 bp, Homo sapiens
tatcttatgaaaggtaattcttcagcaatagactctaggagaaaagcaaggatcaatgatttcatggtgggcaagatta

SEQ ID NO: 178217 - DNA, 76 bp, Homo sapiens
aaggtaattcttcagcaatagactctaggagaaaagcaaggatcaatgatttcatggtgggcaagattactagtaa

SEQ ID NO: 178218 - DNA, 78 bp, Homo sapiens
agcaatagactctaggagaaaagcaaggatcaatgatttcatggtgggcaagattactagtaactgctaattcattat

SEQ ID NO: 178219 - DNA, 79 bp, Homo sapiens
tctaggagaaaagcaaggatcaatgatttcatggtgggcaagattactagtaactgctaattcattattcgatgataac

SEQ ID NO: 178220 - DNA, 78 bp, Homo sapiens
gaaaagcaaggatcaatgatttcatggtgggcaagattactagtaactgctaattcattattcgatgataacttgaaa

SEQ ID NO: 178221 - DNA, 79 bp, Homo sapiens
ggatcaatgatttcatggtgggcaagattactagtaactgctaattcattattcgatgataacttgaaaatggttcata

SEQ ID NO: 178222 - DNA, 77 bp, Homo sapiens
tcatggtgggcaagattactagtaactgctaattcattattcgatgataacttgaaaatggttcataatttattaga

SEQ ID NO: 178223 - DNA, 74 bp, Homo sapiens
ggcaagattactagtaactgctaattcattattcgatgataacttgaaaatggttcataatttattagaaagga

SEQ ID NO: 178224 - DNA, 71 bp, Homo sapiens
ctagtaactgctaattcattattcgatgataacttgaaaatggttcataatttattagaaaggaaacattt

SEQ ID NO: 178225 - DNA, 69 bp, Homo sapiens
ctaattcattattcgatgataacttgaaaatggttcataatttattagaaaggaaacattttcctttct

SEQ ID NO: 178226 - DNA, 69 bp, Homo sapiens
attcgatgataacttgaaaatggttcataatttattagaaaggaaacattttcctttcttcaacaaatg

SEQ ID NO: 178227 - DNA, 67 bp, Homo sapiens
gaaaatggttcataatttattagaaaggaaacattttcctttcttcaacaaatgtttgttacactcc

SEQ ID NO: 178228 - DNA, 67 bp, Homo sapiens
ggttcataatttattagaaaggaaacattttcctttcttcaacaaatgtttgttacactcctcctaa

SEQ ID NO: 178229 - DNA, 70 bp, Homo sapiens
tagaaaggaaacattttcctttcttcaacaaatgtttgttacactcctcctaaattcagctataaggaca

SEQ ID NO: 178230 - DNA, 70 bp, Homo sapiens
acattttcctttcttcaacaaatgtttgttacactcctcctaaattcagctataaggacacggtgttgaa

SEQ ID NO: 178231 - DNA, 73 bp, Homo sapiens
tttcttcaacaaatgtttgttacactcctcctaaattcagctataaggacacggtgttgaaaagacagatatg

SEQ ID NO: 178232 - DNA, 72 bp, Homo sapiens
aaatgtttgttacactcctcctaaattcagctataaggacacggtgttgaaaagacagatatggttttgaga

SEQ ID NO: 178233 - DNA, 74 bp, Homo sapiens
tcctaaattcagctataaggacacggtgttgaaaagacagatatggttttgagacctacccaatgccctgtgaa

SEQ ID NO: 178234 - DNA, 77 bp, Homo sapiens
acacggtgttgaaaagacagatatggttttgagacctacccaatgccctgtgaagaggccagagggctgctgaatga

SEQ ID NO: 178235 - DNA, 79 bp, Homo sapiens
atatggttttgagacctacccaatgccctgtgaagaggccagagggctgctgaatgatgggaaatgtgctgacttggtc

SEQ ID NO: 178236 - DNA, 80 bp, Homo sapiens
ttgagacctacccaatgccctgtgaagaggccagagggctgctgaatgatgggaaatgtgctgacttggtccagaaaatg

SEQ ID NO: 178237 - DNA, 78 bp, Homo sapiens
aagaggccagagggctgctgaatgatgggaaatgtgctgacttggtccagaaaatgggcaaggagaaggccctatgag

SEQ ID NO: 178238 - DNA, 78 bp, Homo sapiens
agggctgctgaatgatgggaaatgtgctgacttggtccagaaaatgggcaaggagaaggccctatgagtcttagagga

SEQ ID NO: 178239 - DNA, 76 bp, Homo sapiens
atgatgggaaatgtgctgacttggtccagaaaatgggcaaggagaaggccctatgagtcttagaggagaacgtgta

SEQ ID NO: 178240 - DNA, 74 bp, Homo sapiens
aaatgtgctgacttggtccagaaaatgggcaaggagaaggccctatgagtcttagaggagaacgtgtaacacag

SEQ ID NO: 178241 - DNA, 74 bp, Homo sapiens
ttggtccagaaaatgggcaaggagaaggccctatgagtcttagaggagaacgtgtaacacagtccgtatcacta

SEQ ID NO: 178242 - DNA, 73 bp, Homo sapiens
aaatgggcaaggagaaggccctatgagtcttagaggagaacgtgtaacacagtccgtatcactaccacaccat

SEQ ID NO: 178243 - DNA, 76 bp, Homo sapiens
aaggagaaggccctatgagtcttagaggagaacgtgtaacacagtccgtatcactaccacaccatttgctctgcag

SEQ ID NO: 178244 - DNA, 79 bp, Homo sapiens
cctatgagtcttagaggagaacgtgtaacacagtccgtatcactaccacaccatttgctctgcagtcagaacctgagaa

SEQ ID NO: 178245 - DNA, 77 bp, Homo sapiens
agtcttagaggagaacgtgtaacacagtccgtatcactaccacaccatttgctctgcagtcagaacctgagaagacc

SEQ ID NO: 178246 - DNA, 83 bp, Homo sapiens
aacgtgtaacacagtccgtatcactaccacaccatttgctctgcagtcagaacctgagaagacctcatgcacaggcatggtca

SEQ ID NO: 178247 - DNA, 83 bp, Homo sapiens
aacacagtccgtatcactaccacaccatttgctctgcagtcagaacctgagaagacctcatgcacaggcatggtcatactatt

SEQ ID NO: 178248 - DNA, 82 bp, Homo sapiens
acaccatttgctctgcagtcagaacctgagaagacctcatgcacaggcatggtcatactatttcaacaaattcagaacccag

SEQ ID NO: 178249 - DNA, 77 bp, Homo sapiens
aacctgagaagacctcatgcacaggcatggtcatactatttcaacaaattcagaacccaggaaggaatcttctttca

SEQ ID NO: 178250 - DNA, 76 bp, Homo sapiens
aagacctcatgcacaggcatggtcatactatttcaacaaattcagaacccaggaaggaatcttctttcatttagta

SEQ ID NO: 178251 - DNA, 74 bp, Homo sapiens
aggcatggtcatactatttcaacaaattcagaacccaggaaggaatcttctttcatttagtatctgtgcggaaa

SEQ ID NO: 178252 - DNA, 73 bp, Homo sapiens
atactatttcaacaaattcagaacccaggaaggaatcttctttcatttagtatctgtgcggaaaggtatctga

SEQ ID NO: 178253 - DNA, 75 bp, Homo sapiens
tttcaacaaattcagaacccaggaaggaatcttctttcatttagtatctgtgcggaaaggtatctgagctgtcta

SEQ ID NO: 178254 - DNA, 76 bp, Homo sapiens
ttcagaacccaggaaggaatcttctttcatttagtatctgtgcggaaaggtatctgagctgtctacttcagcccta

SEQ ID NO: 178255 - DNA, 76 bp, Homo sapiens
aaggaatcttctttcatttagtatctgtgcggaaaggtatctgagctgtctacttcagccctagttgaggaattga

SEQ ID NO: 178256 - DNA, 77 bp, Homo sapiens
ctttcatttagtatctgtgcggaaaggtatctgagctgtctacttcagccctagttgaggaattgagtcttgtctaa

SEQ ID NO: 178257 - DNA, 79 bp, Homo sapiens
ttagtatctgtgcggaaaggtatctgagctgtctacttcagccctagttgaggaattgagtcttgtctaagctcaccta

SEQ ID NO: 178258 - DNA, 79 bp, Homo sapiens
gaaaggtatctgagctgtctacttcagccctagttgaggaattgagtcttgtctaagctcacctacccaatcagtgaca

SEQ ID NO: 178259 - DNA, 81 bp, Homo sapiens
gtatctgagctgtctacttcagccctagttgaggaattgagtcttgtctaagctcacctacccaatcagtgacagaaatga

SEQ ID NO: 178260 - DNA, 79 bp, Homo sapiens
tgtctacttcagccctagttgaggaattgagtcttgtctaagctcacctacccaatcagtgacagaaatgagaatagag

SEQ ID NO: 178261 - DNA, 79 bp, Homo sapiens
agccctagttgaggaattgagtcttgtctaagctcacctacccaatcagtgacagaaatgagaatagaggctgggcatg

SEQ ID NO: 178262 - DNA, 81 bp, Homo sapiens
aattgagtcttgtctaagctcacctacccaatcagtgacagaaatgagaatagaggctgggcatggcgactgacgcctgta

SEQ ID NO: 178263 - DNA, 71 bp, Homo sapiens
aaaagaaaagaaacgagagtagaactcctgccttctcactccttgtctggagctcttttgttgtatagttc

SEQ ID NO: 178264 - DNA, 75 bp, Homo sapiens
aaaagaaacgagagtagaactcctgccttctcactccttgtctggagctcttttgttgtatagttctgcctcatg

SEQ ID NO: 178265 - DNA, 76 bp, Homo sapiens
agagtagaactcctgccttctcactccttgtctggagctcttttgttgtatagttctgcctcatgttcccaggccc

SEQ ID NO: 178266 - DNA, 80 bp, Homo sapiens
ccttctcactccttgtctggagctcttttgttgtatagttctgcctcatgttcccaggccctgttcagctcagcacttca

SEQ ID NO: 178267 - DNA, 80 bp, Homo sapiens
tccttgtctggagctcttttgttgtatagttctgcctcatgttcccaggccctgttcagctcagcacttcaaccatgtta

SEQ ID NO: 178268 - DNA, 81 bp, Homo sapiens
agctcttttgttgtatagttctgcctcatgttcccaggccctgttcagctcagcacttcaaccatgttatgccatctggaa

SEQ ID NO: 178269 - DNA, 80 bp, Homo sapiens
ttttgttgtatagttctgcctcatgttcccaggccctgttcagctcagcacttcaaccatgttatgccatctggaagaaa

SEQ ID NO: 178270 - DNA, 81 bp, Homo sapiens
ttgtatagttctgcctcatgttcccaggccctgttcagctcagcacttcaaccatgttatgccatctggaagaaagataaa

SEQ ID NO: 178271 - DNA, 80 bp, Homo sapiens
tagttctgcctcatgttcccaggccctgttcagctcagcacttcaaccatgttatgccatctggaagaaagataaactac

SEQ ID NO: 178272 - DNA, 78 bp, Homo sapiens
tcatgttcccaggccctgttcagctcagcacttcaaccatgttatgccatctggaagaaagataaactaccctgaaaa

SEQ ID NO: 178273 - DNA, 76 bp, Homo sapiens
ttcccaggccctgttcagctcagcacttcaaccatgttatgccatctggaagaaagataaactaccctgaaaagaa

SEQ ID NO: 178274 - DNA, 76 bp, Homo sapiens
aggccctgttcagctcagcacttcaaccatgttatgccatctggaagaaagataaactaccctgaaaagaatgtgg

SEQ ID NO: 178275 - DNA, 80 bp, Homo sapiens
ctgttcagctcagcacttcaaccatgttatgccatctggaagaaagataaactaccctgaaaagaatgtggtatctgaga

SEQ ID NO: 178276 - DNA, 81 bp, Homo sapiens
ttcagctcagcacttcaaccatgttatgccatctggaagaaagataaactaccctgaaaagaatgtggtatctgagattca

SEQ ID NO: 178277 - DNA, 76 bp, Homo sapiens
acttcaaccatgttatgccatctggaagaaagataaactaccctgaaaagaatgtggtatctgagattcagaagaa

SEQ ID NO: 178278 - DNA, 73 bp, Homo sapiens
tctggaagaaagataaactaccctgaaaagaatgtggtatctgagattcagaagaaaccgaggagtagaaata

SEQ ID NO: 178279 - DNA, 73 bp, Homo sapiens
agaaagataaactaccctgaaaagaatgtggtatctgagattcagaagaaaccgaggagtagaaatattcata

SEQ ID NO: 178280 - DNA, 74 bp, Homo sapiens
actaccctgaaaagaatgtggtatctgagattcagaagaaaccgaggagtagaaatattcataatattaagtca

SEQ ID NO: 178281 - DNA, 75 bp, Homo sapiens
gaatgtggtatctgagattcagaagaaaccgaggagtagaaatattcataatattaagtcattagaaagaatttc

SEQ ID NO: 178282 - DNA, 75 bp, Homo sapiens
ctgagattcagaagaaaccgaggagtagaaatattcataatattaagtcattagaaagaatttctggtcactgaa

SEQ ID NO: 178283 - DNA, 73 bp, Homo sapiens
cagaagaaaccgaggagtagaaatattcataatattaagtcattagaaagaatttctggtcactgaaagtgag

SEQ ID NO: 178284 - DNA, 73 bp, Homo sapiens
gaaatattcataatattaagtcattagaaagaatttctggtcactgaaagtgaggataaactattcttagccc

SEQ ID NO: 178285 - DNA, 72 bp, Homo sapiens
ataatattaagtcattagaaagaatttctggtcactgaaagtgaggataaactattcttagcccccatccac

SEQ ID NO: 178286 - DNA, 69 bp, Homo sapiens
attagaaagaatttctggtcactgaaagtgaggataaactattcttagcccccatccacgtggggtttg

SEQ ID NO: 178287 - DNA, 70 bp, Homo sapiens
agaatttctggtcactgaaagtgaggataaactattcttagcccccatccacgtggggtttggtaggaga

SEQ ID NO: 178288 - DNA, 69 bp, Homo sapiens
actgaaagtgaggataaactattcttagcccccatccacgtggggtttggtaggagaggattcattccc

SEQ ID NO: 178289 - DNA, 69 bp, Homo sapiens
gataaactattcttagcccccatccacgtggggtttggtaggagaggattcattccccagggctttaga

SEQ ID NO: 178290 - DNA, 69 bp, Homo sapiens
tattcttagcccccatccacgtggggtttggtaggagaggattcattccccagggctttagaacttaca

SEQ ID NO: 178291 - DNA, 67 bp, Homo sapiens
catccacgtggggtttggtaggagaggattcattccccagggctttagaacttacactattttaaaa

SEQ ID NO: 178292 - DNA, 69 bp, Homo sapiens
gggtttggtaggagaggattcattccccagggctttagaacttacactattttaaaatgttagcaatga

SEQ ID NO: 178293 - DNA, 70 bp, Homo sapiens
tggtaggagaggattcattccccagggctttagaacttacactattttaaaatgttagcaatgaaaaatg

SEQ ID NO: 178294 - DNA, 68 bp, Homo sapiens
ggattcattccccagggctttagaacttacactattttaaaatgttagcaatgaaaaatggtctttaa

SEQ ID NO: 178295 - DNA, 70 bp, Homo sapiens
gaacttacactattttaaaatgttagcaatgaaaaatggtctttaaagtatttgctcagacttttctcca

SEQ ID NO: 178296 - DNA, 72 bp, Homo sapiens
tttaaaatgttagcaatgaaaaatggtctttaaagtatttgctcagacttttctccatactagatgaggaaa

SEQ ID NO: 178297 - DNA, 72 bp, Homo sapiens
aatgttagcaatgaaaaatggtctttaaagtatttgctcagacttttctccatactagatgaggaaacattt

SEQ ID NO: 178298 - DNA, 71 bp, Homo sapiens
gaaaaatggtctttaaagtatttgctcagacttttctccatactagatgaggaaacattttattcataagt

SEQ ID NO: 178299 - DNA, 74 bp, Homo sapiens
ttaaagtatttgctcagacttttctccatactagatgaggaaacattttattcataagttgatttattatgggc

SEQ ID NO: 178300 - DNA, 78 bp, Homo sapiens
ttgctcagacttttctccatactagatgaggaaacattttattcataagttgatttattatgggctatcttagcacac

SEQ ID NO: 178301 - DNA, 76 bp, Homo sapiens
cttttctccatactagatgaggaaacattttattcataagttgatttattatgggctatcttagcacacctgaatg

SEQ ID NO: 178302 - DNA, 77 bp, Homo sapiens
catactagatgaggaaacattttattcataagttgatttattatgggctatcttagcacacctgaatgtcatttaaa

SEQ ID NO: 178303 - DNA, 73 bp, Homo sapiens
gaggaaacattttattcataagttgatttattatgggctatcttagcacacctgaatgtcatttaaaaagaaa

SEQ ID NO: 178304 - DNA, 73 bp, Homo sapiens
tcataagttgatttattatgggctatcttagcacacctgaatgtcatttaaaaagaaataaacttaggctggg

SEQ ID NO: 178305 - DNA, 72 bp, Homo sapiens
agttgatttattatgggctatcttagcacacctgaatgtcatttaaaaagaaataaacttaggctgggtgcg

SEQ ID NO: 178306 - DNA, 64 bp, Homo sapiens
aaaaacaacaaaactttaatgttgtaaaagactcatccaatccaaattgaatttttgttttctt

SEQ ID NO: 178307 - DNA, 66 bp, Homo sapiens
caacaaaactttaatgttgtaaaagactcatccaatccaaattgaatttttgttttctttgtattt

SEQ ID NO: 178308 - DNA, 67 bp, Homo sapiens
tgttgtaaaagactcatccaatccaaattgaatttttgttttctttgtattttacaggttttgggtc

SEQ ID NO: 178309 - DNA, 68 bp, Homo sapiens
gactcatccaatccaaattgaatttttgttttctttgtattttacaggttttgggtctagtaatactg

SEQ ID NO: 178310 - DNA, 66 bp, Homo sapiens
tccaaattgaatttttgttttctttgtattttacaggttttgggtctagtaatactggttctgtgt

SEQ ID NO: 178311 - DNA, 67 bp, Homo sapiens
atttttgttttctttgtattttacaggttttgggtctagtaatactggttctgtgtttggtcaagca

SEQ ID NO: 178312 - DNA, 71 bp, Homo sapiens
ttctttgtattttacaggttttgggtctagtaatactggttctgtgtttggtcaagcagccagtactggtg

SEQ ID NO: 178313 - DNA, 71 bp, Homo sapiens
tttacaggttttgggtctagtaatactggttctgtgtttggtcaagcagccagtactggtggaatagtctt

SEQ ID NO: 178314 - DNA, 74 bp, Homo sapiens
tgggtctagtaatactggttctgtgtttggtcaagcagccagtactggtggaatagtctttggccaggtaaata

SEQ ID NO: 178315 - DNA, 75 bp, Homo sapiens
ctagtaatactggttctgtgtttggtcaagcagccagtactggtggaatagtctttggccaggtaaatatgcatt

SEQ ID NO: 178316 - DNA, 79 bp, Homo sapiens
tctgtgtttggtcaagcagccagtactggtggaatagtctttggccaggtaaatatgcatttgtcttcattcacgtcaa

SEQ ID NO: 178317 - DNA, 74 bp, Homo sapiens
atgacctctcatcctatcttgcttcctgacccttttgttttttagcaatcatcctcttccagtggtagcgtgtt

SEQ ID NO: 178318 - DNA, 72 bp, Homo sapiens
atcctatcttgcttcctgacccttttgttttttagcaatcatcctcttccagtggtagcgtgtttgggtctg

SEQ ID NO: 178319 - DNA, 71 bp, Homo sapiens
atcttgcttcctgacccttttgttttttagcaatcatcctcttccagtggtagcgtgtttgggtctggaaa

SEQ ID NO: 178320 - DNA, 69 bp, Homo sapiens
acccttttgttttttagcaatcatcctcttccagtggtagcgtgtttgggtctggaaacactggaagag

SEQ ID NO: 178321 - DNA, 70 bp, Homo sapiens
tttttagcaatcatcctcttccagtggtagcgtgtttgggtctggaaacactggaagagggggaggtttc

SEQ ID NO: 178322 - DNA, 71 bp, Homo sapiens
aatcatcctcttccagtggtagcgtgtttgggtctggaaacactggaagagggggaggtttcttcagtggc

SEQ ID NO: 178323 - DNA, 68 bp, Homo sapiens
agtggtagcgtgtttgggtctggaaacactggaagagggggaggtttcttcagtggccttggaggaaa

SEQ ID NO: 178324 - DNA, 68 bp, Homo sapiens
tagcgtgtttgggtctggaaacactggaagagggggaggtttcttcagtggccttggaggaaaaccca

SEQ ID NO: 178325 - DNA, 72 bp, Homo sapiens
tggaaacactggaagagggggaggtttcttcagtggccttggaggaaaacccagtcaggatgcagccaacaa

SEQ ID NO: 178326 - DNA, 70 bp, Homo sapiens
acactggaagagggggaggtttcttcagtggccttggaggaaaacccagtcaggatgcagccaacaaaaa

SEQ ID NO: 178327 - DNA, 73 bp, Homo sapiens
gaggtttcttcagtggccttggaggaaaacccagtcaggatgcagccaacaaaaacccattcagctcggccag

SEQ ID NO: 178328 - DNA, 73 bp, Homo sapiens
ttcttcagtggccttggaggaaaacccagtcaggatgcagccaacaaaaacccattcagctcggccagtgggg

SEQ ID NO: 178329 - DNA, 74 bp, Homo sapiens
ttggaggaaaacccagtcaggatgcagccaacaaaaacccattcagctcggccagtgggggctttggatccaca

SEQ ID NO: 178330 - DNA, 76 bp, Homo sapiens
ccagtcaggatgcagccaacaaaaacccattcagctcggccagtgggggctttggatccacagctacctcaagtaa

SEQ ID NO: 178331 - DNA, 75 bp, Homo sapiens
atgcagccaacaaaaacccattcagctcggccagtgggggctttggatccacagctacctcaagtaagttgagaa

SEQ ID NO: 178332 - DNA, 70 bp, Homo sapiens
aaaaacccattcagctcggccagtgggggctttggatccacagctacctcaagtaagttgagaagacttt

SEQ ID NO: 178333 - DNA, 72 bp, Homo sapiens
attcagctcggccagtgggggctttggatccacagctacctcaagtaagttgagaagacttttcccagtccc

SEQ ID NO: 178334 - DNA, 69 bp, Homo sapiens
ccagtgggggctttggatccacagctacctcaagtaagttgagaagacttttcccagtcccttggtccc

SEQ ID NO: 178335 - DNA, 73 bp, Homo sapiens
tttggatccacagctacctcaagtaagttgagaagacttttcccagtcccttggtcccctaatgccattgtca

SEQ ID NO: 178336 - DNA, 71 bp, Homo sapiens
acagctacctcaagtaagttgagaagacttttcccagtcccttggtcccctaatgccattgtcattcttag

SEQ ID NO: 178337 - DNA, 70 bp, Homo sapiens
aagtaagttgagaagacttttcccagtcccttggtcccctaatgccattgtcattcttagggtgttatca

SEQ ID NO: 178338 - DNA, 70 bp, Homo sapiens
agttgagaagacttttcccagtcccttggtcccctaatgccattgtcattcttagggtgttatcaaagct

SEQ ID NO: 178339 - DNA, 73 bp, Homo sapiens
tttcccagtcccttggtcccctaatgccattgtcattcttagggtgttatcaaagcttcagtgacaaatataa

SEQ ID NO: 178340 - DNA, 72 bp, Homo sapiens
gtcccttggtcccctaatgccattgtcattcttagggtgttatcaaagcttcagtgacaaatataaaaagaa

SEQ ID NO: 178341 - DNA, 68 bp, Homo sapiens
agaaaaaaaaatctagaaggctcatttaaaatatcttccccaaagcagtgtgatctgttttgcttttt

SEQ ID NO: 178342 - DNA, 69 bp, Homo sapiens
aaatctagaaggctcatttaaaatatcttccccaaagcagtgtgatctgttttgcttttttatttttgg

SEQ ID NO: 178343 - DNA, 80 bp, Homo sapiens
atttttggttttttaatgagatgtcctatataatcatgaaaagatatcagagctgcagggagaggatctgtgtattgagc

SEQ ID NO: 178344 - DNA, 84 bp, Homo sapiens
tttttaatgagatgtcctatataatcatgaaaagatatcagagctgcagggagaggatctgtgtattgagctgctcccctcttc

SEQ ID NO: 178345 - DNA, 84 bp, Homo sapiens
agatgtcctatataatcatgaaaagatatcagagctgcagggagaggatctgtgtattgagctgctcccctcttctctcccaag

SEQ ID NO: 178346 - DNA, 83 bp, Homo sapiens
tataatcatgaaaagatatcagagctgcagggagaggatctgtgtattgagctgctcccctcttctctcccaaggcccaaatc

SEQ ID NO: 178347 - DNA, 80 bp, Homo sapiens
aaaagatatcagagctgcagggagaggatctgtgtattgagctgctcccctcttctctcccaaggcccaaatcgctctgt

SEQ ID NO: 178348 - DNA, 81 bp, Homo sapiens
atatcagagctgcagggagaggatctgtgtattgagctgctcccctcttctctcccaaggcccaaatcgctctgtttctta

SEQ ID NO: 178349 - DNA, 79 bp, Homo sapiens
tgcagggagaggatctgtgtattgagctgctcccctcttctctcccaaggcccaaatcgctctgtttcttagtattgga

SEQ ID NO: 178350 - DNA, 76 bp, Homo sapiens
aggatctgtgtattgagctgctcccctcttctctcccaaggcccaaatcgctctgtttcttagtattggagtgact

SEQ ID NO: 178351 - DNA, 77 bp, Homo sapiens
atctgtgtattgagctgctcccctcttctctcccaaggcccaaatcgctctgtttcttagtattggagtgacttgaa

SEQ ID NO: 178352 - DNA, 77 bp, Homo sapiens
tgtattgagctgctcccctcttctctcccaaggcccaaatcgctctgtttcttagtattggagtgacttgaagtgaa

SEQ ID NO: 178353 - DNA, 78 bp, Homo sapiens
attgagctgctcccctcttctctcccaaggcccaaatcgctctgtttcttagtattggagtgacttgaagtgaatgca

SEQ ID NO: 178354 - DNA, 77 bp, Homo sapiens
ctcccctcttctctcccaaggcccaaatcgctctgtttcttagtattggagtgacttgaagtgaatgcaagcagaca

SEQ ID NO: 178355 - DNA, 79 bp, Homo sapiens
tcttctctcccaaggcccaaatcgctctgtttcttagtattggagtgacttgaagtgaatgcaagcagacaagcataaa

SEQ ID NO: 178356 - DNA, 83 bp, Homo sapiens
tctcccaaggcccaaatcgctctgtttcttagtattggagtgacttgaagtgaatgcaagcagacaagcataaatgagcagca

SEQ ID NO: 178357 - DNA, 85 bp, Homo sapiens
aaatcgctctgtttcttagtattggagtgacttgaagtgaatgcaagcagacaagcataaatgagcagcagcagagcaagccgag

SEQ ID NO: 178358 - DNA, 87 bp, Homo sapiens
tgtttcttagtattggagtgacttgaagtgaatgcaagcagacaagcataaatgagcagcagcagagcaagccgaggatgctgggag

SEQ ID NO: 178359 - DNA, 92 bp, Homo sapiens
agtattggagtgacttgaagtgaatgcaagcagacaagcataaatgagcagcagcagagcaagccgaggatgctgggaggagagcatgcaga

SEQ ID NO: 178360 - DNA, 85 bp, Homo sapiens
aagcataaatgagcagcagcagagcaagccgaggatgctgggaggagagcatgcagactttcatttggatagtactctccaaatt

SEQ ID NO: 178361 - DNA, 84 bp, Homo sapiens
taaatgagcagcagcagagcaagccgaggatgctgggaggagagcatgcagactttcatttggatagtactctccaaattttcc

SEQ ID NO: 178362 - DNA, 76 bp, Homo sapiens
agagcaagccgaggatgctgggaggagagcatgcagactttcatttggatagtactctccaaattttccttaaaat

SEQ ID NO: 178363 - DNA, 76 bp, Homo sapiens
aagccgaggatgctgggaggagagcatgcagactttcatttggatagtactctccaaattttccttaaaattcagc

SEQ ID NO: 178364 - DNA, 76 bp, Homo sapiens
ggaggagagcatgcagactttcatttggatagtactctccaaattttccttaaaattcagctcctgtagggagatg

SEQ ID NO: 178365 - DNA, 74 bp, Homo sapiens
atgcagactttcatttggatagtactctccaaattttccttaaaattcagctcctgtagggagatgtcacccaa

SEQ ID NO: 178366 - DNA, 70 bp, Homo sapiens
tttcatttggatagtactctccaaattttccttaaaattcagctcctgtagggagatgtcacccaaaagt

SEQ ID NO: 178367 - DNA, 70 bp, Homo sapiens
tagtactctccaaattttccttaaaattcagctcctgtagggagatgtcacccaaaagttgaagccttta

SEQ ID NO: 178368 - DNA, 70 bp, Homo sapiens
caaattttccttaaaattcagctcctgtagggagatgtcacccaaaagttgaagcctttaatatttctca

SEQ ID NO: 178369 - DNA, 71 bp, Homo sapiens
taaaattcagctcctgtagggagatgtcacccaaaagttgaagcctttaatatttctcacctcttacattt

SEQ ID NO: 178370 - DNA, 71 bp, Homo sapiens
ttcagctcctgtagggagatgtcacccaaaagttgaagcctttaatatttctcacctcttacatttttgtt

SEQ ID NO: 178371 - DNA, 67 bp, Homo sapiens
gtagggagatgtcacccaaaagttgaagcctttaatatttctcacctcttacatttttgttttattt

SEQ ID NO: 178372 - DNA, 71 bp, Homo sapiens
gccaccgtgctcggccttaaaagttatttgttgacctgtgtattcatggttggaaatgaaagaaatctgtt

SEQ ID NO: 178373 - DNA, 70 bp, Homo sapiens
ccaccgtgctcggccttaaaagttatttgttgacctgtgtattcatggttggaaatgaaagaaatctgtt

SEQ ID NO: 178374 - DNA, 71 bp, Homo sapiens
cggccttaaaagttatttgttgacctgtgtattcatggttggaaatgaaagaaatctgtttgtgtagatct

SEQ ID NO: 178375 - DNA, 75 bp, Homo sapiens
aaagttatttgttgacctgtgtattcatggttggaaatgaaagaaatctgtttgtgtagatctttatcctgctgc

SEQ ID NO: 178376 - DNA, 78 bp, Homo sapiens
tttgttgacctgtgtattcatggttggaaatgaaagaaatctgtttgtgtagatctttatcctgctgctcaggcggaa

SEQ ID NO: 178377 - DNA, 79 bp, Homo sapiens
tattcatggttggaaatgaaagaaatctgtttgtgtagatctttatcctgctgctcaggcggaagctgagattagaagt

SEQ ID NO: 178378 - DNA, 78 bp, Homo sapiens
tggttggaaatgaaagaaatctgtttgtgtagatctttatcctgctgctcaggcggaagctgagattagaagttggga

SEQ ID NO: 178379 - DNA, 77 bp, Homo sapiens
aagaaatctgtttgtgtagatctttatcctgctgctcaggcggaagctgagattagaagttgggagcctgtcctgtt

SEQ ID NO: 178380 - DNA, 81 bp, Homo sapiens
tgtttgtgtagatctttatcctgctgctcaggcggaagctgagattagaagttgggagcctgtcctgtttgtctcagcttc

SEQ ID NO: 178381 - DNA, 82 bp, Homo sapiens
tgctcaggcggaagctgagattagaagttgggagcctgtcctgtttgtctcagcttctctcatttaatgtgccctacatgaa

SEQ ID NO: 178382 - DNA, 79 bp, Homo sapiens
gaagctgagattagaagttgggagcctgtcctgtttgtctcagcttctctcatttaatgtgccctacatgaagtttctc

SEQ ID NO: 178383 - DNA, 78 bp, Homo sapiens
attagaagttgggagcctgtcctgtttgtctcagcttctctcatttaatgtgccctacatgaagtttctctcatctgt

SEQ ID NO: 178384 - DNA, 81 bp, Homo sapiens
agttgggagcctgtcctgtttgtctcagcttctctcatttaatgtgccctacatgaagtttctctcatctgttgtgctgtg

SEQ ID NO: 178385 - DNA, 89 bp, Homo sapiens
tcctgtttgtctcagcttctctcatttaatgtgccctacatgaagtttctctcatctgttgtgctgtgtgagatctccatgaatcatga

SEQ ID NO: 178386 - DNA, 90 bp, Homo sapiens
tctcagcttctctcatttaatgtgccctacatgaagtttctctcatctgttgtgctgtgtgagatctccatgaatcatgagctagtgttc

SEQ ID NO: 178387 - DNA, 93 bp, Homo sapiens
tctcatttaatgtgccctacatgaagtttctctcatctgttgtgctgtgtgagatctccatgaatcatgagctagtgttctgcagtcatgaca

SEQ ID NO: 178388 - DNA, 91 bp, Homo sapiens
atttaatgtgccctacatgaagtttctctcatctgttgtgctgtgtgagatctccatgaatcatgagctagtgttctgcagtcatgacaga

SEQ ID NO: 178389 - DNA, 88 bp, Homo sapiens
aagtttctctcatctgttgtgctgtgtgagatctccatgaatcatgagctagtgttctgcagtcatgacagatgtttccttaatatta

SEQ ID NO: 178390 - DNA, 90 bp, Homo sapiens
tctctcatctgttgtgctgtgtgagatctccatgaatcatgagctagtgttctgcagtcatgacagatgtttccttaatattaaggcctg

SEQ ID NO: 178391 - DNA, 89 bp, Homo sapiens
tgttgtgctgtgtgagatctccatgaatcatgagctagtgttctgcagtcatgacagatgtttccttaatattaaggcctgtgcagtta

SEQ ID NO: 178392 - DNA, 89 bp, Homo sapiens
tgctgtgtgagatctccatgaatcatgagctagtgttctgcagtcatgacagatgtttccttaatattaaggcctgtgcagttagcaaa

SEQ ID NO: 178393 - DNA, 87 bp, Homo sapiens
tgtgtgagatctccatgaatcatgagctagtgttctgcagtcatgacagatgtttccttaatattaaggcctgtgcagttagcaaaa

SEQ ID NO: 178394 - DNA, 83 bp, Homo sapiens
agatctccatgaatcatgagctagtgttctgcagtcatgacagatgtttccttaatattaaggcctgtgcagttagcaaaact

SEQ ID NO: 178395 - DNA, 83 bp, Homo sapiens
catgaatcatgagctagtgttctgcagtcatgacagatgtttccttaatattaaggcctgtgcagttagcaaaactttctatc

SEQ ID NO: 178396 - DNA, 80 bp, Homo sapiens
atgagctagtgttctgcagtcatgacagatgtttccttaatattaaggcctgtgcagttagcaaaactttctatcctgat

SEQ ID NO: 178397 - DNA, 79 bp, Homo sapiens
tctgcagtcatgacagatgtttccttaatattaaggcctgtgcagttagcaaaactttctatcctgatttgcccttcta

SEQ ID NO: 178398 - DNA, 73 bp, Homo sapiens
atgacagatgtttccttaatattaaggcctgtgcagttagcaaaactttctatcctgatttgcccttctaaac

SEQ ID NO: 178399 - DNA, 70 bp, Homo sapiens
tttccttaatattaaggcctgtgcagttagcaaaactttctatcctgatttgcccttctaaactcctaaa

SEQ ID NO: 178400 - DNA, 70 bp, Homo sapiens
atattaaggcctgtgcagttagcaaaactttctatcctgatttgcccttctaaactcctaaatcaaaaac

SEQ ID NO: 178401 - DNA, 70 bp, Homo sapiens
ctgtgcagttagcaaaactttctatcctgatttgcccttctaaactcctaaatcaaaaactagtcagttt

SEQ ID NO: 178402 - DNA, 68 bp, Homo sapiens
gcaaaactttctatcctgatttgcccttctaaactcctaaatcaaaaactagtcagttttttagttca

SEQ ID NO: 178403 - DNA, 70 bp, Homo sapiens
tttctatcctgatttgcccttctaaactcctaaatcaaaaactagtcagttttttagttcagcctgggca

SEQ ID NO: 178404 - DNA, 73 bp, Homo sapiens
caaacaaaaacctagttattttgatgtcactgtccactccactaatacataaggaaagattattgtcaagaga

SEQ ID NO: 178405 - DNA, 74 bp, Homo sapiens
aacctagttattttgatgtcactgtccactccactaatacataaggaaagattattgtcaagagacacatacct

SEQ ID NO: 178406 - DNA, 75 bp, Homo sapiens
tattttgatgtcactgtccactccactaatacataaggaaagattattgtcaagagacacataccttttaccttg

SEQ ID NO: 178407 - DNA, 75 bp, Homo sapiens
tcactgtccactccactaatacataaggaaagattattgtcaagagacacataccttttaccttgtgaaattatg

SEQ ID NO: 178408 - DNA, 74 bp, Homo sapiens
actccactaatacataaggaaagattattgtcaagagacacataccttttaccttgtgaaattatgtaatcaga

SEQ ID NO: 178409 - DNA, 71 bp, Homo sapiens
cataaggaaagattattgtcaagagacacataccttttaccttgtgaaattatgtaatcagaagtttttgt

SEQ ID NO: 178410 - DNA, 70 bp, Homo sapiens
agattattgtcaagagacacataccttttaccttgtgaaattatgtaatcagaagtttttgttctttagg

SEQ ID NO: 178411 - DNA, 71 bp, Homo sapiens
gagacacataccttttaccttgtgaaattatgtaatcagaagtttttgttctttaggtttcagtctgccag

SEQ ID NO: 178412 - DNA, 69 bp, Homo sapiens
taccttttaccttgtgaaattatgtaatcagaagtttttgttctttaggtttcagtctgccaggaggga

SEQ ID NO: 178413 - DNA, 70 bp, Homo sapiens
accttgtgaaattatgtaatcagaagtttttgttctttaggtttcagtctgccaggagggatttagaatc

SEQ ID NO: 178414 - DNA, 72 bp, Homo sapiens
tatgtaatcagaagtttttgttctttaggtttcagtctgccaggagggatttagaatcctggatcttagaaa

SEQ ID NO: 178415 - DNA, 71 bp, Homo sapiens
gtttttgttctttaggtttcagtctgccaggagggatttagaatcctggatcttagaaatcaagtctagta

SEQ ID NO: 178416 - DNA, 71 bp, Homo sapiens
tttaggtttcagtctgccaggagggatttagaatcctggatcttagaaatcaagtctagtagttttcaaaa

SEQ ID NO: 178417 - DNA, 69 bp, Homo sapiens
ccaggagggatttagaatcctggatcttagaaatcaagtctagtagttttcaaaaactgtttttgccaa

SEQ ID NO: 178418 - DNA, 72 bp, Homo sapiens
gaatcctggatcttagaaatcaagtctagtagttttcaaaaactgtttttgccaatgaactcttaagtagca

SEQ ID NO: 178419 - DNA, 73 bp, Homo sapiens
ctggatcttagaaatcaagtctagtagttttcaaaaactgtttttgccaatgaactcttaagtagcatcctga

SEQ ID NO: 178420 - DNA, 71 bp, Homo sapiens
gaaatcaagtctagtagttttcaaaaactgtttttgccaatgaactcttaagtagcatcctgataaggaaa

SEQ ID NO: 178421 - DNA, 70 bp, Homo sapiens
caagtctagtagttttcaaaaactgtttttgccaatgaactcttaagtagcatcctgataaggaaaacaa

SEQ ID NO: 178422 - DNA, 68 bp, Homo sapiens
ctagtagttttcaaaaactgtttttgccaatgaactcttaagtagcatcctgataaggaaaacaaaag

SEQ ID NO: 178423 - DNA, 73 bp, Homo sapiens
tcaaaaactgtttttgccaatgaactcttaagtagcatcctgataaggaaaacaaaagtaggttcatgctgaa

SEQ ID NO: 178424 - DNA, 73 bp, Homo sapiens
aaaactgtttttgccaatgaactcttaagtagcatcctgataaggaaaacaaaagtaggttcatgctgaagca

SEQ ID NO: 178425 - DNA, 73 bp, Homo sapiens
aactgtttttgccaatgaactcttaagtagcatcctgataaggaaaacaaaagtaggttcatgctgaagcagg

SEQ ID NO: 178426 - DNA, 74 bp, Homo sapiens
tttttgccaatgaactcttaagtagcatcctgataaggaaaacaaaagtaggttcatgctgaagcaggggtcag

SEQ ID NO: 178427 - DNA, 74 bp, Homo sapiens
tgaactcttaagtagcatcctgataaggaaaacaaaagtaggttcatgctgaagcaggggtcaggaactccaaa

SEQ ID NO: 178428 - DNA, 72 bp, Homo sapiens
aactcttaagtagcatcctgataaggaaaacaaaagtaggttcatgctgaagcaggggtcaggaactccaaa

SEQ ID NO: 178429 - DNA, 74 bp, Homo sapiens
tcttaagtagcatcctgataaggaaaacaaaagtaggttcatgctgaagcaggggtcaggaactccaaaacaca

SEQ ID NO: 178430 - DNA, 75 bp, Homo sapiens
agtagcatcctgataaggaaaacaaaagtaggttcatgctgaagcaggggtcaggaactccaaaacacacagctg

SEQ ID NO: 178431 - DNA, 76 bp, Homo sapiens
atcctgataaggaaaacaaaagtaggttcatgctgaagcaggggtcaggaactccaaaacacacagctggctggca

SEQ ID NO: 178432 - DNA, 79 bp, Homo sapiens
agtaggttcatgctgaagcaggggtcaggaactccaaaacacacagctggctggcaccacaggaccgtgaggctccata

SEQ ID NO: 178433 - DNA, 80 bp, Homo sapiens
tgaagcaggggtcaggaactccaaaacacacagctggctggcaccacaggaccgtgaggctccatagcacatactttgaa

SEQ ID NO: 178434 - DNA, 79 bp, Homo sapiens
tcaggaactccaaaacacacagctggctggcaccacaggaccgtgaggctccatagcacatactttgaaaacatcgtcc

SEQ ID NO: 178435 - DNA, 77 bp, Homo sapiens
agctggctggcaccacaggaccgtgaggctccatagcacatactttgaaaacatcgtccttttatggctcttcattt

SEQ ID NO: 178436 - DNA, 76 bp, Homo sapiens
ctggcaccacaggaccgtgaggctccatagcacatactttgaaaacatcgtccttttatggctcttcattttccat

SEQ ID NO: 178437 - DNA, 74 bp, Homo sapiens
accgtgaggctccatagcacatactttgaaaacatcgtccttttatggctcttcattttccattgaggaaacaa

SEQ ID NO: 178438 - DNA, 75 bp, Homo sapiens
tccatagcacatactttgaaaacatcgtccttttatggctcttcattttccattgaggaaacaagcccagaattc

SEQ ID NO: 178439 - DNA, 75 bp, Homo sapiens
aaaacatcgtccttttatggctcttcattttccattgaggaaacaagcccagaattctgaggtcacagagccaga

SEQ ID NO: 178440 - DNA, 79 bp, Homo sapiens
tttatggctcttcattttccattgaggaaacaagcccagaattctgaggtcacagagccagaaagtcacagatatagaa

SEQ ID NO: 178441 - DNA, 80 bp, Homo sapiens
ttcattttccattgaggaaacaagcccagaattctgaggtcacagagccagaaagtcacagatatagaactcagctagac

SEQ ID NO: 178442 - DNA, 81 bp, Homo sapiens
tttccattgaggaaacaagcccagaattctgaggtcacagagccagaaagtcacagatatagaactcagctagactatatg

SEQ ID NO: 178443 - DNA, 85 bp, Homo sapiens
aaacaagcccagaattctgaggtcacagagccagaaagtcacagatatagaactcagctagactatatgtcacatgccagacaca

SEQ ID NO: 178444 - DNA, 89 bp, Homo sapiens
attctgaggtcacagagccagaaagtcacagatatagaactcagctagactatatgtcacatgccagacacagaatctggcacagaata

SEQ ID NO: 178445 - DNA, 89 bp, Homo sapiens
tcacagagccagaaagtcacagatatagaactcagctagactatatgtcacatgccagacacagaatctggcacagaatagacacttaa

SEQ ID NO: 178446 - DNA, 87 bp, Homo sapiens
agaaagtcacagatatagaactcagctagactatatgtcacatgccagacacagaatctggcacagaatagacacttaataacatgc

SEQ ID NO: 178447 - DNA, 89 bp, Homo sapiens
gatatagaactcagctagactatatgtcacatgccagacacagaatctggcacagaatagacacttaataacatgctccactgcagtta

SEQ ID NO: 178448 - DNA, 87 bp, Homo sapiens
tcagctagactatatgtcacatgccagacacagaatctggcacagaatagacacttaataacatgctccactgcagttagaaatttg

SEQ ID NO: 178449 - DNA, 83 bp, Homo sapiens
tatatgtcacatgccagacacagaatctggcacagaatagacacttaataacatgctccactgcagttagaaatttgggttta

SEQ ID NO: 178450 - DNA, 80 bp, Homo sapiens
atgccagacacagaatctggcacagaatagacacttaataacatgctccactgcagttagaaatttgggtttatcccaga

SEQ ID NO: 178451 - DNA, 77 bp, Homo sapiens
acagaatctggcacagaatagacacttaataacatgctccactgcagttagaaatttgggtttatcccagagctaag

SEQ ID NO: 178452 - DNA, 79 bp, Homo sapiens
cacagaatagacacttaataacatgctccactgcagttagaaatttgggtttatcccagagctaaggtatcatctgcga

SEQ ID NO: 178453 - DNA, 76 bp, Homo sapiens
atagacacttaataacatgctccactgcagttagaaatttgggtttatcccagagctaaggtatcatctgcgaggt

SEQ ID NO: 178454 - DNA, 77 bp, Homo sapiens
taataacatgctccactgcagttagaaatttgggtttatcccagagctaaggtatcatctgcgaggttgtgttactg

SEQ ID NO: 178455 - DNA, 71 bp, Homo sapiens
ttagaaatttgggtttatcccagagctaaggtatcatctgcgaggttgtgttactggccaattttgttaaa

SEQ ID NO: 178456 - DNA, 73 bp, Homo sapiens
agctaaggtatcatctgcgaggttgtgttactggccaattttgttaaaagttaaatgtgtcatatccctataa

SEQ ID NO: 178457 - DNA, 71 bp, Homo sapiens
catctgcgaggttgtgttactggccaattttgttaaaagttaaatgtgtcatatccctataaacattcgtt

SEQ ID NO: 178458 - DNA, 69 bp, Homo sapiens
gcgaggttgtgttactggccaattttgttaaaagttaaatgtgtcatatccctataaacattcgtttac

SEQ ID NO: 178459 - DNA, 75 bp, Homo sapiens
tggccaattttgttaaaagttaaatgtgtcatatccctataaacattcgtttactcatctctaatgccatggctc

SEQ ID NO: 178460 - DNA, 77 bp, Homo sapiens
ttgttaaaagttaaatgtgtcatatccctataaacattcgtttactcatctctaatgccatggctcttgactgtcaa

SEQ ID NO: 178461 - DNA, 76 bp, Homo sapiens
aaagttaaatgtgtcatatccctataaacattcgtttactcatctctaatgccatggctcttgactgtcaaggagt

SEQ ID NO: 178462 - DNA, 81 bp, Homo sapiens
gtgtcatatccctataaacattcgtttactcatctctaatgccatggctcttgactgtcaaggagttgccttctgtcagtg

SEQ ID NO: 178463 - DNA, 83 bp, Homo sapiens
cctataaacattcgtttactcatctctaatgccatggctcttgactgtcaaggagttgccttctgtcagtggctggctgcagc

SEQ ID NO: 178464 - DNA, 88 bp, Homo sapiens
ttactcatctctaatgccatggctcttgactgtcaaggagttgccttctgtcagtggctggctgcagctggtttgcacggacacatga

SEQ ID NO: 178465 - DNA, 88 bp, Homo sapiens
atctctaatgccatggctcttgactgtcaaggagttgccttctgtcagtggctggctgcagctggtttgcacggacacatgagagcca

SEQ ID NO: 178466 - DNA, 88 bp, Homo sapiens
atggctcttgactgtcaaggagttgccttctgtcagtggctggctgcagctggtttgcacggacacatgagagccagccaagcacatc

SEQ ID NO: 178467 - DNA, 87 bp, Homo sapiens
ttgactgtcaaggagttgccttctgtcagtggctggctgcagctggtttgcacggacacatgagagccagccaagcacatcttccca

SEQ ID NO: 178468 - DNA, 85 bp, Homo sapiens
tcagtggctggctgcagctggtttgcacggacacatgagagccagccaagcacatcttcccagttgttcatttggtgacatcgtt

SEQ ID NO: 178469 - DNA, 82 bp, Homo sapiens
ctggctgcagctggtttgcacggacacatgagagccagccaagcacatcttcccagttgttcatttggtgacatcgtttggg

SEQ ID NO: 178470 - DNA, 78 bp, Homo sapiens
agctggtttgcacggacacatgagagccagccaagcacatcttcccagttgttcatttggtgacatcgtttggggtaa

SEQ ID NO: 178471 - DNA, 78 bp, Homo sapiens
acacatgagagccagccaagcacatcttcccagttgttcatttggtgacatcgtttggggtaacctgaaatgagccat

SEQ ID NO: 178472 - DNA, 76 bp, Homo sapiens
cacatcttcccagttgttcatttggtgacatcgtttggggtaacctgaaatgagccattgtggagtatttatatca

SEQ ID NO: 178473 - DNA, 75 bp, Homo sapiens
ttcccagttgttcatttggtgacatcgtttggggtaacctgaaatgagccattgtggagtatttatatcatggaa

SEQ ID NO: 178474 - DNA, 75 bp, Homo sapiens
gttcatttggtgacatcgtttggggtaacctgaaatgagccattgtggagtatttatatcatggaaatcagaaaa

SEQ ID NO: 178475 - DNA, 72 bp, Homo sapiens
acatcgtttggggtaacctgaaatgagccattgtggagtatttatatcatggaaatcagaaaaccctacaaa

SEQ ID NO: 178476 - DNA, 72 bp, Homo sapiens
gggtaacctgaaatgagccattgtggagtatttatatcatggaaatcagaaaaccctacaaaccaggactcc

SEQ ID NO: 178477 - DNA, 74 bp, Homo sapiens
aatgagccattgtggagtatttatatcatggaaatcagaaaaccctacaaaccaggactccccagcctgtcaaa

SEQ ID NO: 178478 - DNA, 72 bp, Homo sapiens
attgtggagtatttatatcatggaaatcagaaaaccctacaaaccaggactccccagcctgtcaaacattac

SEQ ID NO: 178479 - DNA, 74 bp, Homo sapiens
tatttatatcatggaaatcagaaaaccctacaaaccaggactccccagcctgtcaaacattactggctgattct

SEQ ID NO: 178480 - DNA, 71 bp, Homo sapiens
aatcagaaaaccctacaaaccaggactccccagcctgtcaaacattactggctgattcttctaattctggt

SEQ ID NO: 178481 - DNA, 70 bp, Homo sapiens
ccctacaaaccaggactccccagcctgtcaaacattactggctgattcttctaattctggtttaaagtaa

SEQ ID NO: 178482 - DNA, 71 bp, Homo sapiens
aaaccaggactccccagcctgtcaaacattactggctgattcttctaattctggtttaaagtaaacacata

SEQ ID NO: 178483 - DNA, 75 bp, Homo sapiens
cagcctgtcaaacattactggctgattcttctaattctggtttaaagtaaacacataactattcttgataccaga

SEQ ID NO: 178484 - DNA, 72 bp, Homo sapiens
aacattactggctgattcttctaattctggtttaaagtaaacacataactattcttgataccagataacctg

SEQ ID NO: 178485 - DNA, 73 bp, Homo sapiens
ggctgattcttctaattctggtttaaagtaaacacataactattcttgataccagataacctgttagtcttca

SEQ ID NO: 178486 - DNA, 72 bp, Homo sapiens
cttctaattctggtttaaagtaaacacataactattcttgataccagataacctgttagtcttcatcttcta

SEQ ID NO: 178487 - DNA, 72 bp, Homo sapiens
aactattcttgataccagataacctgttagtcttcatcttctaaatgttggctgttaactataaaccaacaa

SEQ ID NO: 178488 - DNA, 76 bp, Homo sapiens
tgataccagataacctgttagtcttcatcttctaaatgttggctgttaactataaaccaacaatttacatgtgtgc

SEQ ID NO: 178489 - DNA, 71 bp, Homo sapiens
aacctgttagtcttcatcttctaaatgttggctgttaactataaaccaacaatttacatgtgtgcctaagg

SEQ ID NO: 178490 - DNA, 70 bp, Homo sapiens
atgttggctgttaactataaaccaacaatttacatgtgtgcctaagggaagtttaagtgattttgaagga

SEQ ID NO: 178491 - DNA, 70 bp, Homo sapiens
ggctgttaactataaaccaacaatttacatgtgtgcctaagggaagtttaagtgattttgaaggagtaga

SEQ ID NO: 178492 - DNA, 69 bp, Homo sapiens
accaacaatttacatgtgtgcctaagggaagtttaagtgattttgaaggagtagaggaaacacttaaca

SEQ ID NO: 178493 - DNA, 68 bp, Homo sapiens
gtgtgcctaagggaagtttaagtgattttgaaggagtagaggaaacacttaacattgtattattttaa

SEQ ID NO: 178494 - DNA, 66 bp, Homo sapiens
gggaagtttaagtgattttgaaggagtagaggaaacacttaacattgtattattttaaaaactata

SEQ ID NO: 178495 - DNA, 69 bp, Homo sapiens
agtgattttgaaggagtagaggaaacacttaacattgtattattttaaaaactatatgattttatttca

SEQ ID NO: 178496 - DNA, 70 bp, Homo sapiens
ttcaatagtttttggggtactaggtgtatgattcaatagtgaaagggacaggaattgttttaactctgag

SEQ ID NO: 178497 - DNA, 69 bp, Homo sapiens
agtttttggggtactaggtgtatgattcaatagtgaaagggacaggaattgttttaactctgagggcca

SEQ ID NO: 178498 - DNA, 72 bp, Homo sapiens
taggtgtatgattcaatagtgaaagggacaggaattgttttaactctgagggccaccaagtacagaataaaa

SEQ ID NO: 178499 - DNA, 69 bp, Homo sapiens
acaggaattgttttaactctgagggccaccaagtacagaataaaaggaaggaacagtggagaaggaaga

SEQ ID NO: 178500 - DNA, 71 bp, Homo sapiens
tgttttaactctgagggccaccaagtacagaataaaaggaaggaacagtggagaaggaagagctgggagtc

SEQ ID NO: 178501 - DNA, 69 bp, Homo sapiens
agggccaccaagtacagaataaaaggaaggaacagtggagaaggaagagctgggagtcgtctggggaaa

SEQ ID NO: 178502 - DNA, 70 bp, Homo sapiens
aagtacagaataaaaggaaggaacagtggagaaggaagagctgggagtcgtctggggaaaggcattgtcc

SEQ ID NO: 178503 - DNA, 72 bp, Homo sapiens
ataaaaggaaggaacagtggagaaggaagagctgggagtcgtctggggaaaggcattgtcctcaccacagta

SEQ ID NO: 178504 - DNA, 74 bp, Homo sapiens
aacagtggagaaggaagagctgggagtcgtctggggaaaggcattgtcctcaccacagtactcaggatcgtttc

SEQ ID NO: 178505 - DNA, 78 bp, Homo sapiens
aaggaagagctgggagtcgtctggggaaaggcattgtcctcaccacagtactcaggatcgtttctgcagaatcatcag

SEQ ID NO: 178506 - DNA, 79 bp, Homo sapiens
tggggaaaggcattgtcctcaccacagtactcaggatcgtttctgcagaatcatcagtgacagcttctttctccttaat

SEQ ID NO: 178507 - DNA, 83 bp, Homo sapiens
attgtcctcaccacagtactcaggatcgtttctgcagaatcatcagtgacagcttctttctccttaattgactctgcatcatt

SEQ ID NO: 178508 - DNA, 85 bp, Homo sapiens
accacagtactcaggatcgtttctgcagaatcatcagtgacagcttctttctccttaattgactctgcatcatttgatgctttga

SEQ ID NO: 178509 - DNA, 86 bp, Homo sapiens
tactcaggatcgtttctgcagaatcatcagtgacagcttctttctccttaattgactctgcatcatttgatgctttgagcaccact

SEQ ID NO: 178510 - DNA, 84 bp, Homo sapiens
atcatcagtgacagcttctttctccttaattgactctgcatcatttgatgctttgagcaccacttctttcctggactgtatgaa

SEQ ID NO: 178511 - DNA, 81 bp, Homo sapiens
agcttctttctccttaattgactctgcatcatttgatgctttgagcaccacttctttcctggactgtatgaactgattctc

SEQ ID NO: 178512 - DNA, 80 bp, Homo sapiens
tttctccttaattgactctgcatcatttgatgctttgagcaccacttctttcctggactgtatgaactgattctcctggt

SEQ ID NO: 178513 - DNA, 76 bp, Homo sapiens
atttgatgctttgagcaccacttctttcctggactgtatgaactgattctcctggttccttctgcctttcaaacaa

SEQ ID NO: 178514 - DNA, 73 bp, Homo sapiens
accacttctttcctggactgtatgaactgattctcctggttccttctgcctttcaaacaattcctcctctgct

SEQ ID NO: 178515 - DNA, 76 bp, Homo sapiens
ttcctggactgtatgaactgattctcctggttccttctgcctttcaaacaattcctcctctgcttctcttcttatc

SEQ ID NO: 178516 - DNA, 76 bp, Homo sapiens
tatgaactgattctcctggttccttctgcctttcaaacaattcctcctctgcttctcttcttatctctaccttctc

SEQ ID NO: 178517 - DNA, 73 bp, Homo sapiens
ttccttctgcctttcaaacaattcctcctctgcttctcttcttatctctaccttctctccctcccctcaccaa

SEQ ID NO: 178518 - DNA, 71 bp, Homo sapiens
tttcaaacaattcctcctctgcttctcttcttatctctaccttctctccctcccctcaccaacccccgcac

SEQ ID NO: 178519 - DNA, 70 bp, Homo sapiens
attcctcctctgcttctcttcttatctctaccttctctccctcccctcaccaacccccgcactccccgcc

SEQ ID NO: 178520 - DNA, 70 bp, Homo sapiens
ttctcttcttatctctaccttctctccctcccctcaccaacccccgcactccccgccccattttgctatg

SEQ ID NO: 178521 - DNA, 70 bp, Homo sapiens
ttatctctaccttctctccctcccctcaccaacccccgcactccccgccccattttgctatggggcattc

SEQ ID NO: 178522 - DNA, 70 bp, Homo sapiens
tctccctcccctcaccaacccccgcactccccgccccattttgctatggggcattccccgtggtcatctg

SEQ ID NO: 178523 - DNA, 73 bp, Homo sapiens
ctcaccaacccccgcactccccgccccattttgctatggggcattccccgtggtcatctgttcatcacaatct

SEQ ID NO: 178524 - DNA, 73 bp, Homo sapiens
cccgcactccccgccccattttgctatggggcattccccgtggtcatctgttcatcacaatcttcttctccct

SEQ ID NO: 178525 - DNA, 72 bp, Homo sapiens
actccccgccccattttgctatggggcattccccgtggtcatctgttcatcacaatcttcttctcccttccc

SEQ ID NO: 178526 - DNA, 74 bp, Homo sapiens
attttgctatggggcattccccgtggtcatctgttcatcacaatcttcttctcccttccccctggctcttccat

SEQ ID NO: 178527 - DNA, 76 bp, Homo sapiens
gcattccccgtggtcatctgttcatcacaatcttcttctcccttccccctggctcttccattgtggtctgaaaatc

SEQ ID NO: 178528 - DNA, 77 bp, Homo sapiens
cgtggtcatctgttcatcacaatcttcttctcccttccccctggctcttccattgtggtctgaaaatccatgccaaa

SEQ ID NO: 178529 - DNA, 75 bp, Homo sapiens
atctgttcatcacaatcttcttctcccttccccctggctcttccattgtggtctgaaaatccatgccaaacccga

SEQ ID NO: 178530 - DNA, 71 bp, Homo sapiens
aatcttcttctcccttccccctggctcttccattgtggtctgaaaatccatgccaaacccgagtcttaaga

SEQ ID NO: 178531 - DNA, 71 bp, Homo sapiens
ccttccccctggctcttccattgtggtctgaaaatccatgccaaacccgagtcttaagactgcatttattt

SEQ ID NO: 178532 - DNA, 73 bp, Homo sapiens
tggctcttccattgtggtctgaaaatccatgccaaacccgagtcttaagactgcatttattttgccccttttc

SEQ ID NO: 178533 - DNA, 71 bp, Homo sapiens
ttgtggtctgaaaatccatgccaaacccgagtcttaagactgcatttattttgccccttttcctactcaaa

SEQ ID NO: 178534 - DNA, 71 bp, Homo sapiens
tgcatttattttgccccttttcctactcaaacccttgggcaacttcccactgactataggataaagatgaa

SEQ ID NO: 178535 - DNA, 69 bp, Homo sapiens
ttattttgccccttttcctactcaaacccttgggcaacttcccactgactataggataaagatgaaata

SEQ ID NO: 178536 - DNA, 68 bp, Homo sapiens
ccttttcctactcaaacccttgggcaacttcccactgactataggataaagatgaaataaacttgaaa

SEQ ID NO: 178537 - DNA, 72 bp, Homo sapiens
aacttcccactgactataggataaagatgaaataaacttgaaactggaattcagggccctccttgagctggc

SEQ ID NO: 178538 - DNA, 72 bp, Homo sapiens
ctgactataggataaagatgaaataaacttgaaactggaattcagggccctccttgagctggccccaaagta

SEQ ID NO: 178539 - DNA, 70 bp, Homo sapiens
ataaagatgaaataaacttgaaactggaattcagggccctccttgagctggccccaaagtacctttctga

SEQ ID NO: 178540 - DNA, 70 bp, Homo sapiens
aaataaacttgaaactggaattcagggccctccttgagctggccccaaagtacctttctgactgtactca

SEQ ID NO: 178541 - DNA, 70 bp, Homo sapiens
acttgaaactggaattcagggccctccttgagctggccccaaagtacctttctgactgtactcagttccc

SEQ ID NO: 178542 - DNA, 72 bp, Homo sapiens
aattcagggccctccttgagctggccccaaagtacctttctgactgtactcagttccccagcacattccttc

SEQ ID NO: 178543 - DNA, 73 bp, Homo sapiens
tccttgagctggccccaaagtacctttctgactgtactcagttccccagcacattccttctggtttggtcagt

SEQ ID NO: 178544 - DNA, 73 bp, Homo sapiens
tggccccaaagtacctttctgactgtactcagttccccagcacattccttctggtttggtcagtttgtctgct

SEQ ID NO: 178545 - DNA, 74 bp, Homo sapiens
aaagtacctttctgactgtactcagttccccagcacattccttctggtttggtcagtttgtctgcttgcatccc

SEQ ID NO: 178546 - DNA, 78 bp, Homo sapiens
tctgactgtactcagttccccagcacattccttctggtttggtcagtttgtctgcttgcatccctccctcacttcctc

SEQ ID NO: 178547 - DNA, 75 bp, Homo sapiens
ttccccagcacattccttctggtttggtcagtttgtctgcttgcatccctccctcacttcctccaggttcacttg

SEQ ID NO: 178548 - DNA, 76 bp, Homo sapiens
acattccttctggtttggtcagtttgtctgcttgcatccctccctcacttcctccaggttcacttggcaccctgca

SEQ ID NO: 178549 - DNA, 75 bp, Homo sapiens
cttctggtttggtcagtttgtctgcttgcatccctccctcacttcctccaggttcacttggcaccctgcacccac

SEQ ID NO: 178550 - DNA, 76 bp, Homo sapiens
agtttgtctgcttgcatccctccctcacttcctccaggttcacttggcaccctgcacccaccttctgagcctgtcc

SEQ ID NO: 178551 - DNA, 74 bp, Homo sapiens
ttgcatccctccctcacttcctccaggttcacttggcaccctgcacccaccttctgagcctgtccttctttaaa

SEQ ID NO: 178552 - DNA, 73 bp, Homo sapiens
ctccctcacttcctccaggttcacttggcaccctgcacccaccttctgagcctgtccttctttaaaagatgaa

SEQ ID NO: 178553 - DNA, 75 bp, Homo sapiens
ttcctccaggttcacttggcaccctgcacccaccttctgagcctgtccttctttaaaagatgaatgcaaggctgt

SEQ ID NO: 178554 - DNA, 78 bp, Homo sapiens
accctgcacccaccttctgagcctgtccttctttaaaagatgaatgcaaggctgtttctgtgtgcactgcacctttgc

SEQ ID NO: 178555 - DNA, 78 bp, Homo sapiens
accttctgagcctgtccttctttaaaagatgaatgcaaggctgtttctgtgtgcactgcacctttgcctgagggtcat

SEQ ID NO: 178556 - DNA, 81 bp, Homo sapiens
tgtccttctttaaaagatgaatgcaaggctgtttctgtgtgcactgcacctttgcctgagggtcattcaggcccaccatga

SEQ ID NO: 178557 - DNA, 82 bp, Homo sapiens
ttctttaaaagatgaatgcaaggctgtttctgtgtgcactgcacctttgcctgagggtcattcaggcccaccatgatcgctc

SEQ ID NO: 178558 - DNA, 83 bp, Homo sapiens
atgaatgcaaggctgtttctgtgtgcactgcacctttgcctgagggtcattcaggcccaccatgatcgctccctctctggaaa

SEQ ID NO: 178559 - DNA, 82 bp, Homo sapiens
tgtttctgtgtgcactgcacctttgcctgagggtcattcaggcccaccatgatcgctccctctctggaaatcctgcagccct

SEQ ID NO: 178560 - DNA, 84 bp, Homo sapiens
tgcactgcacctttgcctgagggtcattcaggcccaccatgatcgctccctctctggaaatcctgcagcccttggatttcatca

SEQ ID NO: 178561 - DNA, 81 bp, Homo sapiens
tttgcctgagggtcattcaggcccaccatgatcgctccctctctggaaatcctgcagcccttggatttcatcactacacaa

SEQ ID NO: 178562 - DNA, 80 bp, Homo sapiens
agggtcattcaggcccaccatgatcgctccctctctggaaatcctgcagcccttggatttcatcactacacaaaccatca

SEQ ID NO: 178563 - DNA, 77 bp, Homo sapiens
atcgctccctctctggaaatcctgcagcccttggatttcatcactacacaaaccatcaagcagaaggaaaccagcct

SEQ ID NO: 178564 - DNA, 78 bp, Homo sapiens
tctctggaaatcctgcagcccttggatttcatcactacacaaaccatcaagcagaaggaaaccagcctttattaatca

SEQ ID NO: 178565 - DNA, 76 bp, Homo sapiens
aaatcctgcagcccttggatttcatcactacacaaaccatcaagcagaaggaaaccagcctttattaatcacctgc

SEQ ID NO: 178566 - DNA, 81 bp, Homo sapiens
tttcatcactacacaaaccatcaagcagaaggaaaccagcctttattaatcacctgctgtgtgccagaagctcaatgcacg

SEQ ID NO: 178567 - DNA, 80 bp, Homo sapiens
acaaaccatcaagcagaaggaaaccagcctttattaatcacctgctgtgtgccagaagctcaatgcacgtgagctaacca

SEQ ID NO: 178568 - DNA, 79 bp, Homo sapiens
cagaaggaaaccagcctttattaatcacctgctgtgtgccagaagctcaatgcacgtgagctaaccacttcttacaaca

SEQ ID NO: 178569 - DNA, 79 bp, Homo sapiens
accagcctttattaatcacctgctgtgtgccagaagctcaatgcacgtgagctaaccacttcttacaacagtgctttta

SEQ ID NO: 178570 - DNA, 84 bp, Homo sapiens
tgctgtgtgccagaagctcaatgcacgtgagctaaccacttcttacaacagtgcttttagatgtggctgtccccatttcactga

SEQ ID NO: 178571 - DNA, 79 bp, Homo sapiens
agaagctcaatgcacgtgagctaaccacttcttacaacagtgcttttagatgtggctgtccccatttcactgataggaa

SEQ ID NO: 178572 - DNA, 77 bp, Homo sapiens
ttcttacaacagtgcttttagatgtggctgtccccatttcactgataggaaaatcaggtccaagaggagatgtatac

SEQ ID NO: 178573 - DNA, 78 bp, Homo sapiens
acagtgcttttagatgtggctgtccccatttcactgataggaaaatcaggtccaagaggagatgtatactgcagaagt

SEQ ID NO: 178574 - DNA, 82 bp, Homo sapiens
ttagatgtggctgtccccatttcactgataggaaaatcaggtccaagaggagatgtatactgcagaagttgcacagctacta

SEQ ID NO: 178575 - DNA, 80 bp, Homo sapiens
cccatttcactgataggaaaatcaggtccaagaggagatgtatactgcagaagttgcacagctactaagtggcgtagcca

SEQ ID NO: 178576 - DNA, 79 bp, Homo sapiens
actgataggaaaatcaggtccaagaggagatgtatactgcagaagttgcacagctactaagtggcgtagccaggattta

SEQ ID NO: 178577 - DNA, 80 bp, Homo sapiens
aaaatcaggtccaagaggagatgtatactgcagaagttgcacagctactaagtggcgtagccaggatttagtccagctgc

SEQ ID NO: 178578 - DNA, 80 bp, Homo sapiens
tccaagaggagatgtatactgcagaagttgcacagctactaagtggcgtagccaggatttagtccagctgcgtttcccga

SEQ ID NO: 178579 - DNA, 81 bp, Homo sapiens
agatgtatactgcagaagttgcacagctactaagtggcgtagccaggatttagtccagctgcgtttcccgagctctgattg

SEQ ID NO: 178580 - DNA, 76 bp, Homo sapiens
aagttgcacagctactaagtggcgtagccaggatttagtccagctgcgtttcccgagctctgattggccttgttta

SEQ ID NO: 178581 - DNA, 72 bp, Homo sapiens
cagctgcgtttcccgagctctgattggccttgtttacagaacgtctcccaggtacgcctttttgggcaacat

SEQ ID NO: 178582 - DNA, 69 bp, Homo sapiens
cgtttcccgagctctgattggccttgtttacagaacgtctcccaggtacgcctttttgggcaacattta

SEQ ID NO: 178583 - DNA, 73 bp, Homo sapiens
agctctgattggccttgtttacagaacgtctcccaggtacgcctttttgggcaacatttatgcatggaaaaga

SEQ ID NO: 178584 - DNA, 71 bp, Homo sapiens
ttgtttacagaacgtctcccaggtacgcctttttgggcaacatttatgcatggaaaagaccccattataga

SEQ ID NO: 178585 - DNA, 69 bp, Homo sapiens
aacgtctcccaggtacgcctttttgggcaacatttatgcatggaaaagaccccattatagagagttatt

SEQ ID NO: 178586 - DNA, 73 bp, Homo sapiens
tcccaggtacgcctttttgggcaacatttatgcatggaaaagaccccattatagagagttatttgagcagtcc

SEQ ID NO: 178587 - DNA, 74 bp, Homo sapiens
ttttgggcaacatttatgcatggaaaagaccccattatagagagttatttgagcagtcccctttgtgacattta

SEQ ID NO: 178588 - DNA, 73 bp, Homo sapiens
aacatttatgcatggaaaagaccccattatagagagttatttgagcagtcccctttgtgacatttatgccccg

SEQ ID NO: 178589 - DNA, 73 bp, Homo sapiens
atggaaaagaccccattatagagagttatttgagcagtcccctttgtgacatttatgccccgggctgctttgc

SEQ ID NO: 178590 - DNA, 75 bp, Homo sapiens
ccattatagagagttatttgagcagtcccctttgtgacatttatgccccgggctgctttgccctgaaactgccca

SEQ ID NO: 178591 - DNA, 74 bp, Homo sapiens
tagagagttatttgagcagtcccctttgtgacatttatgccccgggctgctttgccctgaaactgcccacttta

SEQ ID NO: 178592 - DNA, 72 bp, Homo sapiens
atttgagcagtcccctttgtgacatttatgccccgggctgctttgccctgaaactgcccactttacccctga

SEQ ID NO: 178593 - DNA, 73 bp, Homo sapiens
tttgtgacatttatgccccgggctgctttgccctgaaactgcccactttacccctgagaagtcgtgagaacta

SEQ ID NO: 178594 - DNA, 71 bp, Homo sapiens
atttatgccccgggctgctttgccctgaaactgcccactttacccctgagaagtcgtgagaactataacaa

SEQ ID NO: 178595 - DNA, 74 bp, Homo sapiens
ggctgctttgccctgaaactgcccactttacccctgagaagtcgtgagaactataacaatgaccgcaaaagaca

SEQ ID NO: 178596 - DNA, 74 bp, Homo sapiens
tttgccctgaaactgcccactttacccctgagaagtcgtgagaactataacaatgaccgcaaaagacaagctga

SEQ ID NO: 178597 - DNA, 73 bp, Homo sapiens
aaactgcccactttacccctgagaagtcgtgagaactataacaatgaccgcaaaagacaagctgagaacacca

SEQ ID NO: 178598 - DNA, 73 bp, Homo sapiens
tttacccctgagaagtcgtgagaactataacaatgaccgcaaaagacaagctgagaacaccagtacttggagt

SEQ ID NO: 178599 - DNA, 77 bp, Homo sapiens
agaagtcgtgagaactataacaatgaccgcaaaagacaagctgagaacaccagtacttggagttggcatgttctgta

SEQ ID NO: 178600 - DNA, 78 bp, Homo sapiens
aactataacaatgaccgcaaaagacaagctgagaacaccagtacttggagttggcatgttctgtatccagaagctcaa

SEQ ID NO: 178601 - DNA, 77 bp, Homo sapiens
aaaagacaagctgagaacaccagtacttggagttggcatgttctgtatccagaagctcaaagcttgcaagaagggct

SEQ ID NO: 178602 - DNA, 81 bp, Homo sapiens
tacttggagttggcatgttctgtatccagaagctcaaagcttgcaagaagggcttcttctctctgtcatccccatagaatc

SEQ ID NO: 178603 - DNA, 81 bp, Homo sapiens
ttggcatgttctgtatccagaagctcaaagcttgcaagaagggcttcttctctctgtcatccccatagaatctactaaaga

SEQ ID NO: 178604 - DNA, 77 bp, Homo sapiens
gttctgtatccagaagctcaaagcttgcaagaagggcttcttctctctgtcatccccatagaatctactaaagaaaa

SEQ ID NO: 178605 - DNA, 74 bp, Homo sapiens
agaagctcaaagcttgcaagaagggcttcttctctctgtcatccccatagaatctactaaagaaaacctgggaa

SEQ ID NO: 178606 - DNA, 76 bp, Homo sapiens
tgcaagaagggcttcttctctctgtcatccccatagaatctactaaagaaaacctgggaacccatggagacatcta

SEQ ID NO: 178607 - DNA, 74 bp, Homo sapiens
gcttcttctctctgtcatccccatagaatctactaaagaaaacctgggaacccatggagacatctaaaattcac

SEQ ID NO: 178608 - DNA, 74 bp, Homo sapiens
ttctctctgtcatccccatagaatctactaaagaaaacctgggaacccatggagacatctaaaattcaccacca

SEQ ID NO: 178609 - DNA, 72 bp, Homo sapiens
ccatagaatctactaaagaaaacctgggaacccatggagacatctaaaattcaccaccactgtggattgtta

SEQ ID NO: 178610 - DNA, 70 bp, Homo sapiens
tactaaagaaaacctgggaacccatggagacatctaaaattcaccaccactgtggattgttacccataag

SEQ ID NO: 178611 - DNA, 69 bp, Homo sapiens
aaaacctgggaacccatggagacatctaaaattcaccaccactgtggattgttacccataaggacctgt

SEQ ID NO: 178612 - DNA, 72 bp, Homo sapiens
acccatggagacatctaaaattcaccaccactgtggattgttacccataaggacctgttgcctcctttagta

SEQ ID NO: 178613 - DNA, 72 bp, Homo sapiens
acatctaaaattcaccaccactgtggattgttacccataaggacctgttgcctcctttagtattgtcctgag

SEQ ID NO: 178614 - DNA, 71 bp, Homo sapiens
aaaattcaccaccactgtggattgttacccataaggacctgttgcctcctttagtattgtcctgaggacac

SEQ ID NO: 178615 - DNA, 74 bp, Homo sapiens
attgttacccataaggacctgttgcctcctttagtattgtcctgaggacactgtgtagggccattcccagcaca

SEQ ID NO: 178616 - DNA, 74 bp, Homo sapiens
ataaggacctgttgcctcctttagtattgtcctgaggacactgtgtagggccattcccagcacattctttctgt

SEQ ID NO: 178617 - DNA, 73 bp, Homo sapiens
ctcctttagtattgtcctgaggacactgtgtagggccattcccagcacattctttctgtttagggtcctgaaa

SEQ ID NO: 178618 - DNA, 75 bp, Homo sapiens
ttagtattgtcctgaggacactgtgtagggccattcccagcacattctttctgtttagggtcctgaaagacatat

SEQ ID NO: 178619 - DNA, 80 bp, Homo sapiens
ttcccagcacattctttctgtttagggtcctgaaagacatatttgtctcatcagaagatgaagaagccgtttgatgatga

SEQ ID NO: 178620 - DNA, 78 bp, Homo sapiens
attctttctgtttagggtcctgaaagacatatttgtctcatcagaagatgaagaagccgtttgatgatgatcttgtgg

SEQ ID NO: 178621 - DNA, 77 bp, Homo sapiens
aaagacatatttgtctcatcagaagatgaagaagccgtttgatgatgatcttgtgggtttacagggtccctctacaa

SEQ ID NO: 178622 - DNA, 77 bp, Homo sapiens
ttgtctcatcagaagatgaagaagccgtttgatgatgatcttgtgggtttacagggtccctctacaactgttcttta

SEQ ID NO: 178623 - DNA, 72 bp, Homo sapiens
agaagatgaagaagccgtttgatgatgatcttgtgggtttacagggtccctctacaactgttctttaagaaa

SEQ ID NO: 178624 - DNA, 72 bp, Homo sapiens
atgaagaagccgtttgatgatgatcttgtgggtttacagggtccctctacaactgttctttaagaaaatatc

SEQ ID NO: 178625 - DNA, 72 bp, Homo sapiens
tttgatgatgatcttgtgggtttacagggtccctctacaactgttctttaagaaaatatcttggaaagtatc

SEQ ID NO: 178626 - DNA, 69 bp, Homo sapiens
atcttgtgggtttacagggtccctctacaactgttctttaagaaaatatcttggaaagtatcctgggca

SEQ ID NO: 178627 - DNA, 71 bp, Homo sapiens
tttacagggtccctctacaactgttctttaagaaaatatcttggaaagtatcctgggcaagagcttcctga

SEQ ID NO: 178628 - DNA, 72 bp, Homo sapiens
tctacaactgttctttaagaaaatatcttggaaagtatcctgggcaagagcttcctgagagaccctttcgga

SEQ ID NO: 178629 - DNA, 74 bp, Homo sapiens
ttctttaagaaaatatcttggaaagtatcctgggcaagagcttcctgagagaccctttcggagtatgcattgaa

SEQ ID NO: 178630 - DNA, 75 bp, Homo sapiens
aaatatcttggaaagtatcctgggcaagagcttcctgagagaccctttcggagtatgcattgaattcttgttcaa

SEQ ID NO: 178631 - DNA, 76 bp, Homo sapiens
ttggaaagtatcctgggcaagagcttcctgagagaccctttcggagtatgcattgaattcttgttcaatgacttta

SEQ ID NO: 178632 - DNA, 81 bp, Homo sapiens
tgggcaagagcttcctgagagaccctttcggagtatgcattgaattcttgttcaatgactttagacctgcaggatgatatg

SEQ ID NO: 178633 - DNA, 78 bp, Homo sapiens
aagagcttcctgagagaccctttcggagtatgcattgaattcttgttcaatgactttagacctgcaggatgatatggg

SEQ ID NO: 178634 - DNA, 79 bp, Homo sapiens
agagaccctttcggagtatgcattgaattcttgttcaatgactttagacctgcaggatgatatggggcctggtctgata

SEQ ID NO: 178635 - DNA, 80 bp, Homo sapiens
ttgaattcttgttcaatgactttagacctgcaggatgatatggggcctggtctgatactctgtatcggatttaattgcta

SEQ ID NO: 178636 - DNA, 77 bp, Homo sapiens
actttagacctgcaggatgatatggggcctggtctgatactctgtatcggatttaattgctatccagtttatattaa

SEQ ID NO: 178637 - DNA, 76 bp, Homo sapiens
gatatggggcctggtctgatactctgtatcggatttaattgctatccagtttatattaagtataatttaattcaga

SEQ ID NO: 178638 - DNA, 75 bp, Homo sapiens
gtctgatactctgtatcggatttaattgctatccagtttatattaagtataatttaattcagattgggtcaggcc

SEQ ID NO: 178639 - DNA, 74 bp, Homo sapiens
actctgtatcggatttaattgctatccagtttatattaagtataatttaattcagattgggtcaggccctgatg

SEQ ID NO: 178640 - DNA, 77 bp, Homo sapiens
ttaattgctatccagtttatattaagtataatttaattcagattgggtcaggccctgatgttggatgatgctagtgt

SEQ ID NO: 178641 - DNA, 77 bp, Homo sapiens
tatccagtttatattaagtataatttaattcagattgggtcaggccctgatgttggatgatgctagtgtttttgcca

SEQ ID NO: 178642 - DNA, 74 bp, Homo sapiens
ttaagtataatttaattcagattgggtcaggccctgatgttggatgatgctagtgtttttgccaaataaaagac

SEQ ID NO: 178643 - DNA, 74 bp, Homo sapiens
taatttaattcagattgggtcaggccctgatgttggatgatgctagtgtttttgccaaataaaagaccaaagaa

SEQ ID NO: 178644 - DNA, 74 bp, Homo sapiens
agattgggtcaggccctgatgttggatgatgctagtgtttttgccaaataaaagaccaaagaagatccatgttt

SEQ ID NO: 178645 - DNA, 75 bp, Homo sapiens
aggccctgatgttggatgatgctagtgtttttgccaaataaaagaccaaagaagatccatgttttgccagcaggg

SEQ ID NO: 178646 - DNA, 77 bp, Homo sapiens
atgctagtgtttttgccaaataaaagaccaaagaagatccatgttttgccagcagggtggaagcccagagcagatgc

SEQ ID NO: 178647 - DNA, 75 bp, Homo sapiens
ttttgccaaataaaagaccaaagaagatccatgttttgccagcagggtggaagcccagagcagatgccagtttta

SEQ ID NO: 178648 - DNA, 74 bp, Homo sapiens
ataaaagaccaaagaagatccatgttttgccagcagggtggaagcccagagcagatgccagttttacctgtact

SEQ ID NO: 178649 - DNA, 75 bp, Homo sapiens
agaagatccatgttttgccagcagggtggaagcccagagcagatgccagttttacctgtacttggcacccctaaa

SEQ ID NO: 178650 - DNA, 76 bp, Homo sapiens
atgttttgccagcagggtggaagcccagagcagatgccagttttacctgtacttggcacccctaaagtgtcagtca

SEQ ID NO: 178651 - DNA, 78 bp, Homo sapiens
gggtggaagcccagagcagatgccagttttacctgtacttggcacccctaaagtgtcagtcacagatggctatgcaaa

SEQ ID NO: 178652 - DNA, 78 bp, Homo sapiens
ccagagcagatgccagttttacctgtacttggcacccctaaagtgtcagtcacagatggctatgcaaagacaaacttg

SEQ ID NO: 178653 - DNA, 73 bp, Homo sapiens
cagtcacagatggctatgcaaagacaaacttgttttttttactggatagtttatttacaagtcaagaagaatc

SEQ ID NO: 178654 - DNA, 71 bp, Homo sapiens
tggctatgcaaagacaaacttgttttttttactggatagtttatttacaagtcaagaagaatcttctacag

SEQ ID NO: 178655 - DNA, 69 bp, Homo sapiens
gacaaacttgttttttttactggatagtttatttacaagtcaagaagaatcttctacagtgaaatattg

SEQ ID NO: 178656 - DNA, 70 bp, Homo sapiens
ttttttactggatagtttatttacaagtcaagaagaatcttctacagtgaaatattgttcggtccgccaa

SEQ ID NO: 178657 - DNA, 73 bp, Homo sapiens
ggatagtttatttacaagtcaagaagaatcttctacagtgaaatattgttcggtccgccaagatattctctta

SEQ ID NO: 178658 - DNA, 76 bp, Homo sapiens
ttacaagtcaagaagaatcttctacagtgaaatattgttcggtccgccaagatattctcttatggtaatatgagaa

SEQ ID NO: 178659 - DNA, 76 bp, Homo sapiens
agaagaatcttctacagtgaaatattgttcggtccgccaagatattctcttatggtaatatgagaatatggtaaca

SEQ ID NO: 178660 - DNA, 76 bp, Homo sapiens
cttctacagtgaaatattgttcggtccgccaagatattctcttatggtaatatgagaatatggtaacatattttca

SEQ ID NO: 178661 - DNA, 73 bp, Homo sapiens
gtgaaatattgttcggtccgccaagatattctcttatggtaatatgagaatatggtaacatattttcaaaaac

SEQ ID NO: 178662 - DNA, 75 bp, Homo sapiens
gccaagatattctcttatggtaatatgagaatatggtaacatattttcaaaaactagagactatgttattttgga

SEQ ID NO: 178663 - DNA, 72 bp, Homo sapiens
cttatggtaatatgagaatatggtaacatattttcaaaaactagagactatgttattttggaaccattagga

SEQ ID NO: 178664 - DNA, 69 bp, Homo sapiens
tggtaacatattttcaaaaactagagactatgttattttggaaccattaggagaaaaccaagaaacaca

SEQ ID NO: 178665 - DNA, 71 bp, Homo sapiens
ttcaaaaactagagactatgttattttggaaccattaggagaaaaccaagaaacacattgttgacattaga

SEQ ID NO: 178666 - DNA, 72 bp, Homo sapiens
ctagagactatgttattttggaaccattaggagaaaaccaagaaacacattgttgacattagaaacagagac

SEQ ID NO: 178667 - DNA, 72 bp, Homo sapiens
gttattttggaaccattaggagaaaaccaagaaacacattgttgacattagaaacagagactcagtcattgt

SEQ ID NO: 178668 - DNA, 75 bp, Homo sapiens
ttggaaccattaggagaaaaccaagaaacacattgttgacattagaaacagagactcagtcattgttttatgcta

SEQ ID NO: 178669 - DNA, 76 bp, Homo sapiens
agaaaaccaagaaacacattgttgacattagaaacagagactcagtcattgttttatgctactttgtttcagagca

SEQ ID NO: 178670 - DNA, 77 bp, Homo sapiens
cattgttgacattagaaacagagactcagtcattgttttatgctactttgtttcagagcagtttaaatcaatggtaa

SEQ ID NO: 178671 - DNA, 78 bp, Homo sapiens
aaacagagactcagtcattgttttatgctactttgtttcagagcagtttaaatcaatggtaaaatgtctcaacatgca

SEQ ID NO: 178672 - DNA, 79 bp, Homo sapiens
ttttatgctactttgtttcagagcagtttaaatcaatggtaaaatgtctcaacatgcagagctccttgagagactgtaa

SEQ ID NO: 178673 - DNA, 81 bp, Homo sapiens
tactttgtttcagagcagtttaaatcaatggtaaaatgtctcaacatgcagagctccttgagagactgtaaatgagagtga

SEQ ID NO: 178674 - DNA, 81 bp, Homo sapiens
agagcagtttaaatcaatggtaaaatgtctcaacatgcagagctccttgagagactgtaaatgagagtgattacagcttta

SEQ ID NO: 178675 - DNA, 80 bp, Homo sapiens
tttaaatcaatggtaaaatgtctcaacatgcagagctccttgagagactgtaaatgagagtgattacagctttaatggtg

SEQ ID NO: 178676 - DNA, 82 bp, Homo sapiens
taaaatgtctcaacatgcagagctccttgagagactgtaaatgagagtgattacagctttaatggtgtcattcttgggatct

SEQ ID NO: 178677 - DNA, 78 bp, Homo sapiens
aacatgcagagctccttgagagactgtaaatgagagtgattacagctttaatggtgtcattcttgggatcttttaaaa

SEQ ID NO: 178678 - DNA, 76 bp, Homo sapiens
agagctccttgagagactgtaaatgagagtgattacagctttaatggtgtcattcttgggatcttttaaaaatgaa

SEQ ID NO: 178679 - DNA, 77 bp, Homo sapiens
tgagagtgattacagctttaatggtgtcattcttgggatcttttaaaaatgaaaaggatttgattatctcctgctga

SEQ ID NO: 178680 - DNA, 74 bp, Homo sapiens
gtgattacagctttaatggtgtcattcttgggatcttttaaaaatgaaaaggatttgattatctcctgctgacc

SEQ ID NO: 178681 - DNA, 76 bp, Homo sapiens
ttaatggtgtcattcttgggatcttttaaaaatgaaaaggatttgattatctcctgctgacctgctcagtgtctta

SEQ ID NO: 178682 - DNA, 80 bp, Homo sapiens
ttttaaaaatgaaaaggatttgattatctcctgctgacctgctcagtgtcttactagctgaagtgtgattgagatgtgga

SEQ ID NO: 178683 - DNA, 80 bp, Homo sapiens
aaaatgaaaaggatttgattatctcctgctgacctgctcagtgtcttactagctgaagtgtgattgagatgtggaaggaa

SEQ ID NO: 178684 - DNA, 81 bp, Homo sapiens
atttgattatctcctgctgacctgctcagtgtcttactagctgaagtgtgattgagatgtggaaggaagaggttgaaggaa

SEQ ID NO: 178685 - DNA, 81 bp, Homo sapiens
atctcctgctgacctgctcagtgtcttactagctgaagtgtgattgagatgtggaaggaagaggttgaaggaacagagaag

SEQ ID NO: 178686 - DNA, 78 bp, Homo sapiens
tcttactagctgaagtgtgattgagatgtggaaggaagaggttgaaggaacagagaagggcagcagccttttccgaga

SEQ ID NO: 178687 - DNA, 76 bp, Homo sapiens
aagtgtgattgagatgtggaaggaagaggttgaaggaacagagaagggcagcagccttttccgagagtctacaaca

SEQ ID NO: 178688 - DNA, 76 bp, Homo sapiens
attgagatgtggaaggaagaggttgaaggaacagagaagggcagcagccttttccgagagtctacaacataccaca

SEQ ID NO: 178689 - DNA, 73 bp, Homo sapiens
aaggaagaggttgaaggaacagagaagggcagcagccttttccgagagtctacaacataccacactagtgccc

SEQ ID NO: 178690 - DNA, 81 bp, Homo sapiens
tgaaggaacagagaagggcagcagccttttccgagagtctacaacataccacactagtgccctgtgtgcatcatgttatct

SEQ ID NO: 178691 - DNA, 80 bp, Homo sapiens
aacagagaagggcagcagccttttccgagagtctacaacataccacactagtgccctgtgtgcatcatgttatcttccca

SEQ ID NO: 178692 - DNA, 84 bp, Homo sapiens
agcagccttttccgagagtctacaacataccacactagtgccctgtgtgcatcatgttatcttcccagcatccctgcagagtca

SEQ ID NO: 178693 - DNA, 82 bp, Homo sapiens
cttttccgagagtctacaacataccacactagtgccctgtgtgcatcatgttatcttcccagcatccctgcagagtcacaat

SEQ ID NO: 178694 - DNA, 85 bp, Homo sapiens
agtctacaacataccacactagtgccctgtgtgcatcatgttatcttcccagcatccctgcagagtcacaattgctgtcctgttc

SEQ ID NO: 178695 - DNA, 85 bp, Homo sapiens
ataccacactagtgccctgtgtgcatcatgttatcttcccagcatccctgcagagtcacaattgctgtcctgttctgtgtgtggg

SEQ ID NO: 178696 - DNA, 82 bp, Homo sapiens
cctgtgtgcatcatgttatcttcccagcatccctgcagagtcacaattgctgtcctgttctgtgtgtggggaaactgggact

SEQ ID NO: 178697 - DNA, 78 bp, Homo sapiens
tatcttcccagcatccctgcagagtcacaattgctgtcctgttctgtgtgtggggaaactgggacttaggatagttaa

SEQ ID NO: 178698 - DNA, 75 bp, Homo sapiens
atccctgcagagtcacaattgctgtcctgttctgtgtgtggggaaactgggacttaggatagttaagtccttgcc

SEQ ID NO: 178699 - DNA, 73 bp, Homo sapiens
agtcacaattgctgtcctgttctgtgtgtggggaaactgggacttaggatagttaagtccttgcccagggtga

SEQ ID NO: 178700 - DNA, 72 bp, Homo sapiens
ttctgtgtgtggggaaactgggacttaggatagttaagtccttgcccagggtgacacagctattaggtaatc

SEQ ID NO: 178701 - DNA, 70 bp, Homo sapiens
gaaactgggacttaggatagttaagtccttgcccagggtgacacagctattaggtaatctcacccgggtc

SEQ ID NO: 178702 - DNA, 72 bp, Homo sapiens
cttaggatagttaagtccttgcccagggtgacacagctattaggtaatctcacccgggtctgactgcaaact

SEQ ID NO: 178703 - DNA, 74 bp, Homo sapiens
atagttaagtccttgcccagggtgacacagctattaggtaatctcacccgggtctgactgcaaacttcactgct

SEQ ID NO: 178704 - DNA, 78 bp, Homo sapiens
acacagctattaggtaatctcacccgggtctgactgcaaacttcactgcttgttccactatgatatgccataaagatt

SEQ ID NO: 178705 - DNA, 76 bp, Homo sapiens
tattaggtaatctcacccgggtctgactgcaaacttcactgcttgttccactatgatatgccataaagattttaaa

SEQ ID NO: 178706 - DNA, 76 bp, Homo sapiens
aatctcacccgggtctgactgcaaacttcactgcttgttccactatgatatgccataaagattttaaagtcaaaga

SEQ ID NO: 178707 - DNA, 77 bp, Homo sapiens
tgactgcaaacttcactgcttgttccactatgatatgccataaagattttaaagtcaaagagttcttaaagagagaa

SEQ ID NO: 178708 - DNA, 74 bp, Homo sapiens
gcaaacttcactgcttgttccactatgatatgccataaagattttaaagtcaaagagttcttaaagagagaaaa

SEQ ID NO: 178709 - DNA, 70 bp, Homo sapiens
cactatgatatgccataaagattttaaagtcaaagagttcttaaagagagaaaaagattaaaaagcccaa

SEQ ID NO: 178710 - DNA, 67 bp, Homo sapiens
tgccataaagattttaaagtcaaagagttcttaaagagagaaaaagattaaaaagcccaaagacttc

SEQ ID NO: 178711 - DNA, 69 bp, Homo sapiens
ttaaagtcaaagagttcttaaagagagaaaaagattaaaaagcccaaagacttctaaatgatctctgac

SEQ ID NO: 178712 - DNA, 70 bp, Homo sapiens
aagagagaaaaagattaaaaagcccaaagacttctaaatgatctctgacttcccaccactgtcccaataa

SEQ ID NO: 178713 - DNA, 72 bp, Homo sapiens
aaaagattaaaaagcccaaagacttctaaatgatctctgacttcccaccactgtcccaataacatcatttca

SEQ ID NO: 178714 - DNA, 78 bp, Homo sapiens
ttctaaatgatctctgacttcccaccactgtcccaataacatcatttcacctcacatttcatatggttgcaccaagtt

SEQ ID NO: 178715 - DNA, 78 bp, Homo sapiens
atctctgacttcccaccactgtcccaataacatcatttcacctcacatttcatatggttgcaccaagtttctccaaga

SEQ ID NO: 178716 - DNA, 78 bp, Homo sapiens
tcccaccactgtcccaataacatcatttcacctcacatttcatatggttgcaccaagtttctccaagaggagattcaa

SEQ ID NO: 178717 - DNA, 76 bp, Homo sapiens
tcatttcacctcacatttcatatggttgcaccaagtttctccaagaggagattcaaccccagtcttgcccttgaat

SEQ ID NO: 178718 - DNA, 73 bp, Homo sapiens
cctcacatttcatatggttgcaccaagtttctccaagaggagattcaaccccagtcttgcccttgaatttgtt

SEQ ID NO: 178719 - DNA, 73 bp, Homo sapiens
tttcatatggttgcaccaagtttctccaagaggagattcaaccccagtcttgcccttgaatttgtttgctatt

SEQ ID NO: 178720 - DNA, 71 bp, Homo sapiens
accaagtttctccaagaggagattcaaccccagtcttgcccttgaatttgtttgctatttgaattttgcat

SEQ ID NO: 178721 - DNA, 76 bp, Homo sapiens
tccaagaggagattcaaccccagtcttgcccttgaatttgtttgctatttgaattttgcattgctagcactaacaa

SEQ ID NO: 178722 - DNA, 74 bp, Homo sapiens
attcaaccccagtcttgcccttgaatttgtttgctatttgaattttgcattgctagcactaacaaagtgcaaaa

SEQ ID NO: 178723 - DNA, 76 bp, Homo sapiens
agtcttgcccttgaatttgtttgctatttgaattttgcattgctagcactaacaaagtgcaaaaatctgttcttga

SEQ ID NO: 178724 - DNA, 75 bp, Homo sapiens
gcccttgaatttgtttgctatttgaattttgcattgctagcactaacaaagtgcaaaaatctgttcttgaaatac

SEQ ID NO: 178725 - DNA, 74 bp, Homo sapiens
ttgctatttgaattttgcattgctagcactaacaaagtgcaaaaatctgttcttgaaataccaagtaaacggaa

SEQ ID NO: 178726 - DNA, 74 bp, Homo sapiens
aattttgcattgctagcactaacaaagtgcaaaaatctgttcttgaaataccaagtaaacggaatggctgagaa

SEQ ID NO: 178727 - DNA, 73 bp, Homo sapiens
attgctagcactaacaaagtgcaaaaatctgttcttgaaataccaagtaaacggaatggctgagaagcctgtt

SEQ ID NO: 178728 - DNA, 77 bp, Homo sapiens
tgttcttgaaataccaagtaaacggaatggctgagaagcctgttttcatctccattgtcaaatgtactgccattgaa

SEQ ID NO: 178729 - DNA, 76 bp, Homo sapiens
aaataccaagtaaacggaatggctgagaagcctgttttcatctccattgtcaaatgtactgccattgaaggaatca

SEQ ID NO: 178730 - DNA, 74 bp, Homo sapiens
attgtcaaatgtactgccattgaaggaatcagacgtaactttgggctagctcgataaggggaaggtcaaactgc

SEQ ID NO: 178731 - DNA, 74 bp, Homo sapiens
aaatgtactgccattgaaggaatcagacgtaactttgggctagctcgataaggggaaggtcaaactgctcagaa

SEQ ID NO: 178732 - DNA, 71 bp, Homo sapiens
taactttgggctagctcgataaggggaaggtcaaactgctcagaaggccattttgtgggactccgtcaagg

SEQ ID NO: 178733 - DNA, 74 bp, Homo sapiens
tagctcgataaggggaaggtcaaactgctcagaaggccattttgtgggactccgtcaagggatacattatcctg

SEQ ID NO: 178734 - DNA, 73 bp, Homo sapiens
gaaggtcaaactgctcagaaggccattttgtgggactccgtcaagggatacattatcctgtggtaccgagtta

SEQ ID NO: 178735 - DNA, 75 bp, Homo sapiens
actgctcagaaggccattttgtgggactccgtcaagggatacattatcctgtggtaccgagttatgagggtgata

SEQ ID NO: 178736 - DNA, 71 bp, Homo sapiens
aaggccattttgtgggactccgtcaagggatacattatcctgtggtaccgagttatgagggtgatacaaag

SEQ ID NO: 178737 - DNA, 71 bp, Homo sapiens
tccgtcaagggatacattatcctgtggtaccgagttatgagggtgatacaaagggatttcttaaccaccca

SEQ ID NO: 178738 - DNA, 72 bp, Homo sapiens
atacattatcctgtggtaccgagttatgagggtgatacaaagggatttcttaaccacccagctgccagtacc

SEQ ID NO: 178739 - DNA, 75 bp, Homo sapiens
tgtggtaccgagttatgagggtgatacaaagggatttcttaaccacccagctgccagtacctgacatacctgaca

SEQ ID NO: 178740 - DNA, 75 bp, Homo sapiens
ttatgagggtgatacaaagggatttcttaaccacccagctgccagtacctgacatacctgacatgtgggtcctta

SEQ ID NO: 178741 - DNA, 74 bp, Homo sapiens
agggtgatacaaagggatttcttaaccacccagctgccagtacctgacatacctgacatgtgggtccttagcca

SEQ ID NO: 178742 - DNA, 74 bp, Homo sapiens
aagggatttcttaaccacccagctgccagtacctgacatacctgacatgtgggtccttagccaggctctcaaat

SEQ ID NO: 178743 - DNA, 78 bp, Homo sapiens
ttaaccacccagctgccagtacctgacatacctgacatgtgggtccttagccaggctctcaaattgtcagcagtggtt

SEQ ID NO: 178744 - DNA, 81 bp, Homo sapiens
acatgtgggtccttagccaggctctcaaattgtcagcagtggttttatagggcagtgaccatgatgtgatgggccaagtca

SEQ ID NO: 178745 - DNA, 79 bp, Homo sapiens
aaattgtcagcagtggttttatagggcagtgaccatgatgtgatgggccaagtcatattgtattactggtgcctggaaa

SEQ ID NO: 178746 - DNA, 78 bp, Homo sapiens
agtggttttatagggcagtgaccatgatgtgatgggccaagtcatattgtattactggtgcctggaaatttgaggtga

SEQ ID NO: 178747 - DNA, 80 bp, Homo sapiens
tatagggcagtgaccatgatgtgatgggccaagtcatattgtattactggtgcctggaaatttgaggtgactgggtccca

SEQ ID NO: 178748 - DNA, 77 bp, Homo sapiens
accatgatgtgatgggccaagtcatattgtattactggtgcctggaaatttgaggtgactgggtcccaaagtgaggc

SEQ ID NO: 178749 - DNA, 74 bp, Homo sapiens
atgggccaagtcatattgtattactggtgcctggaaatttgaggtgactgggtcccaaagtgaggccactcact

SEQ ID NO: 178750 - DNA, 74 bp, Homo sapiens
atattgtattactggtgcctggaaatttgaggtgactgggtcccaaagtgaggccactcacttcctggattgtg

SEQ ID NO: 178751 - DNA, 74 bp, Homo sapiens
tattactggtgcctggaaatttgaggtgactgggtcccaaagtgaggccactcacttcctggattgtggattaa

SEQ ID NO: 178752 - DNA, 78 bp, Homo sapiens
tggaaatttgaggtgactgggtcccaaagtgaggccactcacttcctggattgtggattaagagcattgcatctggac

SEQ ID NO: 178753 - DNA, 78 bp, Homo sapiens
ttgaggtgactgggtcccaaagtgaggccactcacttcctggattgtggattaagagcattgcatctggacgtattaa

SEQ ID NO: 178754 - DNA, 77 bp, Homo sapiens
ctgggtcccaaagtgaggccactcacttcctggattgtggattaagagcattgcatctggacgtattaaccatggtg

SEQ ID NO: 178755 - DNA, 77 bp, Homo sapiens
cttcctggattgtggattaagagcattgcatctggacgtattaaccatggtggctctcctattagagttggttggta

SEQ ID NO: 178756 - DNA, 80 bp, Homo sapiens
attgtggattaagagcattgcatctggacgtattaaccatggtggctctcctattagagttggttggtagcagcatgagt

SEQ ID NO: 178757 - DNA, 81 bp, Homo sapiens
attaagagcattgcatctggacgtattaaccatggtggctctcctattagagttggttggtagcagcatgagttgagagac

SEQ ID NO: 178758 - DNA, 77 bp, Homo sapiens
tattaaccatggtggctctcctattagagttggttggtagcagcatgagttgagagacctggggaggtgacaggtta

SEQ ID NO: 178759 - DNA, 75 bp, Homo sapiens
atggtggctctcctattagagttggttggtagcagcatgagttgagagacctggggaggtgacaggttaatgggg

SEQ ID NO: 178760 - DNA, 73 bp, Homo sapiens
tattagagttggttggtagcagcatgagttgagagacctggggaggtgacaggttaatgggggggccacctct

SEQ ID NO: 178761 - DNA, 72 bp, Homo sapiens
agttggttggtagcagcatgagttgagagacctggggaggtgacaggttaatgggggggccacctcttccaa

SEQ ID NO: 178762 - DNA, 70 bp, Homo sapiens
agagacctggggaggtgacaggttaatgggggggccacctcttccaacagctcgactttgaaaatgatgt

SEQ ID NO: 178763 - DNA, 71 bp, Homo sapiens
ggaggtgacaggttaatgggggggccacctcttccaacagctcgactttgaaaatgatgttaagtgctccc

SEQ ID NO: 178764 - DNA, 69 bp, Homo sapiens
acaggttaatgggggggccacctcttccaacagctcgactttgaaaatgatgttaagtgctccccctcc

SEQ ID NO: 178765 - DNA, 71 bp, Homo sapiens
ggggccacctcttccaacagctcgactttgaaaatgatgttaagtgctccccctcctccagtcctctcctt

SEQ ID NO: 178766 - DNA, 74 bp, Homo sapiens
aacagctcgactttgaaaatgatgttaagtgctccccctcctccagtcctctcctttcactttgcttgtgaaca

SEQ ID NO: 178767 - DNA, 75 bp, Homo sapiens
ttgaaaatgatgttaagtgctccccctcctccagtcctctcctttcactttgcttgtgaacacctgactggctta

SEQ ID NO: 178768 - DNA, 74 bp, Homo sapiens
ccctcctccagtcctctcctttcactttgcttgtgaacacctgactggcttagggagagactggtccttcatta

SEQ ID NO: 178769 - DNA, 73 bp, Homo sapiens
agtcctctcctttcactttgcttgtgaacacctgactggcttagggagagactggtccttcattacccaccca

SEQ ID NO: 178770 - DNA, 74 bp, Homo sapiens
tttcactttgcttgtgaacacctgactggcttagggagagactggtccttcattacccacccagtgattaccca

SEQ ID NO: 178771 - DNA, 78 bp, Homo sapiens
tttgcttgtgaacacctgactggcttagggagagactggtccttcattacccacccagtgattacccagagcatatgc

SEQ ID NO: 178772 - DNA, 78 bp, Homo sapiens
ctgactggcttagggagagactggtccttcattacccacccagtgattacccagagcatatgctgtgcctcccattta

SEQ ID NO: 178773 - DNA, 78 bp, Homo sapiens
attacccacccagtgattacccagagcatatgctgtgcctcccatttatgccttgtgtctttgggcatccactccact

SEQ ID NO: 178774 - DNA, 83 bp, Homo sapiens
cagtgattacccagagcatatgctgtgcctcccatttatgccttgtgtctttgggcatccactccacttcaggatagcttctc

SEQ ID NO: 178775 - DNA, 80 bp, Homo sapiens
attacccagagcatatgctgtgcctcccatttatgccttgtgtctttgggcatccactccacttcaggatagcttctccc

SEQ ID NO: 178776 - DNA, 80 bp, Homo sapiens
tcccatttatgccttgtgtctttgggcatccactccacttcaggatagcttctccctgccttgtgggcatatattcaata

SEQ ID NO: 178777 - DNA, 79 bp, Homo sapiens
ttatgccttgtgtctttgggcatccactccacttcaggatagcttctccctgccttgtgggcatatattcaataaaaca

SEQ ID NO: 178778 - DNA, 79 bp, Homo sapiens
tgtctttgggcatccactccacttcaggatagcttctccctgccttgtgggcatatattcaataaaacacccatctaga

SEQ ID NO: 178779 - DNA, 75 bp, Homo sapiens
actccacttcaggatagcttctccctgccttgtgggcatatattcaataaaacacccatctagacgtggtaggaa

SEQ ID NO: 178780 - DNA, 73 bp, Homo sapiens
aggatagcttctccctgccttgtgggcatatattcaataaaacacccatctagacgtggtaggaaacgtgagt

SEQ ID NO: 178781 - DNA, 70 bp, Homo sapiens
ccttgtgggcatatattcaataaaacacccatctagacgtggtaggaaacgtgagttattccttcccttc

SEQ ID NO: 178782 - DNA, 68 bp, Homo sapiens
atatattcaataaaacacccatctagacgtggtaggaaacgtgagttattccttcccttcccaccaac

SEQ ID NO: 178783 - DNA, 64 bp, Homo sapiens
atctagacgtggtaggaaacgtgagttattccttcccttcccaccaacgcccaccccccccaaa

SEQ ID NO: 178784 - DNA, 62 bp, Homo sapiens
taggaaacgtgagttattccttcccttcccaccaacgcccaccccccccaaaaaaagtttga

SEQ ID NO: 178785 - DNA, 76 bp, Homo sapiens
accccccccaaaaaaagtttgaaaactctgacatatcctgtgctatattatctgagtgacagctgctgtgtatgtg

SEQ ID NO: 178786 - DNA, 80 bp, Homo sapiens
aaaaagtttgaaaactctgacatatcctgtgctatattatctgagtgacagctgctgtgtatgtggactttgtctgttta

SEQ ID NO: 178787 - DNA, 84 bp, Homo sapiens
tttgaaaactctgacatatcctgtgctatattatctgagtgacagctgctgtgtatgtggactttgtctgtttatctattatta

SEQ ID NO: 178788 - DNA, 82 bp, Homo sapiens
attatctgagtgacagctgctgtgtatgtggactttgtctgtttatctattattatctgtcaggtttgcatttcttgtaaca

SEQ ID NO: 178789 - DNA, 77 bp, Homo sapiens
agctgctgtgtatgtggactttgtctgtttatctattattatctgtcaggtttgcatttcttgtaacaggtgaaaaa

SEQ ID NO: 178790 - DNA, 73 bp, Homo sapiens
gtgtatgtggactttgtctgtttatctattattatctgtcaggtttgcatttcttgtaacaggtgaaaaaaaa

SEQ ID NO: 178791 - DNA, 75 bp, Homo sapiens
tgtctgtttatctattattatctgtcaggtttgcatttcttgtaacaggtgaaaaaaaattctcagccatcttgg

SEQ ID NO: 178792 - DNA, 72 bp, Homo sapiens
tctattattatctgtcaggtttgcatttcttgtaacaggtgaaaaaaaattctcagccatcttggtttttag

SEQ ID NO: 178793 - DNA, 70 bp, Homo sapiens
tctgtcaggtttgcatttcttgtaacaggtgaaaaaaaattctcagccatcttggtttttagtagtttcc

SEQ ID NO: 178794 - DNA, 67 bp, Homo sapiens
caggtttgcatttcttgtaacaggtgaaaaaaaattctcagccatcttggtttttagtagtttcctt

SEQ ID NO: 178795 - DNA, 64 bp, Homo sapiens
tttcttgtaacaggtgaaaaaaaattctcagccatcttggtttttagtagtttccttttttcct

SEQ ID NO: 178796 - DNA, 65 bp, Homo sapiens
gaaaaaaaattctcagccatcttggtttttagtagtttccttttttcctttaattcttggagtga

SEQ ID NO: 178797 - DNA, 70 bp, Homo sapiens
gccatcttggtttttagtagtttccttttttcctttaattcttggagtgaattcagtgcatagttgagag

SEQ ID NO: 178798 - DNA, 72 bp, Homo sapiens
ttttttcctttaattcttggagtgaattcagtgcatagttgagagggggatgaccccctagataagtatcta

SEQ ID NO: 178799 - DNA, 73 bp, Homo sapiens
tttaattcttggagtgaattcagtgcatagttgagagggggatgaccccctagataagtatctaaaaggtcaa

SEQ ID NO: 178800 - DNA, 73 bp, Homo sapiens
agtgaattcagtgcatagttgagagggggatgaccccctagataagtatctaaaaggtcaagggcttcattaa

SEQ ID NO: 178801 - DNA, 71 bp, Homo sapiens
attcagtgcatagttgagagggggatgaccccctagataagtatctaaaaggtcaagggcttcattaaacc

SEQ ID NO: 178802 - DNA, 69 bp, Homo sapiens
tgagagggggatgaccccctagataagtatctaaaaggtcaagggcttcattaaacctcttagaggaaa

SEQ ID NO: 178803 - DNA, 70 bp, Homo sapiens
atgaccccctagataagtatctaaaaggtcaagggcttcattaaacctcttagaggaaatctgactggaa

SEQ ID NO: 178804 - DNA, 72 bp, Homo sapiens
cctagataagtatctaaaaggtcaagggcttcattaaacctcttagaggaaatctgactggaagtcttgcta

SEQ ID NO: 178805 - DNA, 73 bp, Homo sapiens
aagggcttcattaaacctcttagaggaaatctgactggaagtcttgctagcctctttaacattcttcagacca

SEQ ID NO: 178806 - DNA, 74 bp, Homo sapiens
attaaacctcttagaggaaatctgactggaagtcttgctagcctctttaacattcttcagaccatccctatatc

SEQ ID NO: 178807 - DNA, 76 bp, Homo sapiens
tagaggaaatctgactggaagtcttgctagcctctttaacattcttcagaccatccctatatccccttggatcaaa

SEQ ID NO: 178808 - DNA, 75 bp, Homo sapiens
aaatctgactggaagtcttgctagcctctttaacattcttcagaccatccctatatccccttggatcaaagacag

SEQ ID NO: 178809 - DNA, 76 bp, Homo sapiens
aagtcttgctagcctctttaacattcttcagaccatccctatatccccttggatcaaagacaggagcaccatgatt

SEQ ID NO: 178810 - DNA, 76 bp, Homo sapiens
tagcctctttaacattcttcagaccatccctatatccccttggatcaaagacaggagcaccatgatttttctcatt

SEQ ID NO: 178811 - DNA, 79 bp, Homo sapiens
taacattcttcagaccatccctatatccccttggatcaaagacaggagcaccatgatttttctcatttcactgccattc

SEQ ID NO: 178812 - DNA, 82 bp, Homo sapiens
agaccatccctatatccccttggatcaaagacaggagcaccatgatttttctcatttcactgccattctctgagcagctcag

SEQ ID NO: 178813 - DNA, 86 bp, Homo sapiens
ctatatccccttggatcaaagacaggagcaccatgatttttctcatttcactgccattctctgagcagctcaggcagccataagca

SEQ ID NO: 178814 - DNA, 88 bp, Homo sapiens
acaggagcaccatgatttttctcatttcactgccattctctgagcagctcaggcagccataagcatgctgaacttgactataaaagca

SEQ ID NO: 178815 - DNA, 83 bp, Homo sapiens
atttttctcatttcactgccattctctgagcagctcaggcagccataagcatgctgaacttgactataaaagcaggaggtaag

SEQ ID NO: 178816 - DNA, 84 bp, Homo sapiens
attctctgagcagctcaggcagccataagcatgctgaacttgactataaaagcaggaggtaagtgctagaagccattttgcctg

SEQ ID NO: 178817 - DNA, 81 bp, Homo sapiens
cagctcaggcagccataagcatgctgaacttgactataaaagcaggaggtaagtgctagaagccattttgcctgggttgga

SEQ ID NO: 178818 - DNA, 76 bp, Homo sapiens
agccataagcatgctgaacttgactataaaagcaggaggtaagtgctagaagccattttgcctgggttggatttgt

SEQ ID NO: 178819 - DNA, 68 bp, Homo sapiens
aaaagcaggaggtaagtgctagaagccattttgcctgggttggatttgttctaactttaatttcccta

SEQ ID NO: 178820 - DNA, 68 bp, Homo sapiens
gtaagtgctagaagccattttgcctgggttggatttgttctaactttaatttccctagtttgacaaaa

SEQ ID NO: 178821 - DNA, 68 bp, Homo sapiens
actttaatttccctagtttgacaaaatttgaagttggtcttgtgtgaagagaccaatcaaagtaagcc

SEQ ID NO: 178822 - DNA, 70 bp, Homo sapiens
gtttgacaaaatttgaagttggtcttgtgtgaagagaccaatcaaagtaagccctgttttccagaagaaa

SEQ ID NO: 178823 - DNA, 72 bp, Homo sapiens
atttgaagttggtcttgtgtgaagagaccaatcaaagtaagccctgttttccagaagaaagcagcctgtggg

SEQ ID NO: 178824 - DNA, 77 bp, Homo sapiens
tcttgtgtgaagagaccaatcaaagtaagccctgttttccagaagaaagcagcctgtggggcagagcccatggcctc

SEQ ID NO: 178825 - DNA, 76 bp, Homo sapiens
aagagaccaatcaaagtaagccctgttttccagaagaaagcagcctgtggggcagagcccatggcctccattgctg

SEQ ID NO: 178826 - DNA, 78 bp, Homo sapiens
atcaaagtaagccctgttttccagaagaaagcagcctgtggggcagagcccatggcctccattgctgggcagtcttga

SEQ ID NO: 178827 - DNA, 82 bp, Homo sapiens
tgttttccagaagaaagcagcctgtggggcagagcccatggcctccattgctgggcagtcttgacacttgcaggagcaccca

SEQ ID NO: 178828 - DNA, 83 bp, Homo sapiens
aagaaagcagcctgtggggcagagcccatggcctccattgctgggcagtcttgacacttgcaggagcacccagtgagcttcta

SEQ ID NO: 178829 - DNA, 80 bp, Homo sapiens
agagcccatggcctccattgctgggcagtcttgacacttgcaggagcacccagtgagcttctacaaaggagccttttcag

SEQ ID NO: 178830 - DNA, 79 bp, Homo sapiens
atggcctccattgctgggcagtcttgacacttgcaggagcacccagtgagcttctacaaaggagccttttcagtgggac

SEQ ID NO: 178831 - DNA, 80 bp, Homo sapiens
attgctgggcagtcttgacacttgcaggagcacccagtgagcttctacaaaggagccttttcagtgggacctctcactgc

SEQ ID NO: 178832 - DNA, 76 bp, Homo sapiens
ttgacacttgcaggagcacccagtgagcttctacaaaggagccttttcagtgggacctctcactgctcctttattt

SEQ ID NO: 178833 - DNA, 75 bp, Homo sapiens
aggagcacccagtgagcttctacaaaggagccttttcagtgggacctctcactgctcctttattttgtgcctata

SEQ ID NO: 178834 - DNA, 74 bp, Homo sapiens
ttctacaaaggagccttttcagtgggacctctcactgctcctttattttgtgcctataaaatcatgccaggaaa

SEQ ID NO: 178835 - DNA, 75 bp, Homo sapiens
aggagccttttcagtgggacctctcactgctcctttattttgtgcctataaaatcatgccaggaaatcctgagcc

SEQ ID NO: 178836 - DNA, 79 bp, Homo sapiens
tgggacctctcactgctcctttattttgtgcctataaaatcatgccaggaaatcctgagcctgggtgccagaatgatta

SEQ ID NO: 178837 - DNA, 74 bp, Homo sapiens
actgctcctttattttgtgcctataaaatcatgccaggaaatcctgagcctgggtgccagaatgattaaaaact

SEQ ID NO: 178838 - DNA, 75 bp, Homo sapiens
tttattttgtgcctataaaatcatgccaggaaatcctgagcctgggtgccagaatgattaaaaacttcccagcaa

SEQ ID NO: 178839 - DNA, 75 bp, Homo sapiens
ctataaaatcatgccaggaaatcctgagcctgggtgccagaatgattaaaaacttcccagcaaggtgcgtgaaaa

SEQ ID NO: 178840 - DNA, 77 bp, Homo sapiens
aaatcatgccaggaaatcctgagcctgggtgccagaatgattaaaaacttcccagcaaggtgcgtgaaaatcagaga

SEQ ID NO: 178841 - DNA, 73 bp, Homo sapiens
aatcctgagcctgggtgccagaatgattaaaaacttcccagcaaggtgcgtgaaaatcagagaaagtacctgt

SEQ ID NO: 178842 - DNA, 76 bp, Homo sapiens
ctgggtgccagaatgattaaaaacttcccagcaaggtgcgtgaaaatcagagaaagtacctgttgctgtcactgtc

SEQ ID NO: 178843 - DNA, 75 bp, Homo sapiens
aatgattaaaaacttcccagcaaggtgcgtgaaaatcagagaaagtacctgttgctgtcactgtcgctccgctcc

SEQ ID NO: 178844 - DNA, 74 bp, Homo sapiens
ttaaaaacttcccagcaaggtgcgtgaaaatcagagaaagtacctgttgctgtcactgtcgctccgctcccttg

SEQ ID NO: 178845 - DNA, 78 bp, Homo sapiens
caaggtgcgtgaaaatcagagaaagtacctgttgctgtcactgtcgctccgctcccttggcttctaggcggcttgtca

SEQ ID NO: 178846 - DNA, 77 bp, Homo sapiens
gaaaatcagagaaagtacctgttgctgtcactgtcgctccgctcccttggcttctaggcggcttgtcactcccatct

SEQ ID NO: 178847 - DNA, 75 bp, Homo sapiens
agaaagtacctgttgctgtcactgtcgctccgctcccttggcttctaggcggcttgtcactcccatctttccaaa

SEQ ID NO: 178848 - DNA, 78 bp, Homo sapiens
tgttgctgtcactgtcgctccgctcccttggcttctaggcggcttgtcactcccatctttccaaacacccaactgaga

SEQ ID NO: 178849 - DNA, 72 bp, Homo sapiens
actgtcgctccgctcccttggcttctaggcggcttgtcactcccatctttccaaacacccaactgagacttt

SEQ ID NO: 178850 - DNA, 74 bp, Homo sapiens
cttctaggcggcttgtcactcccatctttccaaacacccaactgagactttttctgtgttctgagaagcaggta

SEQ ID NO: 178851 - DNA, 74 bp, Homo sapiens
gcttgtcactcccatctttccaaacacccaactgagactttttctgtgttctgagaagcaggtaaggacatttg

SEQ ID NO: 178852 - DNA, 72 bp, Homo sapiens
actcccatctttccaaacacccaactgagactttttctgtgttctgagaagcaggtaaggacatttgtctcc

SEQ ID NO: 178853 - DNA, 73 bp, Homo sapiens
tttccaaacacccaactgagactttttctgtgttctgagaagcaggtaaggacatttgtctccctctgacctc

SEQ ID NO: 178854 - DNA, 77 bp, Homo sapiens
aactgagactttttctgtgttctgagaagcaggtaaggacatttgtctccctctgacctccctcacatcttcatctc

SEQ ID NO: 178855 - DNA, 78 bp, Homo sapiens
actttttctgtgttctgagaagcaggtaaggacatttgtctccctctgacctccctcacatcttcatctcttcagata

SEQ ID NO: 178856 - DNA, 78 bp, Homo sapiens
tctgagaagcaggtaaggacatttgtctccctctgacctccctcacatcttcatctcttcagatacctctaacctatt

SEQ ID NO: 178857 - DNA, 74 bp, Homo sapiens
aggtaaggacatttgtctccctctgacctccctcacatcttcatctcttcagatacctctaacctatttggaaa

SEQ ID NO: 178858 - DNA, 75 bp, Homo sapiens
ggacatttgtctccctctgacctccctcacatcttcatctcttcagatacctctaacctatttggaaacagtggg

SEQ ID NO: 178859 - DNA, 76 bp, Homo sapiens
tctgacctccctcacatcttcatctcttcagatacctctaacctatttggaaacagtggggccaagacatttggtg

SEQ ID NO: 178860 - DNA, 74 bp, Homo sapiens
ctccctcacatcttcatctcttcagatacctctaacctatttggaaacagtggggccaagacatttggtggatt

SEQ ID NO: 178861 - DNA, 75 bp, Homo sapiens
atcttcatctcttcagatacctctaacctatttggaaacagtggggccaagacatttggtggatttgccagctcg

SEQ ID NO: 178862 - DNA, 73 bp, Homo sapiens
ttcagatacctctaacctatttggaaacagtggggccaagacatttggtggatttgccagctcgtcgtttgga

SEQ ID NO: 178863 - DNA, 73 bp, Homo sapiens
ctctaacctatttggaaacagtggggccaagacatttggtggatttgccagctcgtcgtttggagagcagaaa

SEQ ID NO: 178864 - DNA, 74 bp, Homo sapiens
aaacagtggggccaagacatttggtggatttgccagctcgtcgtttggagagcagaaacccactggcactttca

SEQ ID NO: 178865 - DNA, 78 bp, Homo sapiens
gccaagacatttggtggatttgccagctcgtcgtttggagagcagaaacccactggcactttcagctctggaggagga

SEQ ID NO: 178866 - DNA, 76 bp, Homo sapiens
acatttggtggatttgccagctcgtcgtttggagagcagaaacccactggcactttcagctctggaggaggaagtg

SEQ ID NO: 178867 - DNA, 77 bp, Homo sapiens
atttgccagctcgtcgtttggagagcagaaacccactggcactttcagctctggaggaggaagtgtggcatcccaag

SEQ ID NO: 178868 - DNA, 74 bp, Homo sapiens
tcgtttggagagcagaaacccactggcactttcagctctggaggaggaagtgtggcatcccaaggctttgggtt

SEQ ID NO: 178869 - DNA, 74 bp, Homo sapiens
agcagaaacccactggcactttcagctctggaggaggaagtgtggcatcccaaggctttgggttttcctctcca

SEQ ID NO: 178870 - DNA, 72 bp, Homo sapiens
ccactggcactttcagctctggaggaggaagtgtggcatcccaaggctttgggttttcctctccaaacaaaa

SEQ ID NO: 178871 - DNA, 70 bp, Homo sapiens
gaggaggaagtgtggcatcccaaggctttgggttttcctctccaaacaaaacaggtactcctatgtctat

SEQ ID NO: 178872 - DNA, 69 bp, Homo sapiens
aagtgtggcatcccaaggctttgggttttcctctccaaacaaaacaggtactcctatgtctatttgtta

SEQ ID NO: 178873 - DNA, 69 bp, Homo sapiens
ctttgggttttcctctccaaacaaaacaggtactcctatgtctatttgttatggttatctttatatatg

SEQ ID NO: 178874 - DNA, 78 bp, Homo sapiens
acaggtactcctatgtctatttgttatggttatctttatatatgtatttgtttatgcatagatatctggaaggagaca

SEQ ID NO: 178875 - DNA, 79 bp, Homo sapiens
ctatgtctatttgttatggttatctttatatatgtatttgtttatgcatagatatctggaaggagacatctctagggtg

SEQ ID NO: 178876 - DNA, 77 bp, Homo sapiens
tttgttatggttatctttatatatgtatttgtttatgcatagatatctggaaggagacatctctagggtggttatct

SEQ ID NO: 178877 - DNA, 78 bp, Homo sapiens
tatgtatttgtttatgcatagatatctggaaggagacatctctagggtggttatcttaagagagtaggattggagtaa

SEQ ID NO: 178878 - DNA, 76 bp, Homo sapiens
tttatgcatagatatctggaaggagacatctctagggtggttatcttaagagagtaggattggagtaaagaagtta

SEQ ID NO: 178879 - DNA, 73 bp, Homo sapiens
atagatatctggaaggagacatctctagggtggttatcttaagagagtaggattggagtaaagaagttaactg

SEQ ID NO: 178880 - DNA, 69 bp, Homo sapiens
aaggagacatctctagggtggttatcttaagagagtaggattggagtaaagaagttaactgtttcctcc

SEQ ID NO: 178881 - DNA, 68 bp, Homo sapiens
tctagggtggttatcttaagagagtaggattggagtaaagaagttaactgtttcctccgcattatttt

SEQ ID NO: 178882 - DNA, 68 bp, Homo sapiens
ggtggttatcttaagagagtaggattggagtaaagaagttaactgtttcctccgcattatttttatat

SEQ ID NO: 178883 - DNA, 74 bp, Homo sapiens
agagagtaggattggagtaaagaagttaactgtttcctccgcattatttttatatttactgagcatctgctaca

SEQ ID NO: 178884 - DNA, 75 bp, Homo sapiens
tggagtaaagaagttaactgtttcctccgcattatttttatatttactgagcatctgctacattcctaacatgat

SEQ ID NO: 178885 - DNA, 74 bp, Homo sapiens
aagttaactgtttcctccgcattatttttatatttactgagcatctgctacattcctaacatgattccaggtct

SEQ ID NO: 178886 - DNA, 75 bp, Homo sapiens
ccgcattatttttatatttactgagcatctgctacattcctaacatgattccaggtcttccaaaacatgtttaaa

SEQ ID NO: 178887 - DNA, 79 bp, Homo sapiens
tatttactgagcatctgctacattcctaacatgattccaggtcttccaaaacatgtttaaaagcatagaatgcaagtaa

SEQ ID NO: 178888 - DNA, 79 bp, Homo sapiens
gcatctgctacattcctaacatgattccaggtcttccaaaacatgtttaaaagcatagaatgcaagtaatgcaacattt

SEQ ID NO: 178889 - DNA, 75 bp, Homo sapiens
gctacattcctaacatgattccaggtcttccaaaacatgtttaaaagcatagaatgcaagtaatgcaacattttt

SEQ ID NO: 178890 - DNA, 72 bp, Homo sapiens
ctaacatgattccaggtcttccaaaacatgtttaaaagcatagaatgcaagtaatgcaacatttttttttct

SEQ ID NO: 178891 - DNA, 74 bp, Homo sapiens
accgcgcccagctgtaatgcaactcttaagagaacacagattcttcttggggagaaaacattgtaaatatttga

SEQ ID NO: 178892 - DNA, 76 bp, Homo sapiens
agctgtaatgcaactcttaagagaacacagattcttcttggggagaaaacattgtaaatatttgacagttgcagaa

SEQ ID NO: 178893 - DNA, 75 bp, Homo sapiens
atgcaactcttaagagaacacagattcttcttggggagaaaacattgtaaatatttgacagttgcagaacaaaca

SEQ ID NO: 178894 - DNA, 72 bp, Homo sapiens
ttaagagaacacagattcttcttggggagaaaacattgtaaatatttgacagttgcagaacaaacaaaataa

SEQ ID NO: 178895 - DNA, 72 bp, Homo sapiens
cagattcttcttggggagaaaacattgtaaatatttgacagttgcagaacaaacaaaataaaggaacacata

SEQ ID NO: 178896 - DNA, 71 bp, Homo sapiens
gggagaaaacattgtaaatatttgacagttgcagaacaaacaaaataaaggaacacataaggaaatgataa

SEQ ID NO: 178897 - DNA, 75 bp, Homo sapiens
ttgtaaatatttgacagttgcagaacaaacaaaataaaggaacacataaggaaatgataactgaagtatctgcag

SEQ ID NO: 178898 - DNA, 76 bp, Homo sapiens
atttgacagttgcagaacaaacaaaataaaggaacacataaggaaatgataactgaagtatctgcaggaaagcatc

SEQ ID NO: 178899 - DNA, 77 bp, Homo sapiens
cagaacaaacaaaataaaggaacacataaggaaatgataactgaagtatctgcaggaaagcatcctgagtcatggat

SEQ ID NO: 178900 - DNA, 75 bp, Homo sapiens
aaacaaaataaaggaacacataaggaaatgataactgaagtatctgcaggaaagcatcctgagtcatggatttgt

SEQ ID NO: 178901 - DNA, 76 bp, Homo sapiens
aacacataaggaaatgataactgaagtatctgcaggaaagcatcctgagtcatggatttgttggggttcccattat

SEQ ID NO: 178902 - DNA, 77 bp, Homo sapiens
ataaggaaatgataactgaagtatctgcaggaaagcatcctgagtcatggatttgttggggttcccattatttgtga

SEQ ID NO: 178903 - DNA, 77 bp, Homo sapiens
aatgataactgaagtatctgcaggaaagcatcctgagtcatggatttgttggggttcccattatttgtgagggtcaa

SEQ ID NO: 178904 - DNA, 77 bp, Homo sapiens
ataactgaagtatctgcaggaaagcatcctgagtcatggatttgttggggttcccattatttgtgagggtcaaagca

SEQ ID NO: 178905 - DNA, 77 bp, Homo sapiens
aagtatctgcaggaaagcatcctgagtcatggatttgttggggttcccattatttgtgagggtcaaagcagattatc

SEQ ID NO: 178906 - DNA, 77 bp, Homo sapiens
tgcaggaaagcatcctgagtcatggatttgttggggttcccattatttgtgagggtcaaagcagattatctgtttaa

SEQ ID NO: 178907 - DNA, 74 bp, Homo sapiens
gaaagcatcctgagtcatggatttgttggggttcccattatttgtgagggtcaaagcagattatctgtttaatt

SEQ ID NO: 178908 - DNA, 73 bp, Homo sapiens
aaagcatcctgagtcatggatttgttggggttcccattatttgtgagggtcaaagcagattatctgtttaatt

SEQ ID NO: 178909 - DNA, 73 bp, Homo sapiens
atcctgagtcatggatttgttggggttcccattatttgtgagggtcaaagcagattatctgtttaatttctaa

SEQ ID NO: 178910 - DNA, 73 bp, Homo sapiens
agtcatggatttgttggggttcccattatttgtgagggtcaaagcagattatctgtttaatttctaatgtgta

SEQ ID NO: 178911 - DNA, 72 bp, Homo sapiens
atggatttgttggggttcccattatttgtgagggtcaaagcagattatctgtttaatttctaatgtgtatgt

SEQ ID NO: 178912 - DNA, 71 bp, Homo sapiens
gttggggttcccattatttgtgagggtcaaagcagattatctgtttaatttctaatgtgtatgttactttc

SEQ ID NO: 178913 - DNA, 73 bp, Homo sapiens
tttgtgagggtcaaagcagattatctgtttaatttctaatgtgtatgttactttcccctctttcgcaaatcac

SEQ ID NO: 178914 - DNA, 71 bp, Homo sapiens
gagggtcaaagcagattatctgtttaatttctaatgtgtatgttactttcccctctttcgcaaatcacttt

SEQ ID NO: 178915 - DNA, 69 bp, Homo sapiens
gcagattatctgtttaatttctaatgtgtatgttactttcccctctttcgcaaatcactttttttttat

SEQ ID NO: 178916 - DNA, 73 bp, Homo sapiens
accatgcccagcccccaaatcactttatttttaattgaagtatatgtttatccacaatccacataagtacaca

SEQ ID NO: 178917 - DNA, 73 bp, Homo sapiens
ccagcccccaaatcactttatttttaattgaagtatatgtttatccacaatccacataagtacacagctgaat

SEQ ID NO: 178918 - DNA, 75 bp, Homo sapiens
cactttatttttaattgaagtatatgtttatccacaatccacataagtacacagctgaattaattatcacagttg

SEQ ID NO: 178919 - DNA, 79 bp, Homo sapiens
taattgaagtatatgtttatccacaatccacataagtacacagctgaattaattatcacagttggaatacacccatgta

SEQ ID NO: 178920 - DNA, 77 bp, Homo sapiens
aagtatatgtttatccacaatccacataagtacacagctgaattaattatcacagttggaatacacccatgtaacca

SEQ ID NO: 178921 - DNA, 75 bp, Homo sapiens
tttatccacaatccacataagtacacagctgaattaattatcacagttggaatacacccatgtaaccaaggaaaa

SEQ ID NO: 178922 - DNA, 74 bp, Homo sapiens
atccacataagtacacagctgaattaattatcacagttggaatacacccatgtaaccaaggaaaaggaacatta

SEQ ID NO: 178923 - DNA, 71 bp, Homo sapiens
cagctgaattaattatcacagttggaatacacccatgtaaccaaggaaaaggaacattactaggactactt

SEQ ID NO: 178924 - DNA, 69 bp, Homo sapiens
taattatcacagttggaatacacccatgtaaccaaggaaaaggaacattactaggactactttttatcc

SEQ ID NO: 178925 - DNA, 69 bp, Homo sapiens
acagttggaatacacccatgtaaccaaggaaaaggaacattactaggactactttttatcccagcatta

SEQ ID NO: 178926 - DNA, 68 bp, Homo sapiens
cacccatgtaaccaaggaaaaggaacattactaggactactttttatcccagcattactattaaagta

SEQ ID NO: 178927 - DNA, 67 bp, Homo sapiens
gtaaccaaggaaaaggaacattactaggactactttttatcccagcattactattaaagtatatatt

SEQ ID NO: 178928 - DNA, 75 bp, Homo sapiens
tatatatttatataaactatatgcctttttataatcatgtatgatgtatttataactacaaatttttaatgaaca

SEQ ID NO: 178929 - DNA, 74 bp, Homo sapiens
tataaactatatgcctttttataatcatgtatgatgtatttataactacaaatttttaatgaacagtgtatgtt

SEQ ID NO: 178930 - DNA, 77 bp, Homo sapiens
ctatatgcctttttataatcatgtatgatgtatttataactacaaatttttaatgaacagtgtatgtttagatctga

SEQ ID NO: 178931 - DNA, 78 bp, Homo sapiens
tataatcatgtatgatgtatttataactacaaatttttaatgaacagtgtatgtttagatctgaaaacatgtacttca

SEQ ID NO: 178932 - DNA, 76 bp, Homo sapiens
catgtatgatgtatttataactacaaatttttaatgaacagtgtatgtttagatctgaaaacatgtacttcatttc

SEQ ID NO: 178933 - DNA, 78 bp, Homo sapiens
tataactacaaatttttaatgaacagtgtatgtttagatctgaaaacatgtacttcatttctgtcatctgcctctcca

SEQ ID NO: 178934 - DNA, 81 bp, Homo sapiens
ttaatgaacagtgtatgtttagatctgaaaacatgtacttcatttctgtcatctgcctctccaccctgtttctgtctctga

SEQ ID NO: 178935 - DNA, 83 bp, Homo sapiens
tatgtttagatctgaaaacatgtacttcatttctgtcatctgcctctccaccctgtttctgtctctgagatctgcggagagtc

SEQ ID NO: 178936 - DNA, 84 bp, Homo sapiens
agatctgaaaacatgtacttcatttctgtcatctgcctctccaccctgtttctgtctctgagatctgcggagagtctgcactcc

SEQ ID NO: 178937 - DNA, 84 bp, Homo sapiens
atgtacttcatttctgtcatctgcctctccaccctgtttctgtctctgagatctgcggagagtctgcactcctgtccttgttga

SEQ ID NO: 178938 - DNA, 82 bp, Homo sapiens
tttctgtcatctgcctctccaccctgtttctgtctctgagatctgcggagagtctgcactcctgtccttgttgatggaaagt

SEQ ID NO: 178939 - DNA, 79 bp, Homo sapiens
cctctccaccctgtttctgtctctgagatctgcggagagtctgcactcctgtccttgttgatggaaagttgtgtgaaaa

SEQ ID NO: 178940 - DNA, 77 bp, Homo sapiens
ctgtttctgtctctgagatctgcggagagtctgcactcctgtccttgttgatggaaagttgtgtgaaaagagttttt

SEQ ID NO: 178941 - DNA, 77 bp, Homo sapiens
tctgtctctgagatctgcggagagtctgcactcctgtccttgttgatggaaagttgtgtgaaaagagttttttttaa

SEQ ID NO: 178942 - DNA, 68 bp, Homo sapiens
tttttaagacaggtggtccagggtgggctgtttgagcaagcagctttttaaagcaaactccccctggg

SEQ ID NO: 178943 - DNA, 69 bp, Homo sapiens
aagacaggtggtccagggtgggctgtttgagcaagcagctttttaaagcaaactccccctgggtaagtg

SEQ ID NO: 178944 - DNA, 71 bp, Homo sapiens
tccagggtgggctgtttgagcaagcagctttttaaagcaaactccccctgggtaagtgggcaggacacttg

SEQ ID NO: 178945 - DNA, 73 bp, Homo sapiens
tgtttgagcaagcagctttttaaagcaaactccccctgggtaagtgggcaggacacttggccctcgtatgcag

SEQ ID NO: 178946 - DNA, 72 bp, Homo sapiens
ttttaaagcaaactccccctgggtaagtgggcaggacacttggccctcgtatgcaggggatgctctgaaata

SEQ ID NO: 178947 - DNA, 75 bp, Homo sapiens
cccctgggtaagtgggcaggacacttggccctcgtatgcaggggatgctctgaaatatgctaattccagaggaag

SEQ ID NO: 178948 - DNA, 79 bp, Homo sapiens
taagtgggcaggacacttggccctcgtatgcaggggatgctctgaaatatgctaattccagaggaaggatctaacctca

SEQ ID NO: 178949 - DNA, 82 bp, Homo sapiens
acacttggccctcgtatgcaggggatgctctgaaatatgctaattccagaggaaggatctaacctcaggactagatgcatca

SEQ ID NO: 178950 - DNA, 84 bp, Homo sapiens
ccctcgtatgcaggggatgctctgaaatatgctaattccagaggaaggatctaacctcaggactagatgcatcagtggctctga

SEQ ID NO: 178951 - DNA, 82 bp, Homo sapiens
ggggatgctctgaaatatgctaattccagaggaaggatctaacctcaggactagatgcatcagtggctctgacctgggagta

SEQ ID NO: 178952 - DNA, 78 bp, Homo sapiens
taattccagaggaaggatctaacctcaggactagatgcatcagtggctctgacctgggagtaaggctgccccaaatta

SEQ ID NO: 178953 - DNA, 78 bp, Homo sapiens
agaggaaggatctaacctcaggactagatgcatcagtggctctgacctgggagtaaggctgccccaaattaatacatg

SEQ ID NO: 178954 - DNA, 80 bp, Homo sapiens
taacctcaggactagatgcatcagtggctctgacctgggagtaaggctgccccaaattaatacatggagtctcatattta

SEQ ID NO: 178955 - DNA, 79 bp, Homo sapiens
actagatgcatcagtggctctgacctgggagtaaggctgccccaaattaatacatggagtctcatatttagagcctaaa

SEQ ID NO: 178956 - DNA, 78 bp, Homo sapiens
atcagtggctctgacctgggagtaaggctgccccaaattaatacatggagtctcatatttagagcctaaagtgctgtg

SEQ ID NO: 178957 - DNA, 75 bp, Homo sapiens
tgacctgggagtaaggctgccccaaattaatacatggagtctcatatttagagcctaaagtgctgtggtttccaa

SEQ ID NO: 178958 - DNA, 73 bp, Homo sapiens
acctgggagtaaggctgccccaaattaatacatggagtctcatatttagagcctaaagtgctgtggtttccaa

SEQ ID NO: 178959 - DNA, 74 bp, Homo sapiens
agtaaggctgccccaaattaatacatggagtctcatatttagagcctaaagtgctgtggtttccaaatccactg

SEQ ID NO: 178960 - DNA, 76 bp, Homo sapiens
ctgccccaaattaatacatggagtctcatatttagagcctaaagtgctgtggtttccaaatccactgtgcacctta

SEQ ID NO: 178961 - DNA, 76 bp, Homo sapiens
ccaaattaatacatggagtctcatatttagagcctaaagtgctgtggtttccaaatccactgtgcaccttacctca

SEQ ID NO: 178962 - DNA, 76 bp, Homo sapiens
aattaatacatggagtctcatatttagagcctaaagtgctgtggtttccaaatccactgtgcaccttacctcagat

SEQ ID NO: 178963 - DNA, 79 bp, Homo sapiens
ttaatacatggagtctcatatttagagcctaaagtgctgtggtttccaaatccactgtgcaccttacctcagattgtga

SEQ ID NO: 178964 - DNA, 79 bp, Homo sapiens
tggagtctcatatttagagcctaaagtgctgtggtttccaaatccactgtgcaccttacctcagattgtgactcaggta

SEQ ID NO: 178965 - DNA, 79 bp, Homo sapiens
tctcatatttagagcctaaagtgctgtggtttccaaatccactgtgcaccttacctcagattgtgactcaggtagctta

SEQ ID NO: 178966 - DNA, 76 bp, Homo sapiens
atatttagagcctaaagtgctgtggtttccaaatccactgtgcaccttacctcagattgtgactcaggtagcttag

SEQ ID NO: 178967 - DNA, 76 bp, Homo sapiens
ttagagcctaaagtgctgtggtttccaaatccactgtgcaccttacctcagattgtgactcaggtagcttagtctt

SEQ ID NO: 178968 - DNA, 74 bp, Homo sapiens
cctaaagtgctgtggtttccaaatccactgtgcaccttacctcagattgtgactcaggtagcttagtctttctt

SEQ ID NO: 178969 - DNA, 75 bp, Homo sapiens
tggtttccaaatccactgtgcaccttacctcagattgtgactcaggtagcttagtctttctttggttgctagttg

SEQ ID NO: 178970 - DNA, 74 bp, Homo sapiens
aaatccactgtgcaccttacctcagattgtgactcaggtagcttagtctttctttggttgctagttgttaatac

SEQ ID NO: 178971 - DNA, 71 bp, Homo sapiens
accttacctcagattgtgactcaggtagcttagtctttctttggttgctagttgttaatactgttttccta

SEQ ID NO: 178972 - DNA, 69 bp, Homo sapiens
tagtctttctttggttgctagttgttaatactgttttcctagaaattaaaacagaatattctgaaatgg

SEQ ID NO: 178973 - DNA, 71 bp, Homo sapiens
tgctagttgttaatactgttttcctagaaattaaaacagaatattctgaaatgggcttcacagctttcttt

SEQ ID NO: 178974 - DNA, 72 bp, Homo sapiens
actgttttcctagaaattaaaacagaatattctgaaatgggcttcacagctttctttttgctacacacacag

SEQ ID NO: 178975 - DNA, 76 bp, Homo sapiens
tcctagaaattaaaacagaatattctgaaatgggcttcacagctttctttttgctacacacacagtgcattgttta

SEQ ID NO: 178976 - DNA, 74 bp, Homo sapiens
aacagaatattctgaaatgggcttcacagctttctttttgctacacacacagtgcattgtttaaaaatgaaagg

SEQ ID NO: 178977 - DNA, 75 bp, Homo sapiens
atattctgaaatgggcttcacagctttctttttgctacacacacagtgcattgtttaaaaatgaaagggccacaa

SEQ ID NO: 178978 - DNA, 73 bp, Homo sapiens
cttcacagctttctttttgctacacacacagtgcattgtttaaaaatgaaagggccacaaggcttttatccca

SEQ ID NO: 178979 - DNA, 71 bp, Homo sapiens
ttctttttgctacacacacagtgcattgtttaaaaatgaaagggccacaaggcttttatcccagttagaaa

SEQ ID NO: 178980 - DNA, 74 bp, Homo sapiens
tacacacacagtgcattgtttaaaaatgaaagggccacaaggcttttatcccagttagaaaggtgcatcgtgaa

SEQ ID NO: 178981 - DNA, 72 bp, Homo sapiens
gtgcattgtttaaaaatgaaagggccacaaggcttttatcccagttagaaaggtgcatcgtgaacatttcaa

SEQ ID NO: 178982 - DNA, 69 bp, Homo sapiens
tttaaaaatgaaagggccacaaggcttttatcccagttagaaaggtgcatcgtgaacatttcaactggg

SEQ ID NO: 178983 - DNA, 70 bp, Homo sapiens
atgaaagggccacaaggcttttatcccagttagaaaggtgcatcgtgaacatttcaactggggaatttta

SEQ ID NO: 178984 - DNA, 73 bp, Homo sapiens
aaggcttttatcccagttagaaaggtgcatcgtgaacatttcaactggggaattttagttcatcgatcatcaa

SEQ ID NO: 178985 - DNA, 74 bp, Homo sapiens
tatcccagttagaaaggtgcatcgtgaacatttcaactggggaattttagttcatcgatcatcaagacttttta

SEQ ID NO: 178986 - DNA, 74 bp, Homo sapiens
catcgtgaacatttcaactggggaattttagttcatcgatcatcaagactttttatgtttttaggaggctgata

SEQ ID NO: 178987 - DNA, 71 bp, Homo sapiens
gggaattttagttcatcgatcatcaagactttttatgtttttaggaggctgataatgttttctttgactct

SEQ ID NO: 178988 - DNA, 70 bp, Homo sapiens
catcgatcatcaagactttttatgtttttaggaggctgataatgttttctttgactcttaacggttttcc

SEQ ID NO: 178989 - DNA, 67 bp, Homo sapiens
agactttttatgtttttaggaggctgataatgttttctttgactcttaacggttttcctatatatgg

SEQ ID NO: 178990 - DNA, 70 bp, Homo sapiens
tgtttttaggaggctgataatgttttctttgactcttaacggttttcctatatatggttctttatcctga

SEQ ID NO: 178991 - DNA, 72 bp, Homo sapiens
gaggctgataatgttttctttgactcttaacggttttcctatatatggttctttatcctgagattatatccc

SEQ ID NO: 178992 - DNA, 71 bp, Homo sapiens
tgttttctttgactcttaacggttttcctatatatggttctttatcctgagattatatccccattgatttg

SEQ ID NO: 178993 - DNA, 73 bp, Homo sapiens
ttgactcttaacggttttcctatatatggttctttatcctgagattatatccccattgatttggaaatctgac

SEQ ID NO: 178994 - DNA, 74 bp, Homo sapiens
tcctatatatggttctttatcctgagattatatccccattgatttggaaatctgacctttgaaaattccacctg

SEQ ID NO: 178995 - DNA, 72 bp, Homo sapiens
ggttctttatcctgagattatatccccattgatttggaaatctgacctttgaaaattccacctgtaatccca

SEQ ID NO: 178996 - DNA, 69 bp, Homo sapiens
gaaagaaaatctgacccttttatttgtctagtcttagagaaaatgtatgccccaacttttcatagtaag

SEQ ID NO: 178997 - DNA, 70 bp, Homo sapiens
ctgacccttttatttgtctagtcttagagaaaatgtatgccccaacttttcatagtaagtacttatttgc

SEQ ID NO: 178998 - DNA, 71 bp, Homo sapiens
ttatttgtctagtcttagagaaaatgtatgccccaacttttcatagtaagtacttatttgccccatgaaac

SEQ ID NO: 178999 - DNA, 71 bp, Homo sapiens
gtctagtcttagagaaaatgtatgccccaacttttcatagtaagtacttatttgccccatgaaactaatac

SEQ ID NO: 179000 - DNA, 70 bp, Homo sapiens
aaaatgtatgccccaacttttcatagtaagtacttatttgccccatgaaactaatacttagattgaggcc

SEQ ID NO: 179001 - DNA, 75 bp, Homo sapiens
tcatagtaagtacttatttgccccatgaaactaatacttagattgaggcctcgaatagagaacaactatctttca

SEQ ID NO: 179002 - DNA, 75 bp, Homo sapiens
taagtacttatttgccccatgaaactaatacttagattgaggcctcgaatagagaacaactatctttcagataca

SEQ ID NO: 179003 - DNA, 77 bp, Homo sapiens
ctaatacttagattgaggcctcgaatagagaacaactatctttcagatacataagatgagtgaactagtaaccataa

SEQ ID NO: 179004 - DNA, 78 bp, Homo sapiens
ttagattgaggcctcgaatagagaacaactatctttcagatacataagatgagtgaactagtaaccataaacatcaaa

SEQ ID NO: 179005 - DNA, 77 bp, Homo sapiens
cctcgaatagagaacaactatctttcagatacataagatgagtgaactagtaaccataaacatcaaagtgagggcag

SEQ ID NO: 179006 - DNA, 75 bp, Homo sapiens
agagaacaactatctttcagatacataagatgagtgaactagtaaccataaacatcaaagtgagggcaggggaaa

SEQ ID NO: 179007 - DNA, 75 bp, Homo sapiens
tatctttcagatacataagatgagtgaactagtaaccataaacatcaaagtgagggcaggggaaaggccactccc

SEQ ID NO: 179008 - DNA, 73 bp, Homo sapiens
ataagatgagtgaactagtaaccataaacatcaaagtgagggcaggggaaaggccactccccctcatgtttca

SEQ ID NO: 179009 - DNA, 70 bp, Homo sapiens
agtgaactagtaaccataaacatcaaagtgagggcaggggaaaggccactccccctcatgtttcaggact

SEQ ID NO: 179010 - DNA, 74 bp, Homo sapiens
agtaaccataaacatcaaagtgagggcaggggaaaggccactccccctcatgtttcaggacttcatctctctgc

SEQ ID NO: 179011 - DNA, 77 bp, Homo sapiens
atcaaagtgagggcaggggaaaggccactccccctcatgtttcaggacttcatctctctgctgcagaactcgtattg

SEQ ID NO: 179012 - DNA, 77 bp, Homo sapiens
ggcaggggaaaggccactccccctcatgtttcaggacttcatctctctgctgcagaactcgtattggttctgggaga

SEQ ID NO: 179013 - DNA, 75 bp, Homo sapiens
aaaggccactccccctcatgtttcaggacttcatctctctgctgcagaactcgtattggttctgggagagctttt

SEQ ID NO: 179014 - DNA, 76 bp, Homo sapiens
ttcatctctctgctgcagaactcgtattggttctgggagagctttttctattgaaagaggggactggaagtcccga

SEQ ID NO: 179015 - DNA, 73 bp, Homo sapiens
tgcagaactcgtattggttctgggagagctttttctattgaaagaggggactggaagtcccgagcagaaggaa

SEQ ID NO: 179016 - DNA, 69 bp, Homo sapiens
actcgtattggttctgggagagctttttctattgaaagaggggactggaagtcccgagcagaaggaagg

SEQ ID NO: 179017 - DNA, 74 bp, Homo sapiens
tgggagagctttttctattgaaagaggggactggaagtcccgagcagaaggaagggctgctgtgaatagaggaa

SEQ ID NO: 179018 - DNA, 73 bp, Homo sapiens
tttttctattgaaagaggggactggaagtcccgagcagaaggaagggctgctgtgaatagaggaactgccttc

SEQ ID NO: 179019 - DNA, 74 bp, Homo sapiens
attgaaagaggggactggaagtcccgagcagaaggaagggctgctgtgaatagaggaactgccttcctgtccag

SEQ ID NO: 179020 - DNA, 77 bp, Homo sapiens
tcccgagcagaaggaagggctgctgtgaatagaggaactgccttcctgtccaggcatcagggcactttttgctttaa

SEQ ID NO: 179021 - DNA, 75 bp, Homo sapiens
aagggctgctgtgaatagaggaactgccttcctgtccaggcatcagggcactttttgctttaagagagattttaa

SEQ ID NO: 179022 - DNA, 76 bp, Homo sapiens
tgtgaatagaggaactgccttcctgtccaggcatcagggcactttttgctttaagagagattttaagttgatgatt

SEQ ID NO: 179023 - DNA, 76 bp, Homo sapiens
tagaggaactgccttcctgtccaggcatcagggcactttttgctttaagagagattttaagttgatgatttggatg

SEQ ID NO: 179024 - DNA, 74 bp, Homo sapiens
ttcctgtccaggcatcagggcactttttgctttaagagagattttaagttgatgatttggatgggtctttgaaa

SEQ ID NO: 179025 - DNA, 72 bp, Homo sapiens
aggcatcagggcactttttgctttaagagagattttaagttgatgatttggatgggtctttgaaaaattcca

SEQ ID NO: 179026 - DNA, 68 bp, Homo sapiens
gggcactttttgctttaagagagattttaagttgatgatttggatgggtctttgaaaaattccaaaag

SEQ ID NO: 179027 - DNA, 71 bp, Homo sapiens
taagagagattttaagttgatgatttggatgggtctttgaaaaattccaaaagtatctatcctcccttcag

SEQ ID NO: 179028 - DNA, 70 bp, Homo sapiens
gagattttaagttgatgatttggatgggtctttgaaaaattccaaaagtatctatcctcccttcagtaaa

SEQ ID NO: 179029 - DNA, 72 bp, Homo sapiens
gttgatgatttggatgggtctttgaaaaattccaaaagtatctatcctcccttcagtaaaattgcattataa

SEQ ID NO: 179030 - DNA, 70 bp, Homo sapiens
gggtctttgaaaaattccaaaagtatctatcctcccttcagtaaaattgcattataaaattatcctgctg

SEQ ID NO: 179031 - DNA, 71 bp, Homo sapiens
aaaattccaaaagtatctatcctcccttcagtaaaattgcattataaaattatcctgctggaggtcatccg

SEQ ID NO: 179032 - DNA, 72 bp, Homo sapiens
aaaagtatctatcctcccttcagtaaaattgcattataaaattatcctgctggaggtcatccggggagagga

SEQ ID NO: 179033 - DNA, 74 bp, Homo sapiens
ttcagtaaaattgcattataaaattatcctgctggaggtcatccggggagaggacaggaggaaggtgggatgga

SEQ ID NO: 179034 - DNA, 75 bp, Homo sapiens
aaaattatcctgctggaggtcatccggggagaggacaggaggaaggtgggatggactgaagatggccttgctgcc

SEQ ID NO: 179035 - DNA, 77 bp, Homo sapiens
ctggaggtcatccggggagaggacaggaggaaggtgggatggactgaagatggccttgctgcccaccatggtcagtg

SEQ ID NO: 179036 - DNA, 76 bp, Homo sapiens
atccggggagaggacaggaggaaggtgggatggactgaagatggccttgctgcccaccatggtcagtggtctacac

SEQ ID NO: 179037 - DNA, 79 bp, Homo sapiens
caggaggaaggtgggatggactgaagatggccttgctgcccaccatggtcagtggtctacaccctgctgtctcgctaaa

SEQ ID NO: 179038 - DNA, 79 bp, Homo sapiens
gtgggatggactgaagatggccttgctgcccaccatggtcagtggtctacaccctgctgtctcgctaaagtgttagatt

SEQ ID NO: 179039 - DNA, 79 bp, Homo sapiens
atggactgaagatggccttgctgcccaccatggtcagtggtctacaccctgctgtctcgctaaagtgttagatttggag

SEQ ID NO: 179040 - DNA, 79 bp, Homo sapiens
atggccttgctgcccaccatggtcagtggtctacaccctgctgtctcgctaaagtgttagatttggagggaggcaggca

SEQ ID NO: 179041 - DNA, 79 bp, Homo sapiens
caccatggtcagtggtctacaccctgctgtctcgctaaagtgttagatttggagggaggcaggcaggggatgaatgatg

SEQ ID NO: 179042 - DNA, 76 bp, Homo sapiens
agtggtctacaccctgctgtctcgctaaagtgttagatttggagggaggcaggcaggggatgaatgatggggaaga

SEQ ID NO: 179043 - DNA, 78 bp, Homo sapiens
tctacaccctgctgtctcgctaaagtgttagatttggagggaggcaggcaggggatgaatgatggggaagatgagagg

SEQ ID NO: 179044 - DNA, 77 bp, Homo sapiens
tgtctcgctaaagtgttagatttggagggaggcaggcaggggatgaatgatggggaagatgagaggtgggcgtttga

SEQ ID NO: 179045 - DNA, 77 bp, Homo sapiens
taaagtgttagatttggagggaggcaggcaggggatgaatgatggggaagatgagaggtgggcgtttgagtcgcaca

SEQ ID NO: 179046 - DNA, 76 bp, Homo sapiens
atttggagggaggcaggcaggggatgaatgatggggaagatgagaggtgggcgtttgagtcgcacagaccttgttc

SEQ ID NO: 179047 - DNA, 79 bp, Homo sapiens
aggcaggggatgaatgatggggaagatgagaggtgggcgtttgagtcgcacagaccttgttccagtcccagctctagca

SEQ ID NO: 179048 - DNA, 81 bp, Homo sapiens
atgaatgatggggaagatgagaggtgggcgtttgagtcgcacagaccttgttccagtcccagctctagcacccatcagctg

SEQ ID NO: 179049 - DNA, 78 bp, Homo sapiens
agaggtgggcgtttgagtcgcacagaccttgttccagtcccagctctagcacccatcagctggctgaagttgggacaa

SEQ ID NO: 179050 - DNA, 82 bp, Homo sapiens
tttgagtcgcacagaccttgttccagtcccagctctagcacccatcagctggctgaagttgggacaagtggcatattctcta

SEQ ID NO: 179051 - DNA, 80 bp, Homo sapiens
acagaccttgttccagtcccagctctagcacccatcagctggctgaagttgggacaagtggcatattctctaagtctcag

SEQ ID NO: 179052 - DNA, 79 bp, Homo sapiens
cttgttccagtcccagctctagcacccatcagctggctgaagttgggacaagtggcatattctctaagtctcagtttcc

SEQ ID NO: 179053 - DNA, 77 bp, Homo sapiens
acccatcagctggctgaagttgggacaagtggcatattctctaagtctcagtttcctcccctgtgatgtaaggatcc

SEQ ID NO: 179054 - DNA, 74 bp, Homo sapiens
ggacaagtggcatattctctaagtctcagtttcctcccctgtgatgtaaggatcccaggcttattgggaagatt

SEQ ID NO: 179055 - DNA, 72 bp, Homo sapiens
catattctctaagtctcagtttcctcccctgtgatgtaaggatcccaggcttattgggaagatttaagaaaa

SEQ ID NO: 179056 - DNA, 76 bp, Homo sapiens
ttcctcccctgtgatgtaaggatcccaggcttattgggaagatttaagaaaactgctgtgaagcacctggcatata

SEQ ID NO: 179057 - DNA, 78 bp, Homo sapiens
tgtgatgtaaggatcccaggcttattgggaagatttaagaaaactgctgtgaagcacctggcatatagtgggccctca

SEQ ID NO: 179058 - DNA, 75 bp, Homo sapiens
taaggatcccaggcttattgggaagatttaagaaaactgctgtgaagcacctggcatatagtgggccctcaataa

SEQ ID NO: 179059 - DNA, 74 bp, Homo sapiens
ttattgggaagatttaagaaaactgctgtgaagcacctggcatatagtgggccctcaataaatcagaaagttta

SEQ ID NO: 179060 - DNA, 77 bp, Homo sapiens
aaaactgctgtgaagcacctggcatatagtgggccctcaataaatcagaaagtttatcatcattgattattagaaaa

SEQ ID NO: 179061 - DNA, 76 bp, Homo sapiens
ctgtgaagcacctggcatatagtgggccctcaataaatcagaaagtttatcatcattgattattagaaaatttgtt

SEQ ID NO: 179062 - DNA, 75 bp, Homo sapiens
cctggcatatagtgggccctcaataaatcagaaagtttatcatcattgattattagaaaatttgtttcttctgga

SEQ ID NO: 179063 - DNA, 71 bp, Homo sapiens
aatcagaaagtttatcatcattgattattagaaaatttgtttcttctggagaagaaatttatgaaaatacg

SEQ ID NO: 179064 - DNA, 73 bp, Homo sapiens
gtttatcatcattgattattagaaaatttgtttcttctggagaagaaatttatgaaaatacggcaactgataa

SEQ ID NO: 179065 - DNA, 73 bp, Homo sapiens
catcattgattattagaaaatttgtttcttctggagaagaaatttatgaaaatacggcaactgataaaatcaa

SEQ ID NO: 179066 - DNA, 69 bp, Homo sapiens
gaaaatttgtttcttctggagaagaaatttatgaaaatacggcaactgataaaatcaaacccctcctgc

SEQ ID NO: 179067 - DNA, 73 bp, Homo sapiens
gaagaaatttatgaaaatacggcaactgataaaatcaaacccctcctgccatcaggagagagttgcctcttta

SEQ ID NO: 179068 - DNA, 73 bp, Homo sapiens
aatttatgaaaatacggcaactgataaaatcaaacccctcctgccatcaggagagagttgcctctttaagcca

SEQ ID NO: 179069 - DNA, 74 bp, Homo sapiens
aatacggcaactgataaaatcaaacccctcctgccatcaggagagagttgcctctttaagccagagtgactgtt

SEQ ID NO: 179070 - DNA, 72 bp, Homo sapiens
ataaaatcaaacccctcctgccatcaggagagagttgcctctttaagccagagtgactgttttcttcctgtt

SEQ ID NO: 179071 - DNA, 75 bp, Homo sapiens
ccctcctgccatcaggagagagttgcctctttaagccagagtgactgttttcttcctgtttaatttggctgtgac

SEQ ID NO: 179072 - DNA, 74 bp, Homo sapiens
atcaggagagagttgcctctttaagccagagtgactgttttcttcctgtttaatttggctgtgacccaggtgtg

SEQ ID NO: 179073 - DNA, 71 bp, Homo sapiens
agttgcctctttaagccagagtgactgttttcttcctgtttaatttggctgtgacccaggtgtgttgtttg

SEQ ID NO: 179074 - DNA, 69 bp, Homo sapiens
cctctttaagccagagtgactgttttcttcctgtttaatttggctgtgacccaggtgtgttgtttgggg

SEQ ID NO: 179075 - DNA, 69 bp, Homo sapiens
agagtgactgttttcttcctgtttaatttggctgtgacccaggtgtgttgtttgggggctttttctctc

SEQ ID NO: 179076 - DNA, 70 bp, Homo sapiens
ttcttcctgtttaatttggctgtgacccaggtgtgttgtttgggggctttttctctctgtgtatatttaa

SEQ ID NO: 179077 - DNA, 70 bp, Homo sapiens
tgtttaatttggctgtgacccaggtgtgttgtttgggggctttttctctctgtgtatatttaaccgccac

SEQ ID NO: 179078 - DNA, 69 bp, Homo sapiens
tgtgacccaggtgtgttgtttgggggctttttctctctgtgtatatttaaccgccacccctcccctgtc

SEQ ID NO: 179079 - DNA, 67 bp, Homo sapiens
tgtgttgtttgggggctttttctctctgtgtatatttaaccgccacccctcccctgtccagtttatt

SEQ ID NO: 179080 - DNA, 73 bp, Homo sapiens
tctctctgtgtatatttaaccgccacccctcccctgtccagtttattttctgtatcatcatgacttcccattt

SEQ ID NO: 179081 - DNA, 72 bp, Homo sapiens
ctgtgtatatttaaccgccacccctcccctgtccagtttattttctgtatcatcatgacttcccatttttca

SEQ ID NO: 179082 - DNA, 71 bp, Homo sapiens
ttaaccgccacccctcccctgtccagtttattttctgtatcatcatgacttcccatttttcactcaccttc

SEQ ID NO: 179083 - DNA, 76 bp, Homo sapiens
gtttattttctgtatcatcatgacttcccatttttcactcaccttccaccaagaagtctaagcaatattgatacaa

SEQ ID NO: 179084 - DNA, 77 bp, Homo sapiens
tttttcactcaccttccaccaagaagtctaagcaatattgatacaaggtactagatagcgccctgcatgtctaggaa

SEQ ID NO: 179085 - DNA, 76 bp, Homo sapiens
accttccaccaagaagtctaagcaatattgatacaaggtactagatagcgccctgcatgtctaggaagaaagtgta

SEQ ID NO: 179086 - DNA, 79 bp, Homo sapiens
aagaagtctaagcaatattgatacaaggtactagatagcgccctgcatgtctaggaagaaagtgtaactagatctgtga

SEQ ID NO: 179087 - DNA, 80 bp, Homo sapiens
agcaatattgatacaaggtactagatagcgccctgcatgtctaggaagaaagtgtaactagatctgtgatcagtcttaaa

SEQ ID NO: 179088 - DNA, 79 bp, Homo sapiens
tattgatacaaggtactagatagcgccctgcatgtctaggaagaaagtgtaactagatctgtgatcagtcttaaataat

SEQ ID NO: 179089 - DNA, 78 bp, Homo sapiens
aggtactagatagcgccctgcatgtctaggaagaaagtgtaactagatctgtgatcagtcttaaataattcaactgta

SEQ ID NO: 179090 - DNA, 72 bp, Homo sapiens
ccctgcatgtctaggaagaaagtgtaactagatctgtgatcagtcttaaataattcaactgtaagggttttt

SEQ ID NO: 179091 - DNA, 73 bp, Homo sapiens
catgtctaggaagaaagtgtaactagatctgtgatcagtcttaaataattcaactgtaagggttttttagcac

SEQ ID NO: 179092 - DNA, 68 bp, Homo sapiens
aagaaagtgtaactagatctgtgatcagtcttaaataattcaactgtaagggttttttagcacttttt

SEQ ID NO: 179093 - DNA, 69 bp, Homo sapiens
ctagatctgtgatcagtcttaaataattcaactgtaagggttttttagcacttttttttttccagtctg

SEQ ID NO: 179094 - DNA, 70 bp, Homo sapiens
tttagcacttttttttttccagtctgttatatttataacccaacagtctccattatcatggcttggaatt

SEQ ID NO: 179095 - DNA, 72 bp, Homo sapiens
ttttttttccagtctgttatatttataacccaacagtctccattatcatggcttggaatttcactcagtgtt

SEQ ID NO: 179096 - DNA, 75 bp, Homo sapiens
agtctgttatatttataacccaacagtctccattatcatggcttggaatttcactcagtgttttaacatgcggaa

SEQ ID NO: 179097 - DNA, 75 bp, Homo sapiens
tatatttataacccaacagtctccattatcatggcttggaatttcactcagtgttttaacatgcggaatgttaac

SEQ ID NO: 179098 - DNA, 70 bp, Homo sapiens
ggcttggaatttcactcagtgttttaacatgcggaatgttaacccaaacacgagccttagcaaaaaagta

SEQ ID NO: 179099 - DNA, 71 bp, Homo sapiens
aatttcactcagtgttttaacatgcggaatgttaacccaaacacgagccttagcaaaaaagtatcttctca

SEQ ID NO: 179100 - DNA, 73 bp, Homo sapiens
gtgttttaacatgcggaatgttaacccaaacacgagccttagcaaaaaagtatcttctcagttgtgcagccta

SEQ ID NO: 179101 - DNA, 73 bp, Homo sapiens
atgcggaatgttaacccaaacacgagccttagcaaaaaagtatcttctcagttgtgcagcctaccactgttaa

SEQ ID NO: 179102 - DNA, 74 bp, Homo sapiens
tgttaacccaaacacgagccttagcaaaaaagtatcttctcagttgtgcagcctaccactgttaatggcaaata

SEQ ID NO: 179103 - DNA, 80 bp, Homo sapiens
gagccttagcaaaaaagtatcttctcagttgtgcagcctaccactgttaatggcaaataggcacatgagtgaatcacaaa

SEQ ID NO: 179104 - DNA, 79 bp, Homo sapiens
ttagcaaaaaagtatcttctcagttgtgcagcctaccactgttaatggcaaataggcacatgagtgaatcacaaaataa

SEQ ID NO: 179105 - DNA, 80 bp, Homo sapiens
agtatcttctcagttgtgcagcctaccactgttaatggcaaataggcacatgagtgaatcacaaaataacagttaactga

SEQ ID NO: 179106 - DNA, 79 bp, Homo sapiens
agttgtgcagcctaccactgttaatggcaaataggcacatgagtgaatcacaaaataacagttaactgagggattcagc

SEQ ID NO: 179107 - DNA, 77 bp, Homo sapiens
taccactgttaatggcaaataggcacatgagtgaatcacaaaataacagttaactgagggattcagctgacaacttt

SEQ ID NO: 179108 - DNA, 78 bp, Homo sapiens
ttaatggcaaataggcacatgagtgaatcacaaaataacagttaactgagggattcagctgacaacttttcataccca

SEQ ID NO: 179109 - DNA, 77 bp, Homo sapiens
aataggcacatgagtgaatcacaaaataacagttaactgagggattcagctgacaacttttcatacccaggatttga

SEQ ID NO: 179110 - DNA, 76 bp, Homo sapiens
gaatcacaaaataacagttaactgagggattcagctgacaacttttcatacccaggatttgatctttcctgattca

SEQ ID NO: 179111 - DNA, 75 bp, Homo sapiens
acaaaataacagttaactgagggattcagctgacaacttttcatacccaggatttgatctttcctgattcagatg

SEQ ID NO: 179112 - DNA, 79 bp, Homo sapiens
ttaactgagggattcagctgacaacttttcatacccaggatttgatctttcctgattcagatggcagaagcttgtgttg

SEQ ID NO: 179113 - DNA, 77 bp, Homo sapiens
acaacttttcatacccaggatttgatctttcctgattcagatggcagaagcttgtgttgtgattacataaacaataa

SEQ ID NO: 179114 - DNA, 80 bp, Homo sapiens
tttgatctttcctgattcagatggcagaagcttgtgttgtgattacataaacaataagaagtctggatttcatccctcta

SEQ ID NO: 179115 - DNA, 81 bp, Homo sapiens
tgattcagatggcagaagcttgtgttgtgattacataaacaataagaagtctggatttcatccctctaacaacagattgac

SEQ ID NO: 179116 - DNA, 78 bp, Homo sapiens
gcagaagcttgtgttgtgattacataaacaataagaagtctggatttcatccctctaacaacagattgactttctgaa

SEQ ID NO: 179117 - DNA, 75 bp, Homo sapiens
agcttgtgttgtgattacataaacaataagaagtctggatttcatccctctaacaacagattgactttctgaaag

SEQ ID NO: 179118 - DNA, 70 bp, Homo sapiens
aaacaataagaagtctggatttcatccctctaacaacagattgactttctgaaaggggagaaaaggcttg

SEQ ID NO: 179119 - DNA, 74 bp, Homo sapiens
tctggatttcatccctctaacaacagattgactttctgaaaggggagaaaaggcttgtcgctaggccaccatta

SEQ ID NO: 179120 - DNA, 72 bp, Homo sapiens
ttcatccctctaacaacagattgactttctgaaaggggagaaaaggcttgtcgctaggccaccattactccc

SEQ ID NO: 179121 - DNA, 75 bp, Homo sapiens
acagattgactttctgaaaggggagaaaaggcttgtcgctaggccaccattactcccgctagcacgcagttcata

SEQ ID NO: 179122 - DNA, 75 bp, Homo sapiens
gggagaaaaggcttgtcgctaggccaccattactcccgctagcacgcagttcataggccaacactcaccttaaga

SEQ ID NO: 179123 - DNA, 74 bp, Homo sapiens
aaaaggcttgtcgctaggccaccattactcccgctagcacgcagttcataggccaacactcaccttaagaagta

SEQ ID NO: 179124 - DNA, 73 bp, Homo sapiens
ctaggccaccattactcccgctagcacgcagttcataggccaacactcaccttaagaagtactccctttagag

SEQ ID NO: 179125 - DNA, 73 bp, Homo sapiens
accattactcccgctagcacgcagttcataggccaacactcaccttaagaagtactccctttagagggtgctc

SEQ ID NO: 179126 - DNA, 75 bp, Homo sapiens
tagcacgcagttcataggccaacactcaccttaagaagtactccctttagagggtgctcccagttagagcacatt

SEQ ID NO: 179127 - DNA, 72 bp, Homo sapiens
agttcataggccaacactcaccttaagaagtactccctttagagggtgctcccagttagagcacatttctta

SEQ ID NO: 179128 - DNA, 73 bp, Homo sapiens
aacactcaccttaagaagtactccctttagagggtgctcccagttagagcacatttcttatgccattctattc

SEQ ID NO: 179129 - DNA, 76 bp, Homo sapiens
ttaagaagtactccctttagagggtgctcccagttagagcacatttcttatgccattctattccattcattcaaga

SEQ ID NO: 179130 - DNA, 76 bp, Homo sapiens
agtactccctttagagggtgctcccagttagagcacatttcttatgccattctattccattcattcaagaagacac

SEQ ID NO: 179131 - DNA, 81 bp, Homo sapiens
ttagagggtgctcccagttagagcacatttcttatgccattctattccattcattcaagaagacactcactgagtgtctat

SEQ ID NO: 179132 - DNA, 80 bp, Homo sapiens
agttagagcacatttcttatgccattctattccattcattcaagaagacactcactgagtgtctattctaatactttaga

SEQ ID NO: 179133 - DNA, 82 bp, Homo sapiens
catttcttatgccattctattccattcattcaagaagacactcactgagtgtctattctaatactttagaatgatttcagca

SEQ ID NO: 179134 - DNA, 78 bp, Homo sapiens
attccattcattcaagaagacactcactgagtgtctattctaatactttagaatgatttcagcagtatcttggaagtt

SEQ ID NO: 179135 - DNA, 76 bp, Homo sapiens
attcaagaagacactcactgagtgtctattctaatactttagaatgatttcagcagtatcttggaagtttgggaac

SEQ ID NO: 179136 - DNA, 76 bp, Homo sapiens
agtgtctattctaatactttagaatgatttcagcagtatcttggaagtttgggaacccgcatcaggaatagctcag

SEQ ID NO: 179137 - DNA, 76 bp, Homo sapiens
taatactttagaatgatttcagcagtatcttggaagtttgggaacccgcatcaggaatagctcaggagaggatgtt

SEQ ID NO: 179138 - DNA, 77 bp, Homo sapiens
ttagaatgatttcagcagtatcttggaagtttgggaacccgcatcaggaatagctcaggagaggatgttttgtcttc

SEQ ID NO: 179139 - DNA, 78 bp, Homo sapiens
ttcagcagtatcttggaagtttgggaacccgcatcaggaatagctcaggagaggatgttttgtcttcctgcctgacag

SEQ ID NO: 179140 - DNA, 79 bp, Homo sapiens
ttggaagtttgggaacccgcatcaggaatagctcaggagaggatgttttgtcttcctgcctgacaggcatcaccagcaa

SEQ ID NO: 179141 - DNA, 81 bp, Homo sapiens
ttgggaacccgcatcaggaatagctcaggagaggatgttttgtcttcctgcctgacaggcatcaccagcaatcagagtagg

SEQ ID NO: 179142 - DNA, 84 bp, Homo sapiens
atcaggaatagctcaggagaggatgttttgtcttcctgcctgacaggcatcaccagcaatcagagtagggtgccctgtgcgtga

SEQ ID NO: 179143 - DNA, 81 bp, Homo sapiens
tcaggagaggatgttttgtcttcctgcctgacaggcatcaccagcaatcagagtagggtgccctgtgcgtgacctgaccct

SEQ ID NO: 179144 - DNA, 81 bp, Homo sapiens
atgttttgtcttcctgcctgacaggcatcaccagcaatcagagtagggtgccctgtgcgtgacctgacccttgtctgtgtg

SEQ ID NO: 179145 - DNA, 83 bp, Homo sapiens
ttcctgcctgacaggcatcaccagcaatcagagtagggtgccctgtgcgtgacctgacccttgtctgtgtggccacctgtgtg

SEQ ID NO: 179146 - DNA, 84 bp, Homo sapiens
cctgacaggcatcaccagcaatcagagtagggtgccctgtgcgtgacctgacccttgtctgtgtggccacctgtgtggtgctgc

SEQ ID NO: 179147 - DNA, 83 bp, Homo sapiens
atcaccagcaatcagagtagggtgccctgtgcgtgacctgacccttgtctgtgtggccacctgtgtggtgctgccctctggca

SEQ ID NO: 179148 - DNA, 82 bp, Homo sapiens
atcagagtagggtgccctgtgcgtgacctgacccttgtctgtgtggccacctgtgtggtgctgccctctggcagcctgagcc

SEQ ID NO: 179149 - DNA, 83 bp, Homo sapiens
cctgtgcgtgacctgacccttgtctgtgtggccacctgtgtggtgctgccctctggcagcctgagcccactgggcagcagtgt

SEQ ID NO: 179150 - DNA, 83 bp, Homo sapiens
cgtgacctgacccttgtctgtgtggccacctgtgtggtgctgccctctggcagcctgagcccactgggcagcagtgttggcaa

SEQ ID NO: 179151 - DNA, 86 bp, Homo sapiens
ttgtctgtgtggccacctgtgtggtgctgccctctggcagcctgagcccactgggcagcagtgttggcaacgttgcagaaggcatc

SEQ ID NO: 179152 - DNA, 86 bp, Homo sapiens
tggccacctgtgtggtgctgccctctggcagcctgagcccactgggcagcagtgttggcaacgttgcagaaggcatctgaactcta

SEQ ID NO: 179153 - DNA, 86 bp, Homo sapiens
tgtgtggtgctgccctctggcagcctgagcccactgggcagcagtgttggcaacgttgcagaaggcatctgaactctagggctgtc

SEQ ID NO: 179154 - DNA, 84 bp, Homo sapiens
ctctggcagcctgagcccactgggcagcagtgttggcaacgttgcagaaggcatctgaactctagggctgtcctcactgttgac

SEQ ID NO: 179155 - DNA, 78 bp, Homo sapiens
actgggcagcagtgttggcaacgttgcagaaggcatctgaactctagggctgtcctcactgttgacttattattttat

SEQ ID NO: 179156 - DNA, 76 bp, Homo sapiens
agtgttggcaacgttgcagaaggcatctgaactctagggctgtcctcactgttgacttattattttattagattta

SEQ ID NO: 179157 - DNA, 80 bp, Homo sapiens
aacgttgcagaaggcatctgaactctagggctgtcctcactgttgacttattattttattagatttatgcagcagcctgc

SEQ ID NO: 179158 - DNA, 79 bp, Homo sapiens
agaaggcatctgaactctagggctgtcctcactgttgacttattattttattagatttatgcagcagcctgcctccaaa

SEQ ID NO: 179159 - DNA, 75 bp, Homo sapiens
aactctagggctgtcctcactgttgacttattattttattagatttatgcagcagcctgcctccaaagaagaaat

SEQ ID NO: 179160 - DNA, 74 bp, Homo sapiens
tcctcactgttgacttattattttattagatttatgcagcagcctgcctccaaagaagaaatttggtgtgtttt

SEQ ID NO: 179161 - DNA, 72 bp, Homo sapiens
ttttattagatttatgcagcagcctgcctccaaagaagaaatttggtgtgttttttcattgggaagtaattc

SEQ ID NO: 179162 - DNA, 76 bp, Homo sapiens
ttagatttatgcagcagcctgcctccaaagaagaaatttggtgtgttttttcattgggaagtaattccagactgca

SEQ ID NO: 179163 - DNA, 71 bp, Homo sapiens
agcagcctgcctccaaagaagaaatttggtgtgttttttcattgggaagtaattccagactgcaggaaaaa

SEQ ID NO: 179164 - DNA, 68 bp, Homo sapiens
cctccaaagaagaaatttggtgtgttttttcattgggaagtaattccagactgcaggaaaaaagcatt

SEQ ID NO: 179165 - DNA, 74 bp, Homo sapiens
aaaaaaaacaaacctccactgagcgagagaaagggagactctgatgagagacgtaggagccatcaggctgtaaa

SEQ ID NO: 179166 - DNA, 76 bp, Homo sapiens
aaacaaacctccactgagcgagagaaagggagactctgatgagagacgtaggagccatcaggctgtaaataaataa

SEQ ID NO: 179167 - DNA, 78 bp, Homo sapiens
actgagcgagagaaagggagactctgatgagagacgtaggagccatcaggctgtaaataaataaaaagcacctggctg

SEQ ID NO: 179168 - DNA, 80 bp, Homo sapiens
actctgatgagagacgtaggagccatcaggctgtaaataaataaaaagcacctggctgggcgccagcatacacgtctctg

SEQ ID NO: 179169 - DNA, 81 bp, Homo sapiens
agacgtaggagccatcaggctgtaaataaataaaaagcacctggctgggcgccagcatacacgtctctgtctctgctatga

SEQ ID NO: 179170 - DNA, 81 bp, Homo sapiens
agccatcaggctgtaaataaataaaaagcacctggctgggcgccagcatacacgtctctgtctctgctatgacccaattca

SEQ ID NO: 179171 - DNA, 78 bp, Homo sapiens
taaataaataaaaagcacctggctgggcgccagcatacacgtctctgtctctgctatgacccaattcagggattctcc

SEQ ID NO: 179172 - DNA, 79 bp, Homo sapiens
aaataaaaagcacctggctgggcgccagcatacacgtctctgtctctgctatgacccaattcagggattctccctgaga

SEQ ID NO: 179173 - DNA, 79 bp, Homo sapiens
acctggctgggcgccagcatacacgtctctgtctctgctatgacccaattcagggattctccctgagaggaggttttga

SEQ ID NO: 179174 - DNA, 80 bp, Homo sapiens
cagcatacacgtctctgtctctgctatgacccaattcagggattctccctgagaggaggttttgagcctctgattttata

SEQ ID NO: 179175 - DNA, 77 bp, Homo sapiens
tacacgtctctgtctctgctatgacccaattcagggattctccctgagaggaggttttgagcctctgattttataat

SEQ ID NO: 179176 - DNA, 74 bp, Homo sapiens
tctgctatgacccaattcagggattctccctgagaggaggttttgagcctctgattttataatttgggtttcta

SEQ ID NO: 179177 - DNA, 77 bp, Homo sapiens
tgagaggaggttttgagcctctgattttataatttgggtttctatgaagctggatgtcttgcctgtgtactgataag

SEQ ID NO: 179178 - DNA, 77 bp, Homo sapiens
ttttgagcctctgattttataatttgggtttctatgaagctggatgtcttgcctgtgtactgataagtaatatagtc

SEQ ID NO: 179179 - DNA, 81 bp, Homo sapiens
tttctatgaagctggatgtcttgcctgtgtactgataagtaatatagtctgtcatcttttgtcagctaggtagggattgga

SEQ ID NO: 179180 - DNA, 77 bp, Homo sapiens
aagctggatgtcttgcctgtgtactgataagtaatatagtctgtcatcttttgtcagctaggtagggattggagttt

SEQ ID NO: 179181 - DNA, 74 bp, Homo sapiens
cctgtgtactgataagtaatatagtctgtcatcttttgtcagctaggtagggattggagtttttgagaatggtt

SEQ ID NO: 179182 - DNA, 74 bp, Homo sapiens
gtactgataagtaatatagtctgtcatcttttgtcagctaggtagggattggagtttttgagaatggtttttca

SEQ ID NO: 179183 - DNA, 73 bp, Homo sapiens
gtaatatagtctgtcatcttttgtcagctaggtagggattggagtttttgagaatggtttttcactccaaaca

SEQ ID NO: 179184 - DNA, 72 bp, Homo sapiens
ttgtcagctaggtagggattggagtttttgagaatggtttttcactccaaacagctcagaggacctgggagg

SEQ ID NO: 179185 - DNA, 69 bp, Homo sapiens
ggtagggattggagtttttgagaatggtttttcactccaaacagctcagaggacctgggaggggtggaa

SEQ ID NO: 179186 - DNA, 70 bp, Homo sapiens
agtttttgagaatggtttttcactccaaacagctcagaggacctgggaggggtggaaggtgcaccgagtg

SEQ ID NO: 179187 - DNA, 72 bp, Homo sapiens
agaatggtttttcactccaaacagctcagaggacctgggaggggtggaaggtgcaccgagtgggctcttgga

SEQ ID NO: 179188 - DNA, 76 bp, Homo sapiens
ttcactccaaacagctcagaggacctgggaggggtggaaggtgcaccgagtgggctcttggaggtctgctcacacg

SEQ ID NO: 179189 - DNA, 79 bp, Homo sapiens
tgggaggggtggaaggtgcaccgagtgggctcttggaggtctgctcacacggcttcacagtgacttcacagggtctgca

SEQ ID NO: 179190 - DNA, 83 bp, Homo sapiens
tggaaggtgcaccgagtgggctcttggaggtctgctcacacggcttcacagtgacttcacagggtctgcaggagctctcctga

SEQ ID NO: 179191 - DNA, 80 bp, Homo sapiens
accgagtgggctcttggaggtctgctcacacggcttcacagtgacttcacagggtctgcaggagctctcctgagtggacc

SEQ ID NO: 179192 - DNA, 84 bp, Homo sapiens
tctgctcacacggcttcacagtgacttcacagggtctgcaggagctctcctgagtggaccccagagccctctgctaggaatgga

SEQ ID NO: 179193 - DNA, 79 bp, Homo sapiens
acacggcttcacagtgacttcacagggtctgcaggagctctcctgagtggaccccagagccctctgctaggaatggagg

SEQ ID NO: 179194 - DNA, 76 bp, Homo sapiens
agtgacttcacagggtctgcaggagctctcctgagtggaccccagagccctctgctaggaatggaggggagtggtt

SEQ ID NO: 179195 - DNA, 75 bp, Homo sapiens
acagggtctgcaggagctctcctgagtggaccccagagccctctgctaggaatggaggggagtggtttggtttga

SEQ ID NO: 179196 - DNA, 72 bp, Homo sapiens
gagctctcctgagtggaccccagagccctctgctaggaatggaggggagtggtttggtttgagggcttttgt

SEQ ID NO: 179197 - DNA, 66 bp, Homo sapiens
accccagagccctctgctaggaatggaggggagtggtttggtttgagggcttttgttttgttgttt

SEQ ID NO: 179198 - DNA, 63 bp, Homo sapiens
gttttgttgttttcattactattttcttgatagaagggcgggggggagggggggtgttgccct

SEQ ID NO: 179199 - DNA, 64 bp, Homo sapiens
ttttcattactattttcttgatagaagggcgggggggagggggggtgttgccctttactctagt

SEQ ID NO: 179200 - DNA, 67 bp, Homo sapiens
tattttcttgatagaagggcgggggggagggggggtgttgccctttactctagttcttgcatttgaa

SEQ ID NO: 179201 - DNA, 69 bp, Homo sapiens
ttgatagaagggcgggggggagggggggtgttgccctttactctagttcttgcatttgaattgctaaca

SEQ ID NO: 179202 - DNA, 67 bp, Homo sapiens
ggggggagggggggtgttgccctttactctagttcttgcatttgaattgctaacatcctcttttccc

SEQ ID NO: 179203 - DNA, 66 bp, Homo sapiens
agggggggtgttgccctttactctagttcttgcatttgaattgctaacatcctcttttcccttttt

SEQ ID NO: 179204 - DNA, 68 bp, Homo sapiens
gttgccctttactctagttcttgcatttgaattgctaacatcctcttttcccttttttcttcctattt

SEQ ID NO: 179205 - DNA, 69 bp, Homo sapiens
ctctagttcttgcatttgaattgctaacatcctcttttcccttttttcttcctattttgatttggtttc

SEQ ID NO: 179206 - DNA, 73 bp, Homo sapiens
gcatttgaattgctaacatcctcttttcccttttttcttcctattttgatttggtttctcattgctcaatgtc

SEQ ID NO: 179207 - DNA, 70 bp, Homo sapiens
ctaacatcctcttttcccttttttcttcctattttgatttggtttctcattgctcaatgtcttctcttcc

SEQ ID NO: 179208 - DNA, 70 bp, Homo sapiens
ttttcccttttttcttcctattttgatttggtttctcattgctcaatgtcttctcttcctgtctcctcct

SEQ ID NO: 179209 - DNA, 72 bp, Homo sapiens
tttttcttcctattttgatttggtttctcattgctcaatgtcttctcttcctgtctcctcctttctttctcc

SEQ ID NO: 179210 - DNA, 73 bp, Homo sapiens
tattttgatttggtttctcattgctcaatgtcttctcttcctgtctcctcctttctttctccctatttctgtt

SEQ ID NO: 179211 - DNA, 73 bp, Homo sapiens
atttggtttctcattgctcaatgtcttctcttcctgtctcctcctttctttctccctatttctgtttgtttgc

SEQ ID NO: 179212 - DNA, 75 bp, Homo sapiens
attgctcaatgtcttctcttcctgtctcctcctttctttctccctatttctgtttgtttgcctctgttttgctca

SEQ ID NO: 179213 - DNA, 73 bp, Homo sapiens
tcttctcttcctgtctcctcctttctttctccctatttctgtttgtttgcctctgttttgctcaggtggcttc

SEQ ID NO: 179214 - DNA, 74 bp, Homo sapiens
ttcctgtctcctcctttctttctccctatttctgtttgtttgcctctgttttgctcaggtggcttcggtgctgc

SEQ ID NO: 179215 - DNA, 75 bp, Homo sapiens
ctatttctgtttgtttgcctctgttttgctcaggtggcttcggtgctgctccagtgtttggcagccctcctactt

SEQ ID NO: 179216 - DNA, 73 bp, Homo sapiens
tctgttttgctcaggtggcttcggtgctgctccagtgtttggcagccctcctacttttgggggatcccctggg

SEQ ID NO: 179217 - DNA, 73 bp, Homo sapiens
ttgctcaggtggcttcggtgctgctccagtgtttggcagccctcctacttttgggggatcccctgggtttgga

SEQ ID NO: 179218 - DNA, 70 bp, Homo sapiens
tccagtgtttggcagccctcctacttttgggggatcccctgggtttggaggggtgccagcattcggttca

SEQ ID NO: 179219 - DNA, 68 bp, Homo sapiens
gtttggcagccctcctacttttgggggatcccctgggtttggaggggtgccagcattcggttcagccc

SEQ ID NO: 179220 - DNA, 68 bp, Homo sapiens
tcctacttttgggggatcccctgggtttggaggggtgccagcattcggttcagccccagcctttacaa

SEQ ID NO: 179221 - DNA, 71 bp, Homo sapiens
ggatcccctgggtttggaggggtgccagcattcggttcagccccagcctttacaagccctctgggctcgac

SEQ ID NO: 179222 - DNA, 71 bp, Homo sapiens
ggtttggaggggtgccagcattcggttcagccccagcctttacaagccctctgggctcgacgggaggcaaa

SEQ ID NO: 179223 - DNA, 73 bp, Homo sapiens
gggtgccagcattcggttcagccccagcctttacaagccctctgggctcgacgggaggcaaagtgttcggaga

SEQ ID NO: 179224 - DNA, 73 bp, Homo sapiens
attcggttcagccccagcctttacaagccctctgggctcgacgggaggcaaagtgttcggagagggcactgca

SEQ ID NO: 179225 - DNA, 79 bp, Homo sapiens
ttcagccccagcctttacaagccctctgggctcgacgggaggcaaagtgttcggagagggcactgcagctgccagcgca

SEQ ID NO: 179226 - DNA, 76 bp, Homo sapiens
cctctgggctcgacgggaggcaaagtgttcggagagggcactgcagctgccagcgcaggaggattcgggtaagccc

SEQ ID NO: 179227 - DNA, 74 bp, Homo sapiens
ctcgacgggaggcaaagtgttcggagagggcactgcagctgccagcgcaggaggattcgggtaagccccctggg

SEQ ID NO: 179228 - DNA, 75 bp, Homo sapiens
aatgccaggtcagttattaaatctccataagagcccattaccttcttccaggtccctggccatgagcctgtctcc

SEQ ID NO: 179229 - DNA, 73 bp, Homo sapiens
agttattaaatctccataagagcccattaccttcttccaggtccctggccatgagcctgtctccgaccctgaa

SEQ ID NO: 179230 - DNA, 75 bp, Homo sapiens
atctccataagagcccattaccttcttccaggtccctggccatgagcctgtctccgaccctgaagggcaggctgt

SEQ ID NO: 179231 - DNA, 77 bp, Homo sapiens
cattaccttcttccaggtccctggccatgagcctgtctccgaccctgaagggcaggctgttgctgatgaggcccaag

SEQ ID NO: 179232 - DNA, 78 bp, Homo sapiens
ccttcttccaggtccctggccatgagcctgtctccgaccctgaagggcaggctgttgctgatgaggcccaaggcagga

SEQ ID NO: 179233 - DNA, 77 bp, Homo sapiens
ggtccctggccatgagcctgtctccgaccctgaagggcaggctgttgctgatgaggcccaaggcaggaggaggaagg

SEQ ID NO: 179234 - DNA, 79 bp, Homo sapiens
atgagcctgtctccgaccctgaagggcaggctgttgctgatgaggcccaaggcaggaggaggaagggagcaggccgctc

SEQ ID NO: 179235 - DNA, 76 bp, Homo sapiens
cgaccctgaagggcaggctgttgctgatgaggcccaaggcaggaggaggaagggagcaggccgctcctgggagaaa

SEQ ID NO: 179236 - DNA, 77 bp, Homo sapiens
aagggcaggctgttgctgatgaggcccaaggcaggaggaggaagggagcaggccgctcctgggagaaagtccaatga

SEQ ID NO: 179237 - DNA, 79 bp, Homo sapiens
tgttgctgatgaggcccaaggcaggaggaggaagggagcaggccgctcctgggagaaagtccaatgagagcagatccct

SEQ ID NO: 179238 - DNA, 77 bp, Homo sapiens
atgaggcccaaggcaggaggaggaagggagcaggccgctcctgggagaaagtccaatgagagcagatcccttggcca

SEQ ID NO: 179239 - DNA, 75 bp, Homo sapiens
ggaggaggaagggagcaggccgctcctgggagaaagtccaatgagagcagatcccttggccacctttgtatggaa

SEQ ID NO: 179240 - DNA, 74 bp, Homo sapiens
aagggagcaggccgctcctgggagaaagtccaatgagagcagatcccttggccacctttgtatggaaagagcct

SEQ ID NO: 179241 - DNA, 76 bp, Homo sapiens
cgctcctgggagaaagtccaatgagagcagatcccttggccacctttgtatggaaagagccttgacctcaccatta

SEQ ID NO: 179242 - DNA, 74 bp, Homo sapiens
agaaagtccaatgagagcagatcccttggccacctttgtatggaaagagccttgacctcaccattaaaagtgaa

SEQ ID NO: 179243 - DNA, 76 bp, Homo sapiens
gtccaatgagagcagatcccttggccacctttgtatggaaagagccttgacctcaccattaaaagtgaatagaatg

SEQ ID NO: 179244 - DNA, 71 bp, Homo sapiens
agatcccttggccacctttgtatggaaagagccttgacctcaccattaaaagtgaatagaatggtgggaag

SEQ ID NO: 179245 - DNA, 72 bp, Homo sapiens
cacctttgtatggaaagagccttgacctcaccattaaaagtgaatagaatggtgggaaggcagagttttaga

SEQ ID NO: 179246 - DNA, 79 bp, Homo sapiens
aagtggtgagaggccccactgacctcagtctgtttctcactggagcgcaggtttgggagcagcagcaacaccacatcct

SEQ ID NO: 179247 - DNA, 83 bp, Homo sapiens
ccactgacctcagtctgtttctcactggagcgcaggtttgggagcagcagcaacaccacatccttcggcacgctcgcgagtca

SEQ ID NO: 179248 - DNA, 83 bp, Homo sapiens
acctcagtctgtttctcactggagcgcaggtttgggagcagcagcaacaccacatccttcggcacgctcgcgagtcagaatgc

SEQ ID NO: 179249 - DNA, 80 bp, Homo sapiens
tttctcactggagcgcaggtttgggagcagcagcaacaccacatccttcggcacgctcgcgagtcagaatgcccccactt

SEQ ID NO: 179250 - DNA, 80 bp, Homo sapiens
cgcaggtttgggagcagcagcaacaccacatccttcggcacgctcgcgagtcagaatgcccccactttcggatcactgtc

SEQ ID NO: 179251 - DNA, 80 bp, Homo sapiens
tttgggagcagcagcaacaccacatccttcggcacgctcgcgagtcagaatgcccccactttcggatcactgtcccaaca

SEQ ID NO: 179252 - DNA, 76 bp, Homo sapiens
caacaccacatccttcggcacgctcgcgagtcagaatgcccccactttcggatcactgtcccaacagacttctggt

SEQ ID NO: 179253 - DNA, 74 bp, Homo sapiens
acatccttcggcacgctcgcgagtcagaatgcccccactttcggatcactgtcccaacagacttctggttttgg

SEQ ID NO: 179254 - DNA, 73 bp, Homo sapiens
acgctcgcgagtcagaatgcccccactttcggatcactgtcccaacagacttctggttttgggacccagagta

SEQ ID NO: 179255 - DNA, 72 bp, Homo sapiens
agtcagaatgcccccactttcggatcactgtcccaacagacttctggttttgggacccagagtagcggattc

SEQ ID NO: 179256 - DNA, 70 bp, Homo sapiens
cccactttcggatcactgtcccaacagacttctggttttgggacccagagtagcggattctctggttttg

SEQ ID NO: 179257 - DNA, 74 bp, Homo sapiens
tttcggatcactgtcccaacagacttctggttttgggacccagagtagcggattctctggttttggatcaggca

SEQ ID NO: 179258 - DNA, 73 bp, Homo sapiens
tgtcccaacagacttctggttttgggacccagagtagcggattctctggttttggatcaggcacaggaggtaa

SEQ ID NO: 179259 - DNA, 74 bp, Homo sapiens
ttctggttttgggacccagagtagcggattctctggttttggatcaggcacaggaggtaagctgccacaagttc

SEQ ID NO: 179260 - DNA, 73 bp, Homo sapiens
ttttgggacccagagtagcggattctctggttttggatcaggcacaggaggtaagctgccacaagttctcccc

SEQ ID NO: 179261 - DNA, 76 bp, Homo sapiens
agagtagcggattctctggttttggatcaggcacaggaggtaagctgccacaagttctcccctcacaagcaaaatg

SEQ ID NO: 179262 - DNA, 74 bp, Homo sapiens
ttctctggttttggatcaggcacaggaggtaagctgccacaagttctcccctcacaagcaaaatgggtccctct

SEQ ID NO: 179263 - DNA, 75 bp, Homo sapiens
ttttggatcaggcacaggaggtaagctgccacaagttctcccctcacaagcaaaatgggtccctcttgccttctc

SEQ ID NO: 179264 - DNA, 70 bp, Homo sapiens
aggaggtaagctgccacaagttctcccctcacaagcaaaatgggtccctcttgccttctcccccaaagaa

SEQ ID NO: 179265 - DNA, 73 bp, Homo sapiens
taagctgccacaagttctcccctcacaagcaaaatgggtccctcttgccttctcccccaaagaaatgagtatg

SEQ ID NO: 179266 - DNA, 69 bp, Homo sapiens
acaagttctcccctcacaagcaaaatgggtccctcttgccttctcccccaaagaaatgagtatgtttta

SEQ ID NO: 179267 - DNA, 69 bp, Homo sapiens
acaagcaaaatgggtccctcttgccttctcccccaaagaaatgagtatgttttacctgaccagtctgtt

SEQ ID NO: 179268 - DNA, 69 bp, Homo sapiens
tgggtccctcttgccttctcccccaaagaaatgagtatgttttacctgaccagtctgtttagtatttta

SEQ ID NO: 179269 - DNA, 67 bp, Homo sapiens
ccctcttgccttctcccccaaagaaatgagtatgttttacctgaccagtctgtttagtattttaaaa

SEQ ID NO: 179270 - DNA, 69 bp, Homo sapiens
ccccaaagaaatgagtatgttttacctgaccagtctgtttagtattttaaaagctgactgggcacgtgg

SEQ ID NO: 179271 - DNA, 71 bp, Homo sapiens
aagaaatgagtatgttttacctgaccagtctgtttagtattttaaaagctgactgggcacgtggttcacgc

SEQ ID NO: 179272 - DNA, 66 bp, Homo sapiens
tatatttttttttaggttttagttagacttagaacactgtgtcatttcttaccaaagaaattactg

SEQ ID NO: 179273 - DNA, 69 bp, Homo sapiens
tttaggttttagttagacttagaacactgtgtcatttcttaccaaagaaattactgtcttgatttcctc

SEQ ID NO: 179274 - DNA, 74 bp, Homo sapiens
ttagttagacttagaacactgtgtcatttcttaccaaagaaattactgtcttgatttcctctcaggatttgaga

SEQ ID NO: 179275 - DNA, 74 bp, Homo sapiens
tagaacactgtgtcatttcttaccaaagaaattactgtcttgatttcctctcaggatttgagaagcccaaaata

SEQ ID NO: 179276 - DNA, 72 bp, Homo sapiens
gtgtcatttcttaccaaagaaattactgtcttgatttcctctcaggatttgagaagcccaaaataataatgg

SEQ ID NO: 179277 - DNA, 72 bp, Homo sapiens
taccaaagaaattactgtcttgatttcctctcaggatttgagaagcccaaaataataatggtcttactaggc

SEQ ID NO: 179278 - DNA, 71 bp, Homo sapiens
ttactgtcttgatttcctctcaggatttgagaagcccaaaataataatggtcttactaggccttggtttaa

SEQ ID NO: 179279 - DNA, 69 bp, Homo sapiens
gtcttgatttcctctcaggatttgagaagcccaaaataataatggtcttactaggccttggtttaaaaa

SEQ ID NO: 179280 - DNA, 69 bp, Homo sapiens
cctctcaggatttgagaagcccaaaataataatggtcttactaggccttggtttaaaaaatctaagcca

SEQ ID NO: 179281 - DNA, 70 bp, Homo sapiens
tttgagaagcccaaaataataatggtcttactaggccttggtttaaaaaatctaagccagcagactcaaa

SEQ ID NO: 179282 - DNA, 66 bp, Homo sapiens
ccaaaataataatggtcttactaggccttggtttaaaaaatctaagccagcagactcaaaaaaaaa

SEQ ID NO: 179283 - DNA, 76 bp, Homo sapiens
aaaaaaaggcatagaaacttcacaaaacatcttgcatttgtttaacactctgcttcttcagatggcagaatatgtg

SEQ ID NO: 179284 - DNA, 78 bp, Homo sapiens
atagaaacttcacaaaacatcttgcatttgtttaacactctgcttcttcagatggcagaatatgtgtcttccattttg

SEQ ID NO: 179285 - DNA, 77 bp, Homo sapiens
aacttcacaaaacatcttgcatttgtttaacactctgcttcttcagatggcagaatatgtgtcttccattttgttct

SEQ ID NO: 179286 - DNA, 80 bp, Homo sapiens
atcttgcatttgtttaacactctgcttcttcagatggcagaatatgtgtcttccattttgttcttgcagtaaactgacaa

SEQ ID NO: 179287 - DNA, 79 bp, Homo sapiens
atttgtttaacactctgcttcttcagatggcagaatatgtgtcttccattttgttcttgcagtaaactgacaaggcaca

SEQ ID NO: 179288 - DNA, 81 bp, Homo sapiens
tgcttcttcagatggcagaatatgtgtcttccattttgttcttgcagtaaactgacaaggcacagaatttaggtatcatta

SEQ ID NO: 179289 - DNA, 79 bp, Homo sapiens
gatggcagaatatgtgtcttccattttgttcttgcagtaaactgacaaggcacagaatttaggtatcattacaattgta

SEQ ID NO: 179290 - DNA, 75 bp, Homo sapiens
agaatatgtgtcttccattttgttcttgcagtaaactgacaaggcacagaatttaggtatcattacaattgtacc

SEQ ID NO: 179291 - DNA, 73 bp, Homo sapiens
ccattttgttcttgcagtaaactgacaaggcacagaatttaggtatcattacaattgtacccgtgaagaaaca

SEQ ID NO: 179292 - DNA, 73 bp, Homo sapiens
ttgttcttgcagtaaactgacaaggcacagaatttaggtatcattacaattgtacccgtgaagaaacagaaac

SEQ ID NO: 179293 - DNA, 71 bp, Homo sapiens
agtaaactgacaaggcacagaatttaggtatcattacaattgtacccgtgaagaaacagaaactccaagga

SEQ ID NO: 179294 - DNA, 70 bp, Homo sapiens
aggcacagaatttaggtatcattacaattgtacccgtgaagaaacagaaactccaaggaactaagtgtta

SEQ ID NO: 179295 - DNA, 71 bp, Homo sapiens
atttaggtatcattacaattgtacccgtgaagaaacagaaactccaaggaactaagtgttagcagttagca

SEQ ID NO: 179296 - DNA, 70 bp, Homo sapiens
attacaattgtacccgtgaagaaacagaaactccaaggaactaagtgttagcagttagcagtagaaccag

SEQ ID NO: 179297 - DNA, 72 bp, Homo sapiens
tgtacccgtgaagaaacagaaactccaaggaactaagtgttagcagttagcagtagaaccaggcctagaatc

SEQ ID NO: 179298 - DNA, 74 bp, Homo sapiens
aagaaacagaaactccaaggaactaagtgttagcagttagcagtagaaccaggcctagaatccagccatcttgc

SEQ ID NO: 179299 - DNA, 74 bp, Homo sapiens
aaacagaaactccaaggaactaagtgttagcagttagcagtagaaccaggcctagaatccagccatcttgcttc

SEQ ID NO: 179300 - DNA, 75 bp, Homo sapiens
aactccaaggaactaagtgttagcagttagcagtagaaccaggcctagaatccagccatcttgcttctctggccc

SEQ ID NO: 179301 - DNA, 74 bp, Homo sapiens
aactaagtgttagcagttagcagtagaaccaggcctagaatccagccatcttgcttctctggcccccaaaaaga

SEQ ID NO: 179302 - DNA, 75 bp, Homo sapiens
agtgttagcagttagcagtagaaccaggcctagaatccagccatcttgcttctctggcccccaaaaagaagagga

SEQ ID NO: 179303 - DNA, 74 bp, Homo sapiens
agttagcagtagaaccaggcctagaatccagccatcttgcttctctggcccccaaaaagaagaggaagcaaatg

SEQ ID NO: 179304 - DNA, 76 bp, Homo sapiens
ttagcagtagaaccaggcctagaatccagccatcttgcttctctggcccccaaaaagaagaggaagcaaatggatg

SEQ ID NO: 179305 - DNA, 74 bp, Homo sapiens
tagaaccaggcctagaatccagccatcttgcttctctggcccccaaaaagaagaggaagcaaatggatggaaaa

SEQ ID NO: 179306 - DNA, 72 bp, Homo sapiens
aaccaggcctagaatccagccatcttgcttctctggcccccaaaaagaagaggaagcaaatggatggaaaaa

SEQ ID NO: 179307 - DNA, 75 bp, Homo sapiens
tagaatccagccatcttgcttctctggcccccaaaaagaagaggaagcaaatggatggaaaaacaacaacagcaa

SEQ ID NO: 179308 - DNA, 71 bp, Homo sapiens
aaaaaaaaaaggttttcctaatgaatggatctatgtggtccagtacagctgagaggccaagccagagaccc

SEQ ID NO: 179309 - DNA, 76 bp, Homo sapiens
aaaaaggttttcctaatgaatggatctatgtggtccagtacagctgagaggccaagccagagaccctctgcctaca

SEQ ID NO: 179310 - DNA, 81 bp, Homo sapiens
tcctaatgaatggatctatgtggtccagtacagctgagaggccaagccagagaccctctgcctacagctggggccgaggag

SEQ ID NO: 179311 - DNA, 78 bp, Homo sapiens
atctatgtggtccagtacagctgagaggccaagccagagaccctctgcctacagctggggccgaggagggaggaagaa

SEQ ID NO: 179312 - DNA, 74 bp, Homo sapiens
cagtacagctgagaggccaagccagagaccctctgcctacagctggggccgaggagggaggaagaaccctaaaa

SEQ ID NO: 179313 - DNA, 73 bp, Homo sapiens
tgagaggccaagccagagaccctctgcctacagctggggccgaggagggaggaagaaccctaaaataccaaga

SEQ ID NO: 179314 - DNA, 70 bp, Homo sapiens
aagccagagaccctctgcctacagctggggccgaggagggaggaagaaccctaaaataccaagaagataa

SEQ ID NO: 179315 - DNA, 69 bp, Homo sapiens
cctctgcctacagctggggccgaggagggaggaagaaccctaaaataccaagaagataactcataaaaa

SEQ ID NO: 179316 - DNA, 67 bp, Homo sapiens
ctacagctggggccgaggagggaggaagaaccctaaaataccaagaagataactcataaaaagtaaa

SEQ ID NO: 179317 - DNA, 63 bp, Homo sapiens
ccgaggagggaggaagaaccctaaaataccaagaagataactcataaaaagtaaaggattttt

SEQ ID NO: 179318 - DNA, 65 bp, Homo sapiens
gggaggaagaaccctaaaataccaagaagataactcataaaaagtaaaggattttttctgccttc

SEQ ID NO: 179319 - DNA, 71 bp, Homo sapiens
aagaagataactcataaaaagtaaaggattttttctgccttctgggggatctgagtagctccagaggacaa

SEQ ID NO: 179320 - DNA, 72 bp, Homo sapiens
tcataaaaagtaaaggattttttctgccttctgggggatctgagtagctccagaggacaaactcagaataaa

SEQ ID NO: 179321 - DNA, 69 bp, Homo sapiens
aaagtaaaggattttttctgccttctgggggatctgagtagctccagaggacaaactcagaataaaggg

SEQ ID NO: 179322 - DNA, 73 bp, Homo sapiens
ttttctgccttctgggggatctgagtagctccagaggacaaactcagaataaaggggcttctgtgtgtacctt

SEQ ID NO: 179323 - DNA, 74 bp, Homo sapiens
ttctgggggatctgagtagctccagaggacaaactcagaataaaggggcttctgtgtgtacctttcctgccttc

SEQ ID NO: 179324 - DNA, 74 bp, Homo sapiens
atctgagtagctccagaggacaaactcagaataaaggggcttctgtgtgtacctttcctgccttcctgtaggtg

SEQ ID NO: 179325 - DNA, 71 bp, Homo sapiens
agaggacaaactcagaataaaggggcttctgtgtgtacctttcctgccttcctgtaggtggtggaggcacg

SEQ ID NO: 179326 - DNA, 70 bp, Homo sapiens
acaaactcagaataaaggggcttctgtgtgtacctttcctgccttcctgtaggtggtggaggcacggagg

SEQ ID NO: 179327 - DNA, 70 bp, Homo sapiens
aataaaggggcttctgtgtgtacctttcctgccttcctgtaggtggtggaggcacggagggcttcccaca

SEQ ID NO: 179328 - DNA, 74 bp, Homo sapiens
cttctgtgtgtacctttcctgccttcctgtaggtggtggaggcacggagggcttcccacaagaagcacagagga

SEQ ID NO: 179329 - DNA, 76 bp, Homo sapiens
tttcctgccttcctgtaggtggtggaggcacggagggcttcccacaagaagcacagaggagggcagacacttagca

SEQ ID NO: 179330 - DNA, 76 bp, Homo sapiens
ttcctgtaggtggtggaggcacggagggcttcccacaagaagcacagaggagggcagacacttagcatggggacca

SEQ ID NO: 179331 - DNA, 74 bp, Homo sapiens
gtggaggcacggagggcttcccacaagaagcacagaggagggcagacacttagcatggggaccacctttgtctt

SEQ ID NO: 179332 - DNA, 73 bp, Homo sapiens
acggagggcttcccacaagaagcacagaggagggcagacacttagcatggggaccacctttgtctttcgagtg

SEQ ID NO: 179333 - DNA, 77 bp, Homo sapiens
tcccacaagaagcacagaggagggcagacacttagcatggggaccacctttgtctttcgagtggatgcgtgctttaa

SEQ ID NO: 179334 - DNA, 76 bp, Homo sapiens
cacagaggagggcagacacttagcatggggaccacctttgtctttcgagtggatgcgtgctttaacttcactctta

SEQ ID NO: 179335 - DNA, 75 bp, Homo sapiens
ggcagacacttagcatggggaccacctttgtctttcgagtggatgcgtgctttaacttcactcttattctgcttt

SEQ ID NO: 179336 - DNA, 72 bp, Homo sapiens
accacctttgtctttcgagtggatgcgtgctttaacttcactcttattctgcttttcagggttcagctttgg

SEQ ID NO: 179337 - DNA, 74 bp, Homo sapiens
tggatgcgtgctttaacttcactcttattctgcttttcagggttcagctttgggtcaaataactcgtaagtatc

SEQ ID NO: 179338 - DNA, 70 bp, Homo sapiens
cgtgctttaacttcactcttattctgcttttcagggttcagctttgggtcaaataactcgtaagtatccc

SEQ ID NO: 179339 - DNA, 69 bp, Homo sapiens
ttcactcttattctgcttttcagggttcagctttgggtcaaataactcgtaagtatccccctttttgag

SEQ ID NO: 179340 - DNA, 68 bp, Homo sapiens
tgcttttcagggttcagctttgggtcaaataactcgtaagtatccccctttttgagtctcaccttaat

SEQ ID NO: 179341 - DNA, 83 bp, Homo sapiens
tctgtgacagagcagctgactccaccactgtcctgtgcttccttgcaggtctgtccagggttttggtggctggcgaagctgag

SEQ ID NO: 179342 - DNA, 80 bp, Homo sapiens
cagctgactccaccactgtcctgtgcttccttgcaggtctgtccagggttttggtggctggcgaagctgagggcgtgtca

SEQ ID NO: 179343 - DNA, 78 bp, Homo sapiens
actccaccactgtcctgtgcttccttgcaggtctgtccagggttttggtggctggcgaagctgagggcgtgtcagcag

SEQ ID NO: 179344 - DNA, 77 bp, Homo sapiens
ctgtgcttccttgcaggtctgtccagggttttggtggctggcgaagctgagggcgtgtcagcaggcctttcgatccc

SEQ ID NO: 179345 - DNA, 76 bp, Homo sapiens
ttgcaggtctgtccagggttttggtggctggcgaagctgagggcgtgtcagcaggcctttcgatccctgggaccaa

SEQ ID NO: 179346 - DNA, 75 bp, Homo sapiens
tgtccagggttttggtggctggcgaagctgagggcgtgtcagcaggcctttcgatccctgggaccaaccgcatcc

SEQ ID NO: 179347 - DNA, 76 bp, Homo sapiens
gttttggtggctggcgaagctgagggcgtgtcagcaggcctttcgatccctgggaccaaccgcatcctcagcttct

SEQ ID NO: 179348 - DNA, 76 bp, Homo sapiens
tggcgaagctgagggcgtgtcagcaggcctttcgatccctgggaccaaccgcatcctcagcttcttccccgagaaa

SEQ ID NO: 179349 - DNA, 78 bp, Homo sapiens
ctgagggcgtgtcagcaggcctttcgatccctgggaccaaccgcatcctcagcttcttccccgagaaatgctggagca

SEQ ID NO: 179350 - DNA, 80 bp, Homo sapiens
tgtcagcaggcctttcgatccctgggaccaaccgcatcctcagcttcttccccgagaaatgctggagcaggctgttcaga

SEQ ID NO: 179351 - DNA, 75 bp, Homo sapiens
tttcgatccctgggaccaaccgcatcctcagcttcttccccgagaaatgctggagcaggctgttcagaccgacgt

SEQ ID NO: 179352 - DNA, 79 bp, Homo sapiens
gaccaaccgcatcctcagcttcttccccgagaaatgctggagcaggctgttcagaccgacgttgccatcaaaacacata

SEQ ID NO: 179353 - DNA, 78 bp, Homo sapiens
atcctcagcttcttccccgagaaatgctggagcaggctgttcagaccgacgttgccatcaaaacacatacacccagaa

SEQ ID NO: 179354 - DNA, 75 bp, Homo sapiens
cttcttccccgagaaatgctggagcaggctgttcagaccgacgttgccatcaaaacacatacacccagaaagaaa

SEQ ID NO: 179355 - DNA, 76 bp, Homo sapiens
agaaatgctggagcaggctgttcagaccgacgttgccatcaaaacacatacacccagaaagaaacaacagaaacca

SEQ ID NO: 179356 - DNA, 75 bp, Homo sapiens
tcagaccgacgttgccatcaaaacacatacacccagaaagaaacaacagaaaccaaaactcacaaggcgcatgat

SEQ ID NO: 179357 - DNA, 73 bp, Homo sapiens
gttgccatcaaaacacatacacccagaaagaaacaacagaaaccaaaactcacaaggcgcatgattacttgtt

SEQ ID NO: 179358 - DNA, 71 bp, Homo sapiens
caaaacacatacacccagaaagaaacaacagaaaccaaaactcacaaggcgcatgattacttgttttatat

SEQ ID NO: 179359 - DNA, 72 bp, Homo sapiens
atacacccagaaagaaacaacagaaaccaaaactcacaaggcgcatgattacttgttttatatttcatgttg

SEQ ID NO: 179360 - DNA, 69 bp, Homo sapiens
aaacaacagaaaccaaaactcacaaggcgcatgattacttgttttatatttcatgttgggttttccctc

SEQ ID NO: 179361 - DNA, 69 bp, Homo sapiens
aaccaaaactcacaaggcgcatgattacttgttttatatttcatgttgggttttccctcccactattaa

SEQ ID NO: 179362 - DNA, 70 bp, Homo sapiens
aaactcacaaggcgcatgattacttgttttatatttcatgttgggttttccctcccactattaaacagtc

SEQ ID NO: 179363 - DNA, 70 bp, Homo sapiens
catgattacttgttttatatttcatgttgggttttccctcccactattaaacagtctgtttccgtacaga

SEQ ID NO: 179364 - DNA, 68 bp, Homo sapiens
gttttatatttcatgttgggttttccctcccactattaaacagtctgtttccgtacagaacgtatgtg

SEQ ID NO: 179365 - DNA, 67 bp, Homo sapiens
tatttcatgttgggttttccctcccactattaaacagtctgtttccgtacagaacgtatgtgggttt

SEQ ID NO: 179366 - DNA, 68 bp, Homo sapiens
ttgggttttccctcccactattaaacagtctgtttccgtacagaacgtatgtgggttttttcagatca

SEQ ID NO: 179367 - DNA, 79 bp, Homo sapiens
tcccagaaagggagccaaaggccagagcagaggggagtggaagccagatcaccatcagtatcatttttattgcaaatca

SEQ ID NO: 179368 - DNA, 77 bp, Homo sapiens
agccaaaggccagagcagaggggagtggaagccagatcaccatcagtatcatttttattgcaaatcagttaacaaaa

SEQ ID NO: 179369 - DNA, 77 bp, Homo sapiens
cagagcagaggggagtggaagccagatcaccatcagtatcatttttattgcaaatcagttaacaaaaaagatgaaaa

SEQ ID NO: 179370 - DNA, 74 bp, Homo sapiens
gggagtggaagccagatcaccatcagtatcatttttattgcaaatcagttaacaaaaaagatgaaaaaaataca

SEQ ID NO: 179371 - DNA, 77 bp, Homo sapiens
gaagccagatcaccatcagtatcatttttattgcaaatcagttaacaaaaaagatgaaaaaaatacatcatctacag

SEQ ID NO: 179372 - DNA, 76 bp, Homo sapiens
caccatcagtatcatttttattgcaaatcagttaacaaaaaagatgaaaaaaatacatcatctacagttcctcatg

SEQ ID NO: 179373 - DNA, 76 bp, Homo sapiens
gtatcatttttattgcaaatcagttaacaaaaaagatgaaaaaaatacatcatctacagttcctcatgtagatcac

SEQ ID NO: 179374 - DNA, 73 bp, Homo sapiens
gcaaatcagttaacaaaaaagatgaaaaaaatacatcatctacagttcctcatgtagatcacttttaaagtct

SEQ ID NO: 179375 - DNA, 70 bp, Homo sapiens
cagttaacaaaaaagatgaaaaaaatacatcatctacagttcctcatgtagatcacttttaaagtctttt

SEQ ID NO: 179376 - DNA, 74 bp, Homo sapiens
gatgaaaaaaatacatcatctacagttcctcatgtagatcacttttaaagtctttttctgtaaactacactcta

SEQ ID NO: 179377 - DNA, 72 bp, Homo sapiens
aaaatacatcatctacagttcctcatgtagatcacttttaaagtctttttctgtaaactacactctatttta

SEQ ID NO: 179378 - DNA, 72 bp, Homo sapiens
catctacagttcctcatgtagatcacttttaaagtctttttctgtaaactacactctattttataaaacaca

SEQ ID NO: 179379 - DNA, 69 bp, Homo sapiens
tcctcatgtagatcacttttaaagtctttttctgtaaactacactctattttataaaacacagtaaaaa

SEQ ID NO: 179380 - DNA, 66 bp, Homo sapiens
cttttaaagtctttttctgtaaactacactctattttataaaacacagtaaaaatcaacatcttgg

SEQ ID NO: 179381 - DNA, 73 bp, Homo sapiens
ctttttctgtaaactacactctattttataaaacacagtaaaaatcaacatcttgggacgcatctggtcatgc

SEQ ID NO: 179382 - DNA, 74 bp, Homo sapiens
tctgtaaactacactctattttataaaacacagtaaaaatcaacatcttgggacgcatctggtcatgccccctg

SEQ ID NO: 179383 - DNA, 74 bp, Homo sapiens
actctattttataaaacacagtaaaaatcaacatcttgggacgcatctggtcatgccccctggggatggcacca

SEQ ID NO: 179384 - DNA, 74 bp, Homo sapiens
ttataaaacacagtaaaaatcaacatcttgggacgcatctggtcatgccccctggggatggcaccacgcggccc

SEQ ID NO: 179385 - DNA, 72 bp, Homo sapiens
aacatcttgggacgcatctggtcatgccccctggggatggcaccacgcggcccccgtagagccgggggaggc

SEQ ID NO: 179386 - DNA, 73 bp, Homo sapiens
acgcatctggtcatgccccctggggatggcaccacgcggcccccgtagagccgggggaggctgccctgaggag

SEQ ID NO: 179387 - DNA, 75 bp, Homo sapiens
gtcatgccccctggggatggcaccacgcggcccccgtagagccgggggaggctgccctgaggagtgcaggcggca

SEQ ID NO: 179388 - DNA, 76 bp, Homo sapiens
ggatggcaccacgcggcccccgtagagccgggggaggctgccctgaggagtgcaggcggcacggcagcggagcgtc

SEQ ID NO: 179389 - DNA, 77 bp, Homo sapiens
ccgtagagccgggggaggctgccctgaggagtgcaggcggcacggcagcggagcgtccccagtgcatgggcggctaa

SEQ ID NO: 179390 - DNA, 81 bp, Homo sapiens
tgccctgaggagtgcaggcggcacggcagcggagcgtccccagtgcatgggcggctaaggctccccgagctgagccaagtc

SEQ ID NO: 179391 - DNA, 81 bp, Homo sapiens
tgcaggcggcacggcagcggagcgtccccagtgcatgggcggctaaggctccccgagctgagccaagtctgacgtccctca

SEQ ID NO: 179392 - DNA, 81 bp, Homo sapiens
agcgtccccagtgcatgggcggctaaggctccccgagctgagccaagtctgacgtccctcactggcatgacacacaacaga

SEQ ID NO: 179393 - DNA, 83 bp, Homo sapiens
agtgcatgggcggctaaggctccccgagctgagccaagtctgacgtccctcactggcatgacacacaacagactcattcatta

SEQ ID NO: 179394 - DNA, 79 bp, Homo sapiens
ggctaaggctccccgagctgagccaagtctgacgtccctcactggcatgacacacaacagactcattcattaagatttt

SEQ ID NO: 179395 - DNA, 78 bp, Homo sapiens
aggctccccgagctgagccaagtctgacgtccctcactggcatgacacacaacagactcattcattaagattttttaa

SEQ ID NO: 179396 - DNA, 73 bp, Homo sapiens
tgacgtccctcactggcatgacacacaacagactcattcattaagattttttaaacaaaatccacctttaaaa

SEQ ID NO: 179397 - DNA, 72 bp, Homo sapiens
catgacacacaacagactcattcattaagattttttaaacaaaatccacctttaaaaacatatttacagaca

SEQ ID NO: 179398 - DNA, 66 bp, Homo sapiens
aacagactcattcattaagattttttaaacaaaatccacctttaaaaacatatttacagacatttt

SEQ ID NO: 179399 - DNA, 67 bp, Homo sapiens
cattaagattttttaaacaaaatccacctttaaaaacatatttacagacattttttctgccataggc

SEQ ID NO: 179400 - DNA, 71 bp, Homo sapiens
taaacaaaatccacctttaaaaacatatttacagacattttttctgccataggctatacttggtattgcaa

SEQ ID NO: 179401 - DNA, 72 bp, Homo sapiens
ccacctttaaaaacatatttacagacattttttctgccataggctatacttggtattgcaaaaatctgctcc

SEQ ID NO: 179402 - DNA, 73 bp, Homo sapiens
aaacatatttacagacattttttctgccataggctatacttggtattgcaaaaatctgctcctcccaaactag

SEQ ID NO: 179403 - DNA, 73 bp, Homo sapiens
tatttacagacattttttctgccataggctatacttggtattgcaaaaatctgctcctcccaaactaggaggg

SEQ ID NO: 179404 - DNA, 71 bp, Homo sapiens
tttttctgccataggctatacttggtattgcaaaaatctgctcctcccaaactaggaggggtggcccaagg

SEQ ID NO: 179405 - DNA, 71 bp, Homo sapiens
ccataggctatacttggtattgcaaaaatctgctcctcccaaactaggaggggtggcccaagggcagcccc

SEQ ID NO: 179406 - DNA, 69 bp, Homo sapiens
atacttggtattgcaaaaatctgctcctcccaaactaggaggggtggcccaagggcagcccccgcctcc

SEQ ID NO: 179407 - DNA, 69 bp, Homo sapiens
ttgcaaaaatctgctcctcccaaactaggaggggtggcccaagggcagcccccgcctccctccagcccc

SEQ ID NO: 179408 - DNA, 70 bp, Homo sapiens
tcctcccaaactaggaggggtggcccaagggcagcccccgcctccctccagcccctgcccgaccgcatgc

SEQ ID NO: 179409 - DNA, 71 bp, Homo sapiens
cagcccccgcctccctccagcccctgcccgaccgcatgccccctgccagggctgcggggacaggaccaaag

SEQ ID NO: 179410 - DNA, 74 bp, Homo sapiens
cccctgcccgaccgcatgccccctgccagggctgcggggacaggaccaaaggacgcagcccacggcgttgcaca

SEQ ID NO: 179411 - DNA, 77 bp, Homo sapiens
accgcatgccccctgccagggctgcggggacaggaccaaaggacgcagcccacggcgttgcacagctcaatgtgccc

SEQ ID NO: 179412 - DNA, 79 bp, Homo sapiens
gctgcggggacaggaccaaaggacgcagcccacggcgttgcacagctcaatgtgcccggctctggcaagtctcctacaa

SEQ ID NO: 179413 - DNA, 76 bp, Homo sapiens
acaggaccaaaggacgcagcccacggcgttgcacagctcaatgtgcccggctctggcaagtctcctacaaaacacg

SEQ ID NO: 179414 - DNA, 73 bp, Homo sapiens
agcccacggcgttgcacagctcaatgtgcccggctctggcaagtctcctacaaaacacgggagcccacggggg

SEQ ID NO: 179415 - DNA, 72 bp, Homo sapiens
ttgcacagctcaatgtgcccggctctggcaagtctcctacaaaacacgggagcccacggggggtcgggtccc

SEQ ID NO: 179416 - DNA, 69 bp, Homo sapiens
aatgtgcccggctctggcaagtctcctacaaaacacgggagcccacggggggtcgggtcccgcgagctg

SEQ ID NO: 179417 - DNA, 68 bp, Homo sapiens
cggctctggcaagtctcctacaaaacacgggagcccacggggggtcgggtcccgcgagctggggccca

SEQ ID NO: 179418 - DNA, 66 bp, Homo sapiens
aagtctcctacaaaacacgggagcccacggggggtcgggtcccgcgagctggggcccaggctgtgt

SEQ ID NO: 179419 - DNA, 70 bp, Homo sapiens
acaaaacacgggagcccacggggggtcgggtcccgcgagctggggcccaggctgtgttgctggagcatct

SEQ ID NO: 179420 - DNA, 71 bp, Homo sapiens
agcccacggggggtcgggtcccgcgagctggggcccaggctgtgttgctggagcatcttcttcggaacctg

SEQ ID NO: 179421 - DNA, 78 bp, Homo sapiens
tcgggtcccgcgagctggggcccaggctgtgttgctggagcatcttcttcggaacctgggggacactgtgcaggctga

SEQ ID NO: 179422 - DNA, 80 bp, Homo sapiens
tcccgcgagctggggcccaggctgtgttgctggagcatcttcttcggaacctgggggacactgtgcaggctgaggtgctg

SEQ ID NO: 179423 - DNA, 77 bp, Homo sapiens
ctgtgttgctggagcatcttcttcggaacctgggggacactgtgcaggctgaggtgctggggccgccaccggggtca

SEQ ID NO: 179424 - DNA, 77 bp, Homo sapiens
tggagcatcttcttcggaacctgggggacactgtgcaggctgaggtgctggggccgccaccggggtcagcccaggca

SEQ ID NO: 179425 - DNA, 73 bp, Homo sapiens
gggacactgtgcaggctgaggtgctggggccgccaccggggtcagcccaggcagtgtctttccccagaaaagg

SEQ ID NO: 179426 - DNA, 73 bp, Homo sapiens
ctgtgcaggctgaggtgctggggccgccaccggggtcagcccaggcagtgtctttccccagaaaagggtagga

SEQ ID NO: 179427 - DNA, 73 bp, Homo sapiens
tgctggggccgccaccggggtcagcccaggcagtgtctttccccagaaaagggtaggatgcctccgtgtgtga

SEQ ID NO: 179428 - DNA, 72 bp, Homo sapiens
gccaccggggtcagcccaggcagtgtctttccccagaaaagggtaggatgcctccgtgtgtgacccaggcaa

SEQ ID NO: 179429 - DNA, 77 bp, Homo sapiens
tcagcccaggcagtgtctttccccagaaaagggtaggatgcctccgtgtgtgacccaggcaagtgccacagtccaca

SEQ ID NO: 179430 - DNA, 77 bp, Homo sapiens
cagtgtctttccccagaaaagggtaggatgcctccgtgtgtgacccaggcaagtgccacagtccacacatctcatgt

SEQ ID NO: 179431 - DNA, 80 bp, Homo sapiens
tttccccagaaaagggtaggatgcctccgtgtgtgacccaggcaagtgccacagtccacacatctcatgtttgacatgca

SEQ ID NO: 179432 - DNA, 83 bp, Homo sapiens
aaaagggtaggatgcctccgtgtgtgacccaggcaagtgccacagtccacacatctcatgtttgacatgcatgatgcctacat

SEQ ID NO: 179433 - DNA, 82 bp, Homo sapiens
tgacccaggcaagtgccacagtccacacatctcatgtttgacatgcatgatgcctacatttcaagaacgggcagggggccgg

SEQ ID NO: 179434 - DNA, 78 bp, Homo sapiens
aagtgccacagtccacacatctcatgtttgacatgcatgatgcctacatttcaagaacgggcagggggccggggtggt

SEQ ID NO: 179435 - DNA, 78 bp, Homo sapiens
acagtccacacatctcatgtttgacatgcatgatgcctacatttcaagaacgggcagggggccggggtggttctggag

SEQ ID NO: 179436 - DNA, 76 bp, Homo sapiens
acatctcatgtttgacatgcatgatgcctacatttcaagaacgggcagggggccggggtggttctggagggaccaa

SEQ ID NO: 179437 - DNA, 73 bp, Homo sapiens
acatgcatgatgcctacatttcaagaacgggcagggggccggggtggttctggagggaccaagaacttgtata

SEQ ID NO: 179438 - DNA, 65 bp, Homo sapiens
atttcaagaacgggcagggggccggggtggttctggagggaccaagaacttgtataaccaacgaa

SEQ ID NO: 179439 - DNA, 69 bp, Homo sapiens
ggggtggttctggagggaccaagaacttgtataaccaacgaacaactacataatactgaacctgaaaca

SEQ ID NO: 179440 - DNA, 69 bp, Homo sapiens
ggttctggagggaccaagaacttgtataaccaacgaacaactacataatactgaacctgaaacaaagat

SEQ ID NO: 179441 - DNA, 72 bp, Homo sapiens
aagaacttgtataaccaacgaacaactacataatactgaacctgaaacaaagattcatgattggtaccatgg

SEQ ID NO: 179442 - DNA, 75 bp, Homo sapiens
ttgtataaccaacgaacaactacataatactgaacctgaaacaaagattcatgattggtaccatgggtgcactct

SEQ ID NO: 179443 - DNA, 77 bp, Homo sapiens
aacgaacaactacataatactgaacctgaaacaaagattcatgattggtaccatgggtgcactcttggcatacacac

SEQ ID NO: 179444 - DNA, 78 bp, Homo sapiens
taatactgaacctgaaacaaagattcatgattggtaccatgggtgcactcttggcatacacactccgagaacacattt

SEQ ID NO: 179445 - DNA, 79 bp, Homo sapiens
ctgaacctgaaacaaagattcatgattggtaccatgggtgcactcttggcatacacactccgagaacacattttcacaa

SEQ ID NO: 179446 - DNA, 82 bp, Homo sapiens
aaagattcatgattggtaccatgggtgcactcttggcatacacactccgagaacacattttcacaagcatgcttgcaagaaa

SEQ ID NO: 179447 - DNA, 81 bp, Homo sapiens
accatgggtgcactcttggcatacacactccgagaacacattttcacaagcatgcttgcaagaaaccatctaaaacacatg

SEQ ID NO: 179448 - DNA, 81 bp, Homo sapiens
actcttggcatacacactccgagaacacattttcacaagcatgcttgcaagaaaccatctaaaacacatggcaacatctaa

SEQ ID NO: 179449 - DNA, 79 bp, Homo sapiens
acactccgagaacacattttcacaagcatgcttgcaagaaaccatctaaaacacatggcaacatctaacccatatgctt

SEQ ID NO: 179450 - DNA, 78 bp, Homo sapiens
aacacattttcacaagcatgcttgcaagaaaccatctaaaacacatggcaacatctaacccatatgctttcacttgtt

SEQ ID NO: 179451 - DNA, 78 bp, Homo sapiens
ttttcacaagcatgcttgcaagaaaccatctaaaacacatggcaacatctaacccatatgctttcacttgtttcctat

SEQ ID NO: 179452 - DNA, 78 bp, Homo sapiens
ttgcaagaaaccatctaaaacacatggcaacatctaacccatatgctttcacttgtttcctatttcagatgcaaatta

SEQ ID NO: 179453 - DNA, 76 bp, Homo sapiens
agaaaccatctaaaacacatggcaacatctaacccatatgctttcacttgtttcctatttcagatgcaaattaatc

SEQ ID NO: 179454 - DNA, 77 bp, Homo sapiens
taaaacacatggcaacatctaacccatatgctttcacttgtttcctatttcagatgcaaattaatccgcgtgcggaa

SEQ ID NO: 179455 - DNA, 81 bp, Homo sapiens
ttaatccgcgtgcggaaggtgagccagctttgcctccgtttgcctctggatgcagcttctcctaacaggcaggtgatgctg

SEQ ID NO: 179456 - DNA, 79 bp, Homo sapiens
aaggtgagccagctttgcctccgtttgcctctggatgcagcttctcctaacaggcaggtgatgctggtggagcggccgg

SEQ ID NO: 179457 - DNA, 79 bp, Homo sapiens
agctttgcctccgtttgcctctggatgcagcttctcctaacaggcaggtgatgctggtggagcggccgggctggcttgg

SEQ ID NO: 179458 - DNA, 77 bp, Homo sapiens
cctccgtttgcctctggatgcagcttctcctaacaggcaggtgatgctggtggagcggccgggctggcttggggttg

SEQ ID NO: 179459 - DNA, 77 bp, Homo sapiens
tctggatgcagcttctcctaacaggcaggtgatgctggtggagcggccgggctggcttggggttgggtgggcgtcgg

SEQ ID NO: 179460 - DNA, 71 bp, Homo sapiens
cttctcctaacaggcaggtgatgctggtggagcggccgggctggcttggggttgggtgggcgtcggggaaa

SEQ ID NO: 179461 - DNA, 70 bp, Homo sapiens
cctaacaggcaggtgatgctggtggagcggccgggctggcttggggttgggtgggcgtcggggaaagggc

SEQ ID NO: 179462 - DNA, 70 bp, Homo sapiens
aggtgatgctggtggagcggccgggctggcttggggttgggtgggcgtcggggaaagggcgcggcctgga

SEQ ID NO: 179463 - DNA, 68 bp, Homo sapiens
tggagcggccgggctggcttggggttgggtgggcgtcggggaaagggcgcggcctggacgccccagga

SEQ ID NO: 179464 - DNA, 66 bp, Homo sapiens
ctggcttggggttgggtgggcgtcggggaaagggcgcggcctggacgccccaggagctttttggac

SEQ ID NO: 179465 - DNA, 69 bp, Homo sapiens
gttgggtgggcgtcggggaaagggcgcggcctggacgccccaggagctttttggactatgctcgttcaa

SEQ ID NO: 179466 - DNA, 68 bp, Homo sapiens
cgtcggggaaagggcgcggcctggacgccccaggagctttttggactatgctcgttcaacttcccttc

SEQ ID NO: 179467 - DNA, 71 bp, Homo sapiens
ctggacgccccaggagctttttggactatgctcgttcaacttcccttctccaacatcatttctttttggat

SEQ ID NO: 179468 - DNA, 70 bp, Homo sapiens
caggagctttttggactatgctcgttcaacttcccttctccaacatcatttctttttggattttgaaaaa

SEQ ID NO: 179469 - DNA, 69 bp, Homo sapiens
gctttttggactatgctcgttcaacttcccttctccaacatcatttctttttggattttgaaaaaagga

SEQ ID NO: 179470 - DNA, 70 bp, Homo sapiens
ctatgctcgttcaacttcccttctccaacatcatttctttttggattttgaaaaaaggaatcaataaata

SEQ ID NO: 179471 - DNA, 69 bp, Homo sapiens
tcaacttcccttctccaacatcatttctttttggattttgaaaaaaggaatcaataaataaatggcatt

SEQ ID NO: 179472 - DNA, 73 bp, Homo sapiens
tctccaacatcatttctttttggattttgaaaaaaggaatcaataaataaatggcatttataaatcatgaatc

SEQ ID NO: 179473 - DNA, 70 bp, Homo sapiens
tcatttctttttggattttgaaaaaaggaatcaataaataaatggcatttataaatcatgaatctttgtt

SEQ ID NO: 179474 - DNA, 71 bp, Homo sapiens
ttggattttgaaaaaaggaatcaataaataaatggcatttataaatcatgaatctttgtttatattttata

SEQ ID NO: 179475 - DNA, 72 bp, Homo sapiens
aggaatcaataaataaatggcatttataaatcatgaatctttgtttatattttataaacacagaagaatctt

SEQ ID NO: 179476 - DNA, 72 bp, Homo sapiens
aaataaatggcatttataaatcatgaatctttgtttatattttataaacacagaagaatcttttcatcctac

SEQ ID NO: 179477 - DNA, 72 bp, Homo sapiens
ggcatttataaatcatgaatctttgtttatattttataaacacagaagaatcttttcatcctacgtaggaaa

SEQ ID NO: 179478 - DNA, 71 bp, Homo sapiens
ttgtttatattttataaacacagaagaatcttttcatcctacgtaggaaaaccctggctctcagaacttgc

SEQ ID NO: 179479 - DNA, 69 bp, Homo sapiens
attttataaacacagaagaatcttttcatcctacgtaggaaaaccctggctctcagaacttgcttgttt

SEQ ID NO: 179480 - DNA, 73 bp, Homo sapiens
cagaagaatcttttcatcctacgtaggaaaaccctggctctcagaacttgcttgttttctcagaatagataaa

SEQ ID NO: 179481 - DNA, 70 bp, Homo sapiens
aatcttttcatcctacgtaggaaaaccctggctctcagaacttgcttgttttctcagaatagataaaagt

SEQ ID NO: 179482 - DNA, 70 bp, Homo sapiens
atcctacgtaggaaaaccctggctctcagaacttgcttgttttctcagaatagataaaagtttctacctg

SEQ ID NO: 179483 - DNA, 70 bp, Homo sapiens
aaaaccctggctctcagaacttgcttgttttctcagaatagataaaagtttctacctggggccagataaa

SEQ ID NO: 179484 - DNA, 72 bp, Homo sapiens
ctcagaacttgcttgttttctcagaatagataaaagtttctacctggggccagataaaacagtacatataaa

SEQ ID NO: 179485 - DNA, 70 bp, Homo sapiens
acttgcttgttttctcagaatagataaaagtttctacctggggccagataaaacagtacatataaataaa

SEQ ID NO: 179486 - DNA, 70 bp, Homo sapiens
ctcagaatagataaaagtttctacctggggccagataaaacagtacatataaataaaaaggcagtgtttc

SEQ ID NO: 179487 - DNA, 69 bp, Homo sapiens
agataaaagtttctacctggggccagataaaacagtacatataaataaaaaggcagtgtttctgtgtaa

SEQ ID NO: 179488 - DNA, 69 bp, Homo sapiens
ctacctggggccagataaaacagtacatataaataaaaaggcagtgtttctgtgtaaaataaaagtaca

SEQ ID NO: 179489 - DNA, 69 bp, Homo sapiens
gggccagataaaacagtacatataaataaaaaggcagtgtttctgtgtaaaataaaagtacataaataa

SEQ ID NO: 179490 - DNA, 67 bp, Homo sapiens
aaacagtacatataaataaaaaggcagtgtttctgtgtaaaataaaagtacataaataaatactaaa

SEQ ID NO: 179491 - DNA, 63 bp, Homo sapiens
aaaaaaattaaaatcctcgttcttattttgtataaaaacatgtgttttaaaaaggctcctctg

SEQ ID NO: 179492 - DNA, 74 bp, Homo sapiens
ttcttattttgtataaaaacatgtgttttaaaaaggctcctctggtcggccctggcatccacagagcgcacaca

SEQ ID NO: 179493 - DNA, 74 bp, Homo sapiens
ttttgtataaaaacatgtgttttaaaaaggctcctctggtcggccctggcatccacagagcgcacacagacgcc

SEQ ID NO: 179494 - DNA, 74 bp, Homo sapiens
tgtgttttaaaaaggctcctctggtcggccctggcatccacagagcgcacacagacgcccgaaggcttgggaaa

SEQ ID NO: 179495 - DNA, 74 bp, Homo sapiens
ctcctctggtcggccctggcatccacagagcgcacacagacgcccgaaggcttgggaaaggaagccggggtctc

SEQ ID NO: 179496 - DNA, 73 bp, Homo sapiens
ctggcatccacagagcgcacacagacgcccgaaggcttgggaaaggaagccggggtctcgtggggcgcgccgt

SEQ ID NO: 179497 - DNA, 71 bp, Homo sapiens
cagagcgcacacagacgcccgaaggcttgggaaaggaagccggggtctcgtggggcgcgccgtttacttga

SEQ ID NO: 179498 - DNA, 67 bp, Homo sapiens
acacagacgcccgaaggcttgggaaaggaagccggggtctcgtggggcgcgccgtttacttgaaggc

SEQ ID NO: 179499 - DNA, 65 bp, Homo sapiens
ccgaaggcttgggaaaggaagccggggtctcgtggggcgcgccgtttacttgaaggcctccggaa

SEQ ID NO: 179500 - DNA, 69 bp, Homo sapiens
gaaaggaagccggggtctcgtggggcgcgccgtttacttgaaggcctccggaatgcgggcgatctggga

SEQ ID NO: 179501 - DNA, 73 bp, Homo sapiens
aagccggggtctcgtggggcgcgccgtttacttgaaggcctccggaatgcgggcgatctgggactgcatgctg

SEQ ID NO: 179502 - DNA, 75 bp, Homo sapiens
cgtttacttgaaggcctccggaatgcgggcgatctgggactgcatgctggtgggagggctggagacgccctcgga

SEQ ID NO: 179503 - DNA, 78 bp, Homo sapiens
ggaatgcgggcgatctgggactgcatgctggtgggagggctggagacgccctcggaccagtcggagacgttggaatgc

SEQ ID NO: 179504 - DNA, 75 bp, Homo sapiens
cgggcgatctgggactgcatgctggtgggagggctggagacgccctcggaccagtcggagacgttggaatgcggg

SEQ ID NO: 179505 - DNA, 73 bp, Homo sapiens
tgggagggctggagacgccctcggaccagtcggagacgttggaatgcggggacgagctggaccactggtcagg

SEQ ID NO: 179506 - DNA, 73 bp, Homo sapiens
ctggagacgccctcggaccagtcggagacgttggaatgcggggacgagctggaccactggtcaggggactcag

SEQ ID NO: 179507 - DNA, 70 bp, Homo sapiens
ccctcggaccagtcggagacgttggaatgcggggacgagctggaccactggtcaggggactcaggggacg

SEQ ID NO: 179508 - DNA, 70 bp, Homo sapiens
agtcggagacgttggaatgcggggacgagctggaccactggtcaggggactcaggggacggggtgaggaa

SEQ ID NO: 179509 - DNA, 69 bp, Homo sapiens
acgttggaatgcggggacgagctggaccactggtcaggggactcaggggacggggtgaggaaggggtgc

SEQ ID NO: 179510 - DNA, 74 bp, Homo sapiens
gacgagctggaccactggtcaggggactcaggggacggggtgaggaaggggtgctcaggcacctgtagctggtg

SEQ ID NO: 179511 - DNA, 73 bp, Homo sapiens
tggaccactggtcaggggactcaggggacggggtgaggaaggggtgctcaggcacctgtagctggtggctggg

SEQ ID NO: 179512 - DNA, 71 bp, Homo sapiens
aggggactcaggggacggggtgaggaaggggtgctcaggcacctgtagctggtggctgggggtgttgtcca

SEQ ID NO: 179513 - DNA, 73 bp, Homo sapiens
actcaggggacggggtgaggaaggggtgctcaggcacctgtagctggtggctgggggtgttgtccacaggcga

SEQ ID NO: 179514 - DNA, 79 bp, Homo sapiens
tgaggaaggggtgctcaggcacctgtagctggtggctgggggtgttgtccacaggcgaggagtagctgtgctgcgaggg

SEQ ID NO: 179515 - DNA, 80 bp, Homo sapiens
gtgctcaggcacctgtagctggtggctgggggtgttgtccacaggcgaggagtagctgtgctgcgaggggggcgtcagga

SEQ ID NO: 179516 - DNA, 75 bp, Homo sapiens
acctgtagctggtggctgggggtgttgtccacaggcgaggagtagctgtgctgcgaggggggcgtcaggaactgg

SEQ ID NO: 179517 - DNA, 77 bp, Homo sapiens
tggtggctgggggtgttgtccacaggcgaggagtagctgtgctgcgaggggggcgtcaggaactgggctgcggtcac

SEQ ID NO: 179518 - DNA, 75 bp, Homo sapiens
ggtgttgtccacaggcgaggagtagctgtgctgcgaggggggcgtcaggaactgggctgcggtcacgggtgggac

SEQ ID NO: 179519 - DNA, 76 bp, Homo sapiens
acaggcgaggagtagctgtgctgcgaggggggcgtcaggaactgggctgcggtcacgggtgggaccagcgaggatg

SEQ ID NO: 179520 - DNA, 77 bp, Homo sapiens
tgtgctgcgaggggggcgtcaggaactgggctgcggtcacgggtgggaccagcgaggatggcagcgacgtgggcagg

SEQ ID NO: 179521 - DNA, 75 bp, Homo sapiens
ggcgtcaggaactgggctgcggtcacgggtgggaccagcgaggatggcagcgacgtgggcagggcggggctctcc

SEQ ID NO: 179522 - DNA, 78 bp, Homo sapiens
ctgcggtcacgggtgggaccagcgaggatggcagcgacgtgggcagggcggggctctcctggggcagaatagtgtgca

SEQ ID NO: 179523 - DNA, 76 bp, Homo sapiens
cgggtgggaccagcgaggatggcagcgacgtgggcagggcggggctctcctggggcagaatagtgtgcaccgccag

SEQ ID NO: 179524 - DNA, 78 bp, Homo sapiens
agcgacgtgggcagggcggggctctcctggggcagaatagtgtgcaccgccaggctgctggggcccagtggctgcacg

SEQ ID NO: 179525 - DNA, 84 bp, Homo sapiens
tctcctggggcagaatagtgtgcaccgccaggctgctggggcccagtggctgcacgtctgcctggctcggctctccactcagga

SEQ ID NO: 179526 - DNA, 82 bp, Homo sapiens
tagtgtgcaccgccaggctgctggggcccagtggctgcacgtctgcctggctcggctctccactcaggaagctccggcccag

SEQ ID NO: 179527 - DNA, 80 bp, Homo sapiens
aggctgctggggcccagtggctgcacgtctgcctggctcggctctccactcaggaagctccggcccaggtggccgctggc

SEQ ID NO: 179528 - DNA, 83 bp, Homo sapiens
gggcccagtggctgcacgtctgcctggctcggctctccactcaggaagctccggcccaggtggccgctggctgctgagctcac

SEQ ID NO: 179529 - DNA, 85 bp, Homo sapiens
tggctgcacgtctgcctggctcggctctccactcaggaagctccggcccaggtggccgctggctgctgagctcacgccaaggtgc

SEQ ID NO: 179530 - DNA, 83 bp, Homo sapiens
tgcctggctcggctctccactcaggaagctccggcccaggtggccgctggctgctgagctcacgccaaggtgcggctgtggtg

SEQ ID NO: 179531 - DNA, 80 bp, Homo sapiens
ctcggctctccactcaggaagctccggcccaggtggccgctggctgctgagctcacgccaaggtgcggctgtggtggtgg

SEQ ID NO: 179532 - DNA, 89 bp, Homo sapiens
ggtggtggtggcggctgcaggctttgctgctgctggatgtttgctggctgcaggttctgctgctgcatctgtaagttttgtggctgcac

SEQ ID NO: 179533 - DNA, 91 bp, Homo sapiens
tggtggcggctgcaggctttgctgctgctggatgtttgctggctgcaggttctgctgctgcatctgtaagttttgtggctgcacctgctgg

SEQ ID NO: 179534 - DNA, 88 bp, Homo sapiens
ctgctggatgtttgctggctgcaggttctgctgctgcatctgtaagttttgtggctgcacctgctgggtctgcaccaggtgaggctgg

SEQ ID NO: 179535 - DNA, 86 bp, Homo sapiens
atgtttgctggctgcaggttctgctgctgcatctgtaagttttgtggctgcacctgctgggtctgcaccaggtgaggctgggtggc

SEQ ID NO: 179536 - DNA, 85 bp, Homo sapiens
tctgctgctgcatctgtaagttttgtggctgcacctgctgggtctgcaccaggtgaggctgggtggccagccgggtgctgggcag

SEQ ID NO: 179537 - DNA, 78 bp, Homo sapiens
atctgtaagttttgtggctgcacctgctgggtctgcaccaggtgaggctgggtggccagccgggtgctgggcaggccc

SEQ ID NO: 179538 - DNA, 82 bp, Homo sapiens
ttttgtggctgcacctgctgggtctgcaccaggtgaggctgggtggccagccgggtgctgggcaggccctggtagctcatca

SEQ ID NO: 179539 - DNA, 80 bp, Homo sapiens
acctgctgggtctgcaccaggtgaggctgggtggccagccgggtgctgggcaggccctggtagctcatcatctgggacag

SEQ ID NO: 179540 - DNA, 84 bp, Homo sapiens
tctgcaccaggtgaggctgggtggccagccgggtgctgggcaggccctggtagctcatcatctgggacagggcgctggcagcaa

SEQ ID NO: 179541 - DNA, 83 bp, Homo sapiens
aggctgggtggccagccgggtgctgggcaggccctggtagctcatcatctgggacagggcgctggcagcaaggctactgtgca

SEQ ID NO: 179542 - DNA, 89 bp, Homo sapiens
tgctgggcaggccctggtagctcatcatctgggacagggcgctggcagcaaggctactgtgcagcgggcctaccatgccatgctgcagg

SEQ ID NO: 179543 - DNA, 85 bp, Homo sapiens
aggccctggtagctcatcatctgggacagggcgctggcagcaaggctactgtgcagcgggcctaccatgccatgctgcagggagg

SEQ ID NO: 179544 - DNA, 86 bp, Homo sapiens
gtagctcatcatctgggacagggcgctggcagcaaggctactgtgcagcgggcctaccatgccatgctgcagggagggggcctgtg

SEQ ID NO: 179545 - DNA, 84 bp, Homo sapiens
atctgggacagggcgctggcagcaaggctactgtgcagcgggcctaccatgccatgctgcagggagggggcctgtgtgctcagg

SEQ ID NO: 179546 - DNA, 82 bp, Homo sapiens
agcaaggctactgtgcagcgggcctaccatgccatgctgcagggagggggcctgtgtgctcagggggcctggtgccacactc

SEQ ID NO: 179547 - DNA, 80 bp, Homo sapiens
actgtgcagcgggcctaccatgccatgctgcagggagggggcctgtgtgctcagggggcctggtgccacactcccccgca

SEQ ID NO: 179548 - DNA, 78 bp, Homo sapiens
taccatgccatgctgcagggagggggcctgtgtgctcagggggcctggtgccacactcccccgcagagggttgtattg

SEQ ID NO: 179549 - DNA, 73 bp, Homo sapiens
agggggcctgtgtgctcagggggcctggtgccacactcccccgcagagggttgtattggttcggcaccatgcc

SEQ ID NO: 179550 - DNA, 78 bp, Homo sapiens
tgtgctcagggggcctggtgccacactcccccgcagagggttgtattggttcggcaccatgccgctctgcagccggga

SEQ ID NO: 179551 - DNA, 77 bp, Homo sapiens
gggcctggtgccacactcccccgcagagggttgtattggttcggcaccatgccgctctgcagccgggacagccactc

SEQ ID NO: 179552 - DNA, 78 bp, Homo sapiens
cccgcagagggttgtattggttcggcaccatgccgctctgcagccgggacagccactcgcattgaccattcaaactgg

SEQ ID NO: 179553 - DNA, 77 bp, Homo sapiens
agggttgtattggttcggcaccatgccgctctgcagccgggacagccactcgcattgaccattcaaactggtggacc

SEQ ID NO: 179554 - DNA, 79 bp, Homo sapiens
ttcggcaccatgccgctctgcagccgggacagccactcgcattgaccattcaaactggtggacccgcccacagtgaaat

SEQ ID NO: 179555 - DNA, 78 bp, Homo sapiens
accatgccgctctgcagccgggacagccactcgcattgaccattcaaactggtggacccgcccacagtgaaattcagg

SEQ ID NO: 179556 - DNA, 76 bp, Homo sapiens
tctgcagccgggacagccactcgcattgaccattcaaactggtggacccgcccacagtgaaattcagggcccctcc

SEQ ID NO: 179557 - DNA, 76 bp, Homo sapiens
acagccactcgcattgaccattcaaactggtggacccgcccacagtgaaattcagggcccctccgctgctggagcc

SEQ ID NO: 179558 - DNA, 72 bp, Homo sapiens
attgaccattcaaactggtggacccgcccacagtgaaattcagggcccctccgctgctggagcccaggacgg

SEQ ID NO: 179559 - DNA, 74 bp, Homo sapiens
attcaaactggtggacccgcccacagtgaaattcagggcccctccgctgctggagcccaggacggtgctggtgc

SEQ ID NO: 179560 - DNA, 76 bp, Homo sapiens
ggtggacccgcccacagtgaaattcagggcccctccgctgctggagcccaggacggtgctggtgccagaggccaca

SEQ ID NO: 179561 - DNA, 78 bp, Homo sapiens
acagtgaaattcagggcccctccgctgctggagcccaggacggtgctggtgccagaggccacaggcaggtgggagaga

SEQ ID NO: 179562 - DNA, 76 bp, Homo sapiens
aattcagggcccctccgctgctggagcccaggacggtgctggtgccagaggccacaggcaggtgggagagacgagg

SEQ ID NO: 179563 - DNA, 75 bp, Homo sapiens
acggtgctggtgccagaggccacaggcaggtgggagagacgaggtgggccagtctcaaaggccagccggccgccc

SEQ ID NO: 179564 - DNA, 74 bp, Homo sapiens
ggtgccagaggccacaggcaggtgggagagacgaggtgggccagtctcaaaggccagccggccgcccccaccca

SEQ ID NO: 179565 - DNA, 73 bp, Homo sapiens
aggcaggtgggagagacgaggtgggccagtctcaaaggccagccggccgcccccacccagcgccgccatctcg

SEQ ID NO: 179566 - DNA, 73 bp, Homo sapiens
gtgggagagacgaggtgggccagtctcaaaggccagccggccgcccccacccagcgccgccatctcgggcttg

SEQ ID NO: 179567 - DNA, 75 bp, Homo sapiens
tctcaaaggccagccggccgcccccacccagcgccgccatctcgggcttggccgccacgttcaggtgcccgatgc

SEQ ID NO: 179568 - DNA, 72 bp, Homo sapiens
agccggccgcccccacccagcgccgccatctcgggcttggccgccacgttcaggtgcccgatgcccaggtgg

SEQ ID NO: 179569 - DNA, 74 bp, Homo sapiens
ccccacccagcgccgccatctcgggcttggccgccacgttcaggtgcccgatgcccaggtgggtgtcgggcatc

SEQ ID NO: 179570 - DNA, 76 bp, Homo sapiens
cccagcgccgccatctcgggcttggccgccacgttcaggtgcccgatgcccaggtgggtgtcgggcatcccaggca

SEQ ID NO: 179571 - DNA, 74 bp, Homo sapiens
atctcgggcttggccgccacgttcaggtgcccgatgcccaggtgggtgtcgggcatcccaggcaggtggttgag

SEQ ID NO: 179572 - DNA, 74 bp, Homo sapiens
ttggccgccacgttcaggtgcccgatgcccaggtgggtgtcgggcatcccaggcaggtggttgaggggcacgga

SEQ ID NO: 179573 - DNA, 76 bp, Homo sapiens
ttcaggtgcccgatgcccaggtgggtgtcgggcatcccaggcaggtggttgaggggcacggacggagactgctgga

SEQ ID NO: 179574 - DNA, 72 bp, Homo sapiens
ccgatgcccaggtgggtgtcgggcatcccaggcaggtggttgaggggcacggacggagactgctggaacggg

SEQ ID NO: 179575 - DNA, 73 bp, Homo sapiens
aggtgggtgtcgggcatcccaggcaggtggttgaggggcacggacggagactgctggaacggggagggcagca

SEQ ID NO: 179576 - DNA, 75 bp, Homo sapiens
catcccaggcaggtggttgaggggcacggacggagactgctggaacggggagggcagcagtggcggcgaggccac

SEQ ID NO: 179577 - DNA, 74 bp, Homo sapiens
aggtggttgaggggcacggacggagactgctggaacggggagggcagcagtggcggcgaggccacgtctgacag

SEQ ID NO: 179578 - DNA, 77 bp, Homo sapiens
ttgaggggcacggacggagactgctggaacggggagggcagcagtggcggcgaggccacgtctgacaggtagccatg

SEQ ID NO: 179579 - DNA, 76 bp, Homo sapiens
actgctggaacggggagggcagcagtggcggcgaggccacgtctgacaggtagccatggggtgactccagggagtc

SEQ ID NO: 179580 - DNA, 79 bp, Homo sapiens
agggcagcagtggcggcgaggccacgtctgacaggtagccatggggtgactccagggagtccacgggcgagagcatgcc

SEQ ID NO: 179581 - DNA, 81 bp, Homo sapiens
cgaggccacgtctgacaggtagccatggggtgactccagggagtccacgggcgagagcatgccggagctgtccagcaggca

SEQ ID NO: 179582 - DNA, 81 bp, Homo sapiens
tgacaggtagccatggggtgactccagggagtccacgggcgagagcatgccggagctgtccagcaggcagcccttgccgtc

SEQ ID NO: 179583 - DNA, 77 bp, Homo sapiens
atggggtgactccagggagtccacgggcgagagcatgccggagctgtccagcaggcagcccttgccgtcctgggact

SEQ ID NO: 179584 - DNA, 78 bp, Homo sapiens
agtccacgggcgagagcatgccggagctgtccagcaggcagcccttgccgtcctgggacttcttcctccgtgccttga

SEQ ID NO: 179585 - DNA, 77 bp, Homo sapiens
agagcatgccggagctgtccagcaggcagcccttgccgtcctgggacttcttcctccgtgccttgaggtccttggcc

SEQ ID NO: 179586 - DNA, 76 bp, Homo sapiens
gagctgtccagcaggcagcccttgccgtcctgggacttcttcctccgtgccttgaggtccttggcctccttgcttc

SEQ ID NO: 179587 - DNA, 74 bp, Homo sapiens
agcaggcagcccttgccgtcctgggacttcttcctccgtgccttgaggtccttggcctccttgcttccacaggc

SEQ ID NO: 179588 - DNA, 74 bp, Homo sapiens
cgtcctgggacttcttcctccgtgccttgaggtccttggcctccttgcttccacaggccaggcctttgctgctg

SEQ ID NO: 179589 - DNA, 75 bp, Homo sapiens
tcctccgtgccttgaggtccttggcctccttgcttccacaggccaggcctttgctgctgggcttgcggaccttct

SEQ ID NO: 179590 - DNA, 76 bp, Homo sapiens
ccttgaggtccttggcctccttgcttccacaggccaggcctttgctgctgggcttgcggaccttcttgccctgcac

SEQ ID NO: 179591 - DNA, 77 bp, Homo sapiens
ttggcctccttgcttccacaggccaggcctttgctgctgggcttgcggaccttcttgccctgcacgccgggcttgag

SEQ ID NO: 179592 - DNA, 79 bp, Homo sapiens
tccttgcttccacaggccaggcctttgctgctgggcttgcggaccttcttgccctgcacgccgggcttgaggctgccca

SEQ ID NO: 179593 - DNA, 75 bp, Homo sapiens
aggccaggcctttgctgctgggcttgcggaccttcttgccctgcacgccgggcttgaggctgcccaggtagccgt

SEQ ID NO: 179594 - DNA, 78 bp, Homo sapiens
ctttgctgctgggcttgcggaccttcttgccctgcacgccgggcttgaggctgcccaggtagccgttgggcgagcaga

SEQ ID NO: 179595 - DNA, 75 bp, Homo sapiens
ctgggcttgcggaccttcttgccctgcacgccgggcttgaggctgcccaggtagccgttgggcgagcagagcggg

SEQ ID NO: 179596 - DNA, 73 bp, Homo sapiens
accttcttgccctgcacgccgggcttgaggctgcccaggtagccgttgggcgagcagagcgggggcgacaggg

SEQ ID NO: 179597 - DNA, 76 bp, Homo sapiens
tgccctgcacgccgggcttgaggctgcccaggtagccgttgggcgagcagagcgggggcgacagggtgggcgtgcc

SEQ ID NO: 179598 - DNA, 72 bp, Homo sapiens
ggcttgaggctgcccaggtagccgttgggcgagcagagcgggggcgacagggtgggcgtgccccccagcggg

SEQ ID NO: 179599 - DNA, 73 bp, Homo sapiens
ctgcccaggtagccgttgggcgagcagagcgggggcgacagggtgggcgtgccccccagcggggctccgtgca

SEQ ID NO: 179600 - DNA, 73 bp, Homo sapiens
ggtagccgttgggcgagcagagcgggggcgacagggtgggcgtgccccccagcggggctccgtgcagctgcgg

SEQ ID NO: 179601 - DNA, 77 bp, Homo sapiens
gggcgacagggtgggcgtgccccccagcggggctccgtgcagctgcgggctgcgcaccaggttgtactcgtccagca

SEQ ID NO: 179602 - DNA, 78 bp, Homo sapiens
acagggtgggcgtgccccccagcggggctccgtgcagctgcgggctgcgcaccaggttgtactcgtccagcagcctca

SEQ ID NO: 179603 - DNA, 85 bp, Homo sapiens
cccccagcggggctccgtgcagctgcgggctgcgcaccaggttgtactcgtccagcagcctcacgatgtcgtgatgcatgcgctc

SEQ ID NO: 179604 - DNA, 90 bp, Homo sapiens
gggctccgtgcagctgcgggctgcgcaccaggttgtactcgtccagcagcctcacgatgtcgtgatgcatgcgctcctgtgcgatgtcgc

SEQ ID NO: 179605 - DNA, 89 bp, Homo sapiens
agctgcgggctgcgcaccaggttgtactcgtccagcagcctcacgatgtcgtgatgcatgcgctcctgtgcgatgtcgcgcggcaggcg

SEQ ID NO: 179606 - DNA, 91 bp, Homo sapiens
tgcgcaccaggttgtactcgtccagcagcctcacgatgtcgtgatgcatgcgctcctgtgcgatgtcgcgcggcaggcggtccatatgatc

SEQ ID NO: 179607 - DNA, 88 bp, Homo sapiens
aggttgtactcgtccagcagcctcacgatgtcgtgatgcatgcgctcctgtgcgatgtcgcgcggcaggcggtccatatgatccgtga

SEQ ID NO: 179608 - DNA, 86 bp, Homo sapiens
agcctcacgatgtcgtgatgcatgcgctcctgtgcgatgtcgcgcggcaggcggtccatatgatccgtgatgtcccggttggcaaa

SEQ ID NO: 179609 - DNA, 85 bp, Homo sapiens
atgtcgtgatgcatgcgctcctgtgcgatgtcgcgcggcaggcggtccatatgatccgtgatgtcccggttggcaaagtggtcca

SEQ ID NO: 179610 - DNA, 82 bp, Homo sapiens
atgcgctcctgtgcgatgtcgcgcggcaggcggtccatatgatccgtgatgtcccggttggcaaagtggtccagcagcacct

SEQ ID NO: 179611 - DNA, 78 bp, Homo sapiens
cggcaggcggtccatatgatccgtgatgtcccggttggcaaagtggtccagcagcaccttggcggtctcgtagctgcc

SEQ ID NO: 179612 - DNA, 76 bp, Homo sapiens
cggtccatatgatccgtgatgtcccggttggcaaagtggtccagcagcaccttggcggtctcgtagctgccctccc

SEQ ID NO: 179613 - DNA, 75 bp, Homo sapiens
atgatccgtgatgtcccggttggcaaagtggtccagcagcaccttggcggtctcgtagctgccctcccgggcggc

SEQ ID NO: 179614 - DNA, 73 bp, Homo sapiens
atgtcccggttggcaaagtggtccagcagcaccttggcggtctcgtagctgccctcccgggcggccagaaaca

SEQ ID NO: 179615 - DNA, 72 bp, Homo sapiens
aaagtggtccagcagcaccttggcggtctcgtagctgccctcccgggcggccagaaacaggggtgtctcctc

SEQ ID NO: 179616 - DNA, 69 bp, Homo sapiens
accttggcggtctcgtagctgccctcccgggcggccagaaacaggggtgtctcctcctgggggatgagg

SEQ ID NO: 179617 - DNA, 65 bp, Homo sapiens
ccctcccgggcggccagaaacaggggtgtctcctcctgggggatgagggcgggggccggtgaggg

SEQ ID NO: 179618 - DNA, 79 bp, Homo sapiens
ctgtggattcagccctcacgtctcccctggcatcccagcctcgcgctcaccctgttgttctgcatatctttgttagccc

SEQ ID NO: 179619 - DNA, 76 bp, Homo sapiens
cctcacgtctcccctggcatcccagcctcgcgctcaccctgttgttctgcatatctttgttagccccgttcttcag

SEQ ID NO: 179620 - DNA, 78 bp, Homo sapiens
tctcccctggcatcccagcctcgcgctcaccctgttgttctgcatatctttgttagccccgttcttcaggagcacaac

SEQ ID NO: 179621 - DNA, 80 bp, Homo sapiens
atcccagcctcgcgctcaccctgttgttctgcatatctttgttagccccgttcttcaggagcacaactgcggcatccaca

SEQ ID NO: 179622 - DNA, 80 bp, Homo sapiens
cctcgcgctcaccctgttgttctgcatatctttgttagccccgttcttcaggagcacaactgcggcatccacattgttca

SEQ ID NO: 179623 - DNA, 77 bp, Homo sapiens
accctgttgttctgcatatctttgttagccccgttcttcaggagcacaactgcggcatccacattgttcacggcggc

SEQ ID NO: 179624 - DNA, 77 bp, Homo sapiens
atatctttgttagccccgttcttcaggagcacaactgcggcatccacattgttcacggcggcggcccagtgcagggc

SEQ ID NO: 179625 - DNA, 76 bp, Homo sapiens
tttgttagccccgttcttcaggagcacaactgcggcatccacattgttcacggcggcggcccagtgcagggcggac

SEQ ID NO: 179626 - DNA, 80 bp, Homo sapiens
ttcttcaggagcacaactgcggcatccacattgttcacggcggcggcccagtgcagggcggacttgcctgcgtgaaagaa

SEQ ID NO: 179627 - DNA, 81 bp, Homo sapiens
ggagcacaactgcggcatccacattgttcacggcggcggcccagtgcagggcggacttgcctgcgtgaaagaagcagatgg

SEQ ID NO: 179628 - DNA, 77 bp, Homo sapiens
catccacattgttcacggcggcggcccagtgcagggcggacttgcctgcgtgaaagaagcagatggggtaggttgga

SEQ ID NO: 179629 - DNA, 75 bp, Homo sapiens
acattgttcacggcggcggcccagtgcagggcggacttgcctgcgtgaaagaagcagatggggtaggttggagac

SEQ ID NO: 179630 - DNA, 74 bp, Homo sapiens
tgtggcggtcccgccccacgacagagcagccgtgcccccgtgggctcacccaggtcatctacggcgttgacgtc

SEQ ID NO: 179631 - DNA, 75 bp, Homo sapiens
ccccacgacagagcagccgtgcccccgtgggctcacccaggtcatctacggcgttgacgtcggcgtgtgagttga

SEQ ID NO: 179632 - DNA, 76 bp, Homo sapiens
agagcagccgtgcccccgtgggctcacccaggtcatctacggcgttgacgtcggcgtgtgagttgatgaggtcctc

SEQ ID NO: 179633 - DNA, 77 bp, Homo sapiens
ccgtgcccccgtgggctcacccaggtcatctacggcgttgacgtcggcgtgtgagttgatgaggtcctccagcatgc

SEQ ID NO: 179634 - DNA, 79 bp, Homo sapiens
tgggctcacccaggtcatctacggcgttgacgtcggcgtgtgagttgatgaggtcctccagcatgccctccacggccag

SEQ ID NO: 179635 - DNA, 78 bp, Homo sapiens
cccaggtcatctacggcgttgacgtcggcgtgtgagttgatgaggtcctccagcatgccctccacggccaggcgggca

SEQ ID NO: 179636 - DNA, 80 bp, Homo sapiens
tacggcgttgacgtcggcgtgtgagttgatgaggtcctccagcatgccctccacggccaggcgggcagccaggatcagtg

SEQ ID NO: 179637 - DNA, 86 bp, Homo sapiens
gtcggcgtgtgagttgatgaggtcctccagcatgccctccacggccaggcgggcagccaggatcagtggcgtcgtgccatcatgca

SEQ ID NO: 179638 - DNA, 89 bp, Homo sapiens
tgagttgatgaggtcctccagcatgccctccacggccaggcgggcagccaggatcagtggcgtcgtgccatcatgcatgcgggcatcca

SEQ ID NO: 179639 - DNA, 85 bp, Homo sapiens
aggtcctccagcatgccctccacggccaggcgggcagccaggatcagtggcgtcgtgccatcatgcatgcgggcatccaggtctg

SEQ ID NO: 179640 - DNA, 84 bp, Homo sapiens
atgccctccacggccaggcgggcagccaggatcagtggcgtcgtgccatcatgcatgcgggcatccaggtctgtggctcggttc

SEQ ID NO: 179641 - DNA, 85 bp, Homo sapiens
ggccaggcgggcagccaggatcagtggcgtcgtgccatcatgcatgcgggcatccaggtctgtggctcggttccggatcaggatc

SEQ ID NO: 179642 - DNA, 86 bp, Homo sapiens
gcagccaggatcagtggcgtcgtgccatcatgcatgcgggcatccaggtctgtggctcggttccggatcaggatctgggcaacagg

SEQ ID NO: 179643 - DNA, 84 bp, Homo sapiens
aggatcagtggcgtcgtgccatcatgcatgcgggcatccaggtctgtggctcggttccggatcaggatctgggcaacagggaga

SEQ ID NO: 179644 - DNA, 83 bp, Homo sapiens
cgtcgtgccatcatgcatgcgggcatccaggtctgtggctcggttccggatcaggatctgggcaacagggagaggctcaggcg

SEQ ID NO: 179645 - DNA, 82 bp, Homo sapiens
atcatgcatgcgggcatccaggtctgtggctcggttccggatcaggatctgggcaacagggagaggctcaggcgggtgctgg

SEQ ID NO: 179646 - DNA, 79 bp, Homo sapiens
aggcggccctgaggagggcaggtgggcacacaggcagccactgcctacctggaagacaccttgtgcgtcggcagacaca

SEQ ID NO: 179647 - DNA, 82 bp, Homo sapiens
aggagggcaggtgggcacacaggcagccactgcctacctggaagacaccttgtgcgtcggcagacacagccgcatgcagcgg

SEQ ID NO: 179648 - DNA, 84 bp, Homo sapiens
tgggcacacaggcagccactgcctacctggaagacaccttgtgcgtcggcagacacagccgcatgcagcggggtgcggcccatg

SEQ ID NO: 179649 - DNA, 80 bp, Homo sapiens
actgcctacctggaagacaccttgtgcgtcggcagacacagccgcatgcagcggggtgcggcccatgttgtcctggatgt

SEQ ID NO: 179650 - DNA, 85 bp, Homo sapiens
ctggaagacaccttgtgcgtcggcagacacagccgcatgcagcggggtgcggcccatgttgtcctggatgttggcatctgcgctg

SEQ ID NO: 179651 - DNA, 86 bp, Homo sapiens
accttgtgcgtcggcagacacagccgcatgcagcggggtgcggcccatgttgtcctggatgttggcatctgcgctggcctccagca

SEQ ID NO: 179652 - DNA, 88 bp, Homo sapiens
agacacagccgcatgcagcggggtgcggcccatgttgtcctggatgttggcatctgcgctggcctccagcaggcgcttggcggcatca

SEQ ID NO: 179653 - DNA, 89 bp, Homo sapiens
gcatgcagcggggtgcggcccatgttgtcctggatgttggcatctgcgctggcctccagcaggcgcttggcggcatcagagcgtgagta

SEQ ID NO: 179654 - DNA, 85 bp, Homo sapiens
gggtgcggcccatgttgtcctggatgttggcatctgcgctggcctccagcaggcgcttggcggcatcagagcgtgagtagcgggc

SEQ ID NO: 179655 - DNA, 87 bp, Homo sapiens
catgttgtcctggatgttggcatctgcgctggcctccagcaggcgcttggcggcatcagagcgtgagtagcgggcggccaggtgcaa

SEQ ID NO: 179656 - DNA, 86 bp, Homo sapiens
tggatgttggcatctgcgctggcctccagcaggcgcttggcggcatcagagcgtgagtagcgggcggccaggtgcaaggcggtctc

SEQ ID NO: 179657 - DNA, 84 bp, Homo sapiens
gttggcatctgcgctggcctccagcaggcgcttggcggcatcagagcgtgagtagcgggcggccaggtgcaaggcggtctcgcc

SEQ ID NO: 179658 - DNA, 80 bp, Homo sapiens
ggcctccagcaggcgcttggcggcatcagagcgtgagtagcgggcggccaggtgcaaggcggtctcgcccgtgcggtctg

SEQ ID NO: 179659 - DNA, 78 bp, Homo sapiens
aggcgcttggcggcatcagagcgtgagtagcgggcggccaggtgcaaggcggtctcgcccgtgcggtctgtctggttg

SEQ ID NO: 179660 - DNA, 80 bp, Homo sapiens
cttggcggcatcagagcgtgagtagcgggcggccaggtgcaaggcggtctcgcccgtgcggtctgtctggttgtgcaggc

SEQ ID NO: 179661 - DNA, 80 bp, Homo sapiens
tcagagcgtgagtagcgggcggccaggtgcaaggcggtctcgcccgtgcggtctgtctggttgtgcaggctggcgccctg

SEQ ID NO: 179662 - DNA, 78 bp, Homo sapiens
gtagcgggcggccaggtgcaaggcggtctcgcccgtgcggtctgtctggttgtgcaggctggcgccctggtagatgaa

SEQ ID NO: 179663 - DNA, 78 bp, Homo sapiens
aggtgcaaggcggtctcgcccgtgcggtctgtctggttgtgcaggctggcgccctggtagatgaagtcggagatgacg

SEQ ID NO: 179664 - DNA, 76 bp, Homo sapiens
aaggcggtctcgcccgtgcggtctgtctggttgtgcaggctggcgccctggtagatgaagtcggagatgacggccg

SEQ ID NO: 179665 - DNA, 78 bp, Homo sapiens
cgtgcggtctgtctggttgtgcaggctggcgccctggtagatgaagtcggagatgacggccggcgcgtcctcctcttc

SEQ ID NO: 179666 - DNA, 79 bp, Homo sapiens
tctgtctggttgtgcaggctggcgccctggtagatgaagtcggagatgacggccggcgcgtcctcctcttcctcgctgt

SEQ ID NO: 179667 - DNA, 78 bp, Homo sapiens
ttgtgcaggctggcgccctggtagatgaagtcggagatgacggccggcgcgtcctcctcttcctcgctgttgcccgtc

SEQ ID NO: 179668 - DNA, 77 bp, Homo sapiens
tagatgaagtcggagatgacggccggcgcgtcctcctcttcctcgctgttgcccgtctccaggccgcccccgctgca

SEQ ID NO: 179669 - DNA, 78 bp, Homo sapiens
agatgacggccggcgcgtcctcctcttcctcgctgttgcccgtctccaggccgcccccgctgcaggaggcgatcatga

SEQ ID NO: 179670 - DNA, 81 bp, Homo sapiens
ctcctcttcctcgctgttgcccgtctccaggccgcccccgctgcaggaggcgatcatgagcggggtgaagccatctgcaga

SEQ ID NO: 179671 - DNA, 83 bp, Homo sapiens
tcctcgctgttgcccgtctccaggccgcccccgctgcaggaggcgatcatgagcggggtgaagccatctgcagaggcagagac

SEQ ID NO: 179672 - DNA, 84 bp, Homo sapiens
gtctccaggccgcccccgctgcaggaggcgatcatgagcggggtgaagccatctgcagaggcagagacgggtgctcagtctgga

SEQ ID NO: 179673 - DNA, 82 bp, Homo sapiens
aggccgcccccgctgcaggaggcgatcatgagcggggtgaagccatctgcagaggcagagacgggtgctcagtctggagggc

SEQ ID NO: 179674 - DNA, 74 bp, Homo sapiens
aggtgggccacggggctagggaagccctggctgctggcacccttaccaggcccgcggacattgacgtccatgca

SEQ ID NO: 179675 - DNA, 75 bp, Homo sapiens
cggggctagggaagccctggctgctggcacccttaccaggcccgcggacattgacgtccatgcagtcggcgtcaa

SEQ ID NO: 179676 - DNA, 76 bp, Homo sapiens
gaagccctggctgctggcacccttaccaggcccgcggacattgacgtccatgcagtcggcgtcaacctcaccctgg

SEQ ID NO: 179677 - DNA, 75 bp, Homo sapiens
ctgctggcacccttaccaggcccgcggacattgacgtccatgcagtcggcgtcaacctcaccctggggcggtgtg

SEQ ID NO: 179678 - DNA, 72 bp, Homo sapiens
ggcacccttaccaggcccgcggacattgacgtccatgcagtcggcgtcaacctcaccctggggcggtgtggg

SEQ ID NO: 179679 - DNA, 77 bp, Homo sapiens
aggcccgcggacattgacgtccatgcagtcggcgtcaacctcaccctggggcggtgtgggggccatggcagacatgc

SEQ ID NO: 179680 - DNA, 81 bp, Homo sapiens
attgacgtccatgcagtcggcgtcaacctcaccctggggcggtgtgggggccatggcagacatgcgcaggtcagcggcatc

SEQ ID NO: 179681 - DNA, 82 bp, Homo sapiens
gtccatgcagtcggcgtcaacctcaccctggggcggtgtgggggccatggcagacatgcgcaggtcagcggcatccaggtgc

SEQ ID NO: 179682 - DNA, 83 bp, Homo sapiens
tcggcgtcaacctcaccctggggcggtgtgggggccatggcagacatgcgcaggtcagcggcatccaggtgctgctgagtcca

SEQ ID NO: 179683 - DNA, 83 bp, Homo sapiens
tcaccctggggcggtgtgggggccatggcagacatgcgcaggtcagcggcatccaggtgctgctgagtccactgccggtggtc

SEQ ID NO: 179684 - DNA, 85 bp, Homo sapiens
gtgtgggggccatggcagacatgcgcaggtcagcggcatccaggtgctgctgagtccactgccggtggtctgtctggtcgtccag

SEQ ID NO: 179685 - DNA, 87 bp, Homo sapiens
catggcagacatgcgcaggtcagcggcatccaggtgctgctgagtccactgccggtggtctgtctggtcgtccaggtcaggcagaac

SEQ ID NO: 179686 - DNA, 84 bp, Homo sapiens
agacatgcgcaggtcagcggcatccaggtgctgctgagtccactgccggtggtctgtctggtcgtccaggtcaggcagaaccac

SEQ ID NO: 179687 - DNA, 80 bp, Homo sapiens
aggtcagcggcatccaggtgctgctgagtccactgccggtggtctgtctggtcgtccaggtcaggcagaaccacgggctc

SEQ ID NO: 179688 - DNA, 79 bp, Homo sapiens
caggtgctgctgagtccactgccggtggtctgtctggtcgtccaggtcaggcagaaccacgggctcctcgaactacata

SEQ ID NO: 179689 - DNA, 76 bp, Homo sapiens
ctgagtccactgccggtggtctgtctggtcgtccaggtcaggcagaaccacgggctcctcgaactacatagaggga

SEQ ID NO: 179690 - DNA, 77 bp, Homo sapiens
actgccggtggtctgtctggtcgtccaggtcaggcagaaccacgggctcctcgaactacatagagggagtgagcaga

SEQ ID NO: 179691 - DNA, 78 bp, Homo sapiens
tcgaactacatagagggagtgagcagagcctgtcagggcagcccggcagcaggtgcccgggagcccaggagcccggga

SEQ ID NO: 179692 - DNA, 71 bp, Homo sapiens
agcccggcagcaggtgcccgggagcccaggagcccgggagcctcgcgactcacccggaacttcttggtctc

SEQ ID NO: 179693 - DNA, 69 bp, Homo sapiens
aggtgcccgggagcccaggagcccgggagcctcgcgactcacccggaacttcttggtctccaggtcctc

SEQ ID NO: 179694 - DNA, 68 bp, Homo sapiens
ccgggagcccaggagcccgggagcctcgcgactcacccggaacttcttggtctccaggtcctcgtccc

SEQ ID NO: 179695 - DNA, 69 bp, Homo sapiens
agcccgggagcctcgcgactcacccggaacttcttggtctccaggtcctcgtccccccactcattctgg

SEQ ID NO: 179696 - DNA, 72 bp, Homo sapiens
cctcgcgactcacccggaacttcttggtctccaggtcctcgtccccccactcattctggttgtcgtccatga

SEQ ID NO: 179697 - DNA, 71 bp, Homo sapiens
actcacccggaacttcttggtctccaggtcctcgtccccccactcattctggttgtcgtccatgagggcac

SEQ ID NO: 179698 - DNA, 75 bp, Homo sapiens
tcttggtctccaggtcctcgtccccccactcattctggttgtcgtccatgagggcaccgtctgaagcgttcttca

SEQ ID NO: 179699 - DNA, 73 bp, Homo sapiens
gtctccaggtcctcgtccccccactcattctggttgtcgtccatgagggcaccgtctgaagcgttcttcaggg

SEQ ID NO: 179700 - DNA, 71 bp, Homo sapiens
cctcgtccccccactcattctggttgtcgtccatgagggcaccgtctgaagcgttcttcaggggcctgggg

SEQ ID NO: 179701 - DNA, 73 bp, Homo sapiens
tcattctggttgtcgtccatgagggcaccgtctgaagcgttcttcaggggcctggggggtgaggggtcgagaa

SEQ ID NO: 179702 - DNA, 72 bp, Homo sapiens
tggttgtcgtccatgagggcaccgtctgaagcgttcttcaggggcctggggggtgaggggtcgagaagtgag

SEQ ID NO: 179703 - DNA, 74 bp, Homo sapiens
atgagggcaccgtctgaagcgttcttcaggggcctggggggtgaggggtcgagaagtgaggctgagcgagctcc

SEQ ID NO: 179704 - DNA, 70 bp, Homo sapiens
tcccacctcccaccggggacccagaagcaggggcggcgtccgctcacttgaggcccacggagtcctcgcc

SEQ ID NO: 179705 - DNA, 69 bp, Homo sapiens
ctcccaccggggacccagaagcaggggcggcgtccgctcacttgaggcccacggagtcctcgccgaggg

SEQ ID NO: 179706 - DNA, 72 bp, Homo sapiens
cagaagcaggggcggcgtccgctcacttgaggcccacggagtcctcgccgaggggctcccgccgcttcttct

SEQ ID NO: 179707 - DNA, 75 bp, Homo sapiens
cgctcacttgaggcccacggagtcctcgccgaggggctcccgccgcttcttcttgctggcctcagacactttgaa

SEQ ID NO: 179708 - DNA, 75 bp, Homo sapiens
ttgaggcccacggagtcctcgccgaggggctcccgccgcttcttcttgctggcctcagacactttgaagccctca

SEQ ID NO: 179709 - DNA, 72 bp, Homo sapiens
acggagtcctcgccgaggggctcccgccgcttcttcttgctggcctcagacactttgaagccctcagggaac

SEQ ID NO: 179710 - DNA, 79 bp, Homo sapiens
tcccgccgcttcttcttgctggcctcagacactttgaagccctcagggaaccagagctggccatgctgccgccggcgct

SEQ ID NO: 179711 - DNA, 82 bp, Homo sapiens
tcagacactttgaagccctcagggaaccagagctggccatgctgccgccggcgcttgcgggacagcagcaccccgcagccca

SEQ ID NO: 179712 - DNA, 80 bp, Homo sapiens
ttgaagccctcagggaaccagagctggccatgctgccgccggcgcttgcgggacagcagcaccccgcagcccacgaagaa

SEQ ID NO: 179713 - DNA, 80 bp, Homo sapiens
agggaaccagagctggccatgctgccgccggcgcttgcgggacagcagcaccccgcagcccacgaagaacagaagcacaa

SEQ ID NO: 179714 - DNA, 80 bp, Homo sapiens
accagagctggccatgctgccgccggcgcttgcgggacagcagcaccccgcagcccacgaagaacagaagcacaaaggcg

SEQ ID NO: 179715 - DNA, 78 bp, Homo sapiens
atgctgccgccggcgcttgcgggacagcagcaccccgcagcccacgaagaacagaagcacaaaggcggccgccgccac

SEQ ID NO: 179716 - DNA, 80 bp, Homo sapiens
gcgcttgcgggacagcagcaccccgcagcccacgaagaacagaagcacaaaggcggccgccgccacgtacatgaagtgca

SEQ ID NO: 179717 - DNA, 80 bp, Homo sapiens
ggacagcagcaccccgcagcccacgaagaacagaagcacaaaggcggccgccgccacgtacatgaagtgcagctgcgccg

SEQ ID NO: 179718 - DNA, 76 bp, Homo sapiens
agcccacgaagaacagaagcacaaaggcggccgccgccacgtacatgaagtgcagctgcgccggcgggggcggctc

SEQ ID NO: 179719 - DNA, 77 bp, Homo sapiens
agaagcacaaaggcggccgccgccacgtacatgaagtgcagctgcgccggcgggggcggctccacggtctcacctgc

SEQ ID NO: 179720 - DNA, 76 bp, Homo sapiens
acaaaggcggccgccgccacgtacatgaagtgcagctgcgccggcgggggcggctccacggtctcacctgcgggca

SEQ ID NO: 179721 - DNA, 75 bp, Homo sapiens
ccgccgccacgtacatgaagtgcagctgcgccggcgggggcggctccacggtctcacctgcgggcacgggggcca

SEQ ID NO: 179722 - DNA, 74 bp, Homo sapiens
cgtacatgaagtgcagctgcgccggcgggggcggctccacggtctcacctgcgggcacgggggccaggggcagg

SEQ ID NO: 179723 - DNA, 76 bp, Homo sapiens
tgcagctgcgccggcgggggcggctccacggtctcacctgcgggcacgggggccaggggcaggtgcccggacatca

SEQ ID NO: 179724 - DNA, 73 bp, Homo sapiens
cgggggcggctccacggtctcacctgcgggcacgggggccaggggcaggtgcccggacatcaggcagcggcta

SEQ ID NO: 179725 - DNA, 77 bp, Homo sapiens
ggtctcacctgcgggcacgggggccaggggcaggtgcccggacatcaggcagcggctacgcagcaggctggtggccg

SEQ ID NO: 179726 - DNA, 75 bp, Homo sapiens
aggggcaggtgcccggacatcaggcagcggctacgcagcaggctggtggccggggggcggcggactggctccgcg

SEQ ID NO: 179727 - DNA, 74 bp, Homo sapiens
aggtgcccggacatcaggcagcggctacgcagcaggctggtggccggggggcggcggactggctccgcgtccgg

SEQ ID NO: 179728 - DNA, 76 bp, Homo sapiens
acatcaggcagcggctacgcagcaggctggtggccggggggcggcggactggctccgcgtccgggcgcctcctcac

SEQ ID NO: 179729 - DNA, 73 bp, Homo sapiens
agcggctacgcagcaggctggtggccggggggcggcggactggctccgcgtccgggcgcctcctcacccactc

SEQ ID NO: 179730 - DNA, 72 bp, Homo sapiens
agcaggctggtggccggggggcggcggactggctccgcgtccgggcgcctcctcacccactctcctccatcc

SEQ ID NO: 179731 - DNA, 70 bp, Homo sapiens
cggactggctccgcgtccgggcgcctcctcacccactctcctccatcccgccctccaaaataaggtcatt

SEQ ID NO: 179732 - DNA, 71 bp, Homo sapiens
tccgcgtccgggcgcctcctcacccactctcctccatcccgccctccaaaataaggtcattttctacgcga

SEQ ID NO: 179733 - DNA, 72 bp, Homo sapiens
ggcgcctcctcacccactctcctccatcccgccctccaaaataaggtcattttctacgcgattaatcagaat

SEQ ID NO: 179734 - DNA, 72 bp, Homo sapiens
acccactctcctccatcccgccctccaaaataaggtcattttctacgcgattaatcagaattgcaaactatc

SEQ ID NO: 179735 - DNA, 73 bp, Homo sapiens
ctccatcccgccctccaaaataaggtcattttctacgcgattaatcagaattgcaaactatcgctaaattctc

SEQ ID NO: 179736 - DNA, 75 bp, Homo sapiens
tcccgccctccaaaataaggtcattttctacgcgattaatcagaattgcaaactatcgctaaattctctcctgca

SEQ ID NO: 179737 - DNA, 77 bp, Homo sapiens
aataaggtcattttctacgcgattaatcagaattgcaaactatcgctaaattctctcctgcaccagccgactctatc

SEQ ID NO: 179738 - DNA, 78 bp, Homo sapiens
attttctacgcgattaatcagaattgcaaactatcgctaaattctctcctgcaccagccgactctatctggagacggc

SEQ ID NO: 179739 - DNA, 75 bp, Homo sapiens
ttaatcagaattgcaaactatcgctaaattctctcctgcaccagccgactctatctggagacggcttttactttt

SEQ ID NO: 179740 - DNA, 74 bp, Homo sapiens
agaattgcaaactatcgctaaattctctcctgcaccagccgactctatctggagacggcttttacttttttctc

SEQ ID NO: 179741 - DNA, 71 bp, Homo sapiens
aactatcgctaaattctctcctgcaccagccgactctatctggagacggcttttacttttttctcctttaa

SEQ ID NO: 179742 - DNA, 69 bp, Homo sapiens
aaattctctcctgcaccagccgactctatctggagacggcttttacttttttctcctttaaggaaggag

SEQ ID NO: 179743 - DNA, 68 bp, Homo sapiens
actctatctggagacggcttttacttttttctcctttaaggaaggaggattagtcaacttcaaatcgc

SEQ ID NO: 179744 - DNA, 71 bp, Homo sapiens
agacggcttttacttttttctcctttaaggaaggaggattagtcaacttcaaatcgctgcactcgcactga

SEQ ID NO: 179745 - DNA, 75 bp, Homo sapiens
ttctcctttaaggaaggaggattagtcaacttcaaatcgctgcactcgcactgagctgttaagacaaaggattta

SEQ ID NO: 179746 - DNA, 75 bp, Homo sapiens
aaggaggattagtcaacttcaaatcgctgcactcgcactgagctgttaagacaaaggatttagagggattttcaa

SEQ ID NO: 179747 - DNA, 76 bp, Homo sapiens
attagtcaacttcaaatcgctgcactcgcactgagctgttaagacaaaggatttagagggattttcaagatacaaa

SEQ ID NO: 179748 - DNA, 76 bp, Homo sapiens
ttcaaatcgctgcactcgcactgagctgttaagacaaaggatttagagggattttcaagatacaaacttcaacact

SEQ ID NO: 179749 - DNA, 75 bp, Homo sapiens
actcgcactgagctgttaagacaaaggatttagagggattttcaagatacaaacttcaacacttcacatgacacc

SEQ ID NO: 179750 - DNA, 73 bp, Homo sapiens
ctgttaagacaaaggatttagagggattttcaagatacaaacttcaacacttcacatgacaccgatcaattct

SEQ ID NO: 179751 - DNA, 74 bp, Homo sapiens
aagacaaaggatttagagggattttcaagatacaaacttcaacacttcacatgacaccgatcaattcttctctc

SEQ ID NO: 179752 - DNA, 64 bp, Homo sapiens
ttttctttaaaaaaagccgtaatgattttgaaataatacccaacaaagaaaattcaggaggaaa

SEQ ID NO: 179753 - DNA, 63 bp, Homo sapiens
aaaaaaagccgtaatgattttgaaataatacccaacaaagaaaattcaggaggaaagggtggg

SEQ ID NO: 179754 - DNA, 70 bp, Homo sapiens
taatgattttgaaataatacccaacaaagaaaattcaggaggaaagggtggggagagaagcaggcaccca

SEQ ID NO: 179755 - DNA, 67 bp, Homo sapiens
ttttgaaataatacccaacaaagaaaattcaggaggaaagggtggggagagaagcaggcacccactt

SEQ ID NO: 179756 - DNA, 68 bp, Homo sapiens
atacccaacaaagaaaattcaggaggaaagggtggggagagaagcaggcacccactttcccgtggctg

SEQ ID NO: 179757 - DNA, 68 bp, Homo sapiens
aagaaaattcaggaggaaagggtggggagagaagcaggcacccactttcccgtggctggactcgttcc

SEQ ID NO: 179758 - DNA, 69 bp, Homo sapiens
aggaaagggtggggagagaagcaggcacccactttcccgtggctggactcgttcccaggtggctccacc

SEQ ID NO: 179759 - DNA, 76 bp, Homo sapiens
ggagagaagcaggcacccactttcccgtggctggactcgttcccaggtggctccaccggcagctgtgaccgccgca

SEQ ID NO: 179760 - DNA, 74 bp, Homo sapiens
aagcaggcacccactttcccgtggctggactcgttcccaggtggctccaccggcagctgtgaccgccgcaggtg

SEQ ID NO: 179761 - DNA, 71 bp, Homo sapiens
actttcccgtggctggactcgttcccaggtggctccaccggcagctgtgaccgccgcaggtgggggcggag

SEQ ID NO: 179762 - DNA, 74 bp, Homo sapiens
ctggactcgttcccaggtggctccaccggcagctgtgaccgccgcaggtgggggcggagtgccattcagaaaat

SEQ ID NO: 179763 - DNA, 75 bp, Homo sapiens
ctcgttcccaggtggctccaccggcagctgtgaccgccgcaggtgggggcggagtgccattcagaaaattccaga

SEQ ID NO: 179764 - DNA, 74 bp, Homo sapiens
ggtggctccaccggcagctgtgaccgccgcaggtgggggcggagtgccattcagaaaattccagaaaagcccta

SEQ ID NO: 179765 - DNA, 71 bp, Homo sapiens
agctgtgaccgccgcaggtgggggcggagtgccattcagaaaattccagaaaagccctaccccaactcgga

SEQ ID NO: 179766 - DNA, 69 bp, Homo sapiens
ggggcggagtgccattcagaaaattccagaaaagccctaccccaactcggacggcaacgctcacacccg

SEQ ID NO: 179767 - DNA, 71 bp, Homo sapiens
tgccattcagaaaattccagaaaagccctaccccaactcggacggcaacgctcacacccgtgggtagcaac

SEQ ID NO: 179768 - DNA, 69 bp, Homo sapiens
aaattccagaaaagccctaccccaactcggacggcaacgctcacacccgtgggtagcaactggcacaaa

SEQ ID NO: 179769 - DNA, 71 bp, Homo sapiens
aaaagccctaccccaactcggacggcaacgctcacacccgtgggtagcaactggcacaaacagccagcgtg

SEQ ID NO: 179770 - DNA, 73 bp, Homo sapiens
cccaactcggacggcaacgctcacacccgtgggtagcaactggcacaaacagccagcgtgtctggggcacggg

SEQ ID NO: 179771 - DNA, 74 bp, Homo sapiens
ctcggacggcaacgctcacacccgtgggtagcaactggcacaaacagccagcgtgtctggggcacggggggatg

SEQ ID NO: 179772 - DNA, 72 bp, Homo sapiens
aacgctcacacccgtgggtagcaactggcacaaacagccagcgtgtctggggcacggggggatggcaccccc

SEQ ID NO: 179773 - DNA, 77 bp, Homo sapiens
gtgggtagcaactggcacaaacagccagcgtgtctggggcacggggggatggcaccccctgcaggcagagcctgttc

SEQ ID NO: 179774 - DNA, 74 bp, Homo sapiens
aactggcacaaacagccagcgtgtctggggcacggggggatggcaccccctgcaggcagagcctgttcccggga

SEQ ID NO: 179775 - DNA, 73 bp, Homo sapiens
aaacagccagcgtgtctggggcacggggggatggcaccccctgcaggcagagcctgttcccgggatggggcca

SEQ ID NO: 179776 - DNA, 74 bp, Homo sapiens
ggggggatggcaccccctgcaggcagagcctgttcccgggatggggccacacttactctgcacggcctcgatct

SEQ ID NO: 179777 - DNA, 75 bp, Homo sapiens
atggcaccccctgcaggcagagcctgttcccgggatggggccacacttactctgcacggcctcgatcttgtaggg

SEQ ID NO: 179778 - DNA, 77 bp, Homo sapiens
cctgcaggcagagcctgttcccgggatggggccacacttactctgcacggcctcgatcttgtaggggatgttgaggc

SEQ ID NO: 179779 - DNA, 76 bp, Homo sapiens
agcctgttcccgggatggggccacacttactctgcacggcctcgatcttgtaggggatgttgaggctgcccagcga

SEQ ID NO: 179780 - DNA, 79 bp, Homo sapiens
atggggccacacttactctgcacggcctcgatcttgtaggggatgttgaggctgcccagcgaggcgagcgctcccagga

SEQ ID NO: 179781 - DNA, 80 bp, Homo sapiens
acacttactctgcacggcctcgatcttgtaggggatgttgaggctgcccagcgaggcgagcgctcccaggaatgcggcca

SEQ ID NO: 179782 - DNA, 80 bp, Homo sapiens
tctgcacggcctcgatcttgtaggggatgttgaggctgcccagcgaggcgagcgctcccaggaatgcggccacgtcggtg

SEQ ID NO: 179783 - DNA, 80 bp, Homo sapiens
tcgatcttgtaggggatgttgaggctgcccagcgaggcgagcgctcccaggaatgcggccacgtcggtggcactctggaa

SEQ ID NO: 179784 - DNA, 82 bp, Homo sapiens
ggatgttgaggctgcccagcgaggcgagcgctcccaggaatgcggccacgtcggtggcactctggaagcactgcgaggaggc

SEQ ID NO: 179785 - DNA, 84 bp, Homo sapiens
ttgaggctgcccagcgaggcgagcgctcccaggaatgcggccacgtcggtggcactctggaagcactgcgaggaggcctgcaca

SEQ ID NO: 179786 - DNA, 81 bp, Homo sapiens
gaggcgagcgctcccaggaatgcggccacgtcggtggcactctggaagcactgcgaggaggcctgcacacactgccggttg

SEQ ID NO: 179787 - DNA, 81 bp, Homo sapiens
ctcccaggaatgcggccacgtcggtggcactctggaagcactgcgaggaggcctgcacacactgccggttgtcaatctcca

SEQ ID NO: 179788 - DNA, 80 bp, Homo sapiens
aggaatgcggccacgtcggtggcactctggaagcactgcgaggaggcctgcacacactgccggttgtcaatctccaggta

SEQ ID NO: 179789 - DNA, 81 bp, Homo sapiens
acgtcggtggcactctggaagcactgcgaggaggcctgcacacactgccggttgtcaatctccaggtagacgatggagctg

SEQ ID NO: 179790 - DNA, 81 bp, Homo sapiens
aagcactgcgaggaggcctgcacacactgccggttgtcaatctccaggtagacgatggagctgggcggacaatcagagagg

SEQ ID NO: 179791 - DNA, 79 bp, Homo sapiens
aggaggcctgcacacactgccggttgtcaatctccaggtagacgatggagctgggcggacaatcagagaggggctggga

SEQ ID NO: 179792 - DNA, 71 bp, Homo sapiens
cccaggagagttgcggggattgaccgtgggcgccgggtctcactcacccgcggacgtccatggggtccagc

SEQ ID NO: 179793 - DNA, 71 bp, Homo sapiens
agagttgcggggattgaccgtgggcgccgggtctcactcacccgcggacgtccatggggtccagctccctc

SEQ ID NO: 179794 - DNA, 71 bp, Homo sapiens
attgaccgtgggcgccgggtctcactcacccgcggacgtccatggggtccagctccctccgccgccgccca

SEQ ID NO: 179795 - DNA, 73 bp, Homo sapiens
gccgggtctcactcacccgcggacgtccatggggtccagctccctccgccgccgcccaccctcgctgccacca

SEQ ID NO: 179796 - DNA, 75 bp, Homo sapiens
gtctcactcacccgcggacgtccatggggtccagctccctccgccgccgcccaccctcgctgccaccagggagca

SEQ ID NO: 179797 - DNA, 74 bp, Homo sapiens
cggacgtccatggggtccagctccctccgccgccgcccaccctcgctgccaccagggagcagcgaggccttcac

SEQ ID NO: 179798 - DNA, 76 bp, Homo sapiens
tccatggggtccagctccctccgccgccgcccaccctcgctgccaccagggagcagcgaggccttcacctggccca

SEQ ID NO: 179799 - DNA, 77 bp, Homo sapiens
tccctccgccgccgcccaccctcgctgccaccagggagcagcgaggccttcacctggcccagcagggcgtcaggtgc

SEQ ID NO: 179800 - DNA, 77 bp, Homo sapiens
cgccgcccaccctcgctgccaccagggagcagcgaggccttcacctggcccagcagggcgtcaggtgcggcccagcc

SEQ ID NO: 179801 - DNA, 76 bp, Homo sapiens
accctcgctgccaccagggagcagcgaggccttcacctggcccagcagggcgtcaggtgcggcccagccctcggcg

SEQ ID NO: 179802 - DNA, 77 bp, Homo sapiens
accagggagcagcgaggccttcacctggcccagcagggcgtcaggtgcggcccagccctcggcggcacgcttgatgg

SEQ ID NO: 179803 - DNA, 79 bp, Homo sapiens
agcgaggccttcacctggcccagcagggcgtcaggtgcggcccagccctcggcggcacgcttgatggggtgcttgcgca

SEQ ID NO: 179804 - DNA, 80 bp, Homo sapiens
ttcacctggcccagcagggcgtcaggtgcggcccagccctcggcggcacgcttgatggggtgcttgcgcagctcctcctc

SEQ ID NO: 179805 - DNA, 78 bp, Homo sapiens
agcagggcgtcaggtgcggcccagccctcggcggcacgcttgatggggtgcttgcgcagctcctcctcgcggccgtag

SEQ ID NO: 179806 - DNA, 76 bp, Homo sapiens
cgtcaggtgcggcccagccctcggcggcacgcttgatggggtgcttgcgcagctcctcctcgcggccgtagtaggg

SEQ ID NO: 179807 - DNA, 77 bp, Homo sapiens
cggcccagccctcggcggcacgcttgatggggtgcttgcgcagctcctcctcgcggccgtagtaggggaagatcatc

SEQ ID NO: 179808 - DNA, 82 bp, Homo sapiens
ggcggcacgcttgatggggtgcttgcgcagctcctcctcgcggccgtagtaggggaagatcatctgctggccgtgtgcgtca

SEQ ID NO: 179809 - DNA, 82 bp, Homo sapiens
ttgatggggtgcttgcgcagctcctcctcgcggccgtagtaggggaagatcatctgctggccgtgtgcgtcacgcttgaaga

SEQ ID NO: 179810 - DNA, 79 bp, Homo sapiens
cttgcgcagctcctcctcgcggccgtagtaggggaagatcatctgctggccgtgtgcgtcacgcttgaagaccacgttg

SEQ ID NO: 179811 - DNA, 79 bp, Homo sapiens
agctcctcctcgcggccgtagtaggggaagatcatctgctggccgtgtgcgtcacgcttgaagaccacgttggtgtgca

SEQ ID NO: 179812 - DNA, 82 bp, Homo sapiens
tcgcggccgtagtaggggaagatcatctgctggccgtgtgcgtcacgcttgaagaccacgttggtgtgcagcacgcggctga

SEQ ID NO: 179813 - DNA, 82 bp, Homo sapiens
ggggaagatcatctgctggccgtgtgcgtcacgcttgaagaccacgttggtgtgcagcacgcggctgagctcccgcaggaag

SEQ ID NO: 179814 - DNA, 83 bp, Homo sapiens
agatcatctgctggccgtgtgcgtcacgcttgaagaccacgttggtgtgcagcacgcggctgagctcccgcaggaagtggaag

SEQ ID NO: 179815 - DNA, 80 bp, Homo sapiens
ctggccgtgtgcgtcacgcttgaagaccacgttggtgtgcagcacgcggctgagctcccgcaggaagtggaaggagctgt

SEQ ID NO: 179816 - DNA, 83 bp, Homo sapiens
cgtcacgcttgaagaccacgttggtgtgcagcacgcggctgagctcccgcaggaagtggaaggagctgttgcgcagctgctcc

SEQ ID NO: 179817 - DNA, 87 bp, Homo sapiens
tgaagaccacgttggtgtgcagcacgcggctgagctcccgcaggaagtggaaggagctgttgcgcagctgctccggcggcatcagca

SEQ ID NO: 179818 - DNA, 86 bp, Homo sapiens
gttggtgtgcagcacgcggctgagctcccgcaggaagtggaaggagctgttgcgcagctgctccggcggcatcagcaccaccacca

SEQ ID NO: 179819 - DNA, 85 bp, Homo sapiens
agcacgcggctgagctcccgcaggaagtggaaggagctgttgcgcagctgctccggcggcatcagcaccaccaccaccagcgtgc

SEQ ID NO: 179820 - DNA, 84 bp, Homo sapiens
tgagctcccgcaggaagtggaaggagctgttgcgcagctgctccggcggcatcagcaccaccaccaccagcgtgccggccgcca

SEQ ID NO: 179821 - DNA, 81 bp, Homo sapiens
agtggaaggagctgttgcgcagctgctccggcggcatcagcaccaccaccaccagcgtgccggccgccagcctctcgggta

SEQ ID NO: 179822 - DNA, 83 bp, Homo sapiens
aaggagctgttgcgcagctgctccggcggcatcagcaccaccaccaccagcgtgccggccgccagcctctcgggtacatgctc

SEQ ID NO: 179823 - DNA, 82 bp, Homo sapiens
agctgctccggcggcatcagcaccaccaccaccagcgtgccggccgccagcctctcgggtacatgctccgcacagtccagcc

SEQ ID NO: 179824 - DNA, 80 bp, Homo sapiens
tccggcggcatcagcaccaccaccaccagcgtgccggccgccagcctctcgggtacatgctccgcacagtccagcccgtc

SEQ ID NO: 179825 - DNA, 78 bp, Homo sapiens
caccaccaccaccagcgtgccggccgccagcctctcgggtacatgctccgcacagtccagcccgtcccactcgcactc

SEQ ID NO: 179826 - DNA, 80 bp, Homo sapiens
accagcgtgccggccgccagcctctcgggtacatgctccgcacagtccagcccgtcccactcgcactccgcgctgttgca

SEQ ID NO: 179827 - DNA, 78 bp, Homo sapiens
ccggccgccagcctctcgggtacatgctccgcacagtccagcccgtcccactcgcactccgcgctgttgcagccctgg

SEQ ID NO: 179828 - DNA, 80 bp, Homo sapiens
agcctctcgggtacatgctccgcacagtccagcccgtcccactcgcactccgcgctgttgcagccctggtcgcagtgccc

SEQ ID NO: 179829 - DNA, 82 bp, Homo sapiens
gtacatgctccgcacagtccagcccgtcccactcgcactccgcgctgttgcagccctggtcgcagtgcccgtcgctgaagtg

SEQ ID NO: 179830 - DNA, 79 bp, Homo sapiens
tccgcacagtccagcccgtcccactcgcactccgcgctgttgcagccctggtcgcagtgcccgtcgctgaagtggtcct

SEQ ID NO: 179831 - DNA, 78 bp, Homo sapiens
agcccgtcccactcgcactccgcgctgttgcagccctggtcgcagtgcccgtcgctgaagtggtccttgcagtactgg

SEQ ID NO: 179832 - DNA, 78 bp, Homo sapiens
actcgcactccgcgctgttgcagccctggtcgcagtgcccgtcgctgaagtggtccttgcagtactggtcgtacaggg

SEQ ID NO: 179833 - DNA, 78 bp, Homo sapiens
ctccgcgctgttgcagccctggtcgcagtgcccgtcgctgaagtggtccttgcagtactggtcgtacagggggctgtg

SEQ ID NO: 179834 - DNA, 75 bp, Homo sapiens
ttgcagccctggtcgcagtgcccgtcgctgaagtggtccttgcagtactggtcgtacagggggctgtggggggcg

SEQ ID NO: 179835 - DNA, 73 bp, Homo sapiens
gtcgctgaagtggtccttgcagtactggtcgtacagggggctgtggggggcgggacacgctcaggccgccttc

SEQ ID NO: 179836 - DNA, 78 bp, Homo sapiens
tccaagttcaggtcctccctcagccccatgagccccgcagccttacttgcactggccttccgcacgctggcagtcaaa

SEQ ID NO: 179837 - DNA, 77 bp, Homo sapiens
ggtcctccctcagccccatgagccccgcagccttacttgcactggccttccgcacgctggcagtcaaagccgtcgaa

SEQ ID NO: 179838 - DNA, 79 bp, Homo sapiens
ctcagccccatgagccccgcagccttacttgcactggccttccgcacgctggcagtcaaagccgtcgaagaggcagccg

SEQ ID NO: 179839 - DNA, 81 bp, Homo sapiens
atgagccccgcagccttacttgcactggccttccgcacgctggcagtcaaagccgtcgaagaggcagccggctgagttgca

SEQ ID NO: 179840 - DNA, 82 bp, Homo sapiens
agccttacttgcactggccttccgcacgctggcagtcaaagccgtcgaagaggcagccggctgagttgcactggctgtcaca

SEQ ID NO: 179841 - DNA, 84 bp, Homo sapiens
ttgcactggccttccgcacgctggcagtcaaagccgtcgaagaggcagccggctgagttgcactggctgtcacagtggccgtca

SEQ ID NO: 179842 - DNA, 82 bp, Homo sapiens
cttccgcacgctggcagtcaaagccgtcgaagaggcagccggctgagttgcactggctgtcacagtggccgtcactgaagta

SEQ ID NO: 179843 - DNA, 82 bp, Homo sapiens
ctggcagtcaaagccgtcgaagaggcagccggctgagttgcactggctgtcacagtggccgtcactgaagtacttccagcac

SEQ ID NO: 179844 - DNA, 82 bp, Homo sapiens
aaagccgtcgaagaggcagccggctgagttgcactggctgtcacagtggccgtcactgaagtacttccagcactgcagagac

SEQ ID NO: 179845 - DNA, 85 bp, Homo sapiens
aagaggcagccggctgagttgcactggctgtcacagtggccgtcactgaagtacttccagcactgcagagactgcgtgcagttct

SEQ ID NO: 179846 - DNA, 86 bp, Homo sapiens
tgagttgcactggctgtcacagtggccgtcactgaagtacttccagcactgcagagactgcgtgcagttcttccaggggtcattga

SEQ ID NO: 179847 - DNA, 83 bp, Homo sapiens
tggctgtcacagtggccgtcactgaagtacttccagcactgcagagactgcgtgcagttcttccaggggtcattgaagttgag

SEQ ID NO: 179848 - DNA, 81 bp, Homo sapiens
acagtggccgtcactgaagtacttccagcactgcagagactgcgtgcagttcttccaggggtcattgaagttgagggagca

SEQ ID NO: 179849 - DNA, 79 bp, Homo sapiens
actgaagtacttccagcactgcagagactgcgtgcagttcttccaggggtcattgaagttgagggagcagtcaccgccg

SEQ ID NO: 179850 - DNA, 80 bp, Homo sapiens
tacttccagcactgcagagactgcgtgcagttcttccaggggtcattgaagttgagggagcagtcaccgccgtcccagcc

SEQ ID NO: 179851 - DNA, 79 bp, Homo sapiens
tgcagagactgcgtgcagttcttccaggggtcattgaagttgagggagcagtcaccgccgtcccagccgcacgcgtggt

SEQ ID NO: 179852 - DNA, 75 bp, Homo sapiens
actgcgtgcagttcttccaggggtcattgaagttgagggagcagtcaccgccgtcccagccgcacgcgtggttgt

SEQ ID NO: 179853 - DNA, 77 bp, Homo sapiens
gttcttccaggggtcattgaagttgagggagcagtcaccgccgtcccagccgcacgcgtggttgttgcactgcaggc

SEQ ID NO: 179854 - DNA, 79 bp, Homo sapiens
agttgagggagcagtcaccgccgtcccagccgcacgcgtggttgttgcactgcaggctgcagaccttgttgcccgcgtc

SEQ ID NO: 179855 - DNA, 79 bp, Homo sapiens
agtcaccgccgtcccagccgcacgcgtggttgttgcactgcaggctgcagaccttgttgcccgcgtcctcctggcactc

SEQ ID NO: 179856 - DNA, 82 bp, Homo sapiens
cgtcccagccgcacgcgtggttgttgcactgcaggctgcagaccttgttgcccgcgtcctcctggcactcgggcagctcgca

SEQ ID NO: 179857 - DNA, 83 bp, Homo sapiens
cgcgtggttgttgcactgcaggctgcagaccttgttgcccgcgtcctcctggcactcgggcagctcgcacgcctcctcgatca

SEQ ID NO: 179858 - DNA, 78 bp, Homo sapiens
aggctgcagaccttgttgcccgcgtcctcctggcactcgggcagctcgcacgcctcctcgatcagcggcggggggatg

SEQ ID NO: 179859 - DNA, 75 bp, Homo sapiens
cccgcgtcctcctggcactcgggcagctcgcacgcctcctcgatcagcggcggggggatgtcgcgcccggcccca

SEQ ID NO: 179860 - DNA, 75 bp, Homo sapiens
gcactcgggcagctcgcacgcctcctcgatcagcggcggggggatgtcgcgcccggccccacccccgaagctgta

SEQ ID NO: 179861 - DNA, 74 bp, Homo sapiens
gggcagctcgcacgcctcctcgatcagcggcggggggatgtcgcgcccggccccacccccgaagctgtagtcca

SEQ ID NO: 179862 - DNA, 73 bp, Homo sapiens
cctcctcgatcagcggcggggggatgtcgcgcccggccccacccccgaagctgtagtccaggatgtggcacaa

SEQ ID NO: 179863 - DNA, 74 bp, Homo sapiens
tcgatcagcggcggggggatgtcgcgcccggccccacccccgaagctgtagtccaggatgtggcacaagagccc

SEQ ID NO: 179864 - DNA, 72 bp, Homo sapiens
gggatgtcgcgcccggccccacccccgaagctgtagtccaggatgtggcacaagagcccgttgaatttggcg

SEQ ID NO: 179865 - DNA, 73 bp, Homo sapiens
gcccggccccacccccgaagctgtagtccaggatgtggcacaagagcccgttgaatttggcggggcacaggca

SEQ ID NO: 179866 - DNA, 74 bp, Homo sapiens
ctgtagtccaggatgtggcacaagagcccgttgaatttggcggggcacaggcaacggtagaaggggctctcgga

SEQ ID NO: 179867 - DNA, 75 bp, Homo sapiens
aggatgtggcacaagagcccgttgaatttggcggggcacaggcaacggtagaaggggctctcggatgtgggctca

SEQ ID NO: 179868 - DNA, 72 bp, Homo sapiens
acaagagcccgttgaatttggcggggcacaggcaacggtagaaggggctctcggatgtgggctcacaggtcc

SEQ ID NO: 179869 - DNA, 72 bp, Homo sapiens
gttgaatttggcggggcacaggcaacggtagaaggggctctcggatgtgggctcacaggtcccctggttgta

SEQ ID NO: 179870 - DNA, 72 bp, Homo sapiens
tttggcggggcacaggcaacggtagaaggggctctcggatgtgggctcacaggtcccctggttgtagcaggg

SEQ ID NO: 179871 - DNA, 72 bp, Homo sapiens
acaggcaacggtagaaggggctctcggatgtgggctcacaggtcccctggttgtagcaggggttgccgccca

SEQ ID NO: 179872 - DNA, 72 bp, Homo sapiens
ggtagaaggggctctcggatgtgggctcacaggtcccctggttgtagcaggggttgccgcccaggcaggggc

SEQ ID NO: 179873 - DNA, 74 bp, Homo sapiens
tctcggatgtgggctcacaggtcccctggttgtagcaggggttgccgcccaggcaggggctgctggccgggaac

SEQ ID NO: 179874 - DNA, 72 bp, Homo sapiens
ctcacaggtcccctggttgtagcaggggttgccgcccaggcaggggctgctggccgggaactggcattcggg

SEQ ID NO: 179875 - DNA, 71 bp, Homo sapiens
ccctggttgtagcaggggttgccgcccaggcaggggctgctggccgggaactggcattcggggcccgtgaa

SEQ ID NO: 179876 - DNA, 71 bp, Homo sapiens
ttgtagcaggggttgccgcccaggcaggggctgctggccgggaactggcattcggggcccgtgaaggggcc

SEQ ID NO: 179877 - DNA, 73 bp, Homo sapiens
ggttgccgcccaggcaggggctgctggccgggaactggcattcggggcccgtgaaggggcccaggcacaggca

SEQ ID NO: 179878 - DNA, 73 bp, Homo sapiens
caggggctgctggccgggaactggcattcggggcccgtgaaggggcccaggcacaggcaggtggggctgcgcg

SEQ ID NO: 179879 - DNA, 72 bp, Homo sapiens
tggccgggaactggcattcggggcccgtgaaggggcccaggcacaggcaggtggggctgcgcgggccggaga

SEQ ID NO: 179880 - DNA, 79 bp, Homo sapiens
gggcccgtgaaggggcccaggcacaggcaggtggggctgcgcgggccggagatgcatgtgccgccgttgaggcagcgca

SEQ ID NO: 179881 - DNA, 83 bp, Homo sapiens
tgaaggggcccaggcacaggcaggtggggctgcgcgggccggagatgcatgtgccgccgttgaggcagcgcaggctgccgcag

SEQ ID NO: 179882 - DNA, 83 bp, Homo sapiens
aggtggggctgcgcgggccggagatgcatgtgccgccgttgaggcagcgcaggctgccgcaggtacgagcgtcattctcacac

SEQ ID NO: 179883 - DNA, 84 bp, Homo sapiens
gcgggccggagatgcatgtgccgccgttgaggcagcgcaggctgccgcaggtacgagcgtcattctcacacgtggcgccctcga

SEQ ID NO: 179884 - DNA, 81 bp, Homo sapiens
atgtgccgccgttgaggcagcgcaggctgccgcaggtacgagcgtcattctcacacgtggcgccctcgaagccctgcccga

SEQ ID NO: 179885 - DNA, 81 bp, Homo sapiens
ttgaggcagcgcaggctgccgcaggtacgagcgtcattctcacacgtggcgccctcgaagccctgcccgagagggaagaca

SEQ ID NO: 179886 - DNA, 75 bp, Homo sapiens
aggctgccgcaggtacgagcgtcattctcacacgtggcgccctcgaagccctgcccgagagggaagacaggacgg

SEQ ID NO: 179887 - DNA, 75 bp, Homo sapiens
tccaggtgtctcccctggcgggcccctgcctccctgcacccctgcacctaccgcagggcacttgcagatgaaccc

SEQ ID NO: 179888 - DNA, 75 bp, Homo sapiens
tggcgggcccctgcctccctgcacccctgcacctaccgcagggcacttgcagatgaacccgcgggcggtgttgga

SEQ ID NO: 179889 - DNA, 77 bp, Homo sapiens
ctgcctccctgcacccctgcacctaccgcagggcacttgcagatgaacccgcgggcggtgttggaggccacggcgca

SEQ ID NO: 179890 - DNA, 76 bp, Homo sapiens
ctgcacccctgcacctaccgcagggcacttgcagatgaacccgcgggcggtgttggaggccacggcgcaggtgccc

SEQ ID NO: 179891 - DNA, 75 bp, Homo sapiens
acctaccgcagggcacttgcagatgaacccgcgggcggtgttggaggccacggcgcaggtgcccccattcttgca

SEQ ID NO: 179892 - DNA, 75 bp, Homo sapiens
gggcacttgcagatgaacccgcgggcggtgttggaggccacggcgcaggtgcccccattcttgcagggcttgcct

SEQ ID NO: 179893 - DNA, 78 bp, Homo sapiens
ttgcagatgaacccgcgggcggtgttggaggccacggcgcaggtgcccccattcttgcagggcttgcctttgcagcca

SEQ ID NO: 179894 - DNA, 76 bp, Homo sapiens
aacccgcgggcggtgttggaggccacggcgcaggtgcccccattcttgcagggcttgcctttgcagccattgatga

SEQ ID NO: 179895 - DNA, 79 bp, Homo sapiens
cggtgttggaggccacggcgcaggtgcccccattcttgcagggcttgcctttgcagccattgatgacggactcgcagcg

SEQ ID NO: 179896 - DNA, 78 bp, Homo sapiens
ccacggcgcaggtgcccccattcttgcagggcttgcctttgcagccattgatgacggactcgcagcggcgccctaggg

SEQ ID NO: 179897 - DNA, 78 bp, Homo sapiens
aggtgcccccattcttgcagggcttgcctttgcagccattgatgacggactcgcagcggcgccctaggggtaagagca

SEQ ID NO: 179898 - DNA, 80 bp, Homo sapiens
attcttgcagggcttgcctttgcagccattgatgacggactcgcagcggcgccctaggggtaagagcagggcagtgagag

SEQ ID NO: 179899 - DNA, 82 bp, Homo sapiens
cttgcctttgcagccattgatgacggactcgcagcggcgccctaggggtaagagcagggcagtgagaggctcaccctgctgc

SEQ ID NO: 179900 - DNA, 74 bp, Homo sapiens
cctaggggtaagagcagggcagtgagaggctcaccctgctgccccacacgccccacccgcctgggcgcggcacc

SEQ ID NO: 179901 - DNA, 77 bp, Homo sapiens
tcaccctgctgccccacacgccccacccgcctgggcgcggcacccaccggtgtgaccagcacggcactcgcagtgga

SEQ ID NO: 179902 - DNA, 75 bp, Homo sapiens
ccccacacgccccacccgcctgggcgcggcacccaccggtgtgaccagcacggcactcgcagtggaagtcattga

SEQ ID NO: 179903 - DNA, 79 bp, Homo sapiens
cccacccgcctgggcgcggcacccaccggtgtgaccagcacggcactcgcagtggaagtcattgacgcgctgcacgcag

SEQ ID NO: 179904 - DNA, 81 bp, Homo sapiens
cctgggcgcggcacccaccggtgtgaccagcacggcactcgcagtggaagtcattgacgcgctgcacgcagttctgggtgc

SEQ ID NO: 179905 - DNA, 79 bp, Homo sapiens
acccaccggtgtgaccagcacggcactcgcagtggaagtcattgacgcgctgcacgcagttctgggtgccacgggcgtc

SEQ ID NO: 179906 - DNA, 84 bp, Homo sapiens
tgtgaccagcacggcactcgcagtggaagtcattgacgcgctgcacgcagttctgggtgccacgggcgtcgcagggattggaca

SEQ ID NO: 179907 - DNA, 81 bp, Homo sapiens
acggcactcgcagtggaagtcattgacgcgctgcacgcagttctgggtgccacgggcgtcgcagggattggacaggcactc

SEQ ID NO: 179908 - DNA, 80 bp, Homo sapiens
agtggaagtcattgacgcgctgcacgcagttctgggtgccacgggcgtcgcagggattggacaggcactcgttgacatcc

SEQ ID NO: 179909 - DNA, 80 bp, Homo sapiens
ctgcacgcagttctgggtgccacgggcgtcgcagggattggacaggcactcgttgacatccccctcacagcgctcaccca

SEQ ID NO: 179910 - DNA, 76 bp, Homo sapiens
agttctgggtgccacgggcgtcgcagggattggacaggcactcgttgacatccccctcacagcgctcacccacgaa

SEQ ID NO: 179911 - DNA, 75 bp, Homo sapiens
acgggcgtcgcagggattggacaggcactcgttgacatccccctcacagcgctcacccacgaagcccggcgggca

SEQ ID NO: 179912 - DNA, 80 bp, Homo sapiens
tcgcagggattggacaggcactcgttgacatccccctcacagcgctcacccacgaagcccggcgggcaggtgcagctgta

SEQ ID NO: 179913 - DNA, 78 bp, Homo sapiens
attggacaggcactcgttgacatccccctcacagcgctcacccacgaagcccggcgggcaggtgcagctgtagccgcc

SEQ ID NO: 179914 - DNA, 76 bp, Homo sapiens
actcgttgacatccccctcacagcgctcacccacgaagcccggcgggcaggtgcagctgtagccgcccacctggtc

SEQ ID NO: 179915 - DNA, 76 bp, Homo sapiens
ccctcacagcgctcacccacgaagcccggcgggcaggtgcagctgtagccgcccacctggtccacgcaggtgccgt

SEQ ID NO: 179916 - DNA, 76 bp, Homo sapiens
gctcacccacgaagcccggcgggcaggtgcagctgtagccgcccacctggtccacgcaggtgccgttgttaaagca

SEQ ID NO: 179917 - DNA, 73 bp, Homo sapiens
acgaagcccggcgggcaggtgcagctgtagccgcccacctggtccacgcaggtgccgttgttaaagcacttgg

SEQ ID NO: 179918 - DNA, 74 bp, Homo sapiens
gggcaggtgcagctgtagccgcccacctggtccacgcaggtgccgttgttaaagcacttggggctccgggacac

SEQ ID NO: 179919 - DNA, 72 bp, Homo sapiens
ggtgcagctgtagccgcccacctggtccacgcaggtgccgttgttaaagcacttggggctccgggacacggg

SEQ ID NO: 179920 - DNA, 69 bp, Homo sapiens
tagccgcccacctggtccacgcaggtgccgttgttaaagcacttggggctccgggacacggggtcaacg

SEQ ID NO: 179921 - DNA, 69 bp, Homo sapiens
tccacgcaggtgccgttgttaaagcacttggggctccgggacacggggtcaacggggggattgcagtcg

SEQ ID NO: 179922 - DNA, 69 bp, Homo sapiens
tgccgttgttaaagcacttggggctccgggacacggggtcaacggggggattgcagtcgtccacgttga

SEQ ID NO: 179923 - DNA, 71 bp, Homo sapiens
ttgttaaagcacttggggctccgggacacggggtcaacggggggattgcagtcgtccacgttgatctcaca

SEQ ID NO: 179924 - DNA, 73 bp, Homo sapiens
acttggggctccgggacacggggtcaacggggggattgcagtcgtccacgttgatctcacagtgcacacctgc

SEQ ID NO: 179925 - DNA, 72 bp, Homo sapiens
acacggggtcaacggggggattgcagtcgtccacgttgatctcacagtgcacacctgcggggccaggtttcg

SEQ ID NO: 179926 - DNA, 74 bp, Homo sapiens
aacggggggattgcagtcgtccacgttgatctcacagtgcacacctgcggggccaggtttcgtcagtggcccaa

SEQ ID NO: 179927 - DNA, 77 bp, Homo sapiens
ctggccatggatggccaacaccagccctccgtgcagcggcccttaccctgagtgccccgtgggcaggagcacttgta

SEQ ID NO: 179928 - DNA, 74 bp, Homo sapiens
atggccaacaccagccctccgtgcagcggcccttaccctgagtgccccgtgggcaggagcacttgtaggtgttg

SEQ ID NO: 179929 - DNA, 72 bp, Homo sapiens
aacaccagccctccgtgcagcggcccttaccctgagtgccccgtgggcaggagcacttgtaggtgttgggga

SEQ ID NO: 179930 - DNA, 73 bp, Homo sapiens
cctccgtgcagcggcccttaccctgagtgccccgtgggcaggagcacttgtaggtgttggggaggtcgaggca

SEQ ID NO: 179931 - DNA, 75 bp, Homo sapiens
ggaggtcgaggcaggtgcccccgttctggcaggggtgggagaggcactcgtcgatctcctcagagcagttcaccc

SEQ ID NO: 179932 - DNA, 74 bp, Homo sapiens
aggcaggtgcccccgttctggcaggggtgggagaggcactcgtcgatctcctcagagcagttcaccccgtggta

SEQ ID NO: 179933 - DNA, 75 bp, Homo sapiens
ccgttctggcaggggtgggagaggcactcgtcgatctcctcagagcagttcaccccgtggtagccggccacgcac

SEQ ID NO: 179934 - DNA, 78 bp, Homo sapiens
aggggtgggagaggcactcgtcgatctcctcagagcagttcaccccgtggtagccggccacgcactgtgcaggcgaca

SEQ ID NO: 179935 - DNA, 80 bp, Homo sapiens
tgggagaggcactcgtcgatctcctcagagcagttcaccccgtggtagccggccacgcactgtgcaggcgacagaacgag

SEQ ID NO: 179936 - DNA, 77 bp, Homo sapiens
tcgtcgatctcctcagagcagttcaccccgtggtagccggccacgcactgtgcaggcgacagaacgaggggcccttc

SEQ ID NO: 179937 - DNA, 71 bp, Homo sapiens
tgtggcaacactcgtgccggccacaacccttaccctaggagggacccccaccttgcaggagtagccgccca

SEQ ID NO: 179938 - DNA, 70 bp, Homo sapiens
tgccggccacaacccttaccctaggagggacccccaccttgcaggagtagccgcccaggtagtccgtgca

SEQ ID NO: 179939 - DNA, 68 bp, Homo sapiens
ccacaacccttaccctaggagggacccccaccttgcaggagtagccgcccaggtagtccgtgcaggtg

SEQ ID NO: 179940 - DNA, 69 bp, Homo sapiens
taccctaggagggacccccaccttgcaggagtagccgcccaggtagtccgtgcaggtggccccgttctg

SEQ ID NO: 179941 - DNA, 73 bp, Homo sapiens
ccccaccttgcaggagtagccgcccaggtagtccgtgcaggtggccccgttctggcaggggctgggtgagcac

SEQ ID NO: 179942 - DNA, 76 bp, Homo sapiens
ttgcaggagtagccgcccaggtagtccgtgcaggtggccccgttctggcaggggctgggtgagcactcgtccacca

SEQ ID NO: 179943 - DNA, 75 bp, Homo sapiens
tagccgcccaggtagtccgtgcaggtggccccgttctggcaggggctgggtgagcactcgtccaccaggtcctca

SEQ ID NO: 179944 - DNA, 76 bp, Homo sapiens
aggtagtccgtgcaggtggccccgttctggcaggggctgggtgagcactcgtccaccaggtcctcacagtagctgc

SEQ ID NO: 179945 - DNA, 76 bp, Homo sapiens
aggtggccccgttctggcaggggctgggtgagcactcgtccaccaggtcctcacagtagctgcctgtgtagcccgc

SEQ ID NO: 179946 - DNA, 81 bp, Homo sapiens
gttctggcaggggctgggtgagcactcgtccaccaggtcctcacagtagctgcctgtgtagcccgcctggcagcggcagtg

SEQ ID NO: 179947 - DNA, 82 bp, Homo sapiens
gctgggtgagcactcgtccaccaggtcctcacagtagctgcctgtgtagcccgcctggcagcggcagtggtgcgtgttgccc

SEQ ID NO: 179948 - DNA, 83 bp, Homo sapiens
tgagcactcgtccaccaggtcctcacagtagctgcctgtgtagcccgcctggcagcggcagtggtgcgtgttgcccgcgtcca

SEQ ID NO: 179949 - DNA, 80 bp, Homo sapiens
accaggtcctcacagtagctgcctgtgtagcccgcctggcagcggcagtggtgcgtgttgcccgcgtccacacagagccc

SEQ ID NO: 179950 - DNA, 84 bp, Homo sapiens
acagtagctgcctgtgtagcccgcctggcagcggcagtggtgcgtgttgcccgcgtccacacagagccctccatgctggcacag

SEQ ID NO: 179951 - DNA, 84 bp, Homo sapiens
tgcctgtgtagcccgcctggcagcggcagtggtgcgtgttgcccgcgtccacacagagccctccatgctggcacaggcgggcaa

SEQ ID NO: 179952 - DNA, 82 bp, Homo sapiens
tagcccgcctggcagcggcagtggtgcgtgttgcccgcgtccacacagagccctccatgctggcacaggcgggcaacgtcaa

SEQ ID NO: 179953 - DNA, 79 bp, Homo sapiens
agcggcagtggtgcgtgttgcccgcgtccacacagagccctccatgctggcacaggcgggcaacgtcaacacctgcggg

SEQ ID NO: 179954 - DNA, 78 bp, Homo sapiens
agtggtgcgtgttgcccgcgtccacacagagccctccatgctggcacaggcgggcaacgtcaacacctgcgggggatg

SEQ ID NO: 179955 - DNA, 77 bp, Homo sapiens
ttgcccgcgtccacacagagccctccatgctggcacaggcgggcaacgtcaacacctgcgggggatggggtggtaga

SEQ ID NO: 179956 - DNA, 76 bp, Homo sapiens
acagagccctccatgctggcacaggcgggcaacgtcaacacctgcgggggatggggtggtagacaggtgaggccca

SEQ ID NO: 179957 - DNA, 78 bp, Homo sapiens
agaggaccttgatgggctgggacccgagctgggtgggcacagcaggttaccttgtcgctgcgcagccacctcacagga

SEQ ID NO: 179958 - DNA, 81 bp, Homo sapiens
tgatgggctgggacccgagctgggtgggcacagcaggttaccttgtcgctgcgcagccacctcacaggacacgctgggcac

SEQ ID NO: 179959 - DNA, 79 bp, Homo sapiens
ccgagctgggtgggcacagcaggttaccttgtcgctgcgcagccacctcacaggacacgctgggcacgtcgcagtaaag

SEQ ID NO: 179960 - DNA, 80 bp, Homo sapiens
tgggcacagcaggttaccttgtcgctgcgcagccacctcacaggacacgctgggcacgtcgcagtaaaggccggtccagc

SEQ ID NO: 179961 - DNA, 76 bp, Homo sapiens
aggttaccttgtcgctgcgcagccacctcacaggacacgctgggcacgtcgcagtaaaggccggtccagccgctgg

SEQ ID NO: 179962 - DNA, 80 bp, Homo sapiens
ccttgtcgctgcgcagccacctcacaggacacgctgggcacgtcgcagtaaaggccggtccagccgctggggcactcgca

SEQ ID NO: 179963 - DNA, 76 bp, Homo sapiens
agccacctcacaggacacgctgggcacgtcgcagtaaaggccggtccagccgctggggcactcgcagcggtactgg

SEQ ID NO: 179964 - DNA, 74 bp, Homo sapiens
aggacacgctgggcacgtcgcagtaaaggccggtccagccgctggggcactcgcagcggtactgggtgtgggtc

SEQ ID NO: 179965 - DNA, 76 bp, Homo sapiens
ctgggcacgtcgcagtaaaggccggtccagccgctggggcactcgcagcggtactgggtgtgggtctgccagcatt

SEQ ID NO: 179966 - DNA, 75 bp, Homo sapiens
cagtaaaggccggtccagccgctggggcactcgcagcggtactgggtgtgggtctgccagcatttgccgccgttc

SEQ ID NO: 179967 - DNA, 76 bp, Homo sapiens
aaggccggtccagccgctggggcactcgcagcggtactgggtgtgggtctgccagcatttgccgccgttcttgcag

SEQ ID NO: 179968 - DNA, 79 bp, Homo sapiens
cgctggggcactcgcagcggtactgggtgtgggtctgccagcatttgccgccgttcttgcagggcgaggagtcacacca

SEQ ID NO: 179969 - DNA, 79 bp, Homo sapiens
actcgcagcggtactgggtgtgggtctgccagcatttgccgccgttcttgcagggcgaggagtcacaccagtgcacaag

SEQ ID NO: 179970 - DNA, 77 bp, Homo sapiens
gtactgggtgtgggtctgccagcatttgccgccgttcttgcagggcgaggagtcacaccagtgcacaaggttctggg

SEQ ID NO: 179971 - DNA, 79 bp, Homo sapiens
gtgtgggtctgccagcatttgccgccgttcttgcagggcgaggagtcacaccagtgcacaaggttctggggacagattg

SEQ ID NO: 179972 - DNA, 77 bp, Homo sapiens
agcatttgccgccgttcttgcagggcgaggagtcacaccagtgcacaaggttctggggacagattggggtcagctgg

SEQ ID NO: 179973 - DNA, 75 bp, Homo sapiens
ccgccgttcttgcagggcgaggagtcacaccagtgcacaaggttctggggacagattggggtcagctgggtgccc

SEQ ID NO: 179974 - DNA, 73 bp, Homo sapiens
cacccagggcccctccttcgggcacctctgtggccggcgcactcacctggcagttggggccagtgtagccctg

SEQ ID NO: 179975 - DNA, 75 bp, Homo sapiens
ccctccttcgggcacctctgtggccggcgcactcacctggcagttggggccagtgtagccctgggggcaggtgca

SEQ ID NO: 179976 - DNA, 76 bp, Homo sapiens
cttcgggcacctctgtggccggcgcactcacctggcagttggggccagtgtagccctgggggcaggtgcacctgta

SEQ ID NO: 179977 - DNA, 78 bp, Homo sapiens
ctctgtggccggcgcactcacctggcagttggggccagtgtagccctgggggcaggtgcacctgtaggagccgcagcc

SEQ ID NO: 179978 - DNA, 77 bp, Homo sapiens
actcacctggcagttggggccagtgtagccctgggggcaggtgcacctgtaggagccgcagccgtcctgacaggtgc

SEQ ID NO: 179979 - DNA, 80 bp, Homo sapiens
cagttggggccagtgtagccctgggggcaggtgcacctgtaggagccgcagccgtcctgacaggtgccgccatgcaggca

SEQ ID NO: 179980 - DNA, 82 bp, Homo sapiens
cagtgtagccctgggggcaggtgcacctgtaggagccgcagccgtcctgacaggtgccgccatgcaggcagggctgtgagtc

SEQ ID NO: 179981 - DNA, 85 bp, Homo sapiens
ctgggggcaggtgcacctgtaggagccgcagccgtcctgacaggtgccgccatgcaggcagggctgtgagtcgcactcattgaca

SEQ ID NO: 179982 - DNA, 89 bp, Homo sapiens
gtgcacctgtaggagccgcagccgtcctgacaggtgccgccatgcaggcagggctgtgagtcgcactcattgacatcgtgctggcagta

SEQ ID NO: 179983 - DNA, 89 bp, Homo sapiens
cctgtaggagccgcagccgtcctgacaggtgccgccatgcaggcagggctgtgagtcgcactcattgacatcgtgctggcagtagctgc

SEQ ID NO: 179984 - DNA, 86 bp, Homo sapiens
agccgtcctgacaggtgccgccatgcaggcagggctgtgagtcgcactcattgacatcgtgctggcagtagctgcccgtgaagccg

SEQ ID NO: 179985 - DNA, 88 bp, Homo sapiens
tgacaggtgccgccatgcaggcagggctgtgagtcgcactcattgacatcgtgctggcagtagctgcccgtgaagccgggtggacaca

SEQ ID NO: 179986 - DNA, 86 bp, Homo sapiens
catgcaggcagggctgtgagtcgcactcattgacatcgtgctggcagtagctgcccgtgaagccgggtggacacaggcaggtgaac

SEQ ID NO: 179987 - DNA, 81 bp, Homo sapiens
agggctgtgagtcgcactcattgacatcgtgctggcagtagctgcccgtgaagccgggtggacacaggcaggtgaacgagt

SEQ ID NO: 179988 - DNA, 82 bp, Homo sapiens
agtcgcactcattgacatcgtgctggcagtagctgcccgtgaagccgggtggacacaggcaggtgaacgagttgatgccgtc

SEQ ID NO: 179989 - DNA, 80 bp, Homo sapiens
attgacatcgtgctggcagtagctgcccgtgaagccgggtggacacaggcaggtgaacgagttgatgccgtccacgcagg

SEQ ID NO: 179990 - DNA, 77 bp, Homo sapiens
ctggcagtagctgcccgtgaagccgggtggacacaggcaggtgaacgagttgatgccgtccacgcaggtgccaccgt

SEQ ID NO: 179991 - DNA, 76 bp, Homo sapiens
agtagctgcccgtgaagccgggtggacacaggcaggtgaacgagttgatgccgtccacgcaggtgccaccgttgaa

SEQ ID NO: 179992 - DNA, 79 bp, Homo sapiens
cgtgaagccgggtggacacaggcaggtgaacgagttgatgccgtccacgcaggtgccaccgttgaagcaggagctgcaa

SEQ ID NO: 179993 - DNA, 77 bp, Homo sapiens
ggtggacacaggcaggtgaacgagttgatgccgtccacgcaggtgccaccgttgaagcaggagctgcaagggggtgg

SEQ ID NO: 179994 - DNA, 76 bp, Homo sapiens
ggcaggtgaacgagttgatgccgtccacgcaggtgccaccgttgaagcaggagctgcaagggggtgggcaggcggg

SEQ ID NO: 179995 - DNA, 76 bp, Homo sapiens
agttgatgccgtccacgcaggtgccaccgttgaagcaggagctgcaagggggtgggcaggcgggggctgagtggag

SEQ ID NO: 179996 - DNA, 76 bp, Homo sapiens
ccgcaccgcccgttcccttccacggcctcactcgagccccgcacacctctctgtgcagtcaggcgtgttgttctca

SEQ ID NO: 179997 - DNA, 77 bp, Homo sapiens
cccgttcccttccacggcctcactcgagccccgcacacctctctgtgcagtcaggcgtgttgttctcacagtggatc

SEQ ID NO: 179998 - DNA, 80 bp, Homo sapiens
cttccacggcctcactcgagccccgcacacctctctgtgcagtcaggcgtgttgttctcacagtggatcccgctgaagcc

SEQ ID NO: 179999 - DNA, 81 bp, Homo sapiens
cctcactcgagccccgcacacctctctgtgcagtcaggcgtgttgttctcacagtggatcccgctgaagcctgcggggcag

SEQ ID NO: 180000 - DNA, 85 bp, Homo sapiens
gcacacctctctgtgcagtcaggcgtgttgttctcacagtggatcccgctgaagcctgcggggcaggtgcacgtgtagctgtcca

SEQ ID NO: 180001 - DNA, 84 bp, Homo sapiens
tctgtgcagtcaggcgtgttgttctcacagtggatcccgctgaagcctgcggggcaggtgcacgtgtagctgtccacgcagtcc

SEQ ID NO: 180002 - DNA, 80 bp, Homo sapiens
aggcgtgttgttctcacagtggatcccgctgaagcctgcggggcaggtgcacgtgtagctgtccacgcagtccgtgcagt

SEQ ID NO: 180003 - DNA, 81 bp, Homo sapiens
tgttgttctcacagtggatcccgctgaagcctgcggggcaggtgcacgtgtagctgtccacgcagtccgtgcagttggccc

SEQ ID NO: 180004 - DNA, 78 bp, Homo sapiens
acagtggatcccgctgaagcctgcggggcaggtgcacgtgtagctgtccacgcagtccgtgcagttggccccgttgcg

SEQ ID NO: 180005 - DNA, 78 bp, Homo sapiens
ctgaagcctgcggggcaggtgcacgtgtagctgtccacgcagtccgtgcagttggccccgttgcggcaggggtcactg

SEQ ID NO: 180006 - DNA, 79 bp, Homo sapiens
gggcaggtgcacgtgtagctgtccacgcagtccgtgcagttggccccgttgcggcaggggtcactggcacactcgttga

SEQ ID NO: 180007 - DNA, 77 bp, Homo sapiens
acgtgtagctgtccacgcagtccgtgcagttggccccgttgcggcaggggtcactggcacactcgttgatgtcctcc

SEQ ID NO: 180008 - DNA, 80 bp, Homo sapiens
tagctgtccacgcagtccgtgcagttggccccgttgcggcaggggtcactggcacactcgttgatgtcctcctcacagaa

SEQ ID NO: 180009 - DNA, 77 bp, Homo sapiens
cgcagtccgtgcagttggccccgttgcggcaggggtcactggcacactcgttgatgtcctcctcacagaaagtgccc

SEQ ID NO: 180010 - DNA, 73 bp, Homo sapiens
agttggccccgttgcggcaggggtcactggcacactcgttgatgtcctcctcacagaaagtgccccggaagcc

SEQ ID NO: 180011 - DNA, 79 bp, Homo sapiens
ttgcggcaggggtcactggcacactcgttgatgtcctcctcacagaaagtgccccggaagccgggcaggcagtcgcaga

SEQ ID NO: 180012 - DNA, 79 bp, Homo sapiens
tcactggcacactcgttgatgtcctcctcacagaaagtgccccggaagccgggcaggcagtcgcagaaggccgtgttga

SEQ ID NO: 180013 - DNA, 76 bp, Homo sapiens
actcgttgatgtcctcctcacagaaagtgccccggaagccgggcaggcagtcgcagaaggccgtgttgatgccgtc

SEQ ID NO: 180014 - DNA, 80 bp, Homo sapiens
ttgatgtcctcctcacagaaagtgccccggaagccgggcaggcagtcgcagaaggccgtgttgatgccgtctgtgcagga

SEQ ID NO: 180015 - DNA, 74 bp, Homo sapiens
acagaaagtgccccggaagccgggcaggcagtcgcagaaggccgtgttgatgccgtctgtgcaggagcccccgt

SEQ ID NO: 180016 - DNA, 74 bp, Homo sapiens
cccggaagccgggcaggcagtcgcagaaggccgtgttgatgccgtctgtgcaggagcccccgttgtgacacggg

SEQ ID NO: 180017 - DNA, 76 bp, Homo sapiens
aagccgggcaggcagtcgcagaaggccgtgttgatgccgtctgtgcaggagcccccgttgtgacacgggtctggga

SEQ ID NO: 180018 - DNA, 74 bp, Homo sapiens
agtcgcagaaggccgtgttgatgccgtctgtgcaggagcccccgttgtgacacgggtctgggagaggacggaag

SEQ ID NO: 180019 - DNA, 72 bp, Homo sapiens
aaggccgtgttgatgccgtctgtgcaggagcccccgttgtgacacgggtctgggagaggacggaagggtgag

SEQ ID NO: 180020 - DNA, 75 bp, Homo sapiens
ttgatgccgtctgtgcaggagcccccgttgtgacacgggtctgggagaggacggaagggtgagtgtgaggggcag

SEQ ID NO: 180021 - DNA, 77 bp, Homo sapiens
actgaggcctgagagcttcctggaggaggccagagccgcggggctactcactgggccggcagtcgtcgatgtcggtc

SEQ ID NO: 180022 - DNA, 77 bp, Homo sapiens
cttcctggaggaggccagagccgcggggctactcactgggccggcagtcgtcgatgtcggtctcgcagttgcgccca

SEQ ID NO: 180023 - DNA, 77 bp, Homo sapiens
aggaggccagagccgcggggctactcactgggccggcagtcgtcgatgtcggtctcgcagttgcgcccactgtagcc

SEQ ID NO: 180024 - DNA, 78 bp, Homo sapiens
agagccgcggggctactcactgggccggcagtcgtcgatgtcggtctcgcagttgcgcccactgtagccggcctggca

SEQ ID NO: 180025 - DNA, 80 bp, Homo sapiens
ctactcactgggccggcagtcgtcgatgtcggtctcgcagttgcgcccactgtagccggcctggcagtggcagcggtagc

SEQ ID NO: 180026 - DNA, 79 bp, Homo sapiens
tgggccggcagtcgtcgatgtcggtctcgcagttgcgcccactgtagccggcctggcagtggcagcggtagccgccgtg

SEQ ID NO: 180027 - DNA, 77 bp, Homo sapiens
agtcgtcgatgtcggtctcgcagttgcgcccactgtagccggcctggcagtggcagcggtagccgccgtgggtgttc

SEQ ID NO: 180028 - DNA, 80 bp, Homo sapiens
gtcggtctcgcagttgcgcccactgtagccggcctggcagtggcagcggtagccgccgtgggtgttctggcaggatgcgc

SEQ ID NO: 180029 - DNA, 79 bp, Homo sapiens
agttgcgcccactgtagccggcctggcagtggcagcggtagccgccgtgggtgttctggcaggatgcgccgtgccggca

SEQ ID NO: 180030 - DNA, 79 bp, Homo sapiens
tgtagccggcctggcagtggcagcggtagccgccgtgggtgttctggcaggatgcgccgtgccggcacgggctcagaac

SEQ ID NO: 180031 - DNA, 81 bp, Homo sapiens
tggcagtggcagcggtagccgccgtgggtgttctggcaggatgcgccgtgccggcacgggctcagaacgcactcgttgatg

SEQ ID NO: 180032 - DNA, 79 bp, Homo sapiens
gcggtagccgccgtgggtgttctggcaggatgcgccgtgccggcacgggctcagaacgcactcgttgatgtcgacctca

SEQ ID NO: 180033 - DNA, 78 bp, Homo sapiens
agccgccgtgggtgttctggcaggatgcgccgtgccggcacgggctcagaacgcactcgttgatgtcgacctcacagg

SEQ ID NO: 180034 - DNA, 80 bp, Homo sapiens
gtgttctggcaggatgcgccgtgccggcacgggctcagaacgcactcgttgatgtcgacctcacaggtctgccctgcggg

SEQ ID NO: 180035 - DNA, 79 bp, Homo sapiens
aggatgcgccgtgccggcacgggctcagaacgcactcgttgatgtcgacctcacaggtctgccctgcggggcaggagga

SEQ ID NO: 180036 - DNA, 77 bp, Homo sapiens
tgccggcacgggctcagaacgcactcgttgatgtcgacctcacaggtctgccctgcggggcaggaggaggccggttg

SEQ ID NO: 180037 - DNA, 76 bp, Homo sapiens
cgggctcagaacgcactcgttgatgtcgacctcacaggtctgccctgcggggcaggaggaggccggttggtcacca

SEQ ID NO: 180038 - DNA, 76 bp, Homo sapiens
agacatcctgacctcccatcccagccctcaccgggccctggccagcctcaccttgccagcccgtggggcagacaca

SEQ ID NO: 180039 - DNA, 78 bp, Homo sapiens
tcccatcccagccctcaccgggccctggccagcctcaccttgccagcccgtggggcagacacaggagaagctctcata

SEQ ID NO: 180040 - DNA, 76 bp, Homo sapiens
cctcaccgggccctggccagcctcaccttgccagcccgtggggcagacacaggagaagctctcatagtcctcggat

SEQ ID NO: 180041 - DNA, 79 bp, Homo sapiens
ccctggccagcctcaccttgccagcccgtggggcagacacaggagaagctctcatagtcctcggattgcctgcactccc

SEQ ID NO: 180042 - DNA, 76 bp, Homo sapiens
cctcaccttgccagcccgtggggcagacacaggagaagctctcatagtcctcggattgcctgcactccccgccgtt

SEQ ID NO: 180043 - DNA, 78 bp, Homo sapiens
ccttgccagcccgtggggcagacacaggagaagctctcatagtcctcggattgcctgcactccccgccgtttctgcag

SEQ ID NO: 180044 - DNA, 76 bp, Homo sapiens
ccgtggggcagacacaggagaagctctcatagtcctcggattgcctgcactccccgccgtttctgcaggggctggg

SEQ ID NO: 180045 - DNA, 75 bp, Homo sapiens
acacaggagaagctctcatagtcctcggattgcctgcactccccgccgtttctgcaggggctgggggcacacggg

SEQ ID NO: 180046 - DNA, 76 bp, Homo sapiens
aagctctcatagtcctcggattgcctgcactccccgccgtttctgcaggggctgggggcacacggggccagcacca

SEQ ID NO: 180047 - DNA, 74 bp, Homo sapiens
agtcctcggattgcctgcactccccgccgtttctgcaggggctgggggcacacggggccagcaccacctcacac

SEQ ID NO: 180048 - DNA, 75 bp, Homo sapiens
tgcactccccgccgtttctgcaggggctgggggcacacggggccagcaccacctcacacgtggcacctgcgggaa

SEQ ID NO: 180049 - DNA, 75 bp, Homo sapiens
cgccgtttctgcaggggctgggggcacacggggccagcaccacctcacacgtggcacctgcgggaaggagacaca

SEQ ID NO: 180050 - DNA, 76 bp, Homo sapiens
ttctgcaggggctgggggcacacggggccagcaccacctcacacgtggcacctgcgggaaggagacacacgtgacc

SEQ ID NO: 180051 - DNA, 75 bp, Homo sapiens
cacataggccccgccccctccagcacaggccccacccacccctcacctgtgtagggcagcaggcagttgcacttg

SEQ ID NO: 180052 - DNA, 74 bp, Homo sapiens
ccgccccctccagcacaggccccacccacccctcacctgtgtagggcagcaggcagttgcacttgtacccggca

SEQ ID NO: 180053 - DNA, 76 bp, Homo sapiens
cagcacaggccccacccacccctcacctgtgtagggcagcaggcagttgcacttgtacccggcaacgtcgtcaata

SEQ ID NO: 180054 - DNA, 74 bp, Homo sapiens
cccacccacccctcacctgtgtagggcagcaggcagttgcacttgtacccggcaacgtcgtcaatacacgtgcc

SEQ ID NO: 180055 - DNA, 78 bp, Homo sapiens
cctcacctgtgtagggcagcaggcagttgcacttgtacccggcaacgtcgtcaatacacgtgccctggttcagacatg

SEQ ID NO: 180056 - DNA, 77 bp, Homo sapiens
tgtagggcagcaggcagttgcacttgtacccggcaacgtcgtcaatacacgtgccctggttcagacatgggttggac

SEQ ID NO: 180057 - DNA, 75 bp, Homo sapiens
aggcagttgcacttgtacccggcaacgtcgtcaatacacgtgccctggttcagacatgggttggacgcacactcg

SEQ ID NO: 180058 - DNA, 74 bp, Homo sapiens
acttgtacccggcaacgtcgtcaatacacgtgccctggttcagacatgggttggacgcacactcgttgatgttg

SEQ ID NO: 180059 - DNA, 77 bp, Homo sapiens
tacccggcaacgtcgtcaatacacgtgccctggttcagacatgggttggacgcacactcgttgatgttggtctggca

SEQ ID NO: 180060 - DNA, 78 bp, Homo sapiens
tcgtcaatacacgtgccctggttcagacatgggttggacgcacactcgttgatgttggtctggcagttgggacctgga

SEQ ID NO: 180061 - DNA, 75 bp, Homo sapiens
acacgtgccctggttcagacatgggttggacgcacactcgttgatgttggtctggcagttgggacctggagggaa

SEQ ID NO: 180062 - DNA, 76 bp, Homo sapiens
tggttcagacatgggttggacgcacactcgttgatgttggtctggcagttgggacctggagggaaggggacagcac

SEQ ID NO: 180063 - DNA, 76 bp, Homo sapiens
atgggttggacgcacactcgttgatgttggtctggcagttgggacctggagggaaggggacagcactcggcatgtc

SEQ ID NO: 180064 - DNA, 78 bp, Homo sapiens
agactcgagggcggccctctgcactgagaaacgcgcagcccactcaccgctgaagccctcccggcaggtgcacacgta

SEQ ID NO: 180065 - DNA, 80 bp, Homo sapiens
cggccctctgcactgagaaacgcgcagcccactcaccgctgaagccctcccggcaggtgcacacgtagccactggtcatg

SEQ ID NO: 180066 - DNA, 83 bp, Homo sapiens
tctgcactgagaaacgcgcagcccactcaccgctgaagccctcccggcaggtgcacacgtagccactggtcatgtctttgcag

SEQ ID NO: 180067 - DNA, 79 bp, Homo sapiens
agaaacgcgcagcccactcaccgctgaagccctcccggcaggtgcacacgtagccactggtcatgtctttgcaggtgcc

SEQ ID NO: 180068 - DNA, 78 bp, Homo sapiens
actcaccgctgaagccctcccggcaggtgcacacgtagccactggtcatgtctttgcaggtgccgccgttgacacaag

SEQ ID NO: 180069 - DNA, 77 bp, Homo sapiens
tgaagccctcccggcaggtgcacacgtagccactggtcatgtctttgcaggtgccgccgttgacacaagggttggat

SEQ ID NO: 180070 - DNA, 79 bp, Homo sapiens
cggcaggtgcacacgtagccactggtcatgtctttgcaggtgccgccgttgacacaagggttggattcacactcattgt

SEQ ID NO: 180071 - DNA, 80 bp, Homo sapiens
acacgtagccactggtcatgtctttgcaggtgccgccgttgacacaagggttggattcacactcattgttgttgatgtca

SEQ ID NO: 180072 - DNA, 79 bp, Homo sapiens
actggtcatgtctttgcaggtgccgccgttgacacaagggttggattcacactcattgttgttgatgtcacagttggtc

SEQ ID NO: 180073 - DNA, 78 bp, Homo sapiens
atgtctttgcaggtgccgccgttgacacaagggttggattcacactcattgttgttgatgtcacagttggtcccactc

SEQ ID NO: 180074 - DNA, 75 bp, Homo sapiens
aggtgccgccgttgacacaagggttggattcacactcattgttgttgatgtcacagttggtcccactccacccag

SEQ ID NO: 180075 - DNA, 76 bp, Homo sapiens
cgttgacacaagggttggattcacactcattgttgttgatgtcacagttggtcccactccacccagggtcacagtc

SEQ ID NO: 180076 - DNA, 76 bp, Homo sapiens
aagggttggattcacactcattgttgttgatgtcacagttggtcccactccacccagggtcacagtcgcacttgta

SEQ ID NO: 180077 - DNA, 77 bp, Homo sapiens
ttcacactcattgttgttgatgtcacagttggtcccactccacccagggtcacagtcgcacttgtacctgcaagggg

SEQ ID NO: 180078 - DNA, 75 bp, Homo sapiens
ttgttgttgatgtcacagttggtcccactccacccagggtcacagtcgcacttgtacctgcaagggggaccacac

SEQ ID NO: 180079 - DNA, 76 bp, Homo sapiens
tgtcacagttggtcccactccacccagggtcacagtcgcacttgtacctgcaagggggaccacactgcaggtcgag

SEQ ID NO: 180080 - DNA, 77 bp, Homo sapiens
cactccacccagggtcacagtcgcacttgtacctgcaagggggaccacactgcaggtcgagggaggcccgagcagca

SEQ ID NO: 180081 - DNA, 73 bp, Homo sapiens
tcccagggtttaggactgatgtgtccccatgatcggccccgccgcatacccgttgaggctgtcccggcaggcc

SEQ ID NO: 180082 - DNA, 73 bp, Homo sapiens
tttaggactgatgtgtccccatgatcggccccgccgcatacccgttgaggctgtcccggcaggccccgtggac

SEQ ID NO: 180083 - DNA, 71 bp, Homo sapiens
atgtgtccccatgatcggccccgccgcatacccgttgaggctgtcccggcaggccccgtggacgcaggggt

SEQ ID NO: 180084 - DNA, 75 bp, Homo sapiens
atgatcggccccgccgcatacccgttgaggctgtcccggcaggccccgtggacgcaggggttgctgttgcactca

SEQ ID NO: 180085 - DNA, 76 bp, Homo sapiens
ccgcatacccgttgaggctgtcccggcaggccccgtggacgcaggggttgctgttgcactcattgacctcagacag

SEQ ID NO: 180086 - DNA, 76 bp, Homo sapiens
cccgttgaggctgtcccggcaggccccgtggacgcaggggttgctgttgcactcattgacctcagacaggcaggtg

SEQ ID NO: 180087 - DNA, 76 bp, Homo sapiens
tgtcccggcaggccccgtggacgcaggggttgctgttgcactcattgacctcagacaggcaggtggggtcgtggta

SEQ ID NO: 180088 - DNA, 74 bp, Homo sapiens
aggccccgtggacgcaggggttgctgttgcactcattgacctcagacaggcaggtggggtcgtggtagccctcg

SEQ ID NO: 180089 - DNA, 76 bp, Homo sapiens
aggggttgctgttgcactcattgacctcagacaggcaggtggggtcgtggtagccctcggggcagcggcaggtgaa

SEQ ID NO: 180090 - DNA, 82 bp, Homo sapiens
ttgctgttgcactcattgacctcagacaggcaggtggggtcgtggtagccctcggggcagcggcaggtgaagccattgatgc

SEQ ID NO: 180091 - DNA, 77 bp, Homo sapiens
actcattgacctcagacaggcaggtggggtcgtggtagccctcggggcagcggcaggtgaagccattgatgccgtcc

SEQ ID NO: 180092 - DNA, 76 bp, Homo sapiens
agacaggcaggtggggtcgtggtagccctcggggcagcggcaggtgaagccattgatgccgtcctcgcaggtgccc

SEQ ID NO: 180093 - DNA, 72 bp, Homo sapiens
aggtggggtcgtggtagccctcggggcagcggcaggtgaagccattgatgccgtcctcgcaggtgcccccgt

SEQ ID NO: 180094 - DNA, 74 bp, Homo sapiens
gtggtagccctcggggcagcggcaggtgaagccattgatgccgtcctcgcaggtgcccccgttgtggcaggggt

SEQ ID NO: 180095 - DNA, 80 bp, Homo sapiens
ggcagcggcaggtgaagccattgatgccgtcctcgcaggtgcccccgttgtggcaggggttgcccgcacactcatcgatg

SEQ ID NO: 180096 - DNA, 79 bp, Homo sapiens
ggtgaagccattgatgccgtcctcgcaggtgcccccgttgtggcaggggttgcccgcacactcatcgatgttgatgtta

SEQ ID NO: 180097 - DNA, 81 bp, Homo sapiens
agccattgatgccgtcctcgcaggtgcccccgttgtggcaggggttgcccgcacactcatcgatgttgatgttacacatgc

SEQ ID NO: 180098 - DNA, 77 bp, Homo sapiens
ccgtcctcgcaggtgcccccgttgtggcaggggttgcccgcacactcatcgatgttgatgttacacatgctccctaa

SEQ ID NO: 180099 - DNA, 76 bp, Homo sapiens
aggtgcccccgttgtggcaggggttgcccgcacactcatcgatgttgatgttacacatgctccctaagggcagggc

SEQ ID NO: 180100 - DNA, 79 bp, Homo sapiens
ttgtggcaggggttgcccgcacactcatcgatgttgatgttacacatgctccctaagggcagggcgggtcagactccga

SEQ ID NO: 180101 - DNA, 78 bp, Homo sapiens
gggttgcccgcacactcatcgatgttgatgttacacatgctccctaagggcagggcgggtcagactccgaggcccagc

SEQ ID NO: 180102 - DNA, 84 bp, Homo sapiens
ttgacctctgagcacagtgcagtcagcccccacgtgcagggccgctcacctgtgtagcccggctcacaggcacactcgtagcca

SEQ ID NO: 180103 - DNA, 82 bp, Homo sapiens
acagtgcagtcagcccccacgtgcagggccgctcacctgtgtagcccggctcacaggcacactcgtagccatcgatcttgtc

SEQ ID NO: 180104 - DNA, 81 bp, Homo sapiens
agtcagcccccacgtgcagggccgctcacctgtgtagcccggctcacaggcacactcgtagccatcgatcttgtccagaca

SEQ ID NO: 180105 - DNA, 80 bp, Homo sapiens
acgtgcagggccgctcacctgtgtagcccggctcacaggcacactcgtagccatcgatcttgtccagacaggtgcccgag

SEQ ID NO: 180106 - DNA, 80 bp, Homo sapiens
ggccgctcacctgtgtagcccggctcacaggcacactcgtagccatcgatcttgtccagacaggtgcccgagtcgcaggg

SEQ ID NO: 180107 - DNA, 85 bp, Homo sapiens
tgtgtagcccggctcacaggcacactcgtagccatcgatcttgtccagacaggtgcccgagtcgcaggggctgctggcacagtca

SEQ ID NO: 180108 - DNA, 86 bp, Homo sapiens
tcacaggcacactcgtagccatcgatcttgtccagacaggtgcccgagtcgcaggggctgctggcacagtcatccaggttgatctc

SEQ ID NO: 180109 - DNA, 83 bp, Homo sapiens
acactcgtagccatcgatcttgtccagacaggtgcccgagtcgcaggggctgctggcacagtcatccaggttgatctcgcagt

SEQ ID NO: 180110 - DNA, 82 bp, Homo sapiens
atcgatcttgtccagacaggtgcccgagtcgcaggggctgctggcacagtcatccaggttgatctcgcagttgggtcctgaa

SEQ ID NO: 180111 - DNA, 80 bp, Homo sapiens
tcttgtccagacaggtgcccgagtcgcaggggctgctggcacagtcatccaggttgatctcgcagttgggtcctgaaggg

SEQ ID NO: 180112 - DNA, 78 bp, Homo sapiens
acaggtgcccgagtcgcaggggctgctggcacagtcatccaggttgatctcgcagttgggtcctgaaggggtggcacg

SEQ ID NO: 180113 - DNA, 80 bp, Homo sapiens
gcaggggctgctggcacagtcatccaggttgatctcgcagttgggtcctgaaggggtggcacgtgtcggtcagtcctcag

SEQ ID NO: 180114 - DNA, 69 bp, Homo sapiens
ccgccctgcccactggccccccgccggccacccgcctggccggccacctgtggtccccttcaggcagaa

SEQ ID NO: 180115 - DNA, 72 bp, Homo sapiens
tgcccactggccccccgccggccacccgcctggccggccacctgtggtccccttcaggcagaagcagaggta

SEQ ID NO: 180116 - DNA, 72 bp, Homo sapiens
cgccggccacccgcctggccggccacctgtggtccccttcaggcagaagcagaggtaggcgttgtcgcggtc

SEQ ID NO: 180117 - DNA, 72 bp, Homo sapiens
acccgcctggccggccacctgtggtccccttcaggcagaagcagaggtaggcgttgtcgcggtcctggcagg

SEQ ID NO: 180118 - DNA, 72 bp, Homo sapiens
ccggccacctgtggtccccttcaggcagaagcagaggtaggcgttgtcgcggtcctggcaggtgcccccgtg

SEQ ID NO: 180119 - DNA, 75 bp, Homo sapiens
tgtggtccccttcaggcagaagcagaggtaggcgttgtcgcggtcctggcaggtgcccccgtggcggcagggctg

SEQ ID NO: 180120 - DNA, 76 bp, Homo sapiens
aggcagaagcagaggtaggcgttgtcgcggtcctggcaggtgcccccgtggcggcagggctggctggagcactcgt

SEQ ID NO: 180121 - DNA, 76 bp, Homo sapiens
aagcagaggtaggcgttgtcgcggtcctggcaggtgcccccgtggcggcagggctggctggagcactcgttgatgt

SEQ ID NO: 180122 - DNA, 78 bp, Homo sapiens
taggcgttgtcgcggtcctggcaggtgcccccgtggcggcagggctggctggagcactcgttgatgttggtctcgcag

SEQ ID NO: 180123 - DNA, 78 bp, Homo sapiens
gtcctggcaggtgcccccgtggcggcagggctggctggagcactcgttgatgttggtctcgcagtggtggcccgtgta

SEQ ID NO: 180124 - DNA, 76 bp, Homo sapiens
aggtgcccccgtggcggcagggctggctggagcactcgttgatgttggtctcgcagtggtggcccgtgtagcctgg

SEQ ID NO: 180125 - DNA, 80 bp, Homo sapiens
tggctggagcactcgttgatgttggtctcgcagtggtggcccgtgtagcctgggcggcagaggcaggtgaaggtggcgac

SEQ ID NO: 180126 - DNA, 76 bp, Homo sapiens
actcgttgatgttggtctcgcagtggtggcccgtgtagcctgggcggcagaggcaggtgaaggtggcgacgccgtc

SEQ ID NO: 180127 - DNA, 77 bp, Homo sapiens
cagtggtggcccgtgtagcctgggcggcagaggcaggtgaaggtggcgacgccgtccttgcaggagccgtagtggca

SEQ ID NO: 180128 - DNA, 75 bp, Homo sapiens
gtggcccgtgtagcctgggcggcagaggcaggtgaaggtggcgacgccgtccttgcaggagccgtagtggcaggg

SEQ ID NO: 180129 - DNA, 76 bp, Homo sapiens
tgggcggcagaggcaggtgaaggtggcgacgccgtccttgcaggagccgtagtggcaggggtcggggtcgcactca

SEQ ID NO: 180130 - DNA, 76 bp, Homo sapiens
aggcaggtgaaggtggcgacgccgtccttgcaggagccgtagtggcaggggtcggggtcgcactcatcgatgtcca

SEQ ID NO: 180131 - DNA, 75 bp, Homo sapiens
ggtgaaggtggcgacgccgtccttgcaggagccgtagtggcaggggtcggggtcgcactcatcgatgtccacctc

SEQ ID NO: 180132 - DNA, 76 bp, Homo sapiens
cgacgccgtccttgcaggagccgtagtggcaggggtcggggtcgcactcatcgatgtccacctcgcagtgcgtccc

SEQ ID NO: 180133 - DNA, 76 bp, Homo sapiens
ttgcaggagccgtagtggcaggggtcggggtcgcactcatcgatgtccacctcgcagtgcgtccccgtgtaccctg

SEQ ID NO: 180134 - DNA, 74 bp, Homo sapiens
tagtggcaggggtcggggtcgcactcatcgatgtccacctcgcagtgcgtccccgtgtaccctggaccgtggga

SEQ ID NO: 180135 - DNA, 70 bp, Homo sapiens
aggggtcggggtcgcactcatcgatgtccacctcgcagtgcgtccccgtgtaccctggaccgtgggaggg

SEQ ID NO: 180136 - DNA, 73 bp, Homo sapiens
cactcatcgatgtccacctcgcagtgcgtccccgtgtaccctggaccgtgggaggggcgggcacaggaagact

SEQ ID NO: 180137 - DNA, 72 bp, Homo sapiens
ctgtcccgtccccagtccctccccgctggtgggcgccagcccgcaccttccgtgcacacacaggtgtaagtg

SEQ ID NO: 180138 - DNA, 71 bp, Homo sapiens
cccagtccctccccgctggtgggcgccagcccgcaccttccgtgcacacacaggtgtaagtgttgggtccg

SEQ ID NO: 180139 - DNA, 74 bp, Homo sapiens
tccccgctggtgggcgccagcccgcaccttccgtgcacacacaggtgtaagtgttgggtccgtccaggcacttg

SEQ ID NO: 180140 - DNA, 78 bp, Homo sapiens
tgggcgccagcccgcaccttccgtgcacacacaggtgtaagtgttgggtccgtccaggcacttggcaccattcttgca

SEQ ID NO: 180141 - DNA, 75 bp, Homo sapiens
ccagcccgcaccttccgtgcacacacaggtgtaagtgttgggtccgtccaggcacttggcaccattcttgcaggg

SEQ ID NO: 180142 - DNA, 78 bp, Homo sapiens
ttccgtgcacacacaggtgtaagtgttgggtccgtccaggcacttggcaccattcttgcagggggtgctggcacactc

SEQ ID NO: 180143 - DNA, 77 bp, Homo sapiens
caggtgtaagtgttgggtccgtccaggcacttggcaccattcttgcagggggtgctggcacactcgtccacatcgta

SEQ ID NO: 180144 - DNA, 79 bp, Homo sapiens
taagtgttgggtccgtccaggcacttggcaccattcttgcagggggtgctggcacactcgtccacatcgtactggcaca

SEQ ID NO: 180145 - DNA, 82 bp, Homo sapiens
gtccgtccaggcacttggcaccattcttgcagggggtgctggcacactcgtccacatcgtactggcacagatgcccagtgaa

SEQ ID NO: 180146 - DNA, 80 bp, Homo sapiens
acttggcaccattcttgcagggggtgctggcacactcgtccacatcgtactggcacagatgcccagtgaagcctggggcc

SEQ ID NO: 180147 - DNA, 78 bp, Homo sapiens
accattcttgcagggggtgctggcacactcgtccacatcgtactggcacagatgcccagtgaagcctggggccgggga

SEQ ID NO: 180148 - DNA, 74 bp, Homo sapiens
agggggtgctggcacactcgtccacatcgtactggcacagatgcccagtgaagcctggggccggggaggggagg

SEQ ID NO: 180149 - DNA, 68 bp, Homo sapiens
ccagggtgcagacgacccgggggcagggggcgggggtggccctcacccgtggggcactcgcactggaa

SEQ ID NO: 180150 - DNA, 69 bp, Homo sapiens
agacgacccgggggcagggggcgggggtggccctcacccgtggggcactcgcactggaactcattgatc

SEQ ID NO: 180151 - DNA, 74 bp, Homo sapiens
gggcagggggcgggggtggccctcacccgtggggcactcgcactggaactcattgatcttgtccaggcagcggc

SEQ ID NO: 180152 - DNA, 78 bp, Homo sapiens
cgggggtggccctcacccgtggggcactcgcactggaactcattgatcttgtccaggcagcggccattgtgcaggcag

SEQ ID NO: 180153 - DNA, 82 bp, Homo sapiens
gtggccctcacccgtggggcactcgcactggaactcattgatcttgtccaggcagcggccattgtgcaggcaggggctgctg

SEQ ID NO: 180154 - DNA, 87 bp, Homo sapiens
tggggcactcgcactggaactcattgatcttgtccaggcagcggccattgtgcaggcaggggctgctggcacactcgtctgtgttga

SEQ ID NO: 180155 - DNA, 85 bp, Homo sapiens
actcgcactggaactcattgatcttgtccaggcagcggccattgtgcaggcaggggctgctggcacactcgtctgtgttgacctc

SEQ ID NO: 180156 - DNA, 86 bp, Homo sapiens
aactcattgatcttgtccaggcagcggccattgtgcaggcaggggctgctggcacactcgtctgtgttgacctcgcagtgcacacc

SEQ ID NO: 180157 - DNA, 85 bp, Homo sapiens
atcttgtccaggcagcggccattgtgcaggcaggggctgctggcacactcgtctgtgttgacctcgcagtgcacaccctcgtagc

SEQ ID NO: 180158 - DNA, 82 bp, Homo sapiens
agcggccattgtgcaggcaggggctgctggcacactcgtctgtgttgacctcgcagtgcacaccctcgtagcctgtggggtg

SEQ ID NO: 180159 - DNA, 81 bp, Homo sapiens
attgtgcaggcaggggctgctggcacactcgtctgtgttgacctcgcagtgcacaccctcgtagcctgtggggtggggcaa

SEQ ID NO: 180160 - DNA, 78 bp, Homo sapiens
aggggctgctggcacactcgtctgtgttgacctcgcagtgcacaccctcgtagcctgtggggtggggcaacagtgagg

SEQ ID NO: 180161 - DNA, 78 bp, Homo sapiens
tggcacactcgtctgtgttgacctcgcagtgcacaccctcgtagcctgtggggtggggcaacagtgaggggggcacgc

SEQ ID NO: 180162 - DNA, 74 bp, Homo sapiens
aaggctgcccagcctcgactcggtttcccgccctggccccggccgacgcaccgggcatgcagatgcactggaac

SEQ ID NO: 180163 - DNA, 74 bp, Homo sapiens
tcgactcggtttcccgccctggccccggccgacgcaccgggcatgcagatgcactggaactccccaatctggtc

SEQ ID NO: 180164 - DNA, 74 bp, Homo sapiens
cggtttcccgccctggccccggccgacgcaccgggcatgcagatgcactggaactccccaatctggtccaggca

SEQ ID NO: 180165 - DNA, 79 bp, Homo sapiens
tggccccggccgacgcaccgggcatgcagatgcactggaactccccaatctggtccaggcaggtggcgtcgttctggca

SEQ ID NO: 180166 - DNA, 78 bp, Homo sapiens
acgcaccgggcatgcagatgcactggaactccccaatctggtccaggcaggtggcgtcgttctggcacgggttcgaga

SEQ ID NO: 180167 - DNA, 80 bp, Homo sapiens
catgcagatgcactggaactccccaatctggtccaggcaggtggcgtcgttctggcacgggttcgagacgcactcgttga

SEQ ID NO: 180168 - DNA, 76 bp, Homo sapiens
agatgcactggaactccccaatctggtccaggcaggtggcgtcgttctggcacgggttcgagacgcactcgttgac

SEQ ID NO: 180169 - DNA, 74 bp, Homo sapiens
aactccccaatctggtccaggcaggtggcgtcgttctggcacgggttcgagacgcactcgttgacgtcgatctc

SEQ ID NO: 180170 - DNA, 74 bp, Homo sapiens
gtccaggcaggtggcgtcgttctggcacgggttcgagacgcactcgttgacgtcgatctcgcatcgggggcccg

SEQ ID NO: 180171 - DNA, 73 bp, Homo sapiens
aggtggcgtcgttctggcacgggttcgagacgcactcgttgacgtcgatctcgcatcgggggcccgtgtagcc

SEQ ID NO: 180172 - DNA, 76 bp, Homo sapiens
gtcgttctggcacgggttcgagacgcactcgttgacgtcgatctcgcatcgggggcccgtgtagccctgcagacac

SEQ ID NO: 180173 - DNA, 76 bp, Homo sapiens
acgggttcgagacgcactcgttgacgtcgatctcgcatcgggggcccgtgtagccctgcagacactggcactcgaa

SEQ ID NO: 180174 - DNA, 79 bp, Homo sapiens
cactcgttgacgtcgatctcgcatcgggggcccgtgtagccctgcagacactggcactcgaaggagcccagcgtgttga

SEQ ID NO: 180175 - DNA, 80 bp, Homo sapiens
gttgacgtcgatctcgcatcgggggcccgtgtagccctgcagacactggcactcgaaggagcccagcgtgttgatgcact

SEQ ID NO: 180176 - DNA, 83 bp, Homo sapiens
atctcgcatcgggggcccgtgtagccctgcagacactggcactcgaaggagcccagcgtgttgatgcacttgcccgcatgctc

SEQ ID NO: 180177 - DNA, 82 bp, Homo sapiens
cccgtgtagccctgcagacactggcactcgaaggagcccagcgtgttgatgcacttgcccgcatgctcgcaggggttggcac

SEQ ID NO: 180178 - DNA, 84 bp, Homo sapiens
cctgcagacactggcactcgaaggagcccagcgtgttgatgcacttgcccgcatgctcgcaggggttggcacctggcgagggca

SEQ ID NO: 180179 - DNA, 82 bp, Homo sapiens
agacactggcactcgaaggagcccagcgtgttgatgcacttgcccgcatgctcgcaggggttggcacctggcgagggcacac

SEQ ID NO: 180180 - DNA, 80 bp, Homo sapiens
actcgaaggagcccagcgtgttgatgcacttgcccgcatgctcgcaggggttggcacctggcgagggcacacgggtgaga

SEQ ID NO: 180181 - DNA, 83 bp, Homo sapiens
cccagcgtgttgatgcacttgcccgcatgctcgcaggggttggcacctggcgagggcacacgggtgagaggctgctccaggca

SEQ ID NO: 180182 - DNA, 79 bp, Homo sapiens
ccaggctgccacccccacctggccgcaccccctgtgctggcacctacccagcgagcactcatccacgtcctggctgcag

SEQ ID NO: 180183 - DNA, 76 bp, Homo sapiens
acccccacctggccgcaccccctgtgctggcacctacccagcgagcactcatccacgtcctggctgcaggccgggc

SEQ ID NO: 180184 - DNA, 77 bp, Homo sapiens
acctggccgcaccccctgtgctggcacctacccagcgagcactcatccacgtcctggctgcaggccgggcccgtgta

SEQ ID NO: 180185 - DNA, 76 bp, Homo sapiens
ctgtgctggcacctacccagcgagcactcatccacgtcctggctgcaggccgggcccgtgtaccccgaggggcagg

SEQ ID NO: 180186 - DNA, 78 bp, Homo sapiens
tggcacctacccagcgagcactcatccacgtcctggctgcaggccgggcccgtgtaccccgaggggcaggtgcagatg

SEQ ID NO: 180187 - DNA, 79 bp, Homo sapiens
agcgagcactcatccacgtcctggctgcaggccgggcccgtgtaccccgaggggcaggtgcagatggccttgccattga

SEQ ID NO: 180188 - DNA, 74 bp, Homo sapiens
atccacgtcctggctgcaggccgggcccgtgtaccccgaggggcaggtgcagatggccttgccattgacagggt

SEQ ID NO: 180189 - DNA, 76 bp, Homo sapiens
tggctgcaggccgggcccgtgtaccccgaggggcaggtgcagatggccttgccattgacagggttggtgtcgcagt

SEQ ID NO: 180190 - DNA, 73 bp, Homo sapiens
aggccgggcccgtgtaccccgaggggcaggtgcagatggccttgccattgacagggttggtgtcgcagttgga

SEQ ID NO: 180191 - DNA, 75 bp, Homo sapiens
cgtgtaccccgaggggcaggtgcagatggccttgccattgacagggttggtgtcgcagttggagccctcgttaca

SEQ ID NO: 180192 - DNA, 82 bp, Homo sapiens
ggcaggtgcagatggccttgccattgacagggttggtgtcgcagttggagccctcgttacaggggttgctgatgcatgcgtc

SEQ ID NO: 180193 - DNA, 79 bp, Homo sapiens
agatggccttgccattgacagggttggtgtcgcagttggagccctcgttacaggggttgctgatgcatgcgtcgttgag

SEQ ID NO: 180194 - DNA, 79 bp, Homo sapiens
acagggttggtgtcgcagttggagccctcgttacaggggttgctgatgcatgcgtcgttgaggtggcacagcagacctg

SEQ ID NO: 180195 - DNA, 83 bp, Homo sapiens
gtgtcgcagttggagccctcgttacaggggttgctgatgcatgcgtcgttgaggtggcacagcagacctgggcaggcagcggc

SEQ ID NO: 180196 - DNA, 82 bp, Homo sapiens
agccctcgttacaggggttgctgatgcatgcgtcgttgaggtggcacagcagacctgggcaggcagcggcggtcagtgggca

SEQ ID NO: 180197 - DNA, 81 bp, Homo sapiens
gttacaggggttgctgatgcatgcgtcgttgaggtggcacagcagacctgggcaggcagcggcggtcagtgggcacggccc

SEQ ID NO: 180198 - DNA, 79 bp, Homo sapiens
tggcccatgtgagccccctgcgcccacctgggcctcaaggcactcacctgtgcggccatggggacactcgcagtagaag

SEQ ID NO: 180199 - DNA, 78 bp, Homo sapiens
atgtgagccccctgcgcccacctgggcctcaaggcactcacctgtgcggccatggggacactcgcagtagaaggaggc

SEQ ID NO: 180200 - DNA, 79 bp, Homo sapiens
gcccacctgggcctcaaggcactcacctgtgcggccatggggacactcgcagtagaaggaggccacacggtcatggcag

SEQ ID NO: 180201 - DNA, 80 bp, Homo sapiens
gcctcaaggcactcacctgtgcggccatggggacactcgcagtagaaggaggccacacggtcatggcaggtggcgccgtg

SEQ ID NO: 180202 - DNA, 78 bp, Homo sapiens
aaggcactcacctgtgcggccatggggacactcgcagtagaaggaggccacacggtcatggcaggtggcgccgtggaa

SEQ ID NO: 180203 - DNA, 80 bp, Homo sapiens
ctgtgcggccatggggacactcgcagtagaaggaggccacacggtcatggcaggtggcgccgtggaagcaggcggcgctg

SEQ ID NO: 180204 - DNA, 82 bp, Homo sapiens
ggacactcgcagtagaaggaggccacacggtcatggcaggtggcgccgtggaagcaggcggcgctggcacagtcatcaatgt

SEQ ID NO: 180205 - DNA, 83 bp, Homo sapiens
agtagaaggaggccacacggtcatggcaggtggcgccgtggaagcaggcggcgctggcacagtcatcaatgttctcgctgcag

SEQ ID NO: 180206 - DNA, 84 bp, Homo sapiens
aaggaggccacacggtcatggcaggtggcgccgtggaagcaggcggcgctggcacagtcatcaatgttctcgctgcagtcctca

SEQ ID NO: 180207 - DNA, 87 bp, Homo sapiens
tcatggcaggtggcgccgtggaagcaggcggcgctggcacagtcatcaatgttctcgctgcagtcctcaccagtccagccgttgaca

SEQ ID NO: 180208 - DNA, 84 bp, Homo sapiens
aggtggcgccgtggaagcaggcggcgctggcacagtcatcaatgttctcgctgcagtcctcaccagtccagccgttgacacaca

SEQ ID NO: 180209 - DNA, 87 bp, Homo sapiens
tggaagcaggcggcgctggcacagtcatcaatgttctcgctgcagtcctcaccagtccagccgttgacacacacgcagttgtagcca

SEQ ID NO: 180210 - DNA, 84 bp, Homo sapiens
gcgctggcacagtcatcaatgttctcgctgcagtcctcaccagtccagccgttgacacacacgcagttgtagccaccgtgggtg

SEQ ID NO: 180211 - DNA, 81 bp, Homo sapiens
acagtcatcaatgttctcgctgcagtcctcaccagtccagccgttgacacacacgcagttgtagccaccgtgggtgttgtg

SEQ ID NO: 180212 - DNA, 79 bp, Homo sapiens
aatgttctcgctgcagtcctcaccagtccagccgttgacacacacgcagttgtagccaccgtgggtgttgtggcaggtc

SEQ ID NO: 180213 - DNA, 75 bp, Homo sapiens
cagtcctcaccagtccagccgttgacacacacgcagttgtagccaccgtgggtgttgtggcaggtcccgccgttc

SEQ ID NO: 180214 - DNA, 76 bp, Homo sapiens
cagtccagccgttgacacacacgcagttgtagccaccgtgggtgttgtggcaggtcccgccgttctggcaggcatt

SEQ ID NO: 180215 - DNA, 78 bp, Homo sapiens
agccgttgacacacacgcagttgtagccaccgtgggtgttgtggcaggtcccgccgttctggcaggcatttggcatca

SEQ ID NO: 180216 - DNA, 79 bp, Homo sapiens
acacacgcagttgtagccaccgtgggtgttgtggcaggtcccgccgttctggcaggcatttggcatcagctggcactcg

SEQ ID NO: 180217 - DNA, 80 bp, Homo sapiens
ttgtagccaccgtgggtgttgtggcaggtcccgccgttctggcaggcatttggcatcagctggcactcgtccacatcctc

SEQ ID NO: 180218 - DNA, 80 bp, Homo sapiens
ggtgttgtggcaggtcccgccgttctggcaggcatttggcatcagctggcactcgtccacatcctcggtacagtactgac

SEQ ID NO: 180219 - DNA, 80 bp, Homo sapiens
caggtcccgccgttctggcaggcatttggcatcagctggcactcgtccacatcctcggtacagtactgacctgcagggaa

SEQ ID NO: 180220 - DNA, 79 bp, Homo sapiens
aggcatttggcatcagctggcactcgtccacatcctcggtacagtactgacctgcagggaacaggagctgtcggccccg

SEQ ID NO: 180221 - DNA, 80 bp, Homo sapiens
atcagctggcactcgtccacatcctcggtacagtactgacctgcagggaacaggagctgtcggccccgggcagctgccac

SEQ ID NO: 180222 - DNA, 72 bp, Homo sapiens
ggtagcagccccgccccggctaccccgccctgcggcgacccgtatacgcgcctgtccactctggcgggcagc

SEQ ID NO: 180223 - DNA, 72 bp, Homo sapiens
ccggctaccccgccctgcggcgacccgtatacgcgcctgtccactctggcgggcagcggcagttgtaggtgt

SEQ ID NO: 180224 - DNA, 76 bp, Homo sapiens
cgccctgcggcgacccgtatacgcgcctgtccactctggcgggcagcggcagttgtaggtgttcacgccgtccaca

SEQ ID NO: 180225 - DNA, 78 bp, Homo sapiens
tgcggcgacccgtatacgcgcctgtccactctggcgggcagcggcagttgtaggtgttcacgccgtccacacaggcac

SEQ ID NO: 180226 - DNA, 75 bp, Homo sapiens
tatacgcgcctgtccactctggcgggcagcggcagttgtaggtgttcacgccgtccacacaggcacccccgttct

SEQ ID NO: 180227 - DNA, 75 bp, Homo sapiens
tgtccactctggcgggcagcggcagttgtaggtgttcacgccgtccacacaggcacccccgttcttgcagttgtt

SEQ ID NO: 180228 - DNA, 74 bp, Homo sapiens
gggcagcggcagttgtaggtgttcacgccgtccacacaggcacccccgttcttgcagttgtttcctggacaatc

SEQ ID NO: 180229 - DNA, 72 bp, Homo sapiens
agttgtaggtgttcacgccgtccacacaggcacccccgttcttgcagttgtttcctggacaatcgtcgatat

SEQ ID NO: 180230 - DNA, 72 bp, Homo sapiens
taggtgttcacgccgtccacacaggcacccccgttcttgcagttgtttcctggacaatcgtcgatattttcc

SEQ ID NO: 180231 - DNA, 73 bp, Homo sapiens
cgccgtccacacaggcacccccgttcttgcagttgtttcctggacaatcgtcgatattttcctcacagttctg

SEQ ID NO: 180232 - DNA, 72 bp, Homo sapiens
acaggcacccccgttcttgcagttgtttcctggacaatcgtcgatattttcctcacagttctggccggtgaa

SEQ ID NO: 180233 - DNA, 75 bp, Homo sapiens
ttcttgcagttgtttcctggacaatcgtcgatattttcctcacagttctggccggtgaagcctgccgcaagaggg

SEQ ID NO: 180234 - DNA, 72 bp, Homo sapiens
agttgtttcctggacaatcgtcgatattttcctcacagttctggccggtgaagcctgccgcaagaggggccg

SEQ ID NO: 180235 - DNA, 73 bp, Homo sapiens
acaatcgtcgatattttcctcacagttctggccggtgaagcctgccgcaagaggggccgggtcagcctcttcc

SEQ ID NO: 180236 - DNA, 77 bp, Homo sapiens
gcagccggggaggggctcgtgcaccccggccagcgggcagcactacctggcaggcaggcacactcgtgggtgacgtc

SEQ ID NO: 180237 - DNA, 75 bp, Homo sapiens
aggggctcgtgcaccccggccagcgggcagcactacctggcaggcaggcacactcgtgggtgacgtcgcccgtgg

SEQ ID NO: 180238 - DNA, 77 bp, Homo sapiens
ctcgtgcaccccggccagcgggcagcactacctggcaggcaggcacactcgtgggtgacgtcgcccgtggggcggca

SEQ ID NO: 180239 - DNA, 75 bp, Homo sapiens
ccggccagcgggcagcactacctggcaggcaggcacactcgtgggtgacgtcgcccgtggggcggcaggtgcccc

SEQ ID NO: 180240 - DNA, 74 bp, Homo sapiens
agcactacctggcaggcaggcacactcgtgggtgacgtcgcccgtggggcggcaggtgcccccgttctggcagg

SEQ ID NO: 180241 - DNA, 73 bp, Homo sapiens
ctggcaggcaggcacactcgtgggtgacgtcgcccgtggggcggcaggtgcccccgttctggcagggcgaggg

SEQ ID NO: 180242 - DNA, 72 bp, Homo sapiens
aggcacactcgtgggtgacgtcgcccgtggggcggcaggtgcccccgttctggcagggcgaggggctgcagg

SEQ ID NO: 180243 - DNA, 71 bp, Homo sapiens
gtgggtgacgtcgcccgtggggcggcaggtgcccccgttctggcagggcgaggggctgcagggcacgtagg

SEQ ID NO: 180244 - DNA, 72 bp, Homo sapiens
cccgtggggcggcaggtgcccccgttctggcagggcgaggggctgcagggcacgtagggccgctcgcagttg

SEQ ID NO: 180245 - DNA, 73 bp, Homo sapiens
caggtgcccccgttctggcagggcgaggggctgcagggcacgtagggccgctcgcagttggggccagtgtggg

SEQ ID NO: 180246 - DNA, 76 bp, Homo sapiens
ccgttctggcagggcgaggggctgcagggcacgtagggccgctcgcagttggggccagtgtgggtggcgcggcaga

SEQ ID NO: 180247 - DNA, 76 bp, Homo sapiens
agggcgaggggctgcagggcacgtagggccgctcgcagttggggccagtgtgggtggcgcggcagacgcagcggta

SEQ ID NO: 180248 - DNA, 77 bp, Homo sapiens
ctgcagggcacgtagggccgctcgcagttggggccagtgtgggtggcgcggcagacgcagcggtaggagccgacctc

SEQ ID NO: 180249 - DNA, 74 bp, Homo sapiens
acgtagggccgctcgcagttggggccagtgtgggtggcgcggcagacgcagcggtaggagccgacctcgttgtg

SEQ ID NO: 180250 - DNA, 77 bp, Homo sapiens
ggccgctcgcagttggggccagtgtgggtggcgcggcagacgcagcggtaggagccgacctcgttgtggcaggtgcc

SEQ ID NO: 180251 - DNA, 76 bp, Homo sapiens
gggccagtgtgggtggcgcggcagacgcagcggtaggagccgacctcgttgtggcaggtgcctccgtggcggcaaa

SEQ ID NO: 180252 - DNA, 75 bp, Homo sapiens
agtgtgggtggcgcggcagacgcagcggtaggagccgacctcgttgtggcaggtgcctccgtggcggcaaagccc

SEQ ID NO: 180253 - DNA, 76 bp, Homo sapiens
ggcagacgcagcggtaggagccgacctcgttgtggcaggtgcctccgtggcggcaaagcccgggcttctggccaca

SEQ ID NO: 180254 - DNA, 73 bp, Homo sapiens
cggtaggagccgacctcgttgtggcaggtgcctccgtggcggcaaagcccgggcttctggccacactcgttga

SEQ ID NO: 180255 - DNA, 75 bp, Homo sapiens
agccgacctcgttgtggcaggtgcctccgtggcggcaaagcccgggcttctggccacactcgttgacatcctgcc

SEQ ID NO: 180256 - DNA, 75 bp, Homo sapiens
gttgtggcaggtgcctccgtggcggcaaagcccgggcttctggccacactcgttgacatcctgccggcaggtggg

SEQ ID NO: 180257 - DNA, 75 bp, Homo sapiens
aggtgcctccgtggcggcaaagcccgggcttctggccacactcgttgacatcctgccggcaggtggggccatgga

SEQ ID NO: 180258 - DNA, 75 bp, Homo sapiens
gtggcggcaaagcccgggcttctggccacactcgttgacatcctgccggcaggtggggccatggaagctgggtgg

SEQ ID NO: 180259 - DNA, 79 bp, Homo sapiens
cgggcttctggccacactcgttgacatcctgccggcaggtggggccatggaagctgggtgggcagtggcagatgtagga

SEQ ID NO: 180260 - DNA, 80 bp, Homo sapiens
tggccacactcgttgacatcctgccggcaggtggggccatggaagctgggtgggcagtggcagatgtaggaggcctcgaa

SEQ ID NO: 180261 - DNA, 80 bp, Homo sapiens
tcgttgacatcctgccggcaggtggggccatggaagctgggtgggcagtggcagatgtaggaggcctcgaagggcaggca

SEQ ID NO: 180262 - DNA, 79 bp, Homo sapiens
tcctgccggcaggtggggccatggaagctgggtgggcagtggcagatgtaggaggcctcgaagggcaggcactggccac

SEQ ID NO: 180263 - DNA, 77 bp, Homo sapiens
gggccatggaagctgggtgggcagtggcagatgtaggaggcctcgaagggcaggcactggccaccgttggcgcaggg

SEQ ID NO: 180264 - DNA, 75 bp, Homo sapiens
aagctgggtgggcagtggcagatgtaggaggcctcgaagggcaggcactggccaccgttggcgcaggggttggag

SEQ ID NO: 180265 - DNA, 77 bp, Homo sapiens
ggcagtggcagatgtaggaggcctcgaagggcaggcactggccaccgttggcgcaggggttggaggcgcacgggtca

SEQ ID NO: 180266 - DNA, 76 bp, Homo sapiens
agatgtaggaggcctcgaagggcaggcactggccaccgttggcgcaggggttggaggcgcacgggtcagcctgctg

SEQ ID NO: 180267 - DNA, 75 bp, Homo sapiens
cctcgaagggcaggcactggccaccgttggcgcaggggttggaggcgcacgggtcagcctgctggcacgatttcc

SEQ ID NO: 180268 - DNA, 76 bp, Homo sapiens
caggcactggccaccgttggcgcaggggttggaggcgcacgggtcagcctgctggcacgatttccctggagacaag

SEQ ID NO: 180269 - DNA, 73 bp, Homo sapiens
actggccaccgttggcgcaggggttggaggcgcacgggtcagcctgctggcacgatttccctggagacaaggg

SEQ ID NO: 180270 - DNA, 74 bp, Homo sapiens
ttggcgcaggggttggaggcgcacgggtcagcctgctggcacgatttccctggagacaaggggacaagagggtc

SEQ ID NO: 180271 - DNA, 76 bp, Homo sapiens
ggttggaggcgcacgggtcagcctgctggcacgatttccctggagacaaggggacaagagggtcgtgctggcctca

SEQ ID NO: 180272 - DNA, 73 bp, Homo sapiens
gcgggcctgggtctgcccacccctcaggctgtgggtcctccctcacctgaccagccgggcgggcagcggcact

SEQ ID NO: 180273 - DNA, 75 bp, Homo sapiens
gtctgcccacccctcaggctgtgggtcctccctcacctgaccagccgggcgggcagcggcacttgtactccgtca

SEQ ID NO: 180274 - DNA, 76 bp, Homo sapiens
ccctcaggctgtgggtcctccctcacctgaccagccgggcgggcagcggcacttgtactccgtcagcgtgagcagg

SEQ ID NO: 180275 - DNA, 78 bp, Homo sapiens
tgtgggtcctccctcacctgaccagccgggcgggcagcggcacttgtactccgtcagcgtgagcaggtcgcaggtgcc

SEQ ID NO: 180276 - DNA, 76 bp, Homo sapiens
cctcacctgaccagccgggcgggcagcggcacttgtactccgtcagcgtgagcaggtcgcaggtgcccccgttgcg

SEQ ID NO: 180277 - DNA, 76 bp, Homo sapiens
ctgaccagccgggcgggcagcggcacttgtactccgtcagcgtgagcaggtcgcaggtgcccccgttgcggcaggg

SEQ ID NO: 180278 - DNA, 75 bp, Homo sapiens
cgggcgggcagcggcacttgtactccgtcagcgtgagcaggtcgcaggtgcccccgttgcggcaggggttggtga

SEQ ID NO: 180279 - DNA, 76 bp, Homo sapiens
acttgtactccgtcagcgtgagcaggtcgcaggtgcccccgttgcggcaggggttggtgaggcaggcattgtccag

SEQ ID NO: 180280 - DNA, 76 bp, Homo sapiens
tactccgtcagcgtgagcaggtcgcaggtgcccccgttgcggcaggggttggtgaggcaggcattgtccaggggtg

SEQ ID NO: 180281 - DNA, 76 bp, Homo sapiens
cgtgagcaggtcgcaggtgcccccgttgcggcaggggttggtgaggcaggcattgtccaggggtgtcaggcagagg

SEQ ID NO: 180282 - DNA, 73 bp, Homo sapiens
aggtgcccccgttgcggcaggggttggtgaggcaggcattgtccaggggtgtcaggcagaggggcccagagaa

SEQ ID NO: 180283 - DNA, 76 bp, Homo sapiens
cgttgcggcaggggttggtgaggcaggcattgtccaggggtgtcaggcagaggggcccagagaagcccagggcaca

SEQ ID NO: 180284 - DNA, 80 bp, Homo sapiens
gggttggtgaggcaggcattgtccaggggtgtcaggcagaggggcccagagaagcccagggcacagctgcaggcatagtc

SEQ ID NO: 180285 - DNA, 82 bp, Homo sapiens
aggcaggcattgtccaggggtgtcaggcagaggggcccagagaagcccagggcacagctgcaggcatagtctgccacgcctc

SEQ ID NO: 180286 - DNA, 81 bp, Homo sapiens
attgtccaggggtgtcaggcagaggggcccagagaagcccagggcacagctgcaggcatagtctgccacgcctctgcggtc

SEQ ID NO: 180287 - DNA, 85 bp, Homo sapiens
tgtcaggcagaggggcccagagaagcccagggcacagctgcaggcatagtctgccacgcctctgcggtccaccacgtggcatgtc

SEQ ID NO: 180288 - DNA, 80 bp, Homo sapiens
agaggggcccagagaagcccagggcacagctgcaggcatagtctgccacgcctctgcggtccaccacgtggcatgtcccg

SEQ ID NO: 180289 - DNA, 81 bp, Homo sapiens
agaagcccagggcacagctgcaggcatagtctgccacgcctctgcggtccaccacgtggcatgtcccggcgttcttgcagg

SEQ ID NO: 180290 - DNA, 82 bp, Homo sapiens
agggcacagctgcaggcatagtctgccacgcctctgcggtccaccacgtggcatgtcccggcgttcttgcagggggtgctga

SEQ ID NO: 180291 - DNA, 77 bp, Homo sapiens
aggcatagtctgccacgcctctgcggtccaccacgtggcatgtcccggcgttcttgcagggggtgctgaggcacggg

SEQ ID NO: 180292 - DNA, 76 bp, Homo sapiens
tagtctgccacgcctctgcggtccaccacgtggcatgtcccggcgttcttgcagggggtgctgaggcacgggttgg

SEQ ID NO: 180293 - DNA, 75 bp, Homo sapiens
ctctgcggtccaccacgtggcatgtcccggcgttcttgcagggggtgctgaggcacgggttggggtcctggcatc

SEQ ID NO: 180294 - DNA, 73 bp, Homo sapiens
accacgtggcatgtcccggcgttcttgcagggggtgctgaggcacgggttggggtcctggcatcgcgggccca

SEQ ID NO: 180295 - DNA, 71 bp, Homo sapiens
atgtcccggcgttcttgcagggggtgctgaggcacgggttggggtcctggcatcgcgggcccacgaaggcc

SEQ ID NO: 180296 - DNA, 73 bp, Homo sapiens
ttcttgcagggggtgctgaggcacgggttggggtcctggcatcgcgggcccacgaaggccccgccacagctgt

SEQ ID NO: 180297 - DNA, 77 bp, Homo sapiens
gggtgctgaggcacgggttggggtcctggcatcgcgggcccacgaaggccccgccacagctgttggcagatgtgcca

SEQ ID NO: 180298 - DNA, 76 bp, Homo sapiens
gcacgggttggggtcctggcatcgcgggcccacgaaggccccgccacagctgttggcagatgtgccagggcagtta

SEQ ID NO: 180299 - DNA, 75 bp, Homo sapiens
gggtcctggcatcgcgggcccacgaaggccccgccacagctgttggcagatgtgccagggcagttagttcccacc

SEQ ID NO: 180300 - DNA, 75 bp, Homo sapiens
agaaggcaggggctctgccctcgacaaagcaacaggtcccgcaggggtggtactcacacgcaggcctccgtgcca

SEQ ID NO: 180301 - DNA, 77 bp, Homo sapiens
ggctctgccctcgacaaagcaacaggtcccgcaggggtggtactcacacgcaggcctccgtgccattggccgcttca

SEQ ID NO: 180302 - DNA, 75 bp, Homo sapiens
cctcgacaaagcaacaggtcccgcaggggtggtactcacacgcaggcctccgtgccattggccgcttcacacttc

SEQ ID NO: 180303 - DNA, 74 bp, Homo sapiens
aagcaacaggtcccgcaggggtggtactcacacgcaggcctccgtgccattggccgcttcacacttcccgccat

SEQ ID NO: 180304 - DNA, 76 bp, Homo sapiens
gtcccgcaggggtggtactcacacgcaggcctccgtgccattggccgcttcacacttcccgccattcaggcaggtc

SEQ ID NO: 180305 - DNA, 78 bp, Homo sapiens
tggtactcacacgcaggcctccgtgccattggccgcttcacacttcccgccattcaggcaggtctcaccgggctggga

SEQ ID NO: 180306 - DNA, 78 bp, Homo sapiens
acacgcaggcctccgtgccattggccgcttcacacttcccgccattcaggcaggtctcaccgggctgggagcatcgcg

SEQ ID NO: 180307 - DNA, 78 bp, Homo sapiens
ctccgtgccattggccgcttcacacttcccgccattcaggcaggtctcaccgggctgggagcatcgcgggcctaggca

SEQ ID NO: 180308 - DNA, 77 bp, Homo sapiens
ttggccgcttcacacttcccgccattcaggcaggtctcaccgggctgggagcatcgcgggcctaggcaggggcagga

SEQ ID NO: 180309 - DNA, 76 bp, Homo sapiens
acttcccgccattcaggcaggtctcaccgggctgggagcatcgcgggcctaggcaggggcaggagaagagaggtca

SEQ ID NO: 180310 - DNA, 78 bp, Homo sapiens
attcaggcaggtctcaccgggctgggagcatcgcgggcctaggcaggggcaggagaagagaggtcagtctcacccgca

SEQ ID NO: 180311 - DNA, 76 bp, Homo sapiens
aggtctcaccgggctgggagcatcgcgggcctaggcaggggcaggagaagagaggtcagtctcacccgcaccacca

SEQ ID NO: 180312 - DNA, 66 bp, Homo sapiens
gccgggcgccgccaaagtttccaaagggcgcggaaagtgggggctcgcgggtgggtgggcgcctac

SEQ ID NO: 180313 - DNA, 68 bp, Homo sapiens
gccaaagtttccaaagggcgcggaaagtgggggctcgcgggtgggtgggcgcctacctcgtgcggcga

SEQ ID NO: 180314 - DNA, 68 bp, Homo sapiens
agtttccaaagggcgcggaaagtgggggctcgcgggtgggtgggcgcctacctcgtgcggcgagcgcg

SEQ ID NO: 180315 - DNA, 76 bp, Homo sapiens
cggaaagtgggggctcgcgggtgggtgggcgcctacctcgtgcggcgagcgcgggcagcagcgccaggcagagcag

SEQ ID NO: 180316 - DNA, 79 bp, Homo sapiens
gggctcgcgggtgggtgggcgcctacctcgtgcggcgagcgcgggcagcagcgccaggcagagcaggggcgccaggagc

SEQ ID NO: 180317 - DNA, 82 bp, Homo sapiens
gtgggtgggcgcctacctcgtgcggcgagcgcgggcagcagcgccaggcagagcaggggcgccaggagcggcggcatgcctc

SEQ ID NO: 180318 - DNA, 82 bp, Homo sapiens
tgggcgcctacctcgtgcggcgagcgcgggcagcagcgccaggcagagcaggggcgccaggagcggcggcatgcctccccac

SEQ ID NO: 180319 - DNA, 84 bp, Homo sapiens
tcgtgcggcgagcgcgggcagcagcgccaggcagagcaggggcgccaggagcggcggcatgcctccccaccggctgccctctgc

SEQ ID NO: 180320 - DNA, 80 bp, Homo sapiens
agcgcgggcagcagcgccaggcagagcaggggcgccaggagcggcggcatgcctccccaccggctgccctctgcgcccgg

SEQ ID NO: 180321 - DNA, 79 bp, Homo sapiens
agcagcgccaggcagagcaggggcgccaggagcggcggcatgcctccccaccggctgccctctgcgcccgggcggcggc

SEQ ID NO: 180322 - DNA, 77 bp, Homo sapiens
agagcaggggcgccaggagcggcggcatgcctccccaccggctgccctctgcgcccgggcggcggcctcctgcgctg

SEQ ID NO: 180323 - DNA, 75 bp, Homo sapiens
cgccaggagcggcggcatgcctccccaccggctgccctctgcgcccgggcggcggcctcctgcgctggccggcgg

SEQ ID NO: 180324 - DNA, 69 bp, Homo sapiens
tgacgaacctttggatccagaagtatttcttcatttctcttcttttcggctgaatttctagtaaaaact

SEQ ID NO: 180325 - DNA, 72 bp, Homo sapiens
ggatccagaagtatttcttcatttctcttcttttcggctgaatttctagtaaaaactttgaagatgagctgt

SEQ ID NO: 180326 - DNA, 71 bp, Homo sapiens
tttcttcatttctcttcttttcggctgaatttctagtaaaaactttgaagatgagctgttcttacttttca

SEQ ID NO: 180327 - DNA, 71 bp, Homo sapiens
ttctcttcttttcggctgaatttctagtaaaaactttgaagatgagctgttcttacttttcatttctccac

SEQ ID NO: 180328 - DNA, 74 bp, Homo sapiens
tcggctgaatttctagtaaaaactttgaagatgagctgttcttacttttcatttctccacttatggagaagatg

SEQ ID NO: 180329 - DNA, 75 bp, Homo sapiens
ttctagtaaaaactttgaagatgagctgttcttacttttcatttctccacttatggagaagatggaataatgaca

SEQ ID NO: 180330 - DNA, 73 bp, Homo sapiens
aaactttgaagatgagctgttcttacttttcatttctccacttatggagaagatggaataatgacaccaaaag

SEQ ID NO: 180331 - DNA, 72 bp, Homo sapiens
atgagctgttcttacttttcatttctccacttatggagaagatggaataatgacaccaaaagtactttggtt

SEQ ID NO: 180332 - DNA, 69 bp, Homo sapiens
ctgttcttacttttcatttctccacttatggagaagatggaataatgacaccaaaagtactttggtttt

SEQ ID NO: 180333 - DNA, 71 bp, Homo sapiens
ttaaaaataatttgctttcttttgcatgccacaggacagatttctagtttcaaaacaagggtacaacaaga

SEQ ID NO: 180334 - DNA, 71 bp, Homo sapiens
aataatttgctttcttttgcatgccacaggacagatttctagtttcaaaacaagggtacaacaagaacaaa

SEQ ID NO: 180335 - DNA, 69 bp, Homo sapiens
tttcttttgcatgccacaggacagatttctagtttcaaaacaagggtacaacaagaacaaaaaaatccc

SEQ ID NO: 180336 - DNA, 67 bp, Homo sapiens
atgccacaggacagatttctagtttcaaaacaagggtacaacaagaacaaaaaaatccccccatccc

SEQ ID NO: 180337 - DNA, 62 bp, Homo sapiens
tttctagtttcaaaacaagggtacaacaagaacaaaaaaatccccccatccccaaccgtctt

SEQ ID NO: 180338 - DNA, 64 bp, Homo sapiens
tttcaaaacaagggtacaacaagaacaaaaaaatccccccatccccaaccgtctttcaccaata

SEQ ID NO: 180339 - DNA, 64 bp, Homo sapiens
aagggtacaacaagaacaaaaaaatccccccatccccaaccgtctttcaccaatacaagaaatc

SEQ ID NO: 180340 - DNA, 65 bp, Homo sapiens
aacaaaaaaatccccccatccccaaccgtctttcaccaatacaagaaatccttctggaaatatta

SEQ ID NO: 180341 - DNA, 68 bp, Homo sapiens
aaaaatccccccatccccaaccgtctttcaccaatacaagaaatccttctggaaatattagcaagcaa

SEQ ID NO: 180342 - DNA, 70 bp, Homo sapiens
cccaaccgtctttcaccaatacaagaaatccttctggaaatattagcaagcaactaaacaggtattgaac

SEQ ID NO: 180343 - DNA, 75 bp, Homo sapiens
tctttcaccaatacaagaaatccttctggaaatattagcaagcaactaaacaggtattgaaccactgaatctaca

SEQ ID NO: 180344 - DNA, 73 bp, Homo sapiens
ccaatacaagaaatccttctggaaatattagcaagcaactaaacaggtattgaaccactgaatctacaagtta

SEQ ID NO: 180345 - DNA, 74 bp, Homo sapiens
ccttctggaaatattagcaagcaactaaacaggtattgaaccactgaatctacaagttaatacataatctgtta

SEQ ID NO: 180346 - DNA, 77 bp, Homo sapiens
tattagcaagcaactaaacaggtattgaaccactgaatctacaagttaatacataatctgttatggcagaataacca

SEQ ID NO: 180347 - DNA, 72 bp, Homo sapiens
acaggtattgaaccactgaatctacaagttaatacataatctgttatggcagaataaccaagaatttttccc

SEQ ID NO: 180348 - DNA, 72 bp, Homo sapiens
tgaaccactgaatctacaagttaatacataatctgttatggcagaataaccaagaatttttccccaaagaaa

SEQ ID NO: 180349 - DNA, 69 bp, Homo sapiens
aatctacaagttaatacataatctgttatggcagaataaccaagaatttttccccaaagaaagatttta

SEQ ID NO: 180350 - DNA, 66 bp, Homo sapiens
atctgttatggcagaataaccaagaatttttccccaaagaaagattttaattttttcaaatataaa

SEQ ID NO: 180351 - DNA, 65 bp, Homo sapiens
gcagaataaccaagaatttttccccaaagaaagattttaattttttcaaatataaaagtgtctaa

SEQ ID NO: 180352 - DNA, 68 bp, Homo sapiens
atttttccccaaagaaagattttaattttttcaaatataaaagtgtctaagagaatcatatgtgaaca

SEQ ID NO: 180353 - DNA, 68 bp, Homo sapiens
cccaaagaaagattttaattttttcaaatataaaagtgtctaagagaatcatatgtgaacaaacaaaa

SEQ ID NO: 180354 - DNA, 73 bp, Homo sapiens
gattttaattttttcaaatataaaagtgtctaagagaatcatatgtgaacaaacaaaaatctctgattccaga

SEQ ID NO: 180355 - DNA, 75 bp, Homo sapiens
tcaaatataaaagtgtctaagagaatcatatgtgaacaaacaaaaatctctgattccagatttttaggataaaga

SEQ ID NO: 180356 - DNA, 76 bp, Homo sapiens
aagtgtctaagagaatcatatgtgaacaaacaaaaatctctgattccagatttttaggataaagatgagtaacaca

SEQ ID NO: 180357 - DNA, 79 bp, Homo sapiens
tctaagagaatcatatgtgaacaaacaaaaatctctgattccagatttttaggataaagatgagtaacacactggcagc

SEQ ID NO: 180358 - DNA, 77 bp, Homo sapiens
atatgtgaacaaacaaaaatctctgattccagatttttaggataaagatgagtaacacactggcagctgaagaaagc

SEQ ID NO: 180359 - DNA, 75 bp, Homo sapiens
aaacaaaaatctctgattccagatttttaggataaagatgagtaacacactggcagctgaagaaagctgaaactc

SEQ ID NO: 180360 - DNA, 79 bp, Homo sapiens
tgattccagatttttaggataaagatgagtaacacactggcagctgaagaaagctgaaactctgactaataaatagatc

SEQ ID NO: 180361 - DNA, 76 bp, Homo sapiens
gatttttaggataaagatgagtaacacactggcagctgaagaaagctgaaactctgactaataaatagatccaaat

SEQ ID NO: 180362 - DNA, 76 bp, Homo sapiens
aggataaagatgagtaacacactggcagctgaagaaagctgaaactctgactaataaatagatccaaattaagaat

SEQ ID NO: 180363 - DNA, 75 bp, Homo sapiens
agtaacacactggcagctgaagaaagctgaaactctgactaataaatagatccaaattaagaatttctacaacag

SEQ ID NO: 180364 - DNA, 72 bp, Homo sapiens
actggcagctgaagaaagctgaaactctgactaataaatagatccaaattaagaatttctacaacagttttt

SEQ ID NO: 180365 - DNA, 67 bp, Homo sapiens
gaagaaagctgaaactctgactaataaatagatccaaattaagaatttctacaacagtttttttttt

SEQ ID NO: 180366 - DNA, 73 bp, Homo sapiens
tttttttaaatgatgatcctgtggaatgcctttacttccatattcacctaatattgtaacagtaaaacagaca

SEQ ID NO: 180367 - DNA, 77 bp, Homo sapiens
aatgatgatcctgtggaatgcctttacttccatattcacctaatattgtaacagtaaaacagacacaagaatgttga

SEQ ID NO: 180368 - DNA, 79 bp, Homo sapiens
tgtggaatgcctttacttccatattcacctaatattgtaacagtaaaacagacacaagaatgttgatgacagctcaaca

SEQ ID NO: 180369 - DNA, 78 bp, Homo sapiens
aatgcctttacttccatattcacctaatattgtaacagtaaaacagacacaagaatgttgatgacagctcaacaatgc

SEQ ID NO: 180370 - DNA, 80 bp, Homo sapiens
tttacttccatattcacctaatattgtaacagtaaaacagacacaagaatgttgatgacagctcaacaatgctggattca

SEQ ID NO: 180371 - DNA, 80 bp, Homo sapiens
atattcacctaatattgtaacagtaaaacagacacaagaatgttgatgacagctcaacaatgctggattcaggacattta

SEQ ID NO: 180372 - DNA, 80 bp, Homo sapiens
attcacctaatattgtaacagtaaaacagacacaagaatgttgatgacagctcaacaatgctggattcaggacatttaca

SEQ ID NO: 180373 - DNA, 80 bp, Homo sapiens
ctaatattgtaacagtaaaacagacacaagaatgttgatgacagctcaacaatgctggattcaggacatttacaggtaca

SEQ ID NO: 180374 - DNA, 78 bp, Homo sapiens
ttgtaacagtaaaacagacacaagaatgttgatgacagctcaacaatgctggattcaggacatttacaggtacacttt

SEQ ID NO: 180375 - DNA, 77 bp, Homo sapiens
agtaaaacagacacaagaatgttgatgacagctcaacaatgctggattcaggacatttacaggtacacttttgttta

SEQ ID NO: 180376 - DNA, 77 bp, Homo sapiens
taaaacagacacaagaatgttgatgacagctcaacaatgctggattcaggacatttacaggtacacttttgtttaaa

SEQ ID NO: 180377 - DNA, 71 bp, Homo sapiens
gattcaggacatttacaggtacacttttgtttaaaagtcctacaagtttattgactaaggctagacagcaa

SEQ ID NO: 180378 - DNA, 73 bp, Homo sapiens
catttacaggtacacttttgtttaaaagtcctacaagtttattgactaaggctagacagcaattcatatgatc

SEQ ID NO: 180379 - DNA, 74 bp, Homo sapiens
cacttttgtttaaaagtcctacaagtttattgactaaggctagacagcaattcatatgatcctatttggtgcat

SEQ ID NO: 180380 - DNA, 76 bp, Homo sapiens
ttaaaagtcctacaagtttattgactaaggctagacagcaattcatatgatcctatttggtgcattttctaccatg

SEQ ID NO: 180381 - DNA, 82 bp, Homo sapiens
aaggctagacagcaattcatatgatcctatttggtgcattttctaccatggtccaagatcattacatggatacagccaagga

SEQ ID NO: 180382 - DNA, 80 bp, Homo sapiens
agcaattcatatgatcctatttggtgcattttctaccatggtccaagatcattacatggatacagccaaggactgggccc

SEQ ID NO: 180383 - DNA, 76 bp, Homo sapiens
atcctatttggtgcattttctaccatggtccaagatcattacatggatacagccaaggactgggccccaactttca

SEQ ID NO: 180384 - DNA, 74 bp, Homo sapiens
ttctaccatggtccaagatcattacatggatacagccaaggactgggccccaactttcaggaaaaagaccacaa

SEQ ID NO: 180385 - DNA, 72 bp, Homo sapiens
tccaagatcattacatggatacagccaaggactgggccccaactttcaggaaaaagaccacaaagaagaaaa

SEQ ID NO: 180386 - DNA, 69 bp, Homo sapiens
attacatggatacagccaaggactgggccccaactttcaggaaaaagaccacaaagaagaaaatcaagg

SEQ ID NO: 180387 - DNA, 69 bp, Homo sapiens
tacagccaaggactgggccccaactttcaggaaaaagaccacaaagaagaaaatcaaggtggctatttg

SEQ ID NO: 180388 - DNA, 65 bp, Homo sapiens
actgggccccaactttcaggaaaaagaccacaaagaagaaaatcaaggtggctatttggtccccc

SEQ ID NO: 180389 - DNA, 67 bp, Homo sapiens
aactttcaggaaaaagaccacaaagaagaaaatcaaggtggctatttggtccccccagttgataatc

SEQ ID NO: 180390 - DNA, 69 bp, Homo sapiens
aaaaagaccacaaagaagaaaatcaaggtggctatttggtccccccagttgataatctgtgtcctggaa

SEQ ID NO: 180391 - DNA, 68 bp, Homo sapiens
aaatcaaggtggctatttggtccccccagttgataatctgtgtcctggaactggaaaaacaaaaggtg

SEQ ID NO: 180392 - DNA, 68 bp, Homo sapiens
ctatttggtccccccagttgataatctgtgtcctggaactggaaaaacaaaaggtggaaaatacagac

SEQ ID NO: 180393 - DNA, 70 bp, Homo sapiens
ccagttgataatctgtgtcctggaactggaaaaacaaaaggtggaaaatacagactgcaacgagttaaag

SEQ ID NO: 180394 - DNA, 69 bp, Homo sapiens
ataatctgtgtcctggaactggaaaaacaaaaggtggaaaatacagactgcaacgagttaaaggacttg

SEQ ID NO: 180395 - DNA, 66 bp, Homo sapiens
tggaactggaaaaacaaaaggtggaaaatacagactgcaacgagttaaaggacttggaaaaagttg

SEQ ID NO: 180396 - DNA, 64 bp, Homo sapiens
aaaacaaaaggtggaaaatacagactgcaacgagttaaaggacttggaaaaagttggtggaaag

SEQ ID NO: 180397 - DNA, 68 bp, Homo sapiens
aaatacagactgcaacgagttaaaggacttggaaaaagttggtggaaagtggcacggtatacgagtaa

SEQ ID NO: 180398 - DNA, 69 bp, Homo sapiens
aaggacttggaaaaagttggtggaaagtggcacggtatacgagtaaggtcactgggcttgggatggcaa

SEQ ID NO: 180399 - DNA, 73 bp, Homo sapiens
aaagttggtggaaagtggcacggtatacgagtaaggtcactgggcttgggatggcaagggtgctgcattgaaa

SEQ ID NO: 180400 - DNA, 75 bp, Homo sapiens
acggtatacgagtaaggtcactgggcttgggatggcaagggtgctgcattgaaagagcatccacgggaccaagta

SEQ ID NO: 180401 - DNA, 79 bp, Homo sapiens
actgggcttgggatggcaagggtgctgcattgaaagagcatccacgggaccaagtacttataatgtctgatggtgtcat

SEQ ID NO: 180402 - DNA, 79 bp, Homo sapiens
tggcaagggtgctgcattgaaagagcatccacgggaccaagtacttataatgtctgatggtgtcattccctcaacgact

SEQ ID NO: 180403 - DNA, 81 bp, Homo sapiens
tgctgcattgaaagagcatccacgggaccaagtacttataatgtctgatggtgtcattccctcaacgacttagaatatctg

SEQ ID NO: 180404 - DNA, 77 bp, Homo sapiens
attgaaagagcatccacgggaccaagtacttataatgtctgatggtgtcattccctcaacgacttagaatatctgta

SEQ ID NO: 180405 - DNA, 76 bp, Homo sapiens
acgggaccaagtacttataatgtctgatggtgtcattccctcaacgacttagaatatctgtatgcgataataaata

SEQ ID NO: 180406 - DNA, 80 bp, Homo sapiens
gtgtcattccctcaacgacttagaatatctgtatgcgataataaatagatcagttatgtaataaggcagtgtgttgaata

SEQ ID NO: 180407 - DNA, 83 bp, Homo sapiens
ttagaatatctgtatgcgataataaatagatcagttatgtaataaggcagtgtgttgaatatgcattcgtcctgtggaatgaa

SEQ ID NO: 180408 - DNA, 81 bp, Homo sapiens
ataataaatagatcagttatgtaataaggcagtgtgttgaatatgcattcgtcctgtggaatgaaccaccacagagagata

SEQ ID NO: 180409 - DNA, 83 bp, Homo sapiens
tgtaataaggcagtgtgttgaatatgcattcgtcctgtggaatgaaccaccacagagagatacatgataccatacacattctt

SEQ ID NO: 180410 - DNA, 80 bp, Homo sapiens
aatatgcattcgtcctgtggaatgaaccaccacagagagatacatgataccatacacattctttgagttttcttgtgttg

SEQ ID NO: 180411 - DNA, 78 bp, Homo sapiens
tgtggaatgaaccaccacagagagatacatgataccatacacattctttgagttttcttgtgttgtgtttgatttgtt

SEQ ID NO: 180412 - DNA, 76 bp, Homo sapiens
aatgaaccaccacagagagatacatgataccatacacattctttgagttttcttgtgttgtgtttgatttgtttgt

SEQ ID NO: 180413 - DNA, 77 bp, Homo sapiens
gagagatacatgataccatacacattctttgagttttcttgtgttgtgtttgatttgtttgttttcaaggctatcca

SEQ ID NO: 180414 - DNA, 76 bp, Homo sapiens
tacatgataccatacacattctttgagttttcttgtgttgtgtttgatttgtttgttttcaaggctatccaggcta

SEQ ID NO: 180415 - DNA, 72 bp, Homo sapiens
atacacattctttgagttttcttgtgttgtgtttgatttgtttgttttcaaggctatccaggctaactcttc

SEQ ID NO: 180416 - DNA, 68 bp, Homo sapiens
ctttgagttttcttgtgttgtgtttgatttgtttgttttcaaggctatccaggctaactcttcccggg

SEQ ID NO: 180417 - DNA, 70 bp, Homo sapiens
ttgtgttgtgtttgatttgtttgttttcaaggctatccaggctaactcttcccggggatttccttggaga

SEQ ID NO: 180418 - DNA, 70 bp, Homo sapiens
tgtttgatttgtttgttttcaaggctatccaggctaactcttcccggggatttccttggagagaagagtg

SEQ ID NO: 180419 - DNA, 70 bp, Homo sapiens
gtttgttttcaaggctatccaggctaactcttcccggggatttccttggagagaagagtggtccgctgag

SEQ ID NO: 180420 - DNA, 71 bp, Homo sapiens
tatccaggctaactcttcccggggatttccttggagagaagagtggtccgctgaggctggtttgctttaac

SEQ ID NO: 180421 - DNA, 69 bp, Homo sapiens
taactcttcccggggatttccttggagagaagagtggtccgctgaggctggtttgctttaacctctcct

SEQ ID NO: 180422 - DNA, 76 bp, Homo sapiens
ttggagagaagagtggtccgctgaggctggtttgctttaacctctcctttatcaagagatgatgactggctttaaa

SEQ ID NO: 180423 - DNA, 74 bp, Homo sapiens
agaagagtggtccgctgaggctggtttgctttaacctctcctttatcaagagatgatgactggctttaaagaaa

SEQ ID NO: 180424 - DNA, 73 bp, Homo sapiens
ctgaggctggtttgctttaacctctcctttatcaagagatgatgactggctttaaagaaaaataaagctgaag

SEQ ID NO: 180425 - DNA, 70 bp, Homo sapiens
ggtttgctttaacctctcctttatcaagagatgatgactggctttaaagaaaaataaagctgaaggttgt

SEQ ID NO: 180426 - DNA, 70 bp, Homo sapiens
tttaacctctcctttatcaagagatgatgactggctttaaagaaaaataaagctgaaggttgtttgattt

SEQ ID NO: 180427 - DNA, 67 bp, Homo sapiens
gatttttattttttcccttttggttgcatcattttgagtgttttcatataaacaacaagaacaaaaa

SEQ ID NO: 180428 - DNA, 69 bp, Homo sapiens
ttttcccttttggttgcatcattttgagtgttttcatataaacaacaagaacaaaaaatcacaaccaaa

SEQ ID NO: 180429 - DNA, 68 bp, Homo sapiens
ccttttggttgcatcattttgagtgttttcatataaacaacaagaacaaaaaatcacaaccaaaaaaa

SEQ ID NO: 180430 - DNA, 73 bp, Homo sapiens
aaaaaaaaacacaatagttcttgatgcatccagttgttatatcctcaggatgttccagatgtttccaggtaac

SEQ ID NO: 180431 - DNA, 77 bp, Homo sapiens
aacacaatagttcttgatgcatccagttgttatatcctcaggatgttccagatgtttccaggtaactctgtagttta

SEQ ID NO: 180432 - DNA, 76 bp, Homo sapiens
ttgatgcatccagttgttatatcctcaggatgttccagatgtttccaggtaactctgtagtttacggactgtggtt

SEQ ID NO: 180433 - DNA, 72 bp, Homo sapiens
atccagttgttatatcctcaggatgttccagatgtttccaggtaactctgtagtttacggactgtggttttg

SEQ ID NO: 180434 - DNA, 75 bp, Homo sapiens
tatatcctcaggatgttccagatgtttccaggtaactctgtagtttacggactgtggttttgtccagcgagcaaa

SEQ ID NO: 180435 - DNA, 74 bp, Homo sapiens
atgttccagatgtttccaggtaactctgtagtttacggactgtggttttgtccagcgagcaaagatcaaaatca

SEQ ID NO: 180436 - DNA, 72 bp, Homo sapiens
agatgtttccaggtaactctgtagtttacggactgtggttttgtccagcgagcaaagatcaaaatcaaatgt

SEQ ID NO: 180437 - DNA, 76 bp, Homo sapiens
taactctgtagtttacggactgtggttttgtccagcgagcaaagatcaaaatcaaatgttgtgtttgtgatatgaa

SEQ ID NO: 180438 - DNA, 76 bp, Homo sapiens
tgtagtttacggactgtggttttgtccagcgagcaaagatcaaaatcaaatgttgtgtttgtgatatgaaagtgtc

SEQ ID NO: 180439 - DNA, 77 bp, Homo sapiens
tgtggttttgtccagcgagcaaagatcaaaatcaaatgttgtgtttgtgatatgaaagtgtccagtttcttctataa

SEQ ID NO: 180440 - DNA, 77 bp, Homo sapiens
tttgtccagcgagcaaagatcaaaatcaaatgttgtgtttgtgatatgaaagtgtccagtttcttctataaggttca

SEQ ID NO: 180441 - DNA, 75 bp, Homo sapiens
aagatcaaaatcaaatgttgtgtttgtgatatgaaagtgtccagtttcttctataaggttcacgatctagaggag

SEQ ID NO: 180442 - DNA, 75 bp, Homo sapiens
aaatcaaatgttgtgtttgtgatatgaaagtgtccagtttcttctataaggttcacgatctagaggagtgaagaa

SEQ ID NO: 180443 - DNA, 74 bp, Homo sapiens
ttgtgtttgtgatatgaaagtgtccagtttcttctataaggttcacgatctagaggagtgaagaagagaaagtt

SEQ ID NO: 180444 - DNA, 73 bp, Homo sapiens
atatgaaagtgtccagtttcttctataaggttcacgatctagaggagtgaagaagagaaagtttgggcaatac

SEQ ID NO: 180445 - DNA, 76 bp, Homo sapiens
aagtcttgaagtttctggaaagggttgtgctaaaaagcatttctcacctgctgcagaatgtgtctttctctcaatg

SEQ ID NO: 180446 - DNA, 76 bp, Homo sapiens
aagtttctggaaagggttgtgctaaaaagcatttctcacctgctgcagaatgtgtctttctctcaatgtcattaac

SEQ ID NO: 180447 - DNA, 78 bp, Homo sapiens
aaagggttgtgctaaaaagcatttctcacctgctgcagaatgtgtctttctctcaatgtcattaaccttctgtgaagc

SEQ ID NO: 180448 - DNA, 81 bp, Homo sapiens
aaaaagcatttctcacctgctgcagaatgtgtctttctctcaatgtcattaaccttctgtgaagctctaccagttcatcta

SEQ ID NO: 180449 - DNA, 84 bp, Homo sapiens
tctcacctgctgcagaatgtgtctttctctcaatgtcattaaccttctgtgaagctctaccagttcatctaggtatgcctgaaa

SEQ ID NO: 180450 - DNA, 82 bp, Homo sapiens
tgcagaatgtgtctttctctcaatgtcattaaccttctgtgaagctctaccagttcatctaggtatgcctgaaagagaagaa

SEQ ID NO: 180451 - DNA, 80 bp, Homo sapiens
atgtgtctttctctcaatgtcattaaccttctgtgaagctctaccagttcatctaggtatgcctgaaagagaagaatgtc

SEQ ID NO: 180452 - DNA, 74 bp, Homo sapiens
aatgtcattaaccttctgtgaagctctaccagttcatctaggtatgcctgaaagagaagaatgtccccgaaaag

SEQ ID NO: 180453 - DNA, 73 bp, Homo sapiens
attaaccttctgtgaagctctaccagttcatctaggtatgcctgaaagagaagaatgtccccgaaaaggacaa

SEQ ID NO: 180454 - DNA, 72 bp, Homo sapiens
aagctctaccagttcatctaggtatgcctgaaagagaagaatgtccccgaaaaggacaagcactttaagtag

SEQ ID NO: 180455 - DNA, 71 bp, Homo sapiens
agttcatctaggtatgcctgaaagagaagaatgtccccgaaaaggacaagcactttaagtagtagttcaaa

SEQ ID NO: 180456 - DNA, 70 bp, Homo sapiens
gcctgaaagagaagaatgtccccgaaaaggacaagcactttaagtagtagttcaaaaataaatgaatatg

SEQ ID NO: 180457 - DNA, 74 bp, Homo sapiens
cgaaaaggacaagcactttaagtagtagttcaaaaataaatgaatatgtaagtaagaacacacaggcagcagca

SEQ ID NO: 180458 - DNA, 74 bp, Homo sapiens
aagcactttaagtagtagttcaaaaataaatgaatatgtaagtaagaacacacaggcagcagcagctggaggtt

SEQ ID NO: 180459 - DNA, 77 bp, Homo sapiens
taagtagtagttcaaaaataaatgaatatgtaagtaagaacacacaggcagcagcagctggaggtttctcattacac

SEQ ID NO: 180460 - DNA, 78 bp, Homo sapiens
aaaataaatgaatatgtaagtaagaacacacaggcagcagcagctggaggtttctcattacaccactctagcccaggc

SEQ ID NO: 180461 - DNA, 84 bp, Homo sapiens
aatgaatatgtaagtaagaacacacaggcagcagcagctggaggtttctcattacaccactctagcccaggctgtgtgcactca

SEQ ID NO: 180462 - DNA, 83 bp, Homo sapiens
taagtaagaacacacaggcagcagcagctggaggtttctcattacaccactctagcccaggctgtgtgcactcagtgcccaaa

SEQ ID NO: 180463 - DNA, 84 bp, Homo sapiens
aggcagcagcagctggaggtttctcattacaccactctagcccaggctgtgtgcactcagtgcccaaaggcctctgcagaacaa

SEQ ID NO: 180464 - DNA, 81 bp, Homo sapiens
agctggaggtttctcattacaccactctagcccaggctgtgtgcactcagtgcccaaaggcctctgcagaacaagcctgtc

SEQ ID NO: 180465 - DNA, 80 bp, Homo sapiens
aggtttctcattacaccactctagcccaggctgtgtgcactcagtgcccaaaggcctctgcagaacaagcctgtcttgga

SEQ ID NO: 180466 - DNA, 81 bp, Homo sapiens
attacaccactctagcccaggctgtgtgcactcagtgcccaaaggcctctgcagaacaagcctgtcttggaccagtcatta

SEQ ID NO: 180467 - DNA, 80 bp, Homo sapiens
cccaggctgtgtgcactcagtgcccaaaggcctctgcagaacaagcctgtcttggaccagtcattacctttatcacacca

SEQ ID NO: 180468 - DNA, 79 bp, Homo sapiens
tgtgcactcagtgcccaaaggcctctgcagaacaagcctgtcttggaccagtcattacctttatcacaccaacttcaaa

SEQ ID NO: 180469 - DNA, 73 bp, Homo sapiens
agtgcccaaaggcctctgcagaacaagcctgtcttggaccagtcattacctttatcacaccaacttcaaaaag

SEQ ID NO: 180470 - DNA, 71 bp, Homo sapiens
aaaggcctctgcagaacaagcctgtcttggaccagtcattacctttatcacaccaacttcaaaaagggagt

SEQ ID NO: 180471 - DNA, 70 bp, Homo sapiens
aacaagcctgtcttggaccagtcattacctttatcacaccaacttcaaaaagggagttggagtgaattct

SEQ ID NO: 180472 - DNA, 73 bp, Homo sapiens
tcattacctttatcacaccaacttcaaaaagggagttggagtgaattcttggacttaattgctcttatgaaga

SEQ ID NO: 180473 - DNA, 74 bp, Homo sapiens
tttatcacaccaacttcaaaaagggagttggagtgaattcttggacttaattgctcttatgaagattcaagtca

SEQ ID NO: 180474 - DNA, 73 bp, Homo sapiens
acttcaaaaagggagttggagtgaattcttggacttaattgctcttatgaagattcaagtcagtagactcact

SEQ ID NO: 180475 - DNA, 77 bp, Homo sapiens
agtgaattcttggacttaattgctcttatgaagattcaagtcagtagactcactttcctccaacaatatctctacaa

SEQ ID NO: 180476 - DNA, 73 bp, Homo sapiens
atgaagattcaagtcagtagactcactttcctccaacaatatctctacaaaaggtagggaaattaaatgctaa

SEQ ID NO: 180477 - DNA, 71 bp, Homo sapiens
aagtcagtagactcactttcctccaacaatatctctacaaaaggtagggaaattaaatgctaaattgtgag

SEQ ID NO: 180478 - DNA, 70 bp, Homo sapiens
gactcactttcctccaacaatatctctacaaaaggtagggaaattaaatgctaaattgtgagtttaaaca

SEQ ID NO: 180479 - DNA, 69 bp, Homo sapiens
cctccaacaatatctctacaaaaggtagggaaattaaatgctaaattgtgagtttaaacatattaacaa

SEQ ID NO: 180480 - DNA, 68 bp, Homo sapiens
ctctacaaaaggtagggaaattaaatgctaaattgtgagtttaaacatattaacaaaggctactttca

SEQ ID NO: 180481 - DNA, 65 bp, Homo sapiens
aaaggtagggaaattaaatgctaaattgtgagtttaaacatattaacaaaggctactttcatttt

SEQ ID NO: 180482 - DNA, 71 bp, Homo sapiens
taaatgctaaattgtgagtttaaacatattaacaaaggctactttcatttttttttcattcttgaatctca

SEQ ID NO: 180483 - DNA, 70 bp, Homo sapiens
tgtgagtttaaacatattaacaaaggctactttcatttttttttcattcttgaatctcagaaggtttcta

SEQ ID NO: 180484 - DNA, 68 bp, Homo sapiens
aacatattaacaaaggctactttcatttttttttcattcttgaatctcagaaggtttctaagagaaaa

SEQ ID NO: 180485 - DNA, 68 bp, Homo sapiens
catttttttttcattcttgaatctcagaaggtttctaagagaaaaaaattctaagtttgaacatggaa

SEQ ID NO: 180486 - DNA, 71 bp, Homo sapiens
tgaatctcagaaggtttctaagagaaaaaaattctaagtttgaacatggaaacaagaatgtacattaccaa

SEQ ID NO: 180487 - DNA, 68 bp, Homo sapiens
tttctaagagaaaaaaattctaagtttgaacatggaaacaagaatgtacattaccaattaagtcaggg

SEQ ID NO: 180488 - DNA, 67 bp, Homo sapiens
gaaaaaaattctaagtttgaacatggaaacaagaatgtacattaccaattaagtcaggggaattttg

SEQ ID NO: 180489 - DNA, 67 bp, Homo sapiens
attctaagtttgaacatggaaacaagaatgtacattaccaattaagtcaggggaattttgtggggtt

SEQ ID NO: 180490 - DNA, 68 bp, Homo sapiens
tgaacatggaaacaagaatgtacattaccaattaagtcaggggaattttgtggggtttttcctgtttg

SEQ ID NO: 180491 - DNA, 73 bp, Homo sapiens
tttgtttttgttttaaaaaggcttcctggtcataccaaacattgctagtaagcaatgccagcaagtgacagaa

SEQ ID NO: 180492 - DNA, 75 bp, Homo sapiens
tttgttttaaaaaggcttcctggtcataccaaacattgctagtaagcaatgccagcaagtgacagaagaacagaa

SEQ ID NO: 180493 - DNA, 78 bp, Homo sapiens
gcttcctggtcataccaaacattgctagtaagcaatgccagcaagtgacagaagaacagaagaatgtattacgaaaaa

SEQ ID NO: 180494 - DNA, 79 bp, Homo sapiens
gtcataccaaacattgctagtaagcaatgccagcaagtgacagaagaacagaagaatgtattacgaaaaacagggatca

SEQ ID NO: 180495 - DNA, 80 bp, Homo sapiens
taagcaatgccagcaagtgacagaagaacagaagaatgtattacgaaaaacagggatcactatctaattatcatctgatt

SEQ ID NO: 180496 - DNA, 77 bp, Homo sapiens
gaagaacagaagaatgtattacgaaaaacagggatcactatctaattatcatctgatttgtgaagagctcccctgaa

SEQ ID NO: 180497 - DNA, 73 bp, Homo sapiens
gtattacgaaaaacagggatcactatctaattatcatctgatttgtgaagagctcccctgaaaggggagaggg

SEQ ID NO: 180498 - DNA, 73 bp, Homo sapiens
acagggatcactatctaattatcatctgatttgtgaagagctcccctgaaaggggagagggggtacctctctt

SEQ ID NO: 180499 - DNA, 76 bp, Homo sapiens
actatctaattatcatctgatttgtgaagagctcccctgaaaggggagagggggtacctctctttccatatgctca

SEQ ID NO: 180500 - DNA, 77 bp, Homo sapiens
ttatcatctgatttgtgaagagctcccctgaaaggggagagggggtacctctctttccatatgctcagactcacgag

SEQ ID NO: 180501 - DNA, 74 bp, Homo sapiens
ttgtgaagagctcccctgaaaggggagagggggtacctctctttccatatgctcagactcacgagtctttgtta

SEQ ID NO: 180502 - DNA, 74 bp, Homo sapiens
ccctgaaaggggagagggggtacctctctttccatatgctcagactcacgagtctttgttagtgtaactgcatg

SEQ ID NO: 180503 - DNA, 74 bp, Homo sapiens
aaaggggagagggggtacctctctttccatatgctcagactcacgagtctttgttagtgtaactgcatgggtgc

SEQ ID NO: 180504 - DNA, 80 bp, Homo sapiens
tacctctctttccatatgctcagactcacgagtctttgttagtgtaactgcatgggtgcccccagcaccatttgcgataa

SEQ ID NO: 180505 - DNA, 77 bp, Homo sapiens
tcagactcacgagtctttgttagtgtaactgcatgggtgcccccagcaccatttgcgataaaggcaaatgaaagatt

SEQ ID NO: 180506 - DNA, 77 bp, Homo sapiens
ttgttagtgtaactgcatgggtgcccccagcaccatttgcgataaaggcaaatgaaagatttgtgaaacattacaga

SEQ ID NO: 180507 - DNA, 76 bp, Homo sapiens
aactgcatgggtgcccccagcaccatttgcgataaaggcaaatgaaagatttgtgaaacattacagaggtctgccc

SEQ ID NO: 180508 - DNA, 77 bp, Homo sapiens
cccagcaccatttgcgataaaggcaaatgaaagatttgtgaaacattacagaggtctgccctggccctacagagcaa

SEQ ID NO: 180509 - DNA, 74 bp, Homo sapiens
atttgcgataaaggcaaatgaaagatttgtgaaacattacagaggtctgccctggccctacagagcaaggttag

SEQ ID NO: 180510 - DNA, 75 bp, Homo sapiens
ataaaggcaaatgaaagatttgtgaaacattacagaggtctgccctggccctacagagcaaggttagggctctgc

SEQ ID NO: 180511 - DNA, 74 bp, Homo sapiens
aatgaaagatttgtgaaacattacagaggtctgccctggccctacagagcaaggttagggctctgcccaaacca

SEQ ID NO: 180512 - DNA, 74 bp, Homo sapiens
ttgtgaaacattacagaggtctgccctggccctacagagcaaggttagggctctgcccaaaccaggcaacttaa

SEQ ID NO: 180513 - DNA, 72 bp, Homo sapiens
ttacagaggtctgccctggccctacagagcaaggttagggctctgcccaaaccaggcaacttaaccccacca

SEQ ID NO: 180514 - DNA, 71 bp, Homo sapiens
ctggccctacagagcaaggttagggctctgcccaaaccaggcaacttaaccccaccaggtgttgtagtcag

SEQ ID NO: 180515 - DNA, 70 bp, Homo sapiens
agagcaaggttagggctctgcccaaaccaggcaacttaaccccaccaggtgttgtagtcaggtttcagaa

SEQ ID NO: 180516 - DNA, 71 bp, Homo sapiens
aaggttagggctctgcccaaaccaggcaacttaaccccaccaggtgttgtagtcaggtttcagaagcatga

SEQ ID NO: 180517 - DNA, 90 bp, Homo sapiens
aagcatgacgcacactctgggaaagcacactgcactagcatcagatgtcttgctcatctacatctgagattccttaatattctatctcta

SEQ ID NO: 180518 - DNA, 86 bp, Homo sapiens
acactctgggaaagcacactgcactagcatcagatgtcttgctcatctacatctgagattccttaatattctatctctaccacaat

SEQ ID NO: 180519 - DNA, 85 bp, Homo sapiens
aaagcacactgcactagcatcagatgtcttgctcatctacatctgagattccttaatattctatctctaccacaattctcttaat

SEQ ID NO: 180520 - DNA, 84 bp, Homo sapiens
cactagcatcagatgtcttgctcatctacatctgagattccttaatattctatctctaccacaattctcttaattcccaattca

SEQ ID NO: 180521 - DNA, 83 bp, Homo sapiens
atcagatgtcttgctcatctacatctgagattccttaatattctatctctaccacaattctcttaattcccaattcaatgtgc

SEQ ID NO: 180522 - DNA, 81 bp, Homo sapiens
tcttgctcatctacatctgagattccttaatattctatctctaccacaattctcttaattcccaattcaatgtgcctgaaa

SEQ ID NO: 180523 - DNA, 77 bp, Homo sapiens
tctgagattccttaatattctatctctaccacaattctcttaattcccaattcaatgtgcctgaaatcccttggcaa

SEQ ID NO: 180524 - DNA, 74 bp, Homo sapiens
ttccttaatattctatctctaccacaattctcttaattcccaattcaatgtgcctgaaatcccttggcaacgta

SEQ ID NO: 180525 - DNA, 79 bp, Homo sapiens
tattctatctctaccacaattctcttaattcccaattcaatgtgcctgaaatcccttggcaacgtaggcatcatggcaa

SEQ ID NO: 180526 - DNA, 80 bp, Homo sapiens
taccacaattctcttaattcccaattcaatgtgcctgaaatcccttggcaacgtaggcatcatggcaaatgacagcataa

SEQ ID NO: 180527 - DNA, 80 bp, Homo sapiens
taattcccaattcaatgtgcctgaaatcccttggcaacgtaggcatcatggcaaatgacagcataaggccaagcttaata

SEQ ID NO: 180528 - DNA, 81 bp, Homo sapiens
aattcaatgtgcctgaaatcccttggcaacgtaggcatcatggcaaatgacagcataaggccaagcttaatactgaagata

SEQ ID NO: 180529 - DNA, 80 bp, Homo sapiens
ttggcaacgtaggcatcatggcaaatgacagcataaggccaagcttaatactgaagatataaacaacacatggaaaacaa

SEQ ID NO: 180530 - DNA, 77 bp, Homo sapiens
aacgtaggcatcatggcaaatgacagcataaggccaagcttaatactgaagatataaacaacacatggaaaacaaac

SEQ ID NO: 180531 - DNA, 77 bp, Homo sapiens
atggcaaatgacagcataaggccaagcttaatactgaagatataaacaacacatggaaaacaaactacaaagcactg

SEQ ID NO: 180532 - DNA, 75 bp, Homo sapiens
atataaacaacacatggaaaacaaactacaaagcactgggatgaaatactcatcatttgggcatcttggacactt

SEQ ID NO: 180533 - DNA, 76 bp, Homo sapiens
acatggaaaacaaactacaaagcactgggatgaaatactcatcatttgggcatcttggacactttgatgaagaaaa

SEQ ID NO: 180534 - DNA, 76 bp, Homo sapiens
aacaaactacaaagcactgggatgaaatactcatcatttgggcatcttggacactttgatgaagaaaatgaaagga

SEQ ID NO: 180535 - DNA, 80 bp, Homo sapiens
actgggatgaaatactcatcatttgggcatcttggacactttgatgaagaaaatgaaaggagaaccagcaaggatgatca

SEQ ID NO: 180536 - DNA, 78 bp, Homo sapiens
aaatactcatcatttgggcatcttggacactttgatgaagaaaatgaaaggagaaccagcaaggatgatcaagggcaa

SEQ ID NO: 180537 - DNA, 76 bp, Homo sapiens
atttgggcatcttggacactttgatgaagaaaatgaaaggagaaccagcaaggatgatcaagggcaacacaaagaa

SEQ ID NO: 180538 - DNA, 74 bp, Homo sapiens
atcttggacactttgatgaagaaaatgaaaggagaaccagcaaggatgatcaagggcaacacaaagaaacggaa

SEQ ID NO: 180539 - DNA, 74 bp, Homo sapiens
actttgatgaagaaaatgaaaggagaaccagcaaggatgatcaagggcaacacaaagaaacggaaggcttgtca

SEQ ID NO: 180540 - DNA, 73 bp, Homo sapiens
aaatgaaaggagaaccagcaaggatgatcaagggcaacacaaagaaacggaaggcttgtcagtgttggagccc

SEQ ID NO: 180541 - DNA, 74 bp, Homo sapiens
agaaccagcaaggatgatcaagggcaacacaaagaaacggaaggcttgtcagtgttggagccctcctagtaaca

SEQ ID NO: 180542 - DNA, 73 bp, Homo sapiens
aaggatgatcaagggcaacacaaagaaacggaaggcttgtcagtgttggagccctcctagtaacagactagaa

SEQ ID NO: 180543 - DNA, 69 bp, Homo sapiens
aagggcaacacaaagaaacggaaggcttgtcagtgttggagccctcctagtaacagactagaaacctac

SEQ ID NO: 180544 - DNA, 71 bp, Homo sapiens
aaagaaacggaaggcttgtcagtgttggagccctcctagtaacagactagaaacctaccttgtcacattca

SEQ ID NO: 180545 - DNA, 72 bp, Homo sapiens
aaggcttgtcagtgttggagccctcctagtaacagactagaaacctaccttgtcacattcaccattctttat

SEQ ID NO: 180546 - DNA, 73 bp, Homo sapiens
agccctcctagtaacagactagaaacctaccttgtcacattcaccattctttatttgcttatctgatttgctt

SEQ ID NO: 180547 - DNA, 74 bp, Homo sapiens
ctagtaacagactagaaacctaccttgtcacattcaccattctttatttgcttatctgatttgctttgctttat

SEQ ID NO: 180548 - DNA, 77 bp, Homo sapiens
tgtcacattcaccattctttatttgcttatctgatttgctttgctttattggacttttcacttcaagaatctaggga

SEQ ID NO: 180549 - DNA, 75 bp, Homo sapiens
caccattctttatttgcttatctgatttgctttgctttattggacttttcacttcaagaatctagggatcaaaga

SEQ ID NO: 180550 - DNA, 72 bp, Homo sapiens
ctgatttgctttgctttattggacttttcacttcaagaatctagggatcaaagagaacgctgtgttaaattt

SEQ ID NO: 180551 - DNA, 71 bp, Homo sapiens
ttgctttgctttattggacttttcacttcaagaatctagggatcaaagagaacgctgtgttaaattttatt

SEQ ID NO: 180552 - DNA, 75 bp, Homo sapiens
tggacttttcacttcaagaatctagggatcaaagagaacgctgtgttaaattttatttcaagcatctcttagcta

SEQ ID NO: 180553 - DNA, 73 bp, Homo sapiens
atctagggatcaaagagaacgctgtgttaaattttatttcaagcatctcttagctaaccagccacctaaacaa

SEQ ID NO: 180554 - DNA, 74 bp, Homo sapiens
atcaaagagaacgctgtgttaaattttatttcaagcatctcttagctaaccagccacctaaacaaaggcatcca

SEQ ID NO: 180555 - DNA, 76 bp, Homo sapiens
tgtgttaaattttatttcaagcatctcttagctaaccagccacctaaacaaaggcatccactgaatgaaatgtaca

SEQ ID NO: 180556 - DNA, 75 bp, Homo sapiens
ttttatttcaagcatctcttagctaaccagccacctaaacaaaggcatccactgaatgaaatgtacagtaacatt

SEQ ID NO: 180557 - DNA, 76 bp, Homo sapiens
aagcatctcttagctaaccagccacctaaacaaaggcatccactgaatgaaatgtacagtaacatttgctttccaa

SEQ ID NO: 180558 - DNA, 75 bp, Homo sapiens
ttagctaaccagccacctaaacaaaggcatccactgaatgaaatgtacagtaacatttgctttccaaatagcatt

SEQ ID NO: 180559 - DNA, 74 bp, Homo sapiens
acaaaggcatccactgaatgaaatgtacagtaacatttgctttccaaatagcatttcttttctatacattttcc

SEQ ID NO: 180560 - DNA, 74 bp, Homo sapiens
ccactgaatgaaatgtacagtaacatttgctttccaaatagcatttcttttctatacattttccttcttctctc

SEQ ID NO: 180561 - DNA, 71 bp, Homo sapiens
acatttgctttccaaatagcatttcttttctatacattttccttcttctctctaatcttattttccttgga

SEQ ID NO: 180562 - DNA, 71 bp, Homo sapiens
gctttccaaatagcatttcttttctatacattttccttcttctctctaatcttattttccttggaaaatga

SEQ ID NO: 180563 - DNA, 74 bp, Homo sapiens
ccttcttctctctaatcttattttccttggaaaatgaattacttagatctgaaatgctgagtcagaaaagtaga

SEQ ID NO: 180564 - DNA, 74 bp, Homo sapiens
tctctctaatcttattttccttggaaaatgaattacttagatctgaaatgctgagtcagaaaagtagaactaaa

SEQ ID NO: 180565 - DNA, 73 bp, Homo sapiens
aaaaaaaacaacacagttgatgataaggaaattgatctaagcttccaaggctgcttctcttttgcgacaacac

SEQ ID NO: 180566 - DNA, 80 bp, Homo sapiens
aacacagttgatgataaggaaattgatctaagcttccaaggctgcttctcttttgcgacaacactctcaccatatgtata

SEQ ID NO: 180567 - DNA, 83 bp, Homo sapiens
aattgatctaagcttccaaggctgcttctcttttgcgacaacactctcaccatatgtatagcagctgagttatacagagatta

SEQ ID NO: 180568 - DNA, 83 bp, Homo sapiens
tctaagcttccaaggctgcttctcttttgcgacaacactctcaccatatgtatagcagctgagttatacagagattatagttc

SEQ ID NO: 180569 - DNA, 82 bp, Homo sapiens
ctgcttctcttttgcgacaacactctcaccatatgtatagcagctgagttatacagagattatagttccctctggcaagaat

SEQ ID NO: 180570 - DNA, 79 bp, Homo sapiens
tcttttgcgacaacactctcaccatatgtatagcagctgagttatacagagattatagttccctctggcaagaattttt

SEQ ID NO: 180571 - DNA, 77 bp, Homo sapiens
acaacactctcaccatatgtatagcagctgagttatacagagattatagttccctctggcaagaatttttttcctat

SEQ ID NO: 180572 - DNA, 79 bp, Homo sapiens
atatgtatagcagctgagttatacagagattatagttccctctggcaagaatttttttcctattcattctgctgtttca

SEQ ID NO: 180573 - DNA, 81 bp, Homo sapiens
tatagcagctgagttatacagagattatagttccctctggcaagaatttttttcctattcattctgctgtttcagcatgac

SEQ ID NO: 180574 - DNA, 77 bp, Homo sapiens
ttatacagagattatagttccctctggcaagaatttttttcctattcattctgctgtttcagcatgactactagtgt

SEQ ID NO: 180575 - DNA, 78 bp, Homo sapiens
attatagttccctctggcaagaatttttttcctattcattctgctgtttcagcatgactactagtgttcagtatgcta

SEQ ID NO: 180576 - DNA, 79 bp, Homo sapiens
tctggcaagaatttttttcctattcattctgctgtttcagcatgactactagtgttcagtatgctagggatgataaaaa

SEQ ID NO: 180577 - DNA, 77 bp, Homo sapiens
caagaatttttttcctattcattctgctgtttcagcatgactactagtgttcagtatgctagggatgataaaaacaa

SEQ ID NO: 180578 - DNA, 77 bp, Homo sapiens
attctgctgtttcagcatgactactagtgttcagtatgctagggatgataaaaacaaatactcaaatgcccttttta

SEQ ID NO: 180579 - DNA, 75 bp, Homo sapiens
ttcagcatgactactagtgttcagtatgctagggatgataaaaacaaatactcaaatgccctttttagtacctaa

SEQ ID NO: 180580 - DNA, 71 bp, Homo sapiens
ctactagtgttcagtatgctagggatgataaaaacaaatactcaaatgccctttttagtacctaactttca

SEQ ID NO: 180581 - DNA, 71 bp, Homo sapiens
tcagtatgctagggatgataaaaacaaatactcaaatgccctttttagtacctaactttcacattctaaaa

SEQ ID NO: 180582 - DNA, 73 bp, Homo sapiens
gatgataaaaacaaatactcaaatgccctttttagtacctaactttcacattctaaaattactcatatgcaca

SEQ ID NO: 180583 - DNA, 73 bp, Homo sapiens
caaatactcaaatgccctttttagtacctaactttcacattctaaaattactcatatgcacaaaactgataca

SEQ ID NO: 180584 - DNA, 73 bp, Homo sapiens
caaatgccctttttagtacctaactttcacattctaaaattactcatatgcacaaaactgatacagctttgga

SEQ ID NO: 180585 - DNA, 79 bp, Homo sapiens
attactcatatgcacaaaactgatacagctttggaaatgaagatggccgactatcttctgtgttttaagaaatgatgtg

SEQ ID NO: 180586 - DNA, 72 bp, Homo sapiens
aaaactgatacagctttggaaatgaagatggccgactatcttctgtgttttaagaaatgatgtgtttaccct

SEQ ID NO: 180587 - DNA, 70 bp, Homo sapiens
agatggccgactatcttctgtgttttaagaaatgatgtgtttacccttggtaaaacgccaagtgcttttc

SEQ ID NO: 180588 - DNA, 69 bp, Homo sapiens
taagaaatgatgtgtttacccttggtaaaacgccaagtgcttttccttttatctggactgattacaact

SEQ ID NO: 180589 - DNA, 68 bp, Homo sapiens
atgatgtgtttacccttggtaaaacgccaagtgcttttccttttatctggactgattacaacttaagt

SEQ ID NO: 180590 - DNA, 74 bp, Homo sapiens
cgccaagtgcttttccttttatctggactgattacaacttaagttatgaatagctttacatactgtatagaagc

SEQ ID NO: 180591 - DNA, 72 bp, Homo sapiens
ttttccttttatctggactgattacaacttaagttatgaatagctttacatactgtatagaagctttggtgg

SEQ ID NO: 180592 - DNA, 76 bp, Homo sapiens
tatctggactgattacaacttaagttatgaatagctttacatactgtatagaagctttggtgggaagctatgtttc

SEQ ID NO: 180593 - DNA, 74 bp, Homo sapiens
gactgattacaacttaagttatgaatagctttacatactgtatagaagctttggtgggaagctatgtttctact

SEQ ID NO: 180594 - DNA, 71 bp, Homo sapiens
aacttaagttatgaatagctttacatactgtatagaagctttggtgggaagctatgtttctacttaataaa

SEQ ID NO: 180595 - DNA, 73 bp, Homo sapiens
atgaatagctttacatactgtatagaagctttggtgggaagctatgtttctacttaataaaaaggagaagcaa

SEQ ID NO: 180596 - DNA, 71 bp, Homo sapiens
ttacatactgtatagaagctttggtgggaagctatgtttctacttaataaaaaggagaagcaaattattat

SEQ ID NO: 180597 - DNA, 71 bp, Homo sapiens
gaagctttggtgggaagctatgtttctacttaataaaaaggagaagcaaattattatttaataaatgcagc

SEQ ID NO: 180598 - DNA, 75 bp, Homo sapiens
gctatgtttctacttaataaaaaggagaagcaaattattatttaataaatgcagctgatttctttgacagcatct

SEQ ID NO: 180599 - DNA, 75 bp, Homo sapiens
ggagaagcaaattattatttaataaatgcagctgatttctttgacagcatcttcaaaactgaggattaaaaggga

SEQ ID NO: 180600 - DNA, 73 bp, Homo sapiens
tattatttaataaatgcagctgatttctttgacagcatcttcaaaactgaggattaaaagggaagtattttta

SEQ ID NO: 180601 - DNA, 74 bp, Homo sapiens
taaatgcagctgatttctttgacagcatcttcaaaactgaggattaaaagggaagtatttttaaatggtcctca

SEQ ID NO: 180602 - DNA, 65 bp, Homo sapiens
ctgaggattaaaagggaagtatttttaaatggtcctcacttgaaaaagcttgaaaccactaaatt

SEQ ID NO: 180603 - DNA, 69 bp, Homo sapiens
gggaagtatttttaaatggtcctcacttgaaaaagcttgaaaccactaaatttataaatgatgagtgct

SEQ ID NO: 180604 - DNA, 74 bp, Homo sapiens
ttttaaatggtcctcacttgaaaaagcttgaaaccactaaatttataaatgatgagtgcttacacatgtgtata

SEQ ID NO: 180605 - DNA, 74 bp, Homo sapiens
ggtcctcacttgaaaaagcttgaaaccactaaatttataaatgatgagtgcttacacatgtgtataaacacaaa

SEQ ID NO: 180606 - DNA, 72 bp, Homo sapiens
gaaaccactaaatttataaatgatgagtgcttacacatgtgtataaacacaaaaagcaaagtaatttgtctt

SEQ ID NO: 180607 - DNA, 75 bp, Homo sapiens
ttataaatgatgagtgcttacacatgtgtataaacacaaaaagcaaagtaatttgtctttttcattataactcat

SEQ ID NO: 180608 - DNA, 74 bp, Homo sapiens
gcttacacatgtgtataaacacaaaaagcaaagtaatttgtctttttcattataactcattatgaagtgagttg

SEQ ID NO: 180609 - DNA, 72 bp, Homo sapiens
taaacacaaaaagcaaagtaatttgtctttttcattataactcattatgaagtgagttgttataactggaga

SEQ ID NO: 180610 - DNA, 72 bp, Homo sapiens
caaaaagcaaagtaatttgtctttttcattataactcattatgaagtgagttgttataactggagactaata

SEQ ID NO: 180611 - DNA, 72 bp, Homo sapiens
gtaatttgtctttttcattataactcattatgaagtgagttgttataactggagactaatattaaaggagga

SEQ ID NO: 180612 - DNA, 72 bp, Homo sapiens
ctttttcattataactcattatgaagtgagttgttataactggagactaatattaaaggaggaaaatgccaa

SEQ ID NO: 180613 - DNA, 70 bp, Homo sapiens
aactcattatgaagtgagttgttataactggagactaatattaaaggaggaaaatgccaaataaaggacc

SEQ ID NO: 180614 - DNA, 69 bp, Homo sapiens
gaagtgagttgttataactggagactaatattaaaggaggaaaatgccaaataaaggacctaatttatc

SEQ ID NO: 180615 - DNA, 67 bp, Homo sapiens
ctggagactaatattaaaggaggaaaatgccaaataaaggacctaatttatcttaagaggttttata

SEQ ID NO: 180616 - DNA, 66 bp, Homo sapiens
aaaggaggaaaatgccaaataaaggacctaatttatcttaagaggttttatattcctactgttctc

SEQ ID NO: 180617 - DNA, 67 bp, Homo sapiens
aataaaggacctaatttatcttaagaggttttatattcctactgttctctttacccattctgtgccc

SEQ ID NO: 180618 - DNA, 68 bp, Homo sapiens
atttatcttaagaggttttatattcctactgttctctttacccattctgtgccctaacttagtaacac

SEQ ID NO: 180619 - DNA, 70 bp, Homo sapiens
ttttatattcctactgttctctttacccattctgtgccctaacttagtaacacttctgtccacaagttta

SEQ ID NO: 180620 - DNA, 71 bp, Homo sapiens
tgttctctttacccattctgtgccctaacttagtaacacttctgtccacaagtttaccacattccgtaaca

SEQ ID NO: 180621 - DNA, 70 bp, Homo sapiens
tacccattctgtgccctaacttagtaacacttctgtccacaagtttaccacattccgtaacataaagatt

SEQ ID NO: 180622 - DNA, 70 bp, Homo sapiens
tctgtgccctaacttagtaacacttctgtccacaagtttaccacattccgtaacataaagattttaagaa

SEQ ID NO: 180623 - DNA, 69 bp, Homo sapiens
cttagtaacacttctgtccacaagtttaccacattccgtaacataaagattttaagaatgagtccactt

SEQ ID NO: 180624 - DNA, 73 bp, Homo sapiens
tctgtccacaagtttaccacattccgtaacataaagattttaagaatgagtccacttttaatctgtagtggca

SEQ ID NO: 180625 - DNA, 71 bp, Homo sapiens
aagtttaccacattccgtaacataaagattttaagaatgagtccacttttaatctgtagtggcaagagcac

SEQ ID NO: 180626 - DNA, 75 bp, Homo sapiens
attccgtaacataaagattttaagaatgagtccacttttaatctgtagtggcaagagcactgattaggctcagaa

SEQ ID NO: 180627 - DNA, 75 bp, Homo sapiens
attttaagaatgagtccacttttaatctgtagtggcaagagcactgattaggctcagaagcccaagttcaagtcc

SEQ ID NO: 180628 - DNA, 76 bp, Homo sapiens
tccacttttaatctgtagtggcaagagcactgattaggctcagaagcccaagttcaagtcccagccttattattta

SEQ ID NO: 180629 - DNA, 73 bp, Homo sapiens
caagagcactgattaggctcagaagcccaagttcaagtcccagccttattatttaatatttttggaccgcaaa

SEQ ID NO: 180630 - DNA, 72 bp, Homo sapiens
tgattaggctcagaagcccaagttcaagtcccagccttattatttaatatttttggaccgcaaaggatgaaa

SEQ ID NO: 180631 - DNA, 72 bp, Homo sapiens
gttcaagtcccagccttattatttaatatttttggaccgcaaaggatgaaatgggagagatgaacaagataa

SEQ ID NO: 180632 - DNA, 73 bp, Homo sapiens
cagccttattatttaatatttttggaccgcaaaggatgaaatgggagagatgaacaagataagacccagattc

SEQ ID NO: 180633 - DNA, 72 bp, Homo sapiens
accgcaaaggatgaaatgggagagatgaacaagataagacccagattcccattcagctttaacattttttat

SEQ ID NO: 180634 - DNA, 72 bp, Homo sapiens
gaaatgggagagatgaacaagataagacccagattcccattcagctttaacattttttattactaataaaca

SEQ ID NO: 180635 - DNA, 71 bp, Homo sapiens
gagatgaacaagataagacccagattcccattcagctttaacattttttattactaataaacattttactg

SEQ ID NO: 180636 - DNA, 71 bp, Homo sapiens
taagacccagattcccattcagctttaacattttttattactaataaacattttactggatgaggatagga

SEQ ID NO: 180637 - DNA, 73 bp, Homo sapiens
ttcccattcagctttaacattttttattactaataaacattttactggatgaggataggaacatgacatcctg

SEQ ID NO: 180638 - DNA, 71 bp, Homo sapiens
gctttaacattttttattactaataaacattttactggatgaggataggaacatgacatcctggaaaagac

SEQ ID NO: 180639 - DNA, 72 bp, Homo sapiens
attactaataaacattttactggatgaggataggaacatgacatcctggaaaagaccgaatactcctgaagg

SEQ ID NO: 180640 - DNA, 72 bp, Homo sapiens
attttactggatgaggataggaacatgacatcctggaaaagaccgaatactcctgaaggggcatatttttat

SEQ ID NO: 180641 - DNA, 73 bp, Homo sapiens
atgaggataggaacatgacatcctggaaaagaccgaatactcctgaaggggcatatttttattttaattgaga

SEQ ID NO: 180642 - DNA, 74 bp, Homo sapiens
taggaacatgacatcctggaaaagaccgaatactcctgaaggggcatatttttattttaattgagaataatgca

SEQ ID NO: 180643 - DNA, 71 bp, Homo sapiens
catcctggaaaagaccgaatactcctgaaggggcatatttttattttaattgagaataatgcacgagtaaa

SEQ ID NO: 180644 - DNA, 69 bp, Homo sapiens
aagaccgaatactcctgaaggggcatatttttattttaattgagaataatgcacgagtaaaaagtgtcc

SEQ ID NO: 180645 - DNA, 69 bp, Homo sapiens
ctcctgaaggggcatatttttattttaattgagaataatgcacgagtaaaaagtgtccttttaacagtc

SEQ ID NO: 180646 - DNA, 70 bp, Homo sapiens
gggcatatttttattttaattgagaataatgcacgagtaaaaagtgtccttttaacagtctttcctgaca

SEQ ID NO: 180647 - DNA, 70 bp, Homo sapiens
attttaattgagaataatgcacgagtaaaaagtgtccttttaacagtctttcctgacaatcatgcttttt

SEQ ID NO: 180648 - DNA, 73 bp, Homo sapiens
ttgagaataatgcacgagtaaaaagtgtccttttaacagtctttcctgacaatcatgctttttttcatcattt

SEQ ID NO: 180649 - DNA, 72 bp, Homo sapiens
gcacgagtaaaaagtgtccttttaacagtctttcctgacaatcatgctttttttcatcatttttaatatgaa

SEQ ID NO: 180650 - DNA, 73 bp, Homo sapiens
gtgtccttttaacagtctttcctgacaatcatgctttttttcatcatttttaatatgaagataaccaaatgac

SEQ ID NO: 180651 - DNA, 74 bp, Homo sapiens
acagtctttcctgacaatcatgctttttttcatcatttttaatatgaagataaccaaatgactaatttgaccag

SEQ ID NO: 180652 - DNA, 72 bp, Homo sapiens
catgctttttttcatcatttttaatatgaagataaccaaatgactaatttgaccaggctaacttaaaataca

SEQ ID NO: 180653 - DNA, 72 bp, Homo sapiens
catcatttttaatatgaagataaccaaatgactaatttgaccaggctaacttaaaatacaatacttttggca

SEQ ID NO: 180654 - DNA, 71 bp, Homo sapiens
aatatgaagataaccaaatgactaatttgaccaggctaacttaaaatacaatacttttggcaacacaagga

SEQ ID NO: 180655 - DNA, 69 bp, Homo sapiens
gaagataaccaaatgactaatttgaccaggctaacttaaaatacaatacttttggcaacacaaggaaat

SEQ ID NO: 180656 - DNA, 69 bp, Homo sapiens
gactaatttgaccaggctaacttaaaatacaatacttttggcaacacaaggaaattacgtattaacaga

SEQ ID NO: 180657 - DNA, 69 bp, Homo sapiens
accaggctaacttaaaatacaatacttttggcaacacaaggaaattacgtattaacagaggcaaggcaa

SEQ ID NO: 180658 - DNA, 68 bp, Homo sapiens
cttaaaatacaatacttttggcaacacaaggaaattacgtattaacagaggcaaggcaatcgttttta

SEQ ID NO: 180659 - DNA, 72 bp, Homo sapiens
atacaatacttttggcaacacaaggaaattacgtattaacagaggcaaggcaatcgtttttaacatgctcca

SEQ ID NO: 180660 - DNA, 70 bp, Homo sapiens
caacacaaggaaattacgtattaacagaggcaaggcaatcgtttttaacatgctccactgtaaaggaaac

SEQ ID NO: 180661 - DNA, 74 bp, Homo sapiens
tattaacagaggcaaggcaatcgtttttaacatgctccactgtaaaggaaaccaaatactccactacattcaga

SEQ ID NO: 180662 - DNA, 72 bp, Homo sapiens
agaggcaaggcaatcgtttttaacatgctccactgtaaaggaaaccaaatactccactacattcagaatttc

SEQ ID NO: 180663 - DNA, 70 bp, Homo sapiens
aatcgtttttaacatgctccactgtaaaggaaaccaaatactccactacattcagaatttcctcctccat

SEQ ID NO: 180664 - DNA, 71 bp, Homo sapiens
aaaccaaatactccactacattcagaatttcctcctccattgttgttgaaagtgagatctcaagggaaaaa

SEQ ID NO: 180665 - DNA, 75 bp, Homo sapiens
agaatttcctcctccattgttgttgaaagtgagatctcaagggaaaaatcagcgctgagacctaggagcaagtag

SEQ ID NO: 180666 - DNA, 81 bp, Homo sapiens
agtgagatctcaagggaaaaatcagcgctgagacctaggagcaagtaggtcagtagatggcactcctcgccaactcagata

SEQ ID NO: 180667 - DNA, 78 bp, Homo sapiens
aagggaaaaatcagcgctgagacctaggagcaagtaggtcagtagatggcactcctcgccaactcagatactgggctg

SEQ ID NO: 180668 - DNA, 85 bp, Homo sapiens
aatcagcgctgagacctaggagcaagtaggtcagtagatggcactcctcgccaactcagatactgggctgggcatgcagagacaa

SEQ ID NO: 180669 - DNA, 85 bp, Homo sapiens
ctaggagcaagtaggtcagtagatggcactcctcgccaactcagatactgggctgggcatgcagagacaatccgctgagatttca

SEQ ID NO: 180670 - DNA, 84 bp, Homo sapiens
aagtaggtcagtagatggcactcctcgccaactcagatactgggctgggcatgcagagacaatccgctgagatttcaggcaaga

SEQ ID NO: 180671 - DNA, 81 bp, Homo sapiens
agtagatggcactcctcgccaactcagatactgggctgggcatgcagagacaatccgctgagatttcaggcaagaaaaaaa

SEQ ID NO: 180672 - DNA, 77 bp, Homo sapiens
cctgcttgacttgtgcattacagaactgaattttgttcccatcatatcccgctgcctcccacgatcccctcctccaa

SEQ ID NO: 180673 - DNA, 76 bp, Homo sapiens
ttgacttgtgcattacagaactgaattttgttcccatcatatcccgctgcctcccacgatcccctcctccaactcc

SEQ ID NO: 180674 - DNA, 74 bp, Homo sapiens
attacagaactgaattttgttcccatcatatcccgctgcctcccacgatcccctcctccaactcctgtactctg

SEQ ID NO: 180675 - DNA, 72 bp, Homo sapiens
aattttgttcccatcatatcccgctgcctcccacgatcccctcctccaactcctgtactctgggtgttgaag

SEQ ID NO: 180676 - DNA, 76 bp, Homo sapiens
ttcccatcatatcccgctgcctcccacgatcccctcctccaactcctgtactctgggtgttgaagtgacttgagga

SEQ ID NO: 180677 - DNA, 73 bp, Homo sapiens
acgatcccctcctccaactcctgtactctgggtgttgaagtgacttgaggacgctgtatttgcaatagaactt

SEQ ID NO: 180678 - DNA, 75 bp, Homo sapiens
tcctccaactcctgtactctgggtgttgaagtgacttgaggacgctgtatttgcaatagaactttgctaactagg

SEQ ID NO: 180679 - DNA, 73 bp, Homo sapiens
aactcctgtactctgggtgttgaagtgacttgaggacgctgtatttgcaatagaactttgctaactaggttta

SEQ ID NO: 180680 - DNA, 74 bp, Homo sapiens
ggtgttgaagtgacttgaggacgctgtatttgcaatagaactttgctaactaggtttagagagttctgccacct

SEQ ID NO: 180681 - DNA, 74 bp, Homo sapiens
tgttgaagtgacttgaggacgctgtatttgcaatagaactttgctaactaggtttagagagttctgccaccttt

SEQ ID NO: 180682 - DNA, 72 bp, Homo sapiens
aagtgacttgaggacgctgtatttgcaatagaactttgctaactaggtttagagagttctgccaccttttct

SEQ ID NO: 180683 - DNA, 72 bp, Homo sapiens
acttgaggacgctgtatttgcaatagaactttgctaactaggtttagagagttctgccaccttttcttcaaa

SEQ ID NO: 180684 - DNA, 72 bp, Homo sapiens
acgctgtatttgcaatagaactttgctaactaggtttagagagttctgccaccttttcttcaaagcagaaaa

SEQ ID NO: 180685 - DNA, 73 bp, Homo sapiens
ctgtatttgcaatagaactttgctaactaggtttagagagttctgccaccttttcttcaaagcagaaaataga

SEQ ID NO: 180686 - DNA, 71 bp, Homo sapiens
caatagaactttgctaactaggtttagagagttctgccaccttttcttcaaagcagaaaatagaacatttg

SEQ ID NO: 180687 - DNA, 71 bp, Homo sapiens
tagaactttgctaactaggtttagagagttctgccaccttttcttcaaagcagaaaatagaacatttggac

SEQ ID NO: 180688 - DNA, 72 bp, Homo sapiens
tttgctaactaggtttagagagttctgccaccttttcttcaaagcagaaaatagaacatttggacgctgaag

SEQ ID NO: 180689 - DNA, 72 bp, Homo sapiens
taactaggtttagagagttctgccaccttttcttcaaagcagaaaatagaacatttggacgctgaagtccca

SEQ ID NO: 180690 - DNA, 71 bp, Homo sapiens
taggtttagagagttctgccaccttttcttcaaagcagaaaatagaacatttggacgctgaagtcccaccc

SEQ ID NO: 180691 - DNA, 71 bp, Homo sapiens
accttttcttcaaagcagaaaatagaacatttggacgctgaagtcccaccccacacattccgtaagtgcta

SEQ ID NO: 180692 - DNA, 74 bp, Homo sapiens
cagaaaatagaacatttggacgctgaagtcccaccccacacattccgtaagtgctacagcacagaaggccaaaa

SEQ ID NO: 180693 - DNA, 73 bp, Homo sapiens
acgctgaagtcccaccccacacattccgtaagtgctacagcacagaaggccaaaatacattgaaatcctagtt

SEQ ID NO: 180694 - DNA, 72 bp, Homo sapiens
acagaaggccaaaatacattgaaatcctagtttctttcttctgaagttgcagtggcaggaacaaaagctccg

SEQ ID NO: 180695 - DNA, 73 bp, Homo sapiens
acattgaaatcctagtttctttcttctgaagttgcagtggcaggaacaaaagctccgggtgtcagtgacccgc

SEQ ID NO: 180696 - DNA, 74 bp, Homo sapiens
tttctttcttctgaagttgcagtggcaggaacaaaagctccgggtgtcagtgacccgcctcaagttactgagtg

SEQ ID NO: 180697 - DNA, 77 bp, Homo sapiens
ttcttctgaagttgcagtggcaggaacaaaagctccgggtgtcagtgacccgcctcaagttactgagtggctgccca

SEQ ID NO: 180698 - DNA, 75 bp, Homo sapiens
agtggcaggaacaaaagctccgggtgtcagtgacccgcctcaagttactgagtggctgcccagagagggctcagt

SEQ ID NO: 180699 - DNA, 74 bp, Homo sapiens
aacaaaagctccgggtgtcagtgacccgcctcaagttactgagtggctgcccagagagggctcagttaatcttc

SEQ ID NO: 180700 - DNA, 74 bp, Homo sapiens
agctccgggtgtcagtgacccgcctcaagttactgagtggctgcccagagagggctcagttaatcttccttctt

SEQ ID NO: 180701 - DNA, 77 bp, Homo sapiens
tcaagttactgagtggctgcccagagagggctcagttaatcttccttctttgatctctccctgctccaaaataaaca

SEQ ID NO: 180702 - DNA, 78 bp, Homo sapiens
tcagttaatcttccttctttgatctctccctgctccaaaataaacagctttgtcaaaacctcattctgagagagctga

SEQ ID NO: 180703 - DNA, 77 bp, Homo sapiens
taatcttccttctttgatctctccctgctccaaaataaacagctttgtcaaaacctcattctgagagagctgagccc

SEQ ID NO: 180704 - DNA, 80 bp, Homo sapiens
tgatctctccctgctccaaaataaacagctttgtcaaaacctcattctgagagagctgagccctgctgaagacaattgtt

SEQ ID NO: 180705 - DNA, 77 bp, Homo sapiens
aaataaacagctttgtcaaaacctcattctgagagagctgagccctgctgaagacaattgttttatttatgatcatt

SEQ ID NO: 180706 - DNA, 78 bp, Homo sapiens
ctttgtcaaaacctcattctgagagagctgagccctgctgaagacaattgttttatttatgatcatttcttatcttta

SEQ ID NO: 180707 - DNA, 72 bp, Homo sapiens
gagccctgctgaagacaattgttttatttatgatcatttcttatctttagggaaacaactccagaataaaaa

SEQ ID NO: 180708 - DNA, 69 bp, Homo sapiens
gacaattgttttatttatgatcatttcttatctttagggaaacaactccagaataaaaaagtacaacac

SEQ ID NO: 180709 - DNA, 71 bp, Homo sapiens
tatttatgatcatttcttatctttagggaaacaactccagaataaaaaagtacaacaccttgtcttccaca

SEQ ID NO: 180710 - DNA, 70 bp, Homo sapiens
gatcatttcttatctttagggaaacaactccagaataaaaaagtacaacaccttgtcttccacaggctta

SEQ ID NO: 180711 - DNA, 67 bp, Homo sapiens
cttatctttagggaaacaactccagaataaaaaagtacaacaccttgtcttccacaggcttatttta

SEQ ID NO: 180712 - DNA, 65 bp, Homo sapiens
gggaaacaactccagaataaaaaagtacaacaccttgtcttccacaggcttattttaaaccagtt

SEQ ID NO: 180713 - DNA, 68 bp, Homo sapiens
cagaataaaaaagtacaacaccttgtcttccacaggcttattttaaaccagtttaactggatagactc

SEQ ID NO: 180714 - DNA, 66 bp, Homo sapiens
aaaagtacaacaccttgtcttccacaggcttattttaaaccagtttaactggatagactcttttta

SEQ ID NO: 180715 - DNA, 73 bp, Homo sapiens
tgtcttccacaggcttattttaaaccagtttaactggatagactctttttaatttcattcaacatgccttgca

SEQ ID NO: 180716 - DNA, 72 bp, Homo sapiens
aggcttattttaaaccagtttaactggatagactctttttaatttcattcaacatgccttgcaggctgatag

SEQ ID NO: 180717 - DNA, 76 bp, Homo sapiens
taaaccagtttaactggatagactctttttaatttcattcaacatgccttgcaggctgataggtgatttatgatat

SEQ ID NO: 180718 - DNA, 76 bp, Homo sapiens
atagactctttttaatttcattcaacatgccttgcaggctgataggtgatttatgatattctgaatattaacccgg

SEQ ID NO: 180719 - DNA, 76 bp, Homo sapiens
tttttaatttcattcaacatgccttgcaggctgataggtgatttatgatattctgaatattaacccgggtccaatg

SEQ ID NO: 180720 - DNA, 78 bp, Homo sapiens
attcaacatgccttgcaggctgataggtgatttatgatattctgaatattaacccgggtccaatggatcacttccttc

SEQ ID NO: 180721 - DNA, 70 bp, Homo sapiens
atttatgatattctgaatattaacccgggtccaatggatcacttccttccttcaagtcctttctcccctc

SEQ ID NO: 180722 - DNA, 70 bp, Homo sapiens
cgggtccaatggatcacttccttccttcaagtcctttctcccctccctccctgccaagcttctggctaaa

SEQ ID NO: 180723 - DNA, 68 bp, Homo sapiens
ttccttccttcaagtcctttctcccctccctccctgccaagcttctggctaaaaaagatgtggtattt

SEQ ID NO: 180724 - DNA, 66 bp, Homo sapiens
aagtcctttctcccctccctccctgccaagcttctggctaaaaaagatgtggtattttgtttttgt

SEQ ID NO: 180725 - DNA, 70 bp, Homo sapiens
ttgtttttgtttgaaattcacataagggaggtttggagtgaaaaaaccatctctggttgaaatgacgcaa

SEQ ID NO: 180726 - DNA, 72 bp, Homo sapiens
tgaaattcacataagggaggtttggagtgaaaaaaccatctctggttgaaatgacgcaacactctttattat

SEQ ID NO: 180727 - DNA, 69 bp, Homo sapiens
ataagggaggtttggagtgaaaaaaccatctctggttgaaatgacgcaacactctttattattacctat

SEQ ID NO: 180728 - DNA, 69 bp, Homo sapiens
ggaggtttggagtgaaaaaaccatctctggttgaaatgacgcaacactctttattattacctattaaat

SEQ ID NO: 180729 - DNA, 74 bp, Homo sapiens
aaaaaccatctctggttgaaatgacgcaacactctttattattacctattaaattgtactgagagaagcagagc

SEQ ID NO: 180730 - DNA, 76 bp, Homo sapiens
atctctggttgaaatgacgcaacactctttattattacctattaaattgtactgagagaagcagagctacctagac

SEQ ID NO: 180731 - DNA, 78 bp, Homo sapiens
ttgaaatgacgcaacactctttattattacctattaaattgtactgagagaagcagagctacctagactgcctagcta

SEQ ID NO: 180732 - DNA, 76 bp, Homo sapiens
actctttattattacctattaaattgtactgagagaagcagagctacctagactgcctagctactccatttataga

SEQ ID NO: 180733 - DNA, 79 bp, Homo sapiens
ttattattacctattaaattgtactgagagaagcagagctacctagactgcctagctactccatttatagatacagcag

SEQ ID NO: 180734 - DNA, 82 bp, Homo sapiens
tattaaattgtactgagagaagcagagctacctagactgcctagctactccatttatagatacagcagtctctgaaaataga

SEQ ID NO: 180735 - DNA, 79 bp, Homo sapiens
agcagagctacctagactgcctagctactccatttatagatacagcagtctctgaaaatagaagaattgtggtttagta

SEQ ID NO: 180736 - DNA, 78 bp, Homo sapiens
tagactgcctagctactccatttatagatacagcagtctctgaaaatagaagaattgtggtttagtagcacttttgtc

SEQ ID NO: 180737 - DNA, 75 bp, Homo sapiens
cctagctactccatttatagatacagcagtctctgaaaatagaagaattgtggtttagtagcacttttgtcttta

SEQ ID NO: 180738 - DNA, 75 bp, Homo sapiens
ccatttatagatacagcagtctctgaaaatagaagaattgtggtttagtagcacttttgtctttaatctgagaaa

SEQ ID NO: 180739 - DNA, 74 bp, Homo sapiens
gcagtctctgaaaatagaagaattgtggtttagtagcacttttgtctttaatctgagaaaatgtcttgacaaac

SEQ ID NO: 180740 - DNA, 72 bp, Homo sapiens
gaagaattgtggtttagtagcacttttgtctttaatctgagaaaatgtcttgacaaacgttcaagattatat

SEQ ID NO: 180741 - DNA, 71 bp, Homo sapiens
ggtttagtagcacttttgtctttaatctgagaaaatgtcttgacaaacgttcaagattatatttttctgta

SEQ ID NO: 180742 - DNA, 73 bp, Homo sapiens
tagtagcacttttgtctttaatctgagaaaatgtcttgacaaacgttcaagattatatttttctgtatcactt

SEQ ID NO: 180743 - DNA, 74 bp, Homo sapiens
gcacttttgtctttaatctgagaaaatgtcttgacaaacgttcaagattatatttttctgtatcactttatgaa

SEQ ID NO: 180744 - DNA, 75 bp, Homo sapiens
gtctttaatctgagaaaatgtcttgacaaacgttcaagattatatttttctgtatcactttatgaagaatgacaa

SEQ ID NO: 180745 - DNA, 76 bp, Homo sapiens
gagaaaatgtcttgacaaacgttcaagattatatttttctgtatcactttatgaagaatgacaactcagttattca

SEQ ID NO: 180746 - DNA, 78 bp, Homo sapiens
atgtcttgacaaacgttcaagattatatttttctgtatcactttatgaagaatgacaactcagttattcacagatgga

SEQ ID NO: 180747 - DNA, 77 bp, Homo sapiens
gtcttgacaaacgttcaagattatatttttctgtatcactttatgaagaatgacaactcagttattcacagatggat

SEQ ID NO: 180748 - DNA, 79 bp, Homo sapiens
tgacaaacgttcaagattatatttttctgtatcactttatgaagaatgacaactcagttattcacagatggattctcta

SEQ ID NO: 180749 - DNA, 80 bp, Homo sapiens
cgttcaagattatatttttctgtatcactttatgaagaatgacaactcagttattcacagatggattctctactgataga

SEQ ID NO: 180750 - DNA, 81 bp, Homo sapiens
tatttttctgtatcactttatgaagaatgacaactcagttattcacagatggattctctactgatagatctttcatactaa

SEQ ID NO: 180751 - DNA, 84 bp, Homo sapiens
ttctgtatcactttatgaagaatgacaactcagttattcacagatggattctctactgatagatctttcatactaatgacagta

SEQ ID NO: 180752 - DNA, 81 bp, Homo sapiens
caactcagttattcacagatggattctctactgatagatctttcatactaatgacagtagctcccaacagtactcaggtta

SEQ ID NO: 180753 - DNA, 79 bp, Homo sapiens
ttattcacagatggattctctactgatagatctttcatactaatgacagtagctcccaacagtactcaggttaattact

SEQ ID NO: 180754 - DNA, 78 bp, Homo sapiens
agatggattctctactgatagatctttcatactaatgacagtagctcccaacagtactcaggttaattacttgcttgg

SEQ ID NO: 180755 - DNA, 76 bp, Homo sapiens
atctttcatactaatgacagtagctcccaacagtactcaggttaattacttgcttggttgacgtgtgactctatgt

SEQ ID NO: 180756 - DNA, 75 bp, Homo sapiens
taatgacagtagctcccaacagtactcaggttaattacttgcttggttgacgtgtgactctatgttcacttttat

SEQ ID NO: 180757 - DNA, 74 bp, Homo sapiens
ctcccaacagtactcaggttaattacttgcttggttgacgtgtgactctatgttcacttttattcagtatgaaa

SEQ ID NO: 180758 - DNA, 73 bp, Homo sapiens
aacagtactcaggttaattacttgcttggttgacgtgtgactctatgttcacttttattcagtatgaaaatat

SEQ ID NO: 180759 - DNA, 74 bp, Homo sapiens
aattacttgcttggttgacgtgtgactctatgttcacttttattcagtatgaaaatatttgactccattagtac

SEQ ID NO: 180760 - DNA, 74 bp, Homo sapiens
cttgcttggttgacgtgtgactctatgttcacttttattcagtatgaaaatatttgactccattagtacttccc

SEQ ID NO: 180761 - DNA, 73 bp, Homo sapiens
acgtgtgactctatgttcacttttattcagtatgaaaatatttgactccattagtacttcccctcttctctag

SEQ ID NO: 180762 - DNA, 72 bp, Homo sapiens
tgttcacttttattcagtatgaaaatatttgactccattagtacttcccctcttctctagtccctggaagat

SEQ ID NO: 180763 - DNA, 71 bp, Homo sapiens
acttttattcagtatgaaaatatttgactccattagtacttcccctcttctctagtccctggaagatttga

SEQ ID NO: 180764 - DNA, 71 bp, Homo sapiens
agtatgaaaatatttgactccattagtacttcccctcttctctagtccctggaagatttgagaaaaggcaa

SEQ ID NO: 180765 - DNA, 74 bp, Homo sapiens
tatttgactccattagtacttcccctcttctctagtccctggaagatttgagaaaaggcaatggacatttcagc

SEQ ID NO: 180766 - DNA, 72 bp, Homo sapiens
attagtacttcccctcttctctagtccctggaagatttgagaaaaggcaatggacatttcagctttgcctgg

SEQ ID NO: 180767 - DNA, 78 bp, Homo sapiens
tcttctctagtccctggaagatttgagaaaaggcaatggacatttcagctttgcctggtgctttatcaaactcagaga

SEQ ID NO: 180768 - DNA, 79 bp, Homo sapiens
tccctggaagatttgagaaaaggcaatggacatttcagctttgcctggtgctttatcaaactcagagatcattatcaat

SEQ ID NO: 180769 - DNA, 81 bp, Homo sapiens
aagatttgagaaaaggcaatggacatttcagctttgcctggtgctttatcaaactcagagatcattatcaattcatagaga

SEQ ID NO: 180770 - DNA, 80 bp, Homo sapiens
tttgcctggtgctttatcaaactcagagatcattatcaattcatagagagagaacaggcaaggagtatggaaggaggaaa

SEQ ID NO: 180771 - DNA, 79 bp, Homo sapiens
ctttatcaaactcagagatcattatcaattcatagagagagaacaggcaaggagtatggaaggaggaaactcaagagtg

SEQ ID NO: 180772 - DNA, 78 bp, Homo sapiens
actcagagatcattatcaattcatagagagagaacaggcaaggagtatggaaggaggaaactcaagagtgttcccatt

SEQ ID NO: 180773 - DNA, 73 bp, Homo sapiens
aattcatagagagagaacaggcaaggagtatggaaggaggaaactcaagagtgttcccatttcggagttagtc

SEQ ID NO: 180774 - DNA, 70 bp, Homo sapiens
aaggagtatggaaggaggaaactcaagagtgttcccatttcggagttagtccttccaagtatgttctcaa

SEQ ID NO: 180775 - DNA, 69 bp, Homo sapiens
aggaggaaactcaagagtgttcccatttcggagttagtccttccaagtatgttctcaactctttattaa

SEQ ID NO: 180776 - DNA, 72 bp, Homo sapiens
tcaagagtgttcccatttcggagttagtccttccaagtatgttctcaactctttattaatcgtgaaaattca

SEQ ID NO: 180777 - DNA, 70 bp, Homo sapiens
agtgttcccatttcggagttagtccttccaagtatgttctcaactctttattaatcgtgaaaattcagat

SEQ ID NO: 180778 - DNA, 73 bp, Homo sapiens
ttcggagttagtccttccaagtatgttctcaactctttattaatcgtgaaaattcagattcatactctttctc

SEQ ID NO: 180779 - DNA, 74 bp, Homo sapiens
agtccttccaagtatgttctcaactctttattaatcgtgaaaattcagattcatactctttctctatccctgtc

SEQ ID NO: 180780 - DNA, 74 bp, Homo sapiens
agtatgttctcaactctttattaatcgtgaaaattcagattcatactctttctctatccctgtctctctccccc

SEQ ID NO: 180781 - DNA, 71 bp, Homo sapiens
aactctttattaatcgtgaaaattcagattcatactctttctctatccctgtctctctccccctacttttc

SEQ ID NO: 180782 - DNA, 72 bp, Homo sapiens
ttaatcgtgaaaattcagattcatactctttctctatccctgtctctctccccctacttttctccctccctc

SEQ ID NO: 180783 - DNA, 75 bp, Homo sapiens
aaattcagattcatactctttctctatccctgtctctctccccctacttttctccctccctcctgcgcacacaca

SEQ ID NO: 180784 - DNA, 69 bp, Homo sapiens
cacacattcaaatacgactaaaaagtcattccagagtgaaatttagttgacttttagatttttaagaaa

SEQ ID NO: 180785 - DNA, 66 bp, Homo sapiens
cgactaaaaagtcattccagagtgaaatttagttgacttttagatttttaagaaatttttactctc

SEQ ID NO: 180786 - DNA, 70 bp, Homo sapiens
gtcattccagagtgaaatttagttgacttttagatttttaagaaatttttactctcttataccatcaaca

SEQ ID NO: 180787 - DNA, 70 bp, Homo sapiens
ccagagtgaaatttagttgacttttagatttttaagaaatttttactctcttataccatcaacatagaga

SEQ ID NO: 180788 - DNA, 70 bp, Homo sapiens
gttgacttttagatttttaagaaatttttactctcttataccatcaacatagagaattaagatatactag

SEQ ID NO: 180789 - DNA, 68 bp, Homo sapiens
agatttttaagaaatttttactctcttataccatcaacatagagaattaagatatactagtaattttt

SEQ ID NO: 180790 - DNA, 69 bp, Homo sapiens
gaaatttttactctcttataccatcaacatagagaattaagatatactagtaattttttttaagtccca

SEQ ID NO: 180791 - DNA, 70 bp, Homo sapiens
ttttactctcttataccatcaacatagagaattaagatatactagtaattttttttaagtcccagaagct

SEQ ID NO: 180792 - DNA, 72 bp, Homo sapiens
ctctcttataccatcaacatagagaattaagatatactagtaattttttttaagtcccagaagcttgactta

SEQ ID NO: 180793 - DNA, 70 bp, Homo sapiens
agagaattaagatatactagtaattttttttaagtcccagaagcttgacttaaagggatagcatcacacc

SEQ ID NO: 180794 - DNA, 70 bp, Homo sapiens
ttaagatatactagtaattttttttaagtcccagaagcttgacttaaagggatagcatcacacctgaccc

SEQ ID NO: 180795 - DNA, 72 bp, Homo sapiens
tatactagtaattttttttaagtcccagaagcttgacttaaagggatagcatcacacctgaccccagtgcaa

SEQ ID NO: 180796 - DNA, 71 bp, Homo sapiens
gtaattttttttaagtcccagaagcttgacttaaagggatagcatcacacctgaccccagtgcaagtgatt

SEQ ID NO: 180797 - DNA, 72 bp, Homo sapiens
tttttttaagtcccagaagcttgacttaaagggatagcatcacacctgaccccagtgcaagtgatttgaggg

SEQ ID NO: 180798 - DNA, 75 bp, Homo sapiens
taagtcccagaagcttgacttaaagggatagcatcacacctgaccccagtgcaagtgatttgaggggctaggaaa

SEQ ID NO: 180799 - DNA, 74 bp, Homo sapiens
tgacttaaagggatagcatcacacctgaccccagtgcaagtgatttgaggggctaggaaaccaatactaaacaa

SEQ ID NO: 180800 - DNA, 73 bp, Homo sapiens
ggatagcatcacacctgaccccagtgcaagtgatttgaggggctaggaaaccaatactaaacaaggtttaaga

SEQ ID NO: 180801 - DNA, 69 bp, Homo sapiens
atcacacctgaccccagtgcaagtgatttgaggggctaggaaaccaatactaaacaaggtttaagaaac

SEQ ID NO: 180802 - DNA, 67 bp, Homo sapiens
ccagtgcaagtgatttgaggggctaggaaaccaatactaaacaaggtttaagaaacctttacttgtc

SEQ ID NO: 180803 - DNA, 65 bp, Homo sapiens
aagtgatttgaggggctaggaaaccaatactaaacaaggtttaagaaacctttacttgtcctctc

SEQ ID NO: 180804 - DNA, 67 bp, Homo sapiens
gggctaggaaaccaatactaaacaaggtttaagaaacctttacttgtcctctcggctccaagacata

SEQ ID NO: 180805 - DNA, 68 bp, Homo sapiens
aaaccaatactaaacaaggtttaagaaacctttacttgtcctctcggctccaagacatagctctaaga

SEQ ID NO: 180806 - DNA, 73 bp, Homo sapiens
taagaaacctttacttgtcctctcggctccaagacatagctctaagaaggtaagccctcctgtggtatatata

SEQ ID NO: 180807 - DNA, 73 bp, Homo sapiens
ctttacttgtcctctcggctccaagacatagctctaagaaggtaagccctcctgtggtatatatatttcctaa

SEQ ID NO: 180808 - DNA, 74 bp, Homo sapiens
tcggctccaagacatagctctaagaaggtaagccctcctgtggtatatatatttcctaacccagactagctaaa

SEQ ID NO: 180809 - DNA, 72 bp, Homo sapiens
aagacatagctctaagaaggtaagccctcctgtggtatatatatttcctaacccagactagctaaaagtgga

SEQ ID NO: 180810 - DNA, 72 bp, Homo sapiens
tctaagaaggtaagccctcctgtggtatatatatttcctaacccagactagctaaaagtggaagcatacgga

SEQ ID NO: 180811 - DNA, 71 bp, Homo sapiens
taagccctcctgtggtatatatatttcctaacccagactagctaaaagtggaagcatacggactttcttac

SEQ ID NO: 180812 - DNA, 75 bp, Homo sapiens
tggtatatatatttcctaacccagactagctaaaagtggaagcatacggactttcttaccatgcttacaagtgca

SEQ ID NO: 180813 - DNA, 75 bp, Homo sapiens
tatatttcctaacccagactagctaaaagtggaagcatacggactttcttaccatgcttacaagtgcatggagaa

SEQ ID NO: 180814 - DNA, 77 bp, Homo sapiens
taacccagactagctaaaagtggaagcatacggactttcttaccatgcttacaagtgcatggagaaagtgacacata

SEQ ID NO: 180815 - DNA, 78 bp, Homo sapiens
tagctaaaagtggaagcatacggactttcttaccatgcttacaagtgcatggagaaagtgacacataatacagtatta

SEQ ID NO: 180816 - DNA, 81 bp, Homo sapiens
aagcatacggactttcttaccatgcttacaagtgcatggagaaagtgacacataatacagtattattggcagactgatgat

SEQ ID NO: 180817 - DNA, 84 bp, Homo sapiens
actttcttaccatgcttacaagtgcatggagaaagtgacacataatacagtattattggcagactgatgattcacatgtgtgaa

SEQ ID NO: 180818 - DNA, 86 bp, Homo sapiens
ttaccatgcttacaagtgcatggagaaagtgacacataatacagtattattggcagactgatgattcacatgtgtgaagcaacact

SEQ ID NO: 180819 - DNA, 84 bp, Homo sapiens
aagtgcatggagaaagtgacacataatacagtattattggcagactgatgattcacatgtgtgaagcaacacttgccaaataaa

SEQ ID NO: 180820 - DNA, 82 bp, Homo sapiens
agaaagtgacacataatacagtattattggcagactgatgattcacatgtgtgaagcaacacttgccaaataaacacgccaa

SEQ ID NO: 180821 - DNA, 80 bp, Homo sapiens
ataatacagtattattggcagactgatgattcacatgtgtgaagcaacacttgccaaataaacacgccaaggaaccagga

SEQ ID NO: 180822 - DNA, 81 bp, Homo sapiens
agtattattggcagactgatgattcacatgtgtgaagcaacacttgccaaataaacacgccaaggaaccaggagtatgcta

SEQ ID NO: 180823 - DNA, 81 bp, Homo sapiens
agactgatgattcacatgtgtgaagcaacacttgccaaataaacacgccaaggaaccaggagtatgctacttaatcagata

SEQ ID NO: 180824 - DNA, 77 bp, Homo sapiens
ttcacatgtgtgaagcaacacttgccaaataaacacgccaaggaaccaggagtatgctacttaatcagataaggtaa

SEQ ID NO: 180825 - DNA, 73 bp, Homo sapiens
tgaagcaacacttgccaaataaacacgccaaggaaccaggagtatgctacttaatcagataaggtaactttta

SEQ ID NO: 180826 - DNA, 69 bp, Homo sapiens
aacacttgccaaataaacacgccaaggaaccaggagtatgctacttaatcagataaggtaacttttacc

SEQ ID NO: 180827 - DNA, 70 bp, Homo sapiens
aaataaacacgccaaggaaccaggagtatgctacttaatcagataaggtaacttttaccctctccagata

SEQ ID NO: 180828 - DNA, 71 bp, Homo sapiens
ggaaccaggagtatgctacttaatcagataaggtaacttttaccctctccagatagacgatactattcgtt

SEQ ID NO: 180829 - DNA, 70 bp, Homo sapiens
gagtatgctacttaatcagataaggtaacttttaccctctccagatagacgatactattcgtttttggtt

SEQ ID NO: 180830 - DNA, 67 bp, Homo sapiens
ctacttaatcagataaggtaacttttaccctctccagatagacgatactattcgtttttggttttgt

SEQ ID NO: 180831 - DNA, 65 bp, Homo sapiens
ttttggttttgttttgctagacaggtaaaaaacagtctgacaaagagtctaaacctttccctaaa

SEQ ID NO: 180832 - DNA, 66 bp, Homo sapiens
ttttgttttgctagacaggtaaaaaacagtctgacaaagagtctaaacctttccctaaagccaagg

SEQ ID NO: 180833 - DNA, 68 bp, Homo sapiens
ctagacaggtaaaaaacagtctgacaaagagtctaaacctttccctaaagccaaggtctgttcaagac

SEQ ID NO: 180834 - DNA, 70 bp, Homo sapiens
aaaacagtctgacaaagagtctaaacctttccctaaagccaaggtctgttcaagactgcccattcaggaa

SEQ ID NO: 180835 - DNA, 68 bp, Homo sapiens
acaaagagtctaaacctttccctaaagccaaggtctgttcaagactgcccattcaggaagggcttaag

SEQ ID NO: 180836 - DNA, 71 bp, Homo sapiens
tctaaacctttccctaaagccaaggtctgttcaagactgcccattcaggaagggcttaagtgaagccataa

SEQ ID NO: 180837 - DNA, 71 bp, Homo sapiens
tttccctaaagccaaggtctgttcaagactgcccattcaggaagggcttaagtgaagccataaggtttgaa

SEQ ID NO: 180838 - DNA, 73 bp, Homo sapiens
aaggtctgttcaagactgcccattcaggaagggcttaagtgaagccataaggtttgaagggcatgaaaggtgc

SEQ ID NO: 180839 - DNA, 75 bp, Homo sapiens
ttcaagactgcccattcaggaagggcttaagtgaagccataaggtttgaagggcatgaaaggtgcttgctggagt

SEQ ID NO: 180840 - DNA, 76 bp, Homo sapiens
ttcaggaagggcttaagtgaagccataaggtttgaagggcatgaaaggtgcttgctggagttgcattccctagcaa

SEQ ID NO: 180841 - DNA, 76 bp, Homo sapiens
aagccataaggtttgaagggcatgaaaggtgcttgctggagttgcattccctagcaagcccacttttcactatgat

SEQ ID NO: 180842 - DNA, 77 bp, Homo sapiens
taaggtttgaagggcatgaaaggtgcttgctggagttgcattccctagcaagcccacttttcactatgattgggaga

SEQ ID NO: 180843 - DNA, 80 bp, Homo sapiens
atgaaaggtgcttgctggagttgcattccctagcaagcccacttttcactatgattgggagagatactgaaggagatgag

SEQ ID NO: 180844 - DNA, 80 bp, Homo sapiens
aggtgcttgctggagttgcattccctagcaagcccacttttcactatgattgggagagatactgaaggagatgagtgagg

SEQ ID NO: 180845 - DNA, 79 bp, Homo sapiens
ttccctagcaagcccacttttcactatgattgggagagatactgaaggagatgagtgaggggcacaaaagcagagccta

SEQ ID NO: 180846 - DNA, 78 bp, Homo sapiens
acttttcactatgattgggagagatactgaaggagatgagtgaggggcacaaaagcagagcctaatgccctacactcc

SEQ ID NO: 180847 - DNA, 80 bp, Homo sapiens
actatgattgggagagatactgaaggagatgagtgaggggcacaaaagcagagcctaatgccctacactcctggccctgc

SEQ ID NO: 180848 - DNA, 82 bp, Homo sapiens
agagatactgaaggagatgagtgaggggcacaaaagcagagcctaatgccctacactcctggccctgccactgctgtgccca

SEQ ID NO: 180849 - DNA, 80 bp, Homo sapiens
aaggagatgagtgaggggcacaaaagcagagcctaatgccctacactcctggccctgccactgctgtgcccatgacgtat

SEQ ID NO: 180850 - DNA, 84 bp, Homo sapiens
tgaggggcacaaaagcagagcctaatgccctacactcctggccctgccactgctgtgcccatgacgtattgtagctctcatata

SEQ ID NO: 180851 - DNA, 81 bp, Homo sapiens
aaaagcagagcctaatgccctacactcctggccctgccactgctgtgcccatgacgtattgtagctctcatataccaccca

SEQ ID NO: 180852 - DNA, 82 bp, Homo sapiens
agagcctaatgccctacactcctggccctgccactgctgtgcccatgacgtattgtagctctcatataccacccactggata

SEQ ID NO: 180853 - DNA, 84 bp, Homo sapiens
tacactcctggccctgccactgctgtgcccatgacgtattgtagctctcatataccacccactggatacagaaatcaagctgaa

SEQ ID NO: 180854 - DNA, 85 bp, Homo sapiens
tggccctgccactgctgtgcccatgacgtattgtagctctcatataccacccactggatacagaaatcaagctgaaatatgccta

SEQ ID NO: 180855 - DNA, 82 bp, Homo sapiens
tgctgtgcccatgacgtattgtagctctcatataccacccactggatacagaaatcaagctgaaatatgcctaggttggatt

SEQ ID NO: 180856 - DNA, 77 bp, Homo sapiens
atgacgtattgtagctctcatataccacccactggatacagaaatcaagctgaaatatgcctaggttggatttaaaa

SEQ ID NO: 180857 - DNA, 78 bp, Homo sapiens
gtattgtagctctcatataccacccactggatacagaaatcaagctgaaatatgcctaggttggatttaaaaatatca

SEQ ID NO: 180858 - DNA, 78 bp, Homo sapiens
tctcatataccacccactggatacagaaatcaagctgaaatatgcctaggttggatttaaaaatatcatcggctggga

SEQ ID NO: 180859 - DNA, 75 bp, Homo sapiens
acccactggatacagaaatcaagctgaaatatgcctaggttggatttaaaaatatcatcggctgggagcggtggc

SEQ ID NO: 180860 - DNA, 70 bp, Homo sapiens
aaaaaaaaaaatctcaccaaggttcaaattctattctaatgctagttctcactgaagcacaaatttacaa

SEQ ID NO: 180861 - DNA, 73 bp, Homo sapiens
aaatctcaccaaggttcaaattctattctaatgctagttctcactgaagcacaaatttacaaaaggatcccaa

SEQ ID NO: 180862 - DNA, 71 bp, Homo sapiens
ccaaggttcaaattctattctaatgctagttctcactgaagcacaaatttacaaaaggatcccaaattttc

SEQ ID NO: 180863 - DNA, 72 bp, Homo sapiens
ctattctaatgctagttctcactgaagcacaaatttacaaaaggatcccaaattttctagttaaccagtcca

SEQ ID NO: 180864 - DNA, 72 bp, Homo sapiens
taatgctagttctcactgaagcacaaatttacaaaaggatcccaaattttctagttaaccagtccagtgttc

SEQ ID NO: 180865 - DNA, 74 bp, Homo sapiens
ttctcactgaagcacaaatttacaaaaggatcccaaattttctagttaaccagtccagtgttctcagctgattg

SEQ ID NO: 180866 - DNA, 76 bp, Homo sapiens
aaatttacaaaaggatcccaaattttctagttaaccagtccagtgttctcagctgattggccatgatgcatatgtc

SEQ ID NO: 180867 - DNA, 76 bp, Homo sapiens
aaaaggatcccaaattttctagttaaccagtccagtgttctcagctgattggccatgatgcatatgtctttcctct

SEQ ID NO: 180868 - DNA, 75 bp, Homo sapiens
aaattttctagttaaccagtccagtgttctcagctgattggccatgatgcatatgtctttcctctttttactttc

SEQ ID NO: 180869 - DNA, 80 bp, Homo sapiens
tctagttaaccagtccagtgttctcagctgattggccatgatgcatatgtctttcctctttttactttcctctgaaatgc

SEQ ID NO: 180870 - DNA, 80 bp, Homo sapiens
agtccagtgttctcagctgattggccatgatgcatatgtctttcctctttttactttcctctgaaatgcctgacttgtgg

SEQ ID NO: 180871 - DNA, 84 bp, Homo sapiens
ttctcagctgattggccatgatgcatatgtctttcctctttttactttcctctgaaatgcctgacttgtggtggcaggcatcca

SEQ ID NO: 180872 - DNA, 81 bp, Homo sapiens
attggccatgatgcatatgtctttcctctttttactttcctctgaaatgcctgacttgtggtggcaggcatccacaccaga

SEQ ID NO: 180873 - DNA, 77 bp, Homo sapiens
atgcatatgtctttcctctttttactttcctctgaaatgcctgacttgtggtggcaggcatccacaccagaggtaaa

SEQ ID NO: 180874 - DNA, 74 bp, Homo sapiens
atatgtctttcctctttttactttcctctgaaatgcctgacttgtggtggcaggcatccacaccagaggtaaaa

SEQ ID NO: 180875 - DNA, 72 bp, Homo sapiens
ctttcctctttttactttcctctgaaatgcctgacttgtggtggcaggcatccacaccagaggtaaaagacg

SEQ ID NO: 180876 - DNA, 76 bp, Homo sapiens
tttttactttcctctgaaatgcctgacttgtggtggcaggcatccacaccagaggtaaaagacggctgggccatga

SEQ ID NO: 180877 - DNA, 79 bp, Homo sapiens
tttactttcctctgaaatgcctgacttgtggtggcaggcatccacaccagaggtaaaagacggctgggccatgagcaca

SEQ ID NO: 180878 - DNA, 81 bp, Homo sapiens
aaatgcctgacttgtggtggcaggcatccacaccagaggtaaaagacggctgggccatgagcacagctggccctgaagatg

SEQ ID NO: 180879 - DNA, 81 bp, Homo sapiens
aatgcctgacttgtggtggcaggcatccacaccagaggtaaaagacggctgggccatgagcacagctggccctgaagatgg

SEQ ID NO: 180880 - DNA, 81 bp, Homo sapiens
gtggcaggcatccacaccagaggtaaaagacggctgggccatgagcacagctggccctgaagatggggaagagccaggata

SEQ ID NO: 180881 - DNA, 78 bp, Homo sapiens
atccacaccagaggtaaaagacggctgggccatgagcacagctggccctgaagatggggaagagccaggatatggaaa

SEQ ID NO: 180882 - DNA, 75 bp, Homo sapiens
aggtaaaagacggctgggccatgagcacagctggccctgaagatggggaagagccaggatatggaaaaagaagta

SEQ ID NO: 180883 - DNA, 75 bp, Homo sapiens
aaagacggctgggccatgagcacagctggccctgaagatggggaagagccaggatatggaaaaagaagtaaataa

SEQ ID NO: 180884 - DNA, 73 bp, Homo sapiens
ctggccctgaagatggggaagagccaggatatggaaaaagaagtaaataacttgctgaataccccatctataa

SEQ ID NO: 180885 - DNA, 74 bp, Homo sapiens
agagccaggatatggaaaaagaagtaaataacttgctgaataccccatctataagagataatgaggctggactt

SEQ ID NO: 180886 - DNA, 74 bp, Homo sapiens
aagtaaataacttgctgaataccccatctataagagataatgaggctggactttgattttaatgtaggacacaa

SEQ ID NO: 180887 - DNA, 74 bp, Homo sapiens
aataacttgctgaataccccatctataagagataatgaggctggactttgattttaatgtaggacacaaagaaa

SEQ ID NO: 180888 - DNA, 74 bp, Homo sapiens
aataccccatctataagagataatgaggctggactttgattttaatgtaggacacaaagaaattgcagttgaac

SEQ ID NO: 180889 - DNA, 76 bp, Homo sapiens
tataagagataatgaggctggactttgattttaatgtaggacacaaagaaattgcagttgaactgtaactggtaca

SEQ ID NO: 180890 - DNA, 74 bp, Homo sapiens
taatgaggctggactttgattttaatgtaggacacaaagaaattgcagttgaactgtaactggtacaacaaaga

SEQ ID NO: 180891 - DNA, 73 bp, Homo sapiens
ctttgattttaatgtaggacacaaagaaattgcagttgaactgtaactggtacaacaaagagtactggtatca

SEQ ID NO: 180892 - DNA, 72 bp, Homo sapiens
attttaatgtaggacacaaagaaattgcagttgaactgtaactggtacaacaaagagtactggtatcattcc

SEQ ID NO: 180893 - DNA, 71 bp, Homo sapiens
acaaagaaattgcagttgaactgtaactggtacaacaaagagtactggtatcattcctacttaacaagaac

SEQ ID NO: 180894 - DNA, 70 bp, Homo sapiens
aaattgcagttgaactgtaactggtacaacaaagagtactggtatcattcctacttaacaagaacggatt

SEQ ID NO: 180895 - DNA, 74 bp, Homo sapiens
ttgaactgtaactggtacaacaaagagtactggtatcattcctacttaacaagaacggatttgcattatagaca

SEQ ID NO: 180896 - DNA, 71 bp, Homo sapiens
actggtacaacaaagagtactggtatcattcctacttaacaagaacggatttgcattatagacaaacctta

SEQ ID NO: 180897 - DNA, 72 bp, Homo sapiens
caaagagtactggtatcattcctacttaacaagaacggatttgcattatagacaaaccttataaatgaggaa

SEQ ID NO: 180898 - DNA, 69 bp, Homo sapiens
cctacttaacaagaacggatttgcattatagacaaaccttataaatgaggaattttaaactataagaga

SEQ ID NO: 180899 - DNA, 72 bp, Homo sapiens
ttgcattatagacaaaccttataaatgaggaattttaaactataagagatctttgctagtgctttaaataaa

SEQ ID NO: 180900 - DNA, 71 bp, Homo sapiens
agagatctttgctagtgctttaaataaaatgcaaaaagaaaaagtcttcagctctaaactaacattttcca

SEQ ID NO: 180901 - DNA, 71 bp, Homo sapiens
tgctagtgctttaaataaaatgcaaaaagaaaaagtcttcagctctaaactaacattttccaagtaacaca

SEQ ID NO: 180902 - DNA, 67 bp, Homo sapiens
aaataaaatgcaaaaagaaaaagtcttcagctctaaactaacattttccaagtaacacaaagaccac

SEQ ID NO: 180903 - DNA, 68 bp, Homo sapiens
aagtcttcagctctaaactaacattttccaagtaacacaaagaccacggatttaagggcaagactatt

SEQ ID NO: 180904 - DNA, 68 bp, Homo sapiens
ttcagctctaaactaacattttccaagtaacacaaagaccacggatttaagggcaagactatttaaaa

SEQ ID NO: 180905 - DNA, 67 bp, Homo sapiens
acattttccaagtaacacaaagaccacggatttaagggcaagactatttaaaattgaaggacacctg

SEQ ID NO: 180906 - DNA, 68 bp, Homo sapiens
aagtaacacaaagaccacggatttaagggcaagactatttaaaattgaaggacacctgtgaaacagta

SEQ ID NO: 180907 - DNA, 69 bp, Homo sapiens
acaaagaccacggatttaagggcaagactatttaaaattgaaggacacctgtgaaacagtattttcaga

SEQ ID NO: 180908 - DNA, 68 bp, Homo sapiens
cggatttaagggcaagactatttaaaattgaaggacacctgtgaaacagtattttcagaaaaacacag

SEQ ID NO: 180909 - DNA, 68 bp, Homo sapiens
gggcaagactatttaaaattgaaggacacctgtgaaacagtattttcagaaaaacacagttgtttagt

SEQ ID NO: 180910 - DNA, 66 bp, Homo sapiens
atttaaaattgaaggacacctgtgaaacagtattttcagaaaaacacagttgtttagttttcaagt

SEQ ID NO: 180911 - DNA, 69 bp, Homo sapiens
ggacacctgtgaaacagtattttcagaaaaacacagttgtttagttttcaagttaatattcgtacagta

SEQ ID NO: 180912 - DNA, 69 bp, Homo sapiens
tgtgaaacagtattttcagaaaaacacagttgtttagttttcaagttaatattcgtacagtaacttgaa

SEQ ID NO: 180913 - DNA, 71 bp, Homo sapiens
cacagttgtttagttttcaagttaatattcgtacagtaacttgaattaagcagttattgtagaggtcatag

SEQ ID NO: 180914 - DNA, 72 bp, Homo sapiens
agttttcaagttaatattcgtacagtaacttgaattaagcagttattgtagaggtcataggaaatctgtcga

SEQ ID NO: 180915 - DNA, 73 bp, Homo sapiens
caagttaatattcgtacagtaacttgaattaagcagttattgtagaggtcataggaaatctgtcgacacaaaa

SEQ ID NO: 180916 - DNA, 73 bp, Homo sapiens
attcgtacagtaacttgaattaagcagttattgtagaggtcataggaaatctgtcgacacaaaaagataagaa

SEQ ID NO: 180917 - DNA, 75 bp, Homo sapiens
gcagttattgtagaggtcataggaaatctgtcgacacaaaaagataagaaaaacttatggtaatgagagtatcaa

SEQ ID NO: 180918 - DNA, 76 bp, Homo sapiens
ctgtcgacacaaaaagataagaaaaacttatggtaatgagagtatcaattcaatgctcaatgaggcttttacatta

SEQ ID NO: 180919 - DNA, 78 bp, Homo sapiens
agataagaaaaacttatggtaatgagagtatcaattcaatgctcaatgaggcttttacattattcatgatactgaaaa

SEQ ID NO: 180920 - DNA, 77 bp, Homo sapiens
gaaaaacttatggtaatgagagtatcaattcaatgctcaatgaggcttttacattattcatgatactgaaaatagtt

SEQ ID NO: 180921 - DNA, 78 bp, Homo sapiens
tggtaatgagagtatcaattcaatgctcaatgaggcttttacattattcatgatactgaaaatagtttattttagttg

SEQ ID NO: 180922 - DNA, 75 bp, Homo sapiens
agtatcaattcaatgctcaatgaggcttttacattattcatgatactgaaaatagtttattttagttggtaaaga

SEQ ID NO: 180923 - DNA, 73 bp, Homo sapiens
tgctcaatgaggcttttacattattcatgatactgaaaatagtttattttagttggtaaagaaaatatcccga

SEQ ID NO: 180924 - DNA, 70 bp, Homo sapiens
tgaggcttttacattattcatgatactgaaaatagtttattttagttggtaaagaaaatatcccgattta

SEQ ID NO: 180925 - DNA, 67 bp, Homo sapiens
acattattcatgatactgaaaatagtttattttagttggtaaagaaaatatcccgatttaatttatt

SEQ ID NO: 180926 - DNA, 67 bp, Homo sapiens
tgatactgaaaatagtttattttagttggtaaagaaaatatcccgatttaatttatttaacaaatgc

SEQ ID NO: 180927 - DNA, 70 bp, Homo sapiens
ttggtaaagaaaatatcccgatttaatttatttaacaaatgctctttatcatagccttcaaagttctgcc

SEQ ID NO: 180928 - DNA, 73 bp, Homo sapiens
aaatatcccgatttaatttatttaacaaatgctctttatcatagccttcaaagttctgcctagatcttatcca

SEQ ID NO: 180929 - DNA, 72 bp, Homo sapiens
cccgatttaatttatttaacaaatgctctttatcatagccttcaaagttctgcctagatcttatccaaatag

SEQ ID NO: 180930 - DNA, 76 bp, Homo sapiens
ttatcatagccttcaaagttctgcctagatcttatccaaatagttatattttgagttgactatcaaattaataagc

SEQ ID NO: 180931 - DNA, 72 bp, Homo sapiens
cttcaaagttctgcctagatcttatccaaatagttatattttgagttgactatcaaattaataagctttcct

SEQ ID NO: 180932 - DNA, 74 bp, Homo sapiens
tgcctagatcttatccaaatagttatattttgagttgactatcaaattaataagctttcctttagctcaagttg

SEQ ID NO: 180933 - DNA, 74 bp, Homo sapiens
gttatattttgagttgactatcaaattaataagctttcctttagctcaagttgtaacaatgataatgaccatta

SEQ ID NO: 180934 - DNA, 77 bp, Homo sapiens
ttgagttgactatcaaattaataagctttcctttagctcaagttgtaacaatgataatgaccattattttctcagca

SEQ ID NO: 180935 - DNA, 72 bp, Homo sapiens
aagctttcctttagctcaagttgtaacaatgataatgaccattattttctcagcattttattaattattcct

SEQ ID NO: 180936 - DNA, 72 bp, Homo sapiens
agctcaagttgtaacaatgataatgaccattattttctcagcattttattaattattccttaaaatcccaag

SEQ ID NO: 180937 - DNA, 72 bp, Homo sapiens
tgtaacaatgataatgaccattattttctcagcattttattaattattccttaaaatcccaagtaataatcc

SEQ ID NO: 180938 - DNA, 70 bp, Homo sapiens
aatgaccattattttctcagcattttattaattattccttaaaatcccaagtaataatccttctatcttg

SEQ ID NO: 180939 - DNA, 71 bp, Homo sapiens
cattattttctcagcattttattaattattccttaaaatcccaagtaataatccttctatcttggacgaga

SEQ ID NO: 180940 - DNA, 70 bp, Homo sapiens
cagcattttattaattattccttaaaatcccaagtaataatccttctatcttggacgagaaaactgaggc

SEQ ID NO: 180941 - DNA, 69 bp, Homo sapiens
attattccttaaaatcccaagtaataatccttctatcttggacgagaaaactgaggccgaacacctata

SEQ ID NO: 180942 - DNA, 70 bp, Homo sapiens
tccttaaaatcccaagtaataatccttctatcttggacgagaaaactgaggccgaacacctataataata

SEQ ID NO: 180943 - DNA, 70 bp, Homo sapiens
aagtaataatccttctatcttggacgagaaaactgaggccgaacacctataataataaactaccatcaac

SEQ ID NO: 180944 - DNA, 73 bp, Homo sapiens
aatccttctatcttggacgagaaaactgaggccgaacacctataataataaactaccatcaactgagtgccaa

SEQ ID NO: 180945 - DNA, 73 bp, Homo sapiens
tcttggacgagaaaactgaggccgaacacctataataataaactaccatcaactgagtgccaaggaggggctg

SEQ ID NO: 180946 - DNA, 73 bp, Homo sapiens
aaaactgaggccgaacacctataataataaactaccatcaactgagtgccaaggaggggctgtgcactgcctt

SEQ ID NO: 180947 - DNA, 76 bp, Homo sapiens
aacacctataataataaactaccatcaactgagtgccaaggaggggctgtgcactgccttttgctctttacatata

SEQ ID NO: 180948 - DNA, 77 bp, Homo sapiens
tataataataaactaccatcaactgagtgccaaggaggggctgtgcactgccttttgctctttacatatattatttg

SEQ ID NO: 180949 - DNA, 79 bp, Homo sapiens
taccatcaactgagtgccaaggaggggctgtgcactgccttttgctctttacatatattatttgtcatcttcccaataa

SEQ ID NO: 180950 - DNA, 74 bp, Homo sapiens
agtgccaaggaggggctgtgcactgccttttgctctttacatatattatttgtcatcttcccaataacctaaaa

SEQ ID NO: 180951 - DNA, 76 bp, Homo sapiens
ctgtgcactgccttttgctctttacatatattatttgtcatcttcccaataacctaaaagatagtgttaatgtcat

SEQ ID NO: 180952 - DNA, 73 bp, Homo sapiens
ccttttgctctttacatatattatttgtcatcttcccaataacctaaaagatagtgttaatgtcatttacaga

SEQ ID NO: 180953 - DNA, 67 bp, Homo sapiens
agataaggaaactgagaatcaaaagctaaaagttaatttcccaccagtaaattaccagtggtaaaga

SEQ ID NO: 180954 - DNA, 67 bp, Homo sapiens
aactgagaatcaaaagctaaaagttaatttcccaccagtaaattaccagtggtaaagaaccaagctc

SEQ ID NO: 180955 - DNA, 68 bp, Homo sapiens
actgagaatcaaaagctaaaagttaatttcccaccagtaaattaccagtggtaaagaaccaagctcta

SEQ ID NO: 180956 - DNA, 68 bp, Homo sapiens
tcaaaagctaaaagttaatttcccaccagtaaattaccagtggtaaagaaccaagctctatactaggc

SEQ ID NO: 180957 - DNA, 68 bp, Homo sapiens
agttaatttcccaccagtaaattaccagtggtaaagaaccaagctctatactaggcccaaaggtcata

SEQ ID NO: 180958 - DNA, 69 bp, Homo sapiens
atttcccaccagtaaattaccagtggtaaagaaccaagctctatactaggcccaaaggtcatattcttc

SEQ ID NO: 180959 - DNA, 68 bp, Homo sapiens
agtaaattaccagtggtaaagaaccaagctctatactaggcccaaaggtcatattcttcctaattaag

SEQ ID NO: 180960 - DNA, 72 bp, Homo sapiens
aagctctatactaggcccaaaggtcatattcttcctaattaaggcacctacttactgctgaagtgtaaagta

SEQ ID NO: 180961 - DNA, 73 bp, Homo sapiens
tatactaggcccaaaggtcatattcttcctaattaaggcacctacttactgctgaagtgtaaagtatatagaa

SEQ ID NO: 180962 - DNA, 71 bp, Homo sapiens
cttcctaattaaggcacctacttactgctgaagtgtaaagtatatagaaatcaggagtaaatggtaaatgg

SEQ ID NO: 180963 - DNA, 72 bp, Homo sapiens
aattaaggcacctacttactgctgaagtgtaaagtatatagaaatcaggagtaaatggtaaatgggcaatac

SEQ ID NO: 180964 - DNA, 72 bp, Homo sapiens
gctgaagtgtaaagtatatagaaatcaggagtaaatggtaaatgggcaatactttttgtcaccctctcttat

SEQ ID NO: 180965 - DNA, 70 bp, Homo sapiens
agtatatagaaatcaggagtaaatggtaaatgggcaatactttttgtcaccctctcttattgtactaact

SEQ ID NO: 180966 - DNA, 69 bp, Homo sapiens
tcaggagtaaatggtaaatgggcaatactttttgtcaccctctcttattgtactaacttaattaaccca

SEQ ID NO: 180967 - DNA, 69 bp, Homo sapiens
atggtaaatgggcaatactttttgtcaccctctcttattgtactaacttaattaacccatctggtggaa

SEQ ID NO: 180968 - DNA, 70 bp, Homo sapiens
gtaaatgggcaatactttttgtcaccctctcttattgtactaacttaattaacccatctggtggaacata

SEQ ID NO: 180969 - DNA, 71 bp, Homo sapiens
aatgggcaatactttttgtcaccctctcttattgtactaacttaattaacccatctggtggaacatattca

SEQ ID NO: 180970 - DNA, 72 bp, Homo sapiens
ggcaatactttttgtcaccctctcttattgtactaacttaattaacccatctggtggaacatattcatcttc

SEQ ID NO: 180971 - DNA, 75 bp, Homo sapiens
tactttttgtcaccctctcttattgtactaacttaattaacccatctggtggaacatattcatcttctcatgaca

SEQ ID NO: 180972 - DNA, 76 bp, Homo sapiens
taacttaattaacccatctggtggaacatattcatcttctcatgacagcagaacctcttataccctaactatgtgt

SEQ ID NO: 180973 - DNA, 76 bp, Homo sapiens
ttaattaacccatctggtggaacatattcatcttctcatgacagcagaacctcttataccctaactatgtgtttat

SEQ ID NO: 180974 - DNA, 77 bp, Homo sapiens
attaacccatctggtggaacatattcatcttctcatgacagcagaacctcttataccctaactatgtgtttattcca

SEQ ID NO: 180975 - DNA, 80 bp, Homo sapiens
tggtggaacatattcatcttctcatgacagcagaacctcttataccctaactatgtgtttattccacaggctgtggcctc

SEQ ID NO: 180976 - DNA, 78 bp, Homo sapiens
atattcatcttctcatgacagcagaacctcttataccctaactatgtgtttattccacaggctgtggcctccctccca

SEQ ID NO: 180977 - DNA, 78 bp, Homo sapiens
atgacagcagaacctcttataccctaactatgtgtttattccacaggctgtggcctccctcccatctatttggcatca

SEQ ID NO: 180978 - DNA, 74 bp, Homo sapiens
agaacctcttataccctaactatgtgtttattccacaggctgtggcctccctcccatctatttggcatcaagag

SEQ ID NO: 180979 - DNA, 74 bp, Homo sapiens
ttataccctaactatgtgtttattccacaggctgtggcctccctcccatctatttggcatcaagaggaagtttg

SEQ ID NO: 180980 - DNA, 72 bp, Homo sapiens
actatgtgtttattccacaggctgtggcctccctcccatctatttggcatcaagaggaagtttgtttaaaat

SEQ ID NO: 180981 - DNA, 74 bp, Homo sapiens
tattccacaggctgtggcctccctcccatctatttggcatcaagaggaagtttgtttaaaattcagggatgaaa

SEQ ID NO: 180982 - DNA, 72 bp, Homo sapiens
ggcctccctcccatctatttggcatcaagaggaagtttgtttaaaattcagggatgaaagttttgcatgctt

SEQ ID NO: 180983 - DNA, 72 bp, Homo sapiens
ctcccatctatttggcatcaagaggaagtttgtttaaaattcagggatgaaagttttgcatgctttgtaaaa

SEQ ID NO: 180984 - DNA, 73 bp, Homo sapiens
tggcatcaagaggaagtttgtttaaaattcagggatgaaagttttgcatgctttgtaaaaatgattacaccta

SEQ ID NO: 180985 - DNA, 74 bp, Homo sapiens
gaggaagtttgtttaaaattcagggatgaaagttttgcatgctttgtaaaaatgattacacctagctctgcaga

SEQ ID NO: 180986 - DNA, 76 bp, Homo sapiens
ttgtttaaaattcagggatgaaagttttgcatgctttgtaaaaatgattacacctagctctgcagagtcttgcaaa

SEQ ID NO: 180987 - DNA, 77 bp, Homo sapiens
attcagggatgaaagttttgcatgctttgtaaaaatgattacacctagctctgcagagtcttgcaaagtgcaaaccc

SEQ ID NO: 180988 - DNA, 75 bp, Homo sapiens
aaagttttgcatgctttgtaaaaatgattacacctagctctgcagagtcttgcaaagtgcaaaccccacaattta

SEQ ID NO: 180989 - DNA, 73 bp, Homo sapiens
tttgtaaaaatgattacacctagctctgcagagtcttgcaaagtgcaaaccccacaatttacctggttgttgt

SEQ ID NO: 180990 - DNA, 72 bp, Homo sapiens
aaaaatgattacacctagctctgcagagtcttgcaaagtgcaaaccccacaatttacctggttgttgttggt

SEQ ID NO: 180991 - DNA, 71 bp, Homo sapiens
acacctagctctgcagagtcttgcaaagtgcaaaccccacaatttacctggttgttgttggtttttagtaa

SEQ ID NO: 180992 - DNA, 67 bp, Homo sapiens
agagtcttgcaaagtgcaaaccccacaatttacctggttgttgttggtttttagtaagggtggtgga

SEQ ID NO: 180993 - DNA, 63 bp, Homo sapiens
aaagtgcaaaccccacaatttacctggttgttgttggtttttagtaagggtggtggaggttcg

SEQ ID NO: 180994 - DNA, 65 bp, Homo sapiens
aatttacctggttgttgttggtttttagtaagggtggtggaggttcgtgatgtaggggtgaagaa

SEQ ID NO: 180995 - DNA, 76 bp, Homo sapiens
tttagtaagggtggtggaggttcgtgatgtaggggtgaagaagcagaactgctttcactatcgctgccatcactta

SEQ ID NO: 180996 - DNA, 79 bp, Homo sapiens
tggtggaggttcgtgatgtaggggtgaagaagcagaactgctttcactatcgctgccatcacttaagctaactctgaaa

SEQ ID NO: 180997 - DNA, 77 bp, Homo sapiens
aggttcgtgatgtaggggtgaagaagcagaactgctttcactatcgctgccatcacttaagctaactctgaaaagaa

SEQ ID NO: 180998 - DNA, 80 bp, Homo sapiens
gggtgaagaagcagaactgctttcactatcgctgccatcacttaagctaactctgaaaagaaacagacaagttatgcaca

SEQ ID NO: 180999 - DNA, 81 bp, Homo sapiens
agcagaactgctttcactatcgctgccatcacttaagctaactctgaaaagaaacagacaagttatgcacatcattacaaa

SEQ ID NO: 181000 - DNA, 81 bp, Homo sapiens
tttcactatcgctgccatcacttaagctaactctgaaaagaaacagacaagttatgcacatcattacaaacagatgattct

SEQ ID NO: 181001 - DNA, 82 bp, Homo sapiens
tatcgctgccatcacttaagctaactctgaaaagaaacagacaagttatgcacatcattacaaacagatgattcttgaaata

SEQ ID NO: 181002 - DNA, 78 bp, Homo sapiens
cacttaagctaactctgaaaagaaacagacaagttatgcacatcattacaaacagatgattcttgaaatacccataga

SEQ ID NO: 181003 - DNA, 76 bp, Homo sapiens
aactctgaaaagaaacagacaagttatgcacatcattacaaacagatgattcttgaaatacccatagaaataggcg

SEQ ID NO: 181004 - DNA, 78 bp, Homo sapiens
aaacagacaagttatgcacatcattacaaacagatgattcttgaaatacccatagaaataggcgtggaaagcacagaa

SEQ ID NO: 181005 - DNA, 78 bp, Homo sapiens
acaagttatgcacatcattacaaacagatgattcttgaaatacccatagaaataggcgtggaaagcacagaatccaaa

SEQ ID NO: 181006 - DNA, 75 bp, Homo sapiens
acatcattacaaacagatgattcttgaaatacccatagaaataggcgtggaaagcacagaatccaaacactaacc

SEQ ID NO: 181007 - DNA, 73 bp, Homo sapiens
aaacagatgattcttgaaatacccatagaaataggcgtggaaagcacagaatccaaacactaacccttgacaa

SEQ ID NO: 181008 - DNA, 71 bp, Homo sapiens
ttgaaatacccatagaaataggcgtggaaagcacagaatccaaacactaacccttgacaagttcattttaa

SEQ ID NO: 181009 - DNA, 72 bp, Homo sapiens
atacccatagaaataggcgtggaaagcacagaatccaaacactaacccttgacaagttcattttaactcaca

SEQ ID NO: 181010 - DNA, 72 bp, Homo sapiens
aaataggcgtggaaagcacagaatccaaacactaacccttgacaagttcattttaactcacagccgctaaca

SEQ ID NO: 181011 - DNA, 74 bp, Homo sapiens
aaagcacagaatccaaacactaacccttgacaagttcattttaactcacagccgctaacacatattggtgctta

SEQ ID NO: 181012 - DNA, 72 bp, Homo sapiens
aatccaaacactaacccttgacaagttcattttaactcacagccgctaacacatattggtgcttactttgta

SEQ ID NO: 181013 - DNA, 72 bp, Homo sapiens
aagttcattttaactcacagccgctaacacatattggtgcttactttgtaactggaactgtgttaagtgctt

SEQ ID NO: 181014 - DNA, 74 bp, Homo sapiens
tttaactcacagccgctaacacatattggtgcttactttgtaactggaactgtgttaagtgctttacctgccat

SEQ ID NO: 181015 - DNA, 72 bp, Homo sapiens
agccgctaacacatattggtgcttactttgtaactggaactgtgttaagtgctttacctgccatttctcttt

SEQ ID NO: 181016 - DNA, 74 bp, Homo sapiens
atattggtgcttactttgtaactggaactgtgttaagtgctttacctgccatttctcttttcatgatctcctgt

SEQ ID NO: 181017 - DNA, 75 bp, Homo sapiens
ttactttgtaactggaactgtgttaagtgctttacctgccatttctcttttcatgatctcctgtttcacagacga

SEQ ID NO: 181018 - DNA, 78 bp, Homo sapiens
tttacctgccatttctcttttcatgatctcctgtttcacagacgagtaaactgagactcagaaagactgggtcactca

SEQ ID NO: 181019 - DNA, 77 bp, Homo sapiens
atgatctcctgtttcacagacgagtaaactgagactcagaaagactgggtcactcatctagggtcacacaggtaaaa

SEQ ID NO: 181020 - DNA, 75 bp, Homo sapiens
tcctgtttcacagacgagtaaactgagactcagaaagactgggtcactcatctagggtcacacaggtaaaaatgg

SEQ ID NO: 181021 - DNA, 74 bp, Homo sapiens
acgagtaaactgagactcagaaagactgggtcactcatctagggtcacacaggtaaaaatggtggctctggaat

SEQ ID NO: 181022 - DNA, 75 bp, Homo sapiens
agaaagactgggtcactcatctagggtcacacaggtaaaaatggtggctctggaattcaaatacaagcaagtggc

SEQ ID NO: 181023 - DNA, 76 bp, Homo sapiens
tgggtcactcatctagggtcacacaggtaaaaatggtggctctggaattcaaatacaagcaagtggcccaaagcta

SEQ ID NO: 181024 - DNA, 77 bp, Homo sapiens
gggtcacacaggtaaaaatggtggctctggaattcaaatacaagcaagtggcccaaagctagtgctcagccactata

SEQ ID NO: 181025 - DNA, 75 bp, Homo sapiens
acaggtaaaaatggtggctctggaattcaaatacaagcaagtggcccaaagctagtgctcagccactatacttta

SEQ ID NO: 181026 - DNA, 76 bp, Homo sapiens
gtggctctggaattcaaatacaagcaagtggcccaaagctagtgctcagccactatactttactggggtcatttat

SEQ ID NO: 181027 - DNA, 78 bp, Homo sapiens
tctggaattcaaatacaagcaagtggcccaaagctagtgctcagccactatactttactggggtcatttattcattca

SEQ ID NO: 181028 - DNA, 75 bp, Homo sapiens
aaatacaagcaagtggcccaaagctagtgctcagccactatactttactggggtcatttattcattcatctccct

SEQ ID NO: 181029 - DNA, 81 bp, Homo sapiens
ttactggggtcatttattcattcatctcccttctcctgctctccctacctactatgatcaagcatgctactcaagcttaca

SEQ ID NO: 181030 - DNA, 80 bp, Homo sapiens
tcatctcccttctcctgctctccctacctactatgatcaagcatgctactcaagcttacagaaggtcagcaaaattagtt

SEQ ID NO: 181031 - DNA, 80 bp, Homo sapiens
ttctcctgctctccctacctactatgatcaagcatgctactcaagcttacagaaggtcagcaaaattagtttgttgatta

SEQ ID NO: 181032 - DNA, 76 bp, Homo sapiens
tccctacctactatgatcaagcatgctactcaagcttacagaaggtcagcaaaattagtttgttgattactacctt

SEQ ID NO: 181033 - DNA, 73 bp, Homo sapiens
atcaagcatgctactcaagcttacagaaggtcagcaaaattagtttgttgattactacctttattttcctttc

SEQ ID NO: 181034 - DNA, 69 bp, Homo sapiens
ctactcaagcttacagaaggtcagcaaaattagtttgttgattactacctttattttcctttcctcctc

SEQ ID NO: 181035 - DNA, 69 bp, Homo sapiens
tacagaaggtcagcaaaattagtttgttgattactacctttattttcctttcctcctccctctctgtta

SEQ ID NO: 181036 - DNA, 69 bp, Homo sapiens
cagcaaaattagtttgttgattactacctttattttcctttcctcctccctctctgttacagatgaaaa

SEQ ID NO: 181037 - DNA, 70 bp, Homo sapiens
tgttgattactacctttattttcctttcctcctccctctctgttacagatgaaaaagttacaaacatgtc

SEQ ID NO: 181038 - DNA, 70 bp, Homo sapiens
tacctttattttcctttcctcctccctctctgttacagatgaaaaagttacaaacatgtctagaatacac

SEQ ID NO: 181039 - DNA, 73 bp, Homo sapiens
ttattttcctttcctcctccctctctgttacagatgaaaaagttacaaacatgtctagaatacacgctgcagg

SEQ ID NO: 181040 - DNA, 77 bp, Homo sapiens
tcctccctctctgttacagatgaaaaagttacaaacatgtctagaatacacgctgcaggggaagaagcaaccacata

SEQ ID NO: 181041 - DNA, 75 bp, Homo sapiens
tgttacagatgaaaaagttacaaacatgtctagaatacacgctgcaggggaagaagcaaccacataaatgaaact

SEQ ID NO: 181042 - DNA, 74 bp, Homo sapiens
atgaaaaagttacaaacatgtctagaatacacgctgcaggggaagaagcaaccacataaatgaaacttcataaa

SEQ ID NO: 181043 - DNA, 76 bp, Homo sapiens
ttacaaacatgtctagaatacacgctgcaggggaagaagcaaccacataaatgaaacttcataaagaatgtagaaa

SEQ ID NO: 181044 - DNA, 75 bp, Homo sapiens
atgtctagaatacacgctgcaggggaagaagcaaccacataaatgaaacttcataaagaatgtagaaaacagccc

SEQ ID NO: 181045 - DNA, 78 bp, Homo sapiens
tacacgctgcaggggaagaagcaaccacataaatgaaacttcataaagaatgtagaaaacagccctgcaccgctgaca

SEQ ID NO: 181046 - DNA, 80 bp, Homo sapiens
aagaagcaaccacataaatgaaacttcataaagaatgtagaaaacagccctgcaccgctgacagcacagagtgacatcta

SEQ ID NO: 181047 - DNA, 82 bp, Homo sapiens
aaaacagccctgcaccgctgacagcacagagtgacatctaaggattgaacatgtggagcccggcatgctaggaccattacca

SEQ ID NO: 181048 - DNA, 85 bp, Homo sapiens
tgcaccgctgacagcacagagtgacatctaaggattgaacatgtggagcccggcatgctaggaccattaccaatcatttctactg

SEQ ID NO: 181049 - DNA, 81 bp, Homo sapiens
agagtgacatctaaggattgaacatgtggagcccggcatgctaggaccattaccaatcatttctactgtgtcattattcaa

SEQ ID NO: 181050 - DNA, 80 bp, Homo sapiens
atctaaggattgaacatgtggagcccggcatgctaggaccattaccaatcatttctactgtgtcattattcaaggctgtc

SEQ ID NO: 181051 - DNA, 80 bp, Homo sapiens
aacatgtggagcccggcatgctaggaccattaccaatcatttctactgtgtcattattcaaggctgtctctagttctgaa

SEQ ID NO: 181052 - DNA, 81 bp, Homo sapiens
cggcatgctaggaccattaccaatcatttctactgtgtcattattcaaggctgtctctagttctgaacactgatacaacaa

SEQ ID NO: 181053 - DNA, 80 bp, Homo sapiens
taggaccattaccaatcatttctactgtgtcattattcaaggctgtctctagttctgaacactgatacaacaattcattg

SEQ ID NO: 181054 - DNA, 79 bp, Homo sapiens
attaccaatcatttctactgtgtcattattcaaggctgtctctagttctgaacactgatacaacaattcattggaaata

SEQ ID NO: 181055 - DNA, 76 bp, Homo sapiens
attattcaaggctgtctctagttctgaacactgatacaacaattcattggaaatacgctacaacaacacaaagaaa

SEQ ID NO: 181056 - DNA, 76 bp, Homo sapiens
ctgtctctagttctgaacactgatacaacaattcattggaaatacgctacaacaacacaaagaaatggtatgtttg

SEQ ID NO: 181057 - DNA, 76 bp, Homo sapiens
tctagttctgaacactgatacaacaattcattggaaatacgctacaacaacacaaagaaatggtatgtttgggata

SEQ ID NO: 181058 - DNA, 73 bp, Homo sapiens
tgatacaacaattcattggaaatacgctacaacaacacaaagaaatggtatgtttgggataaccgctttggaa

SEQ ID NO: 181059 - DNA, 70 bp, Homo sapiens
attcattggaaatacgctacaacaacacaaagaaatggtatgtttgggataaccgctttggaaaactaca

SEQ ID NO: 181060 - DNA, 71 bp, Homo sapiens
ttggaaatacgctacaacaacacaaagaaatggtatgtttgggataaccgctttggaaaactacaatgata

SEQ ID NO: 181061 - DNA, 70 bp, Homo sapiens
gctacaacaacacaaagaaatggtatgtttgggataaccgctttggaaaactacaatgatatattttaaa

SEQ ID NO: 181062 - DNA, 65 bp, Homo sapiens
ttaaaaattaaagaactaaagacaatccacaccacctcctccccattttttcttttcagaagaaa

SEQ ID NO: 181063 - DNA, 67 bp, Homo sapiens
ctcctccccattttttcttttcagaagaaaatggaattttcttttatccacaataggagagatttat

SEQ ID NO: 181064 - DNA, 74 bp, Homo sapiens
tcttttcagaagaaaatggaattttcttttatccacaataggagagatttatttattctactgtgctgaatgta

SEQ ID NO: 181065 - DNA, 75 bp, Homo sapiens
aattttcttttatccacaataggagagatttatttattctactgtgctgaatgtagtcctccctcagagatgtcc

SEQ ID NO: 181066 - DNA, 77 bp, Homo sapiens
tatccacaataggagagatttatttattctactgtgctgaatgtagtcctccctcagagatgtcctctttccgtatt

SEQ ID NO: 181067 - DNA, 76 bp, Homo sapiens
aataggagagatttatttattctactgtgctgaatgtagtcctccctcagagatgtcctctttccgtatttgctcc

SEQ ID NO: 181068 - DNA, 79 bp, Homo sapiens
ttctactgtgctgaatgtagtcctccctcagagatgtcctctttccgtatttgctcccctcctctctggttatatagca

SEQ ID NO: 181069 - DNA, 76 bp, Homo sapiens
tgtagtcctccctcagagatgtcctctttccgtatttgctcccctcctctctggttatatagcacctaatgtaata

SEQ ID NO: 181070 - DNA, 78 bp, Homo sapiens
cctcagagatgtcctctttccgtatttgctcccctcctctctggttatatagcacctaatgtaatatgcttctcagaa

SEQ ID NO: 181071 - DNA, 74 bp, Homo sapiens
tttccgtatttgctcccctcctctctggttatatagcacctaatgtaatatgcttctcagaaacagaaactgtt

SEQ ID NO: 181072 - DNA, 76 bp, Homo sapiens
tcccctcctctctggttatatagcacctaatgtaatatgcttctcagaaacagaaactgttttagaaatcaggata

SEQ ID NO: 181073 - DNA, 74 bp, Homo sapiens
cctctctggttatatagcacctaatgtaatatgcttctcagaaacagaaactgttttagaaatcaggatagttt

SEQ ID NO: 181074 - DNA, 76 bp, Homo sapiens
gtaatatgcttctcagaaacagaaactgttttagaaatcaggatagtttttctttcactctgaataggcaatcaca

SEQ ID NO: 181075 - DNA, 77 bp, Homo sapiens
tctcagaaacagaaactgttttagaaatcaggatagtttttctttcactctgaataggcaatcacattctagctcta

SEQ ID NO: 181076 - DNA, 76 bp, Homo sapiens
cagaaactgttttagaaatcaggatagtttttctttcactctgaataggcaatcacattctagctctataatgtat

SEQ ID NO: 181077 - DNA, 81 bp, Homo sapiens
ttagaaatcaggatagtttttctttcactctgaataggcaatcacattctagctctataatgtattcagacagacaagata

SEQ ID NO: 181078 - DNA, 82 bp, Homo sapiens
atcaggatagtttttctttcactctgaataggcaatcacattctagctctataatgtattcagacagacaagatacaagata

SEQ ID NO: 181079 - DNA, 81 bp, Homo sapiens
ttctttcactctgaataggcaatcacattctagctctataatgtattcagacagacaagatacaagataggaaatgaaaag

SEQ ID NO: 181080 - DNA, 81 bp, Homo sapiens
actctgaataggcaatcacattctagctctataatgtattcagacagacaagatacaagataggaaatgaaaaggatacac

SEQ ID NO: 181081 - DNA, 79 bp, Homo sapiens
atcacattctagctctataatgtattcagacagacaagatacaagataggaaatgaaaaggatacactgggacatcctt

SEQ ID NO: 181082 - DNA, 77 bp, Homo sapiens
attctagctctataatgtattcagacagacaagatacaagataggaaatgaaaaggatacactgggacatcctttta

SEQ ID NO: 181083 - DNA, 76 bp, Homo sapiens
taatgtattcagacagacaagatacaagataggaaatgaaaaggatacactgggacatccttttagcaaaaactga

SEQ ID NO: 181084 - DNA, 73 bp, Homo sapiens
agacagacaagatacaagataggaaatgaaaaggatacactgggacatccttttagcaaaaactgatagaact

SEQ ID NO: 181085 - DNA, 70 bp, Homo sapiens
ggatacactgggacatccttttagcaaaaactgatagaacttgtttttcttaactaaattacattaatga

SEQ ID NO: 181086 - DNA, 69 bp, Homo sapiens
gggacatccttttagcaaaaactgatagaacttgtttttcttaactaaattacattaatgaagtgttca

SEQ ID NO: 181087 - DNA, 71 bp, Homo sapiens
tagcaaaaactgatagaacttgtttttcttaactaaattacattaatgaagtgttcagttgaagtgctgtt

SEQ ID NO: 181088 - DNA, 70 bp, Homo sapiens
ctgatagaacttgtttttcttaactaaattacattaatgaagtgttcagttgaagtgctgttttaaaatg

SEQ ID NO: 181089 - DNA, 73 bp, Homo sapiens
aactaaattacattaatgaagtgttcagttgaagtgctgttttaaaatgtgtcttgagtgaagtggaaggcta

SEQ ID NO: 181090 - DNA, 73 bp, Homo sapiens
atgaagtgttcagttgaagtgctgttttaaaatgtgtcttgagtgaagtggaaggctaagtatttaaactgat

SEQ ID NO: 181091 - DNA, 74 bp, Homo sapiens
tttaaaatgtgtcttgagtgaagtggaaggctaagtatttaaactgattaaacagttgagacttcacaagtgca

SEQ ID NO: 181092 - DNA, 76 bp, Homo sapiens
aatgtgtcttgagtgaagtggaaggctaagtatttaaactgattaaacagttgagacttcacaagtgcagtgaaga

SEQ ID NO: 181093 - DNA, 83 bp, Homo sapiens
tatttaaactgattaaacagttgagacttcacaagtgcagtgaagatcaaatgttacactggcactgacatgctaacacagca

SEQ ID NO: 181094 - DNA, 83 bp, Homo sapiens
attaaacagttgagacttcacaagtgcagtgaagatcaaatgttacactggcactgacatgctaacacagcacggtcaggcag

SEQ ID NO: 181095 - DNA, 81 bp, Homo sapiens
acttcacaagtgcagtgaagatcaaatgttacactggcactgacatgctaacacagcacggtcaggcagggaacaagaaaa

SEQ ID NO: 181096 - DNA, 82 bp, Homo sapiens
acaagtgcagtgaagatcaaatgttacactggcactgacatgctaacacagcacggtcaggcagggaacaagaaaagcagcc

SEQ ID NO: 181097 - DNA, 82 bp, Homo sapiens
tgacatgctaacacagcacggtcaggcagggaacaagaaaagcagcccccaaaatgtgtatctgtatcagatgactcacaaa

SEQ ID NO: 181098 - DNA, 78 bp, Homo sapiens
taacacagcacggtcaggcagggaacaagaaaagcagcccccaaaatgtgtatctgtatcagatgactcacaaaccta

SEQ ID NO: 181099 - DNA, 81 bp, Homo sapiens
gtcaggcagggaacaagaaaagcagcccccaaaatgtgtatctgtatcagatgactcacaaacctacatgatgaccacaca

SEQ ID NO: 181100 - DNA, 80 bp, Homo sapiens
agggaacaagaaaagcagcccccaaaatgtgtatctgtatcagatgactcacaaacctacatgatgaccacacagactca

SEQ ID NO: 181101 - DNA, 84 bp, Homo sapiens
aaaatgtgtatctgtatcagatgactcacaaacctacatgatgaccacacagactcaggagttgcagcaataagtaggtgggca

SEQ ID NO: 181102 - DNA, 84 bp, Homo sapiens
tatctgtatcagatgactcacaaacctacatgatgaccacacagactcaggagttgcagcaataagtaggtgggcaacaactaa

SEQ ID NO: 181103 - DNA, 82 bp, Homo sapiens
atgactcacaaacctacatgatgaccacacagactcaggagttgcagcaataagtaggtgggcaacaactaatcacagaata

SEQ ID NO: 181104 - DNA, 81 bp, Homo sapiens
aaacctacatgatgaccacacagactcaggagttgcagcaataagtaggtgggcaacaactaatcacagaatatccagata

SEQ ID NO: 181105 - DNA, 78 bp, Homo sapiens
acagactcaggagttgcagcaataagtaggtgggcaacaactaatcacagaatatccagatattctaaataacaacta

SEQ ID NO: 181106 - DNA, 76 bp, Homo sapiens
agttgcagcaataagtaggtgggcaacaactaatcacagaatatccagatattctaaataacaactagggaaatca

SEQ ID NO: 181107 - DNA, 75 bp, Homo sapiens
agcaataagtaggtgggcaacaactaatcacagaatatccagatattctaaataacaactagggaaatcatctaa

SEQ ID NO: 181108 - DNA, 75 bp, Homo sapiens
gtgggcaacaactaatcacagaatatccagatattctaaataacaactagggaaatcatctaaataggtcatacg

SEQ ID NO: 181109 - DNA, 74 bp, Homo sapiens
aatcacagaatatccagatattctaaataacaactagggaaatcatctaaataggtcatacgtttttcatcaac

SEQ ID NO: 181110 - DNA, 73 bp, Homo sapiens
tatccagatattctaaataacaactagggaaatcatctaaataggtcatacgtttttcatcaactaaacttga

SEQ ID NO: 181111 - DNA, 73 bp, Homo sapiens
ttctaaataacaactagggaaatcatctaaataggtcatacgtttttcatcaactaaacttgagagcagccag

SEQ ID NO: 181112 - DNA, 74 bp, Homo sapiens
aataacaactagggaaatcatctaaataggtcatacgtttttcatcaactaaacttgagagcagccagtggtca

SEQ ID NO: 181113 - DNA, 74 bp, Homo sapiens
aatcatctaaataggtcatacgtttttcatcaactaaacttgagagcagccagtggtcaggattttggttggta

SEQ ID NO: 181114 - DNA, 72 bp, Homo sapiens
tacgtttttcatcaactaaacttgagagcagccagtggtcaggattttggttggtataagtaagctacttta

SEQ ID NO: 181115 - DNA, 73 bp, Homo sapiens
ttcatcaactaaacttgagagcagccagtggtcaggattttggttggtataagtaagctactttaagtttcag

SEQ ID NO: 181116 - DNA, 70 bp, Homo sapiens
aaacttgagagcagccagtggtcaggattttggttggtataagtaagctactttaagtttcagtccattt

SEQ ID NO: 181117 - DNA, 66 bp, Homo sapiens
ggttggtataagtaagctactttaagtttcagtccattttgaggtcttttttccctatcagtttcc

SEQ ID NO: 181118 - DNA, 68 bp, Homo sapiens
gtaagctactttaagtttcagtccattttgaggtcttttttccctatcagtttcctttttatcagaca

SEQ ID NO: 181119 - DNA, 66 bp, Homo sapiens
ctttaagtttcagtccattttgaggtcttttttccctatcagtttcctttttatcagacaaaagac

SEQ ID NO: 181120 - DNA, 67 bp, Homo sapiens
cagtccattttgaggtcttttttccctatcagtttcctttttatcagacaaaagacttctaaaggga

SEQ ID NO: 181121 - DNA, 66 bp, Homo sapiens
gtcttttttccctatcagtttcctttttatcagacaaaagacttctaaagggaaatgttataaggc

SEQ ID NO: 181122 - DNA, 70 bp, Homo sapiens
ccctatcagtttcctttttatcagacaaaagacttctaaagggaaatgttataaggccatgggcatatta

SEQ ID NO: 181123 - DNA, 68 bp, Homo sapiens
gtttcctttttatcagacaaaagacttctaaagggaaatgttataaggccatgggcatattaaagagg

SEQ ID NO: 181124 - DNA, 70 bp, Homo sapiens
cagacaaaagacttctaaagggaaatgttataaggccatgggcatattaaagaggttatattctcctatt

SEQ ID NO: 181125 - DNA, 69 bp, Homo sapiens
gacttctaaagggaaatgttataaggccatgggcatattaaagaggttatattctcctatttaaaagga

SEQ ID NO: 181126 - DNA, 71 bp, Homo sapiens
aagggaaatgttataaggccatgggcatattaaagaggttatattctcctatttaaaaggaatgctgacag

SEQ ID NO: 181127 - DNA, 75 bp, Homo sapiens
ttataaggccatgggcatattaaagaggttatattctcctatttaaaaggaatgctgacaggttggtctgagaga

SEQ ID NO: 181128 - DNA, 75 bp, Homo sapiens
atgggcatattaaagaggttatattctcctatttaaaaggaatgctgacaggttggtctgagagacaaggagaga

SEQ ID NO: 181129 - DNA, 72 bp, Homo sapiens
ttaaagaggttatattctcctatttaaaaggaatgctgacaggttggtctgagagacaaggagagaaacagg

SEQ ID NO: 181130 - DNA, 75 bp, Homo sapiens
tatattctcctatttaaaaggaatgctgacaggttggtctgagagacaaggagagaaacaggggttgaatatgac

SEQ ID NO: 181131 - DNA, 77 bp, Homo sapiens
aatgctgacaggttggtctgagagacaaggagagaaacaggggttgaatatgaccataaaaaacagtcactgagata

SEQ ID NO: 181132 - DNA, 75 bp, Homo sapiens
aggttggtctgagagacaaggagagaaacaggggttgaatatgaccataaaaaacagtcactgagatatctaatg

SEQ ID NO: 181133 - DNA, 74 bp, Homo sapiens
aaacaggggttgaatatgaccataaaaaacagtcactgagatatctaatggggcacacaccctgaggaggctct

SEQ ID NO: 181134 - DNA, 78 bp, Homo sapiens
ttgaatatgaccataaaaaacagtcactgagatatctaatggggcacacaccctgaggaggctcttttcagaggacaa

SEQ ID NO: 181135 - DNA, 77 bp, Homo sapiens
aaaacagtcactgagatatctaatggggcacacaccctgaggaggctcttttcagaggacaaagcattggcaattag

SEQ ID NO: 181136 - DNA, 78 bp, Homo sapiens
atatctaatggggcacacaccctgaggaggctcttttcagaggacaaagcattggcaattaggaagcatcggtctctc

SEQ ID NO: 181137 - DNA, 76 bp, Homo sapiens
gggcacacaccctgaggaggctcttttcagaggacaaagcattggcaattaggaagcatcggtctctccagtttgg

SEQ ID NO: 181138 - DNA, 71 bp, Homo sapiens
ctcttttcagaggacaaagcattggcaattaggaagcatcggtctctccagtttgggttaagaccgctttt

SEQ ID NO: 181139 - DNA, 70 bp, Homo sapiens
ttcagaggacaaagcattggcaattaggaagcatcggtctctccagtttgggttaagaccgctttttttt

SEQ ID NO: 181140 - DNA, 71 bp, Homo sapiens
tttttttttgaatcttagggtcttctacatagtaatggataacagggaaagatttaatgcaatatattata

SEQ ID NO: 181141 - DNA, 75 bp, Homo sapiens
tgaatcttagggtcttctacatagtaatggataacagggaaagatttaatgcaatatattataaatgtaattgga

SEQ ID NO: 181142 - DNA, 72 bp, Homo sapiens
agggtcttctacatagtaatggataacagggaaagatttaatgcaatatattataaatgtaattggatttta

SEQ ID NO: 181143 - DNA, 73 bp, Homo sapiens
catagtaatggataacagggaaagatttaatgcaatatattataaatgtaattggattttaaattcaagtaga

SEQ ID NO: 181144 - DNA, 71 bp, Homo sapiens
ggataacagggaaagatttaatgcaatatattataaatgtaattggattttaaattcaagtagattcgtat

SEQ ID NO: 181145 - DNA, 72 bp, Homo sapiens
gatttaatgcaatatattataaatgtaattggattttaaattcaagtagattcgtattttttccactcaaga

SEQ ID NO: 181146 - DNA, 72 bp, Homo sapiens
tgcaatatattataaatgtaattggattttaaattcaagtagattcgtattttttccactcaagacaaatta

SEQ ID NO: 181147 - DNA, 69 bp, Homo sapiens
ttaaattcaagtagattcgtattttttccactcaagacaaattaaagtaagcatgcctatttgttttct

SEQ ID NO: 181148 - DNA, 72 bp, Homo sapiens
gtagattcgtattttttccactcaagacaaattaaagtaagcatgcctatttgttttcttcatgataaagaa

SEQ ID NO: 181149 - DNA, 74 bp, Homo sapiens
ttccactcaagacaaattaaagtaagcatgcctatttgttttcttcatgataaagaaataaaatcctcagggca

SEQ ID NO: 181150 - DNA, 74 bp, Homo sapiens
tcaagacaaattaaagtaagcatgcctatttgttttcttcatgataaagaaataaaatcctcagggcaatttca

SEQ ID NO: 181151 - DNA, 72 bp, Homo sapiens
aaagtaagcatgcctatttgttttcttcatgataaagaaataaaatcctcagggcaatttcaagttgagtat

SEQ ID NO: 181152 - DNA, 74 bp, Homo sapiens
gcatgcctatttgttttcttcatgataaagaaataaaatcctcagggcaatttcaagttgagtattaattataa

SEQ ID NO: 181153 - DNA, 75 bp, Homo sapiens
ttcttcatgataaagaaataaaatcctcagggcaatttcaagttgagtattaattataagtgacatgaattacca

SEQ ID NO: 181154 - DNA, 73 bp, Homo sapiens
taaagaaataaaatcctcagggcaatttcaagttgagtattaattataagtgacatgaattaccatcttataa

SEQ ID NO: 181155 - DNA, 76 bp, Homo sapiens
aaatcctcagggcaatttcaagttgagtattaattataagtgacatgaattaccatcttataacatggaattatgc

SEQ ID NO: 181156 - DNA, 79 bp, Homo sapiens
gggcaatttcaagttgagtattaattataagtgacatgaattaccatcttataacatggaattatgcctcacagcatta

SEQ ID NO: 181157 - DNA, 79 bp, Homo sapiens
tcaagttgagtattaattataagtgacatgaattaccatcttataacatggaattatgcctcacagcattaaagctact

SEQ ID NO: 181158 - DNA, 78 bp, Homo sapiens
gtattaattataagtgacatgaattaccatcttataacatggaattatgcctcacagcattaaagctacttaaggcac

SEQ ID NO: 181159 - DNA, 79 bp, Homo sapiens
ataagtgacatgaattaccatcttataacatggaattatgcctcacagcattaaagctacttaaggcacttaattgtca

SEQ ID NO: 181160 - DNA, 77 bp, Homo sapiens
attaccatcttataacatggaattatgcctcacagcattaaagctacttaaggcacttaattgtcagcacacttaaa

SEQ ID NO: 181161 - DNA, 76 bp, Homo sapiens
tcttataacatggaattatgcctcacagcattaaagctacttaaggcacttaattgtcagcacacttaaaaggaat

SEQ ID NO: 181162 - DNA, 73 bp, Homo sapiens
ggaattatgcctcacagcattaaagctacttaaggcacttaattgtcagcacacttaaaaggaatttattttc

SEQ ID NO: 181163 - DNA, 71 bp, Homo sapiens
cctcacagcattaaagctacttaaggcacttaattgtcagcacacttaaaaggaatttattttctggaaaa

SEQ ID NO: 181164 - DNA, 71 bp, Homo sapiens
gtcagcacacttaaaaggaatttattttctggaaaacacacaggtgatcctagttttaattaggtcacaca

SEQ ID NO: 181165 - DNA, 70 bp, Homo sapiens
cacacttaaaaggaatttattttctggaaaacacacaggtgatcctagttttaattaggtcacacacata

SEQ ID NO: 181166 - DNA, 73 bp, Homo sapiens
tttattttctggaaaacacacaggtgatcctagttttaattaggtcacacacataattcactggagccaatta

SEQ ID NO: 181167 - DNA, 74 bp, Homo sapiens
tttctggaaaacacacaggtgatcctagttttaattaggtcacacacataattcactggagccaattatgtatt

SEQ ID NO: 181168 - DNA, 75 bp, Homo sapiens
acacacaggtgatcctagttttaattaggtcacacacataattcactggagccaattatgtatttctaactacaa

SEQ ID NO: 181169 - DNA, 75 bp, Homo sapiens
gatcctagttttaattaggtcacacacataattcactggagccaattatgtatttctaactacaaacagcaaaca

SEQ ID NO: 181170 - DNA, 78 bp, Homo sapiens
taggtcacacacataattcactggagccaattatgtatttctaactacaaacagcaaacacatttcttcaaattctga

SEQ ID NO: 181171 - DNA, 78 bp, Homo sapiens
attcactggagccaattatgtatttctaactacaaacagcaaacacatttcttcaaattctgagactatctccagcag

SEQ ID NO: 181172 - DNA, 78 bp, Homo sapiens
attatgtatttctaactacaaacagcaaacacatttcttcaaattctgagactatctccagcagtggatcaacacaaa

SEQ ID NO: 181173 - DNA, 79 bp, Homo sapiens
tacaaacagcaaacacatttcttcaaattctgagactatctccagcagtggatcaacacaaactcttcaaatgaaaaca

SEQ ID NO: 181174 - DNA, 77 bp, Homo sapiens
agactatctccagcagtggatcaacacaaactcttcaaatgaaaacagactttagttcaacagtcagtcctgccact

SEQ ID NO: 181175 - DNA, 75 bp, Homo sapiens
cagtggatcaacacaaactcttcaaatgaaaacagactttagttcaacagtcagtcctgccacttggcatacttt

SEQ ID NO: 181176 - DNA, 74 bp, Homo sapiens
atcaacacaaactcttcaaatgaaaacagactttagttcaacagtcagtcctgccacttggcatacttttccaa

SEQ ID NO: 181177 - DNA, 75 bp, Homo sapiens
ttcaaatgaaaacagactttagttcaacagtcagtcctgccacttggcatacttttccaaggacaaggacatcta

SEQ ID NO: 181178 - DNA, 74 bp, Homo sapiens
aacagactttagttcaacagtcagtcctgccacttggcatacttttccaaggacaaggacatctaatgtgactt

SEQ ID NO: 181179 - DNA, 73 bp, Homo sapiens
actttagttcaacagtcagtcctgccacttggcatacttttccaaggacaaggacatctaatgtgactttttc

SEQ ID NO: 181180 - DNA, 71 bp, Homo sapiens
tcagtcctgccacttggcatacttttccaaggacaaggacatctaatgtgactttttcctataaaaatttt

SEQ ID NO: 181181 - DNA, 70 bp, Homo sapiens
cctgccacttggcatacttttccaaggacaaggacatctaatgtgactttttcctataaaaatttttaga

SEQ ID NO: 181182 - DNA, 68 bp, Homo sapiens
ggcatacttttccaaggacaaggacatctaatgtgactttttcctataaaaatttttagaggaaaagc

SEQ ID NO: 181183 - DNA, 69 bp, Homo sapiens
ccaaggacaaggacatctaatgtgactttttcctataaaaatttttagaggaaaagcctctttctgaga

SEQ ID NO: 181184 - DNA, 68 bp, Homo sapiens
ggacatctaatgtgactttttcctataaaaatttttagaggaaaagcctctttctgagaaaaaggaga

SEQ ID NO: 181185 - DNA, 64 bp, Homo sapiens
gactttttcctataaaaatttttagaggaaaagcctctttctgagaaaaaggagaaacagttcc

SEQ ID NO: 181186 - DNA, 65 bp, Homo sapiens
ataaaaatttttagaggaaaagcctctttctgagaaaaaggagaaacagttccctgtaaagtgtg

SEQ ID NO: 181187 - DNA, 69 bp, Homo sapiens
aaaagcctctttctgagaaaaaggagaaacagttccctgtaaagtgtgtgtaggcataccaaggagacc

SEQ ID NO: 181188 - DNA, 74 bp, Homo sapiens
tttctgagaaaaaggagaaacagttccctgtaaagtgtgtgtaggcataccaaggagaccctgcatcaaatgaa

SEQ ID NO: 181189 - DNA, 76 bp, Homo sapiens
aaaggagaaacagttccctgtaaagtgtgtgtaggcataccaaggagaccctgcatcaaatgaatgtgaccatcta

SEQ ID NO: 181190 - DNA, 75 bp, Homo sapiens
agttccctgtaaagtgtgtgtaggcataccaaggagaccctgcatcaaatgaatgtgaccatctactgccgtttt

SEQ ID NO: 181191 - DNA, 77 bp, Homo sapiens
gtaaagtgtgtgtaggcataccaaggagaccctgcatcaaatgaatgtgaccatctactgccgtttttggtgtttca

SEQ ID NO: 181192 - DNA, 79 bp, Homo sapiens
gcataccaaggagaccctgcatcaaatgaatgtgaccatctactgccgtttttggtgtttcacacctttgctgtgatta

SEQ ID NO: 181193 - DNA, 77 bp, Homo sapiens
aaggagaccctgcatcaaatgaatgtgaccatctactgccgtttttggtgtttcacacctttgctgtgattatccca

SEQ ID NO: 181194 - DNA, 78 bp, Homo sapiens
atcaaatgaatgtgaccatctactgccgtttttggtgtttcacacctttgctgtgattatcccagcagggcttgtgaa

SEQ ID NO: 181195 - DNA, 77 bp, Homo sapiens
atgaatgtgaccatctactgccgtttttggtgtttcacacctttgctgtgattatcccagcagggcttgtgaaagag

SEQ ID NO: 181196 - DNA, 77 bp, Homo sapiens
tttttggtgtttcacacctttgctgtgattatcccagcagggcttgtgaaagagtctgacttcatcacaggcaaccc

SEQ ID NO: 181197 - DNA, 77 bp, Homo sapiens
tgtttcacacctttgctgtgattatcccagcagggcttgtgaaagagtctgacttcatcacaggcaacccctttcct

SEQ ID NO: 181198 - DNA, 79 bp, Homo sapiens
tttgctgtgattatcccagcagggcttgtgaaagagtctgacttcatcacaggcaacccctttccttccaagatactca

SEQ ID NO: 181199 - DNA, 77 bp, Homo sapiens
attatcccagcagggcttgtgaaagagtctgacttcatcacaggcaacccctttccttccaagatactcacctgcga

SEQ ID NO: 181200 - DNA, 74 bp, Homo sapiens
acttcatcacaggcaacccctttccttccaagatactcacctgcgacttcggctgcctcctctatttacaggcc

SEQ ID NO: 181201 - DNA, 73 bp, Homo sapiens
aacccctttccttccaagatactcacctgcgacttcggctgcctcctctatttacaggcctctccatttcaga

SEQ ID NO: 181202 - DNA, 78 bp, Homo sapiens
cttccaagatactcacctgcgacttcggctgcctcctctatttacaggcctctccatttcagagtcattgtcgttatc

SEQ ID NO: 181203 - DNA, 79 bp, Homo sapiens
gacttcggctgcctcctctatttacaggcctctccatttcagagtcattgtcgttatcctccacttcatctgattcctc

SEQ ID NO: 181204 - DNA, 83 bp, Homo sapiens
tgcctcctctatttacaggcctctccatttcagagtcattgtcgttatcctccacttcatctgattcctcctcattgtcatca

SEQ ID NO: 181205 - DNA, 85 bp, Homo sapiens
tctatttacaggcctctccatttcagagtcattgtcgttatcctccacttcatctgattcctcctcattgtcatcagaatgcaga

SEQ ID NO: 181206 - DNA, 86 bp, Homo sapiens
tctccatttcagagtcattgtcgttatcctccacttcatctgattcctcctcattgtcatcagaatgcagatctttcattatagac

SEQ ID NO: 181207 - DNA, 85 bp, Homo sapiens
ttcagagtcattgtcgttatcctccacttcatctgattcctcctcattgtcatcagaatgcagatctttcattatagacctcaaa

SEQ ID NO: 181208 - DNA, 81 bp, Homo sapiens
attgtcgttatcctccacttcatctgattcctcctcattgtcatcagaatgcagatctttcattatagacctcaaaggacc

SEQ ID NO: 181209 - DNA, 85 bp, Homo sapiens
tccacttcatctgattcctcctcattgtcatcagaatgcagatctttcattatagacctcaaaggacctgagtaatgacaatgaa

SEQ ID NO: 181210 - DNA, 83 bp, Homo sapiens
atctgattcctcctcattgtcatcagaatgcagatctttcattatagacctcaaaggacctgagtaatgacaatgaaccacag

SEQ ID NO: 181211 - DNA, 82 bp, Homo sapiens
atcagaatgcagatctttcattatagacctcaaaggacctgagtaatgacaatgaaccacaggcaatcaaacatatactcaa

SEQ ID NO: 181212 - DNA, 78 bp, Homo sapiens
attatagacctcaaaggacctgagtaatgacaatgaaccacaggcaatcaaacatatactcaaacacacttagccata

SEQ ID NO: 181213 - DNA, 76 bp, Homo sapiens
aaaggacctgagtaatgacaatgaaccacaggcaatcaaacatatactcaaacacacttagccatattagaaacag

SEQ ID NO: 181214 - DNA, 77 bp, Homo sapiens
agtaatgacaatgaaccacaggcaatcaaacatatactcaaacacacttagccatattagaaacagggggatgctta

SEQ ID NO: 181215 - DNA, 78 bp, Homo sapiens
atgaaccacaggcaatcaaacatatactcaaacacacttagccatattagaaacagggggatgcttaccagcactgaa

SEQ ID NO: 181216 - DNA, 77 bp, Homo sapiens
gcaatcaaacatatactcaaacacacttagccatattagaaacagggggatgcttaccagcactgaacactggttaa

SEQ ID NO: 181217 - DNA, 73 bp, Homo sapiens
atatactcaaacacacttagccatattagaaacagggggatgcttaccagcactgaacactggttaaaaataa

SEQ ID NO: 181218 - DNA, 76 bp, Homo sapiens
aacacacttagccatattagaaacagggggatgcttaccagcactgaacactggttaaaaataatcatcatatata

SEQ ID NO: 181219 - DNA, 76 bp, Homo sapiens
cttagccatattagaaacagggggatgcttaccagcactgaacactggttaaaaataatcatcatatatatttata

SEQ ID NO: 181220 - DNA, 75 bp, Homo sapiens
aacagggggatgcttaccagcactgaacactggttaaaaataatcatcatatatatttatacaatttacaaggca

SEQ ID NO: 181221 - DNA, 75 bp, Homo sapiens
gggatgcttaccagcactgaacactggttaaaaataatcatcatatatatttatacaatttacaaggcaaatttg

SEQ ID NO: 181222 - DNA, 74 bp, Homo sapiens
cagcactgaacactggttaaaaataatcatcatatatatttatacaatttacaaggcaaatttggtatagtttc

SEQ ID NO: 181223 - DNA, 73 bp, Homo sapiens
cactggttaaaaataatcatcatatatatttatacaatttacaaggcaaatttggtatagtttctaaaatgca

SEQ ID NO: 181224 - DNA, 76 bp, Homo sapiens
taatcatcatatatatttatacaatttacaaggcaaatttggtatagtttctaaaatgcaatctctgccaaaacac

SEQ ID NO: 181225 - DNA, 72 bp, Homo sapiens
atatatttatacaatttacaaggcaaatttggtatagtttctaaaatgcaatctctgccaaaacactattgt

SEQ ID NO: 181226 - DNA, 73 bp, Homo sapiens
tacaatttacaaggcaaatttggtatagtttctaaaatgcaatctctgccaaaacactattgttttcataatg

SEQ ID NO: 181227 - DNA, 73 bp, Homo sapiens
caaggcaaatttggtatagtttctaaaatgcaatctctgccaaaacactattgttttcataatggattcccaa

SEQ ID NO: 181228 - DNA, 71 bp, Homo sapiens
aatttggtatagtttctaaaatgcaatctctgccaaaacactattgttttcataatggattcccaaaatat

SEQ ID NO: 181229 - DNA, 74 bp, Homo sapiens
tctaaaatgcaatctctgccaaaacactattgttttcataatggattcccaaaatatttattaaagaatctcta

SEQ ID NO: 181230 - DNA, 74 bp, Homo sapiens
tgcaatctctgccaaaacactattgttttcataatggattcccaaaatatttattaaagaatctctattttcta

SEQ ID NO: 181231 - DNA, 70 bp, Homo sapiens
tgccaaaacactattgttttcataatggattcccaaaatatttattaaagaatctctattttctaggaat

SEQ ID NO: 181232 - DNA, 66 bp, Homo sapiens
ctattgttttcataatggattcccaaaatatttattaaagaatctctattttctaggaattttttt

SEQ ID NO: 181233 - DNA, 67 bp, Homo sapiens
cataatggattcccaaaatatttattaaagaatctctattttctaggaattttttttctgtgtattt

SEQ ID NO: 181234 - DNA, 65 bp, Homo sapiens
aaagaatctctattttctaggaattttttttctgtgtatttttcttccctaagaaaaattataca

SEQ ID NO: 181235 - DNA, 70 bp, Homo sapiens
aagaaaaagaaaaatctatcagtaaattgaatgttttgttaggttaatccatgtattgagaagttgagat

SEQ ID NO: 181236 - DNA, 73 bp, Homo sapiens
gaaaaatctatcagtaaattgaatgttttgttaggttaatccatgtattgagaagttgagattaataaatcac

SEQ ID NO: 181237 - DNA, 74 bp, Homo sapiens
ctatcagtaaattgaatgttttgttaggttaatccatgtattgagaagttgagattaataaatcactgtggttg

SEQ ID NO: 181238 - DNA, 72 bp, Homo sapiens
atgttttgttaggttaatccatgtattgagaagttgagattaataaatcactgtggttgtaacttgttcttg

SEQ ID NO: 181239 - DNA, 77 bp, Homo sapiens
ttgttaggttaatccatgtattgagaagttgagattaataaatcactgtggttgtaacttgttcttggcaatgcagc

SEQ ID NO: 181240 - DNA, 76 bp, Homo sapiens
atgtattgagaagttgagattaataaatcactgtggttgtaacttgttcttggcaatgcagcctttgtgtggtact

SEQ ID NO: 181241 - DNA, 74 bp, Homo sapiens
aagttgagattaataaatcactgtggttgtaacttgttcttggcaatgcagcctttgtgtggtactttttgatc

SEQ ID NO: 181242 - DNA, 74 bp, Homo sapiens
agattaataaatcactgtggttgtaacttgttcttggcaatgcagcctttgtgtggtactttttgatccattaa

SEQ ID NO: 181243 - DNA, 72 bp, Homo sapiens
actgtggttgtaacttgttcttggcaatgcagcctttgtgtggtactttttgatccattaaggtttagctgt

SEQ ID NO: 181244 - DNA, 71 bp, Homo sapiens
taacttgttcttggcaatgcagcctttgtgtggtactttttgatccattaaggtttagctgttccttttat

SEQ ID NO: 181245 - DNA, 71 bp, Homo sapiens
atgcagcctttgtgtggtactttttgatccattaaggtttagctgttccttttatttcaaggtcaatttca

SEQ ID NO: 181246 - DNA, 70 bp, Homo sapiens
ggtactttttgatccattaaggtttagctgttccttttatttcaaggtcaatttcaggtcaagcaagcat

SEQ ID NO: 181247 - DNA, 73 bp, Homo sapiens
tttgatccattaaggtttagctgttccttttatttcaaggtcaatttcaggtcaagcaagcatttcagtcaag

SEQ ID NO: 181248 - DNA, 72 bp, Homo sapiens
attaaggtttagctgttccttttatttcaaggtcaatttcaggtcaagcaagcatttcagtcaagttcagat

SEQ ID NO: 181249 - DNA, 76 bp, Homo sapiens
tttcaaggtcaatttcaggtcaagcaagcatttcagtcaagttcagattataaagtatttcaattccatggtgtaa

SEQ ID NO: 181250 - DNA, 76 bp, Homo sapiens
atttcaggtcaagcaagcatttcagtcaagttcagattataaagtatttcaattccatggtgtaatatcctacctc

SEQ ID NO: 181251 - DNA, 78 bp, Homo sapiens
aagcaagcatttcagtcaagttcagattataaagtatttcaattccatggtgtaatatcctacctctgatcttcacat

SEQ ID NO: 181252 - DNA, 79 bp, Homo sapiens
agcatttcagtcaagttcagattataaagtatttcaattccatggtgtaatatcctacctctgatcttcacattgatct

SEQ ID NO: 181253 - DNA, 77 bp, Homo sapiens
aagttcagattataaagtatttcaattccatggtgtaatatcctacctctgatcttcacattgatcttggacacaag

SEQ ID NO: 181254 - DNA, 76 bp, Homo sapiens
attataaagtatttcaattccatggtgtaatatcctacctctgatcttcacattgatcttggacacaaggtcttgt

SEQ ID NO: 181255 - DNA, 79 bp, Homo sapiens
atttcaattccatggtgtaatatcctacctctgatcttcacattgatcttggacacaaggtcttgttgcagcaatttta

SEQ ID NO: 181256 - DNA, 80 bp, Homo sapiens
tgtaatatcctacctctgatcttcacattgatcttggacacaaggtcttgttgcagcaattttaagcagccaattttcat

SEQ ID NO: 181257 - DNA, 79 bp, Homo sapiens
tatcctacctctgatcttcacattgatcttggacacaaggtcttgttgcagcaattttaagcagccaattttcatttta

SEQ ID NO: 181258 - DNA, 76 bp, Homo sapiens
ctgatcttcacattgatcttggacacaaggtcttgttgcagcaattttaagcagccaattttcattttacttttta

SEQ ID NO: 181259 - DNA, 72 bp, Homo sapiens
cattgatcttggacacaaggtcttgttgcagcaattttaagcagccaattttcattttactttttaagaaat

SEQ ID NO: 181260 - DNA, 74 bp, Homo sapiens
cttgttgcagcaattttaagcagccaattttcattttactttttaagaaattactggcacaataccagcatgta

SEQ ID NO: 181261 - DNA, 73 bp, Homo sapiens
gcaattttaagcagccaattttcattttactttttaagaaattactggcacaataccagcatgtataaacata

SEQ ID NO: 181262 - DNA, 73 bp, Homo sapiens
gcagccaattttcattttactttttaagaaattactggcacaataccagcatgtataaacataaacaagacca

SEQ ID NO: 181263 - DNA, 72 bp, Homo sapiens
tttactttttaagaaattactggcacaataccagcatgtataaacataaacaagaccatgtaataaatcagg

SEQ ID NO: 181264 - DNA, 75 bp, Homo sapiens
ttaagaaattactggcacaataccagcatgtataaacataaacaagaccatgtaataaatcaggtacacagaaaa

SEQ ID NO: 181265 - DNA, 78 bp, Homo sapiens
ataccagcatgtataaacataaacaagaccatgtaataaatcaggtacacagaaaaatcaggacagtatccagtatca

SEQ ID NO: 181266 - DNA, 76 bp, Homo sapiens
gtataaacataaacaagaccatgtaataaatcaggtacacagaaaaatcaggacagtatccagtatcagacaggaa

SEQ ID NO: 181267 - DNA, 74 bp, Homo sapiens
ataaacaagaccatgtaataaatcaggtacacagaaaaatcaggacagtatccagtatcagacaggaaaaagaa

SEQ ID NO: 181268 - DNA, 74 bp, Homo sapiens
cacacaaacacaaattcatcagtgtggcttattttcactttactaggctaaatgtgatgaaaaatagatagttt

SEQ ID NO: 181269 - DNA, 73 bp, Homo sapiens
acacaaattcatcagtgtggcttattttcactttactaggctaaatgtgatgaaaaatagatagttttaatct

SEQ ID NO: 181270 - DNA, 72 bp, Homo sapiens
cagtgtggcttattttcactttactaggctaaatgtgatgaaaaatagatagttttaatcttaacagaagag

SEQ ID NO: 181271 - DNA, 70 bp, Homo sapiens
ggcttattttcactttactaggctaaatgtgatgaaaaatagatagttttaatcttaacagaagaggtta

SEQ ID NO: 181272 - DNA, 72 bp, Homo sapiens
cactttactaggctaaatgtgatgaaaaatagatagttttaatcttaacagaagaggttataaagacaatga

SEQ ID NO: 181273 - DNA, 70 bp, Homo sapiens
aaaatagatagttttaatcttaacagaagaggttataaagacaatgaagaaagagagacactttcattcg

SEQ ID NO: 181274 - DNA, 71 bp, Homo sapiens
gttttaatcttaacagaagaggttataaagacaatgaagaaagagagacactttcattcgggattaggcaa

SEQ ID NO: 181275 - DNA, 71 bp, Homo sapiens
ttaacagaagaggttataaagacaatgaagaaagagagacactttcattcgggattaggcaattcctaaag

SEQ ID NO: 181276 - DNA, 73 bp, Homo sapiens
aggttataaagacaatgaagaaagagagacactttcattcgggattaggcaattcctaaagtcccatctatga

SEQ ID NO: 181277 - DNA, 77 bp, Homo sapiens
agacaatgaagaaagagagacactttcattcgggattaggcaattcctaaagtcccatctatgacagggatatctga

SEQ ID NO: 181278 - DNA, 76 bp, Homo sapiens
aaagagagacactttcattcgggattaggcaattcctaaagtcccatctatgacagggatatctgagctattacta

SEQ ID NO: 181279 - DNA, 77 bp, Homo sapiens
agacactttcattcgggattaggcaattcctaaagtcccatctatgacagggatatctgagctattactatcttgac

SEQ ID NO: 181280 - DNA, 76 bp, Homo sapiens
attcgggattaggcaattcctaaagtcccatctatgacagggatatctgagctattactatcttgactccctacaa

SEQ ID NO: 181281 - DNA, 79 bp, Homo sapiens
aattcctaaagtcccatctatgacagggatatctgagctattactatcttgactccctacaatctcacattctgcaaaa

SEQ ID NO: 181282 - DNA, 79 bp, Homo sapiens
taaagtcccatctatgacagggatatctgagctattactatcttgactccctacaatctcacattctgcaaaacccaaa

SEQ ID NO: 181283 - DNA, 79 bp, Homo sapiens
tatgacagggatatctgagctattactatcttgactccctacaatctcacattctgcaaaacccaaatttatctgcttt

SEQ ID NO: 181284 - DNA, 74 bp, Homo sapiens
tattactatcttgactccctacaatctcacattctgcaaaacccaaatttatctgcttttgtagtgggcttatt

SEQ ID NO: 181285 - DNA, 73 bp, Homo sapiens
ttgactccctacaatctcacattctgcaaaacccaaatttatctgcttttgtagtgggcttatttctttggaa

SEQ ID NO: 181286 - DNA, 74 bp, Homo sapiens
tacaatctcacattctgcaaaacccaaatttatctgcttttgtagtgggcttatttctttggaagtcagtgaaa

SEQ ID NO: 181287 - DNA, 71 bp, Homo sapiens
acattctgcaaaacccaaatttatctgcttttgtagtgggcttatttctttggaagtcagtgaaacaagac

SEQ ID NO: 181288 - DNA, 70 bp, Homo sapiens
aaacccaaatttatctgcttttgtagtgggcttatttctttggaagtcagtgaaacaagacctctgaata

SEQ ID NO: 181289 - DNA, 73 bp, Homo sapiens
ttatctgcttttgtagtgggcttatttctttggaagtcagtgaaacaagacctctgaatagccaaaacgatta

SEQ ID NO: 181290 - DNA, 71 bp, Homo sapiens
tagtgggcttatttctttggaagtcagtgaaacaagacctctgaatagccaaaacgattactgtcttttat

SEQ ID NO: 181291 - DNA, 67 bp, Homo sapiens
ttatttttttcctggaagcttagccttagtccaaacacatacaacaatttaatccttttcaaaacat

SEQ ID NO: 181292 - DNA, 70 bp, Homo sapiens
ttttcctggaagcttagccttagtccaaacacatacaacaatttaatccttttcaaaacattcaaagcca

SEQ ID NO: 181293 - DNA, 72 bp, Homo sapiens
agcttagccttagtccaaacacatacaacaatttaatccttttcaaaacattcaaagccatcaggaattcag

SEQ ID NO: 181294 - DNA, 75 bp, Homo sapiens
tagtccaaacacatacaacaatttaatccttttcaaaacattcaaagccatcaggaattcagtgtggtcattgaa

SEQ ID NO: 181295 - DNA, 73 bp, Homo sapiens
cacatacaacaatttaatccttttcaaaacattcaaagccatcaggaattcagtgtggtcattgaaaaaggta

SEQ ID NO: 181296 - DNA, 74 bp, Homo sapiens
aatccttttcaaaacattcaaagccatcaggaattcagtgtggtcattgaaaaaggtaatgttcaatactatgc

SEQ ID NO: 181297 - DNA, 75 bp, Homo sapiens
caaaacattcaaagccatcaggaattcagtgtggtcattgaaaaaggtaatgttcaatactatgctaaaacacaa

SEQ ID NO: 181298 - DNA, 75 bp, Homo sapiens
ttcaaagccatcaggaattcagtgtggtcattgaaaaaggtaatgttcaatactatgctaaaacacaaattctac

SEQ ID NO: 181299 - DNA, 73 bp, Homo sapiens
caggaattcagtgtggtcattgaaaaaggtaatgttcaatactatgctaaaacacaaattctactttgatacc

SEQ ID NO: 181300 - DNA, 74 bp, Homo sapiens
cagtgtggtcattgaaaaaggtaatgttcaatactatgctaaaacacaaattctactttgatacctatgcattt

SEQ ID NO: 181301 - DNA, 73 bp, Homo sapiens
attgaaaaaggtaatgttcaatactatgctaaaacacaaattctactttgatacctatgcatttttcatgtaa

SEQ ID NO: 181302 - DNA, 75 bp, Homo sapiens
gtaatgttcaatactatgctaaaacacaaattctactttgatacctatgcatttttcatgtaaaaagagtgtata

SEQ ID NO: 181303 - DNA, 74 bp, Homo sapiens
atactatgctaaaacacaaattctactttgatacctatgcatttttcatgtaaaaagagtgtatatttgaagat

SEQ ID NO: 181304 - DNA, 75 bp, Homo sapiens
acacaaattctactttgatacctatgcatttttcatgtaaaaagagtgtatatttgaagattttccacatacaca

SEQ ID NO: 181305 - DNA, 75 bp, Homo sapiens
tctactttgatacctatgcatttttcatgtaaaaagagtgtatatttgaagattttccacatacacaaaaatgga

SEQ ID NO: 181306 - DNA, 73 bp, Homo sapiens
atacctatgcatttttcatgtaaaaagagtgtatatttgaagattttccacatacacaaaaatggaaaatata

SEQ ID NO: 181307 - DNA, 69 bp, Homo sapiens
aaagagtgtatatttgaagattttccacatacacaaaaatggaaaatataattagttaaatattctagt

SEQ ID NO: 181308 - DNA, 70 bp, Homo sapiens
gattttccacatacacaaaaatggaaaatataattagttaaatattctagtttaaatgtctttattctga

SEQ ID NO: 181309 - DNA, 69 bp, Homo sapiens
catacacaaaaatggaaaatataattagttaaatattctagtttaaatgtctttattctgaattcaagt

SEQ ID NO: 181310 - DNA, 72 bp, Homo sapiens
gaaaatataattagttaaatattctagtttaaatgtctttattctgaattcaagttaacacttgatcatgag

SEQ ID NO: 181311 - DNA, 72 bp, Homo sapiens
attagttaaatattctagtttaaatgtctttattctgaattcaagttaacacttgatcatgagtagagaaaa

SEQ ID NO: 181312 - DNA, 73 bp, Homo sapiens
aaatattctagtttaaatgtctttattctgaattcaagttaacacttgatcatgagtagagaaaaatatatat

SEQ ID NO: 181313 - DNA, 70 bp, Homo sapiens
tatttaaaagatagccaattagtattgccttaaagactattaacatgtagaaaaaaaatatgtccaggag

SEQ ID NO: 181314 - DNA, 72 bp, Homo sapiens
aagatagccaattagtattgccttaaagactattaacatgtagaaaaaaaatatgtccaggaggaaagatga

SEQ ID NO: 181315 - DNA, 69 bp, Homo sapiens
caattagtattgccttaaagactattaacatgtagaaaaaaaatatgtccaggaggaaagatgaaaacc

SEQ ID NO: 181316 - DNA, 70 bp, Homo sapiens
ctattaacatgtagaaaaaaaatatgtccaggaggaaagatgaaaacctatttccctatgtcaaagcctc

SEQ ID NO: 181317 - DNA, 67 bp, Homo sapiens
gaaaaaaaatatgtccaggaggaaagatgaaaacctatttccctatgtcaaagcctcttaaagcttt

SEQ ID NO: 181318 - DNA, 71 bp, Homo sapiens
aaatatgtccaggaggaaagatgaaaacctatttccctatgtcaaagcctcttaaagcttttgctattgta

SEQ ID NO: 181319 - DNA, 69 bp, Homo sapiens
ggaaagatgaaaacctatttccctatgtcaaagcctcttaaagcttttgctattgtatttcctttggga

SEQ ID NO: 181320 - DNA, 68 bp, Homo sapiens
atgaaaacctatttccctatgtcaaagcctcttaaagcttttgctattgtatttcctttgggaactcc

SEQ ID NO: 181321 - DNA, 69 bp, Homo sapiens
atttccctatgtcaaagcctcttaaagcttttgctattgtatttcctttgggaactccctgggatgggc

SEQ ID NO: 181322 - DNA, 70 bp, Homo sapiens
aaagcctcttaaagcttttgctattgtatttcctttgggaactccctgggatgggctgtgtctataatcc

SEQ ID NO: 181323 - DNA, 71 bp, Homo sapiens
tcttaaagcttttgctattgtatttcctttgggaactccctgggatgggctgtgtctataatccttttgta

SEQ ID NO: 181324 - DNA, 74 bp, Homo sapiens
ttttgctattgtatttcctttgggaactccctgggatgggctgtgtctataatccttttgtagcaatgacaatc

SEQ ID NO: 181325 - DNA, 77 bp, Homo sapiens
ttgctattgtatttcctttgggaactccctgggatgggctgtgtctataatccttttgtagcaatgacaatctgatg

SEQ ID NO: 181326 - DNA, 76 bp, Homo sapiens
attgtatttcctttgggaactccctgggatgggctgtgtctataatccttttgtagcaatgacaatctgatggcag

SEQ ID NO: 181327 - DNA, 75 bp, Homo sapiens
atttcctttgggaactccctgggatgggctgtgtctataatccttttgtagcaatgacaatctgatggcagggac

SEQ ID NO: 181328 - DNA, 75 bp, Homo sapiens
tgggaactccctgggatgggctgtgtctataatccttttgtagcaatgacaatctgatggcagggaccggaaaaa

SEQ ID NO: 181329 - DNA, 73 bp, Homo sapiens
aactccctgggatgggctgtgtctataatccttttgtagcaatgacaatctgatggcagggaccggaaaaagg

SEQ ID NO: 181330 - DNA, 73 bp, Homo sapiens
ctgggatgggctgtgtctataatccttttgtagcaatgacaatctgatggcagggaccggaaaaaggggaatt

SEQ ID NO: 181331 - DNA, 74 bp, Homo sapiens
atgggctgtgtctataatccttttgtagcaatgacaatctgatggcagggaccggaaaaaggggaatttctaga

SEQ ID NO: 181332 - DNA, 73 bp, Homo sapiens
taatccttttgtagcaatgacaatctgatggcagggaccggaaaaaggggaatttctagagccttgcctcgta

SEQ ID NO: 181333 - DNA, 76 bp, Homo sapiens
tagcaatgacaatctgatggcagggaccggaaaaaggggaatttctagagccttgcctcgtacatcagaacaatac

SEQ ID NO: 181334 - DNA, 74 bp, Homo sapiens
atctgatggcagggaccggaaaaaggggaatttctagagccttgcctcgtacatcagaacaatactcaactgta

SEQ ID NO: 181335 - DNA, 70 bp, Homo sapiens
agggaccggaaaaaggggaatttctagagccttgcctcgtacatcagaacaatactcaactgtattccta

SEQ ID NO: 181336 - DNA, 70 bp, Homo sapiens
aaaaggggaatttctagagccttgcctcgtacatcagaacaatactcaactgtattcctaagggaaataa

SEQ ID NO: 181337 - DNA, 75 bp, Homo sapiens
atttctagagccttgcctcgtacatcagaacaatactcaactgtattcctaagggaaataaatacaactgcataa

SEQ ID NO: 181338 - DNA, 73 bp, Homo sapiens
gaacaatactcaactgtattcctaagggaaataaatacaactgcataaaagccaagttatgattcgaataata

SEQ ID NO: 181339 - DNA, 71 bp, Homo sapiens
caactgtattcctaagggaaataaatacaactgcataaaagccaagttatgattcgaataataaaacagta

SEQ ID NO: 181340 - DNA, 75 bp, Homo sapiens
tacaactgcataaaagccaagttatgattcgaataataaaacagtataaggtgataaatcaagacattaagatgg

SEQ ID NO: 181341 - DNA, 73 bp, Homo sapiens
ctgcataaaagccaagttatgattcgaataataaaacagtataaggtgataaatcaagacattaagatggttt

SEQ ID NO: 181342 - DNA, 70 bp, Homo sapiens
gccaagttatgattcgaataataaaacagtataaggtgataaatcaagacattaagatggtttttttttg

SEQ ID NO: 181343 - DNA, 77 bp, Homo sapiens
tcccaaagtgccattaaggtgttttatgagaaaagcatctcctagtttgcatgagatgttgataccttgttgcctgg

SEQ ID NO: 181344 - DNA, 78 bp, Homo sapiens
agtgccattaaggtgttttatgagaaaagcatctcctagtttgcatgagatgttgataccttgttgcctggtctggga

SEQ ID NO: 181345 - DNA, 79 bp, Homo sapiens
aggtgttttatgagaaaagcatctcctagtttgcatgagatgttgataccttgttgcctggtctgggatggtgtgaagc

SEQ ID NO: 181346 - DNA, 83 bp, Homo sapiens
agaaaagcatctcctagtttgcatgagatgttgataccttgttgcctggtctgggatggtgtgaagctggagctggagctgga

SEQ ID NO: 181347 - DNA, 85 bp, Homo sapiens
atctcctagtttgcatgagatgttgataccttgttgcctggtctgggatggtgtgaagctggagctggagctggagctggagctg

SEQ ID NO: 181348 - DNA, 83 bp, Homo sapiens
atgagatgttgataccttgttgcctggtctgggatggtgtgaagctggagctggagctggagctggagctggcaggactgggt

SEQ ID NO: 181349 - DNA, 83 bp, Homo sapiens
tgttgataccttgttgcctggtctgggatggtgtgaagctggagctggagctggagctggagctggcaggactgggttgttca

SEQ ID NO: 181350 - DNA, 81 bp, Homo sapiens
ttgcctggtctgggatggtgtgaagctggagctggagctggagctggagctggcaggactgggttgttcagactttaaaga

SEQ ID NO: 181351 - DNA, 80 bp, Homo sapiens
gtctgggatggtgtgaagctggagctggagctggagctggagctggcaggactgggttgttcagactttaaagaagaata

SEQ ID NO: 181352 - DNA, 78 bp, Homo sapiens
ggatggtgtgaagctggagctggagctggagctggagctggcaggactgggttgttcagactttaaagaagaataaaa

SEQ ID NO: 181353 - DNA, 77 bp, Homo sapiens
atggtgtgaagctggagctggagctggagctggagctggcaggactgggttgttcagactttaaagaagaataaaaa

SEQ ID NO: 181354 - DNA, 76 bp, Homo sapiens
aagctggagctggagctggagctggagctggcaggactgggttgttcagactttaaagaagaataaaaaggcacca

SEQ ID NO: 181355 - DNA, 78 bp, Homo sapiens
tggagctggagctggagctggagctggcaggactgggttgttcagactttaaagaagaataaaaaggcaccatcaata

SEQ ID NO: 181356 - DNA, 75 bp, Homo sapiens
tggagctggagctggagctggcaggactgggttgttcagactttaaagaagaataaaaaggcaccatcaataaat

SEQ ID NO: 181357 - DNA, 73 bp, Homo sapiens
ctggagctggagctggcaggactgggttgttcagactttaaagaagaataaaaaggcaccatcaataaattta

SEQ ID NO: 181358 - DNA, 70 bp, Homo sapiens
agctggcaggactgggttgttcagactttaaagaagaataaaaaggcaccatcaataaatttacgggata

SEQ ID NO: 181359 - DNA, 69 bp, Homo sapiens
actgggttgttcagactttaaagaagaataaaaaggcaccatcaataaatttacgggataccacacatc

SEQ ID NO: 181360 - DNA, 69 bp, Homo sapiens
gttgttcagactttaaagaagaataaaaaggcaccatcaataaatttacgggataccacacatctaaag

SEQ ID NO: 181361 - DNA, 69 bp, Homo sapiens
aagaagaataaaaaggcaccatcaataaatttacgggataccacacatctaaagttgaaaacagtattg

SEQ ID NO: 181362 - DNA, 74 bp, Homo sapiens
catcaataaatttacgggataccacacatctaaagttgaaaacagtattgttgctcaaaccatcctctgcaaaa

SEQ ID NO: 181363 - DNA, 71 bp, Homo sapiens
taaatttacgggataccacacatctaaagttgaaaacagtattgttgctcaaaccatcctctgcaaaaacc

SEQ ID NO: 181364 - DNA, 77 bp, Homo sapiens
ataccacacatctaaagttgaaaacagtattgttgctcaaaccatcctctgcaaaaaccgtgatgcatttcattatg

SEQ ID NO: 181365 - DNA, 76 bp, Homo sapiens
aaaacagtattgttgctcaaaccatcctctgcaaaaaccgtgatgcatttcattatgtcaaattactaacacagga

SEQ ID NO: 181366 - DNA, 79 bp, Homo sapiens
attgttgctcaaaccatcctctgcaaaaaccgtgatgcatttcattatgtcaaattactaacacaggagagtcatgttg

SEQ ID NO: 181367 - DNA, 76 bp, Homo sapiens
aaaccatcctctgcaaaaaccgtgatgcatttcattatgtcaaattactaacacaggagagtcatgttgtcttttg

SEQ ID NO: 181368 - DNA, 76 bp, Homo sapiens
aaaaaccgtgatgcatttcattatgtcaaattactaacacaggagagtcatgttgtcttttgttgtgcccactgta

SEQ ID NO: 181369 - DNA, 77 bp, Homo sapiens
cgtgatgcatttcattatgtcaaattactaacacaggagagtcatgttgtcttttgttgtgcccactgtatttttat

SEQ ID NO: 181370 - DNA, 78 bp, Homo sapiens
ttcattatgtcaaattactaacacaggagagtcatgttgtcttttgttgtgcccactgtatttttattagatgcagaa

SEQ ID NO: 181371 - DNA, 75 bp, Homo sapiens
caaattactaacacaggagagtcatgttgtcttttgttgtgcccactgtatttttattagatgcagaaacaagta

SEQ ID NO: 181372 - DNA, 75 bp, Homo sapiens
cacaggagagtcatgttgtcttttgttgtgcccactgtatttttattagatgcagaaacaagtataaaaacttga

SEQ ID NO: 181373 - DNA, 74 bp, Homo sapiens
tgcccactgtatttttattagatgcagaaacaagtataaaaacttgaggagataaacacttgggtgttacatga

SEQ ID NO: 181374 - DNA, 70 bp, Homo sapiens
tttttattagatgcagaaacaagtataaaaacttgaggagataaacacttgggtgttacatgagaaaagg

SEQ ID NO: 181375 - DNA, 72 bp, Homo sapiens
tagatgcagaaacaagtataaaaacttgaggagataaacacttgggtgttacatgagaaaagggcctggctt

SEQ ID NO: 181376 - DNA, 72 bp, Homo sapiens
atgcagaaacaagtataaaaacttgaggagataaacacttgggtgttacatgagaaaagggcctggctttga

SEQ ID NO: 181377 - DNA, 68 bp, Homo sapiens
aaacaagtataaaaacttgaggagataaacacttgggtgttacatgagaaaagggcctggctttgatt

SEQ ID NO: 181378 - DNA, 70 bp, Homo sapiens
aacttgaggagataaacacttgggtgttacatgagaaaagggcctggctttgatttcactcctacgttta

SEQ ID NO: 181379 - DNA, 72 bp, Homo sapiens
agataaacacttgggtgttacatgagaaaagggcctggctttgatttcactcctacgtttactgctatacag

SEQ ID NO: 181380 - DNA, 72 bp, Homo sapiens
ttgggtgttacatgagaaaagggcctggctttgatttcactcctacgtttactgctatacaggtctccctct

SEQ ID NO: 181381 - DNA, 74 bp, Homo sapiens
tacatgagaaaagggcctggctttgatttcactcctacgtttactgctatacaggtctccctcttttcatctta

SEQ ID NO: 181382 - DNA, 73 bp, Homo sapiens
gcctggctttgatttcactcctacgtttactgctatacaggtctccctcttttcatcttagatataaaatact

SEQ ID NO: 181383 - DNA, 72 bp, Homo sapiens
gctttgatttcactcctacgtttactgctatacaggtctccctcttttcatcttagatataaaatacttctt

SEQ ID NO: 181384 - DNA, 71 bp, Homo sapiens
cactcctacgtttactgctatacaggtctccctcttttcatcttagatataaaatacttctttattatact

SEQ ID NO: 181385 - DNA, 75 bp, Homo sapiens
cattagagaaatacagctgtctttctaagagataccttgattaccctttctgtaatgttcgattgactcaactgg

SEQ ID NO: 181386 - DNA, 73 bp, Homo sapiens
atacagctgtctttctaagagataccttgattaccctttctgtaatgttcgattgactcaactggttaaaaca

SEQ ID NO: 181387 - DNA, 71 bp, Homo sapiens
ctttctaagagataccttgattaccctttctgtaatgttcgattgactcaactggttaaaacatagtggta

SEQ ID NO: 181388 - DNA, 72 bp, Homo sapiens
agataccttgattaccctttctgtaatgttcgattgactcaactggttaaaacatagtggtaatgaggctaa

SEQ ID NO: 181389 - DNA, 73 bp, Homo sapiens
ttgattaccctttctgtaatgttcgattgactcaactggttaaaacatagtggtaatgaggctaaggtcatta

SEQ ID NO: 181390 - DNA, 76 bp, Homo sapiens
ttctgtaatgttcgattgactcaactggttaaaacatagtggtaatgaggctaaggtcattagttcaatcacacta

SEQ ID NO: 181391 - DNA, 76 bp, Homo sapiens
gattgactcaactggttaaaacatagtggtaatgaggctaaggtcattagttcaatcacactatgagccagttaat

SEQ ID NO: 181392 - DNA, 74 bp, Homo sapiens
actcaactggttaaaacatagtggtaatgaggctaaggtcattagttcaatcacactatgagccagttaattta

SEQ ID NO: 181393 - DNA, 75 bp, Homo sapiens
taaaacatagtggtaatgaggctaaggtcattagttcaatcacactatgagccagttaatttaactgtggcccaa

SEQ ID NO: 181394 - DNA, 76 bp, Homo sapiens
gtaatgaggctaaggtcattagttcaatcacactatgagccagttaatttaactgtggcccaaggccatgacccaa

SEQ ID NO: 181395 - DNA, 73 bp, Homo sapiens
taaggtcattagttcaatcacactatgagccagttaatttaactgtggcccaaggccatgacccaaccctaac

SEQ ID NO: 181396 - DNA, 70 bp, Homo sapiens
ttagttcaatcacactatgagccagttaatttaactgtggcccaaggccatgacccaaccctaacccttt

SEQ ID NO: 181397 - DNA, 70 bp, Homo sapiens
acactatgagccagttaatttaactgtggcccaaggccatgacccaaccctaacccttttcatccacagt

SEQ ID NO: 181398 - DNA, 69 bp, Homo sapiens
agttaatttaactgtggcccaaggccatgacccaaccctaacccttttcatccacagttcacaaatgga

SEQ ID NO: 181399 - DNA, 71 bp, Homo sapiens
tttaactgtggcccaaggccatgacccaaccctaacccttttcatccacagttcacaaatggaggccaata

SEQ ID NO: 181400 - DNA, 72 bp, Homo sapiens
atgacccaaccctaacccttttcatccacagttcacaaatggaggccaatattcataacaagacccagacag

SEQ ID NO: 181401 - DNA, 75 bp, Homo sapiens
taacccttttcatccacagttcacaaatggaggccaatattcataacaagacccagacaggtccaaatgagtcaa

SEQ ID NO: 181402 - DNA, 73 bp, Homo sapiens
caaatggaggccaatattcataacaagacccagacaggtccaaatgagtcaagggaaaatgtcgccattgttt

SEQ ID NO: 181403 - DNA, 71 bp, Homo sapiens
ccaatattcataacaagacccagacaggtccaaatgagtcaagggaaaatgtcgccattgtttttttgtaa

SEQ ID NO: 181404 - DNA, 68 bp, Homo sapiens
agacccagacaggtccaaatgagtcaagggaaaatgtcgccattgtttttttgtaaattctctttaat

SEQ ID NO: 181405 - DNA, 67 bp, Homo sapiens
aggtccaaatgagtcaagggaaaatgtcgccattgtttttttgtaaattctctttaattccacaacc

SEQ ID NO: 181406 - DNA, 69 bp, Homo sapiens
tcaagggaaaatgtcgccattgtttttttgtaaattctctttaattccacaacctattagtggcaagga

SEQ ID NO: 181407 - DNA, 71 bp, Homo sapiens
gtcgccattgtttttttgtaaattctctttaattccacaacctattagtggcaaggaaagagtgtcataca

SEQ ID NO: 181408 - DNA, 69 bp, Homo sapiens
gtttttttgtaaattctctttaattccacaacctattagtggcaaggaaagagtgtcatacacacaccc

SEQ ID NO: 181409 - DNA, 73 bp, Homo sapiens
ttgtaaattctctttaattccacaacctattagtggcaaggaaagagtgtcatacacacaccccaatctctta

SEQ ID NO: 181410 - DNA, 74 bp, Homo sapiens
aacctattagtggcaaggaaagagtgtcatacacacaccccaatctcttacgctctatgaattctccttatcct

SEQ ID NO: 181411 - DNA, 72 bp, Homo sapiens
aaagagtgtcatacacacaccccaatctcttacgctctatgaattctccttatccttttctaaccagaaagt

SEQ ID NO: 181412 - DNA, 71 bp, Homo sapiens
acacaccccaatctcttacgctctatgaattctccttatccttttctaaccagaaagttccacatcctctt

SEQ ID NO: 181413 - DNA, 71 bp, Homo sapiens
aatctcttacgctctatgaattctccttatccttttctaaccagaaagttccacatcctctttgacccacc

SEQ ID NO: 181414 - DNA, 72 bp, Homo sapiens
ttacgctctatgaattctccttatccttttctaaccagaaagttccacatcctctttgacccacccaactca

SEQ ID NO: 181415 - DNA, 69 bp, Homo sapiens
aattctccttatccttttctaaccagaaagttccacatcctctttgacccacccaactcagttctcttc

SEQ ID NO: 181416 - DNA, 70 bp, Homo sapiens
ttatccttttctaaccagaaagttccacatcctctttgacccacccaactcagttctcttccttctccaa

SEQ ID NO: 181417 - DNA, 70 bp, Homo sapiens
taaccagaaagttccacatcctctttgacccacccaactcagttctcttccttctccaaaaccactgaaa

SEQ ID NO: 181418 - DNA, 73 bp, Homo sapiens
caactcagttctcttccttctccaaaaccactgaaatatagtggaagtatcatgttttcttgttagaggtaca

SEQ ID NO: 181419 - DNA, 74 bp, Homo sapiens
ctcttccttctccaaaaccactgaaatatagtggaagtatcatgttttcttgttagaggtacaacagtattgca

SEQ ID NO: 181420 - DNA, 77 bp, Homo sapiens
ttctccaaaaccactgaaatatagtggaagtatcatgttttcttgttagaggtacaacagtattgcactgcctctga

SEQ ID NO: 181421 - DNA, 77 bp, Homo sapiens
aaccactgaaatatagtggaagtatcatgttttcttgttagaggtacaacagtattgcactgcctctgatgtgtctt

SEQ ID NO: 181422 - DNA, 80 bp, Homo sapiens
atatagtggaagtatcatgttttcttgttagaggtacaacagtattgcactgcctctgatgtgtctttgctccccagata

SEQ ID NO: 181423 - DNA, 80 bp, Homo sapiens
agtatcatgttttcttgttagaggtacaacagtattgcactgcctctgatgtgtctttgctccccagatagtctgtagac

SEQ ID NO: 181424 - DNA, 82 bp, Homo sapiens
ttgttagaggtacaacagtattgcactgcctctgatgtgtctttgctccccagatagtctgtagactgccagcacttgaaaa

SEQ ID NO: 181425 - DNA, 80 bp, Homo sapiens
aggtacaacagtattgcactgcctctgatgtgtctttgctccccagatagtctgtagactgccagcacttgaaaaattag

SEQ ID NO: 181426 - DNA, 81 bp, Homo sapiens
tattgcactgcctctgatgtgtctttgctccccagatagtctgtagactgccagcacttgaaaaattaggggtctgtcttg

SEQ ID NO: 181427 - DNA, 80 bp, Homo sapiens
tctgatgtgtctttgctccccagatagtctgtagactgccagcacttgaaaaattaggggtctgtcttgtgcttcttgta

SEQ ID NO: 181428 - DNA, 76 bp, Homo sapiens
tttgctccccagatagtctgtagactgccagcacttgaaaaattaggggtctgtcttgtgcttcttgtaatcctct

SEQ ID NO: 181429 - DNA, 77 bp, Homo sapiens
agatagtctgtagactgccagcacttgaaaaattaggggtctgtcttgtgcttcttgtaatcctcttgtacttagca

SEQ ID NO: 181430 - DNA, 79 bp, Homo sapiens
tagactgccagcacttgaaaaattaggggtctgtcttgtgcttcttgtaatcctcttgtacttagcataatgcattgta

SEQ ID NO: 181431 - DNA, 77 bp, Homo sapiens
ttgtgcttcttgtaatcctcttgtacttagcataatgcattgtatacaagaggcactttttatcggtgactaaagac

SEQ ID NO: 181432 - DNA, 76 bp, Homo sapiens
tgtaatcctcttgtacttagcataatgcattgtatacaagaggcactttttatcggtgactaaagacggtacatta

SEQ ID NO: 181433 - DNA, 75 bp, Homo sapiens
cttagcataatgcattgtatacaagaggcactttttatcggtgactaaagacggtacattaggccctgcgttcca

SEQ ID NO: 181434 - DNA, 68 bp, Homo sapiens
aggcactttttatcggtgactaaagacggtacattaggccctgcgttccaccttctgccacagttttt

SEQ ID NO: 181435 - DNA, 71 bp, Homo sapiens
tatcggtgactaaagacggtacattaggccctgcgttccaccttctgccacagtttttttgaaagattcca

SEQ ID NO: 181436 - DNA, 71 bp, Homo sapiens
taaagacggtacattaggccctgcgttccaccttctgccacagtttttttgaaagattccatggcaggtaa

SEQ ID NO: 181437 - DNA, 75 bp, Homo sapiens
acattaggccctgcgttccaccttctgccacagtttttttgaaagattccatggcaggtaaagacaggcaatgca

SEQ ID NO: 181438 - DNA, 76 bp, Homo sapiens
ttccaccttctgccacagtttttttgaaagattccatggcaggtaaagacaggcaatgcacacacatggacctaag

SEQ ID NO: 181439 - DNA, 80 bp, Homo sapiens
tctgccacagtttttttgaaagattccatggcaggtaaagacaggcaatgcacacacatggacctaagtgtgcaaatata

SEQ ID NO: 181440 - DNA, 80 bp, Homo sapiens
tttttgaaagattccatggcaggtaaagacaggcaatgcacacacatggacctaagtgtgcaaatataccaatcatacca

SEQ ID NO: 181441 - DNA, 79 bp, Homo sapiens
aaagattccatggcaggtaaagacaggcaatgcacacacatggacctaagtgtgcaaatataccaatcataccaacaaa

SEQ ID NO: 181442 - DNA, 76 bp, Homo sapiens
aggtaaagacaggcaatgcacacacatggacctaagtgtgcaaatataccaatcataccaacaaacttgaatttta

SEQ ID NO: 181443 - DNA, 77 bp, Homo sapiens
aagacaggcaatgcacacacatggacctaagtgtgcaaatataccaatcataccaacaaacttgaattttacatatt

SEQ ID NO: 181444 - DNA, 75 bp, Homo sapiens
gcacacacatggacctaagtgtgcaaatataccaatcataccaacaaacttgaattttacatatttaaggctaaa

SEQ ID NO: 181445 - DNA, 71 bp, Homo sapiens
atggacctaagtgtgcaaatataccaatcataccaacaaacttgaattttacatatttaaggctaaattta

SEQ ID NO: 181446 - DNA, 72 bp, Homo sapiens
gtgtgcaaatataccaatcataccaacaaacttgaattttacatatttaaggctaaatttatttcacaataa

SEQ ID NO: 181447 - DNA, 70 bp, Homo sapiens
accaatcataccaacaaacttgaattttacatatttaaggctaaatttatttcacaataacttagtcatg

SEQ ID NO: 181448 - DNA, 70 bp, Homo sapiens
ccaacaaacttgaattttacatatttaaggctaaatttatttcacaataacttagtcatgttctcataac

SEQ ID NO: 181449 - DNA, 69 bp, Homo sapiens
attttacatatttaaggctaaatttatttcacaataacttagtcatgttctcataaccaaatttatttc

SEQ ID NO: 181450 - DNA, 71 bp, Homo sapiens
acatatttaaggctaaatttatttcacaataacttagtcatgttctcataaccaaatttatttccatccta

SEQ ID NO: 181451 - DNA, 72 bp, Homo sapiens
gctaaatttatttcacaataacttagtcatgttctcataaccaaatttatttccatcctatttttaatatgc

SEQ ID NO: 181452 - DNA, 75 bp, Homo sapiens
cttagtcatgttctcataaccaaatttatttccatcctatttttaatatgctcatagtcttaactatatatttga

SEQ ID NO: 181453 - DNA, 74 bp, Homo sapiens
ctcataaccaaatttatttccatcctatttttaatatgctcatagtcttaactatatatttgagaatatttgtg

SEQ ID NO: 181454 - DNA, 73 bp, Homo sapiens
atttatttccatcctatttttaatatgctcatagtcttaactatatatttgagaatatttgtggtttcctgtg

SEQ ID NO: 181455 - DNA, 74 bp, Homo sapiens
tttaatatgctcatagtcttaactatatatttgagaatatttgtggtttcctgtgtatagaacaaatcttttta

SEQ ID NO: 181456 - DNA, 74 bp, Homo sapiens
tgctcatagtcttaactatatatttgagaatatttgtggtttcctgtgtatagaacaaatctttttaattcaag

SEQ ID NO: 181457 - DNA, 71 bp, Homo sapiens
cttaactatatatttgagaatatttgtggtttcctgtgtatagaacaaatctttttaattcaaggtgacca

SEQ ID NO: 181458 - DNA, 71 bp, Homo sapiens
gtggtttcctgtgtatagaacaaatctttttaattcaaggtgaccaaatttgaggacaaactaagagcaca

SEQ ID NO: 181459 - DNA, 71 bp, Homo sapiens
caaatctttttaattcaaggtgaccaaatttgaggacaaactaagagcacaaccagaaatcactaaatgag

SEQ ID NO: 181460 - DNA, 73 bp, Homo sapiens
ctttttaattcaaggtgaccaaatttgaggacaaactaagagcacaaccagaaatcactaaatgaggatgaga

SEQ ID NO: 181461 - DNA, 75 bp, Homo sapiens
aaatttgaggacaaactaagagcacaaccagaaatcactaaatgaggatgagaatctcagtcagtttatatttgt

SEQ ID NO: 181462 - DNA, 78 bp, Homo sapiens
acaaccagaaatcactaaatgaggatgagaatctcagtcagtttatatttgtttctcaccaatgctttgttcatctcc

SEQ ID NO: 181463 - DNA, 77 bp, Homo sapiens
aaatcactaaatgaggatgagaatctcagtcagtttatatttgtttctcaccaatgctttgttcatctccctttcca

SEQ ID NO: 181464 - DNA, 79 bp, Homo sapiens
aatgaggatgagaatctcagtcagtttatatttgtttctcaccaatgctttgttcatctccctttccagcactgaattc

SEQ ID NO: 181465 - DNA, 76 bp, Homo sapiens
agaatctcagtcagtttatatttgtttctcaccaatgctttgttcatctccctttccagcactgaattctcacccc

SEQ ID NO: 181466 - DNA, 73 bp, Homo sapiens
tttatatttgtttctcaccaatgctttgttcatctccctttccagcactgaattctcacccccttctcccaag

SEQ ID NO: 181467 - DNA, 74 bp, Homo sapiens
tttgtttctcaccaatgctttgttcatctccctttccagcactgaattctcacccccttctcccaaggtagcac

SEQ ID NO: 181468 - DNA, 74 bp, Homo sapiens
aatgctttgttcatctccctttccagcactgaattctcacccccttctcccaaggtagcaccaggctctaccaa

SEQ ID NO: 181469 - DNA, 73 bp, Homo sapiens
atctccctttccagcactgaattctcacccccttctcccaaggtagcaccaggctctaccaacttggacacaa

SEQ ID NO: 181470 - DNA, 73 bp, Homo sapiens
tttccagcactgaattctcacccccttctcccaaggtagcaccaggctctaccaacttggacacaaggaaaca

SEQ ID NO: 181471 - DNA, 69 bp, Homo sapiens
aattctcacccccttctcccaaggtagcaccaggctctaccaacttggacacaaggaaacactttattc

SEQ ID NO: 181472 - DNA, 73 bp, Homo sapiens
ccttctcccaaggtagcaccaggctctaccaacttggacacaaggaaacactttattcctaatgcacaattca

SEQ ID NO: 181473 - DNA, 76 bp, Homo sapiens
tcccaaggtagcaccaggctctaccaacttggacacaaggaaacactttattcctaatgcacaattcacatcctca

SEQ ID NO: 181474 - DNA, 75 bp, Homo sapiens
ctaccaacttggacacaaggaaacactttattcctaatgcacaattcacatcctcaggcttgatgggaaagcagg

SEQ ID NO: 181475 - DNA, 86 bp, Homo sapiens
ttcctaatgcacaattcacatcctcaggcttgatgggaaagcaggtgccagcaatctagcactcattctgcaggaaaagagccaga

SEQ ID NO: 181476 - DNA, 88 bp, Homo sapiens
tcctcaggcttgatgggaaagcaggtgccagcaatctagcactcattctgcaggaaaagagccagacaggatctctaatgagcagcag

SEQ ID NO: 181477 - DNA, 85 bp, Homo sapiens
ggaaagcaggtgccagcaatctagcactcattctgcaggaaaagagccagacaggatctctaatgagcagcaggcggcctaccaa

SEQ ID NO: 181478 - DNA, 82 bp, Homo sapiens
aggtgccagcaatctagcactcattctgcaggaaaagagccagacaggatctctaatgagcagcaggcggcctaccaaccct

SEQ ID NO: 181479 - DNA, 83 bp, Homo sapiens
aatctagcactcattctgcaggaaaagagccagacaggatctctaatgagcagcaggcggcctaccaacccttcagcactgta

SEQ ID NO: 181480 - DNA, 79 bp, Homo sapiens
attctgcaggaaaagagccagacaggatctctaatgagcagcaggcggcctaccaacccttcagcactgtaacatttac

SEQ ID NO: 181481 - DNA, 77 bp, Homo sapiens
aaaagagccagacaggatctctaatgagcagcaggcggcctaccaacccttcagcactgtaacatttacttgagtac

SEQ ID NO: 181482 - DNA, 80 bp, Homo sapiens
agacaggatctctaatgagcagcaggcggcctaccaacccttcagcactgtaacatttacttgagtactgtagcacaatg

SEQ ID NO: 181483 - DNA, 80 bp, Homo sapiens
atctctaatgagcagcaggcggcctaccaacccttcagcactgtaacatttacttgagtactgtagcacaatgtcttaca

SEQ ID NO: 181484 - DNA, 77 bp, Homo sapiens
agcaggcggcctaccaacccttcagcactgtaacatttacttgagtactgtagcacaatgtcttacacattgctgtt

SEQ ID NO: 181485 - DNA, 77 bp, Homo sapiens
ttcagcactgtaacatttacttgagtactgtagcacaatgtcttacacattgctgtttgtgggtcacaaagaaaagt

SEQ ID NO: 181486 - DNA, 74 bp, Homo sapiens
taacatttacttgagtactgtagcacaatgtcttacacattgctgtttgtgggtcacaaagaaaagttggttta

SEQ ID NO: 181487 - DNA, 74 bp, Homo sapiens
ttgagtactgtagcacaatgtcttacacattgctgtttgtgggtcacaaagaaaagttggtttacacgtacaaa

SEQ ID NO: 181488 - DNA, 73 bp, Homo sapiens
ttacacattgctgtttgtgggtcacaaagaaaagttggtttacacgtacaaatgctctataaggtactcttca

SEQ ID NO: 181489 - DNA, 71 bp, Homo sapiens
attgctgtttgtgggtcacaaagaaaagttggtttacacgtacaaatgctctataaggtactcttcatttc

SEQ ID NO: 181490 - DNA, 73 bp, Homo sapiens
gtcacaaagaaaagttggtttacacgtacaaatgctctataaggtactcttcatttctgttgagtggctcttc

SEQ ID NO: 181491 - DNA, 77 bp, Homo sapiens
tctataaggtactcttcatttctgttgagtggctcttctactgttgagccccaatggcgagttacacaactgaaaga

SEQ ID NO: 181492 - DNA, 80 bp, Homo sapiens
tcatttctgttgagtggctcttctactgttgagccccaatggcgagttacacaactgaaagagcattcagttggcattta

SEQ ID NO: 181493 - DNA, 82 bp, Homo sapiens
tctgttgagtggctcttctactgttgagccccaatggcgagttacacaactgaaagagcattcagttggcatttatgtgcac

SEQ ID NO: 181494 - DNA, 81 bp, Homo sapiens
ttctactgttgagccccaatggcgagttacacaactgaaagagcattcagttggcatttatgtgcactgcccagctgtaaa

SEQ ID NO: 181495 - DNA, 80 bp, Homo sapiens
tgttgagccccaatggcgagttacacaactgaaagagcattcagttggcatttatgtgcactgcccagctgtaaaacatt

SEQ ID NO: 181496 - DNA, 77 bp, Homo sapiens
aaagagcattcagttggcatttatgtgcactgcccagctgtaaaacatttctcccagggtttgcagagtactcctct

SEQ ID NO: 181497 - DNA, 76 bp, Homo sapiens
agttggcatttatgtgcactgcccagctgtaaaacatttctcccagggtttgcagagtactcctcttcctctccaa

SEQ ID NO: 181498 - DNA, 76 bp, Homo sapiens
atttatgtgcactgcccagctgtaaaacatttctcccagggtttgcagagtactcctcttcctctccaagttgctc

SEQ ID NO: 181499 - DNA, 75 bp, Homo sapiens
ccagctgtaaaacatttctcccagggtttgcagagtactcctcttcctctccaagttgctcttttcagccatgaa

SEQ ID NO: 181500 - DNA, 73 bp, Homo sapiens
tgtaaaacatttctcccagggtttgcagagtactcctcttcctctccaagttgctcttttcagccatgaaaag

SEQ ID NO: 181501 - DNA, 77 bp, Homo sapiens
ccagggtttgcagagtactcctcttcctctccaagttgctcttttcagccatgaaaagtgcctgcaaatgatattat

SEQ ID NO: 181502 - DNA, 79 bp, Homo sapiens
gtttgcagagtactcctcttcctctccaagttgctcttttcagccatgaaaagtgcctgcaaatgatattattttgata

SEQ ID NO: 181503 - DNA, 79 bp, Homo sapiens
ctcttcctctccaagttgctcttttcagccatgaaaagtgcctgcaaatgatattattttgatagctctggaaaccatc

SEQ ID NO: 181504 - DNA, 79 bp, Homo sapiens
cctctccaagttgctcttttcagccatgaaaagtgcctgcaaatgatattattttgatagctctggaaaccatctggga

SEQ ID NO: 181505 - DNA, 78 bp, Homo sapiens
ttgctcttttcagccatgaaaagtgcctgcaaatgatattattttgatagctctggaaaccatctgggagccgaaaag

SEQ ID NO: 181506 - DNA, 73 bp, Homo sapiens
atgaaaagtgcctgcaaatgatattattttgatagctctggaaaccatctgggagccgaaaaggaggtttcct

SEQ ID NO: 181507 - DNA, 75 bp, Homo sapiens
attttgatagctctggaaaccatctgggagccgaaaaggaggtttccttacagtgagcagagagagctctaattc

SEQ ID NO: 181508 - DNA, 77 bp, Homo sapiens
tctggaaaccatctgggagccgaaaaggaggtttccttacagtgagcagagagagctctaattcctcatcttgcctg

SEQ ID NO: 181509 - DNA, 78 bp, Homo sapiens
aaggaggtttccttacagtgagcagagagagctctaattcctcatcttgcctggccagttcacattgtattggactta

SEQ ID NO: 181510 - DNA, 78 bp, Homo sapiens
ggtttccttacagtgagcagagagagctctaattcctcatcttgcctggccagttcacattgtattggacttaaagga

SEQ ID NO: 181511 - DNA, 82 bp, Homo sapiens
agagctctaattcctcatcttgcctggccagttcacattgtattggacttaaaggagccactctgccagagctatttgctga

SEQ ID NO: 181512 - DNA, 81 bp, Homo sapiens
ctgagaatgatattagcaaggatgacaagagaagatggtggtcatctctccaactaccccacatgaaacattactcatttg

SEQ ID NO: 181513 - DNA, 81 bp, Homo sapiens
atgatattagcaaggatgacaagagaagatggtggtcatctctccaactaccccacatgaaacattactcatttgtctcaa

SEQ ID NO: 181514 - DNA, 82 bp, Homo sapiens
aaggatgacaagagaagatggtggtcatctctccaactaccccacatgaaacattactcatttgtctcaagcatcatgtcaa

SEQ ID NO: 181515 - DNA, 81 bp, Homo sapiens
tggtggtcatctctccaactaccccacatgaaacattactcatttgtctcaagcatcatgtcaatctcagaaccaaaccag

SEQ ID NO: 181516 - DNA, 79 bp, Homo sapiens
caactaccccacatgaaacattactcatttgtctcaagcatcatgtcaatctcagaaccaaaccaggaggcaggcttct

SEQ ID NO: 181517 - DNA, 77 bp, Homo sapiens
aaacattactcatttgtctcaagcatcatgtcaatctcagaaccaaaccaggaggcaggcttcttttagcttcttac

SEQ ID NO: 181518 - DNA, 76 bp, Homo sapiens
atttgtctcaagcatcatgtcaatctcagaaccaaaccaggaggcaggcttcttttagcttcttacccataaataa

SEQ ID NO: 181519 - DNA, 72 bp, Homo sapiens
atcatgtcaatctcagaaccaaaccaggaggcaggcttcttttagcttcttacccataaataaggttaataa

SEQ ID NO: 181520 - DNA, 69 bp, Homo sapiens
aatctcagaaccaaaccaggaggcaggcttcttttagcttcttacccataaataaggttaataattcca

SEQ ID NO: 181521 - DNA, 68 bp, Homo sapiens
aaccaaaccaggaggcaggcttcttttagcttcttacccataaataaggttaataattccacagttgc

SEQ ID NO: 181522 - DNA, 71 bp, Homo sapiens
ggaggcaggcttcttttagcttcttacccataaataaggttaataattccacagttgctgatcaccaaaaa

SEQ ID NO: 181523 - DNA, 69 bp, Homo sapiens
ttcttttagcttcttacccataaataaggttaataattccacagttgctgatcaccaaaaaacccacaa

SEQ ID NO: 181524 - DNA, 70 bp, Homo sapiens
acccataaataaggttaataattccacagttgctgatcaccaaaaaacccacaaataggaacataacaca

SEQ ID NO: 181525 - DNA, 70 bp, Homo sapiens
taataattccacagttgctgatcaccaaaaaacccacaaataggaacataacacaacaggaaaaagggct

SEQ ID NO: 181526 - DNA, 70 bp, Homo sapiens
agttgctgatcaccaaaaaacccacaaataggaacataacacaacaggaaaaagggctttttattcatca

SEQ ID NO: 181527 - DNA, 70 bp, Homo sapiens
gctgatcaccaaaaaacccacaaataggaacataacacaacaggaaaaagggctttttattcatcattta

SEQ ID NO: 181528 - DNA, 69 bp, Homo sapiens
atcaccaaaaaacccacaaataggaacataacacaacaggaaaaagggctttttattcatcatttatga

SEQ ID NO: 181529 - DNA, 68 bp, Homo sapiens
aaacccacaaataggaacataacacaacaggaaaaagggctttttattcatcatttatgattaagacc

SEQ ID NO: 181530 - DNA, 70 bp, Homo sapiens
cccacaaataggaacataacacaacaggaaaaagggctttttattcatcatttatgattaagaccttgcc

SEQ ID NO: 181531 - DNA, 72 bp, Homo sapiens
acataacacaacaggaaaaagggctttttattcatcatttatgattaagaccttgcctctgccacaaagtat

SEQ ID NO: 181532 - DNA, 72 bp, Homo sapiens
aacacaacaggaaaaagggctttttattcatcatttatgattaagaccttgcctctgccacaaagtatttga

SEQ ID NO: 181533 - DNA, 71 bp, Homo sapiens
aacaggaaaaagggctttttattcatcatttatgattaagaccttgcctctgccacaaagtatttgagaag

SEQ ID NO: 181534 - DNA, 71 bp, Homo sapiens
acaggaaaaagggctttttattcatcatttatgattaagaccttgcctctgccacaaagtatttgagaagt

SEQ ID NO: 181535 - DNA, 72 bp, Homo sapiens
agggctttttattcatcatttatgattaagaccttgcctctgccacaaagtatttgagaagttttacaacaa

SEQ ID NO: 181536 - DNA, 72 bp, Homo sapiens
gggctttttattcatcatttatgattaagaccttgcctctgccacaaagtatttgagaagttttacaacaaa

SEQ ID NO: 181537 - DNA, 73 bp, Homo sapiens
catttatgattaagaccttgcctctgccacaaagtatttgagaagttttacaacaaaagacattaattctaca

SEQ ID NO: 181538 - DNA, 72 bp, Homo sapiens
gattaagaccttgcctctgccacaaagtatttgagaagttttacaacaaaagacattaattctacaaggaca

SEQ ID NO: 181539 - DNA, 70 bp, Homo sapiens
ccttgcctctgccacaaagtatttgagaagttttacaacaaaagacattaattctacaaggacattaaag

SEQ ID NO: 181540 - DNA, 68 bp, Homo sapiens
gccacaaagtatttgagaagttttacaacaaaagacattaattctacaaggacattaaagtagaaagt

SEQ ID NO: 181541 - DNA, 67 bp, Homo sapiens
gagaagttttacaacaaaagacattaattctacaaggacattaaagtagaaagtttaaagcaaaaga

SEQ ID NO: 181542 - DNA, 68 bp, Homo sapiens
caacaaaagacattaattctacaaggacattaaagtagaaagtttaaagcaaaagagctggataaaaa

SEQ ID NO: 181543 - DNA, 67 bp, Homo sapiens
aaagacattaattctacaaggacattaaagtagaaagtttaaagcaaaagagctggataaaaaagga

SEQ ID NO: 181544 - DNA, 69 bp, Homo sapiens
acaaggacattaaagtagaaagtttaaagcaaaagagctggataaaaaaggataaaatgctgaagagtg

SEQ ID NO: 181545 - DNA, 71 bp, Homo sapiens
taaagtagaaagtttaaagcaaaagagctggataaaaaaggataaaatgctgaagagtgggcaacaaggca

SEQ ID NO: 181546 - DNA, 72 bp, Homo sapiens
agtttaaagcaaaagagctggataaaaaaggataaaatgctgaagagtgggcaacaaggcaatgtcctgaaa

SEQ ID NO: 181547 - DNA, 72 bp, Homo sapiens
aaaagagctggataaaaaaggataaaatgctgaagagtgggcaacaaggcaatgtcctgaaagcttttagta

SEQ ID NO: 181548 - DNA, 74 bp, Homo sapiens
gataaaaaaggataaaatgctgaagagtgggcaacaaggcaatgtcctgaaagcttttagtagtcaggacagaa

SEQ ID NO: 181549 - DNA, 79 bp, Homo sapiens
aatgctgaagagtgggcaacaaggcaatgtcctgaaagcttttagtagtcaggacagaacaagcatttgtggaagatga

SEQ ID NO: 181550 - DNA, 75 bp, Homo sapiens
gcaacaaggcaatgtcctgaaagcttttagtagtcaggacagaacaagcatttgtggaagatgagacctttaaaa

SEQ ID NO: 181551 - DNA, 74 bp, Homo sapiens
aatgtcctgaaagcttttagtagtcaggacagaacaagcatttgtggaagatgagacctttaaaatgatctaag

SEQ ID NO: 181552 - DNA, 75 bp, Homo sapiens
aaagcttttagtagtcaggacagaacaagcatttgtggaagatgagacctttaaaatgatctaaggcagtgaatc

SEQ ID NO: 181553 - DNA, 77 bp, Homo sapiens
agaacaagcatttgtggaagatgagacctttaaaatgatctaaggcagtgaatctcacactttggtggacaacagaa

SEQ ID NO: 181554 - DNA, 76 bp, Homo sapiens
atgagacctttaaaatgatctaaggcagtgaatctcacactttggtggacaacagaatgacaggaggacttgttaa

SEQ ID NO: 181555 - DNA, 73 bp, Homo sapiens
acctttaaaatgatctaaggcagtgaatctcacactttggtggacaacagaatgacaggaggacttgttaaaa

SEQ ID NO: 181556 - DNA, 76 bp, Homo sapiens
atctaaggcagtgaatctcacactttggtggacaacagaatgacaggaggacttgttaaaacacagcctacagccc

SEQ ID NO: 181557 - DNA, 74 bp, Homo sapiens
agtgaatctcacactttggtggacaacagaatgacaggaggacttgttaaaacacagcctacagccccacccag

SEQ ID NO: 181558 - DNA, 74 bp, Homo sapiens
tttggtggacaacagaatgacaggaggacttgttaaaacacagcctacagccccacccaggagttacagattca

SEQ ID NO: 181559 - DNA, 73 bp, Homo sapiens
aacagaatgacaggaggacttgttaaaacacagcctacagccccacccaggagttacagattcagtaggttga

SEQ ID NO: 181560 - DNA, 73 bp, Homo sapiens
aaacacagcctacagccccacccaggagttacagattcagtaggttgagggacatgggtgagtgggacaggac

SEQ ID NO: 181561 - DNA, 71 bp, Homo sapiens
ccccacccaggagttacagattcagtaggttgagggacatgggtgagtgggacaggaccctggaatttata

SEQ ID NO: 181562 - DNA, 75 bp, Homo sapiens
gagttacagattcagtaggttgagggacatgggtgagtgggacaggaccctggaatttataaagcatcacaggta

SEQ ID NO: 181563 - DNA, 77 bp, Homo sapiens
acagattcagtaggttgagggacatgggtgagtgggacaggaccctggaatttataaagcatcacaggtaatgatga

SEQ ID NO: 181564 - DNA, 82 bp, Homo sapiens
gacaggaccctggaatttataaagcatcacaggtaatgatgatgctgcaggtccagggaccaaccatgctgatgagaaccac

SEQ ID NO: 181565 - DNA, 83 bp, Homo sapiens
accctggaatttataaagcatcacaggtaatgatgatgctgcaggtccagggaccaaccatgctgatgagaaccactgatcga

SEQ ID NO: 181566 - DNA, 85 bp, Homo sapiens
tttataaagcatcacaggtaatgatgatgctgcaggtccagggaccaaccatgctgatgagaaccactgatcgaggacccagaga

SEQ ID NO: 181567 - DNA, 84 bp, Homo sapiens
aggtaatgatgatgctgcaggtccagggaccaaccatgctgatgagaaccactgatcgaggacccagagaccgataatcacaga

SEQ ID NO: 181568 - DNA, 83 bp, Homo sapiens
atgatgctgcaggtccagggaccaaccatgctgatgagaaccactgatcgaggacccagagaccgataatcacagaaactcaa

SEQ ID NO: 181569 - DNA, 79 bp, Homo sapiens
gtccagggaccaaccatgctgatgagaaccactgatcgaggacccagagaccgataatcacagaaactcaacagaatta

SEQ ID NO: 181570 - DNA, 82 bp, Homo sapiens
tgatgagaaccactgatcgaggacccagagaccgataatcacagaaactcaacagaattagctgggagaagcctatatatga

SEQ ID NO: 181571 - DNA, 78 bp, Homo sapiens
aaccactgatcgaggacccagagaccgataatcacagaaactcaacagaattagctgggagaagcctatatatgagga

SEQ ID NO: 181572 - DNA, 78 bp, Homo sapiens
aggacccagagaccgataatcacagaaactcaacagaattagctgggagaagcctatatatgaggagattctgattta

SEQ ID NO: 181573 - DNA, 79 bp, Homo sapiens
aatcacagaaactcaacagaattagctgggagaagcctatatatgaggagattctgatttaataggttgatagtggaga

SEQ ID NO: 181574 - DNA, 78 bp, Homo sapiens
acagaattagctgggagaagcctatatatgaggagattctgatttaataggttgatagtggagatccaggcattttta

SEQ ID NO: 181575 - DNA, 77 bp, Homo sapiens
attagctgggagaagcctatatatgaggagattctgatttaataggttgatagtggagatccaggcatttttataaa

SEQ ID NO: 181576 - DNA, 77 bp, Homo sapiens
agaagcctatatatgaggagattctgatttaataggttgatagtggagatccaggcatttttataaaaagctcacaa

SEQ ID NO: 181577 - DNA, 77 bp, Homo sapiens
atatgaggagattctgatttaataggttgatagtggagatccaggcatttttataaaaagctcacaagagatactgg

SEQ ID NO: 181578 - DNA, 75 bp, Homo sapiens
tgatttaataggttgatagtggagatccaggcatttttataaaaagctcacaagagatactggtgaaaactacag

SEQ ID NO: 181579 - DNA, 75 bp, Homo sapiens
aataggttgatagtggagatccaggcatttttataaaaagctcacaagagatactggtgaaaactacaggatgag

SEQ ID NO: 181580 - DNA, 76 bp, Homo sapiens
catttttataaaaagctcacaagagatactggtgaaaactacaggatgaggccactgattctatattagtctgcct

SEQ ID NO: 181581 - DNA, 77 bp, Homo sapiens
ttataaaaagctcacaagagatactggtgaaaactacaggatgaggccactgattctatattagtctgcctttcttc

SEQ ID NO: 181582 - DNA, 76 bp, Homo sapiens
acaagagatactggtgaaaactacaggatgaggccactgattctatattagtctgcctttcttccttaaacacaca

SEQ ID NO: 181583 - DNA, 75 bp, Homo sapiens
atactggtgaaaactacaggatgaggccactgattctatattagtctgcctttcttccttaaacacacacacaaa

SEQ ID NO: 181584 - DNA, 72 bp, Homo sapiens
cacacacaaaaacacatttttgaaagaattttaaatttaagaaagcatgactatatatatcatgagaaaaat

SEQ ID NO: 181585 - DNA, 71 bp, Homo sapiens
caaaaacacatttttgaaagaattttaaatttaagaaagcatgactatatatatcatgagaaaaattagaa

SEQ ID NO: 181586 - DNA, 77 bp, Homo sapiens
gaaagcatgactatatatatcatgagaaaaattagaaaaaaattgacttatccagaggcagcttgaaagaacgcaat

SEQ ID NO: 181587 - DNA, 78 bp, Homo sapiens
catgactatatatatcatgagaaaaattagaaaaaaattgacttatccagaggcagcttgaaagaacgcaattgccac

SEQ ID NO: 181588 - DNA, 73 bp, Homo sapiens
catgagaaaaattagaaaaaaattgacttatccagaggcagcttgaaagaacgcaattgccacttaatgaaaa

SEQ ID NO: 181589 - DNA, 76 bp, Homo sapiens
aaaaattgacttatccagaggcagcttgaaagaacgcaattgccacttaatgaaaacatttatgaagcatgtacaa

SEQ ID NO: 181590 - DNA, 78 bp, Homo sapiens
acttatccagaggcagcttgaaagaacgcaattgccacttaatgaaaacatttatgaagcatgtacaaccatgttgtg

SEQ ID NO: 181591 - DNA, 75 bp, Homo sapiens
agcttgaaagaacgcaattgccacttaatgaaaacatttatgaagcatgtacaaccatgttgtgggggagacacc

SEQ ID NO: 181592 - DNA, 73 bp, Homo sapiens
aaagaacgcaattgccacttaatgaaaacatttatgaagcatgtacaaccatgttgtgggggagacaccttaa

SEQ ID NO: 181593 - DNA, 72 bp, Homo sapiens
attgccacttaatgaaaacatttatgaagcatgtacaaccatgttgtgggggagacaccttaaactaactta

SEQ ID NO: 181594 - DNA, 72 bp, Homo sapiens
aaaacatttatgaagcatgtacaaccatgttgtgggggagacaccttaaactaacttaatctgcctagtaca

SEQ ID NO: 181595 - DNA, 74 bp, Homo sapiens
tttatgaagcatgtacaaccatgttgtgggggagacaccttaaactaacttaatctgcctagtacagaattcac

SEQ ID NO: 181596 - DNA, 71 bp, Homo sapiens
atgtacaaccatgttgtgggggagacaccttaaactaacttaatctgcctagtacagaattcacctgttaa

SEQ ID NO: 181597 - DNA, 72 bp, Homo sapiens
atgttgtgggggagacaccttaaactaacttaatctgcctagtacagaattcacctgttaactgctcaaaga

SEQ ID NO: 181598 - DNA, 75 bp, Homo sapiens
agacaccttaaactaacttaatctgcctagtacagaattcacctgttaactgctcaaagagccactctgccacta

SEQ ID NO: 181599 - DNA, 78 bp, Homo sapiens
taaactaacttaatctgcctagtacagaattcacctgttaactgctcaaagagccactctgccactagaggaggctga

SEQ ID NO: 181600 - DNA, 81 bp, Homo sapiens
taatctgcctagtacagaattcacctgttaactgctcaaagagccactctgccactagaggaggctgacactgtcttacat

SEQ ID NO: 181601 - DNA, 81 bp, Homo sapiens
agtacagaattcacctgttaactgctcaaagagccactctgccactagaggaggctgacactgtcttacatttcatcaagc

SEQ ID NO: 181602 - DNA, 82 bp, Homo sapiens
tcaaagagccactctgccactagaggaggctgacactgtcttacatttcatcaagcccaaccaacagaattgcagttcactg

SEQ ID NO: 181603 - DNA, 81 bp, Homo sapiens
actctgccactagaggaggctgacactgtcttacatttcatcaagcccaaccaacagaattgcagttcactgtgagttatg

SEQ ID NO: 181604 - DNA, 79 bp, Homo sapiens
tagaggaggctgacactgtcttacatttcatcaagcccaaccaacagaattgcagttcactgtgagttatgtattttat

SEQ ID NO: 181605 - DNA, 67 bp, Homo sapiens
ttatttttaaaatgtcacatttatcttccaaaaacaaaccaaggatgattatataaactaaagaagg

SEQ ID NO: 181606 - DNA, 70 bp, Homo sapiens
tttaaaatgtcacatttatcttccaaaaacaaaccaaggatgattatataaactaaagaaggtcacttgc

SEQ ID NO: 181607 - DNA, 73 bp, Homo sapiens
aatgtcacatttatcttccaaaaacaaaccaaggatgattatataaactaaagaaggtcacttgctctacaca

SEQ ID NO: 181608 - DNA, 74 bp, Homo sapiens
gtcacatttatcttccaaaaacaaaccaaggatgattatataaactaaagaaggtcacttgctctacacacaca

SEQ ID NO: 181609 - DNA, 73 bp, Homo sapiens
cacatttatcttccaaaaacaaaccaaggatgattatataaactaaagaaggtcacttgctctacacacacaa

SEQ ID NO: 181610 - DNA, 71 bp, Homo sapiens
ttatcttccaaaaacaaaccaaggatgattatataaactaaagaaggtcacttgctctacacacacaaaaa

SEQ ID NO: 181611 - DNA, 77 bp, Homo sapiens
acacacaaaaaaatcatcatcaacagggttatatgaagatctttatatgaagatctttacaggccctaaggattgca

SEQ ID NO: 181612 - DNA, 78 bp, Homo sapiens
aaatcatcatcaacagggttatatgaagatctttatatgaagatctttacaggccctaaggattgcaagatataataa

SEQ ID NO: 181613 - DNA, 74 bp, Homo sapiens
gggttatatgaagatctttatatgaagatctttacaggccctaaggattgcaagatataataatctcctttccc

SEQ ID NO: 181614 - DNA, 72 bp, Homo sapiens
aagatctttatatgaagatctttacaggccctaaggattgcaagatataataatctcctttccccaccctac

SEQ ID NO: 181615 - DNA, 68 bp, Homo sapiens
agatctttacaggccctaaggattgcaagatataataatctcctttccccaccctaccccctaagaaa

SEQ ID NO: 181616 - DNA, 67 bp, Homo sapiens
tttacaggccctaaggattgcaagatataataatctcctttccccaccctaccccctaagaaacatt

SEQ ID NO: 181617 - DNA, 69 bp, Homo sapiens
taaggattgcaagatataataatctcctttccccaccctaccccctaagaaacattttaaatatgtgct

SEQ ID NO: 181618 - DNA, 77 bp, Homo sapiens
accctaccccctaagaaacattttaaatatgtgcttgtgtctgtatacatgtagggcgtgcacatgtgtgaatgcta

SEQ ID NO: 181619 - DNA, 77 bp, Homo sapiens
ctaagaaacattttaaatatgtgcttgtgtctgtatacatgtagggcgtgcacatgtgtgaatgctaaaccaaaaat

SEQ ID NO: 181620 - DNA, 79 bp, Homo sapiens
attttaaatatgtgcttgtgtctgtatacatgtagggcgtgcacatgtgtgaatgctaaaccaaaaattcagagaagtc

SEQ ID NO: 181621 - DNA, 81 bp, Homo sapiens
atatgtgcttgtgtctgtatacatgtagggcgtgcacatgtgtgaatgctaaaccaaaaattcagagaagtccaatgaggt

SEQ ID NO: 181622 - DNA, 77 bp, Homo sapiens
ctgtatacatgtagggcgtgcacatgtgtgaatgctaaaccaaaaattcagagaagtccaatgaggttctgattttt

SEQ ID NO: 181623 - DNA, 73 bp, Homo sapiens
gtagggcgtgcacatgtgtgaatgctaaaccaaaaattcagagaagtccaatgaggttctgattttttcccct

SEQ ID NO: 181624 - DNA, 75 bp, Homo sapiens
tgcacatgtgtgaatgctaaaccaaaaattcagagaagtccaatgaggttctgattttttccccttcttaatata

SEQ ID NO: 181625 - DNA, 73 bp, Homo sapiens
cacatgtgtgaatgctaaaccaaaaattcagagaagtccaatgaggttctgattttttccccttcttaatata

SEQ ID NO: 181626 - DNA, 69 bp, Homo sapiens
tgctaaaccaaaaattcagagaagtccaatgaggttctgattttttccccttcttaatataacacctgt

SEQ ID NO: 181627 - DNA, 70 bp, Homo sapiens
aattcagagaagtccaatgaggttctgattttttccccttcttaatataacacctgtttgtaaaatatca

SEQ ID NO: 181628 - DNA, 68 bp, Homo sapiens
gagaagtccaatgaggttctgattttttccccttcttaatataacacctgtttgtaaaatatcaaaat

SEQ ID NO: 181629 - DNA, 65 bp, Homo sapiens
ttttccccttcttaatataacacctgtttgtaaaatatcaaaattctcaccaccaaaaaaatgtt

SEQ ID NO: 181630 - DNA, 66 bp, Homo sapiens
ccttcttaatataacacctgtttgtaaaatatcaaaattctcaccaccaaaaaaatgttttactac

SEQ ID NO: 181631 - DNA, 69 bp, Homo sapiens
aacacctgtttgtaaaatatcaaaattctcaccaccaaaaaaatgttttactacttcttgctgatcctc

SEQ ID NO: 181632 - DNA, 71 bp, Homo sapiens
aaaattctcaccaccaaaaaaatgttttactacttcttgctgatcctctaaccacatgcttacctgaccta

SEQ ID NO: 181633 - DNA, 76 bp, Homo sapiens
aaaaatgttttactacttcttgctgatcctctaaccacatgcttacctgacctactgggtaatgaaatgctatgca

SEQ ID NO: 181634 - DNA, 80 bp, Homo sapiens
tactacttcttgctgatcctctaaccacatgcttacctgacctactgggtaatgaaatgctatgcatgtagtttctttca

SEQ ID NO: 181635 - DNA, 78 bp, Homo sapiens
atcctctaaccacatgcttacctgacctactgggtaatgaaatgctatgcatgtagtttctttcaatggtatgttcta

SEQ ID NO: 181636 - DNA, 79 bp, Homo sapiens
cacatgcttacctgacctactgggtaatgaaatgctatgcatgtagtttctttcaatggtatgttctacagtgataaaa

SEQ ID NO: 181637 - DNA, 77 bp, Homo sapiens
ttacctgacctactgggtaatgaaatgctatgcatgtagtttctttcaatggtatgttctacagtgataaaagtata

SEQ ID NO: 181638 - DNA, 80 bp, Homo sapiens
tgggtaatgaaatgctatgcatgtagtttctttcaatggtatgttctacagtgataaaagtatagacatcctttgcttca

SEQ ID NO: 181639 - DNA, 81 bp, Homo sapiens
aaatgctatgcatgtagtttctttcaatggtatgttctacagtgataaaagtatagacatcctttgcttcatcatgccatt

SEQ ID NO: 181640 - DNA, 81 bp, Homo sapiens
tatgcatgtagtttctttcaatggtatgttctacagtgataaaagtatagacatcctttgcttcatcatgccatttttcca

SEQ ID NO: 181641 - DNA, 78 bp, Homo sapiens
tctttcaatggtatgttctacagtgataaaagtatagacatcctttgcttcatcatgccatttttccaacaatttgtg

SEQ ID NO: 181642 - DNA, 77 bp, Homo sapiens
atggtatgttctacagtgataaaagtatagacatcctttgcttcatcatgccatttttccaacaatttgtgttcact

SEQ ID NO: 181643 - DNA, 83 bp, Homo sapiens
gtgataaaagtatagacatcctttgcttcatcatgccatttttccaacaatttgtgttcacttcatgtctctgcatcacatat

SEQ ID NO: 181644 - DNA, 82 bp, Homo sapiens
aaagtatagacatcctttgcttcatcatgccatttttccaacaatttgtgttcacttcatgtctctgcatcacatattggaa

SEQ ID NO: 181645 - DNA, 82 bp, Homo sapiens
ctttgcttcatcatgccatttttccaacaatttgtgttcacttcatgtctctgcatcacatattggaaatccttgcaacatt

SEQ ID NO: 181646 - DNA, 80 bp, Homo sapiens
atcatgccatttttccaacaatttgtgttcacttcatgtctctgcatcacatattggaaatccttgcaacatttcaaact

SEQ ID NO: 181647 - DNA, 76 bp, Homo sapiens
ccatttttccaacaatttgtgttcacttcatgtctctgcatcacatattggaaatccttgcaacatttcaaacttt

SEQ ID NO: 181648 - DNA, 77 bp, Homo sapiens
tgatctttgatgctactattgtaattgctttggggacaccacaaaccgcacccatgtaagatagcaaacttaatcaa

SEQ ID NO: 181649 - DNA, 75 bp, Homo sapiens
tttgatgctactattgtaattgctttggggacaccacaaaccgcacccatgtaagatagcaaacttaatcaatgt

SEQ ID NO: 181650 - DNA, 75 bp, Homo sapiens
ttgtaattgctttggggacaccacaaaccgcacccatgtaagatagcaaacttaatcaatgttgtgtatctctaa

SEQ ID NO: 181651 - DNA, 76 bp, Homo sapiens
tttggggacaccacaaaccgcacccatgtaagatagcaaacttaatcaatgttgtgtatctctaactgctccacca

SEQ ID NO: 181652 - DNA, 77 bp, Homo sapiens
acaaaccgcacccatgtaagatagcaaacttaatcaatgttgtgtatctctaactgctccaccaacctgtcaatcac

SEQ ID NO: 181653 - DNA, 76 bp, Homo sapiens
acccatgtaagatagcaaacttaatcaatgttgtgtatctctaactgctccaccaacctgtcaatcaccaactccc

SEQ ID NO: 181654 - DNA, 77 bp, Homo sapiens
taagatagcaaacttaatcaatgttgtgtatctctaactgctccaccaacctgtcaatcaccaactcccttcttctc

SEQ ID NO: 181655 - DNA, 73 bp, Homo sapiens
aaacttaatcaatgttgtgtatctctaactgctccaccaacctgtcaatcaccaactcccttcttctccttgg

SEQ ID NO: 181656 - DNA, 73 bp, Homo sapiens
aatgttgtgtatctctaactgctccaccaacctgtcaatcaccaactcccttcttctccttgggtctccctat

SEQ ID NO: 181657 - DNA, 74 bp, Homo sapiens
atctctaactgctccaccaacctgtcaatcaccaactcccttcttctccttgggtctccctattccctgagata

SEQ ID NO: 181658 - DNA, 72 bp, Homo sapiens
ctccaccaacctgtcaatcaccaactcccttcttctccttgggtctccctattccctgagatacaacaatac

SEQ ID NO: 181659 - DNA, 72 bp, Homo sapiens
cctgtcaatcaccaactcccttcttctccttgggtctccctattccctgagatacaacaatactgaaattag

SEQ ID NO: 181660 - DNA, 78 bp, Homo sapiens
ctctcactttaaatcaaagctataaatgattaggcttagtgagaaaggcatgtcaagaggtgacaggccaaatgctag

SEQ ID NO: 181661 - DNA, 77 bp, Homo sapiens
tttaaatcaaagctataaatgattaggcttagtgagaaaggcatgtcaagaggtgacaggccaaatgctaggcctct

SEQ ID NO: 181662 - DNA, 79 bp, Homo sapiens
tataaatgattaggcttagtgagaaaggcatgtcaagaggtgacaggccaaatgctaggcctcttgcaccaaatattta

SEQ ID NO: 181663 - DNA, 79 bp, Homo sapiens
atgattaggcttagtgagaaaggcatgtcaagaggtgacaggccaaatgctaggcctcttgcaccaaatatttagccaa

SEQ ID NO: 181664 - DNA, 77 bp, Homo sapiens
tattgctgatatggagaaagttgtagtggtctggatataagatcacaccagccacaacacttccttaaaccaaagcc

SEQ ID NO: 181665 - DNA, 75 bp, Homo sapiens
tatggagaaagttgtagtggtctggatataagatcacaccagccacaacacttccttaaaccaaagcctaatcaa

SEQ ID NO: 181666 - DNA, 74 bp, Homo sapiens
aagttgtagtggtctggatataagatcacaccagccacaacacttccttaaaccaaagcctaatcaagagcaaa

SEQ ID NO: 181667 - DNA, 75 bp, Homo sapiens
tctggatataagatcacaccagccacaacacttccttaaaccaaagcctaatcaagagcaaagccctaattctct

SEQ ID NO: 181668 - DNA, 73 bp, Homo sapiens
tataagatcacaccagccacaacacttccttaaaccaaagcctaatcaagagcaaagccctaattctctttaa

SEQ ID NO: 181669 - DNA, 69 bp, Homo sapiens
accagccacaacacttccttaaaccaaagcctaatcaagagcaaagccctaattctctttaattttata

SEQ ID NO: 181670 - DNA, 70 bp, Homo sapiens
cacttccttaaaccaaagcctaatcaagagcaaagccctaattctctttaattttataaaatctgagaga

SEQ ID NO: 181671 - DNA, 75 bp, Homo sapiens
taaaccaaagcctaatcaagagcaaagccctaattctctttaattttataaaatctgagagatgaggaagctgca

SEQ ID NO: 181672 - DNA, 75 bp, Homo sapiens
aaagcctaatcaagagcaaagccctaattctctttaattttataaaatctgagagatgaggaagctgcagacaaa

SEQ ID NO: 181673 - DNA, 74 bp, Homo sapiens
cctaatcaagagcaaagccctaattctctttaattttataaaatctgagagatgaggaagctgcagacaaaaag

SEQ ID NO: 181674 - DNA, 76 bp, Homo sapiens
agagcaaagccctaattctctttaattttataaaatctgagagatgaggaagctgcagacaaaaagtttgatgcta

SEQ ID NO: 181675 - DNA, 76 bp, Homo sapiens
aaagccctaattctctttaattttataaaatctgagagatgaggaagctgcagacaaaaagtttgatgctagcaga

SEQ ID NO: 181676 - DNA, 75 bp, Homo sapiens
ccctaattctctttaattttataaaatctgagagatgaggaagctgcagacaaaaagtttgatgctagcagaggt

SEQ ID NO: 181677 - DNA, 76 bp, Homo sapiens
taattctctttaattttataaaatctgagagatgaggaagctgcagacaaaaagtttgatgctagcagaggttggt

SEQ ID NO: 181678 - DNA, 76 bp, Homo sapiens
taattttataaaatctgagagatgaggaagctgcagacaaaaagtttgatgctagcagaggttggttcataaggtt

SEQ ID NO: 181679 - DNA, 76 bp, Homo sapiens
attttataaaatctgagagatgaggaagctgcagacaaaaagtttgatgctagcagaggttggttcataaggttta

SEQ ID NO: 181680 - DNA, 77 bp, Homo sapiens
tataaaatctgagagatgaggaagctgcagacaaaaagtttgatgctagcagaggttggttcataaggtttagggaa

SEQ ID NO: 181681 - DNA, 76 bp, Homo sapiens
aatctgagagatgaggaagctgcagacaaaaagtttgatgctagcagaggttggttcataaggtttagggaaataa

SEQ ID NO: 181682 - DNA, 76 bp, Homo sapiens
agagatgaggaagctgcagacaaaaagtttgatgctagcagaggttggttcataaggtttagggaaataagccatc

SEQ ID NO: 181683 - DNA, 75 bp, Homo sapiens
ctgcagacaaaaagtttgatgctagcagaggttggttcataaggtttagggaaataagccatctctgtaacataa

SEQ ID NO: 181684 - DNA, 76 bp, Homo sapiens
aagatctagctaacaacattgatgaaggtggctacactacacaaattttctatgtagacgaaacagccttctactg

SEQ ID NO: 181685 - DNA, 76 bp, Homo sapiens
tagctaacaacattgatgaaggtggctacactacacaaattttctatgtagacgaaacagccttctactggaacaa

SEQ ID NO: 181686 - DNA, 77 bp, Homo sapiens
atgaaggtggctacactacacaaattttctatgtagacgaaacagccttctactggaacaagatgccatctagagct

SEQ ID NO: 181687 - DNA, 78 bp, Homo sapiens
ggtggctacactacacaaattttctatgtagacgaaacagccttctactggaacaagatgccatctagagctttcata

SEQ ID NO: 181688 - DNA, 74 bp, Homo sapiens
agaagtcaaggcctggcttcaaagtttcaaaggataggctgacactctttttagaggctaatgcaactggtgaa

SEQ ID NO: 181689 - DNA, 72 bp, Homo sapiens
aaggcctggcttcaaagtttcaaaggataggctgacactctttttagaggctaatgcaactggtgaatttaa

SEQ ID NO: 181690 - DNA, 73 bp, Homo sapiens
ttcaaagtttcaaaggataggctgacactctttttagaggctaatgcaactggtgaatttaagttgaagctaa

SEQ ID NO: 181691 - DNA, 75 bp, Homo sapiens
ttactgaatagtttgagcccactgttgagacctactactcacaataaaagatccgtttcaaaatattattgctca

SEQ ID NO: 181692 - DNA, 81 bp, Homo sapiens
tcaaaatattattgctcattgacaatgtacctggtcacctgaaagctctgcaggagatgcacaaggagattaatgttgttt

SEQ ID NO: 181693 - DNA, 77 bp, Homo sapiens
gttgttttcatgcctgctaatacatctattctgtagctcatgaatcaagaagtagttttggctttcaagttttatta

SEQ ID NO: 181694 - DNA, 77 bp, Homo sapiens
tgttttcatgcctgctaatacatctattctgtagctcatgaatcaagaagtagttttggctttcaagttttattatt

SEQ ID NO: 181695 - DNA, 77 bp, Homo sapiens
catgcctgctaatacatctattctgtagctcatgaatcaagaagtagttttggctttcaagttttattatttaagaa

SEQ ID NO: 181696 - DNA, 78 bp, Homo sapiens
ccattctagatgccattatgaacattcatgattcacaagagaagatcaaaatatgaacattaaaaggagtttggaaaa

SEQ ID NO: 181697 - DNA, 78 bp, Homo sapiens
agatgccattatgaacattcatgattcacaagagaagatcaaaatatgaacattaaaaggagtttggaaaaagctgat

SEQ ID NO: 181698 - DNA, 75 bp, Homo sapiens
acattcatgattcacaagagaagatcaaaatatgaacattaaaaggagtttggaaaaagctgatttcaaccttca

SEQ ID NO: 181699 - DNA, 75 bp, Homo sapiens
gattcacaagagaagatcaaaatatgaacattaaaaggagtttggaaaaagctgatttcaaccttcatggatgac

SEQ ID NO: 181700 - DNA, 71 bp, Homo sapiens
aagatcaaaatatgaacattaaaaggagtttggaaaaagctgatttcaaccttcatggatgacttcgaggg

SEQ ID NO: 181701 - DNA, 70 bp, Homo sapiens
aaatatgaacattaaaaggagtttggaaaaagctgatttcaaccttcatggatgacttcgaggggttcaa

SEQ ID NO: 181702 - DNA, 69 bp, Homo sapiens
acattaaaaggagtttggaaaaagctgatttcaaccttcatggatgacttcgaggggttcaagacttta

SEQ ID NO: 181703 - DNA, 72 bp, Homo sapiens
ggaatctactcctggtgaaaatgctaggaacattgttgaaacgacaataaagaatttagaatattatataaa

SEQ ID NO: 181704 - DNA, 71 bp, Homo sapiens
cctggtgaaaatgctaggaacattgttgaaacgacaataaagaatttagaatattatataaatttagtcga

SEQ ID NO: 181705 - DNA, 72 bp, Homo sapiens
aatgctaggaacattgttgaaacgacaataaagaatttagaatattatataaatttagtcgataaagcagtg

SEQ ID NO: 181706 - DNA, 70 bp, Homo sapiens
aacattgttgaaacgacaataaagaatttagaatattatataaatttagtcgataaagcagtggcagggt

SEQ ID NO: 181707 - DNA, 71 bp, Homo sapiens
tgaaacgacaataaagaatttagaatattatataaatttagtcgataaagcagtggcagggtttgaaagaa

SEQ ID NO: 181708 - DNA, 72 bp, Homo sapiens
gaatttagaatattatataaatttagtcgataaagcagtggcagggtttgaaagaattgagtccaattctaa

SEQ ID NO: 181709 - DNA, 75 bp, Homo sapiens
tattatataaatttagtcgataaagcagtggcagggtttgaaagaattgagtccaattctaaaagatctactgca

SEQ ID NO: 181710 - DNA, 76 bp, Homo sapiens
tataaatttagtcgataaagcagtggcagggtttgaaagaattgagtccaattctaaaagatctactgcactatca

SEQ ID NO: 181711 - DNA, 78 bp, Homo sapiens
taaagcagtggcagggtttgaaagaattgagtccaattctaaaagatctactgcactatcaaacaacctcacatgcta

SEQ ID NO: 181712 - DNA, 77 bp, Homo sapiens
ggcagggtttgaaagaattgagtccaattctaaaagatctactgcactatcaaacaacctcacatgctacagataaa

SEQ ID NO: 181713 - DNA, 78 bp, Homo sapiens
gaaagaattgagtccaattctaaaagatctactgcactatcaaacaacctcacatgctacagataaatcttttgcaaa

SEQ ID NO: 181714 - DNA, 78 bp, Homo sapiens
attgagtccaattctaaaagatctactgcactatcaaacaacctcacatgctacagataaatcttttgcaaaagtcag

SEQ ID NO: 181715 - DNA, 83 bp, Homo sapiens
tctaaaagatctactgcactatcaaacaacctcacatgctacagataaatcttttgcaaaagtcagtcagtccatgcagcaaa

SEQ ID NO: 181716 - DNA, 85 bp, Homo sapiens
tactgcactatcaaacaacctcacatgctacagataaatcttttgcaaaagtcagtcagtccatgcagcaaactgcattgtctta

SEQ ID NO: 181717 - DNA, 81 bp, Homo sapiens
ctatcaaacaacctcacatgctacagataaatcttttgcaaaagtcagtcagtccatgcagcaaactgcattgtcttattt

SEQ ID NO: 181718 - DNA, 79 bp, Homo sapiens
acctcacatgctacagataaatcttttgcaaaagtcagtcagtccatgcagcaaactgcattgtcttattttctttctt

SEQ ID NO: 181719 - DNA, 79 bp, Homo sapiens
accacgcctggcctgcattgtcttattttcaaaaattgccacagccactcatatcttcagcactccaatcgataagtag

SEQ ID NO: 181720 - DNA, 85 bp, Homo sapiens
tggcctgcattgtcttattttcaaaaattgccacagccactcatatcttcagcactccaatcgataagtagtcatcagcatctgg

SEQ ID NO: 181721 - DNA, 82 bp, Homo sapiens
tcttattttcaaaaattgccacagccactcatatcttcagcactccaatcgataagtagtcatcagcatctgggcgagaact

SEQ ID NO: 181722 - DNA, 82 bp, Homo sapiens
ttttcaaaaattgccacagccactcatatcttcagcactccaatcgataagtagtcatcagcatctgggcgagaacttctac

SEQ ID NO: 181723 - DNA, 84 bp, Homo sapiens
acagccactcatatcttcagcactccaatcgataagtagtcatcagcatctgggcgagaacttctaccagcaaaaagactatga

SEQ ID NO: 181724 - DNA, 83 bp, Homo sapiens
atatcttcagcactccaatcgataagtagtcatcagcatctgggcgagaacttctaccagcaaaaagactatgactagctgaa

SEQ ID NO: 181725 - DNA, 81 bp, Homo sapiens
agcactccaatcgataagtagtcatcagcatctgggcgagaacttctaccagcaaaaagactatgactagctgaaggccaa

SEQ ID NO: 181726 - DNA, 78 bp, Homo sapiens
aatcgataagtagtcatcagcatctgggcgagaacttctaccagcaaaaagactatgactagctgaaggccaagaaaa

SEQ ID NO: 181727 - DNA, 79 bp, Homo sapiens
tagtcatcagcatctgggcgagaacttctaccagcaaaaagactatgactagctgaaggccaagaaaattgtaagcatt

SEQ ID NO: 181728 - DNA, 76 bp, Homo sapiens
atctgggcgagaacttctaccagcaaaaagactatgactagctgaaggccaagaaaattgtaagcatttctggcaa

SEQ ID NO: 181729 - DNA, 74 bp, Homo sapiens
ccagcaaaaagactatgactagctgaaggccaagaaaattgtaagcatttctggcaacaaggtatattttaata

SEQ ID NO: 181730 - DNA, 73 bp, Homo sapiens
agactatgactagctgaaggccaagaaaattgtaagcatttctggcaacaaggtatattttaataaggtaata

SEQ ID NO: 181731 - DNA, 74 bp, Homo sapiens
gctgaaggccaagaaaattgtaagcatttctggcaacaaggtatattttaataaggtaatatatactgtcacac

SEQ ID NO: 181732 - DNA, 76 bp, Homo sapiens
gtaagcatttctggcaacaaggtatattttaataaggtaatatatactgtcacacttaatagattaccatatagca

SEQ ID NO: 181733 - DNA, 76 bp, Homo sapiens
tctggcaacaaggtatattttaataaggtaatatatactgtcacacttaatagattaccatatagcataaatataa

SEQ ID NO: 181734 - DNA, 72 bp, Homo sapiens
aggtatattttaataaggtaatatatactgtcacacttaatagattaccatatagcataaatataactttta

SEQ ID NO: 181735 - DNA, 72 bp, Homo sapiens
gcactgggaaaccaaaaacttcacatgcctaattttattgtgctatttgctttattacaattgtctggaacc

SEQ ID NO: 181736 - DNA, 72 bp, Homo sapiens
accaaaaacttcacatgcctaattttattgtgctatttgctttattacaattgtctggaacctaacctgcag

SEQ ID NO: 181737 - DNA, 75 bp, Homo sapiens
aacttcacatgcctaattttattgtgctatttgctttattacaattgtctggaacctaacctgcagtgtctcgaa

SEQ ID NO: 181738 - DNA, 75 bp, Homo sapiens
aattttattgtgctatttgctttattacaattgtctggaacctaacctgcagtgtctcgaaggtatgcctacata

SEQ ID NO: 181739 - DNA, 80 bp, Homo sapiens
tgctatttgctttattacaattgtctggaacctaacctgcagtgtctcgaaggtatgcctacatatgctgaagtatctta

SEQ ID NO: 181740 - DNA, 77 bp, Homo sapiens
tttattacaattgtctggaacctaacctgcagtgtctcgaaggtatgcctacatatgctgaagtatcttaattctac

SEQ ID NO: 181741 - DNA, 78 bp, Homo sapiens
aacctaacctgcagtgtctcgaaggtatgcctacatatgctgaagtatcttaattctactgcttgatagtatattttg

SEQ ID NO: 181742 - DNA, 80 bp, Homo sapiens
agtgtctcgaaggtatgcctacatatgctgaagtatcttaattctactgcttgatagtatattttggtgaagattgctta

SEQ ID NO: 181743 - DNA, 78 bp, Homo sapiens
cgaaggtatgcctacatatgctgaagtatcttaattctactgcttgatagtatattttggtgaagattgcttaaacat

SEQ ID NO: 181744 - DNA, 81 bp, Homo sapiens
tgcctacatatgctgaagtatcttaattctactgcttgatagtatattttggtgaagattgcttaaacattagtttgctca

SEQ ID NO: 181745 - DNA, 79 bp, Homo sapiens
gctgaagtatcttaattctactgcttgatagtatattttggtgaagattgcttaaacattagtttgctcatagagtgag

SEQ ID NO: 181746 - DNA, 79 bp, Homo sapiens
tcttaattctactgcttgatagtatattttggtgaagattgcttaaacattagtttgctcatagagtgagggcactgaa

SEQ ID NO: 181747 - DNA, 80 bp, Homo sapiens
ttgatagtatattttggtgaagattgcttaaacattagtttgctcatagagtgagggcactgaacctcatacagaagtga

SEQ ID NO: 181748 - DNA, 78 bp, Homo sapiens
agtatattttggtgaagattgcttaaacattagtttgctcatagagtgagggcactgaacctcatacagaagtgatta

SEQ ID NO: 181749 - DNA, 77 bp, Homo sapiens
tttggtgaagattgcttaaacattagtttgctcatagagtgagggcactgaacctcatacagaagtgattaccttaa

SEQ ID NO: 181750 - DNA, 78 bp, Homo sapiens
agattgcttaaacattagtttgctcatagagtgagggcactgaacctcatacagaagtgattaccttaaattgatata

SEQ ID NO: 181751 - DNA, 77 bp, Homo sapiens
attgcttaaacattagtttgctcatagagtgagggcactgaacctcatacagaagtgattaccttaaattgatataa

SEQ ID NO: 181752 - DNA, 77 bp, Homo sapiens
gcttaaacattagtttgctcatagagtgagggcactgaacctcatacagaagtgattaccttaaattgatataataa

SEQ ID NO: 181753 - DNA, 76 bp, Homo sapiens
tgctcatagagtgagggcactgaacctcatacagaagtgattaccttaaattgatataataaagtaaaaacaccta

SEQ ID NO: 181754 - DNA, 75 bp, Homo sapiens
tagagtgagggcactgaacctcatacagaagtgattaccttaaattgatataataaagtaaaaacacctagcaca

SEQ ID NO: 181755 - DNA, 76 bp, Homo sapiens
gcactgaacctcatacagaagtgattaccttaaattgatataataaagtaaaaacacctagcacactgctgttcta

SEQ ID NO: 181756 - DNA, 77 bp, Homo sapiens
ctcatacagaagtgattaccttaaattgatataataaagtaaaaacacctagcacactgctgttctaatggcagcta

SEQ ID NO: 181757 - DNA, 76 bp, Homo sapiens
gaagtgattaccttaaattgatataataaagtaaaaacacctagcacactgctgttctaatggcagctaatcaaca

SEQ ID NO: 181758 - DNA, 78 bp, Homo sapiens
ataataaagtaaaaacacctagcacactgctgttctaatggcagctaatcaacatttgattgctactatcatttacaa

SEQ ID NO: 181759 - DNA, 82 bp, Homo sapiens
acctagcacactgctgttctaatggcagctaatcaacatttgattgctactatcatttacaataggtcacatactcctctac

SEQ ID NO: 181760 - DNA, 82 bp, Homo sapiens
gcagctaatcaacatttgattgctactatcatttacaataggtcacatactcctctactgcctaatacaagatatatcttta

SEQ ID NO: 181761 - DNA, 79 bp, Homo sapiens
caacatttgattgctactatcatttacaataggtcacatactcctctactgcctaatacaagatatatctttactacca

SEQ ID NO: 181762 - DNA, 73 bp, Homo sapiens
atttacaataggtcacatactcctctactgcctaatacaagatatatctttactaccaaaacaatgggcctac

SEQ ID NO: 181763 - DNA, 74 bp, Homo sapiens
atactcctctactgcctaatacaagatatatctttactaccaaaacaatgggcctaccaggatttgcaatacaa

SEQ ID NO: 181764 - DNA, 76 bp, Homo sapiens
agatatatctttactaccaaaacaatgggcctaccaggatttgcaatacaatcttcaacattaaatggctatgcaa

SEQ ID NO: 181765 - DNA, 75 bp, Homo sapiens
tctttactaccaaaacaatgggcctaccaggatttgcaatacaatcttcaacattaaatggctatgcaaaatcat

SEQ ID NO: 181766 - DNA, 76 bp, Homo sapiens
caaaacaatgggcctaccaggatttgcaatacaatcttcaacattaaatggctatgcaaaatcattttgtaatgga

SEQ ID NO: 181767 - DNA, 76 bp, Homo sapiens
ggatttgcaatacaatcttcaacattaaatggctatgcaaaatcattttgtaatggattttctacagagtattact

SEQ ID NO: 181768 - DNA, 75 bp, Homo sapiens
tcttcaacattaaatggctatgcaaaatcattttgtaatggattttctacagagtattacttttgtccaagacaa

SEQ ID NO: 181769 - DNA, 74 bp, Homo sapiens
cattaaatggctatgcaaaatcattttgtaatggattttctacagagtattacttttgtccaagacaagtaaga

SEQ ID NO: 181770 - DNA, 71 bp, Homo sapiens
tcattttgtaatggattttctacagagtattacttttgtccaagacaagtaagaaaaaccacatgtttaca

SEQ ID NO: 181771 - DNA, 69 bp, Homo sapiens
ggattttctacagagtattacttttgtccaagacaagtaagaaaaaccacatgtttacaactagaagtg

SEQ ID NO: 181772 - DNA, 69 bp, Homo sapiens
cagagtattacttttgtccaagacaagtaagaaaaaccacatgtttacaactagaagtgtttcaaaagc

SEQ ID NO: 181773 - DNA, 69 bp, Homo sapiens
ttacttttgtccaagacaagtaagaaaaaccacatgtttacaactagaagtgtttcaaaagcgagcacc

SEQ ID NO: 181774 - DNA, 72 bp, Homo sapiens
aagacaagtaagaaaaaccacatgtttacaactagaagtgtttcaaaagcgagcacctgtcaaggtagatca

SEQ ID NO: 181775 - DNA, 72 bp, Homo sapiens
taagaaaaaccacatgtttacaactagaagtgtttcaaaagcgagcacctgtcaaggtagatcacaggggag

SEQ ID NO: 181776 - DNA, 78 bp, Homo sapiens
acatgtttacaactagaagtgtttcaaaagcgagcacctgtcaaggtagatcacaggggaggcctgcataagctggca

SEQ ID NO: 181777 - DNA, 81 bp, Homo sapiens
tttcaaaagcgagcacctgtcaaggtagatcacaggggaggcctgcataagctggcactgatcctgtactaagagcatact

SEQ ID NO: 181778 - DNA, 80 bp, Homo sapiens
agcacctgtcaaggtagatcacaggggaggcctgcataagctggcactgatcctgtactaagagcatacttcctctttag

SEQ ID NO: 181779 - DNA, 78 bp, Homo sapiens
aaggtagatcacaggggaggcctgcataagctggcactgatcctgtactaagagcatacttcctctttaggtaacaga

SEQ ID NO: 181780 - DNA, 78 bp, Homo sapiens
caggggaggcctgcataagctggcactgatcctgtactaagagcatacttcctctttaggtaacagatgtcaaaagta

SEQ ID NO: 181781 - DNA, 78 bp, Homo sapiens
ctgcataagctggcactgatcctgtactaagagcatacttcctctttaggtaacagatgtcaaaagtagttctgtctt

SEQ ID NO: 181782 - DNA, 75 bp, Homo sapiens
tggcactgatcctgtactaagagcatacttcctctttaggtaacagatgtcaaaagtagttctgtcttttctaat

SEQ ID NO: 181783 - DNA, 73 bp, Homo sapiens
atcctgtactaagagcatacttcctctttaggtaacagatgtcaaaagtagttctgtcttttctaattggcaa

SEQ ID NO: 181784 - DNA, 72 bp, Homo sapiens
actaagagcatacttcctctttaggtaacagatgtcaaaagtagttctgtcttttctaattggcaactatat

SEQ ID NO: 181785 - DNA, 72 bp, Homo sapiens
acttcctctttaggtaacagatgtcaaaagtagttctgtcttttctaattggcaactatatttatgaacaga

SEQ ID NO: 181786 - DNA, 72 bp, Homo sapiens
aggtaacagatgtcaaaagtagttctgtcttttctaattggcaactatatttatgaacagaattttggtgac

SEQ ID NO: 181787 - DNA, 74 bp, Homo sapiens
gatgtcaaaagtagttctgtcttttctaattggcaactatatttatgaacagaattttggtgacttgatcttta

SEQ ID NO: 181788 - DNA, 70 bp, Homo sapiens
tgaacagaattttggtgacttgatctttaaagcaatcaaaataaaaatagtgaaaagggaaagagtacag

SEQ ID NO: 181789 - DNA, 70 bp, Homo sapiens
agcaatcaaaataaaaatagtgaaaagggaaagagtacagtataactagttaaacagaaatgatttcaga

SEQ ID NO: 181790 - DNA, 72 bp, Homo sapiens
ataaaaatagtgaaaagggaaagagtacagtataactagttaaacagaaatgatttcagacacattgctaca

SEQ ID NO: 181791 - DNA, 73 bp, Homo sapiens
gtgaaaagggaaagagtacagtataactagttaaacagaaatgatttcagacacattgctacacttttcataa

SEQ ID NO: 181792 - DNA, 73 bp, Homo sapiens
agggaaagagtacagtataactagttaaacagaaatgatttcagacacattgctacacttttcataaaatgta

SEQ ID NO: 181793 - DNA, 73 bp, Homo sapiens
acagtataactagttaaacagaaatgatttcagacacattgctacacttttcataaaatgtaacctcattagt

SEQ ID NO: 181794 - DNA, 74 bp, Homo sapiens
ctagttaaacagaaatgatttcagacacattgctacacttttcataaaatgtaacctcattagttacattacga

SEQ ID NO: 181795 - DNA, 73 bp, Homo sapiens
gaaatgatttcagacacattgctacacttttcataaaatgtaacctcattagttacattacgaaaatgtaact

SEQ ID NO: 181796 - DNA, 72 bp, Homo sapiens
cagacacattgctacacttttcataaaatgtaacctcattagttacattacgaaaatgtaacttttcataaa

SEQ ID NO: 181797 - DNA, 70 bp, Homo sapiens
tgctacacttttcataaaatgtaacctcattagttacattacgaaaatgtaacttttcataaaatgtaaa

SEQ ID NO: 181798 - DNA, 70 bp, Homo sapiens
tcataaaatgtaacctcattagttacattacgaaaatgtaacttttcataaaatgtaaacctcacctaga

SEQ ID NO: 181799 - DNA, 67 bp, Homo sapiens
cctcattagttacattacgaaaatgtaacttttcataaaatgtaaacctcacctagaaaaagaacac

SEQ ID NO: 181800 - DNA, 69 bp, Homo sapiens
acattacgaaaatgtaacttttcataaaatgtaaacctcacctagaaaaagaacacctagagcctgcta

SEQ ID NO: 181801 - DNA, 69 bp, Homo sapiens
cgaaaatgtaacttttcataaaatgtaaacctcacctagaaaaagaacacctagagcctgctataaaga

SEQ ID NO: 181802 - DNA, 73 bp, Homo sapiens
ttcataaaatgtaaacctcacctagaaaaagaacacctagagcctgctataaagattatctcttctttcacaa

SEQ ID NO: 181803 - DNA, 74 bp, Homo sapiens
atgtaaacctcacctagaaaaagaacacctagagcctgctataaagattatctcttctttcacaaatatccaga

SEQ ID NO: 181804 - DNA, 74 bp, Homo sapiens
acctagaaaaagaacacctagagcctgctataaagattatctcttctttcacaaatatccagaaagactgtgga

SEQ ID NO: 181805 - DNA, 76 bp, Homo sapiens
aaagaacacctagagcctgctataaagattatctcttctttcacaaatatccagaaagactgtggatgaatactaa

SEQ ID NO: 181806 - DNA, 78 bp, Homo sapiens
ctagagcctgctataaagattatctcttctttcacaaatatccagaaagactgtggatgaatactaatgaaagaagaa

SEQ ID NO: 181807 - DNA, 76 bp, Homo sapiens
gctataaagattatctcttctttcacaaatatccagaaagactgtggatgaatactaatgaaagaagaaaacacaa

SEQ ID NO: 181808 - DNA, 74 bp, Homo sapiens
ctcttctttcacaaatatccagaaagactgtggatgaatactaatgaaagaagaaaacacaaatataggacact

SEQ ID NO: 181809 - DNA, 74 bp, Homo sapiens
tcacaaatatccagaaagactgtggatgaatactaatgaaagaagaaaacacaaatataggacactttatttac

SEQ ID NO: 181810 - DNA, 73 bp, Homo sapiens
ctgtggatgaatactaatgaaagaagaaaacacaaatataggacactttatttacttctctgttcaattttca

SEQ ID NO: 181811 - DNA, 74 bp, Homo sapiens
ctaatgaaagaagaaaacacaaatataggacactttatttacttctctgttcaattttcattatgcctgactga

SEQ ID NO: 181812 - DNA, 72 bp, Homo sapiens
agaaaacacaaatataggacactttatttacttctctgttcaattttcattatgcctgactgaagtattagg

SEQ ID NO: 181813 - DNA, 74 bp, Homo sapiens
aatataggacactttatttacttctctgttcaattttcattatgcctgactgaagtattaggttcttctcacag

SEQ ID NO: 181814 - DNA, 73 bp, Homo sapiens
ggacactttatttacttctctgttcaattttcattatgcctgactgaagtattaggttcttctcacagttttg

SEQ ID NO: 181815 - DNA, 74 bp, Homo sapiens
cttctctgttcaattttcattatgcctgactgaagtattaggttcttctcacagttttggtccttctttcatta

SEQ ID NO: 181816 - DNA, 72 bp, Homo sapiens
ctgttcaattttcattatgcctgactgaagtattaggttcttctcacagttttggtccttctttcattaaaa

SEQ ID NO: 181817 - DNA, 63 bp, Homo sapiens
aaaaaaaaaaccacttaaaagtccacctcatttagtttctcctctgtaggaaactgaaaataa

SEQ ID NO: 181818 - DNA, 67 bp, Homo sapiens
aaccacttaaaagtccacctcatttagtttctcctctgtaggaaactgaaaataatccactcaattt

SEQ ID NO: 181819 - DNA, 69 bp, Homo sapiens
taaaagtccacctcatttagtttctcctctgtaggaaactgaaaataatccactcaatttttaaatgta

SEQ ID NO: 181820 - DNA, 68 bp, Homo sapiens
cctcatttagtttctcctctgtaggaaactgaaaataatccactcaatttttaaatgtacatttaaaa

SEQ ID NO: 181821 - DNA, 77 bp, Homo sapiens
tctcaaaataaaatacataacatccatgccaaacaattgtggaaaaatgctttccattagatgagtgaaatctatgt

SEQ ID NO: 181822 - DNA, 76 bp, Homo sapiens
aaatacataacatccatgccaaacaattgtggaaaaatgctttccattagatgagtgaaatctatgttaccaattc

SEQ ID NO: 181823 - DNA, 76 bp, Homo sapiens
acatccatgccaaacaattgtggaaaaatgctttccattagatgagtgaaatctatgttaccaattcccattaatg

SEQ ID NO: 181824 - DNA, 73 bp, Homo sapiens
gccaaacaattgtggaaaaatgctttccattagatgagtgaaatctatgttaccaattcccattaatgggtaa

SEQ ID NO: 181825 - DNA, 74 bp, Homo sapiens
ggaaaaatgctttccattagatgagtgaaatctatgttaccaattcccattaatgggtaaaatattgagatagc

SEQ ID NO: 181826 - DNA, 77 bp, Homo sapiens
gctttccattagatgagtgaaatctatgttaccaattcccattaatgggtaaaatattgagatagctatgccaataa

SEQ ID NO: 181827 - DNA, 74 bp, Homo sapiens
gatgagtgaaatctatgttaccaattcccattaatgggtaaaatattgagatagctatgccaataaaaggtaag

SEQ ID NO: 181828 - DNA, 73 bp, Homo sapiens
tgaaatctatgttaccaattcccattaatgggtaaaatattgagatagctatgccaataaaaggtaaggccaa

SEQ ID NO: 181829 - DNA, 69 bp, Homo sapiens
gttaccaattcccattaatgggtaaaatattgagatagctatgccaataaaaggtaaggccaaatttaa

SEQ ID NO: 181830 - DNA, 68 bp, Homo sapiens
cccattaatgggtaaaatattgagatagctatgccaataaaaggtaaggccaaatttaaacaaagaag

SEQ ID NO: 181831 - DNA, 68 bp, Homo sapiens
ggtaaaatattgagatagctatgccaataaaaggtaaggccaaatttaaacaaagaagtattgaaaag

SEQ ID NO: 181832 - DNA, 71 bp, Homo sapiens
tgagatagctatgccaataaaaggtaaggccaaatttaaacaaagaagtattgaaaagtgataaaacaata

SEQ ID NO: 181833 - DNA, 67 bp, Homo sapiens
atgccaataaaaggtaaggccaaatttaaacaaagaagtattgaaaagtgataaaacaatattctac

SEQ ID NO: 181834 - DNA, 66 bp, Homo sapiens
ggtaaggccaaatttaaacaaagaagtattgaaaagtgataaaacaatattctacttatgttaacc

SEQ ID NO: 181835 - DNA, 72 bp, Homo sapiens
ttaaacaaagaagtattgaaaagtgataaaacaatattctacttatgttaacctaacaatctatgcactagc

SEQ ID NO: 181836 - DNA, 73 bp, Homo sapiens
caaagaagtattgaaaagtgataaaacaatattctacttatgttaacctaacaatctatgcactagcgaatta

SEQ ID NO: 181837 - DNA, 74 bp, Homo sapiens
aagtgataaaacaatattctacttatgttaacctaacaatctatgcactagcgaattattaaaagccagaatca

SEQ ID NO: 181838 - DNA, 73 bp, Homo sapiens
aaaacaatattctacttatgttaacctaacaatctatgcactagcgaattattaaaagccagaatcaagagaa

SEQ ID NO: 181839 - DNA, 72 bp, Homo sapiens
attctacttatgttaacctaacaatctatgcactagcgaattattaaaagccagaatcaagagaaattttat

SEQ ID NO: 181840 - DNA, 73 bp, Homo sapiens
tgttaacctaacaatctatgcactagcgaattattaaaagccagaatcaagagaaattttattatcatttggt

SEQ ID NO: 181841 - DNA, 72 bp, Homo sapiens
ctagcgaattattaaaagccagaatcaagagaaattttattatcatttggttttacattagtaactgcttca

SEQ ID NO: 181842 - DNA, 72 bp, Homo sapiens
tattaaaagccagaatcaagagaaattttattatcatttggttttacattagtaactgcttcaaaaacatgc

SEQ ID NO: 181843 - DNA, 72 bp, Homo sapiens
cagaatcaagagaaattttattatcatttggttttacattagtaactgcttcaaaaacatgctaaaagaaca

SEQ ID NO: 181844 - DNA, 69 bp, Homo sapiens
attatcatttggttttacattagtaactgcttcaaaaacatgctaaaagaacaaaactttgttatataa

SEQ ID NO: 181845 - DNA, 68 bp, Homo sapiens
ggttttacattagtaactgcttcaaaaacatgctaaaagaacaaaactttgttatataaaaagatata

SEQ ID NO: 181846 - DNA, 71 bp, Homo sapiens
gtaactgcttcaaaaacatgctaaaagaacaaaactttgttatataaaaagatatataaaaatgagattga

SEQ ID NO: 181847 - DNA, 71 bp, Homo sapiens
aaacatgctaaaagaacaaaactttgttatataaaaagatatataaaaatgagattgaacaaacatcagta

SEQ ID NO: 181848 - DNA, 72 bp, Homo sapiens
tgctaaaagaacaaaactttgttatataaaaagatatataaaaatgagattgaacaaacatcagtaactcta

SEQ ID NO: 181849 - DNA, 72 bp, Homo sapiens
caaaactttgttatataaaaagatatataaaaatgagattgaacaaacatcagtaactctaacctcataatg

SEQ ID NO: 181850 - DNA, 74 bp, Homo sapiens
ataaaaagatatataaaaatgagattgaacaaacatcagtaactctaacctcataatgtatttttgtgtagctc

SEQ ID NO: 181851 - DNA, 78 bp, Homo sapiens
gatatataaaaatgagattgaacaaacatcagtaactctaacctcataatgtatttttgtgtagctctatcatattcc

SEQ ID NO: 181852 - DNA, 79 bp, Homo sapiens
gagattgaacaaacatcagtaactctaacctcataatgtatttttgtgtagctctatcatattccttatttcatttgca

SEQ ID NO: 181853 - DNA, 77 bp, Homo sapiens
caaacatcagtaactctaacctcataatgtatttttgtgtagctctatcatattccttatttcatttgcactaccac

SEQ ID NO: 181854 - DNA, 74 bp, Homo sapiens
aactctaacctcataatgtatttttgtgtagctctatcatattccttatttcatttgcactaccactagtaagg

SEQ ID NO: 181855 - DNA, 76 bp, Homo sapiens
atttttgtgtagctctatcatattccttatttcatttgcactaccactagtaaggtgagtgataggaattatgccc

SEQ ID NO: 181856 - DNA, 70 bp, Homo sapiens
attccttatttcatttgcactaccactagtaaggtgagtgataggaattatgccccctctaccctaaaat

SEQ ID NO: 181857 - DNA, 73 bp, Homo sapiens
ttatttcatttgcactaccactagtaaggtgagtgataggaattatgccccctctaccctaaaattcacatgt

SEQ ID NO: 181858 - DNA, 71 bp, Homo sapiens
actaccactagtaaggtgagtgataggaattatgccccctctaccctaaaattcacatgttgaagccttaa

SEQ ID NO: 181859 - DNA, 70 bp, Homo sapiens
ctagtaaggtgagtgataggaattatgccccctctaccctaaaattcacatgttgaagccttaaccccca

SEQ ID NO: 181860 - DNA, 69 bp, Homo sapiens
ttatgccccctctaccctaaaattcacatgttgaagccttaacccccagtgtcccaatacgatagtatt

SEQ ID NO: 181861 - DNA, 72 bp, Homo sapiens
tcacatgttgaagccttaacccccagtgtcccaatacgatagtatttgaagatgggacctttgcaaggtaat

SEQ ID NO: 181862 - DNA, 67 bp, Homo sapiens
aagccttaacccccagtgtcccaatacgatagtatttgaagatgggacctttgcaaggtaattaggt

SEQ ID NO: 181863 - DNA, 68 bp, Homo sapiens
ccccagtgtcccaatacgatagtatttgaagatgggacctttgcaaggtaattaggtttaaaatgagg

SEQ ID NO: 181864 - DNA, 71 bp, Homo sapiens
tcccaatacgatagtatttgaagatgggacctttgcaaggtaattaggtttaaaatgaggtcatgaacgta

SEQ ID NO: 181865 - DNA, 69 bp, Homo sapiens
tagtatttgaagatgggacctttgcaaggtaattaggtttaaaatgaggtcatgaacgtagggccctct

SEQ ID NO: 181866 - DNA, 69 bp, Homo sapiens
aagatgggacctttgcaaggtaattaggtttaaaatgaggtcatgaacgtagggccctcttgatggaat

SEQ ID NO: 181867 - DNA, 71 bp, Homo sapiens
ttgcaaggtaattaggtttaaaatgaggtcatgaacgtagggccctcttgatggaattggtatccttgtaa

SEQ ID NO: 181868 - DNA, 74 bp, Homo sapiens
aaatgaggtcatgaacgtagggccctcttgatggaattggtatccttgtaagaacagacaccaaagagcttgct

SEQ ID NO: 181869 - DNA, 72 bp, Homo sapiens
atgaacgtagggccctcttgatggaattggtatccttgtaagaacagacaccaaagagcttgcttcttttct

SEQ ID NO: 181870 - DNA, 71 bp, Homo sapiens
cgtagggccctcttgatggaattggtatccttgtaagaacagacaccaaagagcttgcttcttttctttct

SEQ ID NO: 181871 - DNA, 76 bp, Homo sapiens
tcttgatggaattggtatccttgtaagaacagacaccaaagagcttgcttcttttctttcttactatgtgaggaca

SEQ ID NO: 181872 - DNA, 72 bp, Homo sapiens
acttcccagcctttaaaactgcgagaaataaattgctgttgcttaagacactcagtctactgtattttgtta

SEQ ID NO: 181873 - DNA, 82 bp, Homo sapiens
tatggcagcccaagctgactaagatagcagggtgcattttagatcaatatttttcagatgataaaactgaagcacacagtaa

SEQ ID NO: 181874 - DNA, 79 bp, Homo sapiens
caagctgactaagatagcagggtgcattttagatcaatatttttcagatgataaaactgaagcacacagtaagattaag

SEQ ID NO: 181875 - DNA, 77 bp, Homo sapiens
actaagatagcagggtgcattttagatcaatatttttcagatgataaaactgaagcacacagtaagattaagtgacc

SEQ ID NO: 181876 - DNA, 74 bp, Homo sapiens
ggtgcattttagatcaatatttttcagatgataaaactgaagcacacagtaagattaagtgaccgggggtaata

SEQ ID NO: 181877 - DNA, 73 bp, Homo sapiens
agatcaatatttttcagatgataaaactgaagcacacagtaagattaagtgaccgggggtaatatttaggtga

SEQ ID NO: 181878 - DNA, 67 bp, Homo sapiens
ataaaactgaagcacacagtaagattaagtgaccgggggtaatatttaggtgaattagaaccggatt

SEQ ID NO: 181879 - DNA, 68 bp, Homo sapiens
aagcacacagtaagattaagtgaccgggggtaatatttaggtgaattagaaccggattttctgacttc

SEQ ID NO: 181880 - DNA, 67 bp, Homo sapiens
gtaagattaagtgaccgggggtaatatttaggtgaattagaaccggattttctgacttctaatccaa

SEQ ID NO: 181881 - DNA, 69 bp, Homo sapiens
taagtgaccgggggtaatatttaggtgaattagaaccggattttctgacttctaatccaatgctatttg

SEQ ID NO: 181882 - DNA, 72 bp, Homo sapiens
gggtaatatttaggtgaattagaaccggattttctgacttctaatccaatgctatttgtactgcaactatta

SEQ ID NO: 181883 - DNA, 72 bp, Homo sapiens
ttaggtgaattagaaccggattttctgacttctaatccaatgctatttgtactgcaactattaactttgaaa

SEQ ID NO: 181884 - DNA, 70 bp, Homo sapiens
agaaccggattttctgacttctaatccaatgctatttgtactgcaactattaactttgaaaaagggcaat

SEQ ID NO: 181885 - DNA, 72 bp, Homo sapiens
ctgacttctaatccaatgctatttgtactgcaactattaactttgaaaaagggcaattaatttaaagcagtg

SEQ ID NO: 181886 - DNA, 73 bp, Homo sapiens
tccaatgctatttgtactgcaactattaactttgaaaaagggcaattaatttaaagcagtgttctgaacatac

SEQ ID NO: 181887 - DNA, 70 bp, Homo sapiens
tttgtactgcaactattaactttgaaaaagggcaattaatttaaagcagtgttctgaacatactaacacc

SEQ ID NO: 181888 - DNA, 68 bp, Homo sapiens
ctgcaactattaactttgaaaaagggcaattaatttaaagcagtgttctgaacatactaacacccttt

SEQ ID NO: 181889 - DNA, 66 bp, Homo sapiens
ctttgaaaaagggcaattaatttaaagcagtgttctgaacatactaacacccttttataaattagg

SEQ ID NO: 181890 - DNA, 68 bp, Homo sapiens
ttaaagcagtgttctgaacatactaacacccttttataaattagggacagggaagaaagttttgtcac

SEQ ID NO: 181891 - DNA, 72 bp, Homo sapiens
tgttctgaacatactaacacccttttataaattagggacagggaagaaagttttgtcactgcagaagatgta

SEQ ID NO: 181892 - DNA, 68 bp, Homo sapiens
acccttttataaattagggacagggaagaaagttttgtcactgcagaagatgtaaggaatatcctttg

SEQ ID NO: 181893 - DNA, 70 bp, Homo sapiens
taaattagggacagggaagaaagttttgtcactgcagaagatgtaaggaatatcctttgtccccaaggta

SEQ ID NO: 181894 - DNA, 73 bp, Homo sapiens
aaagttttgtcactgcagaagatgtaaggaatatcctttgtccccaaggtacatcttctgatccacacccaaa

SEQ ID NO: 181895 - DNA, 73 bp, Homo sapiens
cagaagatgtaaggaatatcctttgtccccaaggtacatcttctgatccacacccaaagcaaaccagtggtaa

SEQ ID NO: 181896 - DNA, 70 bp, Homo sapiens
taaggaatatcctttgtccccaaggtacatcttctgatccacacccaaagcaaaccagtggtaaaacaaa

SEQ ID NO: 181897 - DNA, 69 bp, Homo sapiens
atatcctttgtccccaaggtacatcttctgatccacacccaaagcaaaccagtggtaaaacaaaacact

SEQ ID NO: 181898 - DNA, 71 bp, Homo sapiens
aaggtacatcttctgatccacacccaaagcaaaccagtggtaaaacaaaacacttcatcccagcggagtta

SEQ ID NO: 181899 - DNA, 74 bp, Homo sapiens
atcttctgatccacacccaaagcaaaccagtggtaaaacaaaacacttcatcccagcggagttaatgtgtctga

SEQ ID NO: 181900 - DNA, 74 bp, Homo sapiens
cacccaaagcaaaccagtggtaaaacaaaacacttcatcccagcggagttaatgtgtctgatccattgcttcta

SEQ ID NO: 181901 - DNA, 73 bp, Homo sapiens
aagcaaaccagtggtaaaacaaaacacttcatcccagcggagttaatgtgtctgatccattgcttctaacatt

SEQ ID NO: 181902 - DNA, 77 bp, Homo sapiens
taaaacaaaacacttcatcccagcggagttaatgtgtctgatccattgcttctaacatttgtccaatcaatattaca

SEQ ID NO: 181903 - DNA, 78 bp, Homo sapiens
aaaacacttcatcccagcggagttaatgtgtctgatccattgcttctaacatttgtccaatcaatattacaatgaatc

SEQ ID NO: 181904 - DNA, 79 bp, Homo sapiens
atcccagcggagttaatgtgtctgatccattgcttctaacatttgtccaatcaatattacaatgaatcctggctaggaa

SEQ ID NO: 181905 - DNA, 77 bp, Homo sapiens
ttaatgtgtctgatccattgcttctaacatttgtccaatcaatattacaatgaatcctggctaggaaccttgttatt

SEQ ID NO: 181906 - DNA, 76 bp, Homo sapiens
ctgatccattgcttctaacatttgtccaatcaatattacaatgaatcctggctaggaaccttgttatttcagtaat

SEQ ID NO: 181907 - DNA, 72 bp, Homo sapiens
ttgcttctaacatttgtccaatcaatattacaatgaatcctggctaggaaccttgttatttcagtaattttt

SEQ ID NO: 181908 - DNA, 66 bp, Homo sapiens
accgcgcccggacttcagtaagttttataaaggaaaacagggaagtttcttctctgaactgcccta

SEQ ID NO: 181909 - DNA, 69 bp, Homo sapiens
gacttcagtaagttttataaaggaaaacagggaagtttcttctctgaactgccctaatcctcttgagac

SEQ ID NO: 181910 - DNA, 70 bp, Homo sapiens
agttttataaaggaaaacagggaagtttcttctctgaactgccctaatcctcttgagactggcattaata

SEQ ID NO: 181911 - DNA, 71 bp, Homo sapiens
ataaaggaaaacagggaagtttcttctctgaactgccctaatcctcttgagactggcattaataggaccaa

SEQ ID NO: 181912 - DNA, 82 bp, Homo sapiens
ttctctgaactgccctaatcctcttgagactggcattaataggaccaatgagcacatcaggcaacacagtaaaatcatatat

SEQ ID NO: 181913 - DNA, 79 bp, Homo sapiens
aactgccctaatcctcttgagactggcattaataggaccaatgagcacatcaggcaacacagtaaaatcatatatttta

SEQ ID NO: 181914 - DNA, 77 bp, Homo sapiens
aatcctcttgagactggcattaataggaccaatgagcacatcaggcaacacagtaaaatcatatattttatttacct

SEQ ID NO: 181915 - DNA, 79 bp, Homo sapiens
agactggcattaataggaccaatgagcacatcaggcaacacagtaaaatcatatattttatttaccttcaagtgatcta

SEQ ID NO: 181916 - DNA, 76 bp, Homo sapiens
taggaccaatgagcacatcaggcaacacagtaaaatcatatattttatttaccttcaagtgatctacgttcttttc

SEQ ID NO: 181917 - DNA, 75 bp, Homo sapiens
atgagcacatcaggcaacacagtaaaatcatatattttatttaccttcaagtgatctacgttcttttcctaactc

SEQ ID NO: 181918 - DNA, 72 bp, Homo sapiens
caggcaacacagtaaaatcatatattttatttaccttcaagtgatctacgttcttttcctaactcttcaata

SEQ ID NO: 181919 - DNA, 70 bp, Homo sapiens
gtaaaatcatatattttatttaccttcaagtgatctacgttcttttcctaactcttcaatataaatccca

SEQ ID NO: 181920 - DNA, 70 bp, Homo sapiens
ttttatttaccttcaagtgatctacgttcttttcctaactcttcaatataaatcccataatatccaagaa

SEQ ID NO: 181921 - DNA, 69 bp, Homo sapiens
tttaccttcaagtgatctacgttcttttcctaactcttcaatataaatcccataatatccaagaaaaaa

SEQ ID NO: 181922 - DNA, 71 bp, Homo sapiens
tgatctacgttcttttcctaactcttcaatataaatcccataatatccaagaaaaaaataccatttaatgc

SEQ ID NO: 181923 - DNA, 68 bp, Homo sapiens
gttcttttcctaactcttcaatataaatcccataatatccaagaaaaaaataccatttaatgctttaa

SEQ ID NO: 181924 - DNA, 72 bp, Homo sapiens
tcttcaatataaatcccataatatccaagaaaaaaataccatttaatgctttaaataagctgttaacagctc

SEQ ID NO: 181925 - DNA, 70 bp, Homo sapiens
aatcccataatatccaagaaaaaaataccatttaatgctttaaataagctgttaacagctctttctttca

SEQ ID NO: 181926 - DNA, 68 bp, Homo sapiens
tatccaagaaaaaaataccatttaatgctttaaataagctgttaacagctctttctttcaaaacaagg

SEQ ID NO: 181927 - DNA, 66 bp, Homo sapiens
aaataccatttaatgctttaaataagctgttaacagctctttctttcaaaacaaggtggaaccggg

SEQ ID NO: 181928 - DNA, 67 bp, Homo sapiens
tttaatgctttaaataagctgttaacagctctttctttcaaaacaaggtggaaccggggaaaggaca

SEQ ID NO: 181929 - DNA, 69 bp, Homo sapiens
taaataagctgttaacagctctttctttcaaaacaaggtggaaccggggaaaggacactagagtgcaac

SEQ ID NO: 181930 - DNA, 67 bp, Homo sapiens
ctgttaacagctctttctttcaaaacaaggtggaaccggggaaaggacactagagtgcaacctttat

SEQ ID NO: 181931 - DNA, 69 bp, Homo sapiens
ttaacagctctttctttcaaaacaaggtggaaccggggaaaggacactagagtgcaacctttattgcta

SEQ ID NO: 181932 - DNA, 69 bp, Homo sapiens
tttcaaaacaaggtggaaccggggaaaggacactagagtgcaacctttattgctagacacctactcaag

SEQ ID NO: 181933 - DNA, 70 bp, Homo sapiens
aacaaggtggaaccggggaaaggacactagagtgcaacctttattgctagacacctactcaagtctgtaa

SEQ ID NO: 181934 - DNA, 72 bp, Homo sapiens
aaccggggaaaggacactagagtgcaacctttattgctagacacctactcaagtctgtaaccacagagaaga

SEQ ID NO: 181935 - DNA, 77 bp, Homo sapiens
agtgcaacctttattgctagacacctactcaagtctgtaaccacagagaagactctacatctctttttagtagatgc

SEQ ID NO: 181936 - DNA, 79 bp, Homo sapiens
ttattgctagacacctactcaagtctgtaaccacagagaagactctacatctctttttagtagatgctctccatttgta

SEQ ID NO: 181937 - DNA, 76 bp, Homo sapiens
ctactcaagtctgtaaccacagagaagactctacatctctttttagtagatgctctccatttgtattacgacaact

SEQ ID NO: 181938 - DNA, 77 bp, Homo sapiens
tctgtaaccacagagaagactctacatctctttttagtagatgctctccatttgtattacgacaacttgaatgaatt

SEQ ID NO: 181939 - DNA, 78 bp, Homo sapiens
cagagaagactctacatctctttttagtagatgctctccatttgtattacgacaacttgaatgaatttgatgttagat

SEQ ID NO: 181940 - DNA, 77 bp, Homo sapiens
ttttagtagatgctctccatttgtattacgacaacttgaatgaatttgatgttagattagaatcatatttagcctct

SEQ ID NO: 181941 - DNA, 79 bp, Homo sapiens
gtagatgctctccatttgtattacgacaacttgaatgaatttgatgttagattagaatcatatttagcctcttgagttc

SEQ ID NO: 181942 - DNA, 76 bp, Homo sapiens
ccatttgtattacgacaacttgaatgaatttgatgttagattagaatcatatttagcctcttgagttcttatgtta

SEQ ID NO: 181943 - DNA, 77 bp, Homo sapiens
cgacaacttgaatgaatttgatgttagattagaatcatatttagcctcttgagttcttatgttatcaaaagctattg

SEQ ID NO: 181944 - DNA, 78 bp, Homo sapiens
tgaatttgatgttagattagaatcatatttagcctcttgagttcttatgttatcaaaagctattgttatacccatcat

SEQ ID NO: 181945 - DNA, 78 bp, Homo sapiens
gatgttagattagaatcatatttagcctcttgagttcttatgttatcaaaagctattgttatacccatcattttctga

SEQ ID NO: 181946 - DNA, 81 bp, Homo sapiens
gaatcatatttagcctcttgagttcttatgttatcaaaagctattgttatacccatcattttctgatgatagagcaagatc

SEQ ID NO: 181947 - DNA, 81 bp, Homo sapiens
tagcctcttgagttcttatgttatcaaaagctattgttatacccatcattttctgatgatagagcaagatcctgagaatta

SEQ ID NO: 181948 - DNA, 79 bp, Homo sapiens
agttcttatgttatcaaaagctattgttatacccatcattttctgatgatagagcaagatcctgagaattaccctctca

SEQ ID NO: 181949 - DNA, 78 bp, Homo sapiens
aaagctattgttatacccatcattttctgatgatagagcaagatcctgagaattaccctctcaactgttagcaaaaca

SEQ ID NO: 181950 - DNA, 71 bp, Homo sapiens
agagcaagatcctgagaattaccctctcaactgttagcaaaacaggaaacgtccttatttctgttatattt

SEQ ID NO: 181951 - DNA, 70 bp, Homo sapiens
agatcctgagaattaccctctcaactgttagcaaaacaggaaacgtccttatttctgttatattttcaac

SEQ ID NO: 181952 - DNA, 69 bp, Homo sapiens
aattaccctctcaactgttagcaaaacaggaaacgtccttatttctgttatattttcaacttacagata

SEQ ID NO: 181953 - DNA, 72 bp, Homo sapiens
tgttagcaaaacaggaaacgtccttatttctgttatattttcaacttacagatataaaatcatcctggaagc

SEQ ID NO: 181954 - DNA, 76 bp, Homo sapiens
tccttatttctgttatattttcaacttacagatataaaatcatcctggaagccaagataattggcttgcattgagg

SEQ ID NO: 181955 - DNA, 76 bp, Homo sapiens
agatataaaatcatcctggaagccaagataattggcttgcattgaggtgcctgtttttacaattacattcactttc

SEQ ID NO: 181956 - DNA, 75 bp, Homo sapiens
aaaatcatcctggaagccaagataattggcttgcattgaggtgcctgtttttacaattacattcactttcttcat

SEQ ID NO: 181957 - DNA, 76 bp, Homo sapiens
ggaagccaagataattggcttgcattgaggtgcctgtttttacaattacattcactttcttcattattatcattac

SEQ ID NO: 181958 - DNA, 75 bp, Homo sapiens
gataattggcttgcattgaggtgcctgtttttacaattacattcactttcttcattattatcattacctttacta

SEQ ID NO: 181959 - DNA, 74 bp, Homo sapiens
ttgcattgaggtgcctgtttttacaattacattcactttcttcattattatcattacctttactattattatta

SEQ ID NO: 181960 - DNA, 74 bp, Homo sapiens
gtgcctgtttttacaattacattcactttcttcattattatcattacctttactattattattaaatgctgtca

SEQ ID NO: 181961 - DNA, 75 bp, Homo sapiens
caattacattcactttcttcattattatcattacctttactattattattaaatgctgtcatttggacttatcac

SEQ ID NO: 181962 - DNA, 76 bp, Homo sapiens
ctttcttcattattatcattacctttactattattattaaatgctgtcatttggacttatcactacttgtctgaga

SEQ ID NO: 181963 - DNA, 76 bp, Homo sapiens
tattatcattacctttactattattattaaatgctgtcatttggacttatcactacttgtctgagaatagaaaatg

SEQ ID NO: 181964 - DNA, 76 bp, Homo sapiens
tacctttactattattattaaatgctgtcatttggacttatcactacttgtctgagaatagaaaatgtcattagga

SEQ ID NO: 181965 - DNA, 76 bp, Homo sapiens
ttattattaaatgctgtcatttggacttatcactacttgtctgagaatagaaaatgtcattaggaaataaaatggc

SEQ ID NO: 181966 - DNA, 75 bp, Homo sapiens
ttaaatgctgtcatttggacttatcactacttgtctgagaatagaaaatgtcattaggaaataaaatggcctcgg

SEQ ID NO: 181967 - DNA, 72 bp, Homo sapiens
atttggacttatcactacttgtctgagaatagaaaatgtcattaggaaataaaatggcctcggggagcaggg

SEQ ID NO: 181968 - DNA, 73 bp, Homo sapiens
ttatcactacttgtctgagaatagaaaatgtcattaggaaataaaatggcctcggggagcaggggtctataaa

SEQ ID NO: 181969 - DNA, 68 bp, Homo sapiens
aaaatgtcattaggaaataaaatggcctcggggagcaggggtctataaatctctccataagacccttt

SEQ ID NO: 181970 - DNA, 69 bp, Homo sapiens
ttaggaaataaaatggcctcggggagcaggggtctataaatctctccataagacccttttccacactta

SEQ ID NO: 181971 - DNA, 69 bp, Homo sapiens
aataaaatggcctcggggagcaggggtctataaatctctccataagacccttttccacacttagggatg

SEQ ID NO: 181972 - DNA, 72 bp, Homo sapiens
gtctataaatctctccataagacccttttccacacttagggatggctatcattttctttcagcttcctccct

SEQ ID NO: 181973 - DNA, 71 bp, Homo sapiens
taaatctctccataagacccttttccacacttagggatggctatcattttctttcagcttcctccctttta

SEQ ID NO: 181974 - DNA, 71 bp, Homo sapiens
ataagacccttttccacacttagggatggctatcattttctttcagcttcctcccttttaagcagaagagc

SEQ ID NO: 181975 - DNA, 73 bp, Homo sapiens
ttccacacttagggatggctatcattttctttcagcttcctcccttttaagcagaagagcctcaagtctttta

SEQ ID NO: 181976 - DNA, 77 bp, Homo sapiens
gatggctatcattttctttcagcttcctcccttttaagcagaagagcctcaagtcttttatctctcatcaccatttg

SEQ ID NO: 181977 - DNA, 72 bp, Homo sapiens
attttctttcagcttcctcccttttaagcagaagagcctcaagtcttttatctctcatcaccatttgtactt

SEQ ID NO: 181978 - DNA, 72 bp, Homo sapiens
ctttcagcttcctcccttttaagcagaagagcctcaagtcttttatctctcatcaccatttgtactttaaag

SEQ ID NO: 181979 - DNA, 75 bp, Homo sapiens
tcccttttaagcagaagagcctcaagtcttttatctctcatcaccatttgtactttaaaggctgctacgattgta

SEQ ID NO: 181980 - DNA, 78 bp, Homo sapiens
aagcagaagagcctcaagtcttttatctctcatcaccatttgtactttaaaggctgctacgattgtagccagaacatg

SEQ ID NO: 181981 - DNA, 76 bp, Homo sapiens
aagtcttttatctctcatcaccatttgtactttaaaggctgctacgattgtagccagaacatgtgctctttcaaaa

SEQ ID NO: 181982 - DNA, 77 bp, Homo sapiens
ttttatctctcatcaccatttgtactttaaaggctgctacgattgtagccagaacatgtgctctttcaaaaaatcca

SEQ ID NO: 181983 - DNA, 77 bp, Homo sapiens
tactttaaaggctgctacgattgtagccagaacatgtgctctttcaaaaaatccagttgttgcaagatgtgttctaa

SEQ ID NO: 181984 - DNA, 82 bp, Homo sapiens
tgctacgattgtagccagaacatgtgctctttcaaaaaatccagttgttgcaagatgtgttctaagatcactggctgaagga

SEQ ID NO: 181985 - DNA, 80 bp, Homo sapiens
tagccagaacatgtgctctttcaaaaaatccagttgttgcaagatgtgttctaagatcactggctgaaggatccttgtta

SEQ ID NO: 181986 - DNA, 78 bp, Homo sapiens
tttcaaaaaatccagttgttgcaagatgtgttctaagatcactggctgaaggatccttgttaagagctttgagaatga

SEQ ID NO: 181987 - DNA, 80 bp, Homo sapiens
aaatccagttgttgcaagatgtgttctaagatcactggctgaaggatccttgttaagagctttgagaatgagaaatcatc

SEQ ID NO: 181988 - DNA, 79 bp, Homo sapiens
tggctgaaggatccttgttaagagctttgagaatgagaaatcatctgaaaacagaccacttacagtcacaccacctata

SEQ ID NO: 181989 - DNA, 75 bp, Homo sapiens
aaggatccttgttaagagctttgagaatgagaaatcatctgaaaacagaccacttacagtcacaccacctataaa

SEQ ID NO: 181990 - DNA, 76 bp, Homo sapiens
ttaagagctttgagaatgagaaatcatctgaaaacagaccacttacagtcacaccacctataaacacagtactatt

SEQ ID NO: 181991 - DNA, 77 bp, Homo sapiens
ttgagaatgagaaatcatctgaaaacagaccacttacagtcacaccacctataaacacagtactatttttgagcaaa

SEQ ID NO: 181992 - DNA, 76 bp, Homo sapiens
aatcatctgaaaacagaccacttacagtcacaccacctataaacacagtactatttttgagcaaagttcacatgta

SEQ ID NO: 181993 - DNA, 73 bp, Homo sapiens
aaaacagaccacttacagtcacaccacctataaacacagtactatttttgagcaaagttcacatgtacagaag

SEQ ID NO: 181994 - DNA, 72 bp, Homo sapiens
accacctataaacacagtactatttttgagcaaagttcacatgtacagaagttgaatttcacaactgacctt

SEQ ID NO: 181995 - DNA, 73 bp, Homo sapiens
acacagtactatttttgagcaaagttcacatgtacagaagttgaatttcacaactgacctttaactacaccac

SEQ ID NO: 181996 - DNA, 73 bp, Homo sapiens
atttttgagcaaagttcacatgtacagaagttgaatttcacaactgacctttaactacaccacttagttgtga

SEQ ID NO: 181997 - DNA, 74 bp, Homo sapiens
acatgtacagaagttgaatttcacaactgacctttaactacaccacttagttgtgatgccaaagacatatgttt

SEQ ID NO: 181998 - DNA, 73 bp, Homo sapiens
aagttgaatttcacaactgacctttaactacaccacttagttgtgatgccaaagacatatgttttagctgtgt

SEQ ID NO: 181999 - DNA, 73 bp, Homo sapiens
tttcacaactgacctttaactacaccacttagttgtgatgccaaagacatatgttttagctgtgttttctctt

SEQ ID NO: 182000 - DNA, 71 bp, Homo sapiens
acctttaactacaccacttagttgtgatgccaaagacatatgttttagctgtgttttctctttctcttttg

SEQ ID NO: 182001 - DNA, 75 bp, Homo sapiens
tacaccacttagttgtgatgccaaagacatatgttttagctgtgttttctctttctcttttgtgtgttttgagag

SEQ ID NO: 182002 - DNA, 75 bp, Homo sapiens
tgatgccaaagacatatgttttagctgtgttttctctttctcttttgtgtgttttgagagtgacgggtagagaaa

SEQ ID NO: 182003 - DNA, 72 bp, Homo sapiens
tttctctttctcttttgtgtgttttgagagtgacgggtagagaaagaaaaatgttacaagtgagagggctca

SEQ ID NO: 182004 - DNA, 74 bp, Homo sapiens
tcttttgtgtgttttgagagtgacgggtagagaaagaaaaatgttacaagtgagagggctcagagctgtaattc

SEQ ID NO: 182005 - DNA, 76 bp, Homo sapiens
tgttttgagagtgacgggtagagaaagaaaaatgttacaagtgagagggctcagagctgtaattcctcacagaaga

SEQ ID NO: 182006 - DNA, 75 bp, Homo sapiens
agagtgacgggtagagaaagaaaaatgttacaagtgagagggctcagagctgtaattcctcacagaagagaaaca

SEQ ID NO: 182007 - DNA, 72 bp, Homo sapiens
agaaagaaaaatgttacaagtgagagggctcagagctgtaattcctcacagaagagaaacaggaaggaaaaa

SEQ ID NO: 182008 - DNA, 70 bp, Homo sapiens
aaaaatgttacaagtgagagggctcagagctgtaattcctcacagaagagaaacaggaaggaaaaaaagt

SEQ ID NO: 182009 - DNA, 73 bp, Homo sapiens
acaagtgagagggctcagagctgtaattcctcacagaagagaaacaggaaggaaaaaaagtttcctgatagaa

SEQ ID NO: 182010 - DNA, 73 bp, Homo sapiens
tcagagctgtaattcctcacagaagagaaacaggaaggaaaaaaagtttcctgatagaactggcccataatta

SEQ ID NO: 182011 - DNA, 69 bp, Homo sapiens
attcctcacagaagagaaacaggaaggaaaaaaagtttcctgatagaactggcccataattaagtgtta

SEQ ID NO: 182012 - DNA, 69 bp, Homo sapiens
gaagagaaacaggaaggaaaaaaagtttcctgatagaactggcccataattaagtgttattggagttga

SEQ ID NO: 182013 - DNA, 69 bp, Homo sapiens
aggaaggaaaaaaagtttcctgatagaactggcccataattaagtgttattggagttgaccaatgaaca

SEQ ID NO: 182014 - DNA, 75 bp, Homo sapiens
tgatagaactggcccataattaagtgttattggagttgaccaatgaacatcgaaacaccactacttgtcagttta

SEQ ID NO: 182015 - DNA, 76 bp, Homo sapiens
attaagtgttattggagttgaccaatgaacatcgaaacaccactacttgtcagtttacaatgagatcttgagatta

SEQ ID NO: 182016 - DNA, 79 bp, Homo sapiens
tattggagttgaccaatgaacatcgaaacaccactacttgtcagtttacaatgagatcttgagattattgtcagaacta

SEQ ID NO: 182017 - DNA, 79 bp, Homo sapiens
gtttacaatgagatcttgagattattgtcagaactattcagttacttgtgaagtaaccctcctgtgcagagcataagaa

SEQ ID NO: 182018 - DNA, 78 bp, Homo sapiens
atgagatcttgagattattgtcagaactattcagttacttgtgaagtaaccctcctgtgcagagcataagaaatttaa

SEQ ID NO: 182019 - DNA, 75 bp, Homo sapiens
ttgagattattgtcagaactattcagttacttgtgaagtaaccctcctgtgcagagcataagaaatttaaaatag

SEQ ID NO: 182020 - DNA, 75 bp, Homo sapiens
tgtcagaactattcagttacttgtgaagtaaccctcctgtgcagagcataagaaatttaaaatagtggaaaatca

SEQ ID NO: 182021 - DNA, 72 bp, Homo sapiens
gtgaagtaaccctcctgtgcagagcataagaaatttaaaatagtggaaaatcacttttgtcttctcaacatt

SEQ ID NO: 182022 - DNA, 73 bp, Homo sapiens
cctcctgtgcagagcataagaaatttaaaatagtggaaaatcacttttgtcttctcaacatttataacggcaa

SEQ ID NO: 182023 - DNA, 73 bp, Homo sapiens
gcagagcataagaaatttaaaatagtggaaaatcacttttgtcttctcaacatttataacggcaacattgaac

SEQ ID NO: 182024 - DNA, 73 bp, Homo sapiens
tttaaaatagtggaaaatcacttttgtcttctcaacatttataacggcaacattgaactgaacactgaattga

SEQ ID NO: 182025 - DNA, 75 bp, Homo sapiens
gtggaaaatcacttttgtcttctcaacatttataacggcaacattgaactgaacactgaattgaacaaagtcata

SEQ ID NO: 182026 - DNA, 73 bp, Homo sapiens
cttttgtcttctcaacatttataacggcaacattgaactgaacactgaattgaacaaagtcataaaaagtaca

SEQ ID NO: 182027 - DNA, 75 bp, Homo sapiens
ctcaacatttataacggcaacattgaactgaacactgaattgaacaaagtcataaaaagtacattatggctacag

SEQ ID NO: 182028 - DNA, 75 bp, Homo sapiens
atttataacggcaacattgaactgaacactgaattgaacaaagtcataaaaagtacattatggctacagggctca

SEQ ID NO: 182029 - DNA, 76 bp, Homo sapiens
aacattgaactgaacactgaattgaacaaagtcataaaaagtacattatggctacagggctcagtactggattata

SEQ ID NO: 182030 - DNA, 73 bp, Homo sapiens
tgaacaaagtcataaaaagtacattatggctacagggctcagtactggattataaatattaaagtatatttgg

SEQ ID NO: 182031 - DNA, 70 bp, Homo sapiens
aagtacattatggctacagggctcagtactggattataaatattaaagtatatttgggattataaaaaag

SEQ ID NO: 182032 - DNA, 67 bp, Homo sapiens
ggctcagtactggattataaatattaaagtatatttgggattataaaaaagtataaagtaaattaaa

SEQ ID NO: 182033 - DNA, 68 bp, Homo sapiens
tataaatattaaagtatatttgggattataaaaaagtataaagtaaattaaatagaatgaattcagga

SEQ ID NO: 182034 - DNA, 66 bp, Homo sapiens
taaagtatatttgggattataaaaaagtataaagtaaattaaatagaatgaattcaggaaataaag

SEQ ID NO: 182035 - DNA, 70 bp, Homo sapiens
tgggattataaaaaagtataaagtaaattaaatagaatgaattcaggaaataaaggtgataatgaaatga

SEQ ID NO: 182036 - DNA, 68 bp, Homo sapiens
aaaaagtataaagtaaattaaatagaatgaattcaggaaataaaggtgataatgaaatgaaataacta

SEQ ID NO: 182037 - DNA, 71 bp, Homo sapiens
aagtaaattaaatagaatgaattcaggaaataaaggtgataatgaaatgaaataactaaaagatatatatc

SEQ ID NO: 182038 - DNA, 74 bp, Homo sapiens
aatagaatgaattcaggaaataaaggtgataatgaaatgaaataactaaaagatatatatctgaagagattatt

SEQ ID NO: 182039 - DNA, 75 bp, Homo sapiens
attcaggaaataaaggtgataatgaaatgaaataactaaaagatatatatctgaagagattattttgacaagaca

SEQ ID NO: 182040 - DNA, 75 bp, Homo sapiens
taaaggtgataatgaaatgaaataactaaaagatatatatctgaagagattattttgacaagacatttaactaca

SEQ ID NO: 182041 - DNA, 75 bp, Homo sapiens
gtgataatgaaatgaaataactaaaagatatatatctgaagagattattttgacaagacatttaactacatttcc

SEQ ID NO: 182042 - DNA, 71 bp, Homo sapiens
gaaataactaaaagatatatatctgaagagattattttgacaagacatttaactacatttccttattaact

SEQ ID NO: 182043 - DNA, 70 bp, Homo sapiens
ctaaaagatatatatctgaagagattattttgacaagacatttaactacatttccttattaactttaacc

SEQ ID NO: 182044 - DNA, 65 bp, Homo sapiens
tgacaagacatttaactacatttccttattaactttaaccttttaaaaaatgtgtcactttaaaa

SEQ ID NO: 182045 - DNA, 66 bp, Homo sapiens
taactacatttccttattaactttaaccttttaaaaaatgtgtcactttaaaatgttcataaagca

SEQ ID NO: 182046 - DNA, 68 bp, Homo sapiens
cttattaactttaaccttttaaaaaatgtgtcactttaaaatgttcataaagcatttgattgacacca

SEQ ID NO: 182047 - DNA, 71 bp, Homo sapiens
taaccttttaaaaaatgtgtcactttaaaatgttcataaagcatttgattgacaccaatataatctttaca

SEQ ID NO: 182048 - DNA, 75 bp, Homo sapiens
aaaaatgtgtcactttaaaatgttcataaagcatttgattgacaccaatataatctttacagatttacacagatg

SEQ ID NO: 182049 - DNA, 77 bp, Homo sapiens
gtgtcactttaaaatgttcataaagcatttgattgacaccaatataatctttacagatttacacagatgtcaagaag

SEQ ID NO: 182050 - DNA, 75 bp, Homo sapiens
aaatgttcataaagcatttgattgacaccaatataatctttacagatttacacagatgtcaagaagtattaattt

SEQ ID NO: 182051 - DNA, 75 bp, Homo sapiens
gacaccaatataatctttacagatttacacagatgtcaagaagtattaattttaatctttggactatcttacaga

SEQ ID NO: 182052 - DNA, 72 bp, Homo sapiens
taatctttacagatttacacagatgtcaagaagtattaattttaatctttggactatcttacagaattttcc

SEQ ID NO: 182053 - DNA, 71 bp, Homo sapiens
cagatttacacagatgtcaagaagtattaattttaatctttggactatcttacagaattttcccgattaaa

SEQ ID NO: 182054 - DNA, 70 bp, Homo sapiens
cagatgtcaagaagtattaattttaatctttggactatcttacagaattttcccgattaaatgtgaaacc

SEQ ID NO: 182055 - DNA, 69 bp, Homo sapiens
tcaagaagtattaattttaatctttggactatcttacagaattttcccgattaaatgtgaaacctggat

SEQ ID NO: 182056 - DNA, 74 bp, Homo sapiens
tttaatctttggactatcttacagaattttcccgattaaatgtgaaacctggatttactatcatggcagtggca

SEQ ID NO: 182057 - DNA, 75 bp, Homo sapiens
tctttggactatcttacagaattttcccgattaaatgtgaaacctggatttactatcatggcagtggcattaaga

SEQ ID NO: 182058 - DNA, 71 bp, Homo sapiens
cttacagaattttcccgattaaatgtgaaacctggatttactatcatggcagtggcattaagagtttattt

SEQ ID NO: 182059 - DNA, 72 bp, Homo sapiens
cccgattaaatgtgaaacctggatttactatcatggcagtggcattaagagtttattttatttgctaagaac

SEQ ID NO: 182060 - DNA, 76 bp, Homo sapiens
tgtgaaacctggatttactatcatggcagtggcattaagagtttattttatttgctaagaacttatgtccatggta

SEQ ID NO: 182061 - DNA, 73 bp, Homo sapiens
actatcatggcagtggcattaagagtttattttatttgctaagaacttatgtccatggtagtttgacttttaa

SEQ ID NO: 182062 - DNA, 68 bp, Homo sapiens
gtttattttatttgctaagaacttatgtccatggtagtttgacttttaatataaccaaaatccactgg

SEQ ID NO: 182063 - DNA, 68 bp, Homo sapiens
tttgctaagaacttatgtccatggtagtttgacttttaatataaccaaaatccactggggaaaaagtg

SEQ ID NO: 182064 - DNA, 66 bp, Homo sapiens
ccatggtagtttgacttttaatataaccaaaatccactggggaaaaagtgttgacttaagactacc

SEQ ID NO: 182065 - DNA, 68 bp, Homo sapiens
aatataaccaaaatccactggggaaaaagtgttgacttaagactacctcatcttcaccaggtcaaaaa

SEQ ID NO: 182066 - DNA, 69 bp, Homo sapiens
aaaatccactggggaaaaagtgttgacttaagactacctcatcttcaccaggtcaaaaatgcaacattt

SEQ ID NO: 182067 - DNA, 76 bp, Homo sapiens
gaaaaagtgttgacttaagactacctcatcttcaccaggtcaaaaatgcaacattttctcattatcagcttatgaa

SEQ ID NO: 182068 - DNA, 77 bp, Homo sapiens
agactacctcatcttcaccaggtcaaaaatgcaacattttctcattatcagcttatgaaacaaggactactgatagt

SEQ ID NO: 182069 - DNA, 76 bp, Homo sapiens
ttcaccaggtcaaaaatgcaacattttctcattatcagcttatgaaacaaggactactgatagttgcaagggttat

SEQ ID NO: 182070 - DNA, 76 bp, Homo sapiens
ggtcaaaaatgcaacattttctcattatcagcttatgaaacaaggactactgatagttgcaagggttatttctcta

SEQ ID NO: 182071 - DNA, 76 bp, Homo sapiens
cattttctcattatcagcttatgaaacaaggactactgatagttgcaagggttatttctctacaagccttatatct

SEQ ID NO: 182072 - DNA, 76 bp, Homo sapiens
attatcagcttatgaaacaaggactactgatagttgcaagggttatttctctacaagccttatatcttcctcaata

SEQ ID NO: 182073 - DNA, 75 bp, Homo sapiens
gcttatgaaacaaggactactgatagttgcaagggttatttctctacaagccttatatcttcctcaatagaatta

SEQ ID NO: 182074 - DNA, 74 bp, Homo sapiens
acaaggactactgatagttgcaagggttatttctctacaagccttatatcttcctcaatagaattagaatactg

SEQ ID NO: 182075 - DNA, 74 bp, Homo sapiens
atagttgcaagggttatttctctacaagccttatatcttcctcaatagaattagaatactggagctctttcctc

SEQ ID NO: 182076 - DNA, 74 bp, Homo sapiens
aagggttatttctctacaagccttatatcttcctcaatagaattagaatactggagctctttcctctatctaga

SEQ ID NO: 182077 - DNA, 74 bp, Homo sapiens
tcaatagaattagaatactggagctctttcctctatctagatcaaggaactccaaagttctttgggtgtgggta

SEQ ID NO: 182078 - DNA, 75 bp, Homo sapiens
ttagaatactggagctctttcctctatctagatcaaggaactccaaagttctttgggtgtgggtatgaatgtata

SEQ ID NO: 182079 - DNA, 76 bp, Homo sapiens
gaactccaaagttctttgggtgtgggtatgaatgtatatgtttacatagatgtgtgtaagataatacatagtagta

SEQ ID NO: 182080 - DNA, 74 bp, Homo sapiens
gttctttgggtgtgggtatgaatgtatatgtttacatagatgtgtgtaagataatacatagtagtaaaagaaaa

SEQ ID NO: 182081 - DNA, 76 bp, Homo sapiens
tgtgggtatgaatgtatatgtttacatagatgtgtgtaagataatacatagtagtaaaagaaaataacaagacctc

SEQ ID NO: 182082 - DNA, 74 bp, Homo sapiens
tatatgtttacatagatgtgtgtaagataatacatagtagtaaaagaaaataacaagacctcttttcatattag

SEQ ID NO: 182083 - DNA, 72 bp, Homo sapiens
catagatgtgtgtaagataatacatagtagtaaaagaaaataacaagacctcttttcatattagtcttttac

SEQ ID NO: 182084 - DNA, 69 bp, Homo sapiens
tgtgtgtaagataatacatagtagtaaaagaaaataacaagacctcttttcatattagtcttttacttt

SEQ ID NO: 182085 - DNA, 63 bp, Homo sapiens
gtagtaaaagaaaataacaagacctcttttcatattagtcttttacttttaaattttcaattt

SEQ ID NO: 182086 - DNA, 65 bp, Homo sapiens
ataacaagacctcttttcatattagtcttttacttttaaattttcaattttttgtatgtgttttc

SEQ ID NO: 182087 - DNA, 67 bp, Homo sapiens
gacctcttttcatattagtcttttacttttaaattttcaattttttgtatgtgttttcttgtacata

SEQ ID NO: 182088 - DNA, 70 bp, Homo sapiens
tagtcttttacttttaaattttcaattttttgtatgtgttttcttgtacataatatgaaagtacagcata

SEQ ID NO: 182089 - DNA, 69 bp, Homo sapiens
cttttaaattttcaattttttgtatgtgttttcttgtacataatatgaaagtacagcataacttattct

SEQ ID NO: 182090 - DNA, 75 bp, Homo sapiens
ttcaattttttgtatgtgttttcttgtacataatatgaaagtacagcataacttattcttgtacataatatgttg

SEQ ID NO: 182091 - DNA, 75 bp, Homo sapiens
gttttcttgtacataatatgaaagtacagcataacttattcttgtacataatatgttggcttactataatttgga

SEQ ID NO: 182092 - DNA, 77 bp, Homo sapiens
acataatatgaaagtacagcataacttattcttgtacataatatgttggcttactataatttggaaatgtacataca

SEQ ID NO: 182093 - DNA, 76 bp, Homo sapiens
gtacagcataacttattcttgtacataatatgttggcttactataatttggaaatgtacatacattggggatacag

SEQ ID NO: 182094 - DNA, 74 bp, Homo sapiens
gcataacttattcttgtacataatatgttggcttactataatttggaaatgtacatacattggggatacaggtt

SEQ ID NO: 182095 - DNA, 75 bp, Homo sapiens
tatgttggcttactataatttggaaatgtacatacattggggatacaggtttacagggagagatgagttgtaata

SEQ ID NO: 182096 - DNA, 72 bp, Homo sapiens
gaaatgtacatacattggggatacaggtttacagggagagatgagttgtaataccaactctgtaagttttaa

SEQ ID NO: 182097 - DNA, 72 bp, Homo sapiens
gtacatacattggggatacaggtttacagggagagatgagttgtaataccaactctgtaagttttaattctg

SEQ ID NO: 182098 - DNA, 69 bp, Homo sapiens
gggatacaggtttacagggagagatgagttgtaataccaactctgtaagttttaattctgtaatttacc

SEQ ID NO: 182099 - DNA, 75 bp, Homo sapiens
gagagatgagttgtaataccaactctgtaagttttaattctgtaatttacctgctcaaatcttaattatatcaca

SEQ ID NO: 182100 - DNA, 75 bp, Homo sapiens
ataccaactctgtaagttttaattctgtaatttacctgctcaaatcttaattatatcacatgatttcaagctctg

SEQ ID NO: 182101 - DNA, 79 bp, Homo sapiens
ctgtaagttttaattctgtaatttacctgctcaaatcttaattatatcacatgatttcaagctctggagtgatacatgc

SEQ ID NO: 182102 - DNA, 81 bp, Homo sapiens
tgtaatttacctgctcaaatcttaattatatcacatgatttcaagctctggagtgatacatgctaaataaacaggacagtc

SEQ ID NO: 182103 - DNA, 83 bp, Homo sapiens
caaatcttaattatatcacatgatttcaagctctggagtgatacatgctaaataaacaggacagtctcattataactcacaca

SEQ ID NO: 182104 - DNA, 86 bp, Homo sapiens
ttaattatatcacatgatttcaagctctggagtgatacatgctaaataaacaggacagtctcattataactcacacagagagcatc

SEQ ID NO: 182105 - DNA, 83 bp, Homo sapiens
acatgatttcaagctctggagtgatacatgctaaataaacaggacagtctcattataactcacacagagagcatccagatttt

SEQ ID NO: 182106 - DNA, 81 bp, Homo sapiens
aagctctggagtgatacatgctaaataaacaggacagtctcattataactcacacagagagcatccagatttttgtcattt

SEQ ID NO: 182107 - DNA, 80 bp, Homo sapiens
agtgatacatgctaaataaacaggacagtctcattataactcacacagagagcatccagatttttgtcattttacagtat

SEQ ID NO: 182108 - DNA, 77 bp, Homo sapiens
gctaaataaacaggacagtctcattataactcacacagagagcatccagatttttgtcattttacagtattttataa

SEQ ID NO: 182109 - DNA, 78 bp, Homo sapiens
ctcattataactcacacagagagcatccagatttttgtcattttacagtattttataacaatcaaactcagagcttaa

SEQ ID NO: 182110 - DNA, 75 bp, Homo sapiens
tcacacagagagcatccagatttttgtcattttacagtattttataacaatcaaactcagagcttaaaagtttac

SEQ ID NO: 182111 - DNA, 70 bp, Homo sapiens
gagcatccagatttttgtcattttacagtattttataacaatcaaactcagagcttaaaagtttactttt

SEQ ID NO: 182112 - DNA, 70 bp, Homo sapiens
cagtattttataacaatcaaactcagagcttaaaagtttactttttatatttatactgtacacagagttc

SEQ ID NO: 182113 - DNA, 71 bp, Homo sapiens
taacaatcaaactcagagcttaaaagtttactttttatatttatactgtacacagagttccttattgaaga

SEQ ID NO: 182114 - DNA, 68 bp, Homo sapiens
ctttttatatttatactgtacacagagttccttattgaagaagaggtaacacaaacttatttaaaaga

SEQ ID NO: 182115 - DNA, 72 bp, Homo sapiens
ttatactgtacacagagttccttattgaagaagaggtaacacaaacttatttaaaagattttgaagtgcaca

SEQ ID NO: 182116 - DNA, 72 bp, Homo sapiens
ctgtacacagagttccttattgaagaagaggtaacacaaacttatttaaaagattttgaagtgcacatagct

SEQ ID NO: 182117 - DNA, 69 bp, Homo sapiens
agttccttattgaagaagaggtaacacaaacttatttaaaagattttgaagtgcacatagcttttctta

SEQ ID NO: 182118 - DNA, 68 bp, Homo sapiens
gaagaggtaacacaaacttatttaaaagattttgaagtgcacatagcttttcttaaaaacccaacaca

SEQ ID NO: 182119 - DNA, 66 bp, Homo sapiens
cacaaacttatttaaaagattttgaagtgcacatagcttttcttaaaaacccaacacaaaatactt

SEQ ID NO: 182120 - DNA, 67 bp, Homo sapiens
tttaaaagattttgaagtgcacatagcttttcttaaaaacccaacacaaaatactttacataatccc

SEQ ID NO: 182121 - DNA, 69 bp, Homo sapiens
ttgaagtgcacatagcttttcttaaaaacccaacacaaaatactttacataatccccctagaagtttga

SEQ ID NO: 182122 - DNA, 67 bp, Homo sapiens
gtgcacatagcttttcttaaaaacccaacacaaaatactttacataatccccctagaagtttgaaat

SEQ ID NO: 182123 - DNA, 67 bp, Homo sapiens
cttaaaaacccaacacaaaatactttacataatccccctagaagtttgaaattatctgtggctctat

SEQ ID NO: 182124 - DNA, 70 bp, Homo sapiens
ccaacacaaaatactttacataatccccctagaagtttgaaattatctgtggctctattttagagtttgc

SEQ ID NO: 182125 - DNA, 70 bp, Homo sapiens
ccctagaagtttgaaattatctgtggctctattttagagtttgcttttatagtgtttacagaaaattata

SEQ ID NO: 182126 - DNA, 73 bp, Homo sapiens
ttgaaattatctgtggctctattttagagtttgcttttatagtgtttacagaaaattatacaatattaagtga

SEQ ID NO: 182127 - DNA, 70 bp, Homo sapiens
ctgtggctctattttagagtttgcttttatagtgtttacagaaaattatacaatattaagtgaaattgtt

SEQ ID NO: 182128 - DNA, 71 bp, Homo sapiens
tagagtttgcttttatagtgtttacagaaaattatacaatattaagtgaaattgtttataatcagtctaaa

SEQ ID NO: 182129 - DNA, 74 bp, Homo sapiens
gtgtttacagaaaattatacaatattaagtgaaattgtttataatcagtctaaatgtgctatacttacattcac

SEQ ID NO: 182130 - DNA, 74 bp, Homo sapiens
ttatacaatattaagtgaaattgtttataatcagtctaaatgtgctatacttacattcacttctatttaaaatg

SEQ ID NO: 182131 - DNA, 72 bp, Homo sapiens
ttaagtgaaattgtttataatcagtctaaatgtgctatacttacattcacttctatttaaaatgttaagtcc

SEQ ID NO: 182132 - DNA, 72 bp, Homo sapiens
gaaattgtttataatcagtctaaatgtgctatacttacattcacttctatttaaaatgttaagtcctaataa

SEQ ID NO: 182133 - DNA, 71 bp, Homo sapiens
tataatcagtctaaatgtgctatacttacattcacttctatttaaaatgttaagtcctaataaaaagtttg

SEQ ID NO: 182134 - DNA, 67 bp, Homo sapiens
ctaaatgtgctatacttacattcacttctatttaaaatgttaagtcctaataaaaagtttgtaaaaa

SEQ ID NO: 182135 - DNA, 67 bp, Homo sapiens
tatacttacattcacttctatttaaaatgttaagtcctaataaaaagtttgtaaaaatatatctatt

SEQ ID NO: 182136 - DNA, 64 bp, Homo sapiens
ttctatttaaaatgttaagtcctaataaaaagtttgtaaaaatatatctattttaagaagtccc

SEQ ID NO: 182137 - DNA, 67 bp, Homo sapiens
aatgttaagtcctaataaaaagtttgtaaaaatatatctattttaagaagtccctctatcttagtga

SEQ ID NO: 182138 - DNA, 67 bp, Homo sapiens
gtcctaataaaaagtttgtaaaaatatatctattttaagaagtccctctatcttagtgaaaatgaac

SEQ ID NO: 182139 - DNA, 68 bp, Homo sapiens
agtttgtaaaaatatatctattttaagaagtccctctatcttagtgaaaatgaactaaagtagcaaaa

SEQ ID NO: 182140 - DNA, 72 bp, Homo sapiens
ttttaagaagtccctctatcttagtgaaaatgaactaaagtagcaaaaacatgctacatttacaagacagcc

SEQ ID NO: 182141 - DNA, 75 bp, Homo sapiens
aagtccctctatcttagtgaaaatgaactaaagtagcaaaaacatgctacatttacaagacagccctcatgtgaa

SEQ ID NO: 182142 - DNA, 74 bp, Homo sapiens
tcttagtgaaaatgaactaaagtagcaaaaacatgctacatttacaagacagccctcatgtgaaaacttaggag

SEQ ID NO: 182143 - DNA, 73 bp, Homo sapiens
aatgaactaaagtagcaaaaacatgctacatttacaagacagccctcatgtgaaaacttaggaggtagattct

SEQ ID NO: 182144 - DNA, 74 bp, Homo sapiens
aagtagcaaaaacatgctacatttacaagacagccctcatgtgaaaacttaggaggtagattcttctgttgtgt

SEQ ID NO: 182145 - DNA, 76 bp, Homo sapiens
aaaacatgctacatttacaagacagccctcatgtgaaaacttaggaggtagattcttctgttgtgttctcaatgta

SEQ ID NO: 182146 - DNA, 73 bp, Homo sapiens
atttacaagacagccctcatgtgaaaacttaggaggtagattcttctgttgtgttctcaatgtagccccttta

SEQ ID NO: 182147 - DNA, 72 bp, Homo sapiens
acagccctcatgtgaaaacttaggaggtagattcttctgttgtgttctcaatgtagcccctttaaaaatgtg

SEQ ID NO: 182148 - DNA, 71 bp, Homo sapiens
aaaacttaggaggtagattcttctgttgtgttctcaatgtagcccctttaaaaatgtggtattcagaatca

SEQ ID NO: 182149 - DNA, 75 bp, Homo sapiens
aggtagattcttctgttgtgttctcaatgtagcccctttaaaaatgtggtattcagaatcacatattcctgatta

SEQ ID NO: 182150 - DNA, 76 bp, Homo sapiens
gattcttctgttgtgttctcaatgtagcccctttaaaaatgtggtattcagaatcacatattcctgattagtaata

SEQ ID NO: 182151 - DNA, 75 bp, Homo sapiens
gtgttctcaatgtagcccctttaaaaatgtggtattcagaatcacatattcctgattagtaatattagatttctg

SEQ ID NO: 182152 - DNA, 74 bp, Homo sapiens
agcccctttaaaaatgtggtattcagaatcacatattcctgattagtaatattagatttctgtccagaatagga

SEQ ID NO: 182153 - DNA, 82 bp, Homo sapiens
tattcagaatcacatattcctgattagtaatattagatttctgtccagaataggaggaatgctgctgcttataaggctctaa

SEQ ID NO: 182154 - DNA, 79 bp, Homo sapiens
atcacatattcctgattagtaatattagatttctgtccagaataggaggaatgctgctgcttataaggctctaaaggaa

SEQ ID NO: 182155 - DNA, 82 bp, Homo sapiens
tattagatttctgtccagaataggaggaatgctgctgcttataaggctctaaaggaacctgcatttccatgcacacatctta

SEQ ID NO: 182156 - DNA, 81 bp, Homo sapiens
atttctgtccagaataggaggaatgctgctgcttataaggctctaaaggaacctgcatttccatgcacacatcttatataa

SEQ ID NO: 182157 - DNA, 79 bp, Homo sapiens
aataggaggaatgctgctgcttataaggctctaaaggaacctgcatttccatgcacacatcttatataagcctaacagt

SEQ ID NO: 182158 - DNA, 76 bp, Homo sapiens
cttataaggctctaaaggaacctgcatttccatgcacacatcttatataagcctaacagttgcttttcttcataaa

SEQ ID NO: 182159 - DNA, 83 bp, Homo sapiens
gcatttccatgcacacatcttatataagcctaacagttgcttttcttcataaatcaatctattgttgcacttcataatgagaa

SEQ ID NO: 182160 - DNA, 82 bp, Homo sapiens
atgcacacatcttatataagcctaacagttgcttttcttcataaatcaatctattgttgcacttcataatgagaaggcagat

SEQ ID NO: 182161 - DNA, 76 bp, Homo sapiens
ttttcttcataaatcaatctattgttgcacttcataatgagaaggcagatttactgccttttaccgccttttctca

SEQ ID NO: 182162 - DNA, 77 bp, Homo sapiens
tattgttgcacttcataatgagaaggcagatttactgccttttaccgccttttctcaccatcagaaagatgcctatt

SEQ ID NO: 182163 - DNA, 75 bp, Homo sapiens
ttcataatgagaaggcagatttactgccttttaccgccttttctcaccatcagaaagatgcctatttgggtaaca

SEQ ID NO: 182164 - DNA, 70 bp, Homo sapiens
aaggcagatttactgccttttaccgccttttctcaccatcagaaagatgcctatttgggtaacagaacgt

SEQ ID NO: 182165 - DNA, 69 bp, Homo sapiens
atttactgccttttaccgccttttctcaccatcagaaagatgcctatttgggtaacagaacgtttctct

SEQ ID NO: 182166 - DNA, 69 bp, Homo sapiens
ccttttaccgccttttctcaccatcagaaagatgcctatttgggtaacagaacgtttctcttcttcaag

SEQ ID NO: 182167 - DNA, 71 bp, Homo sapiens
ttttctcaccatcagaaagatgcctatttgggtaacagaacgtttctcttcttcaagggtatttgggatta

SEQ ID NO: 182168 - DNA, 70 bp, Homo sapiens
atcagaaagatgcctatttgggtaacagaacgtttctcttcttcaagggtatttgggattagggaggcag

SEQ ID NO: 182169 - DNA, 67 bp, Homo sapiens
cctatttgggtaacagaacgtttctcttcttcaagggtatttgggattagggaggcaggggcaagaa

SEQ ID NO: 182170 - DNA, 68 bp, Homo sapiens
taacagaacgtttctcttcttcaagggtatttgggattagggaggcaggggcaagaacctttaacatc

SEQ ID NO: 182171 - DNA, 70 bp, Homo sapiens
ttctcttcttcaagggtatttgggattagggaggcaggggcaagaacctttaacatctgctcccttgaaa

SEQ ID NO: 182172 - DNA, 77 bp, Homo sapiens
gaggcaggggcaagaacctttaacatctgctcccttgaaatgaatgacacctctagttctcacagcctggacgttga

SEQ ID NO: 182173 - DNA, 75 bp, Homo sapiens
caagaacctttaacatctgctcccttgaaatgaatgacacctctagttctcacagcctggacgttgaaaagcaaa

SEQ ID NO: 182174 - DNA, 74 bp, Homo sapiens
tcccttgaaatgaatgacacctctagttctcacagcctggacgttgaaaagcaaatactctaacttgataaaat

SEQ ID NO: 182175 - DNA, 74 bp, Homo sapiens
aaatgaatgacacctctagttctcacagcctggacgttgaaaagcaaatactctaacttgataaaattctctaa

SEQ ID NO: 182176 - DNA, 72 bp, Homo sapiens
acctctagttctcacagcctggacgttgaaaagcaaatactctaacttgataaaattctctaacttgaagaa

SEQ ID NO: 182177 - DNA, 70 bp, Homo sapiens
cctggacgttgaaaagcaaatactctaacttgataaaattctctaacttgaagaagcacaacactttaaa

SEQ ID NO: 182178 - DNA, 74 bp, Homo sapiens
gcaaatactctaacttgataaaattctctaacttgaagaagcacaacactttaaatacactgaagtcccatctc

SEQ ID NO: 182179 - DNA, 72 bp, Homo sapiens
actctaacttgataaaattctctaacttgaagaagcacaacactttaaatacactgaagtcccatctctaaa

SEQ ID NO: 182180 - DNA, 72 bp, Homo sapiens
aaattctctaacttgaagaagcacaacactttaaatacactgaagtcccatctctaaaacatacatttggga

SEQ ID NO: 182181 - DNA, 71 bp, Homo sapiens
acttgaagaagcacaacactttaaatacactgaagtcccatctctaaaacatacatttgggatttagaggt

SEQ ID NO: 182182 - DNA, 72 bp, Homo sapiens
agcacaacactttaaatacactgaagtcccatctctaaaacatacatttgggatttagaggttataccacaa

SEQ ID NO: 182183 - DNA, 69 bp, Homo sapiens
acactttaaatacactgaagtcccatctctaaaacatacatttgggatttagaggttataccacaaaac

SEQ ID NO: 182184 - DNA, 71 bp, Homo sapiens
acactgaagtcccatctctaaaacatacatttgggatttagaggttataccacaaaactaaagaacacaga

SEQ ID NO: 182185 - DNA, 70 bp, Homo sapiens
tctctaaaacatacatttgggatttagaggttataccacaaaactaaagaacacagaatttagattgtcc

SEQ ID NO: 182186 - DNA, 67 bp, Homo sapiens
aaaacatacatttgggatttagaggttataccacaaaactaaagaacacagaatttagattgtcccc

SEQ ID NO: 182187 - DNA, 66 bp, Homo sapiens
tttgggatttagaggttataccacaaaactaaagaacacagaatttagattgtcccccaaaagccc

SEQ ID NO: 182188 - DNA, 70 bp, Homo sapiens
aggttataccacaaaactaaagaacacagaatttagattgtcccccaaaagcccccaaatcatcatcata

SEQ ID NO: 182189 - DNA, 71 bp, Homo sapiens
aaaactaaagaacacagaatttagattgtcccccaaaagcccccaaatcatcatcatagtgagaacaattg

SEQ ID NO: 182190 - DNA, 73 bp, Homo sapiens
acacagaatttagattgtcccccaaaagcccccaaatcatcatcatagtgagaacaattggaatttagaataa

SEQ ID NO: 182191 - DNA, 72 bp, Homo sapiens
aatttagattgtcccccaaaagcccccaaatcatcatcatagtgagaacaattggaatttagaataaagaca

SEQ ID NO: 182192 - DNA, 78 bp, Homo sapiens
catcatcatagtgagaacaattggaatttagaataaagacactggattcatcatcttgaattttctctagccctaaaa

SEQ ID NO: 182193 - DNA, 71 bp, Homo sapiens
ggaatttagaataaagacactggattcatcatcttgaattttctctagccctaaaaacaaatctaaattac

SEQ ID NO: 182194 - DNA, 73 bp, Homo sapiens
taaagacactggattcatcatcttgaattttctctagccctaaaaacaaatctaaattactggctagtaagac

SEQ ID NO: 182195 - DNA, 72 bp, Homo sapiens
cactggattcatcatcttgaattttctctagccctaaaaacaaatctaaattactggctagtaagactttaa

SEQ ID NO: 182196 - DNA, 72 bp, Homo sapiens
tcttgaattttctctagccctaaaaacaaatctaaattactggctagtaagactttaatcatttgagtctca

SEQ ID NO: 182197 - DNA, 75 bp, Homo sapiens
tctctagccctaaaaacaaatctaaattactggctagtaagactttaatcatttgagtctcaatattgtgcagga

SEQ ID NO: 182198 - DNA, 73 bp, Homo sapiens
gccctaaaaacaaatctaaattactggctagtaagactttaatcatttgagtctcaatattgtgcaggaataa

SEQ ID NO: 182199 - DNA, 75 bp, Homo sapiens
aatctaaattactggctagtaagactttaatcatttgagtctcaatattgtgcaggaataacaaaacagtttgca

SEQ ID NO: 182200 - DNA, 77 bp, Homo sapiens
tactggctagtaagactttaatcatttgagtctcaatattgtgcaggaataacaaaacagtttgcaatatagactta

SEQ ID NO: 182201 - DNA, 76 bp, Homo sapiens
gactttaatcatttgagtctcaatattgtgcaggaataacaaaacagtttgcaatatagacttaacattcctctgt

SEQ ID NO: 182202 - DNA, 76 bp, Homo sapiens
taatcatttgagtctcaatattgtgcaggaataacaaaacagtttgcaatatagacttaacattcctctgttttta

SEQ ID NO: 182203 - DNA, 72 bp, Homo sapiens
agtctcaatattgtgcaggaataacaaaacagtttgcaatatagacttaacattcctctgtttttatttact

SEQ ID NO: 182204 - DNA, 65 bp, Homo sapiens
caaaacagtttgcaatatagacttaacattcctctgtttttatttacttaatttttccccttagg

SEQ ID NO: 182205 - DNA, 64 bp, Homo sapiens
atagacttaacattcctctgtttttatttacttaatttttccccttagggagaaatatttaaga

SEQ ID NO: 182206 - DNA, 63 bp, Homo sapiens
cattcctctgtttttatttacttaatttttccccttagggagaaatatttaagaattacaaac

SEQ ID NO: 182207 - DNA, 60 bp, Homo sapiens
atttacttaatttttccccttagggagaaatatttaagaattacaaactttaggttttaa

SEQ ID NO: 182208 - DNA, 60 bp, Homo sapiens
cttaatttttccccttagggagaaatatttaagaattacaaactttaggttttaatttaa

SEQ ID NO: 182209 - DNA, 62 bp, Homo sapiens
tagggagaaatatttaagaattacaaactttaggttttaatttaaaaacaataagaaggtac

SEQ ID NO: 182210 - DNA, 65 bp, Homo sapiens
tatttaagaattacaaactttaggttttaatttaaaaacaataagaaggtacttttcagcatcta

SEQ ID NO: 182211 - DNA, 66 bp, Homo sapiens
ctttaggttttaatttaaaaacaataagaaggtacttttcagcatctaattcctaaccatctgcct

SEQ ID NO: 182212 - DNA, 69 bp, Homo sapiens
tttaaaaacaataagaaggtacttttcagcatctaattcctaaccatctgccttttaaaaatatacaca

SEQ ID NO: 182213 - DNA, 77 bp, Homo sapiens
cacacacacatactcacccattcactccagttaggcttaacattcttaacaagtaagtagatcttgatggatctaaa

SEQ ID NO: 182214 - DNA, 75 bp, Homo sapiens
acatactcacccattcactccagttaggcttaacattcttaacaagtaagtagatcttgatggatctaaacagaa

SEQ ID NO: 182215 - DNA, 74 bp, Homo sapiens
tactcacccattcactccagttaggcttaacattcttaacaagtaagtagatcttgatggatctaaacagaagt

SEQ ID NO: 182216 - DNA, 73 bp, Homo sapiens
acccattcactccagttaggcttaacattcttaacaagtaagtagatcttgatggatctaaacagaagtttca

SEQ ID NO: 182217 - DNA, 75 bp, Homo sapiens
tccagttaggcttaacattcttaacaagtaagtagatcttgatggatctaaacagaagtttcagtaatcagagtc

SEQ ID NO: 182218 - DNA, 73 bp, Homo sapiens
agtagatcttgatggatctaaacagaagtttcagtaatcagagtcccacttttggaaacaaagctatctttaa

SEQ ID NO: 182219 - DNA, 72 bp, Homo sapiens
atggatctaaacagaagtttcagtaatcagagtcccacttttggaaacaaagctatctttaaacaggcacca

SEQ ID NO: 182220 - DNA, 72 bp, Homo sapiens
agaagtttcagtaatcagagtcccacttttggaaacaaagctatctttaaacaggcaccatgactcctacta

SEQ ID NO: 182221 - DNA, 74 bp, Homo sapiens
taatcagagtcccacttttggaaacaaagctatctttaaacaggcaccatgactcctactagcaaaagcagtta

SEQ ID NO: 182222 - DNA, 71 bp, Homo sapiens
ccacttttggaaacaaagctatctttaaacaggcaccatgactcctactagcaaaagcagttaaccataaa

SEQ ID NO: 182223 - DNA, 70 bp, Homo sapiens
ggaaacaaagctatctttaaacaggcaccatgactcctactagcaaaagcagttaaccataaacttaaaa

SEQ ID NO: 182224 - DNA, 71 bp, Homo sapiens
ctatctttaaacaggcaccatgactcctactagcaaaagcagttaaccataaacttaaaacaaatagacac

SEQ ID NO: 182225 - DNA, 72 bp, Homo sapiens
taaacaggcaccatgactcctactagcaaaagcagttaaccataaacttaaaacaaatagacaccatccaaa

SEQ ID NO: 182226 - DNA, 70 bp, Homo sapiens
ccatgactcctactagcaaaagcagttaaccataaacttaaaacaaatagacaccatccaaaacaaataa

SEQ ID NO: 182227 - DNA, 71 bp, Homo sapiens
aataaataaatgaagtgaggcaggtactggattcaagaagaatctctatttttgaagaaaactaaattaca

SEQ ID NO: 182228 - DNA, 74 bp, Homo sapiens
atgaagtgaggcaggtactggattcaagaagaatctctatttttgaagaaaactaaattacatctcctcgttca

SEQ ID NO: 182229 - DNA, 76 bp, Homo sapiens
tgaggcaggtactggattcaagaagaatctctatttttgaagaaaactaaattacatctcctcgttcatgaatatg

SEQ ID NO: 182230 - DNA, 75 bp, Homo sapiens
gattcaagaagaatctctatttttgaagaaaactaaattacatctcctcgttcatgaatatgtagtattgcccag

SEQ ID NO: 182231 - DNA, 75 bp, Homo sapiens
tttgaagaaaactaaattacatctcctcgttcatgaatatgtagtattgcccagtgagctaacattcttgttact

SEQ ID NO: 182232 - DNA, 77 bp, Homo sapiens
actaaattacatctcctcgttcatgaatatgtagtattgcccagtgagctaacattcttgttacttcaggctatctt

SEQ ID NO: 182233 - DNA, 78 bp, Homo sapiens
atctcctcgttcatgaatatgtagtattgcccagtgagctaacattcttgttacttcaggctatcttttgtcacttaa

SEQ ID NO: 182234 - DNA, 73 bp, Homo sapiens
attgcccagtgagctaacattcttgttacttcaggctatcttttgtcacttaagcaatggtttttgacagttt

SEQ ID NO: 182235 - DNA, 72 bp, Homo sapiens
aacattcttgttacttcaggctatcttttgtcacttaagcaatggtttttgacagttttacaggctgttatc

SEQ ID NO: 182236 - DNA, 72 bp, Homo sapiens
tcttgttacttcaggctatcttttgtcacttaagcaatggtttttgacagttttacaggctgttatcccaaa

SEQ ID NO: 182237 - DNA, 72 bp, Homo sapiens
gctatcttttgtcacttaagcaatggtttttgacagttttacaggctgttatcccaaagacttcagtattta

SEQ ID NO: 182238 - DNA, 70 bp, Homo sapiens
tcacttaagcaatggtttttgacagttttacaggctgttatcccaaagacttcagtatttacggccttta

SEQ ID NO: 182239 - DNA, 68 bp, Homo sapiens
aatggtttttgacagttttacaggctgttatcccaaagacttcagtatttacggcctttattcacttg

SEQ ID NO: 182240 - DNA, 70 bp, Homo sapiens
tttgacagttttacaggctgttatcccaaagacttcagtatttacggcctttattcacttgggctttcta

SEQ ID NO: 182241 - DNA, 69 bp, Homo sapiens
gttttacaggctgttatcccaaagacttcagtatttacggcctttattcacttgggctttctactctta

SEQ ID NO: 182242 - DNA, 70 bp, Homo sapiens
ttttacaggctgttatcccaaagacttcagtatttacggcctttattcacttgggctttctactcttatc

SEQ ID NO: 182243 - DNA, 70 bp, Homo sapiens
tgttatcccaaagacttcagtatttacggcctttattcacttgggctttctactcttatccactggttac

SEQ ID NO: 182244 - DNA, 70 bp, Homo sapiens
tatcccaaagacttcagtatttacggcctttattcacttgggctttctactcttatccactggttactaa

SEQ ID NO: 182245 - DNA, 70 bp, Homo sapiens
aagacttcagtatttacggcctttattcacttgggctttctactcttatccactggttactaatcactaa

SEQ ID NO: 182246 - DNA, 70 bp, Homo sapiens
acttcagtatttacggcctttattcacttgggctttctactcttatccactggttactaatcactaaaca

SEQ ID NO: 182247 - DNA, 69 bp, Homo sapiens
agtatttacggcctttattcacttgggctttctactcttatccactggttactaatcactaaacagatt

SEQ ID NO: 182248 - DNA, 67 bp, Homo sapiens
acggcctttattcacttgggctttctactcttatccactggttactaatcactaaacagattttttt

SEQ ID NO: 182249 - DNA, 69 bp, Homo sapiens
tattcacttgggctttctactcttatccactggttactaatcactaaacagattttttttaaaatggga

SEQ ID NO: 182250 - DNA, 69 bp, Homo sapiens
cacttgggctttctactcttatccactggttactaatcactaaacagattttttttaaaatgggactga

SEQ ID NO: 182251 - DNA, 71 bp, Homo sapiens
ccactggttactaatcactaaacagattttttttaaaatgggactgaaattagctcacaggatgtccttca

SEQ ID NO: 182252 - DNA, 74 bp, Homo sapiens
tactaatcactaaacagattttttttaaaatgggactgaaattagctcacaggatgtccttcaacaatggcagc

SEQ ID NO: 182253 - DNA, 74 bp, Homo sapiens
actaaacagattttttttaaaatgggactgaaattagctcacaggatgtccttcaacaatggcagctcaggaca

SEQ ID NO: 182254 - DNA, 74 bp, Homo sapiens
tttttaaaatgggactgaaattagctcacaggatgtccttcaacaatggcagctcaggacagcaccggtaaagg

SEQ ID NO: 182255 - DNA, 78 bp, Homo sapiens
aatgggactgaaattagctcacaggatgtccttcaacaatggcagctcaggacagcaccggtaaaggtcttctcctca

SEQ ID NO: 182256 - DNA, 77 bp, Homo sapiens
ttcaacaatggcagctcaggacagcaccggtaaaggtcttctcctcagcctcttcctctctctcttcaattttctct

SEQ ID NO: 182257 - DNA, 75 bp, Homo sapiens
ctcaggacagcaccggtaaaggtcttctcctcagcctcttcctctctctcttcaattttctcttcctacagacaa

SEQ ID NO: 182258 - DNA, 74 bp, Homo sapiens
taaaggtcttctcctcagcctcttcctctctctcttcaattttctcttcctacagacaagttagtgagggtcca

SEQ ID NO: 182259 - DNA, 77 bp, Homo sapiens
tcagcctcttcctctctctcttcaattttctcttcctacagacaagttagtgagggtccagatccacactgttcaat

SEQ ID NO: 182260 - DNA, 75 bp, Homo sapiens
cctctctctcttcaattttctcttcctacagacaagttagtgagggtccagatccacactgttcaattagaacaa

SEQ ID NO: 182261 - DNA, 78 bp, Homo sapiens
ttcaattttctcttcctacagacaagttagtgagggtccagatccacactgttcaattagaacaacagcacacatgat

SEQ ID NO: 182262 - DNA, 78 bp, Homo sapiens
ttttctcttcctacagacaagttagtgagggtccagatccacactgttcaattagaacaacagcacacatgatttaca

SEQ ID NO: 182263 - DNA, 78 bp, Homo sapiens
gttagtgagggtccagatccacactgttcaattagaacaacagcacacatgatttacagcattcttaggggatggtta

SEQ ID NO: 182264 - DNA, 78 bp, Homo sapiens
agatccacactgttcaattagaacaacagcacacatgatttacagcattcttaggggatggttagggatcgtttctga

SEQ ID NO: 182265 - DNA, 77 bp, Homo sapiens
attagaacaacagcacacatgatttacagcattcttaggggatggttagggatcgtttctgaattgatcctcagaaa

SEQ ID NO: 182266 - DNA, 77 bp, Homo sapiens
acacatgatttacagcattcttaggggatggttagggatcgtttctgaattgatcctcagaaactcattcaatttca

SEQ ID NO: 182267 - DNA, 74 bp, Homo sapiens
atttacagcattcttaggggatggttagggatcgtttctgaattgatcctcagaaactcattcaatttcaaata

SEQ ID NO: 182268 - DNA, 73 bp, Homo sapiens
gaattgatcctcagaaactcattcaatttcaaatatctcaagaatgatttaaaggcctaacttgtttttaatc

SEQ ID NO: 182269 - DNA, 72 bp, Homo sapiens
tcagaaactcattcaatttcaaatatctcaagaatgatttaaaggcctaacttgtttttaatcttcataaaa

SEQ ID NO: 182270 - DNA, 70 bp, Homo sapiens
aaggcctaacttgtttttaatcttcataaaacaggagcaattcctacttgtggaatcattattcaggaat

SEQ ID NO: 182271 - DNA, 74 bp, Homo sapiens
ttttaatcttcataaaacaggagcaattcctacttgtggaatcattattcaggaattattattcagttctacaa

SEQ ID NO: 182272 - DNA, 73 bp, Homo sapiens
cataaaacaggagcaattcctacttgtggaatcattattcaggaattattattcagttctacaaaccttacta

SEQ ID NO: 182273 - DNA, 75 bp, Homo sapiens
aggagcaattcctacttgtggaatcattattcaggaattattattcagttctacaaaccttactatccacacaca

SEQ ID NO: 182274 - DNA, 76 bp, Homo sapiens
ctacttgtggaatcattattcaggaattattattcagttctacaaaccttactatccacacacaattgcacgtaca

SEQ ID NO: 182275 - DNA, 76 bp, Homo sapiens
gtggaatcattattcaggaattattattcagttctacaaaccttactatccacacacaattgcacgtacaattcaa

SEQ ID NO: 182276 - DNA, 75 bp, Homo sapiens
caggaattattattcagttctacaaaccttactatccacacacaattgcacgtacaattcaaatatggatgcttt

SEQ ID NO: 182277 - DNA, 73 bp, Homo sapiens
attattcagttctacaaaccttactatccacacacaattgcacgtacaattcaaatatggatgcttttaaaac

SEQ ID NO: 182278 - DNA, 74 bp, Homo sapiens
gttctacaaaccttactatccacacacaattgcacgtacaattcaaatatggatgcttttaaaacttcaacaca

SEQ ID NO: 182279 - DNA, 75 bp, Homo sapiens
ctatccacacacaattgcacgtacaattcaaatatggatgcttttaaaacttcaacacatttagttgtaacctgc

SEQ ID NO: 182280 - DNA, 75 bp, Homo sapiens
cacacaattgcacgtacaattcaaatatggatgcttttaaaacttcaacacatttagttgtaacctgccattcca

SEQ ID NO: 182281 - DNA, 70 bp, Homo sapiens
gcttttaaaacttcaacacatttagttgtaacctgccattccaatttcttcctatgtagtaaaggctgct

SEQ ID NO: 182282 - DNA, 70 bp, Homo sapiens
cttcaacacatttagttgtaacctgccattccaatttcttcctatgtagtaaaggctgcttattaccttt

SEQ ID NO: 182283 - DNA, 70 bp, Homo sapiens
acatttagttgtaacctgccattccaatttcttcctatgtagtaaaggctgcttattaccttttatccac

SEQ ID NO: 182284 - DNA, 70 bp, Homo sapiens
gtaacctgccattccaatttcttcctatgtagtaaaggctgcttattaccttttatccactacacttaaa

SEQ ID NO: 182285 - DNA, 70 bp, Homo sapiens
caatttcttcctatgtagtaaaggctgcttattaccttttatccactacacttaaacaccatagaccgaa

SEQ ID NO: 182286 - DNA, 71 bp, Homo sapiens
tcttcctatgtagtaaaggctgcttattaccttttatccactacacttaaacaccatagaccgaaaagcaa

SEQ ID NO: 182287 - DNA, 69 bp, Homo sapiens
tagtaaaggctgcttattaccttttatccactacacttaaacaccatagaccgaaaagcaaggagaaaa

SEQ ID NO: 182288 - DNA, 68 bp, Homo sapiens
tattaccttttatccactacacttaaacaccatagaccgaaaagcaaggagaaaacacagaccgttct

SEQ ID NO: 182289 - DNA, 71 bp, Homo sapiens
tacacttaaacaccatagaccgaaaagcaaggagaaaacacagaccgttcttttcacttaatttcatctga

SEQ ID NO: 182290 - DNA, 70 bp, Homo sapiens
acaccatagaccgaaaagcaaggagaaaacacagaccgttcttttcacttaatttcatctgacttaaaca

SEQ ID NO: 182291 - DNA, 71 bp, Homo sapiens
aaagcaaggagaaaacacagaccgttcttttcacttaatttcatctgacttaaacatctcctaagagattg

SEQ ID NO: 182292 - DNA, 69 bp, Homo sapiens
ggagaaaacacagaccgttcttttcacttaatttcatctgacttaaacatctcctaagagattggtttt

SEQ ID NO: 182293 - DNA, 70 bp, Homo sapiens
acagaccgttcttttcacttaatttcatctgacttaaacatctcctaagagattggtttttatcttagga

SEQ ID NO: 182294 - DNA, 73 bp, Homo sapiens
cacttaatttcatctgacttaaacatctcctaagagattggtttttatcttaggaacaatgtgaaatgcgtaa

SEQ ID NO: 182295 - DNA, 76 bp, Homo sapiens
tcatctgacttaaacatctcctaagagattggtttttatcttaggaacaatgtgaaatgcgtaacagagtacattc

SEQ ID NO: 182296 - DNA, 73 bp, Homo sapiens
gacttaaacatctcctaagagattggtttttatcttaggaacaatgtgaaatgcgtaacagagtacattctct

SEQ ID NO: 182297 - DNA, 75 bp, Homo sapiens
tctcctaagagattggtttttatcttaggaacaatgtgaaatgcgtaacagagtacattctcttttctagctggc

SEQ ID NO: 182298 - DNA, 75 bp, Homo sapiens
gtttttatcttaggaacaatgtgaaatgcgtaacagagtacattctcttttctagctggctgctggaaacttgaa

SEQ ID NO: 182299 - DNA, 76 bp, Homo sapiens
ttaggaacaatgtgaaatgcgtaacagagtacattctcttttctagctggctgctggaaacttgaaagtcaaatta

SEQ ID NO: 182300 - DNA, 76 bp, Homo sapiens
aatgtgaaatgcgtaacagagtacattctcttttctagctggctgctggaaacttgaaagtcaaattagactggaa

SEQ ID NO: 182301 - DNA, 74 bp, Homo sapiens
gtaacagagtacattctcttttctagctggctgctggaaacttgaaagtcaaattagactggaaagtgctgttt

SEQ ID NO: 182302 - DNA, 74 bp, Homo sapiens
tacattctcttttctagctggctgctggaaacttgaaagtcaaattagactggaaagtgctgttttcttataaa

SEQ ID NO: 182303 - DNA, 71 bp, Homo sapiens
cttttctagctggctgctggaaacttgaaagtcaaattagactggaaagtgctgttttcttataaactaaa

SEQ ID NO: 182304 - DNA, 71 bp, Homo sapiens
ggctgctggaaacttgaaagtcaaattagactggaaagtgctgttttcttataaactaaaaatgcgaaaga

SEQ ID NO: 182305 - DNA, 69 bp, Homo sapiens
acttgaaagtcaaattagactggaaagtgctgttttcttataaactaaaaatgcgaaagaaagccagaa

SEQ ID NO: 182306 - DNA, 73 bp, Homo sapiens
gactggaaagtgctgttttcttataaactaaaaatgcgaaagaaagccagaaatactgatgttattagtctca

SEQ ID NO: 182307 - DNA, 77 bp, Homo sapiens
gctgttttcttataaactaaaaatgcgaaagaaagccagaaatactgatgttattagtctcatgatcttcctgatga

SEQ ID NO: 182308 - DNA, 77 bp, Homo sapiens
ataaactaaaaatgcgaaagaaagccagaaatactgatgttattagtctcatgatcttcctgatgaactgagcaaac

SEQ ID NO: 182309 - DNA, 81 bp, Homo sapiens
aaaatgcgaaagaaagccagaaatactgatgttattagtctcatgatcttcctgatgaactgagcaaactgcagaattctc

SEQ ID NO: 182310 - DNA, 85 bp, Homo sapiens
agaaagccagaaatactgatgttattagtctcatgatcttcctgatgaactgagcaaactgcagaattctctgagaatgggctga

SEQ ID NO: 182311 - DNA, 87 bp, Homo sapiens
aaatactgatgttattagtctcatgatcttcctgatgaactgagcaaactgcagaattctctgagaatgggctgagcaatggcagga

SEQ ID NO: 182312 - DNA, 84 bp, Homo sapiens
gttattagtctcatgatcttcctgatgaactgagcaaactgcagaattctctgagaatgggctgagcaatggcaggaggaaggg

SEQ ID NO: 182313 - DNA, 80 bp, Homo sapiens
atgaactgagcaaactgcagaattctctgagaatgggctgagcaatggcaggaggaaggggagagactagctttaaagaa

SEQ ID NO: 182314 - DNA, 76 bp, Homo sapiens
aaactgcagaattctctgagaatgggctgagcaatggcaggaggaaggggagagactagctttaaagaaacactaa

SEQ ID NO: 182315 - DNA, 76 bp, Homo sapiens
agaattctctgagaatgggctgagcaatggcaggaggaaggggagagactagctttaaagaaacactaaggctcca

SEQ ID NO: 182316 - DNA, 75 bp, Homo sapiens
aatgggctgagcaatggcaggaggaaggggagagactagctttaaagaaacactaaggctccacttattgctcta

SEQ ID NO: 182317 - DNA, 71 bp, Homo sapiens
gaggaaggggagagactagctttaaagaaacactaaggctccacttattgctctaaaatataatatactaa

SEQ ID NO: 182318 - DNA, 73 bp, Homo sapiens
gggagagactagctttaaagaaacactaaggctccacttattgctctaaaatataatatactaaatatgactc

SEQ ID NO: 182319 - DNA, 73 bp, Homo sapiens
ctagctttaaagaaacactaaggctccacttattgctctaaaatataatatactaaatatgactcttcctaga

SEQ ID NO: 182320 - DNA, 74 bp, Homo sapiens
gctctaaaatataatatactaaatatgactcttcctagaataaaaggaacttattatgatcagcttctgttttc

SEQ ID NO: 182321 - DNA, 76 bp, Homo sapiens
taatatactaaatatgactcttcctagaataaaaggaacttattatgatcagcttctgttttctctgaaattgtgc

SEQ ID NO: 182322 - DNA, 77 bp, Homo sapiens
ctaaatatgactcttcctagaataaaaggaacttattatgatcagcttctgttttctctgaaattgtgctgaaatga

SEQ ID NO: 182323 - DNA, 77 bp, Homo sapiens
gactcttcctagaataaaaggaacttattatgatcagcttctgttttctctgaaattgtgctgaaatgaaatctcaa

SEQ ID NO: 182324 - DNA, 77 bp, Homo sapiens
taaaaggaacttattatgatcagcttctgttttctctgaaattgtgctgaaatgaaatctcaaaagaaaatgctcca

SEQ ID NO: 182325 - DNA, 77 bp, Homo sapiens
gaacttattatgatcagcttctgttttctctgaaattgtgctgaaatgaaatctcaaaagaaaatgctccaacaaag

SEQ ID NO: 182326 - DNA, 70 bp, Homo sapiens
ctgttttctctgaaattgtgctgaaatgaaatctcaaaagaaaatgctccaacaaagtattttaaacctt

SEQ ID NO: 182327 - DNA, 71 bp, Homo sapiens
attgtgctgaaatgaaatctcaaaagaaaatgctccaacaaagtattttaaacctttagatatttccacat

SEQ ID NO: 182328 - DNA, 69 bp, Homo sapiens
atgaaatctcaaaagaaaatgctccaacaaagtattttaaacctttagatatttccacatttgggtaga

SEQ ID NO: 182329 - DNA, 73 bp, Homo sapiens
gctccaacaaagtattttaaacctttagatatttccacatttgggtagaagcaacatgttttagtgcatcaga

SEQ ID NO: 182330 - DNA, 71 bp, Homo sapiens
acctttagatatttccacatttgggtagaagcaacatgttttagtgcatcagaaaaacaattttatcggga

SEQ ID NO: 182331 - DNA, 76 bp, Homo sapiens
gatatttccacatttgggtagaagcaacatgttttagtgcatcagaaaaacaattttatcgggattagcattcata

SEQ ID NO: 182332 - DNA, 77 bp, Homo sapiens
agaagcaacatgttttagtgcatcagaaaaacaattttatcgggattagcattcatatacaacatttacatataata

SEQ ID NO: 182333 - DNA, 76 bp, Homo sapiens
ttagtgcatcagaaaaacaattttatcgggattagcattcatatacaacatttacatataatattaactatttgga

SEQ ID NO: 182334 - DNA, 78 bp, Homo sapiens
aacaattttatcgggattagcattcatatacaacatttacatataatattaactatttggacatcatgtgattgcatt

SEQ ID NO: 182335 - DNA, 80 bp, Homo sapiens
cgggattagcattcatatacaacatttacatataatattaactatttggacatcatgtgattgcatttaatttatagaca

SEQ ID NO: 182336 - DNA, 83 bp, Homo sapiens
cattcatatacaacatttacatataatattaactatttggacatcatgtgattgcatttaatttatagacatccacatgacaa

SEQ ID NO: 182337 - DNA, 81 bp, Homo sapiens
catttacatataatattaactatttggacatcatgtgattgcatttaatttatagacatccacatgacaaattctccttga

SEQ ID NO: 182338 - DNA, 80 bp, Homo sapiens
atattaactatttggacatcatgtgattgcatttaatttatagacatccacatgacaaattctccttgaatgtagttcca

SEQ ID NO: 182339 - DNA, 79 bp, Homo sapiens
tcatgtgattgcatttaatttatagacatccacatgacaaattctccttgaatgtagttccaggaaaatttatttctgc

SEQ ID NO: 182340 - DNA, 76 bp, Homo sapiens
gcatttaatttatagacatccacatgacaaattctccttgaatgtagttccaggaaaatttatttctgctgaagaa

SEQ ID NO: 182341 - DNA, 78 bp, Homo sapiens
ttatagacatccacatgacaaattctccttgaatgtagttccaggaaaatttatttctgctgaagaatgtgcacgctt

SEQ ID NO: 182342 - DNA, 76 bp, Homo sapiens
acatgacaaattctccttgaatgtagttccaggaaaatttatttctgctgaagaatgtgcacgctttccgatattc

SEQ ID NO: 182343 - DNA, 75 bp, Homo sapiens
attctccttgaatgtagttccaggaaaatttatttctgctgaagaatgtgcacgctttccgatattccaaatata

SEQ ID NO: 182344 - DNA, 73 bp, Homo sapiens
ccaggaaaatttatttctgctgaagaatgtgcacgctttccgatattccaaatataaaactccataactgtta

SEQ ID NO: 182345 - DNA, 76 bp, Homo sapiens
tttctgctgaagaatgtgcacgctttccgatattccaaatataaaactccataactgttatatttctctaggaaga

SEQ ID NO: 182346 - DNA, 74 bp, Homo sapiens
gctgaagaatgtgcacgctttccgatattccaaatataaaactccataactgttatatttctctaggaagaaaa

SEQ ID NO: 182347 - DNA, 73 bp, Homo sapiens
gtgcacgctttccgatattccaaatataaaactccataactgttatatttctctaggaagaaaatggcagaac

SEQ ID NO: 182348 - DNA, 72 bp, Homo sapiens
ccgatattccaaatataaaactccataactgttatatttctctaggaagaaaatggcagaacttattgccta

SEQ ID NO: 182349 - DNA, 72 bp, Homo sapiens
caaatataaaactccataactgttatatttctctaggaagaaaatggcagaacttattgcctatgtgtaaaa

SEQ ID NO: 182350 - DNA, 72 bp, Homo sapiens
ccataactgttatatttctctaggaagaaaatggcagaacttattgcctatgtgtaaaaaagcacctaactc

SEQ ID NO: 182351 - DNA, 73 bp, Homo sapiens
ggaagaaaatggcagaacttattgcctatgtgtaaaaaagcacctaactctgaacaaatgctgtgttctttaa

SEQ ID NO: 182352 - DNA, 71 bp, Homo sapiens
aaaatggcagaacttattgcctatgtgtaaaaaagcacctaactctgaacaaatgctgtgttctttaaatt

SEQ ID NO: 182353 - DNA, 71 bp, Homo sapiens
ctatgtgtaaaaaagcacctaactctgaacaaatgctgtgttctttaaattttgtaactacttatattaga

SEQ ID NO: 182354 - DNA, 73 bp, Homo sapiens
aagcacctaactctgaacaaatgctgtgttctttaaattttgtaactacttatattagattatatttgccatg

SEQ ID NO: 182355 - DNA, 74 bp, Homo sapiens
tctgaacaaatgctgtgttctttaaattttgtaactacttatattagattatatttgccatgtatattaacctg

SEQ ID NO: 182356 - DNA, 71 bp, Homo sapiens
gctgtgttctttaaattttgtaactacttatattagattatatttgccatgtatattaacctgtaaaccaa

SEQ ID NO: 182357 - DNA, 72 bp, Homo sapiens
taaattttgtaactacttatattagattatatttgccatgtatattaacctgtaaaccaatctaaatgccat

SEQ ID NO: 182358 - DNA, 75 bp, Homo sapiens
aactacttatattagattatatttgccatgtatattaacctgtaaaccaatctaaatgccattcagtcatataac

SEQ ID NO: 182359 - DNA, 75 bp, Homo sapiens
attagattatatttgccatgtatattaacctgtaaaccaatctaaatgccattcagtcatataactattaaacaa

SEQ ID NO: 182360 - DNA, 74 bp, Homo sapiens
attatatttgccatgtatattaacctgtaaaccaatctaaatgccattcagtcatataactattaaacaagtta

SEQ ID NO: 182361 - DNA, 74 bp, Homo sapiens
cctgtaaaccaatctaaatgccattcagtcatataactattaaacaagttaaaaatgaaatacatgtacttgca

SEQ ID NO: 182362 - DNA, 77 bp, Homo sapiens
tctaaatgccattcagtcatataactattaaacaagttaaaaatgaaatacatgtacttgcatgagaatttacatag

SEQ ID NO: 182363 - DNA, 77 bp, Homo sapiens
atgccattcagtcatataactattaaacaagttaaaaatgaaatacatgtacttgcatgagaatttacatagttata

SEQ ID NO: 182364 - DNA, 73 bp, Homo sapiens
gtcatataactattaaacaagttaaaaatgaaatacatgtacttgcatgagaatttacatagttatattttta

SEQ ID NO: 182365 - DNA, 63 bp, Homo sapiens
tatttttaatttaataaaacaacattttaatgtataattaagggctaatttttaccaaatacc

SEQ ID NO: 182366 - DNA, 65 bp, Homo sapiens
ttaataaaacaacattttaatgtataattaagggctaatttttaccaaataccctagtggttaga

SEQ ID NO: 182367 - DNA, 67 bp, Homo sapiens
tgtataattaagggctaatttttaccaaataccctagtggttagataacaagggatactctgttatt

SEQ ID NO: 182368 - DNA, 65 bp, Homo sapiens
aagggctaatttttaccaaataccctagtggttagataacaagggatactctgttatttttctgg

SEQ ID NO: 182369 - DNA, 66 bp, Homo sapiens
tttaccaaataccctagtggttagataacaagggatactctgttatttttctggtaagttaaatct

SEQ ID NO: 182370 - DNA, 69 bp, Homo sapiens
caaataccctagtggttagataacaagggatactctgttatttttctggtaagttaaatcttgcagtgt

SEQ ID NO: 182371 - DNA, 68 bp, Homo sapiens
agtggttagataacaagggatactctgttatttttctggtaagttaaatcttgcagtgtttactttta

SEQ ID NO: 182372 - DNA, 66 bp, Homo sapiens
aacaagggatactctgttatttttctggtaagttaaatcttgcagtgtttacttttatatttaaaa

SEQ ID NO: 182373 - DNA, 70 bp, Homo sapiens
ctctgttatttttctggtaagttaaatcttgcagtgtttacttttatatttaaaaatatgtgaatggaga

SEQ ID NO: 182374 - DNA, 70 bp, Homo sapiens
ctggtaagttaaatcttgcagtgtttacttttatatttaaaaatatgtgaatggagaaaatcattttgga

SEQ ID NO: 182375 - DNA, 71 bp, Homo sapiens
gttaaatcttgcagtgtttacttttatatttaaaaatatgtgaatggagaaaatcattttggatgaacgac

SEQ ID NO: 182376 - DNA, 74 bp, Homo sapiens
gcagtgtttacttttatatttaaaaatatgtgaatggagaaaatcattttggatgaacgactttcaatgtatga

SEQ ID NO: 182377 - DNA, 76 bp, Homo sapiens
ttatatttaaaaatatgtgaatggagaaaatcattttggatgaacgactttcaatgtatgataagctatataatta

SEQ ID NO: 182378 - DNA, 74 bp, Homo sapiens
aaaaatatgtgaatggagaaaatcattttggatgaacgactttcaatgtatgataagctatataattaagaaaa

SEQ ID NO: 182379 - DNA, 75 bp, Homo sapiens
gtgaatggagaaaatcattttggatgaacgactttcaatgtatgataagctatataattaagaaaaatgtaagaa

SEQ ID NO: 182380 - DNA, 76 bp, Homo sapiens
atcattttggatgaacgactttcaatgtatgataagctatataattaagaaaaatgtaagaacaatattattctga

SEQ ID NO: 182381 - DNA, 76 bp, Homo sapiens
tggatgaacgactttcaatgtatgataagctatataattaagaaaaatgtaagaacaatattattctgaaagaaga

SEQ ID NO: 182382 - DNA, 71 bp, Homo sapiens
taattaagaaaaatgtaagaacaatattattctgaaagaagattcatttcagattagtaaaataattagag

SEQ ID NO: 182383 - DNA, 71 bp, Homo sapiens
aaatgtaagaacaatattattctgaaagaagattcatttcagattagtaaaataattagaggtctaatcct

SEQ ID NO: 182384 - DNA, 75 bp, Homo sapiens
acaatattattctgaaagaagattcatttcagattagtaaaataattagaggtctaatccttagcttctctcaga

SEQ ID NO: 182385 - DNA, 75 bp, Homo sapiens
tctgaaagaagattcatttcagattagtaaaataattagaggtctaatccttagcttctctcagaaaataagaga

SEQ ID NO: 182386 - DNA, 72 bp, Homo sapiens
aagaagattcatttcagattagtaaaataattagaggtctaatccttagcttctctcagaaaataagagaaa

SEQ ID NO: 182387 - DNA, 72 bp, Homo sapiens
tcagattagtaaaataattagaggtctaatccttagcttctctcagaaaataagagaaattatttaatacga

SEQ ID NO: 182388 - DNA, 72 bp, Homo sapiens
aaataattagaggtctaatccttagcttctctcagaaaataagagaaattatttaatacgataatcatgagt

SEQ ID NO: 182389 - DNA, 72 bp, Homo sapiens
ttagaggtctaatccttagcttctctcagaaaataagagaaattatttaatacgataatcatgagttaaaaa

SEQ ID NO: 182390 - DNA, 72 bp, Homo sapiens
ccttagcttctctcagaaaataagagaaattatttaatacgataatcatgagttaaaaaatgcttctatttc

SEQ ID NO: 182391 - DNA, 70 bp, Homo sapiens
agagaaattatttaatacgataatcatgagttaaaaaatgcttctatttctttaacatgcacttaaaaat

SEQ ID NO: 182392 - DNA, 73 bp, Homo sapiens
tatttaatacgataatcatgagttaaaaaatgcttctatttctttaacatgcacttaaaaattcactggtaga

SEQ ID NO: 182393 - DNA, 72 bp, Homo sapiens
cgataatcatgagttaaaaaatgcttctatttctttaacatgcacttaaaaattcactggtagataaaatac

SEQ ID NO: 182394 - DNA, 71 bp, Homo sapiens
ttaaaaaatgcttctatttctttaacatgcacttaaaaattcactggtagataaaatacttgtaaatgtgc

SEQ ID NO: 182395 - DNA, 75 bp, Homo sapiens
gcttctatttctttaacatgcacttaaaaattcactggtagataaaatacttgtaaatgtgctgaagtcagagga

SEQ ID NO: 182396 - DNA, 73 bp, Homo sapiens
catgcacttaaaaattcactggtagataaaatacttgtaaatgtgctgaagtcagaggagaagggtatctttt

SEQ ID NO: 182397 - DNA, 70 bp, Homo sapiens
aaaattcactggtagataaaatacttgtaaatgtgctgaagtcagaggagaagggtatcttttttcctac

SEQ ID NO: 182398 - DNA, 72 bp, Homo sapiens
gataaaatacttgtaaatgtgctgaagtcagaggagaagggtatcttttttcctactttaaatcactctgga

SEQ ID NO: 182399 - DNA, 72 bp, Homo sapiens
atacttgtaaatgtgctgaagtcagaggagaagggtatcttttttcctactttaaatcactctggagaacaa

SEQ ID NO: 182400 - DNA, 74 bp, Homo sapiens
atgtgctgaagtcagaggagaagggtatcttttttcctactttaaatcactctggagaacaaatgcacactggg

SEQ ID NO: 182401 - DNA, 68 bp, Homo sapiens
aagggtatcttttttcctactttaaatcactctggagaacaaatgcacactggggctcctattttaaa

SEQ ID NO: 182402 - DNA, 68 bp, Homo sapiens
tttttcctactttaaatcactctggagaacaaatgcacactggggctcctattttaaaactttttctc

SEQ ID NO: 182403 - DNA, 68 bp, Homo sapiens
tttaaatcactctggagaacaaatgcacactggggctcctattttaaaactttttctctatttttttc

SEQ ID NO: 182404 - DNA, 75 bp, Homo sapiens
tttttctctatttttttcttaattagatgaatgcatgttatatgcacattaatcatctaaaattgtaagattttc

SEQ ID NO: 182405 - DNA, 74 bp, Homo sapiens
atttttttcttaattagatgaatgcatgttatatgcacattaatcatctaaaattgtaagattttcctgaattt

SEQ ID NO: 182406 - DNA, 74 bp, Homo sapiens
tttttttcttaattagatgaatgcatgttatatgcacattaatcatctaaaattgtaagattttcctgaatttt

SEQ ID NO: 182407 - DNA, 77 bp, Homo sapiens
atgcatgttatatgcacattaatcatctaaaattgtaagattttcctgaatttttctatacatcaaaacctcctgtg

SEQ ID NO: 182408 - DNA, 74 bp, Homo sapiens
tatgcacattaatcatctaaaattgtaagattttcctgaatttttctatacatcaaaacctcctgtggcttttc

SEQ ID NO: 182409 - DNA, 69 bp, Homo sapiens
aattgtaagattttcctgaatttttctatacatcaaaacctcctgtggcttttccttgttccatccctc

SEQ ID NO: 182410 - DNA, 70 bp, Homo sapiens
taagattttcctgaatttttctatacatcaaaacctcctgtggcttttccttgttccatccctctcaccc

SEQ ID NO: 182411 - DNA, 71 bp, Homo sapiens
tatacatcaaaacctcctgtggcttttccttgttccatccctctcaccccatttttcattaccttacataa

SEQ ID NO: 182412 - DNA, 69 bp, Homo sapiens
aaacctcctgtggcttttccttgttccatccctctcaccccatttttcattaccttacataatatccca

SEQ ID NO: 182413 - DNA, 74 bp, Homo sapiens
tttccttgttccatccctctcaccccatttttcattaccttacataatatcccagaagctatcttgcctatgaa

SEQ ID NO: 182414 - DNA, 75 bp, Homo sapiens
tgttccatccctctcaccccatttttcattaccttacataatatcccagaagctatcttgcctatgaaattacta

SEQ ID NO: 182415 - DNA, 75 bp, Homo sapiens
ctctcaccccatttttcattaccttacataatatcccagaagctatcttgcctatgaaattactactcatagtaa

SEQ ID NO: 182416 - DNA, 73 bp, Homo sapiens
catttttcattaccttacataatatcccagaagctatcttgcctatgaaattactactcatagtaaataaact

SEQ ID NO: 182417 - DNA, 73 bp, Homo sapiens
accttacataatatcccagaagctatcttgcctatgaaattactactcatagtaaataaactttacatatagt

SEQ ID NO: 182418 - DNA, 73 bp, Homo sapiens
aatatcccagaagctatcttgcctatgaaattactactcatagtaaataaactttacatatagtttatcttta

SEQ ID NO: 182419 - DNA, 71 bp, Homo sapiens
cccagaagctatcttgcctatgaaattactactcatagtaaataaactttacatatagtttatctttaaaa

SEQ ID NO: 182420 - DNA, 71 bp, Homo sapiens
agctatcttgcctatgaaattactactcatagtaaataaactttacatatagtttatctttaaaaattaga

SEQ ID NO: 182421 - DNA, 71 bp, Homo sapiens
gcctatgaaattactactcatagtaaataaactttacatatagtttatctttaaaaattagaaacacagca

SEQ ID NO: 182422 - DNA, 71 bp, Homo sapiens
tgaaattactactcatagtaaataaactttacatatagtttatctttaaaaattagaaacacagcaagcaa

SEQ ID NO: 182423 - DNA, 70 bp, Homo sapiens
ttactactcatagtaaataaactttacatatagtttatctttaaaaattagaaacacagcaagcaaagaa

SEQ ID NO: 182424 - DNA, 70 bp, Homo sapiens
tcatagtaaataaactttacatatagtttatctttaaaaattagaaacacagcaagcaaagaaattgttc

SEQ ID NO: 182425 - DNA, 69 bp, Homo sapiens
aataaactttacatatagtttatctttaaaaattagaaacacagcaagcaaagaaattgttctcacctc

SEQ ID NO: 182426 - DNA, 70 bp, Homo sapiens
aactttacatatagtttatctttaaaaattagaaacacagcaagcaaagaaattgttctcacctctttca

SEQ ID NO: 182427 - DNA, 70 bp, Homo sapiens
acatatagtttatctttaaaaattagaaacacagcaagcaaagaaattgttctcacctctttcaaaagaa

SEQ ID NO: 182428 - DNA, 68 bp, Homo sapiens
ttaaaaattagaaacacagcaagcaaagaaattgttctcacctctttcaaaagaaaacggtgtagccc

SEQ ID NO: 182429 - DNA, 70 bp, Homo sapiens
ttagaaacacagcaagcaaagaaattgttctcacctctttcaaaagaaaacggtgtagccctcaggaaaa

SEQ ID NO: 182430 - DNA, 68 bp, Homo sapiens
aagcaaagaaattgttctcacctctttcaaaagaaaacggtgtagccctcaggaaaacagaagtgccc

SEQ ID NO: 182431 - DNA, 67 bp, Homo sapiens
aagaaattgttctcacctctttcaaaagaaaacggtgtagccctcaggaaaacagaagtgcccctaa

SEQ ID NO: 182432 - DNA, 71 bp, Homo sapiens
acctctttcaaaagaaaacggtgtagccctcaggaaaacagaagtgcccctaagttcatgtgtgtcagcaa

SEQ ID NO: 182433 - DNA, 73 bp, Homo sapiens
ttcaaaagaaaacggtgtagccctcaggaaaacagaagtgcccctaagttcatgtgtgtcagcaaggaatgga

SEQ ID NO: 182434 - DNA, 79 bp, Homo sapiens
tgtagccctcaggaaaacagaagtgcccctaagttcatgtgtgtcagcaaggaatggagagctgttaagaatgatcttc

SEQ ID NO: 182435 - DNA, 76 bp, Homo sapiens
aggaaaacagaagtgcccctaagttcatgtgtgtcagcaaggaatggagagctgttaagaatgatcttcttgaaaa

SEQ ID NO: 182436 - DNA, 77 bp, Homo sapiens
aacagaagtgcccctaagttcatgtgtgtcagcaaggaatggagagctgttaagaatgatcttcttgaaaagaaaga

SEQ ID NO: 182437 - DNA, 76 bp, Homo sapiens
cctaagttcatgtgtgtcagcaaggaatggagagctgttaagaatgatcttcttgaaaagaaagaagtctccttag

SEQ ID NO: 182438 - DNA, 79 bp, Homo sapiens
tgtgtcagcaaggaatggagagctgttaagaatgatcttcttgaaaagaaagaagtctccttaggcacccacatgtata

SEQ ID NO: 182439 - DNA, 74 bp, Homo sapiens
aaggaatggagagctgttaagaatgatcttcttgaaaagaaagaagtctccttaggcacccacatgtatattta

SEQ ID NO: 182440 - DNA, 75 bp, Homo sapiens
agagctgttaagaatgatcttcttgaaaagaaagaagtctccttaggcacccacatgtatatttagattagactg

SEQ ID NO: 182441 - DNA, 75 bp, Homo sapiens
taagaatgatcttcttgaaaagaaagaagtctccttaggcacccacatgtatatttagattagactggcagttta

SEQ ID NO: 182442 - DNA, 75 bp, Homo sapiens
ttgaaaagaaagaagtctccttaggcacccacatgtatatttagattagactggcagtttaaatgacagcaaaca

SEQ ID NO: 182443 - DNA, 78 bp, Homo sapiens
tccttaggcacccacatgtatatttagattagactggcagtttaaatgacagcaaacacatggtcatgacttcccaat

SEQ ID NO: 182444 - DNA, 82 bp, Homo sapiens
acatgtatatttagattagactggcagtttaaatgacagcaaacacatggtcatgacttcccaattgctcattcatctaaca

SEQ ID NO: 182445 - DNA, 82 bp, Homo sapiens
atatttagattagactggcagtttaaatgacagcaaacacatggtcatgacttcccaattgctcattcatctaacacataca

SEQ ID NO: 182446 - DNA, 85 bp, Homo sapiens
tagactggcagtttaaatgacagcaaacacatggtcatgacttcccaattgctcattcatctaacacatacacaggctaatcaga

SEQ ID NO: 182447 - DNA, 84 bp, Homo sapiens
tttaaatgacagcaaacacatggtcatgacttcccaattgctcattcatctaacacatacacaggctaatcagaggcaaacatc

SEQ ID NO: 182448 - DNA, 80 bp, Homo sapiens
aaacacatggtcatgacttcccaattgctcattcatctaacacatacacaggctaatcagaggcaaacatccaccccgaa

SEQ ID NO: 182449 - DNA, 80 bp, Homo sapiens
tcatgacttcccaattgctcattcatctaacacatacacaggctaatcagaggcaaacatccaccccgaactgttttaga

SEQ ID NO: 182450 - DNA, 75 bp, Homo sapiens
attcatctaacacatacacaggctaatcagaggcaaacatccaccccgaactgttttagaaactagcttctccca

SEQ ID NO: 182451 - DNA, 75 bp, Homo sapiens
acaggctaatcagaggcaaacatccaccccgaactgttttagaaactagcttctcccatctgatactactgtatg

SEQ ID NO: 182452 - DNA, 75 bp, Homo sapiens
aggcaaacatccaccccgaactgttttagaaactagcttctcccatctgatactactgtatgtgtggtaagcaga

SEQ ID NO: 182453 - DNA, 81 bp, Homo sapiens
tgttttagaaactagcttctcccatctgatactactgtatgtgtggtaagcagacattcttctagagagatcggatgtcaa

SEQ ID NO: 182454 - DNA, 81 bp, Homo sapiens
aaactagcttctcccatctgatactactgtatgtgtggtaagcagacattcttctagagagatcggatgtcaaatgcttaa

SEQ ID NO: 182455 - DNA, 82 bp, Homo sapiens
tcccatctgatactactgtatgtgtggtaagcagacattcttctagagagatcggatgtcaaatgcttaactacctctctta

SEQ ID NO: 182456 - DNA, 79 bp, Homo sapiens
atactactgtatgtgtggtaagcagacattcttctagagagatcggatgtcaaatgcttaactacctctcttagtataa

SEQ ID NO: 182457 - DNA, 80 bp, Homo sapiens
tatgtgtggtaagcagacattcttctagagagatcggatgtcaaatgcttaactacctctcttagtataacaggatctta

SEQ ID NO: 182458 - DNA, 78 bp, Homo sapiens
aagcagacattcttctagagagatcggatgtcaaatgcttaactacctctcttagtataacaggatcttaaatcacac

SEQ ID NO: 182459 - DNA, 77 bp, Homo sapiens
attcttctagagagatcggatgtcaaatgcttaactacctctcttagtataacaggatcttaaatcacactgattta

SEQ ID NO: 182460 - DNA, 76 bp, Homo sapiens
agatcggatgtcaaatgcttaactacctctcttagtataacaggatcttaaatcacactgatttagaattccagaa

SEQ ID NO: 182461 - DNA, 73 bp, Homo sapiens
gtcaaatgcttaactacctctcttagtataacaggatcttaaatcacactgatttagaattccagaatgtttt

SEQ ID NO: 182462 - DNA, 72 bp, Homo sapiens
actacctctcttagtataacaggatcttaaatcacactgatttagaattccagaatgtttttgtaaagtcag

SEQ ID NO: 182463 - DNA, 75 bp, Homo sapiens
ctcttagtataacaggatcttaaatcacactgatttagaattccagaatgtttttgtaaagtcagtttgacatca

SEQ ID NO: 182464 - DNA, 77 bp, Homo sapiens
atcacactgatttagaattccagaatgtttttgtaaagtcagtttgacatcaacttacatcaattccttgctctagc

SEQ ID NO: 182465 - DNA, 75 bp, Homo sapiens
gaatgtttttgtaaagtcagtttgacatcaacttacatcaattccttgctctagcctgcagggttttatgaagta

SEQ ID NO: 182466 - DNA, 74 bp, Homo sapiens
tttttgtaaagtcagtttgacatcaacttacatcaattccttgctctagcctgcagggttttatgaagtacaaa

SEQ ID NO: 182467 - DNA, 74 bp, Homo sapiens
agtttgacatcaacttacatcaattccttgctctagcctgcagggttttatgaagtacaaagtaaagaaatgac

SEQ ID NO: 182468 - DNA, 75 bp, Homo sapiens
catcaacttacatcaattccttgctctagcctgcagggttttatgaagtacaaagtaaagaaatgactatgtaaa

SEQ ID NO: 182469 - DNA, 75 bp, Homo sapiens
attccttgctctagcctgcagggttttatgaagtacaaagtaaagaaatgactatgtaaagattgcaggatctat

SEQ ID NO: 182470 - DNA, 76 bp, Homo sapiens
tctagcctgcagggttttatgaagtacaaagtaaagaaatgactatgtaaagattgcaggatctatttgtcttatg

SEQ ID NO: 182471 - DNA, 74 bp, Homo sapiens
ctgcagggttttatgaagtacaaagtaaagaaatgactatgtaaagattgcaggatctatttgtcttatgggta

SEQ ID NO: 182472 - DNA, 71 bp, Homo sapiens
gaagtacaaagtaaagaaatgactatgtaaagattgcaggatctatttgtcttatgggtatttttaaactg

SEQ ID NO: 182473 - DNA, 73 bp, Homo sapiens
taaagaaatgactatgtaaagattgcaggatctatttgtcttatgggtatttttaaactgtaagacctgccca

SEQ ID NO: 182474 - DNA, 75 bp, Homo sapiens
aatgactatgtaaagattgcaggatctatttgtcttatgggtatttttaaactgtaagacctgcccatcctatca

SEQ ID NO: 182475 - DNA, 76 bp, Homo sapiens
taaagattgcaggatctatttgtcttatgggtatttttaaactgtaagacctgcccatcctatcagtaatagcaca

SEQ ID NO: 182476 - DNA, 74 bp, Homo sapiens
atctatttgtcttatgggtatttttaaactgtaagacctgcccatcctatcagtaatagcacacactcctattc

SEQ ID NO: 182477 - DNA, 74 bp, Homo sapiens
ttgtcttatgggtatttttaaactgtaagacctgcccatcctatcagtaatagcacacactcctattctgtaaa

SEQ ID NO: 182478 - DNA, 73 bp, Homo sapiens
tttttaaactgtaagacctgcccatcctatcagtaatagcacacactcctattctgtaaacagggtaaagtca

SEQ ID NO: 182479 - DNA, 78 bp, Homo sapiens
taagacctgcccatcctatcagtaatagcacacactcctattctgtaaacagggtaaagtcactatagaggatcacat

SEQ ID NO: 182480 - DNA, 77 bp, Homo sapiens
ctgcccatcctatcagtaatagcacacactcctattctgtaaacagggtaaagtcactatagaggatcacattttct

SEQ ID NO: 182481 - DNA, 75 bp, Homo sapiens
agtaatagcacacactcctattctgtaaacagggtaaagtcactatagaggatcacattttcttgtgcaaataaa

SEQ ID NO: 182482 - DNA, 72 bp, Homo sapiens
acacactcctattctgtaaacagggtaaagtcactatagaggatcacattttcttgtgcaaataaaaggtgg

SEQ ID NO: 182483 - DNA, 72 bp, Homo sapiens
ctattctgtaaacagggtaaagtcactatagaggatcacattttcttgtgcaaataaaaggtggtagagtta

SEQ ID NO: 182484 - DNA, 72 bp, Homo sapiens
gatcacattttcttgtgcaaataaaaggtggtagagttaaaaggtggagatactgaacatgaactttaagcc

SEQ ID NO: 182485 - DNA, 69 bp, Homo sapiens
ttttcttgtgcaaataaaaggtggtagagttaaaaggtggagatactgaacatgaactttaagccccta

SEQ ID NO: 182486 - DNA, 70 bp, Homo sapiens
tgcaaataaaaggtggtagagttaaaaggtggagatactgaacatgaactttaagcccctactcataatt

SEQ ID NO: 182487 - DNA, 72 bp, Homo sapiens
gtagagttaaaaggtggagatactgaacatgaactttaagcccctactcataatttgagcttcagtaacatt

SEQ ID NO: 182488 - DNA, 72 bp, Homo sapiens
gttaaaaggtggagatactgaacatgaactttaagcccctactcataatttgagcttcagtaacattttcca

SEQ ID NO: 182489 - DNA, 74 bp, Homo sapiens
agatactgaacatgaactttaagcccctactcataatttgagcttcagtaacattttccagtaagtgagaaaca

SEQ ID NO: 182490 - DNA, 75 bp, Homo sapiens
ttaagcccctactcataatttgagcttcagtaacattttccagtaagtgagaaacaagagaaaacacagatggca

SEQ ID NO: 182491 - DNA, 78 bp, Homo sapiens
taatttgagcttcagtaacattttccagtaagtgagaaacaagagaaaacacagatggcactgtttgctggcagctat

SEQ ID NO: 182492 - DNA, 77 bp, Homo sapiens
ttcagtaacattttccagtaagtgagaaacaagagaaaacacagatggcactgtttgctggcagctattaactacac

SEQ ID NO: 182493 - DNA, 76 bp, Homo sapiens
attttccagtaagtgagaaacaagagaaaacacagatggcactgtttgctggcagctattaactacacctacaaca

SEQ ID NO: 182494 - DNA, 78 bp, Homo sapiens
agtgagaaacaagagaaaacacagatggcactgtttgctggcagctattaactacacctacaacactattgtgttgta

SEQ ID NO: 182495 - DNA, 81 bp, Homo sapiens
aacaagagaaaacacagatggcactgtttgctggcagctattaactacacctacaacactattgtgttgtatatatgcata

SEQ ID NO: 182496 - DNA, 84 bp, Homo sapiens
acagatggcactgtttgctggcagctattaactacacctacaacactattgtgttgtatatatgcatacacattgagatttata

SEQ ID NO: 182497 - DNA, 84 bp, Homo sapiens
gcactgtttgctggcagctattaactacacctacaacactattgtgttgtatatatgcatacacattgagatttatatatatta

SEQ ID NO: 182498 - DNA, 83 bp, Homo sapiens
gctggcagctattaactacacctacaacactattgtgttgtatatatgcatacacattgagatttatatatattaagatgtgt

SEQ ID NO: 182499 - DNA, 83 bp, Homo sapiens
actacacctacaacactattgtgttgtatatatgcatacacattgagatttatatatattaagatgtgttggtgaggagcaga

SEQ ID NO: 182500 - DNA, 87 bp, Homo sapiens
tattgtgttgtatatatgcatacacattgagatttatatatattaagatgtgttggtgaggagcagaaaacaaatgcagctatcagc

SEQ ID NO: 182501 - DNA, 83 bp, Homo sapiens
tacacattgagatttatatatattaagatgtgttggtgaggagcagaaaacaaatgcagctatcagctctatgatggggggta

SEQ ID NO: 182502 - DNA, 79 bp, Homo sapiens
tatatatattaagatgtgttggtgaggagcagaaaacaaatgcagctatcagctctatgatggggggtacgttatttta

SEQ ID NO: 182503 - DNA, 76 bp, Homo sapiens
atattaagatgtgttggtgaggagcagaaaacaaatgcagctatcagctctatgatggggggtacgttattttaaa

SEQ ID NO: 182504 - DNA, 74 bp, Homo sapiens
gagcagaaaacaaatgcagctatcagctctatgatggggggtacgttattttaaaatgtcaaacaattttaaca

SEQ ID NO: 182505 - DNA, 68 bp, Homo sapiens
tgatggggggtacgttattttaaaatgtcaaacaattttaacataattatattttacttttgacatga

SEQ ID NO: 182506 - DNA, 69 bp, Homo sapiens
tttaaaatgtcaaacaattttaacataattatattttacttttgacatgaactttgcattttaatctta

SEQ ID NO: 182507 - DNA, 72 bp, Homo sapiens
tgtcaaacaattttaacataattatattttacttttgacatgaactttgcattttaatcttaatgtcaaata

SEQ ID NO: 182508 - DNA, 71 bp, Homo sapiens
caattttaacataattatattttacttttgacatgaactttgcattttaatcttaatgtcaaatattttga

SEQ ID NO: 182509 - DNA, 71 bp, Homo sapiens
atattttacttttgacatgaactttgcattttaatcttaatgtcaaatattttgaaaaatctagattagta

SEQ ID NO: 182510 - DNA, 72 bp, Homo sapiens
ttacttttgacatgaactttgcattttaatcttaatgtcaaatattttgaaaaatctagattagtatgaggg

SEQ ID NO: 182511 - DNA, 74 bp, Homo sapiens
tacttttgacatgaactttgcattttaatcttaatgtcaaatattttgaaaaatctagattagtatgagggtga

SEQ ID NO: 182512 - DNA, 74 bp, Homo sapiens
ttgacatgaactttgcattttaatcttaatgtcaaatattttgaaaaatctagattagtatgagggtgaaaaga

SEQ ID NO: 182513 - DNA, 74 bp, Homo sapiens
tgcattttaatcttaatgtcaaatattttgaaaaatctagattagtatgagggtgaaaagaatgaaacactata

SEQ ID NO: 182514 - DNA, 73 bp, Homo sapiens
gcattttaatcttaatgtcaaatattttgaaaaatctagattagtatgagggtgaaaagaatgaaacactata

SEQ ID NO: 182515 - DNA, 71 bp, Homo sapiens
cttaatgtcaaatattttgaaaaatctagattagtatgagggtgaaaagaatgaaacactataataatttg

SEQ ID NO: 182516 - DNA, 73 bp, Homo sapiens
gaaaaatctagattagtatgagggtgaaaagaatgaaacactataataatttggtgctcaggttctgaaaaca

SEQ ID NO: 182517 - DNA, 73 bp, Homo sapiens
ctagattagtatgagggtgaaaagaatgaaacactataataatttggtgctcaggttctgaaaacatcaaacc

SEQ ID NO: 182518 - DNA, 71 bp, Homo sapiens
agggtgaaaagaatgaaacactataataatttggtgctcaggttctgaaaacatcaaacctggtttgaatc

SEQ ID NO: 182519 - DNA, 73 bp, Homo sapiens
aagaatgaaacactataataatttggtgctcaggttctgaaaacatcaaacctggtttgaatctcagttccac

SEQ ID NO: 182520 - DNA, 73 bp, Homo sapiens
acactataataatttggtgctcaggttctgaaaacatcaaacctggtttgaatctcagttccaccactttcta

SEQ ID NO: 182521 - DNA, 78 bp, Homo sapiens
aaaacatcaaacctggtttgaatctcagttccaccactttctagctatgtgaccttagcacataacatcatctctcca

SEQ ID NO: 182522 - DNA, 80 bp, Homo sapiens
gtttgaatctcagttccaccactttctagctatgtgaccttagcacataacatcatctctccaggcctcagttccttcat

SEQ ID NO: 182523 - DNA, 80 bp, Homo sapiens
aatctcagttccaccactttctagctatgtgaccttagcacataacatcatctctccaggcctcagttccttcatttcta

SEQ ID NO: 182524 - DNA, 78 bp, Homo sapiens
actttctagctatgtgaccttagcacataacatcatctctccaggcctcagttccttcatttctaatggggaaacata

SEQ ID NO: 182525 - DNA, 78 bp, Homo sapiens
tatgtgaccttagcacataacatcatctctccaggcctcagttccttcatttctaatggggaaacataagtaatagtg

SEQ ID NO: 182526 - DNA, 76 bp, Homo sapiens
ttagcacataacatcatctctccaggcctcagttccttcatttctaatggggaaacataagtaatagtggtaccaa

SEQ ID NO: 182527 - DNA, 75 bp, Homo sapiens
ataacatcatctctccaggcctcagttccttcatttctaatggggaaacataagtaatagtggtaccaattcata

SEQ ID NO: 182528 - DNA, 74 bp, Homo sapiens
tccaggcctcagttccttcatttctaatggggaaacataagtaatagtggtaccaattcatatcgctaatgtta

SEQ ID NO: 182529 - DNA, 74 bp, Homo sapiens
gttccttcatttctaatggggaaacataagtaatagtggtaccaattcatatcgctaatgttagaatgttgaca

SEQ ID NO: 182530 - DNA, 75 bp, Homo sapiens
tttctaatggggaaacataagtaatagtggtaccaattcatatcgctaatgttagaatgttgacaacgcaaagca

SEQ ID NO: 182531 - DNA, 76 bp, Homo sapiens
gaaacataagtaatagtggtaccaattcatatcgctaatgttagaatgttgacaacgcaaagcagttaggacagaa

SEQ ID NO: 182532 - DNA, 77 bp, Homo sapiens
ataagtaatagtggtaccaattcatatcgctaatgttagaatgttgacaacgcaaagcagttaggacagaacactga

SEQ ID NO: 182533 - DNA, 79 bp, Homo sapiens
taccaattcatatcgctaatgttagaatgttgacaacgcaaagcagttaggacagaacactgaataaatgatgactaaa

SEQ ID NO: 182534 - DNA, 78 bp, Homo sapiens
catatcgctaatgttagaatgttgacaacgcaaagcagttaggacagaacactgaataaatgatgactaaatattagt

SEQ ID NO: 182535 - DNA, 77 bp, Homo sapiens
gttagaatgttgacaacgcaaagcagttaggacagaacactgaataaatgatgactaaatattagttactattatca

SEQ ID NO: 182536 - DNA, 79 bp, Homo sapiens
tgttgacaacgcaaagcagttaggacagaacactgaataaatgatgactaaatattagttactattatcatcaatagga

SEQ ID NO: 182537 - DNA, 74 bp, Homo sapiens
ttagttactattatcatcaataggaataaatataaaattatgatattaaaaagttatgtctgagtccatttggc

SEQ ID NO: 182538 - DNA, 73 bp, Homo sapiens
tgatattaaaaagttatgtctgagtccatttggcttgtccaccctctcccccatgatagtcttccctgaaaaa

SEQ ID NO: 182539 - DNA, 71 bp, Homo sapiens
taaaaagttatgtctgagtccatttggcttgtccaccctctcccccatgatagtcttccctgaaaaacact

SEQ ID NO: 182540 - DNA, 74 bp, Homo sapiens
tgagtccatttggcttgtccaccctctcccccatgatagtcttccctgaaaaacacttgacacttcaagaaata

SEQ ID NO: 182541 - DNA, 71 bp, Homo sapiens
tttggcttgtccaccctctcccccatgatagtcttccctgaaaaacacttgacacttcaagaaataaggta

SEQ ID NO: 182542 - DNA, 67 bp, Homo sapiens
accctctcccccatgatagtcttccctgaaaaacacttgacacttcaagaaataaggtaacttcctt

SEQ ID NO: 182543 - DNA, 70 bp, Homo sapiens
ccatgatagtcttccctgaaaaacacttgacacttcaagaaataaggtaacttcctttagactaatccaa

SEQ ID NO: 182544 - DNA, 66 bp, Homo sapiens
gtcttccctgaaaaacacttgacacttcaagaaataaggtaacttcctttagactaatccaaaatt

SEQ ID NO: 182545 - DNA, 66 bp, Homo sapiens
ctgaaaaacacttgacacttcaagaaataaggtaacttcctttagactaatccaaaatttattttc

SEQ ID NO: 182546 - DNA, 67 bp, Homo sapiens
gacacttcaagaaataaggtaacttcctttagactaatccaaaatttattttctctgaaacttctcc

SEQ ID NO: 182547 - DNA, 68 bp, Homo sapiens
aataaggtaacttcctttagactaatccaaaatttattttctctgaaacttctcctggagaaggcagc

SEQ ID NO: 182548 - DNA, 70 bp, Homo sapiens
ggtaacttcctttagactaatccaaaatttattttctctgaaacttctcctggagaaggcagctgataaa

SEQ ID NO: 182549 - DNA, 72 bp, Homo sapiens
ttagactaatccaaaatttattttctctgaaacttctcctggagaaggcagctgataaagtacctagttcaa

SEQ ID NO: 182550 - DNA, 74 bp, Homo sapiens
aatttattttctctgaaacttctcctggagaaggcagctgataaagtacctagttcaatgcccaatatataaga

SEQ ID NO: 182551 - DNA, 76 bp, Homo sapiens
attttctctgaaacttctcctggagaaggcagctgataaagtacctagttcaatgcccaatatataagacattcta

SEQ ID NO: 182552 - DNA, 76 bp, Homo sapiens
gtacctagttcaatgcccaatatataagacattctagcaaggacttctatacaaacagaataaacaaagatgagaa

SEQ ID NO: 182553 - DNA, 74 bp, Homo sapiens
caatgcccaatatataagacattctagcaaggacttctatacaaacagaataaacaaagatgagaattaaaaag

SEQ ID NO: 182554 - DNA, 74 bp, Homo sapiens
taagacattctagcaaggacttctatacaaacagaataaacaaagatgagaattaaaaagtgattgttaatcta

SEQ ID NO: 182555 - DNA, 73 bp, Homo sapiens
ctagcaaggacttctatacaaacagaataaacaaagatgagaattaaaaagtgattgttaatctaagcacaaa

SEQ ID NO: 182556 - DNA, 74 bp, Homo sapiens
cttctatacaaacagaataaacaaagatgagaattaaaaagtgattgttaatctaagcacaaatgatctatagg

SEQ ID NO: 182557 - DNA, 75 bp, Homo sapiens
cagaataaacaaagatgagaattaaaaagtgattgttaatctaagcacaaatgatctataggtaagaactgcctg

SEQ ID NO: 182558 - DNA, 75 bp, Homo sapiens
caaagatgagaattaaaaagtgattgttaatctaagcacaaatgatctataggtaagaactgcctggtcaagtaa

SEQ ID NO: 182559 - DNA, 75 bp, Homo sapiens
gaattaaaaagtgattgttaatctaagcacaaatgatctataggtaagaactgcctggtcaagtaatatttgaga

SEQ ID NO: 182560 - DNA, 77 bp, Homo sapiens
aagtgattgttaatctaagcacaaatgatctataggtaagaactgcctggtcaagtaatatttgagaattcatagaa

SEQ ID NO: 182561 - DNA, 75 bp, Homo sapiens
ttaatctaagcacaaatgatctataggtaagaactgcctggtcaagtaatatttgagaattcatagaaaaaagaa

SEQ ID NO: 182562 - DNA, 70 bp, Homo sapiens
ggtaagaactgcctggtcaagtaatatttgagaattcatagaaaaaagaaagtgaaacttatttagggca

SEQ ID NO: 182563 - DNA, 73 bp, Homo sapiens
gaactgcctggtcaagtaatatttgagaattcatagaaaaaagaaagtgaaacttatttagggcatcacattg

SEQ ID NO: 182564 - DNA, 72 bp, Homo sapiens
gtcaagtaatatttgagaattcatagaaaaaagaaagtgaaacttatttagggcatcacattgtttgagaag

SEQ ID NO: 182565 - DNA, 69 bp, Homo sapiens
tttgagaattcatagaaaaaagaaagtgaaacttatttagggcatcacattgtttgagaagtttttcct

SEQ ID NO: 182566 - DNA, 67 bp, Homo sapiens
gaaaaaagaaagtgaaacttatttagggcatcacattgtttgagaagtttttccttttgcagaaaaa

SEQ ID NO: 182567 - DNA, 68 bp, Homo sapiens
agtgaaacttatttagggcatcacattgtttgagaagtttttccttttgcagaaaaagtgggccctaa

SEQ ID NO: 182568 - DNA, 68 bp, Homo sapiens
aacttatttagggcatcacattgtttgagaagtttttccttttgcagaaaaagtgggccctaagactc

SEQ ID NO: 182569 - DNA, 71 bp, Homo sapiens
atcacattgtttgagaagtttttccttttgcagaaaaagtgggccctaagactctcaagaaaatgatccac

SEQ ID NO: 182570 - DNA, 69 bp, Homo sapiens
tgagaagtttttccttttgcagaaaaagtgggccctaagactctcaagaaaatgatccacttaaagaaa

SEQ ID NO: 182571 - DNA, 75 bp, Homo sapiens
tgcagaaaaagtgggccctaagactctcaagaaaatgatccacttaaagaaaataataatatcatgatactgttc

SEQ ID NO: 182572 - DNA, 73 bp, Homo sapiens
agtgggccctaagactctcaagaaaatgatccacttaaagaaaataataatatcatgatactgttcttaacag

SEQ ID NO: 182573 - DNA, 76 bp, Homo sapiens
gactctcaagaaaatgatccacttaaagaaaataataatatcatgatactgttcttaacagttcatctcaattttg

SEQ ID NO: 182574 - DNA, 77 bp, Homo sapiens
aatgatccacttaaagaaaataataatatcatgatactgttcttaacagttcatctcaattttgtagacttatatgc

SEQ ID NO: 182575 - DNA, 79 bp, Homo sapiens
ttaaagaaaataataatatcatgatactgttcttaacagttcatctcaattttgtagacttatatgcttctgccacatg

SEQ ID NO: 182576 - DNA, 80 bp, Homo sapiens
taataatatcatgatactgttcttaacagttcatctcaattttgtagacttatatgcttctgccacatgttaacttgtct

SEQ ID NO: 182577 - DNA, 78 bp, Homo sapiens
atgatactgttcttaacagttcatctcaattttgtagacttatatgcttctgccacatgttaacttgtcttggtagta

SEQ ID NO: 182578 - DNA, 75 bp, Homo sapiens
ctgttcttaacagttcatctcaattttgtagacttatatgcttctgccacatgttaacttgtcttggtagtaaaa

SEQ ID NO: 182579 - DNA, 74 bp, Homo sapiens
acagttcatctcaattttgtagacttatatgcttctgccacatgttaacttgtcttggtagtaaaaagacaaaa

SEQ ID NO: 182580 - DNA, 77 bp, Homo sapiens
agacttatatgcttctgccacatgttaacttgtcttggtagtaaaaagacaaaaacagatggatgctgattgcttaa

SEQ ID NO: 182581 - DNA, 77 bp, Homo sapiens
ttctgccacatgttaacttgtcttggtagtaaaaagacaaaaacagatggatgctgattgcttaatggcagaaatat

SEQ ID NO: 182582 - DNA, 76 bp, Homo sapiens
catgttaacttgtcttggtagtaaaaagacaaaaacagatggatgctgattgcttaatggcagaaatatttgtctg

SEQ ID NO: 182583 - DNA, 75 bp, Homo sapiens
ggatgctgattgcttaatggcagaaatatttgtctgtagtttttgctactttataaaatattacaaaggaataca

SEQ ID NO: 182584 - DNA, 72 bp, Homo sapiens
taatggcagaaatatttgtctgtagtttttgctactttataaaatattacaaaggaatacagaggtgggcca

SEQ ID NO: 182585 - DNA, 69 bp, Homo sapiens
atatttgtctgtagtttttgctactttataaaatattacaaaggaatacagaggtgggccaaaacctca

SEQ ID NO: 182586 - DNA, 67 bp, Homo sapiens
gtctgtagtttttgctactttataaaatattacaaaggaatacagaggtgggccaaaacctcaaact

SEQ ID NO: 182587 - DNA, 69 bp, Homo sapiens
tgctactttataaaatattacaaaggaatacagaggtgggccaaaacctcaaacttaattgaaactctc

SEQ ID NO: 182588 - DNA, 70 bp, Homo sapiens
aaatattacaaaggaatacagaggtgggccaaaacctcaaacttaattgaaactctctagtgttgtctga

SEQ ID NO: 182589 - DNA, 69 bp, Homo sapiens
aaaggaatacagaggtgggccaaaacctcaaacttaattgaaactctctagtgttgtctgacaaattaa

SEQ ID NO: 182590 - DNA, 71 bp, Homo sapiens
atacagaggtgggccaaaacctcaaacttaattgaaactctctagtgttgtctgacaaattaagattgtaa

SEQ ID NO: 182591 - DNA, 70 bp, Homo sapiens
gggccaaaacctcaaacttaattgaaactctctagtgttgtctgacaaattaagattgtaagtcacttta

SEQ ID NO: 182592 - DNA, 75 bp, Homo sapiens
acttaattgaaactctctagtgttgtctgacaaattaagattgtaagtcactttattatatagcgtctggtcatg

SEQ ID NO: 182593 - DNA, 79 bp, Homo sapiens
aactctctagtgttgtctgacaaattaagattgtaagtcactttattatatagcgtctggtcatgtggtatatcatcaa

SEQ ID NO: 182594 - DNA, 81 bp, Homo sapiens
tctagtgttgtctgacaaattaagattgtaagtcactttattatatagcgtctggtcatgtggtatatcatcaatgccaat

SEQ ID NO: 182595 - DNA, 79 bp, Homo sapiens
tctgacaaattaagattgtaagtcactttattatatagcgtctggtcatgtggtatatcatcaatgccaattatttctt

SEQ ID NO: 182596 - DNA, 76 bp, Homo sapiens
taagattgtaagtcactttattatatagcgtctggtcatgtggtatatcatcaatgccaattatttcttttttctt

SEQ ID NO: 182597 - DNA, 74 bp, Homo sapiens
aactacaatcactacatatacacagttcctgcactcctaagtaagaggttttgttatacatagaagtaagcaag

SEQ ID NO: 182598 - DNA, 74 bp, Homo sapiens
acatatacacagttcctgcactcctaagtaagaggttttgttatacatagaagtaagcaagtttaatgtactca

SEQ ID NO: 182599 - DNA, 72 bp, Homo sapiens
gaggttttgttatacatagaagtaagcaagtttaatgtactcatttcctaagaaataagagaattgtcaatg

SEQ ID NO: 182600 - DNA, 74 bp, Homo sapiens
atacatagaagtaagcaagtttaatgtactcatttcctaagaaataagagaattgtcaatgttaatgttatcca

SEQ ID NO: 182601 - DNA, 70 bp, Homo sapiens
gtaagcaagtttaatgtactcatttcctaagaaataagagaattgtcaatgttaatgttatccaaaaacg

SEQ ID NO: 182602 - DNA, 72 bp, Homo sapiens
ttaatgtactcatttcctaagaaataagagaattgtcaatgttaatgttatccaaaaacgtgttcttaatgc

SEQ ID NO: 182603 - DNA, 72 bp, Homo sapiens
ctcatttcctaagaaataagagaattgtcaatgttaatgttatccaaaaacgtgttcttaatgctcagtttg

SEQ ID NO: 182604 - DNA, 73 bp, Homo sapiens
gaaataagagaattgtcaatgttaatgttatccaaaaacgtgttcttaatgctcagtttgtacctatcattaa

SEQ ID NO: 182605 - DNA, 72 bp, Homo sapiens
tcaatgttaatgttatccaaaaacgtgttcttaatgctcagtttgtacctatcattaaaatttaatataatc

SEQ ID NO: 182606 - DNA, 74 bp, Homo sapiens
tccaaaaacgtgttcttaatgctcagtttgtacctatcattaaaatttaatataatctaacacaattatcatca

SEQ ID NO: 182607 - DNA, 77 bp, Homo sapiens
cgtgttcttaatgctcagtttgtacctatcattaaaatttaatataatctaacacaattatcatcaatgggatgcag

SEQ ID NO: 182608 - DNA, 77 bp, Homo sapiens
gctcagtttgtacctatcattaaaatttaatataatctaacacaattatcatcaatgggatgcaggtgttggataat

SEQ ID NO: 182609 - DNA, 76 bp, Homo sapiens
gtttgtacctatcattaaaatttaatataatctaacacaattatcatcaatgggatgcaggtgttggataattata

SEQ ID NO: 182610 - DNA, 80 bp, Homo sapiens
tataatctaacacaattatcatcaatgggatgcaggtgttggataattatattagtatcaacacgacagtcaaattaaga

SEQ ID NO: 182611 - DNA, 78 bp, Homo sapiens
cacaattatcatcaatgggatgcaggtgttggataattatattagtatcaacacgacagtcaaattaagatttcttcc

SEQ ID NO: 182612 - DNA, 80 bp, Homo sapiens
ttatcatcaatgggatgcaggtgttggataattatattagtatcaacacgacagtcaaattaagatttcttcccatgtga

SEQ ID NO: 182613 - DNA, 79 bp, Homo sapiens
tgcaggtgttggataattatattagtatcaacacgacagtcaaattaagatttcttcccatgtgatggagttctgataa

SEQ ID NO: 182614 - DNA, 78 bp, Homo sapiens
tcaacacgacagtcaaattaagatttcttcccatgtgatggagttctgataaatatcaattcattggtttactgaatc

SEQ ID NO: 182615 - DNA, 79 bp, Homo sapiens
cagtcaaattaagatttcttcccatgtgatggagttctgataaatatcaattcattggtttactgaatcctgaagatca

SEQ ID NO: 182616 - DNA, 77 bp, Homo sapiens
taagatttcttcccatgtgatggagttctgataaatatcaattcattggtttactgaatcctgaagatcaaaaggcc

SEQ ID NO: 182617 - DNA, 81 bp, Homo sapiens
atgtgatggagttctgataaatatcaattcattggtttactgaatcctgaagatcaaaaggccctgcatatggcactaata

SEQ ID NO: 182618 - DNA, 78 bp, Homo sapiens
gttctgataaatatcaattcattggtttactgaatcctgaagatcaaaaggccctgcatatggcactaataaatcaaa

SEQ ID NO: 182619 - DNA, 79 bp, Homo sapiens
attcattggtttactgaatcctgaagatcaaaaggccctgcatatggcactaataaatcaaatagagtcatcaaatcta

SEQ ID NO: 182620 - DNA, 77 bp, Homo sapiens
aagatcaaaaggccctgcatatggcactaataaatcaaatagagtcatcaaatctacagtctgttttctttggctaa

SEQ ID NO: 182621 - DNA, 76 bp, Homo sapiens
ccctgcatatggcactaataaatcaaatagagtcatcaaatctacagtctgttttctttggctaaaactgcaaagt

SEQ ID NO: 182622 - DNA, 74 bp, Homo sapiens
aatcaaatagagtcatcaaatctacagtctgttttctttggctaaaactgcaaagttttacttacagagactga

SEQ ID NO: 182623 - DNA, 75 bp, Homo sapiens
gagtcatcaaatctacagtctgttttctttggctaaaactgcaaagttttacttacagagactgatctacttcta

SEQ ID NO: 182624 - DNA, 72 bp, Homo sapiens
tcaaatctacagtctgttttctttggctaaaactgcaaagttttacttacagagactgatctacttctaaaa

SEQ ID NO: 182625 - DNA, 70 bp, Homo sapiens
ctttggctaaaactgcaaagttttacttacagagactgatctacttctaaaaattctctgccaaaccaaa

SEQ ID NO: 182626 - DNA, 72 bp, Homo sapiens
gcaaagttttacttacagagactgatctacttctaaaaattctctgccaaaccaaatttgactcactaagtg

SEQ ID NO: 182627 - DNA, 75 bp, Homo sapiens
agagactgatctacttctaaaaattctctgccaaaccaaatttgactcactaagtgtacagaaaatatagcactc

SEQ ID NO: 182628 - DNA, 72 bp, Homo sapiens
ctacttctaaaaattctctgccaaaccaaatttgactcactaagtgtacagaaaatatagcactccccagcc

SEQ ID NO: 182629 - DNA, 73 bp, Homo sapiens
aaattctctgccaaaccaaatttgactcactaagtgtacagaaaatatagcactccccagccgcaccctcctg

SEQ ID NO: 182630 - DNA, 72 bp, Homo sapiens
aaaccaaatttgactcactaagtgtacagaaaatatagcactccccagccgcaccctcctggggcttctgaa

SEQ ID NO: 182631 - DNA, 76 bp, Homo sapiens
tttgactcactaagtgtacagaaaatatagcactccccagccgcaccctcctggggcttctgaagtccagagacac

SEQ ID NO: 182632 - DNA, 76 bp, Homo sapiens
taagtgtacagaaaatatagcactccccagccgcaccctcctggggcttctgaagtccagagacactgttatgtgg

SEQ ID NO: 182633 - DNA, 76 bp, Homo sapiens
aaatatagcactccccagccgcaccctcctggggcttctgaagtccagagacactgttatgtggtggtctagatta

SEQ ID NO: 182634 - DNA, 75 bp, Homo sapiens
cccagccgcaccctcctggggcttctgaagtccagagacactgttatgtggtggtctagattatctggtctttcc

SEQ ID NO: 182635 - DNA, 73 bp, Homo sapiens
accctcctggggcttctgaagtccagagacactgttatgtggtggtctagattatctggtctttccctcttct

SEQ ID NO: 182636 - DNA, 75 bp, Homo sapiens
gcttctgaagtccagagacactgttatgtggtggtctagattatctggtctttccctcttctttgcctttttaga

SEQ ID NO: 182637 - DNA, 77 bp, Homo sapiens
tccagagacactgttatgtggtggtctagattatctggtctttccctcttctttgcctttttagatctcataatcaa

SEQ ID NO: 182638 - DNA, 73 bp, Homo sapiens
actgttatgtggtggtctagattatctggtctttccctcttctttgcctttttagatctcataatcaactaaa

SEQ ID NO: 182639 - DNA, 72 bp, Homo sapiens
atgtggtggtctagattatctggtctttccctcttctttgcctttttagatctcataatcaactaaaaattc

SEQ ID NO: 182640 - DNA, 72 bp, Homo sapiens
ctagattatctggtctttccctcttctttgcctttttagatctcataatcaactaaaaattcttgcagaaaa

SEQ ID NO: 182641 - DNA, 69 bp, Homo sapiens
tggtctttccctcttctttgcctttttagatctcataatcaactaaaaattcttgcagaaaagtaaaaa

SEQ ID NO: 182642 - DNA, 70 bp, Homo sapiens
ctttgcctttttagatctcataatcaactaaaaattcttgcagaaaagtaaaaagttacctctagactca

SEQ ID NO: 182643 - DNA, 71 bp, Homo sapiens
cctttttagatctcataatcaactaaaaattcttgcagaaaagtaaaaagttacctctagactcagactga

SEQ ID NO: 182644 - DNA, 71 bp, Homo sapiens
tctcataatcaactaaaaattcttgcagaaaagtaaaaagttacctctagactcagactgaaaagttacaa

SEQ ID NO: 182645 - DNA, 66 bp, Homo sapiens
aactaaaaattcttgcagaaaagtaaaaagttacctctagactcagactgaaaagttacaaaatat

SEQ ID NO: 182646 - DNA, 64 bp, Homo sapiens
tttttatttattaataaatcctaccataagtaaaggtacttaataaaaatctctaaccgattaa

SEQ ID NO: 182647 - DNA, 68 bp, Homo sapiens
attaataaatcctaccataagtaaaggtacttaataaaaatctctaaccgattaacatacacactgaa

SEQ ID NO: 182648 - DNA, 67 bp, Homo sapiens
aaatcctaccataagtaaaggtacttaataaaaatctctaaccgattaacatacacactgaaaataa

SEQ ID NO: 182649 - DNA, 67 bp, Homo sapiens
gtaaaggtacttaataaaaatctctaaccgattaacatacacactgaaaataataaaggggtctaca

SEQ ID NO: 182650 - DNA, 67 bp, Homo sapiens
taataaaaatctctaaccgattaacatacacactgaaaataataaaggggtctacaatactttttcc

SEQ ID NO: 182651 - DNA, 68 bp, Homo sapiens
aaaatctctaaccgattaacatacacactgaaaataataaaggggtctacaatactttttcctgagtc

SEQ ID NO: 182652 - DNA, 69 bp, Homo sapiens
ccgattaacatacacactgaaaataataaaggggtctacaatactttttcctgagtctatttaaatatc

SEQ ID NO: 182653 - DNA, 68 bp, Homo sapiens
gggtctacaatactttttcctgagtctatttaaatatcggtaagaactcctaaagctggaaattctac

SEQ ID NO: 182654 - DNA, 68 bp, Homo sapiens
actttttcctgagtctatttaaatatcggtaagaactcctaaagctggaaattctactcaggtattta

SEQ ID NO: 182655 - DNA, 70 bp, Homo sapiens
cctgagtctatttaaatatcggtaagaactcctaaagctggaaattctactcaggtatttatagtataat

SEQ ID NO: 182656 - DNA, 72 bp, Homo sapiens
taaatatcggtaagaactcctaaagctggaaattctactcaggtatttatagtataattagtcacgttctga

SEQ ID NO: 182657 - DNA, 73 bp, Homo sapiens
tctactcaggtatttatagtataattagtcacgttctgataaactgaccctaaactttgtgtgacagtagtat

SEQ ID NO: 182658 - DNA, 70 bp, Homo sapiens
taaactgaccctaaactttgtgtgacagtagtattatttgaaagagaaggggctacggaaagataatgta

SEQ ID NO: 182659 - DNA, 70 bp, Homo sapiens
accctaaactttgtgtgacagtagtattatttgaaagagaaggggctacggaaagataatgtaagcaata

SEQ ID NO: 182660 - DNA, 68 bp, Homo sapiens
agtattatttgaaagagaaggggctacggaaagataatgtaagcaatatcccaggaaaaaatcccact

SEQ ID NO: 182661 - DNA, 69 bp, Homo sapiens
aagagaaggggctacggaaagataatgtaagcaatatcccaggaaaaaatcccacttccagttgattta

SEQ ID NO: 182662 - DNA, 70 bp, Homo sapiens
ggctacggaaagataatgtaagcaatatcccaggaaaaaatcccacttccagttgatttacttaaggaga

SEQ ID NO: 182663 - DNA, 72 bp, Homo sapiens
gataatgtaagcaatatcccaggaaaaaatcccacttccagttgatttacttaaggagactactctgataaa

SEQ ID NO: 182664 - DNA, 72 bp, Homo sapiens
tgtaagcaatatcccaggaaaaaatcccacttccagttgatttacttaaggagactactctgataaaccatc

SEQ ID NO: 182665 - DNA, 71 bp, Homo sapiens
aggaaaaaatcccacttccagttgatttacttaaggagactactctgataaaccatctgttccatgatatt

SEQ ID NO: 182666 - DNA, 74 bp, Homo sapiens
aaatcccacttccagttgatttacttaaggagactactctgataaaccatctgttccatgatattttgaatctc

SEQ ID NO: 182667 - DNA, 76 bp, Homo sapiens
cagttgatttacttaaggagactactctgataaaccatctgttccatgatattttgaatctcgaagaaaatgtaca

SEQ ID NO: 182668 - DNA, 75 bp, Homo sapiens
acttaaggagactactctgataaaccatctgttccatgatattttgaatctcgaagaaaatgtacaaatgaatgg

SEQ ID NO: 182669 - DNA, 78 bp, Homo sapiens
tactctgataaaccatctgttccatgatattttgaatctcgaagaaaatgtacaaatgaatggtaggattatggtgct

SEQ ID NO: 182670 - DNA, 74 bp, Homo sapiens
tctgttccatgatattttgaatctcgaagaaaatgtacaaatgaatggtaggattatggtgctttttattttct

SEQ ID NO: 182671 - DNA, 65 bp, Homo sapiens
ttattttcttctttataaaacaattctgtacctttcaaaaatttttacaataattatgtttgaaa

SEQ ID NO: 182672 - DNA, 68 bp, Homo sapiens
cttctttataaaacaattctgtacctttcaaaaatttttacaataattatgtttgaaatatatgaata

SEQ ID NO: 182673 - DNA, 67 bp, Homo sapiens
aaacaattctgtacctttcaaaaatttttacaataattatgtttgaaatatatgaataaaaataaca

SEQ ID NO: 182674 - DNA, 69 bp, Homo sapiens
atttttacaataattatgtttgaaatatatgaataaaaataacaaaatgtctgtttttggttcaatcga

SEQ ID NO: 182675 - DNA, 71 bp, Homo sapiens
acaataattatgtttgaaatatatgaataaaaataacaaaatgtctgtttttggttcaatcgagaacatcc

SEQ ID NO: 182676 - DNA, 72 bp, Homo sapiens
ttgaaatatatgaataaaaataacaaaatgtctgtttttggttcaatcgagaacatcctaaagcaataagaa

SEQ ID NO: 182677 - DNA, 68 bp, Homo sapiens
gaataaaaataacaaaatgtctgtttttggttcaatcgagaacatcctaaagcaataagaaatacttt

SEQ ID NO: 182678 - DNA, 69 bp, Homo sapiens
aacaaaatgtctgtttttggttcaatcgagaacatcctaaagcaataagaaatacttttccaagtccaa

SEQ ID NO: 182679 - DNA, 69 bp, Homo sapiens
tggttcaatcgagaacatcctaaagcaataagaaatacttttccaagtccaaaaagattttagaaagac

SEQ ID NO: 182680 - DNA, 65 bp, Homo sapiens
cctaaagcaataagaaatacttttccaagtccaaaaagattttagaaagacttaataatttgtcc

SEQ ID NO: 182681 - DNA, 67 bp, Homo sapiens
ccaagtccaaaaagattttagaaagacttaataatttgtcctaaaatgttaaaatctcagctgaaaa

SEQ ID NO: 182682 - DNA, 71 bp, Homo sapiens
gaaagacttaataatttgtcctaaaatgttaaaatctcagctgaaaattttggctgacaccactcccactc

SEQ ID NO: 182683 - DNA, 72 bp, Homo sapiens
ttaataatttgtcctaaaatgttaaaatctcagctgaaaattttggctgacaccactcccactcccaagtca

SEQ ID NO: 182684 - DNA, 74 bp, Homo sapiens
tgttaaaatctcagctgaaaattttggctgacaccactcccactcccaagtcacaacatttaaaaatgtctcca

SEQ ID NO: 182685 - DNA, 74 bp, Homo sapiens
tgaaaattttggctgacaccactcccactcccaagtcacaacatttaaaaatgtctccagatagtgcccaatgg

SEQ ID NO: 182686 - DNA, 73 bp, Homo sapiens
attttggctgacaccactcccactcccaagtcacaacatttaaaaatgtctccagatagtgcccaatggggtg

SEQ ID NO: 182687 - DNA, 72 bp, Homo sapiens
tcccaagtcacaacatttaaaaatgtctccagatagtgcccaatggggtggggtaggggagacactatccta

SEQ ID NO: 182688 - DNA, 70 bp, Homo sapiens
acatttaaaaatgtctccagatagtgcccaatggggtggggtaggggagacactatcctaggataatgtt

SEQ ID NO: 182689 - DNA, 72 bp, Homo sapiens
aatgtctccagatagtgcccaatggggtggggtaggggagacactatcctaggataatgttttctcaagaag

SEQ ID NO: 182690 - DNA, 70 bp, Homo sapiens
agatagtgcccaatggggtggggtaggggagacactatcctaggataatgttttctcaagaagttaccta

SEQ ID NO: 182691 - DNA, 71 bp, Homo sapiens
atggggtggggtaggggagacactatcctaggataatgttttctcaagaagttacctacaagagtctcata

SEQ ID NO: 182692 - DNA, 73 bp, Homo sapiens
gggtaggggagacactatcctaggataatgttttctcaagaagttacctacaagagtctcatataattatata

SEQ ID NO: 182693 - DNA, 74 bp, Homo sapiens
ggagacactatcctaggataatgttttctcaagaagttacctacaagagtctcatataattatataccactaat

SEQ ID NO: 182694 - DNA, 77 bp, Homo sapiens
ctaggataatgttttctcaagaagttacctacaagagtctcatataattatataccactaattgacagatgattcca

SEQ ID NO: 182695 - DNA, 76 bp, Homo sapiens
gaagttacctacaagagtctcatataattatataccactaattgacagatgattccattttaataatgttctaatc

SEQ ID NO: 182696 - DNA, 77 bp, Homo sapiens
ctacaagagtctcatataattatataccactaattgacagatgattccattttaataatgttctaatcttaagacca

SEQ ID NO: 182697 - DNA, 75 bp, Homo sapiens
taccactaattgacagatgattccattttaataatgttctaatcttaagaccattatgaaatgatacttttggtc

SEQ ID NO: 182698 - DNA, 78 bp, Homo sapiens
tgacagatgattccattttaataatgttctaatcttaagaccattatgaaatgatacttttggtctgataagatccat

SEQ ID NO: 182699 - DNA, 75 bp, Homo sapiens
tccattttaataatgttctaatcttaagaccattatgaaatgatacttttggtctgataagatccatttcaatgg

SEQ ID NO: 182700 - DNA, 79 bp, Homo sapiens
ataatgttctaatcttaagaccattatgaaatgatacttttggtctgataagatccatttcaatggtctctctctagca

SEQ ID NO: 182701 - DNA, 82 bp, Homo sapiens
ttctaatcttaagaccattatgaaatgatacttttggtctgataagatccatttcaatggtctctctctagcattgatgcta

SEQ ID NO: 182702 - DNA, 79 bp, Homo sapiens
aaatgatacttttggtctgataagatccatttcaatggtctctctctagcattgatgctaaggtgtattctgaagtaaa

SEQ ID NO: 182703 - DNA, 82 bp, Homo sapiens
tttggtctgataagatccatttcaatggtctctctctagcattgatgctaaggtgtattctgaagtaaactgcaatctgcct

SEQ ID NO: 182704 - DNA, 83 bp, Homo sapiens
taagatccatttcaatggtctctctctagcattgatgctaaggtgtattctgaagtaaactgcaatctgccttctgagatatt

SEQ ID NO: 182705 - DNA, 84 bp, Homo sapiens
atttcaatggtctctctctagcattgatgctaaggtgtattctgaagtaaactgcaatctgccttctgagatatttgtgttgca

SEQ ID NO: 182706 - DNA, 84 bp, Homo sapiens
tctctctagcattgatgctaaggtgtattctgaagtaaactgcaatctgccttctgagatatttgtgttgcatctctcccttta

SEQ ID NO: 182707 - DNA, 81 bp, Homo sapiens
attgatgctaaggtgtattctgaagtaaactgcaatctgccttctgagatatttgtgttgcatctctccctttagtgaaga

SEQ ID NO: 182708 - DNA, 79 bp, Homo sapiens
taaggtgtattctgaagtaaactgcaatctgccttctgagatatttgtgttgcatctctccctttagtgaagaggacaa

SEQ ID NO: 182709 - DNA, 79 bp, Homo sapiens
aagtaaactgcaatctgccttctgagatatttgtgttgcatctctccctttagtgaagaggacaatcactccactctgg

SEQ ID NO: 182710 - DNA, 81 bp, Homo sapiens
aatctgccttctgagatatttgtgttgcatctctccctttagtgaagaggacaatcactccactctggttctggtgagaca

SEQ ID NO: 182711 - DNA, 80 bp, Homo sapiens
ttctgagatatttgtgttgcatctctccctttagtgaagaggacaatcactccactctggttctggtgagacagccctgt

SEQ ID NO: 182712 - DNA, 78 bp, Homo sapiens
atatttgtgttgcatctctccctttagtgaagaggacaatcactccactctggttctggtgagacagccctgttgtcc

SEQ ID NO: 182713 - DNA, 73 bp, Homo sapiens
agaggacaatcactccactctggttctggtgagacagccctgttgtcccttaggttgaaactgaattcccatt

SEQ ID NO: 182714 - DNA, 75 bp, Homo sapiens
tctggtgagacagccctgttgtcccttaggttgaaactgaattcccatttccaatgggcactgccatttctgtat

SEQ ID NO: 182715 - DNA, 74 bp, Homo sapiens
acagccctgttgtcccttaggttgaaactgaattcccatttccaatgggcactgccatttctgtatttcatata

SEQ ID NO: 182716 - DNA, 80 bp, Homo sapiens
ttgaaactgaattcccatttccaatgggcactgccatttctgtatttcatatacagaacatgtagagatgccgtgccatt

SEQ ID NO: 182717 - DNA, 78 bp, Homo sapiens
aattcccatttccaatgggcactgccatttctgtatttcatatacagaacatgtagagatgccgtgccatttggttaa

SEQ ID NO: 182718 - DNA, 78 bp, Homo sapiens
atttccaatgggcactgccatttctgtatttcatatacagaacatgtagagatgccgtgccatttggttaacagggtc

SEQ ID NO: 182719 - DNA, 75 bp, Homo sapiens
actgccatttctgtatttcatatacagaacatgtagagatgccgtgccatttggttaacagggtccaaaaagtac

SEQ ID NO: 182720 - DNA, 76 bp, Homo sapiens
ttctgtatttcatatacagaacatgtagagatgccgtgccatttggttaacagggtccaaaaagtaccatgtgaaa

SEQ ID NO: 182721 - DNA, 76 bp, Homo sapiens
tatacagaacatgtagagatgccgtgccatttggttaacagggtccaaaaagtaccatgtgaaagcacatacttta

SEQ ID NO: 182722 - DNA, 74 bp, Homo sapiens
aacatgtagagatgccgtgccatttggttaacagggtccaaaaagtaccatgtgaaagcacatactttacataa

SEQ ID NO: 182723 - DNA, 74 bp, Homo sapiens
cgtgccatttggttaacagggtccaaaaagtaccatgtgaaagcacatactttacataatgttatctgaaatga

SEQ ID NO: 182724 - DNA, 72 bp, Homo sapiens
catttggttaacagggtccaaaaagtaccatgtgaaagcacatactttacataatgttatctgaaatgaaaa

SEQ ID NO: 182725 - DNA, 74 bp, Homo sapiens
gtgaaagcacatactttacataatgttatctgaaatgaaaaagagtttgcaattagagtaagtaaatacaagaa

SEQ ID NO: 182726 - DNA, 72 bp, Homo sapiens
tttacataatgttatctgaaatgaaaaagagtttgcaattagagtaagtaaatacaagaatggtgttaccag

SEQ ID NO: 182727 - DNA, 71 bp, Homo sapiens
atgaaaaagagtttgcaattagagtaagtaaatacaagaatggtgttaccagtcagtttatgtttagggca

SEQ ID NO: 182728 - DNA, 71 bp, Homo sapiens
gtttgcaattagagtaagtaaatacaagaatggtgttaccagtcagtttatgtttagggcaagtgttgttc

SEQ ID NO: 182729 - DNA, 71 bp, Homo sapiens
aattagagtaagtaaatacaagaatggtgttaccagtcagtttatgtttagggcaagtgttgttctgtgcc

SEQ ID NO: 182730 - DNA, 73 bp, Homo sapiens
aagaatggtgttaccagtcagtttatgtttagggcaagtgttgttctgtgcctgaagtggcacaaaataatgt

SEQ ID NO: 182731 - DNA, 73 bp, Homo sapiens
agtcagtttatgtttagggcaagtgttgttctgtgcctgaagtggcacaaaataatgtttcaaggagagtttc

SEQ ID NO: 182732 - DNA, 72 bp, Homo sapiens
gtttatgtttagggcaagtgttgttctgtgcctgaagtggcacaaaataatgtttcaaggagagtttccaag

SEQ ID NO: 182733 - DNA, 77 bp, Homo sapiens
aagtgttgttctgtgcctgaagtggcacaaaataatgtttcaaggagagtttccaaggcacagcatgttgaagagta

SEQ ID NO: 182734 - DNA, 78 bp, Homo sapiens
ttgttctgtgcctgaagtggcacaaaataatgtttcaaggagagtttccaaggcacagcatgttgaagagtaaggaga

SEQ ID NO: 182735 - DNA, 75 bp, Homo sapiens
agtggcacaaaataatgtttcaaggagagtttccaaggcacagcatgttgaagagtaaggagaagggtcattcat

SEQ ID NO: 182736 - DNA, 74 bp, Homo sapiens
aaaataatgtttcaaggagagtttccaaggcacagcatgttgaagagtaaggagaagggtcattcattcaaata

SEQ ID NO: 182737 - DNA, 77 bp, Homo sapiens
tttcaaggagagtttccaaggcacagcatgttgaagagtaaggagaagggtcattcattcaaatacctctctggtca

SEQ ID NO: 182738 - DNA, 77 bp, Homo sapiens
agtttccaaggcacagcatgttgaagagtaaggagaagggtcattcattcaaatacctctctggtcagcagtcccaa

SEQ ID NO: 182739 - DNA, 78 bp, Homo sapiens
acagcatgttgaagagtaaggagaagggtcattcattcaaatacctctctggtcagcagtcccaagcctactacctca

SEQ ID NO: 182740 - DNA, 75 bp, Homo sapiens
aagagtaaggagaagggtcattcattcaaatacctctctggtcagcagtcccaagcctactacctcagaagccaa

SEQ ID NO: 182741 - DNA, 75 bp, Homo sapiens
taaggagaagggtcattcattcaaatacctctctggtcagcagtcccaagcctactacctcagaagccaataaac

SEQ ID NO: 182742 - DNA, 73 bp, Homo sapiens
aaatacctctctggtcagcagtcccaagcctactacctcagaagccaataaacccaaagtctgacaagttagc

SEQ ID NO: 182743 - DNA, 76 bp, Homo sapiens
tctggtcagcagtcccaagcctactacctcagaagccaataaacccaaagtctgacaagttagcctctgaattatg

SEQ ID NO: 182744 - DNA, 73 bp, Homo sapiens
tcccaagcctactacctcagaagccaataaacccaaagtctgacaagttagcctctgaattatgtgtggcttt

SEQ ID NO: 182745 - DNA, 73 bp, Homo sapiens
tactacctcagaagccaataaacccaaagtctgacaagttagcctctgaattatgtgtggcttttccttcgtg

SEQ ID NO: 182746 - DNA, 72 bp, Homo sapiens
aagccaataaacccaaagtctgacaagttagcctctgaattatgtgtggcttttccttcgtggctgtagctt

SEQ ID NO: 182747 - DNA, 73 bp, Homo sapiens
acaagttagcctctgaattatgtgtggcttttccttcgtggctgtagctttgctaaagaaagaccaacaagga

SEQ ID NO: 182748 - DNA, 75 bp, Homo sapiens
ttttccttcgtggctgtagctttgctaaagaaagaccaacaaggagttgatctggctcctgtcatcaagctttgt

SEQ ID NO: 182749 - DNA, 77 bp, Homo sapiens
gtggctgtagctttgctaaagaaagaccaacaaggagttgatctggctcctgtcatcaagctttgtttggaggccca

SEQ ID NO: 182750 - DNA, 77 bp, Homo sapiens
tgctaaagaaagaccaacaaggagttgatctggctcctgtcatcaagctttgtttggaggcccagtcgctggagtaa

SEQ ID NO: 182751 - DNA, 80 bp, Homo sapiens
aaggagttgatctggctcctgtcatcaagctttgtttggaggcccagtcgctggagtaatgaacattgcagaattggata

SEQ ID NO: 182752 - DNA, 79 bp, Homo sapiens
atctggctcctgtcatcaagctttgtttggaggcccagtcgctggagtaatgaacattgcagaattggataaagcctat

SEQ ID NO: 182753 - DNA, 79 bp, Homo sapiens
tcatcaagctttgtttggaggcccagtcgctggagtaatgaacattgcagaattggataaagcctattgacagaagctt

SEQ ID NO: 182754 - DNA, 80 bp, Homo sapiens
tttgtttggaggcccagtcgctggagtaatgaacattgcagaattggataaagcctattgacagaagctttcagctgtca

SEQ ID NO: 182755 - DNA, 83 bp, Homo sapiens
cccagtcgctggagtaatgaacattgcagaattggataaagcctattgacagaagctttcagctgtcacagtcatcactggaa

SEQ ID NO: 182756 - DNA, 85 bp, Homo sapiens
tggagtaatgaacattgcagaattggataaagcctattgacagaagctttcagctgtcacagtcatcactggaagtgacagactc

SEQ ID NO: 182757 - DNA, 81 bp, Homo sapiens
acagaagctttcagctgtcacagtcatcactggaagtgacagactccatcccatggatgccccaaactcctattctaaaga

SEQ ID NO: 182758 - DNA, 82 bp, Homo sapiens
agtcatcactggaagtgacagactccatcccatggatgccccaaactcctattctaaagatgtgctggaatgagacagccaa

SEQ ID NO: 182759 - DNA, 83 bp, Homo sapiens
gaagtgacagactccatcccatggatgccccaaactcctattctaaagatgtgctggaatgagacagccaagtgaatatgtga

SEQ ID NO: 182760 - DNA, 82 bp, Homo sapiens
atggatgccccaaactcctattctaaagatgtgctggaatgagacagccaagtgaatatgtgactacatcaaatattctaga

SEQ ID NO: 182761 - DNA, 79 bp, Homo sapiens
caaactcctattctaaagatgtgctggaatgagacagccaagtgaatatgtgactacatcaaatattctagaccccaaa

SEQ ID NO: 182762 - DNA, 80 bp, Homo sapiens
tattctaaagatgtgctggaatgagacagccaagtgaatatgtgactacatcaaatattctagaccccaaaaaattctca

SEQ ID NO: 182763 - DNA, 78 bp, Homo sapiens
atgtgctggaatgagacagccaagtgaatatgtgactacatcaaatattctagaccccaaaaaattctcagtaagaaa

SEQ ID NO: 182764 - DNA, 76 bp, Homo sapiens
aatgagacagccaagtgaatatgtgactacatcaaatattctagaccccaaaaaattctcagtaagaaatgctaac

SEQ ID NO: 182765 - DNA, 72 bp, Homo sapiens
ccaagtgaatatgtgactacatcaaatattctagaccccaaaaaattctcagtaagaaatgctaaccggatt

SEQ ID NO: 182766 - DNA, 72 bp, Homo sapiens
gtgactacatcaaatattctagaccccaaaaaattctcagtaagaaatgctaaccggattttatggccatta

SEQ ID NO: 182767 - DNA, 70 bp, Homo sapiens
caaatattctagaccccaaaaaattctcagtaagaaatgctaaccggattttatggccattagtattggc

SEQ ID NO: 182768 - DNA, 72 bp, Homo sapiens
ttctagaccccaaaaaattctcagtaagaaatgctaaccggattttatggccattagtattggccagtctgc

SEQ ID NO: 182769 - DNA, 72 bp, Homo sapiens
aaattctcagtaagaaatgctaaccggattttatggccattagtattggccagtctgctcctatggtaaaaa

SEQ ID NO: 182770 - DNA, 73 bp, Homo sapiens
taaccggattttatggccattagtattggccagtctgctcctatggtaaaaaccaggctattttctggatata

SEQ ID NO: 182771 - DNA, 75 bp, Homo sapiens
attttatggccattagtattggccagtctgctcctatggtaaaaaccaggctattttctggatatatatataaca

SEQ ID NO: 182772 - DNA, 73 bp, Homo sapiens
gctcctatggtaaaaaccaggctattttctggatatatatataacattctgaactaaacctagataataataa

SEQ ID NO: 182773 - DNA, 74 bp, Homo sapiens
accaggctattttctggatatatatataacattctgaactaaacctagataataataagttataggcctgctat

SEQ ID NO: 182774 - DNA, 75 bp, Homo sapiens
gctattttctggatatatatataacattctgaactaaacctagataataataagttataggcctgctattactat

SEQ ID NO: 182775 - DNA, 76 bp, Homo sapiens
tatatataacattctgaactaaacctagataataataagttataggcctgctattactattttatccagatatcca

SEQ ID NO: 182776 - DNA, 77 bp, Homo sapiens
cattctgaactaaacctagataataataagttataggcctgctattactattttatccagatatccactgctctcca

SEQ ID NO: 182777 - DNA, 76 bp, Homo sapiens
ctaaacctagataataataagttataggcctgctattactattttatccagatatccactgctctccaatatagaa

SEQ ID NO: 182778 - DNA, 77 bp, Homo sapiens
gataataataagttataggcctgctattactattttatccagatatccactgctctccaatatagaaattattattc

SEQ ID NO: 182779 - DNA, 77 bp, Homo sapiens
taagttataggcctgctattactattttatccagatatccactgctctccaatatagaaattattattctaattgtc

SEQ ID NO: 182780 - DNA, 78 bp, Homo sapiens
gcctgctattactattttatccagatatccactgctctccaatatagaaattattattctaattgtcttaatgtatta

SEQ ID NO: 182781 - DNA, 75 bp, Homo sapiens
ctattttatccagatatccactgctctccaatatagaaattattattctaattgtcttaatgtattaagttgact

SEQ ID NO: 182782 - DNA, 76 bp, Homo sapiens
ccagatatccactgctctccaatatagaaattattattctaattgtcttaatgtattaagttgacttttcatatcc

SEQ ID NO: 182783 - DNA, 74 bp, Homo sapiens
tgctctccaatatagaaattattattctaattgtcttaatgtattaagttgacttttcatatccttttcatacc

SEQ ID NO: 182784 - DNA, 69 bp, Homo sapiens
agaaattattattctaattgtcttaatgtattaagttgacttttcatatccttttcatacctggtaaaa

SEQ ID NO: 182785 - DNA, 70 bp, Homo sapiens
tcttaatgtattaagttgacttttcatatccttttcatacctggtaaaattctactattctactttttgc

SEQ ID NO: 182786 - DNA, 69 bp, Homo sapiens
gtattaagttgacttttcatatccttttcatacctggtaaaattctactattctactttttgctttgtg

SEQ ID NO: 182787 - DNA, 71 bp, Homo sapiens
tgacttttcatatccttttcatacctggtaaaattctactattctactttttgctttgtgtgtaagttatc

SEQ ID NO: 182788 - DNA, 69 bp, Homo sapiens
tccttttcatacctggtaaaattctactattctactttttgctttgtgtgtaagttatctaaatgtttg

SEQ ID NO: 182789 - DNA, 69 bp, Homo sapiens
acctggtaaaattctactattctactttttgctttgtgtgtaagttatctaaatgtttgtattagccac

SEQ ID NO: 182790 - DNA, 75 bp, Homo sapiens
taagttatctaaatgtttgtattagccacttttccctgcagtcacactagccaaagataaagatgaggacagaaa

SEQ ID NO: 182791 - DNA, 73 bp, Homo sapiens
aatgtttgtattagccacttttccctgcagtcacactagccaaagataaagatgaggacagaaaatacgtctt

SEQ ID NO: 182792 - DNA, 75 bp, Homo sapiens
tttccctgcagtcacactagccaaagataaagatgaggacagaaaatacgtctttcttacttcggatcctctata

SEQ ID NO: 182793 - DNA, 74 bp, Homo sapiens
agtcacactagccaaagataaagatgaggacagaaaatacgtctttcttacttcggatcctctatagcaagagt

SEQ ID NO: 182794 - DNA, 72 bp, Homo sapiens
atgaggacagaaaatacgtctttcttacttcggatcctctatagcaagagttggcaggcttttcctataaaa

SEQ ID NO: 182795 - DNA, 71 bp, Homo sapiens
aaaatacgtctttcttacttcggatcctctatagcaagagttggcaggcttttcctataaaagactgaata

SEQ ID NO: 182796 - DNA, 71 bp, Homo sapiens
tttcttacttcggatcctctatagcaagagttggcaggcttttcctataaaagactgaatagtaaatgttt

SEQ ID NO: 182797 - DNA, 72 bp, Homo sapiens
tacttcggatcctctatagcaagagttggcaggcttttcctataaaagactgaatagtaaatgttttagcct

SEQ ID NO: 182798 - DNA, 75 bp, Homo sapiens
ctctatagcaagagttggcaggcttttcctataaaagactgaatagtaaatgttttagccttcacaggctgttca

SEQ ID NO: 182799 - DNA, 73 bp, Homo sapiens
aagagttggcaggcttttcctataaaagactgaatagtaaatgttttagccttcacaggctgttcagtctctg

SEQ ID NO: 182800 - DNA, 76 bp, Homo sapiens
cttttcctataaaagactgaatagtaaatgttttagccttcacaggctgttcagtctctgtcagagctattccaga

SEQ ID NO: 182801 - DNA, 79 bp, Homo sapiens
tataaaagactgaatagtaaatgttttagccttcacaggctgttcagtctctgtcagagctattccagagctcctcaac

SEQ ID NO: 182802 - DNA, 82 bp, Homo sapiens
agtaaatgttttagccttcacaggctgttcagtctctgtcagagctattccagagctcctcaactctactcttgtagcatga

SEQ ID NO: 182803 - DNA, 86 bp, Homo sapiens
acaggctgttcagtctctgtcagagctattccagagctcctcaactctactcttgtagcatgaaagcagtcgcagacagtatgtaa

SEQ ID NO: 182804 - DNA, 84 bp, Homo sapiens
agagctattccagagctcctcaactctactcttgtagcatgaaagcagtcgcagacagtatgtaaacaagtggcatggctgtgt

SEQ ID NO: 182805 - DNA, 83 bp, Homo sapiens
cagagctcctcaactctactcttgtagcatgaaagcagtcgcagacagtatgtaaacaagtggcatggctgtgttcaataaaa

SEQ ID NO: 182806 - DNA, 80 bp, Homo sapiens
tcctcaactctactcttgtagcatgaaagcagtcgcagacagtatgtaaacaagtggcatggctgtgttcaataaaactt

SEQ ID NO: 182807 - DNA, 74 bp, Homo sapiens
ttatttacaaaaacaagcagtgtaccagatttggttcacaggctgtttttgctgatccctgctccatgggtact

SEQ ID NO: 182808 - DNA, 77 bp, Homo sapiens
aaacaagcagtgtaccagatttggttcacaggctgtttttgctgatccctgctccatgggtacttagtacagcaata

SEQ ID NO: 182809 - DNA, 78 bp, Homo sapiens
tgtaccagatttggttcacaggctgtttttgctgatccctgctccatgggtacttagtacagcaatatcacacttaaa

SEQ ID NO: 182810 - DNA, 76 bp, Homo sapiens
acaggctgtttttgctgatccctgctccatgggtacttagtacagcaatatcacacttaaagatgttagggatttg

SEQ ID NO: 182811 - DNA, 75 bp, Homo sapiens
tttttgctgatccctgctccatgggtacttagtacagcaatatcacacttaaagatgttagggatttggtgaact

SEQ ID NO: 182812 - DNA, 76 bp, Homo sapiens
gctgatccctgctccatgggtacttagtacagcaatatcacacttaaagatgttagggatttggtgaactttgtta

SEQ ID NO: 182813 - DNA, 74 bp, Homo sapiens
atccctgctccatgggtacttagtacagcaatatcacacttaaagatgttagggatttggtgaactttgttaca

SEQ ID NO: 182814 - DNA, 76 bp, Homo sapiens
tgctccatgggtacttagtacagcaatatcacacttaaagatgttagggatttggtgaactttgttacatcagatt

SEQ ID NO: 182815 - DNA, 74 bp, Homo sapiens
atgggtacttagtacagcaatatcacacttaaagatgttagggatttggtgaactttgttacatcagatttctc

SEQ ID NO: 182816 - DNA, 75 bp, Homo sapiens
cttagtacagcaatatcacacttaaagatgttagggatttggtgaactttgttacatcagatttctctgatttag

SEQ ID NO: 182817 - DNA, 74 bp, Homo sapiens
agcaatatcacacttaaagatgttagggatttggtgaactttgttacatcagatttctctgatttagtttatcc

SEQ ID NO: 182818 - DNA, 72 bp, Homo sapiens
aaagatgttagggatttggtgaactttgttacatcagatttctctgatttagtttatcctattactggtcta

SEQ ID NO: 182819 - DNA, 71 bp, Homo sapiens
tgttagggatttggtgaactttgttacatcagatttctctgatttagtttatcctattactggtctatttt

SEQ ID NO: 182820 - DNA, 71 bp, Homo sapiens
gttacatcagatttctctgatttagtttatcctattactggtctatttttgtttgaaaacacaattttggc

SEQ ID NO: 182821 - DNA, 65 bp, Homo sapiens
tagtttatcctattactggtctatttttgtttgaaaacacaattttggcttttttgtttttgcgg

SEQ ID NO: 182822 - DNA, 64 bp, Homo sapiens
attactggtctatttttgtttgaaaacacaattttggcttttttgtttttgcggtcgtggaggg

SEQ ID NO: 182823 - DNA, 65 bp, Homo sapiens
gtctatttttgtttgaaaacacaattttggcttttttgtttttgcggtcgtggaggggaagctta

SEQ ID NO: 182824 - DNA, 66 bp, Homo sapiens
tttgaaaacacaattttggcttttttgtttttgcggtcgtggaggggaagcttaactccttcacta

SEQ ID NO: 182825 - DNA, 67 bp, Homo sapiens
aattttggcttttttgtttttgcggtcgtggaggggaagcttaactccttcactagctatgcagttt

SEQ ID NO: 182826 - DNA, 69 bp, Homo sapiens
tttttgtttttgcggtcgtggaggggaagcttaactccttcactagctatgcagttttccattccttaa

SEQ ID NO: 182827 - DNA, 71 bp, Homo sapiens
tttttgcggtcgtggaggggaagcttaactccttcactagctatgcagttttccattccttaaagacactc

SEQ ID NO: 182828 - DNA, 74 bp, Homo sapiens
aggggaagcttaactccttcactagctatgcagttttccattccttaaagacactctgtcctatggcagctaaa

SEQ ID NO: 182829 - DNA, 75 bp, Homo sapiens
ttaactccttcactagctatgcagttttccattccttaaagacactctgtcctatggcagctaaacaattttatc

SEQ ID NO: 182830 - DNA, 77 bp, Homo sapiens
ttcactagctatgcagttttccattccttaaagacactctgtcctatggcagctaaacaattttatcctgcaaaata

SEQ ID NO: 182831 - DNA, 75 bp, Homo sapiens
attccttaaagacactctgtcctatggcagctaaacaattttatcctgcaaaatagcagtgttctgaccttgttg

SEQ ID NO: 182832 - DNA, 76 bp, Homo sapiens
taaagacactctgtcctatggcagctaaacaattttatcctgcaaaatagcagtgttctgaccttgttgtccaagt

SEQ ID NO: 182833 - DNA, 77 bp, Homo sapiens
tgtcctatggcagctaaacaattttatcctgcaaaatagcagtgttctgaccttgttgtccaagtttctcagagtta

SEQ ID NO: 182834 - DNA, 75 bp, Homo sapiens
taaacaattttatcctgcaaaatagcagtgttctgaccttgttgtccaagtttctcagagttactgtggaagaca

SEQ ID NO: 182835 - DNA, 74 bp, Homo sapiens
aattttatcctgcaaaatagcagtgttctgaccttgttgtccaagtttctcagagttactgtggaagacacaat

SEQ ID NO: 182836 - DNA, 77 bp, Homo sapiens
ttctgaccttgttgtccaagtttctcagagttactgtggaagacacaattgtgatatattatcctgaagagtgagtt

SEQ ID NO: 182837 - DNA, 76 bp, Homo sapiens
accttgttgtccaagtttctcagagttactgtggaagacacaattgtgatatattatcctgaagagtgagttttca

SEQ ID NO: 182838 - DNA, 78 bp, Homo sapiens
agtttctcagagttactgtggaagacacaattgtgatatattatcctgaagagtgagttttcatgccaattatattgt

SEQ ID NO: 182839 - DNA, 81 bp, Homo sapiens
cagagttactgtggaagacacaattgtgatatattatcctgaagagtgagttttcatgccaattatattgttgaatgtata

SEQ ID NO: 182840 - DNA, 82 bp, Homo sapiens
caattgtgatatattatcctgaagagtgagttttcatgccaattatattgttgaatgtatacaaatgaaagtctcatcaata

SEQ ID NO: 182841 - DNA, 79 bp, Homo sapiens
atattatcctgaagagtgagttttcatgccaattatattgttgaatgtatacaaatgaaagtctcatcaataaaatata

SEQ ID NO: 182842 - DNA, 77 bp, Homo sapiens
gtgagttttcatgccaattatattgttgaatgtatacaaatgaaagtctcatcaataaaatataataaattactctc

SEQ ID NO: 182843 - DNA, 76 bp, Homo sapiens
tattgttgaatgtatacaaatgaaagtctcatcaataaaatataataaattactctctaccagatagttcctttga

SEQ ID NO: 182844 - DNA, 78 bp, Homo sapiens
tgtatacaaatgaaagtctcatcaataaaatataataaattactctctaccagatagttcctttgatatggcaacatc

SEQ ID NO: 182845 - DNA, 77 bp, Homo sapiens
caaatgaaagtctcatcaataaaatataataaattactctctaccagatagttcctttgatatggcaacatcttaga

SEQ ID NO: 182846 - DNA, 76 bp, Homo sapiens
gtctcatcaataaaatataataaattactctctaccagatagttcctttgatatggcaacatcttagaaaaggcag

SEQ ID NO: 182847 - DNA, 73 bp, Homo sapiens
tataataaattactctctaccagatagttcctttgatatggcaacatcttagaaaaggcagtttgagaaaagt

SEQ ID NO: 182848 - DNA, 73 bp, Homo sapiens
attactctctaccagatagttcctttgatatggcaacatcttagaaaaggcagtttgagaaaagttacaaaca

SEQ ID NO: 182849 - DNA, 75 bp, Homo sapiens
tctaccagatagttcctttgatatggcaacatcttagaaaaggcagtttgagaaaagttacaaacagaattctca

SEQ ID NO: 182850 - DNA, 74 bp, Homo sapiens
gcaacatcttagaaaaggcagtttgagaaaagttacaaacagaattctcaagccaccacaggaaggctatctaa

SEQ ID NO: 182851 - DNA, 71 bp, Homo sapiens
atcttagaaaaggcagtttgagaaaagttacaaacagaattctcaagccaccacaggaaggctatctaaag

SEQ ID NO: 182852 - DNA, 74 bp, Homo sapiens
agaattctcaagccaccacaggaaggctatctaaaggtcactcgtttagcaaatgcaactcattgtttcaaaaa

SEQ ID NO: 182853 - DNA, 73 bp, Homo sapiens
aagccaccacaggaaggctatctaaaggtcactcgtttagcaaatgcaactcattgtttcaaaaattcaggta

SEQ ID NO: 182854 - DNA, 72 bp, Homo sapiens
cacaggaaggctatctaaaggtcactcgtttagcaaatgcaactcattgtttcaaaaattcaggtattttaa

SEQ ID NO: 182855 - DNA, 72 bp, Homo sapiens
gctatctaaaggtcactcgtttagcaaatgcaactcattgtttcaaaaattcaggtattttaaatggataag

SEQ ID NO: 182856 - DNA, 69 bp, Homo sapiens
ggtcactcgtttagcaaatgcaactcattgtttcaaaaattcaggtattttaaatggataagttttaaa

SEQ ID NO: 182857 - DNA, 71 bp, Homo sapiens
gcaaatgcaactcattgtttcaaaaattcaggtattttaaatggataagttttaaatatctggaagttcca

SEQ ID NO: 182858 - DNA, 68 bp, Homo sapiens
caactcattgtttcaaaaattcaggtattttaaatggataagttttaaatatctggaagttccagttc

SEQ ID NO: 182859 - DNA, 68 bp, Homo sapiens
ttcaaaaattcaggtattttaaatggataagttttaaatatctggaagttccagttctataaacagaa

SEQ ID NO: 182860 - DNA, 71 bp, Homo sapiens
tattttaaatggataagttttaaatatctggaagttccagttctataaacagaaatacaggcaggactggc

SEQ ID NO: 182861 - DNA, 74 bp, Homo sapiens
taaatggataagttttaaatatctggaagttccagttctataaacagaaatacaggcaggactggctcattcag

SEQ ID NO: 182862 - DNA, 74 bp, Homo sapiens
agttttaaatatctggaagttccagttctataaacagaaatacaggcaggactggctcattcaggagggcagcg

SEQ ID NO: 182863 - DNA, 74 bp, Homo sapiens
gaagttccagttctataaacagaaatacaggcaggactggctcattcaggagggcagcggagagtgggggttaa

SEQ ID NO: 182864 - DNA, 75 bp, Homo sapiens
agttctataaacagaaatacaggcaggactggctcattcaggagggcagcggagagtgggggttaacatcacaat

SEQ ID NO: 182865 - DNA, 75 bp, Homo sapiens
taaacagaaatacaggcaggactggctcattcaggagggcagcggagagtgggggttaacatcacaattgccccc

SEQ ID NO: 182866 - DNA, 73 bp, Homo sapiens
gcaggactggctcattcaggagggcagcggagagtgggggttaacatcacaattgccccccaaaaatacctaa

SEQ ID NO: 182867 - DNA, 72 bp, Homo sapiens
ctcattcaggagggcagcggagagtgggggttaacatcacaattgccccccaaaaatacctaatcaaatgaa

SEQ ID NO: 182868 - DNA, 69 bp, Homo sapiens
aggagggcagcggagagtgggggttaacatcacaattgccccccaaaaatacctaatcaaatgaaacaa

SEQ ID NO: 182869 - DNA, 70 bp, Homo sapiens
agagtgggggttaacatcacaattgccccccaaaaatacctaatcaaatgaaacaatcacctgtgcttta

SEQ ID NO: 182870 - DNA, 74 bp, Homo sapiens
ttaacatcacaattgccccccaaaaatacctaatcaaatgaaacaatcacctgtgctttatggccaatttgatg

SEQ ID NO: 182871 - DNA, 73 bp, Homo sapiens
atcacaattgccccccaaaaatacctaatcaaatgaaacaatcacctgtgctttatggccaatttgatgttta

SEQ ID NO: 182872 - DNA, 74 bp, Homo sapiens
cccaaaaatacctaatcaaatgaaacaatcacctgtgctttatggccaatttgatgtttatgaagatcagtatt

SEQ ID NO: 182873 - DNA, 76 bp, Homo sapiens
cctaatcaaatgaaacaatcacctgtgctttatggccaatttgatgtttatgaagatcagtattttgattattacc

SEQ ID NO: 182874 - DNA, 77 bp, Homo sapiens
tgaaacaatcacctgtgctttatggccaatttgatgtttatgaagatcagtattttgattattacctagatgaaatt

SEQ ID NO: 182875 - DNA, 77 bp, Homo sapiens
tcacctgtgctttatggccaatttgatgtttatgaagatcagtattttgattattacctagatgaaatttttcacac

SEQ ID NO: 182876 - DNA, 76 bp, Homo sapiens
tggccaatttgatgtttatgaagatcagtattttgattattacctagatgaaatttttcacactagactctgtaac

SEQ ID NO: 182877 - DNA, 75 bp, Homo sapiens
gatgtttatgaagatcagtattttgattattacctagatgaaatttttcacactagactctgtaaccaaattgat

SEQ ID NO: 182878 - DNA, 77 bp, Homo sapiens
gaagatcagtattttgattattacctagatgaaatttttcacactagactctgtaaccaaattgattcttgcataga

SEQ ID NO: 182879 - DNA, 76 bp, Homo sapiens
cagtattttgattattacctagatgaaatttttcacactagactctgtaaccaaattgattcttgcatagacctca

SEQ ID NO: 182880 - DNA, 73 bp, Homo sapiens
tacctagatgaaatttttcacactagactctgtaaccaaattgattcttgcatagacctcaaaacaaaaagga

SEQ ID NO: 182881 - DNA, 73 bp, Homo sapiens
tgaaatttttcacactagactctgtaaccaaattgattcttgcatagacctcaaaacaaaaaggaagatcaag

SEQ ID NO: 182882 - DNA, 75 bp, Homo sapiens
cacactagactctgtaaccaaattgattcttgcatagacctcaaaacaaaaaggaagatcaagtattgatttaga

SEQ ID NO: 182883 - DNA, 73 bp, Homo sapiens
gactctgtaaccaaattgattcttgcatagacctcaaaacaaaaaggaagatcaagtattgatttagaaaata

SEQ ID NO: 182884 - DNA, 72 bp, Homo sapiens
ccaaattgattcttgcatagacctcaaaacaaaaaggaagatcaagtattgatttagaaaatatgtacttgt

SEQ ID NO: 182885 - DNA, 71 bp, Homo sapiens
gcatagacctcaaaacaaaaaggaagatcaagtattgatttagaaaatatgtacttgtttcttttgaacac

SEQ ID NO: 182886 - DNA, 69 bp, Homo sapiens
ctcaaaacaaaaaggaagatcaagtattgatttagaaaatatgtacttgtttcttttgaacacttattc

SEQ ID NO: 182887 - DNA, 70 bp, Homo sapiens
aaggaagatcaagtattgatttagaaaatatgtacttgtttcttttgaacacttattctaataaacaaca

SEQ ID NO: 182888 - DNA, 69 bp, Homo sapiens
atcaagtattgatttagaaaatatgtacttgtttcttttgaacacttattctaataaacaacaaaacta

SEQ ID NO: 182889 - DNA, 67 bp, Homo sapiens
agaaaatatgtacttgtttcttttgaacacttattctaataaacaacaaaactaaaccattagctaa

SEQ ID NO: 182890 - DNA, 65 bp, Homo sapiens
gtacttgtttcttttgaacacttattctaataaacaacaaaactaaaccattagctaaaaagtaa

SEQ ID NO: 182891 - DNA, 65 bp, Homo sapiens
aacacttattctaataaacaacaaaactaaaccattagctaaaaagtaaaatcaaaggttgaaga

SEQ ID NO: 182892 - DNA, 66 bp, Homo sapiens
aaacaacaaaactaaaccattagctaaaaagtaaaatcaaaggttgaagaaatttgaagatgacag

SEQ ID NO: 182893 - DNA, 68 bp, Homo sapiens
actaaaccattagctaaaaagtaaaatcaaaggttgaagaaatttgaagatgacagtagaatttgtcc

SEQ ID NO: 182894 - DNA, 67 bp, Homo sapiens
accattagctaaaaagtaaaatcaaaggttgaagaaatttgaagatgacagtagaatttgtcctttt

SEQ ID NO: 182895 - DNA, 67 bp, Homo sapiens
aagtaaaatcaaaggttgaagaaatttgaagatgacagtagaatttgtccttttttgtttataaaga

SEQ ID NO: 182896 - DNA, 70 bp, Homo sapiens
aggttgaagaaatttgaagatgacagtagaatttgtccttttttgtttataaagaaagctattctctggc

SEQ ID NO: 182897 - DNA, 70 bp, Homo sapiens
agaaatttgaagatgacagtagaatttgtccttttttgtttataaagaaagctattctctggccgggtgc

SEQ ID NO: 182898 - DNA, 64 bp, Homo sapiens
aaaaacaaaactattctccaaaagaatctcccattaaaaaacaataataaggtaattgtcaaaa

SEQ ID NO: 182899 - DNA, 66 bp, Homo sapiens
caaaactattctccaaaagaatctcccattaaaaaacaataataaggtaattgtcaaaaacaaaga

SEQ ID NO: 182900 - DNA, 66 bp, Homo sapiens
ctccaaaagaatctcccattaaaaaacaataataaggtaattgtcaaaaacaaagaataaacagga

SEQ ID NO: 182901 - DNA, 65 bp, Homo sapiens
atctcccattaaaaaacaataataaggtaattgtcaaaaacaaagaataaacaggaagaaaggaa

SEQ ID NO: 182902 - DNA, 70 bp, Homo sapiens
aggaaaaaaaaaccaccatgattccaaaagatgggatccttcaagacagtttctcacgaaagttatatgc

SEQ ID NO: 182903 - DNA, 73 bp, Homo sapiens
aaaaaaaccaccatgattccaaaagatgggatccttcaagacagtttctcacgaaagttatatgccagcatat

SEQ ID NO: 182904 - DNA, 74 bp, Homo sapiens
aaaaaccaccatgattccaaaagatgggatccttcaagacagtttctcacgaaagttatatgccagcatattgg

SEQ ID NO: 182905 - DNA, 75 bp, Homo sapiens
accatgattccaaaagatgggatccttcaagacagtttctcacgaaagttatatgccagcatattgggaaaaaga

SEQ ID NO: 182906 - DNA, 76 bp, Homo sapiens
atgattccaaaagatgggatccttcaagacagtttctcacgaaagttatatgccagcatattgggaaaaagagtga

SEQ ID NO: 182907 - DNA, 75 bp, Homo sapiens
attccaaaagatgggatccttcaagacagtttctcacgaaagttatatgccagcatattgggaaaaagagtgatg

SEQ ID NO: 182908 - DNA, 76 bp, Homo sapiens
atccttcaagacagtttctcacgaaagttatatgccagcatattgggaaaaagagtgatgtcaccaagaataagaa

SEQ ID NO: 182909 - DNA, 75 bp, Homo sapiens
aagacagtttctcacgaaagttatatgccagcatattgggaaaaagagtgatgtcaccaagaataagaatgtggg

SEQ ID NO: 182910 - DNA, 78 bp, Homo sapiens
tttctcacgaaagttatatgccagcatattgggaaaaagagtgatgtcaccaagaataagaatgtgggtgagaccata

SEQ ID NO: 182911 - DNA, 76 bp, Homo sapiens
acgaaagttatatgccagcatattgggaaaaagagtgatgtcaccaagaataagaatgtgggtgagaccatatagt

SEQ ID NO: 182912 - DNA, 77 bp, Homo sapiens
agttatatgccagcatattgggaaaaagagtgatgtcaccaagaataagaatgtgggtgagaccatatagtttatct

SEQ ID NO: 182913 - DNA, 73 bp, Homo sapiens
ggaaaaagagtgatgtcaccaagaataagaatgtgggtgagaccatatagtttatcttgtttttttgtgtgtg

SEQ ID NO: 182914 - DNA, 72 bp, Homo sapiens
gtcaccaagaataagaatgtgggtgagaccatatagtttatcttgtttttttgtgtgtggtgaaaatattgg

SEQ ID NO: 182915 - DNA, 69 bp, Homo sapiens
gggtgagaccatatagtttatcttgtttttttgtgtgtggtgaaaatattggtaataactgacctaacg

SEQ ID NO: 182916 - DNA, 71 bp, Homo sapiens
tatagtttatcttgtttttttgtgtgtggtgaaaatattggtaataactgacctaacgtgacattccagtg

SEQ ID NO: 182917 - DNA, 70 bp, Homo sapiens
tttatcttgtttttttgtgtgtggtgaaaatattggtaataactgacctaacgtgacattccagtgggga

SEQ ID NO: 182918 - DNA, 70 bp, Homo sapiens
ttttgtgtgtggtgaaaatattggtaataactgacctaacgtgacattccagtggggagaaaaacaacca

SEQ ID NO: 182919 - DNA, 72 bp, Homo sapiens
tgaaaatattggtaataactgacctaacgtgacattccagtggggagaaaaacaaccatctccctcaacata

SEQ ID NO: 182920 - DNA, 74 bp, Homo sapiens
tattggtaataactgacctaacgtgacattccagtggggagaaaaacaaccatctccctcaacatatatcagaa

SEQ ID NO: 182921 - DNA, 74 bp, Homo sapiens
aactgacctaacgtgacattccagtggggagaaaaacaaccatctccctcaacatatatcagaattctttcagc

SEQ ID NO: 182922 - DNA, 78 bp, Homo sapiens
acattccagtggggagaaaaacaaccatctccctcaacatatatcagaattctttcagccttctcaagatgctctgaa

SEQ ID NO: 182923 - DNA, 78 bp, Homo sapiens
ggggagaaaaacaaccatctccctcaacatatatcagaattctttcagccttctcaagatgctctgaagagaaataga

SEQ ID NO: 182924 - DNA, 76 bp, Homo sapiens
aaaaacaaccatctccctcaacatatatcagaattctttcagccttctcaagatgctctgaagagaaatagaaaat

SEQ ID NO: 182925 - DNA, 82 bp, Homo sapiens
tatatcagaattctttcagccttctcaagatgctctgaagagaaatagaaaattacatgaacaagaatgtcagaaactgcaa

SEQ ID NO: 182926 - DNA, 80 bp, Homo sapiens
agaattctttcagccttctcaagatgctctgaagagaaatagaaaattacatgaacaagaatgtcagaaactgcaaatgc

SEQ ID NO: 182927 - DNA, 80 bp, Homo sapiens
gctctgaagagaaatagaaaattacatgaacaagaatgtcagaaactgcaaatgctgcagtaggatcagaaagtaatgtt

SEQ ID NO: 182928 - DNA, 80 bp, Homo sapiens
gaaatagaaaattacatgaacaagaatgtcagaaactgcaaatgctgcagtaggatcagaaagtaatgtttcatcagtaa

SEQ ID NO: 182929 - DNA, 81 bp, Homo sapiens
aaattacatgaacaagaatgtcagaaactgcaaatgctgcagtaggatcagaaagtaatgtttcatcagtaacatattatg

SEQ ID NO: 182930 - DNA, 80 bp, Homo sapiens
atgaacaagaatgtcagaaactgcaaatgctgcagtaggatcagaaagtaatgtttcatcagtaacatattatgtaaaaa

SEQ ID NO: 182931 - DNA, 79 bp, Homo sapiens
gtcagaaactgcaaatgctgcagtaggatcagaaagtaatgtttcatcagtaacatattatgtaaaaaaacactgaatc

SEQ ID NO: 182932 - DNA, 73 bp, Homo sapiens
gcagtaggatcagaaagtaatgtttcatcagtaacatattatgtaaaaaaacactgaatccacaaaaacctgt

SEQ ID NO: 182933 - DNA, 72 bp, Homo sapiens
cagaaagtaatgtttcatcagtaacatattatgtaaaaaaacactgaatccacaaaaacctgttttcagcca

SEQ ID NO: 182934 - DNA, 74 bp, Homo sapiens
agtaacatattatgtaaaaaaacactgaatccacaaaaacctgttttcagccattcacggcagcattattcaca

SEQ ID NO: 182935 - DNA, 77 bp, Homo sapiens
attattcacagcagccaaaaggtgaaaacaatccaagtgtccatcagccaatgaacagaaaggcaaattgtggtata

SEQ ID NO: 182936 - DNA, 77 bp, Homo sapiens
agcagccaaaaggtgaaaacaatccaagtgtccatcagccaatgaacagaaaggcaaattgtggtatatccacacaa

SEQ ID NO: 182937 - DNA, 75 bp, Homo sapiens
aaaaggtgaaaacaatccaagtgtccatcagccaatgaacagaaaggcaaattgtggtatatccacacaatggaa

SEQ ID NO: 182938 - DNA, 74 bp, Homo sapiens
tggaatattactcagacataaaaactaatgaagttctggtacatggtacaacataagtaagtcctggaaataca

SEQ ID NO: 182939 - DNA, 72 bp, Homo sapiens
ctcagacataaaaactaatgaagttctggtacatggtacaacataagtaagtcctggaaatacaatactaag

SEQ ID NO: 182940 - DNA, 72 bp, Homo sapiens
aaaactaatgaagttctggtacatggtacaacataagtaagtcctggaaatacaatactaagtgaaagatgc

SEQ ID NO: 182941 - DNA, 73 bp, Homo sapiens
aagttctggtacatggtacaacataagtaagtcctggaaatacaatactaagtgaaagatgccaagcacaaaa

SEQ ID NO: 182942 - DNA, 77 bp, Homo sapiens
gtacatggtacaacataagtaagtcctggaaatacaatactaagtgaaagatgccaagcacaaaacatcacatatta

SEQ ID NO: 182943 - DNA, 78 bp, Homo sapiens
gtacaacataagtaagtcctggaaatacaatactaagtgaaagatgccaagcacaaaacatcacatattatatgattc

SEQ ID NO: 182944 - DNA, 81 bp, Homo sapiens
agtcctggaaatacaatactaagtgaaagatgccaagcacaaaacatcacatattatatgattccattcatatcaattgtc

SEQ ID NO: 182945 - DNA, 83 bp, Homo sapiens
tacaatactaagtgaaagatgccaagcacaaaacatcacatattatatgattccattcatatcaattgtctagaacaggcaac

SEQ ID NO: 182946 - DNA, 85 bp, Homo sapiens
taagtgaaagatgccaagcacaaaacatcacatattatatgattccattcatatcaattgtctagaacaggcaactgtacagata

SEQ ID NO: 182947 - DNA, 84 bp, Homo sapiens
agatgccaagcacaaaacatcacatattatatgattccattcatatcaattgtctagaacaggcaactgtacagatagaaagta

SEQ ID NO: 182948 - DNA, 83 bp, Homo sapiens
gcacaaaacatcacatattatatgattccattcatatcaattgtctagaacaggcaactgtacagatagaaagtagattactg

SEQ ID NO: 182949 - DNA, 81 bp, Homo sapiens
atattatatgattccattcatatcaattgtctagaacaggcaactgtacagatagaaagtagattactggttgcctgtgat

SEQ ID NO: 182950 - DNA, 83 bp, Homo sapiens
tatatgattccattcatatcaattgtctagaacaggcaactgtacagatagaaagtagattactggttgcctgtgattgccta

SEQ ID NO: 182951 - DNA, 79 bp, Homo sapiens
attccattcatatcaattgtctagaacaggcaactgtacagatagaaagtagattactggttgcctgtgattgcctagg

SEQ ID NO: 182952 - DNA, 79 bp, Homo sapiens
attcatatcaattgtctagaacaggcaactgtacagatagaaagtagattactggttgcctgtgattgcctagggctag

SEQ ID NO: 182953 - DNA, 79 bp, Homo sapiens
ttcatatcaattgtctagaacaggcaactgtacagatagaaagtagattactggttgcctgtgattgcctagggctagg

SEQ ID NO: 182954 - DNA, 77 bp, Homo sapiens
atcaattgtctagaacaggcaactgtacagatagaaagtagattactggttgcctgtgattgcctagggctagggga

SEQ ID NO: 182955 - DNA, 77 bp, Homo sapiens
tagaacaggcaactgtacagatagaaagtagattactggttgcctgtgattgcctagggctaggggagataagagaa

SEQ ID NO: 182956 - DNA, 75 bp, Homo sapiens
aacaggcaactgtacagatagaaagtagattactggttgcctgtgattgcctagggctaggggagataagagaat

SEQ ID NO: 182957 - DNA, 75 bp, Homo sapiens
aactgtacagatagaaagtagattactggttgcctgtgattgcctagggctaggggagataagagaattgagagt

SEQ ID NO: 182958 - DNA, 79 bp, Homo sapiens
tacagatagaaagtagattactggttgcctgtgattgcctagggctaggggagataagagaattgagagttgatagcta

SEQ ID NO: 182959 - DNA, 77 bp, Homo sapiens
gatagaaagtagattactggttgcctgtgattgcctagggctaggggagataagagaattgagagttgatagctaaa

SEQ ID NO: 182960 - DNA, 76 bp, Homo sapiens
atagaaagtagattactggttgcctgtgattgcctagggctaggggagataagagaattgagagttgatagctaaa

SEQ ID NO: 182961 - DNA, 74 bp, Homo sapiens
ttactggttgcctgtgattgcctagggctaggggagataagagaattgagagttgatagctaaagggtatgggt

SEQ ID NO: 182962 - DNA, 72 bp, Homo sapiens
cctgtgattgcctagggctaggggagataagagaattgagagttgatagctaaagggtatgggtttattttg

SEQ ID NO: 182963 - DNA, 71 bp, Homo sapiens
tagggctaggggagataagagaattgagagttgatagctaaagggtatgggtttattttggggccagtgaa

SEQ ID NO: 182964 - DNA, 72 bp, Homo sapiens
gagataagagaattgagagttgatagctaaagggtatgggtttattttggggccagtgaaattgttccagta

SEQ ID NO: 182965 - DNA, 71 bp, Homo sapiens
aattgagagttgatagctaaagggtatgggtttattttggggccagtgaaattgttccagtatgtattgtg

SEQ ID NO: 182966 - DNA, 70 bp, Homo sapiens
agttgatagctaaagggtatgggtttattttggggccagtgaaattgttccagtatgtattgtggggata

SEQ ID NO: 182967 - DNA, 72 bp, Homo sapiens
taaagggtatgggtttattttggggccagtgaaattgttccagtatgtattgtggggatagctgcacaattc

SEQ ID NO: 182968 - DNA, 74 bp, Homo sapiens
tttattttggggccagtgaaattgttccagtatgtattgtggggatagctgcacaattctggaatatactaaaa

SEQ ID NO: 182969 - DNA, 74 bp, Homo sapiens
aaattgttccagtatgtattgtggggatagctgcacaattctggaatatactaaaaaccactttagaccaggca

SEQ ID NO: 182970 - DNA, 63 bp, Homo sapiens
aggaagggaaagaaaaccactttaaatgggtgaactgtatttaaacaaagttgcattttaaaa

SEQ ID NO: 182971 - DNA, 64 bp, Homo sapiens
gggaaagaaaaccactttaaatgggtgaactgtatttaaacaaagttgcattttaaaagttaca

SEQ ID NO: 182972 - DNA, 71 bp, Homo sapiens
tttaaatgggtgaactgtatttaaacaaagttgcattttaaaagttacattgaacatatattgacaattgc

SEQ ID NO: 182973 - DNA, 72 bp, Homo sapiens
gggtgaactgtatttaaacaaagttgcattttaaaagttacattgaacatatattgacaattgctcattaaa

SEQ ID NO: 182974 - DNA, 71 bp, Homo sapiens
tgtatttaaacaaagttgcattttaaaagttacattgaacatatattgacaattgctcattaaattttttc

SEQ ID NO: 182975 - DNA, 66 bp, Homo sapiens
tttttcttttcttattttgtccagtaaggcaacttgattcagctcctatattttaaaaggttaaaa

SEQ ID NO: 182976 - DNA, 67 bp, Homo sapiens
cttttcttattttgtccagtaaggcaacttgattcagctcctatattttaaaaggttaaaatgtaat

SEQ ID NO: 182977 - DNA, 69 bp, Homo sapiens
aggcaacttgattcagctcctatattttaaaaggttaaaatgtaattaagttatgtatactttagggca

SEQ ID NO: 182978 - DNA, 70 bp, Homo sapiens
tcagctcctatattttaaaaggttaaaatgtaattaagttatgtatactttagggcattgtgtagtacat

SEQ ID NO: 182979 - DNA, 69 bp, Homo sapiens
ttttaaaaggttaaaatgtaattaagttatgtatactttagggcattgtgtagtacatttggcccatca

SEQ ID NO: 182980 - DNA, 73 bp, Homo sapiens
gtaattaagttatgtatactttagggcattgtgtagtacatttggcccatcagattattatggaagttcctaa

SEQ ID NO: 182981 - DNA, 73 bp, Homo sapiens
tttagggcattgtgtagtacatttggcccatcagattattatggaagttcctaaaatggaaacgttatgagaa

SEQ ID NO: 182982 - DNA, 73 bp, Homo sapiens
ttgtgtagtacatttggcccatcagattattatggaagttcctaaaatggaaacgttatgagaagcaaccaag

SEQ ID NO: 182983 - DNA, 70 bp, Homo sapiens
atttggcccatcagattattatggaagttcctaaaatggaaacgttatgagaagcaaccaagggaagtta

SEQ ID NO: 182984 - DNA, 73 bp, Homo sapiens
atcagattattatggaagttcctaaaatggaaacgttatgagaagcaaccaagggaagttaatgatgagtatg

SEQ ID NO: 182985 - DNA, 71 bp, Homo sapiens
aagttcctaaaatggaaacgttatgagaagcaaccaagggaagttaatgatgagtatggcggcaatctttc

SEQ ID NO: 182986 - DNA, 73 bp, Homo sapiens
cctaaaatggaaacgttatgagaagcaaccaagggaagttaatgatgagtatggcggcaatctttccaatgaa

SEQ ID NO: 182987 - DNA, 74 bp, Homo sapiens
aaacgttatgagaagcaaccaagggaagttaatgatgagtatggcggcaatctttccaatgaactgaagataaa

SEQ ID NO: 182988 - DNA, 75 bp, Homo sapiens
aagcaaccaagggaagttaatgatgagtatggcggcaatctttccaatgaactgaagataaaatatgaaacatta

SEQ ID NO: 182989 - DNA, 75 bp, Homo sapiens
agggaagttaatgatgagtatggcggcaatctttccaatgaactgaagataaaatatgaaacattagccaaagaa

SEQ ID NO: 182990 - DNA, 75 bp, Homo sapiens
agttaatgatgagtatggcggcaatctttccaatgaactgaagataaaatatgaaacattagccaaagaaaatag

SEQ ID NO: 182991 - DNA, 74 bp, Homo sapiens
gagtatggcggcaatctttccaatgaactgaagataaaatatgaaacattagccaaagaaaatagtagtagatt

SEQ ID NO: 182992 - DNA, 74 bp, Homo sapiens
ggcggcaatctttccaatgaactgaagataaaatatgaaacattagccaaagaaaatagtagtagatttgatag

SEQ ID NO: 182993 - DNA, 74 bp, Homo sapiens
ccaatgaactgaagataaaatatgaaacattagccaaagaaaatagtagtagatttgatagtgttacattaaga

SEQ ID NO: 182994 - DNA, 74 bp, Homo sapiens
tgaactgaagataaaatatgaaacattagccaaagaaaatagtagtagatttgatagtgttacattaagaagga

SEQ ID NO: 182995 - DNA, 74 bp, Homo sapiens
ctgaagataaaatatgaaacattagccaaagaaaatagtagtagatttgatagtgttacattaagaaggacata

SEQ ID NO: 182996 - DNA, 73 bp, Homo sapiens
gaagataaaatatgaaacattagccaaagaaaatagtagtagatttgatagtgttacattaagaaggacataa

SEQ ID NO: 182997 - DNA, 72 bp, Homo sapiens
tatgaaacattagccaaagaaaatagtagtagatttgatagtgttacattaagaaggacataaattagaaaa

SEQ ID NO: 182998 - DNA, 72 bp, Homo sapiens
agccaaagaaaatagtagtagatttgatagtgttacattaagaaggacataaattagaaaaatatgttgaga

SEQ ID NO: 182999 - DNA, 73 bp, Homo sapiens
aatagtagtagatttgatagtgttacattaagaaggacataaattagaaaaatatgttgagatatttggagga

SEQ ID NO: 183000 - DNA, 68 bp, Homo sapiens
gtgttacattaagaaggacataaattagaaaaatatgttgagatatttggaggaaaaagtggtaagtt

SEQ ID NO: 183001 - DNA, 69 bp, Homo sapiens
gaaggacataaattagaaaaatatgttgagatatttggaggaaaaagtggtaagtttaaatagagatct

SEQ ID NO: 183002 - DNA, 69 bp, Homo sapiens
tagaaaaatatgttgagatatttggaggaaaaagtggtaagtttaaatagagatcttaaaagtaggata

SEQ ID NO: 183003 - DNA, 68 bp, Homo sapiens
tgttgagatatttggaggaaaaagtggtaagtttaaatagagatcttaaaagtaggatactaattttc

SEQ ID NO: 183004 - DNA, 65 bp, Homo sapiens
ggaaaaagtggtaagtttaaatagagatcttaaaagtaggatactaattttccccgagattgtaa

SEQ ID NO: 183005 - DNA, 66 bp, Homo sapiens
gtttaaatagagatcttaaaagtaggatactaattttccccgagattgtaaatatagttagggctt

SEQ ID NO: 183006 - DNA, 64 bp, Homo sapiens
gatactaattttccccgagattgtaaatatagttagggctttaaaagcaaaacttaaaactttg

SEQ ID NO: 183007 - DNA, 68 bp, Homo sapiens
cccgagattgtaaatatagttagggctttaaaagcaaaacttaaaactttgttacatagaatgagatc

SEQ ID NO: 183008 - DNA, 69 bp, Homo sapiens
tgtaaatatagttagggctttaaaagcaaaacttaaaactttgttacatagaatgagatctactaccga

SEQ ID NO: 183009 - DNA, 66 bp, Homo sapiens
gggctttaaaagcaaaacttaaaactttgttacatagaatgagatctactaccgaaaaagagaaag

SEQ ID NO: 183010 - DNA, 70 bp, Homo sapiens
agcaaaacttaaaactttgttacatagaatgagatctactaccgaaaaagagaaagtagcactaatgtaa

SEQ ID NO: 183011 - DNA, 71 bp, Homo sapiens
cttaaaactttgttacatagaatgagatctactaccgaaaaagagaaagtagcactaatgtaaaatgaaga

SEQ ID NO: 183012 - DNA, 76 bp, Homo sapiens
gttacatagaatgagatctactaccgaaaaagagaaagtagcactaatgtaaaatgaagatggatctacaattgta

SEQ ID NO: 183013 - DNA, 77 bp, Homo sapiens
gaatgagatctactaccgaaaaagagaaagtagcactaatgtaaaatgaagatggatctacaattgtataaagatca

SEQ ID NO: 183014 - DNA, 75 bp, Homo sapiens
ctaccgaaaaagagaaagtagcactaatgtaaaatgaagatggatctacaattgtataaagatcagataaaagca

SEQ ID NO: 183015 - DNA, 79 bp, Homo sapiens
gtagcactaatgtaaaatgaagatggatctacaattgtataaagatcagataaaagcactgatcccaaaataatcataa

SEQ ID NO: 183016 - DNA, 75 bp, Homo sapiens
aaatgaagatggatctacaattgtataaagatcagataaaagcactgatcccaaaataatcataaattaattcct

SEQ ID NO: 183017 - DNA, 76 bp, Homo sapiens
agatggatctacaattgtataaagatcagataaaagcactgatcccaaaataatcataaattaattcctttgtgta

SEQ ID NO: 183018 - DNA, 72 bp, Homo sapiens
aaaagcactgatcccaaaataatcataaattaattcctttgtgtaaaacatcagcaaattttgtacatacaa

SEQ ID NO: 183019 - DNA, 73 bp, Homo sapiens
atcataaattaattcctttgtgtaaaacatcagcaaattttgtacatacaaaaattgtatgttattgaatgcc

SEQ ID NO: 183020 - DNA, 76 bp, Homo sapiens
tcctttgtgtaaaacatcagcaaattttgtacatacaaaaattgtatgttattgaatgcctactatgtgtctagaa

SEQ ID NO: 183021 - DNA, 76 bp, Homo sapiens
gtgtaaaacatcagcaaattttgtacatacaaaaattgtatgttattgaatgcctactatgtgtctagaaatgtct

SEQ ID NO: 183022 - DNA, 79 bp, Homo sapiens
cagcaaattttgtacatacaaaaattgtatgttattgaatgcctactatgtgtctagaaatgtcttagcacactggaca

SEQ ID NO: 183023 - DNA, 79 bp, Homo sapiens
tttgtacatacaaaaattgtatgttattgaatgcctactatgtgtctagaaatgtcttagcacactggacaaacagtgc

SEQ ID NO: 183024 - DNA, 77 bp, Homo sapiens
aaaaattgtatgttattgaatgcctactatgtgtctagaaatgtcttagcacactggacaaacagtgctcaacaacc

SEQ ID NO: 183025 - DNA, 81 bp, Homo sapiens
atgttattgaatgcctactatgtgtctagaaatgtcttagcacactggacaaacagtgctcaacaacccagatatgattcc

SEQ ID NO: 183026 - DNA, 80 bp, Homo sapiens
tactatgtgtctagaaatgtcttagcacactggacaaacagtgctcaacaacccagatatgattcctgaccttagagact

SEQ ID NO: 183027 - DNA, 77 bp, Homo sapiens
tcttagcacactggacaaacagtgctcaacaacccagatatgattcctgaccttagagactttggagtgtattttat

SEQ ID NO: 183028 - DNA, 74 bp, Homo sapiens
acactggacaaacagtgctcaacaacccagatatgattcctgaccttagagactttggagtgtattttattgtt

SEQ ID NO: 183029 - DNA, 71 bp, Homo sapiens
aaacagtgctcaacaacccagatatgattcctgaccttagagactttggagtgtattttattgtttaaagt

SEQ ID NO: 183030 - DNA, 70 bp, Homo sapiens
caacaacccagatatgattcctgaccttagagactttggagtgtattttattgtttaaagtttaactgcc

SEQ ID NO: 183031 - DNA, 72 bp, Homo sapiens
gatatgattcctgaccttagagactttggagtgtattttattgtttaaagtttaactgcctttgcttcaata

SEQ ID NO: 183032 - DNA, 72 bp, Homo sapiens
ttttattgtttaaagtttaactgcctttgcttcaatatttcacatataccaagaactctggcaaattgacta

SEQ ID NO: 183033 - DNA, 74 bp, Homo sapiens
taaagtttaactgcctttgcttcaatatttcacatataccaagaactctggcaaattgactaacactcttcaaa

SEQ ID NO: 183034 - DNA, 77 bp, Homo sapiens
ctgcctttgcttcaatatttcacatataccaagaactctggcaaattgactaacactcttcaaatatgaaaactaca

SEQ ID NO: 183035 - DNA, 76 bp, Homo sapiens
gcttcaatatttcacatataccaagaactctggcaaattgactaacactcttcaaatatgaaaactacaacttctc

SEQ ID NO: 183036 - DNA, 73 bp, Homo sapiens
cacatataccaagaactctggcaaattgactaacactcttcaaatatgaaaactacaacttctccaaaatact

SEQ ID NO: 183037 - DNA, 72 bp, Homo sapiens
ataccaagaactctggcaaattgactaacactcttcaaatatgaaaactacaacttctccaaaatacttaca

SEQ ID NO: 183038 - DNA, 74 bp, Homo sapiens
ctctggcaaattgactaacactcttcaaatatgaaaactacaacttctccaaaatacttacataagagggagca

SEQ ID NO: 183039 - DNA, 71 bp, Homo sapiens
tgactaacactcttcaaatatgaaaactacaacttctccaaaatacttacataagagggagcattaaagtt

SEQ ID NO: 183040 - DNA, 68 bp, Homo sapiens
ctcttcaaatatgaaaactacaacttctccaaaatacttacataagagggagcattaaagtttctttt

SEQ ID NO: 183041 - DNA, 69 bp, Homo sapiens
tgaaaactacaacttctccaaaatacttacataagagggagcattaaagtttctttttcaaaagctgag

SEQ ID NO: 183042 - DNA, 69 bp, Homo sapiens
cttctccaaaatacttacataagagggagcattaaagtttctttttcaaaagctgagttagaagtacaa

SEQ ID NO: 183043 - DNA, 69 bp, Homo sapiens
tacttacataagagggagcattaaagtttctttttcaaaagctgagttagaagtacaaattaacatttg

SEQ ID NO: 183044 - DNA, 69 bp, Homo sapiens
cataagagggagcattaaagtttctttttcaaaagctgagttagaagtacaaattaacatttggagaaa

SEQ ID NO: 183045 - DNA, 67 bp, Homo sapiens
agcattaaagtttctttttcaaaagctgagttagaagtacaaattaacatttggagaaacaatttcc

SEQ ID NO: 183046 - DNA, 70 bp, Homo sapiens
ttttcaaaagctgagttagaagtacaaattaacatttggagaaacaatttccttctataatagtaagaca

SEQ ID NO: 183047 - DNA, 73 bp, Homo sapiens
agctgagttagaagtacaaattaacatttggagaaacaatttccttctataatagtaagacaaatcagatatc

SEQ ID NO: 183048 - DNA, 73 bp, Homo sapiens
gaagtacaaattaacatttggagaaacaatttccttctataatagtaagacaaatcagatatcttatagatta

SEQ ID NO: 183049 - DNA, 74 bp, Homo sapiens
aacatttggagaaacaatttccttctataatagtaagacaaatcagatatcttatagattaaattgaggtgtgc

SEQ ID NO: 183050 - DNA, 76 bp, Homo sapiens
ggagaaacaatttccttctataatagtaagacaaatcagatatcttatagattaaattgaggtgtgccaggcatgg

SEQ ID NO: 183051 - DNA, 72 bp, Homo sapiens
gaaatcccatctcattttttgaaaaaaggttaagtaagcaaattggggtgtgatttacatgcttgcatgtag

SEQ ID NO: 183052 - DNA, 73 bp, Homo sapiens
ctcattttttgaaaaaaggttaagtaagcaaattggggtgtgatttacatgcttgcatgtagtaaaatgcaca

SEQ ID NO: 183053 - DNA, 75 bp, Homo sapiens
aaaaaaggttaagtaagcaaattggggtgtgatttacatgcttgcatgtagtaaaatgcacaatctaggcataca

SEQ ID NO: 183054 - DNA, 79 bp, Homo sapiens
ttaagtaagcaaattggggtgtgatttacatgcttgcatgtagtaaaatgcacaatctaggcatacagctcaattaatt

SEQ ID NO: 183055 - DNA, 80 bp, Homo sapiens
agcaaattggggtgtgatttacatgcttgcatgtagtaaaatgcacaatctaggcatacagctcaattaattttatatat

SEQ ID NO: 183056 - DNA, 82 bp, Homo sapiens
gtgtgatttacatgcttgcatgtagtaaaatgcacaatctaggcatacagctcaattaattttatatatttctacacccatg

SEQ ID NO: 183057 - DNA, 82 bp, Homo sapiens
acatgcttgcatgtagtaaaatgcacaatctaggcatacagctcaattaattttatatatttctacacccatgttactgcca

SEQ ID NO: 183058 - DNA, 80 bp, Homo sapiens
gtaaaatgcacaatctaggcatacagctcaattaattttatatatttctacacccatgttactgccaccagatcaagata

SEQ ID NO: 183059 - DNA, 82 bp, Homo sapiens
atgcacaatctaggcatacagctcaattaattttatatatttctacacccatgttactgccaccagatcaagatacagaaca

SEQ ID NO: 183060 - DNA, 77 bp, Homo sapiens
atacagctcaattaattttatatatttctacacccatgttactgccaccagatcaagatacagaacagttcacctgt

SEQ ID NO: 183061 - DNA, 75 bp, Homo sapiens
attaattttatatatttctacacccatgttactgccaccagatcaagatacagaacagttcacctgttggcaatt

SEQ ID NO: 183062 - DNA, 77 bp, Homo sapiens
tttatatatttctacacccatgttactgccaccagatcaagatacagaacagttcacctgttggcaattttggacaa

SEQ ID NO: 183063 - DNA, 77 bp, Homo sapiens
tctacacccatgttactgccaccagatcaagatacagaacagttcacctgttggcaattttggacaacggtttgcta

SEQ ID NO: 183064 - DNA, 76 bp, Homo sapiens
gatcaagatacagaacagttcacctgttggcaattttggacaacggtttgctaggtgatttgctggatttcttgct

SEQ ID NO: 183065 - DNA, 74 bp, Homo sapiens
atacagaacagttcacctgttggcaattttggacaacggtttgctaggtgatttgctggatttcttgcttggtc

SEQ ID NO: 183066 - DNA, 73 bp, Homo sapiens
agaacagttcacctgttggcaattttggacaacggtttgctaggtgatttgctggatttcttgcttggtccta

SEQ ID NO: 183067 - DNA, 72 bp, Homo sapiens
agttcacctgttggcaattttggacaacggtttgctaggtgatttgctggatttcttgcttggtcctaccaa

SEQ ID NO: 183068 - DNA, 71 bp, Homo sapiens
acctgttggcaattttggacaacggtttgctaggtgatttgctggatttcttgcttggtcctaccaactcc

SEQ ID NO: 183069 - DNA, 71 bp, Homo sapiens
ttggcaattttggacaacggtttgctaggtgatttgctggatttcttgcttggtcctaccaactcccctgg

SEQ ID NO: 183070 - DNA, 69 bp, Homo sapiens
aattttggacaacggtttgctaggtgatttgctggatttcttgcttggtcctaccaactcccctgggga

SEQ ID NO: 183071 - DNA, 69 bp, Homo sapiens
acaacggtttgctaggtgatttgctggatttcttgcttggtcctaccaactcccctggggaattgggta

SEQ ID NO: 183072 - DNA, 69 bp, Homo sapiens
gtttgctaggtgatttgctggatttcttgcttggtcctaccaactcccctggggaattgggtagaaaaa

SEQ ID NO: 183073 - DNA, 67 bp, Homo sapiens
taggtgatttgctggatttcttgcttggtcctaccaactcccctggggaattgggtagaaaaaaatt

SEQ ID NO: 183074 - DNA, 66 bp, Homo sapiens
gatttcttgcttggtcctaccaactcccctggggaattgggtagaaaaaaattttaaggcaactca

SEQ ID NO: 183075 - DNA, 67 bp, Homo sapiens
ttggtcctaccaactcccctggggaattgggtagaaaaaaattttaaggcaactcaattgacatcaa

SEQ ID NO: 183076 - DNA, 69 bp, Homo sapiens
taccaactcccctggggaattgggtagaaaaaaattttaaggcaactcaattgacatcaatcaatcatt

SEQ ID NO: 183077 - DNA, 69 bp, Homo sapiens
ccctggggaattgggtagaaaaaaattttaaggcaactcaattgacatcaatcaatcattttgtaggaa

SEQ ID NO: 183078 - DNA, 74 bp, Homo sapiens
gtagaaaaaaattttaaggcaactcaattgacatcaatcaatcattttgtaggaataaaatcacatctaagtga

SEQ ID NO: 183079 - DNA, 78 bp, Homo sapiens
aattttaaggcaactcaattgacatcaatcaatcattttgtaggaataaaatcacatctaagtgactgattatctgtg

SEQ ID NO: 183080 - DNA, 79 bp, Homo sapiens
aaggcaactcaattgacatcaatcaatcattttgtaggaataaaatcacatctaagtgactgattatctgtgtttagaa

SEQ ID NO: 183081 - DNA, 78 bp, Homo sapiens
aattgacatcaatcaatcattttgtaggaataaaatcacatctaagtgactgattatctgtgtttagaaaatccttgc

SEQ ID NO: 183082 - DNA, 75 bp, Homo sapiens
atcattttgtaggaataaaatcacatctaagtgactgattatctgtgtttagaaaatccttgctaatttctagga

SEQ ID NO: 183083 - DNA, 75 bp, Homo sapiens
taaaatcacatctaagtgactgattatctgtgtttagaaaatccttgctaatttctaggacagggaaaagcagag

SEQ ID NO: 183084 - DNA, 72 bp, Homo sapiens
tctaagtgactgattatctgtgtttagaaaatccttgctaatttctaggacagggaaaagcagagggaaaaa

SEQ ID NO: 183085 - DNA, 71 bp, Homo sapiens
ttgctaatttctaggacagggaaaagcagagggaaaaagaagagaaggaaatggaacaggtgcctgaagat

SEQ ID NO: 183086 - DNA, 73 bp, Homo sapiens
tttctaggacagggaaaagcagagggaaaaagaagagaaggaaatggaacaggtgcctgaagattgtgatcaa

SEQ ID NO: 183087 - DNA, 71 bp, Homo sapiens
aaaagcagagggaaaaagaagagaaggaaatggaacaggtgcctgaagattgtgatcaacaaggtaaacaa

SEQ ID NO: 183088 - DNA, 71 bp, Homo sapiens
ggaaaaagaagagaaggaaatggaacaggtgcctgaagattgtgatcaacaaggtaaacaagataaggtaa

SEQ ID NO: 183089 - DNA, 72 bp, Homo sapiens
gagaaggaaatggaacaggtgcctgaagattgtgatcaacaaggtaaacaagataaggtaaacaaggtagta

SEQ ID NO: 183090 - DNA, 70 bp, Homo sapiens
aaatggaacaggtgcctgaagattgtgatcaacaaggtaaacaagataaggtaaacaaggtagtaaccca

SEQ ID NO: 183091 - DNA, 70 bp, Homo sapiens
tgcctgaagattgtgatcaacaaggtaaacaagataaggtaaacaaggtagtaacccagggggaactgta

SEQ ID NO: 183092 - DNA, 65 bp, Homo sapiens
aaggtaaacaagataaggtaaacaaggtagtaacccagggggaactgtactcattcttcccatat

SEQ ID NO: 183093 - DNA, 65 bp, Homo sapiens
aaacaagataaggtaaacaaggtagtaacccagggggaactgtactcattcttcccatatttatt

SEQ ID NO: 183094 - DNA, 65 bp, Homo sapiens
aggtaaacaaggtagtaacccagggggaactgtactcattcttcccatatttattttgtaaggaa

SEQ ID NO: 183095 - DNA, 72 bp, Homo sapiens
ctcattcttcccatatttattttgtaaggaaggctgacagtatgagggaattattactttaaggcatgaaac

SEQ ID NO: 183096 - DNA, 71 bp, Homo sapiens
catatttattttgtaaggaaggctgacagtatgagggaattattactttaaggcatgaaaccagaaagccc

SEQ ID NO: 183097 - DNA, 73 bp, Homo sapiens
tattttgtaaggaaggctgacagtatgagggaattattactttaaggcatgaaaccagaaagccctcaagcta

SEQ ID NO: 183098 - DNA, 74 bp, Homo sapiens
acagtatgagggaattattactttaaggcatgaaaccagaaagccctcaagctagatctaataggcaacataaa

SEQ ID NO: 183099 - DNA, 74 bp, Homo sapiens
aattattactttaaggcatgaaaccagaaagccctcaagctagatctaataggcaacataaagtgagcctaggc

SEQ ID NO: 183100 - DNA, 76 bp, Homo sapiens
ctttaaggcatgaaaccagaaagccctcaagctagatctaataggcaacataaagtgagcctaggcggatcaaaga

SEQ ID NO: 183101 - DNA, 77 bp, Homo sapiens
aaaccagaaagccctcaagctagatctaataggcaacataaagtgagcctaggcggatcaaagagcagcctgaaaca

SEQ ID NO: 183102 - DNA, 84 bp, Homo sapiens
ctcaagctagatctaataggcaacataaagtgagcctaggcggatcaaagagcagcctgaaacacagggaatcatcatctcatc

SEQ ID NO: 183103 - DNA, 84 bp, Homo sapiens
tagatctaataggcaacataaagtgagcctaggcggatcaaagagcagcctgaaacacagggaatcatcatctcatctcaccta

SEQ ID NO: 183104 - DNA, 83 bp, Homo sapiens
caacataaagtgagcctaggcggatcaaagagcagcctgaaacacagggaatcatcatctcatctcacctatccatctattta

SEQ ID NO: 183105 - DNA, 82 bp, Homo sapiens
taaagtgagcctaggcggatcaaagagcagcctgaaacacagggaatcatcatctcatctcacctatccatctatttattta

SEQ ID NO: 183106 - DNA, 81 bp, Homo sapiens
taggcggatcaaagagcagcctgaaacacagggaatcatcatctcatctcacctatccatctatttatttactgaatattt

SEQ ID NO: 183107 - DNA, 82 bp, Homo sapiens
agagcagcctgaaacacagggaatcatcatctcatctcacctatccatctatttatttactgaatattttcatgagaaaata

SEQ ID NO: 183108 - DNA, 81 bp, Homo sapiens
aaacacagggaatcatcatctcatctcacctatccatctatttatttactgaatattttcatgagaaaatatgccagccta

SEQ ID NO: 183109 - DNA, 83 bp, Homo sapiens
ggaatcatcatctcatctcacctatccatctatttatttactgaatattttcatgagaaaatatgccagcctatgtttatctg

SEQ ID NO: 183110 - DNA, 82 bp, Homo sapiens
tcatctcacctatccatctatttatttactgaatattttcatgagaaaatatgccagcctatgtttatctgttcctgatcca

SEQ ID NO: 183111 - DNA, 78 bp, Homo sapiens
cacctatccatctatttatttactgaatattttcatgagaaaatatgccagcctatgtttatctgttcctgatccact

SEQ ID NO: 183112 - DNA, 75 bp, Homo sapiens
gaatattttcatgagaaaatatgccagcctatgtttatctgttcctgatccactttccgtatttacctcttgtaa

SEQ ID NO: 183113 - DNA, 75 bp, Homo sapiens
tgagaaaatatgccagcctatgtttatctgttcctgatccactttccgtatttacctcttgtaaatctaatgtta

SEQ ID NO: 183114 - DNA, 75 bp, Homo sapiens
aatatgccagcctatgtttatctgttcctgatccactttccgtatttacctcttgtaaatctaatgttattgcat

SEQ ID NO: 183115 - DNA, 73 bp, Homo sapiens
gcctatgtttatctgttcctgatccactttccgtatttacctcttgtaaatctaatgttattgcatttaatat

SEQ ID NO: 183116 - DNA, 72 bp, Homo sapiens
gttcctgatccactttccgtatttacctcttgtaaatctaatgttattgcatttaatattacttccatcaac

SEQ ID NO: 183117 - DNA, 73 bp, Homo sapiens
gatccactttccgtatttacctcttgtaaatctaatgttattgcatttaatattacttccatcaactaccatg

SEQ ID NO: 183118 - DNA, 70 bp, Homo sapiens
ccgtatttacctcttgtaaatctaatgttattgcatttaatattacttccatcaactaccatgtttttcc

SEQ ID NO: 183119 - DNA, 70 bp, Homo sapiens
tctaatgttattgcatttaatattacttccatcaactaccatgtttttcctaaaacaagacaggttttaa

SEQ ID NO: 183120 - DNA, 69 bp, Homo sapiens
ttgcatttaatattacttccatcaactaccatgtttttcctaaaacaagacaggttttaaaaatacaca

SEQ ID NO: 183121 - DNA, 67 bp, Homo sapiens
acttccatcaactaccatgtttttcctaaaacaagacaggttttaaaaatacacaattctttgtcac

SEQ ID NO: 183122 - DNA, 69 bp, Homo sapiens
tcaactaccatgtttttcctaaaacaagacaggttttaaaaatacacaattctttgtcactatcaaatg

SEQ ID NO: 183123 - DNA, 70 bp, Homo sapiens
tttcctaaaacaagacaggttttaaaaatacacaattctttgtcactatcaaatgtacttctctcaagct

SEQ ID NO: 183124 - DNA, 73 bp, Homo sapiens
tttaaaaatacacaattctttgtcactatcaaatgtacttctctcaagcttaagttagtagaaggaagatgtg

SEQ ID NO: 183125 - DNA, 78 bp, Homo sapiens
cacaattctttgtcactatcaaatgtacttctctcaagcttaagttagtagaaggaagatgtgtatgtgataaatgtc

SEQ ID NO: 183126 - DNA, 77 bp, Homo sapiens
ctttgtcactatcaaatgtacttctctcaagcttaagttagtagaaggaagatgtgtatgtgataaatgtcgaacta

SEQ ID NO: 183127 - DNA, 76 bp, Homo sapiens
aaatgtacttctctcaagcttaagttagtagaaggaagatgtgtatgtgataaatgtcgaactagcagctagaaat

SEQ ID NO: 183128 - DNA, 77 bp, Homo sapiens
aagcttaagttagtagaaggaagatgtgtatgtgataaatgtcgaactagcagctagaaattatgcaagtttgtgaa

SEQ ID NO: 183129 - DNA, 76 bp, Homo sapiens
tagtagaaggaagatgtgtatgtgataaatgtcgaactagcagctagaaattatgcaagtttgtgaaagttaaggt

SEQ ID NO: 183130 - DNA, 77 bp, Homo sapiens
gatgtgtatgtgataaatgtcgaactagcagctagaaattatgcaagtttgtgaaagttaaggttttagtatgtatc

SEQ ID NO: 183131 - DNA, 70 bp, Homo sapiens
ttatgcaagtttgtgaaagttaaggttttagtatgtatctatgatttctctaattttattttactattaa

SEQ ID NO: 183132 - DNA, 72 bp, Homo sapiens
ggttttagtatgtatctatgatttctctaattttattttactattaatataataaagcccaggtgctacata

SEQ ID NO: 183133 - DNA, 72 bp, Homo sapiens
tgtatctatgatttctctaattttattttactattaatataataaagcccaggtgctacataaggttaaaga

SEQ ID NO: 183134 - DNA, 69 bp, Homo sapiens
ttctctaattttattttactattaatataataaagcccaggtgctacataaggttaaagacagaaaaca

SEQ ID NO: 183135 - DNA, 68 bp, Homo sapiens
ttattttactattaatataataaagcccaggtgctacataaggttaaagacagaaaacaactaaagaa

SEQ ID NO: 183136 - DNA, 68 bp, Homo sapiens
actattaatataataaagcccaggtgctacataaggttaaagacagaaaacaactaaagaaaaagaca

SEQ ID NO: 183137 - DNA, 69 bp, Homo sapiens
ggtgctacataaggttaaagacagaaaacaactaaagaaaaagacaaaactatatggaagtcaataggc

SEQ ID NO: 183138 - DNA, 67 bp, Homo sapiens
acataaggttaaagacagaaaacaactaaagaaaaagacaaaactatatggaagtcaataggctttc

SEQ ID NO: 183139 - DNA, 70 bp, Homo sapiens
cagaaaacaactaaagaaaaagacaaaactatatggaagtcaataggctttctaaggagcgtcgtatcac

SEQ ID NO: 183140 - DNA, 70 bp, Homo sapiens
aacaactaaagaaaaagacaaaactatatggaagtcaataggctttctaaggagcgtcgtatcactggcg

SEQ ID NO: 183141 - DNA, 78 bp, Homo sapiens
aagacaaaactatatggaagtcaataggctttctaaggagcgtcgtatcactggcggcttgccacaagaatcagctca

SEQ ID NO: 183142 - DNA, 76 bp, Homo sapiens
aagtcaataggctttctaaggagcgtcgtatcactggcggcttgccacaagaatcagctcaccttgtcggtaagcg

SEQ ID NO: 183143 - DNA, 75 bp, Homo sapiens
tttctaaggagcgtcgtatcactggcggcttgccacaagaatcagctcaccttgtcggtaagcgggaacttcacc

SEQ ID NO: 183144 - DNA, 74 bp, Homo sapiens
gtcgtatcactggcggcttgccacaagaatcagctcaccttgtcggtaagcgggaacttcaccggaaaaatatc

SEQ ID NO: 183145 - DNA, 74 bp, Homo sapiens
atcactggcggcttgccacaagaatcagctcaccttgtcggtaagcgggaacttcaccggaaaaatatccttca

SEQ ID NO: 183146 - DNA, 69 bp, Homo sapiens
accttgtcggtaagcgggaacttcaccggaaaaatatccttcaatttgcttatccgaggcctcctgagc

SEQ ID NO: 183147 - DNA, 71 bp, Homo sapiens
gtaagcgggaacttcaccggaaaaatatccttcaatttgcttatccgaggcctcctgagctccctgagtta

SEQ ID NO: 183148 - DNA, 72 bp, Homo sapiens
ttcaccggaaaaatatccttcaatttgcttatccgaggcctcctgagctccctgagttaccaagaagccaaa

SEQ ID NO: 183149 - DNA, 73 bp, Homo sapiens
aaatatccttcaatttgcttatccgaggcctcctgagctccctgagttaccaagaagccaaatctactgttaa

SEQ ID NO: 183150 - DNA, 75 bp, Homo sapiens
aatttgcttatccgaggcctcctgagctccctgagttaccaagaagccaaatctactgttaatcagaacactcta

SEQ ID NO: 183151 - DNA, 74 bp, Homo sapiens
ttatccgaggcctcctgagctccctgagttaccaagaagccaaatctactgttaatcagaacactctaagaaac

SEQ ID NO: 183152 - DNA, 75 bp, Homo sapiens
tgagctccctgagttaccaagaagccaaatctactgttaatcagaacactctaagaaacttctaagagcactact

SEQ ID NO: 183153 - DNA, 73 bp, Homo sapiens
tgagttaccaagaagccaaatctactgttaatcagaacactctaagaaacttctaagagcactacttccaaaa

SEQ ID NO: 183154 - DNA, 73 bp, Homo sapiens
ctactgttaatcagaacactctaagaaacttctaagagcactacttccaaaataaagataattactatgtgtc

SEQ ID NO: 183155 - DNA, 75 bp, Homo sapiens
tcagaacactctaagaaacttctaagagcactacttccaaaataaagataattactatgtgtcttcccaatctca

SEQ ID NO: 183156 - DNA, 72 bp, Homo sapiens
ctctaagaaacttctaagagcactacttccaaaataaagataattactatgtgtcttcccaatctcacttcc

SEQ ID NO: 183157 - DNA, 72 bp, Homo sapiens
aacttctaagagcactacttccaaaataaagataattactatgtgtcttcccaatctcacttcctcaaacca

SEQ ID NO: 183158 - DNA, 71 bp, Homo sapiens
ctacttccaaaataaagataattactatgtgtcttcccaatctcacttcctcaaaccatacctggtaattg

SEQ ID NO: 183159 - DNA, 70 bp, Homo sapiens
aataaagataattactatgtgtcttcccaatctcacttcctcaaaccatacctggtaattgtaagaacct

SEQ ID NO: 183160 - DNA, 71 bp, Homo sapiens
ataattactatgtgtcttcccaatctcacttcctcaaaccatacctggtaattgtaagaaccttcagggtc

SEQ ID NO: 183161 - DNA, 74 bp, Homo sapiens
tatgtgtcttcccaatctcacttcctcaaaccatacctggtaattgtaagaaccttcagggtccagagattgcc

SEQ ID NO: 183162 - DNA, 73 bp, Homo sapiens
tctcacttcctcaaaccatacctggtaattgtaagaaccttcagggtccagagattgccctctgaactatatt

SEQ ID NO: 183163 - DNA, 73 bp, Homo sapiens
taattgtaagaaccttcagggtccagagattgccctctgaactatatttctattttgtcagctctttaaaatg

SEQ ID NO: 183164 - DNA, 77 bp, Homo sapiens
agagattgccctctgaactatatttctattttgtcagctctttaaaatgtgacaccaaacataaggcccagatgcag

SEQ ID NO: 183165 - DNA, 78 bp, Homo sapiens
tctgaactatatttctattttgtcagctctttaaaatgtgacaccaaacataaggcccagatgcagtctgacgggaga

SEQ ID NO: 183166 - DNA, 78 bp, Homo sapiens
atttctattttgtcagctctttaaaatgtgacaccaaacataaggcccagatgcagtctgacgggagaagatgataga

SEQ ID NO: 183167 - DNA, 78 bp, Homo sapiens
ttgtcagctctttaaaatgtgacaccaaacataaggcccagatgcagtctgacgggagaagatgatagaactgtaatt

SEQ ID NO: 183168 - DNA, 80 bp, Homo sapiens
tttaaaatgtgacaccaaacataaggcccagatgcagtctgacgggagaagatgatagaactgtaatttgatatgactga

SEQ ID NO: 183169 - DNA, 79 bp, Homo sapiens
acaccaaacataaggcccagatgcagtctgacgggagaagatgatagaactgtaatttgatatgactgacatacaattt

SEQ ID NO: 183170 - DNA, 79 bp, Homo sapiens
aaacataaggcccagatgcagtctgacgggagaagatgatagaactgtaatttgatatgactgacatacaatttttcta

SEQ ID NO: 183171 - DNA, 79 bp, Homo sapiens
gtctgacgggagaagatgatagaactgtaatttgatatgactgacatacaatttttctattaatacaatcttagattga

SEQ ID NO: 183172 - DNA, 80 bp, Homo sapiens
ctgtaatttgatatgactgacatacaatttttctattaatacaatcttagattgaagtagcttatatagagctgacaatc

SEQ ID NO: 183173 - DNA, 80 bp, Homo sapiens
tgatatgactgacatacaatttttctattaatacaatcttagattgaagtagcttatatagagctgacaatctactaaaa

SEQ ID NO: 183174 - DNA, 76 bp, Homo sapiens
ctgacatacaatttttctattaatacaatcttagattgaagtagcttatatagagctgacaatctactaaaatccc

SEQ ID NO: 183175 - DNA, 78 bp, Homo sapiens
ttctattaatacaatcttagattgaagtagcttatatagagctgacaatctactaaaatccccaagatcctcctcatc

SEQ ID NO: 183176 - DNA, 80 bp, Homo sapiens
taatacaatcttagattgaagtagcttatatagagctgacaatctactaaaatccccaagatcctcctcatctccatata

SEQ ID NO: 183177 - DNA, 79 bp, Homo sapiens
tagcttatatagagctgacaatctactaaaatccccaagatcctcctcatctccatataaactgtctctaaggcccatc

SEQ ID NO: 183178 - DNA, 74 bp, Homo sapiens
agctgacaatctactaaaatccccaagatcctcctcatctccatataaactgtctctaaggcccatctcccttt

SEQ ID NO: 183179 - DNA, 72 bp, Homo sapiens
ccaagatcctcctcatctccatataaactgtctctaaggcccatctcccttttcctttactaatcaaaataa

SEQ ID NO: 183180 - DNA, 67 bp, Homo sapiens
ctccatataaactgtctctaaggcccatctcccttttcctttactaatcaaaataattacttaattt

SEQ ID NO: 183181 - DNA, 67 bp, Homo sapiens
actgtctctaaggcccatctcccttttcctttactaatcaaaataattacttaattttaaatgaaga

SEQ ID NO: 183182 - DNA, 65 bp, Homo sapiens
aggcccatctcccttttcctttactaatcaaaataattacttaattttaaatgaagaaacttata

SEQ ID NO: 183183 - DNA, 64 bp, Homo sapiens
tcccttttcctttactaatcaaaataattacttaattttaaatgaagaaacttatatttatctt

SEQ ID NO: 183184 - DNA, 66 bp, Homo sapiens
ttactaatcaaaataattacttaattttaaatgaagaaacttatatttatctttgttaaatttcac

SEQ ID NO: 183185 - DNA, 63 bp, Homo sapiens
aattacttaattttaaatgaagaaacttatatttatctttgttaaatttcactttcttgggtt

SEQ ID NO: 183186 - DNA, 65 bp, Homo sapiens
ttttaaatgaagaaacttatatttatctttgttaaatttcactttcttgggtttaccctagcatt

SEQ ID NO: 183187 - DNA, 69 bp, Homo sapiens
agaaacttatatttatctttgttaaatttcactttcttgggtttaccctagcatttctactcgatgaga

SEQ ID NO: 183188 - DNA, 68 bp, Homo sapiens
cttatatttatctttgttaaatttcactttcttgggtttaccctagcatttctactcgatgagaattt

SEQ ID NO: 183189 - DNA, 67 bp, Homo sapiens
ctttgttaaatttcactttcttgggtttaccctagcatttctactcgatgagaatttttttcttata

SEQ ID NO: 183190 - DNA, 67 bp, Homo sapiens
cactttcttgggtttaccctagcatttctactcgatgagaatttttttcttataattctggggttaa

SEQ ID NO: 183191 - DNA, 71 bp, Homo sapiens
ccctagcatttctactcgatgagaatttttttcttataattctggggttaatgaatacattatccctccca

SEQ ID NO: 183192 - DNA, 70 bp, Homo sapiens
tctactcgatgagaatttttttcttataattctggggttaatgaatacattatccctcccagctttgggt

SEQ ID NO: 183193 - DNA, 69 bp, Homo sapiens
tttttttcttataattctggggttaatgaatacattatccctcccagctttgggttactggtgaacaca

SEQ ID NO: 183194 - DNA, 73 bp, Homo sapiens
ttataattctggggttaatgaatacattatccctcccagctttgggttactggtgaacacagcttccatatct

SEQ ID NO: 183195 - DNA, 72 bp, Homo sapiens
gggttaatgaatacattatccctcccagctttgggttactggtgaacacagcttccatatctttatgaaatt

SEQ ID NO: 183196 - DNA, 75 bp, Homo sapiens
atgaatacattatccctcccagctttgggttactggtgaacacagcttccatatctttatgaaatttgcaataaa

SEQ ID NO: 183197 - DNA, 74 bp, Homo sapiens
tatccctcccagctttgggttactggtgaacacagcttccatatctttatgaaatttgcaataaacataacaaa

SEQ ID NO: 183198 - DNA, 74 bp, Homo sapiens
agctttgggttactggtgaacacagcttccatatctttatgaaatttgcaataaacataacaaataggacagga

SEQ ID NO: 183199 - DNA, 75 bp, Homo sapiens
tactggtgaacacagcttccatatctttatgaaatttgcaataaacataacaaataggacaggacaaaaggcaaa

SEQ ID NO: 183200 - DNA, 71 bp, Homo sapiens
cttccatatctttatgaaatttgcaataaacataacaaataggacaggacaaaaggcaaagccctgtaacc

SEQ ID NO: 183201 - DNA, 73 bp, Homo sapiens
tatctttatgaaatttgcaataaacataacaaataggacaggacaaaaggcaaagccctgtaaccctctgcaa

SEQ ID NO: 183202 - DNA, 73 bp, Homo sapiens
atttgcaataaacataacaaataggacaggacaaaaggcaaagccctgtaaccctctgcaagagatctcttta

SEQ ID NO: 183203 - DNA, 74 bp, Homo sapiens
ataaacataacaaataggacaggacaaaaggcaaagccctgtaaccctctgcaagagatctctttacaggctga

SEQ ID NO: 183204 - DNA, 78 bp, Homo sapiens
aaagccctgtaaccctctgcaagagatctctttacaggctgacatggactctttaaatgcatttgtagagtgagtaca

SEQ ID NO: 183205 - DNA, 81 bp, Homo sapiens
taaccctctgcaagagatctctttacaggctgacatggactctttaaatgcatttgtagagtgagtacaaatccatccatc

SEQ ID NO: 183206 - DNA, 81 bp, Homo sapiens
aagagatctctttacaggctgacatggactctttaaatgcatttgtagagtgagtacaaatccatccatctcaagaatcac

SEQ ID NO: 183207 - DNA, 80 bp, Homo sapiens
tctttacaggctgacatggactctttaaatgcatttgtagagtgagtacaaatccatccatctcaagaatcaccaggtcc

SEQ ID NO: 183208 - DNA, 77 bp, Homo sapiens
atggactctttaaatgcatttgtagagtgagtacaaatccatccatctcaagaatcaccaggtcctcttctacctta

SEQ ID NO: 183209 - DNA, 77 bp, Homo sapiens
taaatgcatttgtagagtgagtacaaatccatccatctcaagaatcaccaggtcctcttctaccttatcctaaggta

SEQ ID NO: 183210 - DNA, 76 bp, Homo sapiens
tttgtagagtgagtacaaatccatccatctcaagaatcaccaggtcctcttctaccttatcctaaggtatcattaa

SEQ ID NO: 183211 - DNA, 74 bp, Homo sapiens
agtgagtacaaatccatccatctcaagaatcaccaggtcctcttctaccttatcctaaggtatcattaaaagac

SEQ ID NO: 183212 - DNA, 75 bp, Homo sapiens
atccatctcaagaatcaccaggtcctcttctaccttatcctaaggtatcattaaaagactgatgacctgtaatcc

SEQ ID NO: 183213 - DNA, 74 bp, Homo sapiens
aaaatgctgatgaggatgagccattgcattctctagtcaaccttataaaaaataaagaaattaggattgttagg

SEQ ID NO: 183214 - DNA, 76 bp, Homo sapiens
gctgatgaggatgagccattgcattctctagtcaaccttataaaaaataaagaaattaggattgttaggtataata

SEQ ID NO: 183215 - DNA, 71 bp, Homo sapiens
tgagccattgcattctctagtcaaccttataaaaaataaagaaattaggattgttaggtataataaccagg

SEQ ID NO: 183216 - DNA, 68 bp, Homo sapiens
gcattctctagtcaaccttataaaaaataaagaaattaggattgttaggtataataaccaggtaggac

SEQ ID NO: 183217 - DNA, 68 bp, Homo sapiens
ccttataaaaaataaagaaattaggattgttaggtataataaccaggtaggacctagtgacagccaca

SEQ ID NO: 183218 - DNA, 69 bp, Homo sapiens
aataaagaaattaggattgttaggtataataaccaggtaggacctagtgacagccacagtcttttccaa

SEQ ID NO: 183219 - DNA, 70 bp, Homo sapiens
agaaattaggattgttaggtataataaccaggtaggacctagtgacagccacagtcttttccaaatgttc

SEQ ID NO: 183220 - DNA, 69 bp, Homo sapiens
taggtataataaccaggtaggacctagtgacagccacagtcttttccaaatgttccttaactacgtatt

SEQ ID NO: 183221 - DNA, 69 bp, Homo sapiens
taataaccaggtaggacctagtgacagccacagtcttttccaaatgttccttaactacgtatttcaaat

SEQ ID NO: 183222 - DNA, 71 bp, Homo sapiens
gacctagtgacagccacagtcttttccaaatgttccttaactacgtatttcaaattcaattccagagttta

SEQ ID NO: 183223 - DNA, 69 bp, Homo sapiens
cagccacagtcttttccaaatgttccttaactacgtatttcaaattcaattccagagtttactgggaaa

SEQ ID NO: 183224 - DNA, 68 bp, Homo sapiens
cagtcttttccaaatgttccttaactacgtatttcaaattcaattccagagtttactgggaaacacta

SEQ ID NO: 183225 - DNA, 68 bp, Homo sapiens
ccaaatgttccttaactacgtatttcaaattcaattccagagtttactgggaaacactataggactta

SEQ ID NO: 183226 - DNA, 69 bp, Homo sapiens
tgttccttaactacgtatttcaaattcaattccagagtttactgggaaacactataggacttaccaatc

SEQ ID NO: 183227 - DNA, 69 bp, Homo sapiens
cttaactacgtatttcaaattcaattccagagtttactgggaaacactataggacttaccaatcggcaa

SEQ ID NO: 183228 - DNA, 69 bp, Homo sapiens
actacgtatttcaaattcaattccagagtttactgggaaacactataggacttaccaatcggcaatttc

SEQ ID NO: 183229 - DNA, 73 bp, Homo sapiens
tatttcaaattcaattccagagtttactgggaaacactataggacttaccaatcggcaatttctggaatctga

SEQ ID NO: 183230 - DNA, 72 bp, Homo sapiens
atttcaaattcaattccagagtttactgggaaacactataggacttaccaatcggcaatttctggaatctga

SEQ ID NO: 183231 - DNA, 71 bp, Homo sapiens
aattcaattccagagtttactgggaaacactataggacttaccaatcggcaatttctggaatctgaggatt

SEQ ID NO: 183232 - DNA, 72 bp, Homo sapiens
aattccagagtttactgggaaacactataggacttaccaatcggcaatttctggaatctgaggatttgtcag

SEQ ID NO: 183233 - DNA, 73 bp, Homo sapiens
agtttactgggaaacactataggacttaccaatcggcaatttctggaatctgaggatttgtcaggactactca

SEQ ID NO: 183234 - DNA, 75 bp, Homo sapiens
ttactgggaaacactataggacttaccaatcggcaatttctggaatctgaggatttgtcaggactactcatagaa

SEQ ID NO: 183235 - DNA, 76 bp, Homo sapiens
tgggaaacactataggacttaccaatcggcaatttctggaatctgaggatttgtcaggactactcatagaagatta

SEQ ID NO: 183236 - DNA, 84 bp, Homo sapiens
tttctggaatctgaggatttgtcaggactactcatagaagattatgctcactttatcactggatgctgattgttgcatttcaaa

SEQ ID NO: 183237 - DNA, 83 bp, Homo sapiens
aatctgaggatttgtcaggactactcatagaagattatgctcactttatcactggatgctgattgttgcatttcaaaggctaa

SEQ ID NO: 183238 - DNA, 85 bp, Homo sapiens
tttgtcaggactactcatagaagattatgctcactttatcactggatgctgattgttgcatttcaaaggctaaatgctcacatta

SEQ ID NO: 183239 - DNA, 83 bp, Homo sapiens
ttatgctcactttatcactggatgctgattgttgcatttcaaaggctaaatgctcacattactcacttagaacgctatcttta

SEQ ID NO: 183240 - DNA, 81 bp, Homo sapiens
ttgttgcatttcaaaggctaaatgctcacattactcacttagaacgctatctttaactgtagcactatatcatctacagta

SEQ ID NO: 183241 - DNA, 78 bp, Homo sapiens
tttcaaaggctaaatgctcacattactcacttagaacgctatctttaactgtagcactatatcatctacagtagacct

SEQ ID NO: 183242 - DNA, 79 bp, Homo sapiens
aaatgctcacattactcacttagaacgctatctttaactgtagcactatatcatctacagtagaccttgctataaagat

SEQ ID NO: 183243 - DNA, 75 bp, Homo sapiens
attactcacttagaacgctatctttaactgtagcactatatcatctacagtagaccttgctataaagatttccct

SEQ ID NO: 183244 - DNA, 76 bp, Homo sapiens
ttagaacgctatctttaactgtagcactatatcatctacagtagaccttgctataaagatttcccttcgatttcaa

SEQ ID NO: 183245 - DNA, 74 bp, Homo sapiens
ctttaactgtagcactatatcatctacagtagaccttgctataaagatttcccttcgatttcaaaaatattcac

SEQ ID NO: 183246 - DNA, 77 bp, Homo sapiens
gtagcactatatcatctacagtagaccttgctataaagatttcccttcgatttcaaaaatattcactgatataatta

SEQ ID NO: 183247 - DNA, 74 bp, Homo sapiens
tcatctacagtagaccttgctataaagatttcccttcgatttcaaaaatattcactgatataattaaatacagg

SEQ ID NO: 183248 - DNA, 73 bp, Homo sapiens
gtagaccttgctataaagatttcccttcgatttcaaaaatattcactgatataattaaatacaggtctgaatg

SEQ ID NO: 183249 - DNA, 71 bp, Homo sapiens
gctataaagatttcccttcgatttcaaaaatattcactgatataattaaatacaggtctgaatgttttagg

SEQ ID NO: 183250 - DNA, 76 bp, Homo sapiens
caaaaatattcactgatataattaaatacaggtctgaatgttttaggttacatgctatgaaaaggtcagtgcctga

SEQ ID NO: 183251 - DNA, 76 bp, Homo sapiens
cactgatataattaaatacaggtctgaatgttttaggttacatgctatgaaaaggtcagtgcctgaagactgtaaa

SEQ ID NO: 183252 - DNA, 76 bp, Homo sapiens
aattaaatacaggtctgaatgttttaggttacatgctatgaaaaggtcagtgcctgaagactgtaaatatgtgcaa

SEQ ID NO: 183253 - DNA, 79 bp, Homo sapiens
gtctgaatgttttaggttacatgctatgaaaaggtcagtgcctgaagactgtaaatatgtgcaatgcctctcttcttta

SEQ ID NO: 183254 - DNA, 77 bp, Homo sapiens
aatgttttaggttacatgctatgaaaaggtcagtgcctgaagactgtaaatatgtgcaatgcctctcttctttactc

SEQ ID NO: 183255 - DNA, 82 bp, Homo sapiens
atgctatgaaaaggtcagtgcctgaagactgtaaatatgtgcaatgcctctcttctttactccaacagctatgccttacata

SEQ ID NO: 183256 - DNA, 79 bp, Homo sapiens
atgaaaaggtcagtgcctgaagactgtaaatatgtgcaatgcctctcttctttactccaacagctatgccttacataac

SEQ ID NO: 183257 - DNA, 77 bp, Homo sapiens
agtgcctgaagactgtaaatatgtgcaatgcctctcttctttactccaacagctatgccttacataaccacttttta

SEQ ID NO: 183258 - DNA, 77 bp, Homo sapiens
tgtaaatatgtgcaatgcctctcttctttactccaacagctatgccttacataaccactttttattgcgtgataaaa

SEQ ID NO: 183259 - DNA, 78 bp, Homo sapiens
tatgtgcaatgcctctcttctttactccaacagctatgccttacataaccactttttattgcgtgataaaagtaatgc

SEQ ID NO: 183260 - DNA, 75 bp, Homo sapiens
tcttctttactccaacagctatgccttacataaccactttttattgcgtgataaaagtaatgctagttgacagag

SEQ ID NO: 183261 - DNA, 75 bp, Homo sapiens
tttactccaacagctatgccttacataaccactttttattgcgtgataaaagtaatgctagttgacagaggagaa

SEQ ID NO: 183262 - DNA, 75 bp, Homo sapiens
cagctatgccttacataaccactttttattgcgtgataaaagtaatgctagttgacagaggagaaaagtcattat

SEQ ID NO: 183263 - DNA, 71 bp, Homo sapiens
acataaccactttttattgcgtgataaaagtaatgctagttgacagaggagaaaagtcattattggatttt

SEQ ID NO: 183264 - DNA, 72 bp, Homo sapiens
ctttttattgcgtgataaaagtaatgctagttgacagaggagaaaagtcattattggattttttcaattatg

SEQ ID NO: 183265 - DNA, 76 bp, Homo sapiens
gataaaagtaatgctagttgacagaggagaaaagtcattattggattttttcaattatgtagtaattagtcatgca

SEQ ID NO: 183266 - DNA, 74 bp, Homo sapiens
agtaatgctagttgacagaggagaaaagtcattattggattttttcaattatgtagtaattagtcatgcatttt

SEQ ID NO: 183267 - DNA, 73 bp, Homo sapiens
aagtcattattggattttttcaattatgtagtaattagtcatgcattttttaagtgccaatctaacaagaaca

SEQ ID NO: 183268 - DNA, 71 bp, Homo sapiens
tggattttttcaattatgtagtaattagtcatgcattttttaagtgccaatctaacaagaacaggtaaaac

SEQ ID NO: 183269 - DNA, 70 bp, Homo sapiens
ttttcaattatgtagtaattagtcatgcattttttaagtgccaatctaacaagaacaggtaaaactattt

SEQ ID NO: 183270 - DNA, 73 bp, Homo sapiens
atgtagtaattagtcatgcattttttaagtgccaatctaacaagaacaggtaaaactattttaagagcataga

SEQ ID NO: 183271 - DNA, 70 bp, Homo sapiens
tttaagtgccaatctaacaagaacaggtaaaactattttaagagcatagaaaactaagagtaacaagaga

SEQ ID NO: 183272 - DNA, 71 bp, Homo sapiens
gccaatctaacaagaacaggtaaaactattttaagagcatagaaaactaagagtaacaagagaaagtgata

SEQ ID NO: 183273 - DNA, 72 bp, Homo sapiens
ctattttaagagcatagaaaactaagagtaacaagagaaagtgataactgtaacttgagatatatttataac

SEQ ID NO: 183274 - DNA, 71 bp, Homo sapiens
gaaaactaagagtaacaagagaaagtgataactgtaacttgagatatatttataactagcattaccaattt

SEQ ID NO: 183275 - DNA, 73 bp, Homo sapiens
gagtaacaagagaaagtgataactgtaacttgagatatatttataactagcattaccaatttttaaacatata

SEQ ID NO: 183276 - DNA, 72 bp, Homo sapiens
gtgataactgtaacttgagatatatttataactagcattaccaatttttaaacatatataataaattggttc

SEQ ID NO: 183277 - DNA, 72 bp, Homo sapiens
actgtaacttgagatatatttataactagcattaccaatttttaaacatatataataaattggttctgatta

SEQ ID NO: 183278 - DNA, 73 bp, Homo sapiens
gatatatttataactagcattaccaatttttaaacatatataataaattggttctgattatttgatacttgtc

SEQ ID NO: 183279 - DNA, 70 bp, Homo sapiens
taactagcattaccaatttttaaacatatataataaattggttctgattatttgatacttgtcttaaaag

SEQ ID NO: 183280 - DNA, 72 bp, Homo sapiens
ccaatttttaaacatatataataaattggttctgattatttgatacttgtcttaaaagtacttcatcattga

SEQ ID NO: 183281 - DNA, 75 bp, Homo sapiens
aacatatataataaattggttctgattatttgatacttgtcttaaaagtacttcatcattgataagatttatcat

SEQ ID NO: 183282 - DNA, 74 bp, Homo sapiens
ataaattggttctgattatttgatacttgtcttaaaagtacttcatcattgataagatttatcattcttgtaaa

SEQ ID NO: 183283 - DNA, 77 bp, Homo sapiens
ggttctgattatttgatacttgtcttaaaagtacttcatcattgataagatttatcattcttgtaaagcttcatatc

SEQ ID NO: 183284 - DNA, 75 bp, Homo sapiens
ttatttgatacttgtcttaaaagtacttcatcattgataagatttatcattcttgtaaagcttcatatctaaaaa

SEQ ID NO: 183285 - DNA, 76 bp, Homo sapiens
tgtcttaaaagtacttcatcattgataagatttatcattcttgtaaagcttcatatctaaaaaagatttacagtca

SEQ ID NO: 183286 - DNA, 75 bp, Homo sapiens
cttcatcattgataagatttatcattcttgtaaagcttcatatctaaaaaagatttacagtcattttaattatcc

SEQ ID NO: 183287 - DNA, 73 bp, Homo sapiens
gatttatcattcttgtaaagcttcatatctaaaaaagatttacagtcattttaattatccttcacaacaactc

SEQ ID NO: 183288 - DNA, 72 bp, Homo sapiens
cttgtaaagcttcatatctaaaaaagatttacagtcattttaattatccttcacaacaactctttcaaatca

SEQ ID NO: 183289 - DNA, 74 bp, Homo sapiens
tatctaaaaaagatttacagtcattttaattatccttcacaacaactctttcaaatcattcaatgccaccatcc

SEQ ID NO: 183290 - DNA, 77 bp, Homo sapiens
agatttacagtcattttaattatccttcacaacaactctttcaaatcattcaatgccaccatccctgattctgattc

SEQ ID NO: 183291 - DNA, 78 bp, Homo sapiens
ttaattatccttcacaacaactctttcaaatcattcaatgccaccatccctgattctgattctttccatatgaggaaa

SEQ ID NO: 183292 - DNA, 80 bp, Homo sapiens
aacaactctttcaaatcattcaatgccaccatccctgattctgattctttccatatgaggaaaatgactcatatgcagtt

SEQ ID NO: 183293 - DNA, 81 bp, Homo sapiens
tttcaaatcattcaatgccaccatccctgattctgattctttccatatgaggaaaatgactcatatgcagtttatagaatt

SEQ ID NO: 183294 - DNA, 81 bp, Homo sapiens
ttcaatgccaccatccctgattctgattctttccatatgaggaaaatgactcatatgcagtttatagaattttcacctgta

SEQ ID NO: 183295 - DNA, 80 bp, Homo sapiens
atccctgattctgattctttccatatgaggaaaatgactcatatgcagtttatagaattttcacctgtacaacacagcaa

SEQ ID NO: 183296 - DNA, 80 bp, Homo sapiens
attctgattctttccatatgaggaaaatgactcatatgcagtttatagaattttcacctgtacaacacagcaaggagctg

SEQ ID NO: 183297 - DNA, 83 bp, Homo sapiens
ttccatatgaggaaaatgactcatatgcagtttatagaattttcacctgtacaacacagcaaggagctggctggattctcata

SEQ ID NO: 183298 - DNA, 81 bp, Homo sapiens
aaaatgactcatatgcagtttatagaattttcacctgtacaacacagcaaggagctggctggattctcatataggcttctg

SEQ ID NO: 183299 - DNA, 85 bp, Homo sapiens
atatgcagtttatagaattttcacctgtacaacacagcaaggagctggctggattctcatataggcttctggatgcaggctgaga

SEQ ID NO: 183300 - DNA, 83 bp, Homo sapiens
ttatagaattttcacctgtacaacacagcaaggagctggctggattctcatataggcttctggatgcaggctgagacaccaaa

SEQ ID NO: 183301 - DNA, 83 bp, Homo sapiens
aattttcacctgtacaacacagcaaggagctggctggattctcatataggcttctggatgcaggctgagacaccaaacacaga

SEQ ID NO: 183302 - DNA, 81 bp, Homo sapiens
aacacagcaaggagctggctggattctcatataggcttctggatgcaggctgagacaccaaacacagacacccaaagaaaa

SEQ ID NO: 183303 - DNA, 78 bp, Homo sapiens
aaggagctggctggattctcatataggcttctggatgcaggctgagacaccaaacacagacacccaaagaaaaaggtc

SEQ ID NO: 183304 - DNA, 73 bp, Homo sapiens
ctcatataggcttctggatgcaggctgagacaccaaacacagacacccaaagaaaaaggtccagggttggggg

SEQ ID NO: 183305 - DNA, 73 bp, Homo sapiens
ttctggatgcaggctgagacaccaaacacagacacccaaagaaaaaggtccagggttggggggagcattgagg

SEQ ID NO: 183306 - DNA, 69 bp, Homo sapiens
tgagacaccaaacacagacacccaaagaaaaaggtccagggttggggggagcattgagggacaggtacc

SEQ ID NO: 183307 - DNA, 66 bp, Homo sapiens
acccaaagaaaaaggtccagggttggggggagcattgagggacaggtacctcctccagaattagaa

SEQ ID NO: 183308 - DNA, 68 bp, Homo sapiens
agaaaaaggtccagggttggggggagcattgagggacaggtacctcctccagaattagaatgaagctt

SEQ ID NO: 183309 - DNA, 71 bp, Homo sapiens
gttggggggagcattgagggacaggtacctcctccagaattagaatgaagctttcgggtatttgccactta

SEQ ID NO: 183310 - DNA, 74 bp, Homo sapiens
tacctcctccagaattagaatgaagctttcgggtatttgccacttacggaggcagggaggcagagcagttcttc

SEQ ID NO: 183311 - DNA, 75 bp, Homo sapiens
tagaatgaagctttcgggtatttgccacttacggaggcagggaggcagagcagttcttccgatctgaacacaaaa

SEQ ID NO: 183312 - DNA, 76 bp, Homo sapiens
acttacggaggcagggaggcagagcagttcttccgatctgaacacaaaataagacactagctgtgcaaaaagaaga

SEQ ID NO: 183313 - DNA, 80 bp, Homo sapiens
ggaggcagagcagttcttccgatctgaacacaaaataagacactagctgtgcaaaaagaagatgagccgcagctttaaga

SEQ ID NO: 183314 - DNA, 77 bp, Homo sapiens
agagcagttcttccgatctgaacacaaaataagacactagctgtgcaaaaagaagatgagccgcagctttaagaaac

SEQ ID NO: 183315 - DNA, 76 bp, Homo sapiens
aacacaaaataagacactagctgtgcaaaaagaagatgagccgcagctttaagaaacccagctatgattcttccta

SEQ ID NO: 183316 - DNA, 79 bp, Homo sapiens
tgtgcaaaaagaagatgagccgcagctttaagaaacccagctatgattcttcctacctagacactgagccaattagtga

SEQ ID NO: 183317 - DNA, 77 bp, Homo sapiens
aagaagatgagccgcagctttaagaaacccagctatgattcttcctacctagacactgagccaattagtgacctggc

SEQ ID NO: 183318 - DNA, 75 bp, Homo sapiens
agctttaagaaacccagctatgattcttcctacctagacactgagccaattagtgacctggccctgagttagaga

SEQ ID NO: 183319 - DNA, 75 bp, Homo sapiens
taagaaacccagctatgattcttcctacctagacactgagccaattagtgacctggccctgagttagagaattaa

SEQ ID NO: 183320 - DNA, 75 bp, Homo sapiens
tatgattcttcctacctagacactgagccaattagtgacctggccctgagttagagaattaactgtttaaggcta

SEQ ID NO: 183321 - DNA, 74 bp, Homo sapiens
tacctagacactgagccaattagtgacctggccctgagttagagaattaactgtttaaggctactacagtgtct

SEQ ID NO: 183322 - DNA, 73 bp, Homo sapiens
acctggccctgagttagagaattaactgtttaaggctactacagtgtcttagttctgatagtgcagtaaggag

SEQ ID NO: 183323 - DNA, 72 bp, Homo sapiens
agttagagaattaactgtttaaggctactacagtgtcttagttctgatagtgcagtaaggagggggcattag

SEQ ID NO: 183324 - DNA, 74 bp, Homo sapiens
ttaactgtttaaggctactacagtgtcttagttctgatagtgcagtaaggagggggcattagggatggtgataa

SEQ ID NO: 183325 - DNA, 74 bp, Homo sapiens
taaggctactacagtgtcttagttctgatagtgcagtaaggagggggcattagggatggtgataaggtaactta

SEQ ID NO: 183326 - DNA, 73 bp, Homo sapiens
agtgtcttagttctgatagtgcagtaaggagggggcattagggatggtgataaggtaacttaactcaatattc

SEQ ID NO: 183327 - DNA, 72 bp, Homo sapiens
tgatagtgcagtaaggagggggcattagggatggtgataaggtaacttaactcaatattcccactaggtaaa

SEQ ID NO: 183328 - DNA, 67 bp, Homo sapiens
agtaaggagggggcattagggatggtgataaggtaacttaactcaatattcccactaggtaaatttg

SEQ ID NO: 183329 - DNA, 68 bp, Homo sapiens
ggcattagggatggtgataaggtaacttaactcaatattcccactaggtaaatttggggtccacaaag

SEQ ID NO: 183330 - DNA, 69 bp, Homo sapiens
ataaggtaacttaactcaatattcccactaggtaaatttggggtccacaaaggagacatcatgtctggg

SEQ ID NO: 183331 - DNA, 71 bp, Homo sapiens
ttaactcaatattcccactaggtaaatttggggtccacaaaggagacatcatgtctgggtgtacaacttta

SEQ ID NO: 183332 - DNA, 80 bp, Homo sapiens
tccacaaaggagacatcatgtctgggtgtacaactttactatctggaggcaagaactgatctactcagaatatggaacta

SEQ ID NO: 183333 - DNA, 78 bp, Homo sapiens
agacatcatgtctgggtgtacaactttactatctggaggcaagaactgatctactcagaatatggaactagttgtaac

SEQ ID NO: 183334 - DNA, 79 bp, Homo sapiens
tacaactttactatctggaggcaagaactgatctactcagaatatggaactagttgtaacttccaccacagagatatca

SEQ ID NO: 183335 - DNA, 73 bp, Homo sapiens
aagaactgatctactcagaatatggaactagttgtaacttccaccacagagatatcaccttttctgggggtta

SEQ ID NO: 183336 - DNA, 71 bp, Homo sapiens
atctactcagaatatggaactagttgtaacttccaccacagagatatcaccttttctgggggttaccttta

SEQ ID NO: 183337 - DNA, 69 bp, Homo sapiens
aatatggaactagttgtaacttccaccacagagatatcaccttttctgggggttacctttagtcacaaa

SEQ ID NO: 183338 - DNA, 69 bp, Homo sapiens
actagttgtaacttccaccacagagatatcaccttttctgggggttacctttagtcacaaagtgttaga

SEQ ID NO: 183339 - DNA, 69 bp, Homo sapiens
cttttctgggggttacctttagtcacaaagtgttagacactggctgtaagatacactttgtaacaaaca

SEQ ID NO: 183340 - DNA, 70 bp, Homo sapiens
gttacctttagtcacaaagtgttagacactggctgtaagatacactttgtaacaaacatggaacgtattt

SEQ ID NO: 183341 - DNA, 71 bp, Homo sapiens
ttagtcacaaagtgttagacactggctgtaagatacactttgtaacaaacatggaacgtatttttaaactc

SEQ ID NO: 183342 - DNA, 71 bp, Homo sapiens
agtgttagacactggctgtaagatacactttgtaacaaacatggaacgtatttttaaactctttctcagaa

SEQ ID NO: 183343 - DNA, 68 bp, Homo sapiens
actggctgtaagatacactttgtaacaaacatggaacgtatttttaaactctttctcagaaaagaaaa

SEQ ID NO: 183344 - DNA, 67 bp, Homo sapiens
agatacactttgtaacaaacatggaacgtatttttaaactctttctcagaaaagaaaataaggaata

SEQ ID NO: 183345 - DNA, 69 bp, Homo sapiens
tgtaacaaacatggaacgtatttttaaactctttctcagaaaagaaaataaggaataaaatgctggaga

SEQ ID NO: 183346 - DNA, 70 bp, Homo sapiens
aaactctttctcagaaaagaaaataaggaataaaatgctggagaaacagtatggagaaataaggcttcca

SEQ ID NO: 183347 - DNA, 73 bp, Homo sapiens
tcagaaaagaaaataaggaataaaatgctggagaaacagtatggagaaataaggcttccacaaaagaatgaca

SEQ ID NO: 183348 - DNA, 74 bp, Homo sapiens
ataaaatgctggagaaacagtatggagaaataaggcttccacaaaagaatgacatgccagtaaacaggaaatct

SEQ ID NO: 183349 - DNA, 74 bp, Homo sapiens
tggagaaacagtatggagaaataaggcttccacaaaagaatgacatgccagtaaacaggaaatcttggcttatt

SEQ ID NO: 183350 - DNA, 70 bp, Homo sapiens
gaaataaggcttccacaaaagaatgacatgccagtaaacaggaaatcttggcttatttcaactttttaaa

SEQ ID NO: 183351 - DNA, 70 bp, Homo sapiens
tccacaaaagaatgacatgccagtaaacaggaaatcttggcttatttcaactttttaaaatgggcccatt

SEQ ID NO: 183352 - DNA, 67 bp, Homo sapiens
ccagtaaacaggaaatcttggcttatttcaactttttaaaatgggcccatttaaaaagctgtgccca

SEQ ID NO: 183353 - DNA, 65 bp, Homo sapiens
ggaaatcttggcttatttcaactttttaaaatgggcccatttaaaaagctgtgcccaccctcccc

SEQ ID NO: 183354 - DNA, 63 bp, Homo sapiens
tttcaactttttaaaatgggcccatttaaaaagctgtgcccaccctcccccaccaacttcttt

SEQ ID NO: 183355 - DNA, 63 bp, Homo sapiens
actttttaaaatgggcccatttaaaaagctgtgcccaccctcccccaccaacttcttttttga

SEQ ID NO: 183356 - DNA, 66 bp, Homo sapiens
ttaaaaagctgtgcccaccctcccccaccaacttcttttttgatggagggaggtgtgggaagaggt

SEQ ID NO: 183357 - DNA, 66 bp, Homo sapiens
caccctcccccaccaacttcttttttgatggagggaggtgtgggaagaggtttccgtccaaggtga

SEQ ID NO: 183358 - DNA, 70 bp, Homo sapiens
caccaacttcttttttgatggagggaggtgtgggaagaggtttccgtccaaggtgacccatgtgagagaa

SEQ ID NO: 183359 - DNA, 72 bp, Homo sapiens
ttttttgatggagggaggtgtgggaagaggtttccgtccaaggtgacccatgtgagagaagagcaggtgaaa

SEQ ID NO: 183360 - DNA, 71 bp, Homo sapiens
atggagggaggtgtgggaagaggtttccgtccaaggtgacccatgtgagagaagagcaggtgaaagaaagg

SEQ ID NO: 183361 - DNA, 70 bp, Homo sapiens
aggtttccgtccaaggtgacccatgtgagagaagagcaggtgaaagaaaggtcccacaagagtaaggaaa

SEQ ID NO: 183362 - DNA, 70 bp, Homo sapiens
aagagcaggtgaaagaaaggtcccacaagagtaaggaaagggcgtaatctcccctatgttcaatggtcac

SEQ ID NO: 183363 - DNA, 74 bp, Homo sapiens
ccacaagagtaaggaaagggcgtaatctcccctatgttcaatggtcaccacctgtgaagctaagcgtcagagga

SEQ ID NO: 183364 - DNA, 72 bp, Homo sapiens
agtaaggaaagggcgtaatctcccctatgttcaatggtcaccacctgtgaagctaagcgtcagaggaactaa

SEQ ID NO: 183365 - DNA, 73 bp, Homo sapiens
aagggcgtaatctcccctatgttcaatggtcaccacctgtgaagctaagcgtcagaggaactaaaccatagcg

SEQ ID NO: 183366 - DNA, 77 bp, Homo sapiens
cctatgttcaatggtcaccacctgtgaagctaagcgtcagaggaactaaaccatagcgtctcccaaggcaacagatg

SEQ ID NO: 183367 - DNA, 76 bp, Homo sapiens
aagctaagcgtcagaggaactaaaccatagcgtctcccaaggcaacagatggagcaaatgaattagtcactgccct

SEQ ID NO: 183368 - DNA, 77 bp, Homo sapiens
agaggaactaaaccatagcgtctcccaaggcaacagatggagcaaatgaattagtcactgcccttcccaggatgcta

SEQ ID NO: 183369 - DNA, 78 bp, Homo sapiens
ctaaaccatagcgtctcccaaggcaacagatggagcaaatgaattagtcactgcccttcccaggatgctaggcacaaa

SEQ ID NO: 183370 - DNA, 78 bp, Homo sapiens
tcccaaggcaacagatggagcaaatgaattagtcactgcccttcccaggatgctaggcacaaagcactttggagggaa

SEQ ID NO: 183371 - DNA, 76 bp, Homo sapiens
acagatggagcaaatgaattagtcactgcccttcccaggatgctaggcacaaagcactttggagggaaggtggtta

SEQ ID NO: 183372 - DNA, 78 bp, Homo sapiens
ttagtcactgcccttcccaggatgctaggcacaaagcactttggagggaaggtggttaagcagcgcatcctgctgaaa

SEQ ID NO: 183373 - DNA, 77 bp, Homo sapiens
cttcccaggatgctaggcacaaagcactttggagggaaggtggttaagcagcgcatcctgctgaaacaaacctgaca

SEQ ID NO: 183374 - DNA, 76 bp, Homo sapiens
acaaagcactttggagggaaggtggttaagcagcgcatcctgctgaaacaaacctgacatctgcttaatcttctcc

SEQ ID NO: 183375 - DNA, 77 bp, Homo sapiens
aaggtggttaagcagcgcatcctgctgaaacaaacctgacatctgcttaatcttctcccctggcctccaactccata

SEQ ID NO: 183376 - DNA, 77 bp, Homo sapiens
agcgcatcctgctgaaacaaacctgacatctgcttaatcttctcccctggcctccaactccatactgggtatttcaa

SEQ ID NO: 183377 - DNA, 73 bp, Homo sapiens
ctgaaacaaacctgacatctgcttaatcttctcccctggcctccaactccatactgggtatttcaaatgggta

SEQ ID NO: 183378 - DNA, 72 bp, Homo sapiens
acaaacctgacatctgcttaatcttctcccctggcctccaactccatactgggtatttcaaatgggtaacaa

SEQ ID NO: 183379 - DNA, 72 bp, Homo sapiens
atctgcttaatcttctcccctggcctccaactccatactgggtatttcaaatgggtaacaacttgaaagctc

SEQ ID NO: 183380 - DNA, 72 bp, Homo sapiens
ttctcccctggcctccaactccatactgggtatttcaaatgggtaacaacttgaaagctccatgtggacttc

SEQ ID NO: 183381 - DNA, 73 bp, Homo sapiens
ctccaactccatactgggtatttcaaatgggtaacaacttgaaagctccatgtggacttctctttcattatta

SEQ ID NO: 183382 - DNA, 72 bp, Homo sapiens
actccatactgggtatttcaaatgggtaacaacttgaaagctccatgtggacttctctttcattattattat

SEQ ID NO: 183383 - DNA, 71 bp, Homo sapiens
gggtatttcaaatgggtaacaacttgaaagctccatgtggacttctctttcattattattatttcaaacgc

SEQ ID NO: 183384 - DNA, 73 bp, Homo sapiens
tgggtaacaacttgaaagctccatgtggacttctctttcattattattatttcaaacgctaaatgttatctac

SEQ ID NO: 183385 - DNA, 73 bp, Homo sapiens
gaaagctccatgtggacttctctttcattattattatttcaaacgctaaatgttatctacttaggatcttact

SEQ ID NO: 183386 - DNA, 76 bp, Homo sapiens
tctctttcattattattatttcaaacgctaaatgttatctacttaggatcttactttggcttcatgccctggcaga

SEQ ID NO: 183387 - DNA, 74 bp, Homo sapiens
ttattatttcaaacgctaaatgttatctacttaggatcttactttggcttcatgccctggcagaaggcaagatt

SEQ ID NO: 183388 - DNA, 72 bp, Homo sapiens
atttcaaacgctaaatgttatctacttaggatcttactttggcttcatgccctggcagaaggcaagattttt

SEQ ID NO: 183389 - DNA, 73 bp, Homo sapiens
ctaaatgttatctacttaggatcttactttggcttcatgccctggcagaaggcaagattttttagctaataag

SEQ ID NO: 183390 - DNA, 73 bp, Homo sapiens
ttaggatcttactttggcttcatgccctggcagaaggcaagattttttagctaataagggcctggaggcttta

SEQ ID NO: 183391 - DNA, 73 bp, Homo sapiens
atcttactttggcttcatgccctggcagaaggcaagattttttagctaataagggcctggaggctttacaaga

SEQ ID NO: 183392 - DNA, 72 bp, Homo sapiens
ttcatgccctggcagaaggcaagattttttagctaataagggcctggaggctttacaagaccacaggagttt

SEQ ID NO: 183393 - DNA, 69 bp, Homo sapiens
cagaaggcaagattttttagctaataagggcctggaggctttacaagaccacaggagttttcaaaaata

SEQ ID NO: 183394 - DNA, 68 bp, Homo sapiens
caagattttttagctaataagggcctggaggctttacaagaccacaggagttttcaaaaatattccta

SEQ ID NO: 183395 - DNA, 71 bp, Homo sapiens
tttagctaataagggcctggaggctttacaagaccacaggagttttcaaaaatattcctacatattcataa

SEQ ID NO: 183396 - DNA, 70 bp, Homo sapiens
aagggcctggaggctttacaagaccacaggagttttcaaaaatattcctacatattcataatagtcaaat

SEQ ID NO: 183397 - DNA, 78 bp, Homo sapiens
ccacaggagttttcaaaaatattcctacatattcataatagtcaaattaatagatctgatgccagatgtaaagtggca

SEQ ID NO: 183398 - DNA, 80 bp, Homo sapiens
tcaaaaatattcctacatattcataatagtcaaattaatagatctgatgccagatgtaaagtggcattttatgtgtagct

SEQ ID NO: 183399 - DNA, 77 bp, Homo sapiens
tcataatagtcaaattaatagatctgatgccagatgtaaagtggcattttatgtgtagctttaaaaggtactaatgg

SEQ ID NO: 183400 - DNA, 73 bp, Homo sapiens
caaattaatagatctgatgccagatgtaaagtggcattttatgtgtagctttaaaaggtactaatggggtaac

SEQ ID NO: 183401 - DNA, 72 bp, Homo sapiens
gatctgatgccagatgtaaagtggcattttatgtgtagctttaaaaggtactaatggggtaacttttaaagc

SEQ ID NO: 183402 - DNA, 70 bp, Homo sapiens
gatgccagatgtaaagtggcattttatgtgtagctttaaaaggtactaatggggtaacttttaaagctac

SEQ ID NO: 183403 - DNA, 68 bp, Homo sapiens
gtggcattttatgtgtagctttaaaaggtactaatggggtaacttttaaagctactttaaaacatgca

SEQ ID NO: 183404 - DNA, 71 bp, Homo sapiens
tatgtgtagctttaaaaggtactaatggggtaacttttaaagctactttaaaacatgcagctatgaatcta

SEQ ID NO: 183405 - DNA, 70 bp, Homo sapiens
agctttaaaaggtactaatggggtaacttttaaagctactttaaaacatgcagctatgaatctaatgcaa

SEQ ID NO: 183406 - DNA, 71 bp, Homo sapiens
gtactaatggggtaacttttaaagctactttaaaacatgcagctatgaatctaatgcaaaactgtttttgc

SEQ ID NO: 183407 - DNA, 73 bp, Homo sapiens
gtaacttttaaagctactttaaaacatgcagctatgaatctaatgcaaaactgtttttgcctttcatgttggc

SEQ ID NO: 183408 - DNA, 77 bp, Homo sapiens
aagctactttaaaacatgcagctatgaatctaatgcaaaactgtttttgcctttcatgttggctatgtgtttactgc

SEQ ID NO: 183409 - DNA, 74 bp, Homo sapiens
atgcaaaactgtttttgcctttcatgttggctatgtgtttactgctctgtaataaactcatcagaaaaaacttg

SEQ ID NO: 183410 - DNA, 74 bp, Homo sapiens
actgtttttgcctttcatgttggctatgtgtttactgctctgtaataaactcatcagaaaaaacttggcatctt

SEQ ID NO: 183411 - DNA, 78 bp, Homo sapiens
ttcatgttggctatgtgtttactgctctgtaataaactcatcagaaaaaacttggcatctttctccctggatagatat

SEQ ID NO: 183412 - DNA, 78 bp, Homo sapiens
ctatgtgtttactgctctgtaataaactcatcagaaaaaacttggcatctttctccctggatagatatttggcattca

SEQ ID NO: 183413 - DNA, 76 bp, Homo sapiens
tttactgctctgtaataaactcatcagaaaaaacttggcatctttctccctggatagatatttggcattcaggaaa

SEQ ID NO: 183414 - DNA, 73 bp, Homo sapiens
ctgtaataaactcatcagaaaaaacttggcatctttctccctggatagatatttggcattcaggaaagaaatt

SEQ ID NO: 183415 - DNA, 69 bp, Homo sapiens
aacttggcatctttctccctggatagatatttggcattcaggaaagaaatttaggttaaacacctttta

SEQ ID NO: 183416 - DNA, 70 bp, Homo sapiens
tttctccctggatagatatttggcattcaggaaagaaatttaggttaaacaccttttagctgtcctttca

SEQ ID NO: 183417 - DNA, 64 bp, Homo sapiens
caggaaagaaatttaggttaaacaccttttagctgtcctttcagtaataattaaaagcttttcc

SEQ ID NO: 183418 - DNA, 67 bp, Homo sapiens
aggttaaacaccttttagctgtcctttcagtaataattaaaagcttttcctttgacttagtgacatg

SEQ ID NO: 183419 - DNA, 70 bp, Homo sapiens
ccttttagctgtcctttcagtaataattaaaagcttttcctttgacttagtgacatggttcacaaccaca

SEQ ID NO: 183420 - DNA, 73 bp, Homo sapiens
agctgtcctttcagtaataattaaaagcttttcctttgacttagtgacatggttcacaaccacatataatgaa

SEQ ID NO: 183421 - DNA, 74 bp, Homo sapiens
ttcagtaataattaaaagcttttcctttgacttagtgacatggttcacaaccacatataatgaaagcaacataa

SEQ ID NO: 183422 - DNA, 74 bp, Homo sapiens
aaagcttttcctttgacttagtgacatggttcacaaccacatataatgaaagcaacataaatctttcctgtgtg

SEQ ID NO: 183423 - DNA, 76 bp, Homo sapiens
tttcctttgacttagtgacatggttcacaaccacatataatgaaagcaacataaatctttcctgtgtggtacatta

SEQ ID NO: 183424 - DNA, 80 bp, Homo sapiens
tgacatggttcacaaccacatataatgaaagcaacataaatctttcctgtgtggtacattacatgccctccgatagatta

SEQ ID NO: 183425 - DNA, 77 bp, Homo sapiens
ttcacaaccacatataatgaaagcaacataaatctttcctgtgtggtacattacatgccctccgatagattaaaaca

SEQ ID NO: 183426 - DNA, 78 bp, Homo sapiens
gcaacataaatctttcctgtgtggtacattacatgccctccgatagattaaaacatgccagccaagtctgcactttta

SEQ ID NO: 183427 - DNA, 78 bp, Homo sapiens
agccaagtctgcacttttataggctttaagctgttgaagagccaacaaaagtactgatggcagagcatcaggtaaaca

SEQ ID NO: 183428 - DNA, 79 bp, Homo sapiens
gtctgcacttttataggctttaagctgttgaagagccaacaaaagtactgatggcagagcatcaggtaaacaggatgaa

SEQ ID NO: 183429 - DNA, 77 bp, Homo sapiens
tgttgaagagccaacaaaagtactgatggcagagcatcaggtaaacaggatgaaggaaaccatcggtaacaactgta

SEQ ID NO: 183430 - DNA, 75 bp, Homo sapiens
ccaacaaaagtactgatggcagagcatcaggtaaacaggatgaaggaaaccatcggtaacaactgtactgtagaa

SEQ ID NO: 183431 - DNA, 76 bp, Homo sapiens
agagcatcaggtaaacaggatgaaggaaaccatcggtaacaactgtactgtagaattttctgaatgcaggatcctg

SEQ ID NO: 183432 - DNA, 74 bp, Homo sapiens
aggtaaacaggatgaaggaaaccatcggtaacaactgtactgtagaattttctgaatgcaggatcctgtgttca

SEQ ID NO: 183433 - DNA, 77 bp, Homo sapiens
atgaaggaaaccatcggtaacaactgtactgtagaattttctgaatgcaggatcctgtgttcaggacagcataggct

SEQ ID NO: 183434 - DNA, 76 bp, Homo sapiens
aaaccatcggtaacaactgtactgtagaattttctgaatgcaggatcctgtgttcaggacagcataggcttgttct

SEQ ID NO: 183435 - DNA, 80 bp, Homo sapiens
taacaactgtactgtagaattttctgaatgcaggatcctgtgttcaggacagcataggcttgttcttggagaaagcagaa

SEQ ID NO: 183436 - DNA, 78 bp, Homo sapiens
tagaattttctgaatgcaggatcctgtgttcaggacagcataggcttgttcttggagaaagcagaatccctaccttta

SEQ ID NO: 183437 - DNA, 76 bp, Homo sapiens
ttttctgaatgcaggatcctgtgttcaggacagcataggcttgttcttggagaaagcagaatccctacctttaaat

SEQ ID NO: 183438 - DNA, 73 bp, Homo sapiens
atcctgtgttcaggacagcataggcttgttcttggagaaagcagaatccctacctttaaattcccagttctat

SEQ ID NO: 183439 - DNA, 75 bp, Homo sapiens
tgttcaggacagcataggcttgttcttggagaaagcagaatccctacctttaaattcccagttctattcagtaga

SEQ ID NO: 183440 - DNA, 70 bp, Homo sapiens
ccctacctttaaattcccagttctattcagtagacaagatgaagcataaaggcaaaagttaactaataca

SEQ ID NO: 183441 - DNA, 80 bp, Homo sapiens
tattcagtagacaagatgaagcataaaggcaaaagttaactaatacatacgaatacagcatctataatggcaatgtcacc

SEQ ID NO: 183442 - DNA, 82 bp, Homo sapiens
tagacaagatgaagcataaaggcaaaagttaactaatacatacgaatacagcatctataatggcaatgtcacctcatgaaca

SEQ ID NO: 183443 - DNA, 78 bp, Homo sapiens
aagcataaaggcaaaagttaactaatacatacgaatacagcatctataatggcaatgtcacctcatgaacagaaacta

SEQ ID NO: 183444 - DNA, 78 bp, Homo sapiens
aaggcaaaagttaactaatacatacgaatacagcatctataatggcaatgtcacctcatgaacagaaactatcaacta

SEQ ID NO: 183445 - DNA, 79 bp, Homo sapiens
actaatacatacgaatacagcatctataatggcaatgtcacctcatgaacagaaactatcaactaaaaggataaaatgc

SEQ ID NO: 183446 - DNA, 80 bp, Homo sapiens
catacgaatacagcatctataatggcaatgtcacctcatgaacagaaactatcaactaaaaggataaaatgcctactata

SEQ ID NO: 183447 - DNA, 78 bp, Homo sapiens
cagcatctataatggcaatgtcacctcatgaacagaaactatcaactaaaaggataaaatgcctactataaaccatat

SEQ ID NO: 183448 - DNA, 74 bp, Homo sapiens
tggcaatgtcacctcatgaacagaaactatcaactaaaaggataaaatgcctactataaaccatattttcaggg

SEQ ID NO: 183449 - DNA, 69 bp, Homo sapiens
cacctcatgaacagaaactatcaactaaaaggataaaatgcctactataaaccatattttcagggtttt

SEQ ID NO: 183450 - DNA, 64 bp, Homo sapiens
aacagaaactatcaactaaaaggataaaatgcctactataaaccatattttcagggtttttttt

SEQ ID NO: 183451 - DNA, 68 bp, Homo sapiens
ttttttaagagaaagtcatctcttttaacatcttgtgagtagcactttaaactttgggaactctttta

SEQ ID NO: 183452 - DNA, 71 bp, Homo sapiens
gaaagtcatctcttttaacatcttgtgagtagcactttaaactttgggaactcttttacacatatagtccc

SEQ ID NO: 183453 - DNA, 70 bp, Homo sapiens
tctcttttaacatcttgtgagtagcactttaaactttgggaactcttttacacatatagtccccctaaca

SEQ ID NO: 183454 - DNA, 71 bp, Homo sapiens
aacatcttgtgagtagcactttaaactttgggaactcttttacacatatagtccccctaacaatatgtgaa

SEQ ID NO: 183455 - DNA, 71 bp, Homo sapiens
tagcactttaaactttgggaactcttttacacatatagtccccctaacaatatgtgaagtaaggcatggaa

SEQ ID NO: 183456 - DNA, 71 bp, Homo sapiens
ccctaacaatatgtgaagtaaggcatggaaagaaggaaagagggaagacagaaggaaactagaaatattca

SEQ ID NO: 183457 - DNA, 71 bp, Homo sapiens
aatatgtgaagtaaggcatggaaagaaggaaagagggaagacagaaggaaactagaaatattcaggttcta

SEQ ID NO: 183458 - DNA, 70 bp, Homo sapiens
taaggcatggaaagaaggaaagagggaagacagaaggaaactagaaatattcaggttctactggaattta

SEQ ID NO: 183459 - DNA, 68 bp, Homo sapiens
aaagaaggaaagagggaagacagaaggaaactagaaatattcaggttctactggaatttacagactac

SEQ ID NO: 183460 - DNA, 70 bp, Homo sapiens
ggaaagagggaagacagaaggaaactagaaatattcaggttctactggaatttacagactaccaactatg

SEQ ID NO: 183461 - DNA, 71 bp, Homo sapiens
aaagagggaagacagaaggaaactagaaatattcaggttctactggaatttacagactaccaactatgtgc

SEQ ID NO: 183462 - DNA, 71 bp, Homo sapiens
agggaagacagaaggaaactagaaatattcaggttctactggaatttacagactaccaactatgtgccagg

SEQ ID NO: 183463 - DNA, 70 bp, Homo sapiens
gaaggaaactagaaatattcaggttctactggaatttacagactaccaactatgtgccaggtacttttta

SEQ ID NO: 183464 - DNA, 70 bp, Homo sapiens
gaaactagaaatattcaggttctactggaatttacagactaccaactatgtgccaggtactttttactac

SEQ ID NO: 183465 - DNA, 69 bp, Homo sapiens
tagaaatattcaggttctactggaatttacagactaccaactatgtgccaggtactttttactaccctt

SEQ ID NO: 183466 - DNA, 72 bp, Homo sapiens
tattcaggttctactggaatttacagactaccaactatgtgccaggtactttttactaccctttgattcaca

SEQ ID NO: 183467 - DNA, 71 bp, Homo sapiens
aatttacagactaccaactatgtgccaggtactttttactaccctttgattcacacaattttgtgagctat

SEQ ID NO: 183468 - DNA, 75 bp, Homo sapiens
actaccaactatgtgccaggtactttttactaccctttgattcacacaattttgtgagctattattcacatatca

SEQ ID NO: 183469 - DNA, 75 bp, Homo sapiens
gtgccaggtactttttactaccctttgattcacacaattttgtgagctattattcacatatcagagattataaaa

SEQ ID NO: 183470 - DNA, 74 bp, Homo sapiens
gtactttttactaccctttgattcacacaattttgtgagctattattcacatatcagagattataaaattaaga

SEQ ID NO: 183471 - DNA, 75 bp, Homo sapiens
ctaccctttgattcacacaattttgtgagctattattcacatatcagagattataaaattaagattcaaagttgt

SEQ ID NO: 183472 - DNA, 78 bp, Homo sapiens
tgtgagctattattcacatatcagagattataaaattaagattcaaagttgttaataagtattttgccccagatcaca

SEQ ID NO: 183473 - DNA, 76 bp, Homo sapiens
ttattcacatatcagagattataaaattaagattcaaagttgttaataagtattttgccccagatcacagagctag

SEQ ID NO: 183474 - DNA, 72 bp, Homo sapiens
cagagattataaaattaagattcaaagttgttaataagtattttgccccagatcacagagctagttaaactg

SEQ ID NO: 183475 - DNA, 71 bp, Homo sapiens
aaattaagattcaaagttgttaataagtattttgccccagatcacagagctagttaaactgtcagacctgg

SEQ ID NO: 183476 - DNA, 70 bp, Homo sapiens
attcaaagttgttaataagtattttgccccagatcacagagctagttaaactgtcagacctggggccctt

SEQ ID NO: 183477 - DNA, 72 bp, Homo sapiens
ttaataagtattttgccccagatcacagagctagttaaactgtcagacctggggccctttcccaggtctcaa

SEQ ID NO: 183478 - DNA, 71 bp, Homo sapiens
atcacagagctagttaaactgtcagacctggggccctttcccaggtctcaagagtctttctggggtgttag

SEQ ID NO: 183479 - DNA, 68 bp, Homo sapiens
tagttaaactgtcagacctggggccctttcccaggtctcaagagtctttctggggtgttagtttttca

SEQ ID NO: 183480 - DNA, 67 bp, Homo sapiens
aaactgtcagacctggggccctttcccaggtctcaagagtctttctggggtgttagtttttcaattg

SEQ ID NO: 183481 - DNA, 66 bp, Homo sapiens
gggccctttcccaggtctcaagagtctttctggggtgttagtttttcaattggtttataaaacaca

SEQ ID NO: 183482 - DNA, 67 bp, Homo sapiens
tttcccaggtctcaagagtctttctggggtgttagtttttcaattggtttataaaacacagtttgtg

SEQ ID NO: 183483 - DNA, 70 bp, Homo sapiens
tggggtgttagtttttcaattggtttataaaacacagtttgtgttcctcaccaaaatatggacaatctgc

SEQ ID NO: 183484 - DNA, 73 bp, Homo sapiens
attggtttataaaacacagtttgtgttcctcaccaaaatatggacaatctgcttgcctgggcccaaagtgcta

SEQ ID NO: 183485 - DNA, 74 bp, Homo sapiens
ataaaacacagtttgtgttcctcaccaaaatatggacaatctgcttgcctgggcccaaagtgctatggttccaa

SEQ ID NO: 183486 - DNA, 78 bp, Homo sapiens
agtttgtgttcctcaccaaaatatggacaatctgcttgcctgggcccaaagtgctatggttccaagcagattcctgca

SEQ ID NO: 183487 - DNA, 79 bp, Homo sapiens
accaaaatatggacaatctgcttgcctgggcccaaagtgctatggttccaagcagattcctgcaccacctggcatatat

SEQ ID NO: 183488 - DNA, 81 bp, Homo sapiens
atatggacaatctgcttgcctgggcccaaagtgctatggttccaagcagattcctgcaccacctggcatatatttacagga

SEQ ID NO: 183489 - DNA, 81 bp, Homo sapiens
ttgcctgggcccaaagtgctatggttccaagcagattcctgcaccacctggcatatatttacaggagcacacaagttcaga

SEQ ID NO: 183490 - DNA, 78 bp, Homo sapiens
ccaaagtgctatggttccaagcagattcctgcaccacctggcatatatttacaggagcacacaagttcagaagggaaa

SEQ ID NO: 183491 - DNA, 79 bp, Homo sapiens
aagcagattcctgcaccacctggcatatatttacaggagcacacaagttcagaagggaaatgttggtgggcgtagatgc

SEQ ID NO: 183492 - DNA, 80 bp, Homo sapiens
tgcaccacctggcatatatttacaggagcacacaagttcagaagggaaatgttggtgggcgtagatgccgtcaaagctga

SEQ ID NO: 183493 - DNA, 77 bp, Homo sapiens
tatttacaggagcacacaagttcagaagggaaatgttggtgggcgtagatgccgtcaaagctgacagaatctacaaa

SEQ ID NO: 183494 - DNA, 76 bp, Homo sapiens
acacaagttcagaagggaaatgttggtgggcgtagatgccgtcaaagctgacagaatctacaaactcatctagaaa

SEQ ID NO: 183495 - DNA, 79 bp, Homo sapiens
aagggaaatgttggtgggcgtagatgccgtcaaagctgacagaatctacaaactcatctagaaagaaatgcatgcagga

SEQ ID NO: 183496 - DNA, 80 bp, Homo sapiens
aaatgttggtgggcgtagatgccgtcaaagctgacagaatctacaaactcatctagaaagaaatgcatgcaggaagtgag

SEQ ID NO: 183497 - DNA, 87 bp, Homo sapiens
tagatgccgtcaaagctgacagaatctacaaactcatctagaaagaaatgcatgcaggaagtgaggtatgtatgacactgtcattga

SEQ ID NO: 183498 - DNA, 84 bp, Homo sapiens
gtcaaagctgacagaatctacaaactcatctagaaagaaatgcatgcaggaagtgaggtatgtatgacactgtcattgataaaa

SEQ ID NO: 183499 - DNA, 82 bp, Homo sapiens
acagaatctacaaactcatctagaaagaaatgcatgcaggaagtgaggtatgtatgacactgtcattgataaaatggaataa

SEQ ID NO: 183500 - DNA, 79 bp, Homo sapiens
atctagaaagaaatgcatgcaggaagtgaggtatgtatgacactgtcattgataaaatggaataatggaagaaagaaaa

SEQ ID NO: 183501 - DNA, 76 bp, Homo sapiens
tatgtatgacactgtcattgataaaatggaataatggaagaaagaaaaggcaacaaagggtgttgttgctggagta

SEQ ID NO: 183502 - DNA, 73 bp, Homo sapiens
tgtcattgataaaatggaataatggaagaaagaaaaggcaacaaagggtgttgttgctggagtaaggcttatc

SEQ ID NO: 183503 - DNA, 69 bp, Homo sapiens
ataaaatggaataatggaagaaagaaaaggcaacaaagggtgttgttgctggagtaaggcttatcctaa

SEQ ID NO: 183504 - DNA, 68 bp, Homo sapiens
aataatggaagaaagaaaaggcaacaaagggtgttgttgctggagtaaggcttatcctaactcaaaaa

SEQ ID NO: 183505 - DNA, 67 bp, Homo sapiens
aacaaagggtgttgttgctggagtaaggcttatcctaactcaaaaatcaaggaaaaaagaaccacaa

SEQ ID NO: 183506 - DNA, 70 bp, Homo sapiens
gtgttgttgctggagtaaggcttatcctaactcaaaaatcaaggaaaaaagaaccacaatccaaggtgag

SEQ ID NO: 183507 - DNA, 72 bp, Homo sapiens
cttatcctaactcaaaaatcaaggaaaaaagaaccacaatccaaggtgaggcacaatcaagatttctggcta

SEQ ID NO: 183508 - DNA, 74 bp, Homo sapiens
aaaaatcaaggaaaaaagaaccacaatccaaggtgaggcacaatcaagatttctggctagtggagatctgtcag

SEQ ID NO: 183509 - DNA, 78 bp, Homo sapiens
aaaaagaaccacaatccaaggtgaggcacaatcaagatttctggctagtggagatctgtcaggtgaaagatgctagaa

SEQ ID NO: 183510 - DNA, 80 bp, Homo sapiens
ccaaggtgaggcacaatcaagatttctggctagtggagatctgtcaggtgaaagatgctagaactagttaaacacataca

SEQ ID NO: 183511 - DNA, 78 bp, Homo sapiens
atcaagatttctggctagtggagatctgtcaggtgaaagatgctagaactagttaaacacatacacacactttaaata

SEQ ID NO: 183512 - DNA, 75 bp, Homo sapiens
atttctggctagtggagatctgtcaggtgaaagatgctagaactagttaaacacatacacacactttaaatattt

SEQ ID NO: 183513 - DNA, 71 bp, Homo sapiens
catacacacactttaaatattttgctttaactgaaaatttataaatacacattaatcaaccaatcctttga

SEQ ID NO: 183514 - DNA, 74 bp, Homo sapiens
tttaaatattttgctttaactgaaaatttataaatacacattaatcaaccaatcctttgatgcagaatcaagca

SEQ ID NO: 183515 - DNA, 75 bp, Homo sapiens
ttgctttaactgaaaatttataaatacacattaatcaaccaatcctttgatgcagaatcaagcagttttcagtgg

SEQ ID NO: 183516 - DNA, 75 bp, Homo sapiens
ctgaaaatttataaatacacattaatcaaccaatcctttgatgcagaatcaagcagttttcagtggggtctgaaa

SEQ ID NO: 183517 - DNA, 74 bp, Homo sapiens
ataaatacacattaatcaaccaatcctttgatgcagaatcaagcagttttcagtggggtctgaaaaatctttct

SEQ ID NO: 183518 - DNA, 75 bp, Homo sapiens
acacattaatcaaccaatcctttgatgcagaatcaagcagttttcagtggggtctgaaaaatctttcttagataa

SEQ ID NO: 183519 - DNA, 78 bp, Homo sapiens
aatcctttgatgcagaatcaagcagttttcagtggggtctgaaaaatctttcttagataaatcacactcaatgcatta

SEQ ID NO: 183520 - DNA, 80 bp, Homo sapiens
tttgatgcagaatcaagcagttttcagtggggtctgaaaaatctttcttagataaatcacactcaatgcattatctacga

SEQ ID NO: 183521 - DNA, 81 bp, Homo sapiens
tcaagcagttttcagtggggtctgaaaaatctttcttagataaatcacactcaatgcattatctacgatcatcatttatga

SEQ ID NO: 183522 - DNA, 80 bp, Homo sapiens
ttttcagtggggtctgaaaaatctttcttagataaatcacactcaatgcattatctacgatcatcatttatgagcaagaa

SEQ ID NO: 183523 - DNA, 83 bp, Homo sapiens
ctgaaaaatctttcttagataaatcacactcaatgcattatctacgatcatcatttatgagcaagaagccagagacttgtata

SEQ ID NO: 183524 - DNA, 84 bp, Homo sapiens
tttcttagataaatcacactcaatgcattatctacgatcatcatttatgagcaagaagccagagacttgtatagctgttagaac

SEQ ID NO: 183525 - DNA, 85 bp, Homo sapiens
ataaatcacactcaatgcattatctacgatcatcatttatgagcaagaagccagagacttgtatagctgttagaacgcaggagtc

SEQ ID NO: 183526 - DNA, 84 bp, Homo sapiens
actcaatgcattatctacgatcatcatttatgagcaagaagccagagacttgtatagctgttagaacgcaggagtccttctaga

SEQ ID NO: 183527 - DNA, 83 bp, Homo sapiens
ttatctacgatcatcatttatgagcaagaagccagagacttgtatagctgttagaacgcaggagtccttctagagtctgataa

SEQ ID NO: 183528 - DNA, 78 bp, Homo sapiens
atcatttatgagcaagaagccagagacttgtatagctgttagaacgcaggagtccttctagagtctgataattttttc

SEQ ID NO: 183529 - DNA, 75 bp, Homo sapiens
aagaagccagagacttgtatagctgttagaacgcaggagtccttctagagtctgataattttttctgccttggtg

SEQ ID NO: 183530 - DNA, 74 bp, Homo sapiens
agagacttgtatagctgttagaacgcaggagtccttctagagtctgataattttttctgccttggtgttttata

SEQ ID NO: 183531 - DNA, 72 bp, Homo sapiens
tatagctgttagaacgcaggagtccttctagagtctgataattttttctgccttggtgttttataccttatt

SEQ ID NO: 183532 - DNA, 69 bp, Homo sapiens
ggagtccttctagagtctgataattttttctgccttggtgttttataccttatttgaaagcatattttt

SEQ ID NO: 183533 - DNA, 68 bp, Homo sapiens
gtctgataattttttctgccttggtgttttataccttatttgaaagcatattttttcaagggattccc

SEQ ID NO: 183534 - DNA, 69 bp, Homo sapiens
tgccttggtgttttataccttatttgaaagcatattttttcaagggattccccatcaggtttcaactta

SEQ ID NO: 183535 - DNA, 68 bp, Homo sapiens
gaaagcatattttttcaagggattccccatcaggtttcaacttagttttcatagaaacaattgctttt

SEQ ID NO: 183536 - DNA, 68 bp, Homo sapiens
ttcaacttagttttcatagaaacaattgctttttgtacattattggtttctaaaacatttaattaaca

SEQ ID NO: 183537 - DNA, 70 bp, Homo sapiens
tcatagaaacaattgctttttgtacattattggtttctaaaacatttaattaacataattagaagaacaa

SEQ ID NO: 183538 - DNA, 71 bp, Homo sapiens
ttgctttttgtacattattggtttctaaaacatttaattaacataattagaagaacaactgatacatatct

SEQ ID NO: 183539 - DNA, 72 bp, Homo sapiens
tgtacattattggtttctaaaacatttaattaacataattagaagaacaactgatacatatctttgggaaca

SEQ ID NO: 183540 - DNA, 71 bp, Homo sapiens
gtttctaaaacatttaattaacataattagaagaacaactgatacatatctttgggaacaactacattggc

SEQ ID NO: 183541 - DNA, 76 bp, Homo sapiens
catttaattaacataattagaagaacaactgatacatatctttgggaacaactacattggcttctcagtgagtata

SEQ ID NO: 183542 - DNA, 75 bp, Homo sapiens
acataattagaagaacaactgatacatatctttgggaacaactacattggcttctcagtgagtataacgttcaac

SEQ ID NO: 183543 - DNA, 74 bp, Homo sapiens
ttagaagaacaactgatacatatctttgggaacaactacattggcttctcagtgagtataacgttcaacttttg

SEQ ID NO: 183544 - DNA, 74 bp, Homo sapiens
aactgatacatatctttgggaacaactacattggcttctcagtgagtataacgttcaacttttgggagcagaag

SEQ ID NO: 183545 - DNA, 75 bp, Homo sapiens
tatctttgggaacaactacattggcttctcagtgagtataacgttcaacttttgggagcagaagtacacagtata

SEQ ID NO: 183546 - DNA, 75 bp, Homo sapiens
aacaactacattggcttctcagtgagtataacgttcaacttttgggagcagaagtacacagtataagctagcacc

SEQ ID NO: 183547 - DNA, 76 bp, Homo sapiens
attggcttctcagtgagtataacgttcaacttttgggagcagaagtacacagtataagctagcacccaccagcgat

SEQ ID NO: 183548 - DNA, 76 bp, Homo sapiens
agtataacgttcaacttttgggagcagaagtacacagtataagctagcacccaccagcgattggcaagagtgagta

SEQ ID NO: 183549 - DNA, 76 bp, Homo sapiens
aacgttcaacttttgggagcagaagtacacagtataagctagcacccaccagcgattggcaagagtgagtatgctt

SEQ ID NO: 183550 - DNA, 81 bp, Homo sapiens
agtacacagtataagctagcacccaccagcgattggcaagagtgagtatgcttttcaggcgattggagagaattgttatca

SEQ ID NO: 183551 - DNA, 81 bp, Homo sapiens
attggcaagagtgagtatgcttttcaggcgattggagagaattgttatcagtgcaggctcattacttgagcttcttttgac

SEQ ID NO: 183552 - DNA, 83 bp, Homo sapiens
tgagtatgcttttcaggcgattggagagaattgttatcagtgcaggctcattacttgagcttcttttgactgcggaacatgta

SEQ ID NO: 183553 - DNA, 80 bp, Homo sapiens
atgcttttcaggcgattggagagaattgttatcagtgcaggctcattacttgagcttcttttgactgcggaacatgtagg

SEQ ID NO: 183554 - DNA, 77 bp, Homo sapiens
attggagagaattgttatcagtgcaggctcattacttgagcttcttttgactgcggaacatgtagggccctataaaa

SEQ ID NO: 183555 - DNA, 76 bp, Homo sapiens
aattgttatcagtgcaggctcattacttgagcttcttttgactgcggaacatgtagggccctataaaagctgggta

SEQ ID NO: 183556 - DNA, 77 bp, Homo sapiens
atcagtgcaggctcattacttgagcttcttttgactgcggaacatgtagggccctataaaagctgggtagaaaggca

SEQ ID NO: 183557 - DNA, 75 bp, Homo sapiens
attacttgagcttcttttgactgcggaacatgtagggccctataaaagctgggtagaaaggcagctctgcaggac

SEQ ID NO: 183558 - DNA, 79 bp, Homo sapiens
ttcttttgactgcggaacatgtagggccctataaaagctgggtagaaaggcagctctgcaggacccatcagcatgcaaa

SEQ ID NO: 183559 - DNA, 79 bp, Homo sapiens
tgcggaacatgtagggccctataaaagctgggtagaaaggcagctctgcaggacccatcagcatgcaaattacaactta

SEQ ID NO: 183560 - DNA, 76 bp, Homo sapiens
aacatgtagggccctataaaagctgggtagaaaggcagctctgcaggacccatcagcatgcaaattacaacttagg

SEQ ID NO: 183561 - DNA, 79 bp, Homo sapiens
tataaaagctgggtagaaaggcagctctgcaggacccatcagcatgcaaattacaacttaggggatctccagaagtgaa

SEQ ID NO: 183562 - DNA, 80 bp, Homo sapiens
agctgggtagaaaggcagctctgcaggacccatcagcatgcaaattacaacttaggggatctccagaagtgaatacagga

SEQ ID NO: 183563 - DNA, 82 bp, Homo sapiens
cagctctgcaggacccatcagcatgcaaattacaacttaggggatctccagaagtgaatacaggaggcaacccatcaatcta

SEQ ID NO: 183564 - DNA, 77 bp, Homo sapiens
aggacccatcagcatgcaaattacaacttaggggatctccagaagtgaatacaggaggcaacccatcaatctatatt

SEQ ID NO: 183565 - DNA, 77 bp, Homo sapiens
atcagcatgcaaattacaacttaggggatctccagaagtgaatacaggaggcaacccatcaatctatatttacctaa

SEQ ID NO: 183566 - DNA, 70 bp, Homo sapiens
aaattacaacttaggggatctccagaagtgaatacaggaggcaacccatcaatctatatttacctaagtt

SEQ ID NO: 183567 - DNA, 72 bp, Homo sapiens
gggatctccagaagtgaatacaggaggcaacccatcaatctatatttacctaagttttagggtgtcttaata

SEQ ID NO: 183568 - DNA, 70 bp, Homo sapiens
gaagtgaatacaggaggcaacccatcaatctatatttacctaagttttagggtgtcttaataaggtttca

SEQ ID NO: 183569 - DNA, 69 bp, Homo sapiens
caggaggcaacccatcaatctatatttacctaagttttagggtgtcttaataaggtttcaaagtacatg

SEQ ID NO: 183570 - DNA, 70 bp, Homo sapiens
aacccatcaatctatatttacctaagttttagggtgtcttaataaggtttcaaagtacatgtgctgaggc

SEQ ID NO: 183571 - DNA, 70 bp, Homo sapiens
tatatttacctaagttttagggtgtcttaataaggtttcaaagtacatgtgctgaggctatgcctttcct

SEQ ID NO: 183572 - DNA, 73 bp, Homo sapiens
ttaataaggtttcaaagtacatgtgctgaggctatgcctttccttaagaaaacagaaggttgtgataacatct

SEQ ID NO: 183573 - DNA, 72 bp, Homo sapiens
aaagtacatgtgctgaggctatgcctttccttaagaaaacagaaggttgtgataacatcttcctttctaaaa

SEQ ID NO: 183574 - DNA, 74 bp, Homo sapiens
ctatgcctttccttaagaaaacagaaggttgtgataacatcttcctttctaaaatgatgactgctgtctttaga

SEQ ID NO: 183575 - DNA, 72 bp, Homo sapiens
ccttaagaaaacagaaggttgtgataacatcttcctttctaaaatgatgactgctgtctttagagttcattt

SEQ ID NO: 183576 - DNA, 77 bp, Homo sapiens
tgataacatcttcctttctaaaatgatgactgctgtctttagagttcattttttttctcttaataatctcagcatcc

SEQ ID NO: 183577 - DNA, 76 bp, Homo sapiens
cttcctttctaaaatgatgactgctgtctttagagttcattttttttctcttaataatctcagcatcccacagtga

SEQ ID NO: 183578 - DNA, 77 bp, Homo sapiens
atgatgactgctgtctttagagttcattttttttctcttaataatctcagcatcccacagtgataaattatatttgg

SEQ ID NO: 183579 - DNA, 75 bp, Homo sapiens
gactgctgtctttagagttcattttttttctcttaataatctcagcatcccacagtgataaattatatttgggta

SEQ ID NO: 183580 - DNA, 72 bp, Homo sapiens
gagttcattttttttctcttaataatctcagcatcccacagtgataaattatatttgggtataatttttgtc

SEQ ID NO: 183581 - DNA, 77 bp, Homo sapiens
ttttctcttaataatctcagcatcccacagtgataaattatatttgggtataatttttgtctcatagatgtaatggc

SEQ ID NO: 183582 - DNA, 77 bp, Homo sapiens
tcttaataatctcagcatcccacagtgataaattatatttgggtataatttttgtctcatagatgtaatggctcttt

SEQ ID NO: 183583 - DNA, 74 bp, Homo sapiens
cagcatcccacagtgataaattatatttgggtataatttttgtctcatagatgtaatggctcttttaaaaccac

SEQ ID NO: 183584 - DNA, 74 bp, Homo sapiens
tatttgggtataatttttgtctcatagatgtaatggctcttttaaaaccactcttagaaatgctacagtgtatc

SEQ ID NO: 183585 - DNA, 75 bp, Homo sapiens
gggtataatttttgtctcatagatgtaatggctcttttaaaaccactcttagaaatgctacagtgtatccaatga

SEQ ID NO: 183586 - DNA, 76 bp, Homo sapiens
tttgtctcatagatgtaatggctcttttaaaaccactcttagaaatgctacagtgtatccaatgaatataattaaa

SEQ ID NO: 183587 - DNA, 76 bp, Homo sapiens
agatgtaatggctcttttaaaaccactcttagaaatgctacagtgtatccaatgaatataattaaatatatatgta

SEQ ID NO: 183588 - DNA, 78 bp, Homo sapiens
tagaaatgctacagtgtatccaatgaatataattaaatatatatgtatttccaaatacaagtgccaacaaagacacaa

SEQ ID NO: 183589 - DNA, 68 bp, Homo sapiens
attaaatatatatgtatttccaaatacaagtgccaacaaagacacaactaagaccctaatttttaggg

SEQ ID NO: 183590 - DNA, 67 bp, Homo sapiens
tatgtatttccaaatacaagtgccaacaaagacacaactaagaccctaatttttaggggaactaact

SEQ ID NO: 183591 - DNA, 68 bp, Homo sapiens
ttccaaatacaagtgccaacaaagacacaactaagaccctaatttttaggggaactaacttcatcttc

SEQ ID NO: 183592 - DNA, 68 bp, Homo sapiens
aagtgccaacaaagacacaactaagaccctaatttttaggggaactaacttcatcttccacatcttgt

SEQ ID NO: 183593 - DNA, 69 bp, Homo sapiens
aaagacacaactaagaccctaatttttaggggaactaacttcatcttccacatcttgtttctgtcacta

SEQ ID NO: 183594 - DNA, 73 bp, Homo sapiens
agaccctaatttttaggggaactaacttcatcttccacatcttgtttctgtcactatgctagtgttcaatata

SEQ ID NO: 183595 - DNA, 77 bp, Homo sapiens
aactaacttcatcttccacatcttgtttctgtcactatgctagtgttcaatataactctctttcacaatacttgccc

SEQ ID NO: 183596 - DNA, 76 bp, Homo sapiens
tcttccacatcttgtttctgtcactatgctagtgttcaatataactctctttcacaatacttgccccttttagtta

SEQ ID NO: 183597 - DNA, 72 bp, Homo sapiens
cttgtttctgtcactatgctagtgttcaatataactctctttcacaatacttgccccttttagttagaaact

SEQ ID NO: 183598 - DNA, 73 bp, Homo sapiens
ctgtcactatgctagtgttcaatataactctctttcacaatacttgccccttttagttagaaacttatatctt

SEQ ID NO: 183599 - DNA, 72 bp, Homo sapiens
atgctagtgttcaatataactctctttcacaatacttgccccttttagttagaaacttatatcttttgcatt

SEQ ID NO: 183600 - DNA, 72 bp, Homo sapiens
tcaatataactctctttcacaatacttgccccttttagttagaaacttatatcttttgcattttttcattca

SEQ ID NO: 183601 - DNA, 77 bp, Homo sapiens
caggcatgagctacatggctacaataaacatttaattatacggttgtagttactcagatgtgatggtttaataaata

SEQ ID NO: 183602 - DNA, 72 bp, Homo sapiens
gctacaataaacatttaattatacggttgtagttactcagatgtgatggtttaataaatatttaacagccaa

SEQ ID NO: 183603 - DNA, 70 bp, Homo sapiens
acatttaattatacggttgtagttactcagatgtgatggtttaataaatatttaacagccaaattaagct

SEQ ID NO: 183604 - DNA, 70 bp, Homo sapiens
ggttgtagttactcagatgtgatggtttaataaatatttaacagccaaattaagcttattaatttaaagc

SEQ ID NO: 183605 - DNA, 74 bp, Homo sapiens
ctcagatgtgatggtttaataaatatttaacagccaaattaagcttattaatttaaagctattctgtcttgaca

SEQ ID NO: 183606 - DNA, 73 bp, Homo sapiens
gatggtttaataaatatttaacagccaaattaagcttattaatttaaagctattctgtcttgacaattatgca

SEQ ID NO: 183607 - DNA, 73 bp, Homo sapiens
aaatatttaacagccaaattaagcttattaatttaaagctattctgtcttgacaattatgcaacctgaggaca

SEQ ID NO: 183608 - DNA, 74 bp, Homo sapiens
cagccaaattaagcttattaatttaaagctattctgtcttgacaattatgcaacctgaggacacagaaattggg

SEQ ID NO: 183609 - DNA, 73 bp, Homo sapiens
attaagcttattaatttaaagctattctgtcttgacaattatgcaacctgaggacacagaaattgggggagtg

SEQ ID NO: 183610 - DNA, 74 bp, Homo sapiens
tattaatttaaagctattctgtcttgacaattatgcaacctgaggacacagaaattgggggagtgggggaagca

SEQ ID NO: 183611 - DNA, 73 bp, Homo sapiens
tattctgtcttgacaattatgcaacctgaggacacagaaattgggggagtgggggaagcaagtcccttttaca

SEQ ID NO: 183612 - DNA, 71 bp, Homo sapiens
ttgacaattatgcaacctgaggacacagaaattgggggagtgggggaagcaagtcccttttacacggtata

SEQ ID NO: 183613 - DNA, 69 bp, Homo sapiens
aattatgcaacctgaggacacagaaattgggggagtgggggaagcaagtcccttttacacggtatacaa

SEQ ID NO: 183614 - DNA, 69 bp, Homo sapiens
ttatgcaacctgaggacacagaaattgggggagtgggggaagcaagtcccttttacacggtatacaagg

SEQ ID NO: 183615 - DNA, 68 bp, Homo sapiens
tgaggacacagaaattgggggagtgggggaagcaagtcccttttacacggtatacaaggggcatttta

SEQ ID NO: 183616 - DNA, 66 bp, Homo sapiens
aggacacagaaattgggggagtgggggaagcaagtcccttttacacggtatacaaggggcatttta

SEQ ID NO: 183617 - DNA, 65 bp, Homo sapiens
acacagaaattgggggagtgggggaagcaagtcccttttacacggtatacaaggggcattttacc

SEQ ID NO: 183618 - DNA, 65 bp, Homo sapiens
tgggggagtgggggaagcaagtcccttttacacggtatacaaggggcattttacccgttccaata

SEQ ID NO: 183619 - DNA, 66 bp, Homo sapiens
gagtgggggaagcaagtcccttttacacggtatacaaggggcattttacccgttccaataatttca

SEQ ID NO: 183620 - DNA, 67 bp, Homo sapiens
ggggaagcaagtcccttttacacggtatacaaggggcattttacccgttccaataatttcaagagca

SEQ ID NO: 183621 - DNA, 68 bp, Homo sapiens
agcaagtcccttttacacggtatacaaggggcattttacccgttccaataatttcaagagcactgtaa

SEQ ID NO: 183622 - DNA, 66 bp, Homo sapiens
aagtcccttttacacggtatacaaggggcattttacccgttccaataatttcaagagcactgtaaa

SEQ ID NO: 183623 - DNA, 68 bp, Homo sapiens
tcccttttacacggtatacaaggggcattttacccgttccaataatttcaagagcactgtaaacatta

SEQ ID NO: 183624 - DNA, 75 bp, Homo sapiens
ggcattttacccgttccaataatttcaagagcactgtaaacattagagggaatataatcatatttcacgatcaca

SEQ ID NO: 183625 - DNA, 75 bp, Homo sapiens
ttacccgttccaataatttcaagagcactgtaaacattagagggaatataatcatatttcacgatcacaaagaca

SEQ ID NO: 183626 - DNA, 75 bp, Homo sapiens
aatttcaagagcactgtaaacattagagggaatataatcatatttcacgatcacaaagacagcaaaaacaaggtg

SEQ ID NO: 183627 - DNA, 78 bp, Homo sapiens
cattagagggaatataatcatatttcacgatcacaaagacagcaaaaacaaggtggccatataactttcatgttatca

SEQ ID NO: 183628 - DNA, 77 bp, Homo sapiens
agggaatataatcatatttcacgatcacaaagacagcaaaaacaaggtggccatataactttcatgttatcatgccc

SEQ ID NO: 183629 - DNA, 79 bp, Homo sapiens
tatttcacgatcacaaagacagcaaaaacaaggtggccatataactttcatgttatcatgcccctgcacagcccctata

SEQ ID NO: 183630 - DNA, 77 bp, Homo sapiens
atcacaaagacagcaaaaacaaggtggccatataactttcatgttatcatgcccctgcacagcccctataggaaata

SEQ ID NO: 183631 - DNA, 75 bp, Homo sapiens
agacagcaaaaacaaggtggccatataactttcatgttatcatgcccctgcacagcccctataggaaatagggag

SEQ ID NO: 183632 - DNA, 77 bp, Homo sapiens
atataactttcatgttatcatgcccctgcacagcccctataggaaatagggaggcagaaatttctttcactgcaaca

SEQ ID NO: 183633 - DNA, 78 bp, Homo sapiens
atgttatcatgcccctgcacagcccctataggaaatagggaggcagaaatttctttcactgcaacatcctgttattga

SEQ ID NO: 183634 - DNA, 74 bp, Homo sapiens
ccctgcacagcccctataggaaatagggaggcagaaatttctttcactgcaacatcctgttattgaaatttctc

SEQ ID NO: 183635 - DNA, 72 bp, Homo sapiens
agcccctataggaaatagggaggcagaaatttctttcactgcaacatcctgttattgaaatttctctgaaaa

SEQ ID NO: 183636 - DNA, 72 bp, Homo sapiens
ggaaatagggaggcagaaatttctttcactgcaacatcctgttattgaaatttctctgaaaactatttgctt

SEQ ID NO: 183637 - DNA, 71 bp, Homo sapiens
gggaggcagaaatttctttcactgcaacatcctgttattgaaatttctctgaaaactatttgcttttttaa

SEQ ID NO: 183638 - DNA, 73 bp, Homo sapiens
tctttcactgcaacatcctgttattgaaatttctctgaaaactatttgcttttttaaaatagagaagcaaatg

SEQ ID NO: 183639 - DNA, 73 bp, Homo sapiens
ctgcaacatcctgttattgaaatttctctgaaaactatttgcttttttaaaatagagaagcaaatgtctcgga

SEQ ID NO: 183640 - DNA, 70 bp, Homo sapiens
tattgaaatttctctgaaaactatttgcttttttaaaatagagaagcaaatgtctcggaattttagactc

SEQ ID NO: 183641 - DNA, 75 bp, Homo sapiens
ctatttgcttttttaaaatagagaagcaaatgtctcggaattttagactctgacatccctctgctgtctcaataa

SEQ ID NO: 183642 - DNA, 74 bp, Homo sapiens
ttttaaaatagagaagcaaatgtctcggaattttagactctgacatccctctgctgtctcaataaaagattagt

SEQ ID NO: 183643 - DNA, 75 bp, Homo sapiens
aaatagagaagcaaatgtctcggaattttagactctgacatccctctgctgtctcaataaaagattagtttgtgg

SEQ ID NO: 183644 - DNA, 75 bp, Homo sapiens
aaatgtctcggaattttagactctgacatccctctgctgtctcaataaaagattagtttgtggtccttgctgccc

SEQ ID NO: 183645 - DNA, 74 bp, Homo sapiens
ttttagactctgacatccctctgctgtctcaataaaagattagtttgtggtccttgctgcccctgtgttatttt

SEQ ID NO: 183646 - DNA, 71 bp, Homo sapiens
tctgctgtctcaataaaagattagtttgtggtccttgctgcccctgtgttatttttgtggtttaataccct

SEQ ID NO: 183647 - DNA, 66 bp, Homo sapiens
aataaaagattagtttgtggtccttgctgcccctgtgttatttttgtggtttaatacccttcacgg

SEQ ID NO: 183648 - DNA, 69 bp, Homo sapiens
aagattagtttgtggtccttgctgcccctgtgttatttttgtggtttaatacccttcacggtgaaatca

SEQ ID NO: 183649 - DNA, 68 bp, Homo sapiens
gtccttgctgcccctgtgttatttttgtggtttaatacccttcacggtgaaatcagctaaaaaacaaa

SEQ ID NO: 183650 - DNA, 72 bp, Homo sapiens
acaaaaaaaacaactctcttctctttctgttggagttttcaagagctacacactccttggctggcttatgta

SEQ ID NO: 183651 - DNA, 73 bp, Homo sapiens
aaaaacaactctcttctctttctgttggagttttcaagagctacacactccttggctggcttatgtactccaa

SEQ ID NO: 183652 - DNA, 74 bp, Homo sapiens
ttctctttctgttggagttttcaagagctacacactccttggctggcttatgtactccaacacaaaggcaaggg

SEQ ID NO: 183653 - DNA, 73 bp, Homo sapiens
cactccttggctggcttatgtactccaacacaaaggcaaggggctgcccgggcaggtaagagtgaaatccaat

SEQ ID NO: 183654 - DNA, 74 bp, Homo sapiens
ttatgtactccaacacaaaggcaaggggctgcccgggcaggtaagagtgaaatccaatttatgcaacttgctta

SEQ ID NO: 183655 - DNA, 73 bp, Homo sapiens
aacacaaaggcaaggggctgcccgggcaggtaagagtgaaatccaatttatgcaacttgcttactgtgacctc

SEQ ID NO: 183656 - DNA, 74 bp, Homo sapiens
gggctgcccgggcaggtaagagtgaaatccaatttatgcaacttgcttactgtgacctccaatttatcctagga

SEQ ID NO: 183657 - DNA, 74 bp, Homo sapiens
ggcaggtaagagtgaaatccaatttatgcaacttgcttactgtgacctccaatttatcctaggattttgttata

SEQ ID NO: 183658 - DNA, 73 bp, Homo sapiens
gtaagagtgaaatccaatttatgcaacttgcttactgtgacctccaatttatcctaggattttgttatataaa

SEQ ID NO: 183659 - DNA, 73 bp, Homo sapiens
aatccaatttatgcaacttgcttactgtgacctccaatttatcctaggattttgttatataaacttatttgca

SEQ ID NO: 183660 - DNA, 71 bp, Homo sapiens
caacttgcttactgtgacctccaatttatcctaggattttgttatataaacttatttgcataagggtggct

SEQ ID NO: 183661 - DNA, 70 bp, Homo sapiens
ttactgtgacctccaatttatcctaggattttgttatataaacttatttgcataagggtggcttacaccc

SEQ ID NO: 183662 - DNA, 70 bp, Homo sapiens
ccaatttatcctaggattttgttatataaacttatttgcataagggtggcttacaccctgtactgtgtac

SEQ ID NO: 183663 - DNA, 72 bp, Homo sapiens
atcctaggattttgttatataaacttatttgcataagggtggcttacaccctgtactgtgtacctctgagag

SEQ ID NO: 183664 - DNA, 74 bp, Homo sapiens
tatataaacttatttgcataagggtggcttacaccctgtactgtgtacctctgagagggccaagacttgtctta

SEQ ID NO: 183665 - DNA, 71 bp, Homo sapiens
aaacttatttgcataagggtggcttacaccctgtactgtgtacctctgagagggccaagacttgtcttatt

SEQ ID NO: 183666 - DNA, 77 bp, Homo sapiens
cttacaccctgtactgtgtacctctgagagggccaagacttgtcttatttgtacagggagttctctcactcatgtga

SEQ ID NO: 183667 - DNA, 79 bp, Homo sapiens
tgtactgtgtacctctgagagggccaagacttgtcttatttgtacagggagttctctcactcatgtgacctgtctagtc

SEQ ID NO: 183668 - DNA, 78 bp, Homo sapiens
tctgagagggccaagacttgtcttatttgtacagggagttctctcactcatgtgacctgtctagtccacctccataaa

SEQ ID NO: 183669 - DNA, 75 bp, Homo sapiens
tcttatttgtacagggagttctctcactcatgtgacctgtctagtccacctccataaagaagacagaccaaaaat

SEQ ID NO: 183670 - DNA, 77 bp, Homo sapiens
atgtgacctgtctagtccacctccataaagaagacagaccaaaaattccatctccagattacacagacatatttata

SEQ ID NO: 183671 - DNA, 76 bp, Homo sapiens
tgtctagtccacctccataaagaagacagaccaaaaattccatctccagattacacagacatatttatagttaaga

SEQ ID NO: 183672 - DNA, 76 bp, Homo sapiens
tccataaagaagacagaccaaaaattccatctccagattacacagacatatttatagttaagactcctcgactaga

SEQ ID NO: 183673 - DNA, 79 bp, Homo sapiens
agacagaccaaaaattccatctccagattacacagacatatttatagttaagactcctcgactagacatgcatcaatta

SEQ ID NO: 183674 - DNA, 77 bp, Homo sapiens
aaaattccatctccagattacacagacatatttatagttaagactcctcgactagacatgcatcaattacttaagag

SEQ ID NO: 183675 - DNA, 77 bp, Homo sapiens
catatttatagttaagactcctcgactagacatgcatcaattacttaagaggagtcttaactataaatacatacgca

SEQ ID NO: 183676 - DNA, 78 bp, Homo sapiens
aagactcctcgactagacatgcatcaattacttaagaggagtcttaactataaatacatacgcatatattaacacatc

SEQ ID NO: 183677 - DNA, 80 bp, Homo sapiens
ctcgactagacatgcatcaattacttaagaggagtcttaactataaatacatacgcatatattaacacatctttgcacta

SEQ ID NO: 183678 - DNA, 79 bp, Homo sapiens
catgcatcaattacttaagaggagtcttaactataaatacatacgcatatattaacacatctttgcactattaaactca

SEQ ID NO: 183679 - DNA, 74 bp, Homo sapiens
acttaagaggagtcttaactataaatacatacgcatatattaacacatctttgcactattaaactcaatatttg

SEQ ID NO: 183680 - DNA, 77 bp, Homo sapiens
ggagtcttaactataaatacatacgcatatattaacacatctttgcactattaaactcaatatttgttgagtgccaa

SEQ ID NO: 183681 - DNA, 77 bp, Homo sapiens
aatacatacgcatatattaacacatctttgcactattaaactcaatatttgttgagtgccaattaagagccagggac

SEQ ID NO: 183682 - DNA, 79 bp, Homo sapiens
atacgcatatattaacacatctttgcactattaaactcaatatttgttgagtgccaattaagagccagggaccatgcaa

SEQ ID NO: 183683 - DNA, 79 bp, Homo sapiens
attaacacatctttgcactattaaactcaatatttgttgagtgccaattaagagccagggaccatgcaaagagctgtga

SEQ ID NO: 183684 - DNA, 77 bp, Homo sapiens
cactattaaactcaatatttgttgagtgccaattaagagccagggaccatgcaaagagctgtgagattagaaaatta

SEQ ID NO: 183685 - DNA, 77 bp, Homo sapiens
ttaaactcaatatttgttgagtgccaattaagagccagggaccatgcaaagagctgtgagattagaaaattaagaga

SEQ ID NO: 183686 - DNA, 78 bp, Homo sapiens
tatttgttgagtgccaattaagagccagggaccatgcaaagagctgtgagattagaaaattaagagacagggtctgcc

SEQ ID NO: 183687 - DNA, 77 bp, Homo sapiens
cagggaccatgcaaagagctgtgagattagaaaattaagagacagggtctgccctcaaaatagtccactggtcagga

SEQ ID NO: 183688 - DNA, 71 bp, Homo sapiens
taagagacagggtctgccctcaaaatagtccactggtcaggagaaaaacactttaatatgacggaaaaaca

SEQ ID NO: 183689 - DNA, 72 bp, Homo sapiens
acagggtctgccctcaaaatagtccactggtcaggagaaaaacactttaatatgacggaaaaacaatcatca

SEQ ID NO: 183690 - DNA, 73 bp, Homo sapiens
cctcaaaatagtccactggtcaggagaaaaacactttaatatgacggaaaaacaatcatcatccaagtataca

SEQ ID NO: 183691 - DNA, 73 bp, Homo sapiens
agtccactggtcaggagaaaaacactttaatatgacggaaaaacaatcatcatccaagtatacataaactgta

SEQ ID NO: 183692 - DNA, 77 bp, Homo sapiens
ggagaaaaacactttaatatgacggaaaaacaatcatcatccaagtatacataaactgtatacatggtagatgcaca

SEQ ID NO: 183693 - DNA, 76 bp, Homo sapiens
acactttaatatgacggaaaaacaatcatcatccaagtatacataaactgtatacatggtagatgcacaaaggagg

SEQ ID NO: 183694 - DNA, 76 bp, Homo sapiens
tatgacggaaaaacaatcatcatccaagtatacataaactgtatacatggtagatgcacaaaggagggaggggtta

SEQ ID NO: 183695 - DNA, 73 bp, Homo sapiens
aaaacaatcatcatccaagtatacataaactgtatacatggtagatgcacaaaggagggaggggttagttggg

SEQ ID NO: 183696 - DNA, 74 bp, Homo sapiens
tatacataaactgtatacatggtagatgcacaaaggagggaggggttagttggggtgtggcagattatttagaa

SEQ ID NO: 183697 - DNA, 73 bp, Homo sapiens
atacataaactgtatacatggtagatgcacaaaggagggaggggttagttggggtgtggcagattatttagaa

SEQ ID NO: 183698 - DNA, 71 bp, Homo sapiens
taaactgtatacatggtagatgcacaaaggagggaggggttagttggggtgtggcagattatttagaaaag

SEQ ID NO: 183699 - DNA, 69 bp, Homo sapiens
gtagatgcacaaaggagggaggggttagttggggtgtggcagattatttagaaaagtttcaaagaataa

SEQ ID NO: 183700 - DNA, 65 bp, Homo sapiens
aaaggagggaggggttagttggggtgtggcagattatttagaaaagtttcaaagaataagtgaaa

SEQ ID NO: 183701 - DNA, 70 bp, Homo sapiens
tggggtgtggcagattatttagaaaagtttcaaagaataagtgaaagttaaccaggtcataaaggactca

SEQ ID NO: 183702 - DNA, 69 bp, Homo sapiens
gtggcagattatttagaaaagtttcaaagaataagtgaaagttaaccaggtcataaaggactcagggta

SEQ ID NO: 183703 - DNA, 74 bp, Homo sapiens
aaagaataagtgaaagttaaccaggtcataaaggactcagggtaatatactgggacatgagacagcatggaata

SEQ ID NO: 183704 - DNA, 75 bp, Homo sapiens
ataagtgaaagttaaccaggtcataaaggactcagggtaatatactgggacatgagacagcatggaatagtcaag

SEQ ID NO: 183705 - DNA, 78 bp, Homo sapiens
ataaaggactcagggtaatatactgggacatgagacagcatggaatagtcaaggaatcatggattgctaatattttac

SEQ ID NO: 183706 - DNA, 80 bp, Homo sapiens
ggtaatatactgggacatgagacagcatggaatagtcaaggaatcatggattgctaatattttacgatgactaaagtata

SEQ ID NO: 183707 - DNA, 78 bp, Homo sapiens
atgagacagcatggaatagtcaaggaatcatggattgctaatattttacgatgactaaagtataggggagaagaaaga

SEQ ID NO: 183708 - DNA, 75 bp, Homo sapiens
catggaatagtcaaggaatcatggattgctaatattttacgatgactaaagtataggggagaagaaagaaagata

SEQ ID NO: 183709 - DNA, 72 bp, Homo sapiens
gaatcatggattgctaatattttacgatgactaaagtataggggagaagaaagaaagataaggatgaaacgg

SEQ ID NO: 183710 - DNA, 71 bp, Homo sapiens
attgctaatattttacgatgactaaagtataggggagaagaaagaaagataaggatgaaacggtcagactg

SEQ ID NO: 183711 - DNA, 70 bp, Homo sapiens
aatattttacgatgactaaagtataggggagaagaaagaaagataaggatgaaacggtcagactggagaa

SEQ ID NO: 183712 - DNA, 71 bp, Homo sapiens
atgactaaagtataggggagaagaaagaaagataaggatgaaacggtcagactggagaaggcttaaaagca

SEQ ID NO: 183713 - DNA, 70 bp, Homo sapiens
tataggggagaagaaagaaagataaggatgaaacggtcagactggagaaggcttaaaagcagtacttaaa

SEQ ID NO: 183714 - DNA, 71 bp, Homo sapiens
aagaaagataaggatgaaacggtcagactggagaaggcttaaaagcagtacttaaaatataatttgaggca

SEQ ID NO: 183715 - DNA, 73 bp, Homo sapiens
agataaggatgaaacggtcagactggagaaggcttaaaagcagtacttaaaatataatttgaggcatgtgaaa

SEQ ID NO: 183716 - DNA, 73 bp, Homo sapiens
gagaaggcttaaaagcagtacttaaaatataatttgaggcatgtgaaactgttcgaggctgctagggtaccaa

SEQ ID NO: 183717 - DNA, 72 bp, Homo sapiens
cttaaaatataatttgaggcatgtgaaactgttcgaggctgctagggtaccaaagtcattcttttgaaaaca

SEQ ID NO: 183718 - DNA, 72 bp, Homo sapiens
aatataatttgaggcatgtgaaactgttcgaggctgctagggtaccaaagtcattcttttgaaaacaaataa

SEQ ID NO: 183719 - DNA, 70 bp, Homo sapiens
caaataaatggaaagaatcaagcactgtgttttacttttctatacaaactactgctggtttggggggaga

SEQ ID NO: 183720 - DNA, 70 bp, Homo sapiens
gaaagaatcaagcactgtgttttacttttctatacaaactactgctggtttggggggagaaagtagataa

SEQ ID NO: 183721 - DNA, 68 bp, Homo sapiens
aatcaagcactgtgttttacttttctatacaaactactgctggtttggggggagaaagtagataaggg

SEQ ID NO: 183722 - DNA, 65 bp, Homo sapiens
tttacttttctatacaaactactgctggtttggggggagaaagtagataaggggcagtttttctt

SEQ ID NO: 183723 - DNA, 66 bp, Homo sapiens
ttttctatacaaactactgctggtttggggggagaaagtagataaggggcagtttttctttatagg

SEQ ID NO: 183724 - DNA, 70 bp, Homo sapiens
tactgctggtttggggggagaaagtagataaggggcagtttttctttataggtgaactctgacagataaa

SEQ ID NO: 183725 - DNA, 69 bp, Homo sapiens
tttggggggagaaagtagataaggggcagtttttctttataggtgaactctgacagataaatgaagaaa

SEQ ID NO: 183726 - DNA, 73 bp, Homo sapiens
aggggcagtttttctttataggtgaactctgacagataaatgaagaaagaacgatggaacaaaaatatcagca

SEQ ID NO: 183727 - DNA, 76 bp, Homo sapiens
ttctttataggtgaactctgacagataaatgaagaaagaacgatggaacaaaaatatcagcatttcacaatcccta

SEQ ID NO: 183728 - DNA, 78 bp, Homo sapiens
gtgaactctgacagataaatgaagaaagaacgatggaacaaaaatatcagcatttcacaatccctaatgaattaatgc

SEQ ID NO: 183729 - DNA, 79 bp, Homo sapiens
gacagataaatgaagaaagaacgatggaacaaaaatatcagcatttcacaatccctaatgaattaatgcttatacagca

SEQ ID NO: 183730 - DNA, 82 bp, Homo sapiens
tgaagaaagaacgatggaacaaaaatatcagcatttcacaatccctaatgaattaatgcttatacagcaatgagcatcaatg

SEQ ID NO: 183731 - DNA, 83 bp, Homo sapiens
gaacaaaaatatcagcatttcacaatccctaatgaattaatgcttatacagcaatgagcatcaatggttgctaacatcattaa

SEQ ID NO: 183732 - DNA, 80 bp, Homo sapiens
atcagcatttcacaatccctaatgaattaatgcttatacagcaatgagcatcaatggttgctaacatcattaaaaaaaaa

SEQ ID NO: 183733 - DNA, 78 bp, Homo sapiens
attaatgcttatacagcaatgagcatcaatggttgctaacatcattaaaaaaaaagagataatcttacattataggcc

SEQ ID NO: 183734 - DNA, 76 bp, Homo sapiens
gcaatgagcatcaatggttgctaacatcattaaaaaaaaagagataatcttacattataggcctcctaataaaaga

SEQ ID NO: 183735 - DNA, 72 bp, Homo sapiens
tcaatggttgctaacatcattaaaaaaaaagagataatcttacattataggcctcctaataaaagaatataa

SEQ ID NO: 183736 - DNA, 73 bp, Homo sapiens
catcattaaaaaaaaagagataatcttacattataggcctcctaataaaagaatataatctacccatgagatg

SEQ ID NO: 183737 - DNA, 74 bp, Homo sapiens
aaaaagagataatcttacattataggcctcctaataaaagaatataatctacccatgagatggtctggcccaga

SEQ ID NO: 183738 - DNA, 74 bp, Homo sapiens
agataatcttacattataggcctcctaataaaagaatataatctacccatgagatggtctggcccagaaaaaca

SEQ ID NO: 183739 - DNA, 71 bp, Homo sapiens
acattataggcctcctaataaaagaatataatctacccatgagatggtctggcccagaaaaacaaaactaa

SEQ ID NO: 183740 - DNA, 70 bp, Homo sapiens
gcctcctaataaaagaatataatctacccatgagatggtctggcccagaaaaacaaaactaaaacaaaca

SEQ ID NO: 183741 - DNA, 73 bp, Homo sapiens
aaacaaaaaaacctaacatgactctgaccatgattctaactttgactattgacttacagaaaatacaccatga

SEQ ID NO: 183742 - DNA, 77 bp, Homo sapiens
aaaacctaacatgactctgaccatgattctaactttgactattgacttacagaaaatacaccatgaagatactgtca

SEQ ID NO: 183743 - DNA, 78 bp, Homo sapiens
atgactctgaccatgattctaactttgactattgacttacagaaaatacaccatgaagatactgtcaacaaaatccaa

SEQ ID NO: 183744 - DNA, 75 bp, Homo sapiens
gaccatgattctaactttgactattgacttacagaaaatacaccatgaagatactgtcaacaaaatccaaaacca

SEQ ID NO: 183745 - DNA, 75 bp, Homo sapiens
ctttgactattgacttacagaaaatacaccatgaagatactgtcaacaaaatccaaaaccagaaattctatgaca

SEQ ID NO: 183746 - DNA, 75 bp, Homo sapiens
atgaagatactgtcaacaaaatccaaaaccagaaattctatgacaaccaagtttttctcctcttgcatcttcatg

SEQ ID NO: 183747 - DNA, 73 bp, Homo sapiens
actgtcaacaaaatccaaaaccagaaattctatgacaaccaagtttttctcctcttgcatcttcatgtgaaaa

SEQ ID NO: 183748 - DNA, 73 bp, Homo sapiens
caaaatccaaaaccagaaattctatgacaaccaagtttttctcctcttgcatcttcatgtgaaaaaagagaga

SEQ ID NO: 183749 - DNA, 75 bp, Homo sapiens
agaaattctatgacaaccaagtttttctcctcttgcatcttcatgtgaaaaaagagagatgagggagaacctata

SEQ ID NO: 183750 - DNA, 76 bp, Homo sapiens
tctatgacaaccaagtttttctcctcttgcatcttcatgtgaaaaaagagagatgagggagaacctatagattaaa

SEQ ID NO: 183751 - DNA, 74 bp, Homo sapiens
ccaagtttttctcctcttgcatcttcatgtgaaaaaagagagatgagggagaacctatagattaaagaaatgta

SEQ ID NO: 183752 - DNA, 75 bp, Homo sapiens
ctcctcttgcatcttcatgtgaaaaaagagagatgagggagaacctatagattaaagaaatgtaatacttttaca

SEQ ID NO: 183753 - DNA, 75 bp, Homo sapiens
catgtgaaaaaagagagatgagggagaacctatagattaaagaaatgtaatacttttacaaattgcaagatgtga

SEQ ID NO: 183754 - DNA, 72 bp, Homo sapiens
aagagagatgagggagaacctatagattaaagaaatgtaatacttttacaaattgcaagatgtgaactttat

SEQ ID NO: 183755 - DNA, 72 bp, Homo sapiens
agatgagggagaacctatagattaaagaaatgtaatacttttacaaattgcaagatgtgaactttatttaga

SEQ ID NO: 183756 - DNA, 72 bp, Homo sapiens
gaacctatagattaaagaaatgtaatacttttacaaattgcaagatgtgaactttatttagatttcaattca

SEQ ID NO: 183757 - DNA, 72 bp, Homo sapiens
agaaatgtaatacttttacaaattgcaagatgtgaactttatttagatttcaattcaaacaaaatgtagaga

SEQ ID NO: 183758 - DNA, 71 bp, Homo sapiens
tgtaatacttttacaaattgcaagatgtgaactttatttagatttcaattcaaacaaaatgtagagaaaaa

SEQ ID NO: 183759 - DNA, 70 bp, Homo sapiens
caattcaaacaaaatgtagagaaaaaaacttacgatattttgattccattggaaatttgtccagtggcta

SEQ ID NO: 183760 - DNA, 73 bp, Homo sapiens
caaaatgtagagaaaaaaacttacgatattttgattccattggaaatttgtccagtggctagatatttgatga

SEQ ID NO: 183761 - DNA, 79 bp, Homo sapiens
tgattccattggaaatttgtccagtggctagatatttgatgatattaagacttaactaattactttagatgtgatcatg

SEQ ID NO: 183762 - DNA, 77 bp, Homo sapiens
ccattggaaatttgtccagtggctagatatttgatgatattaagacttaactaattactttagatgtgatcatggta

SEQ ID NO: 183763 - DNA, 77 bp, Homo sapiens
tttgtccagtggctagatatttgatgatattaagacttaactaattactttagatgtgatcatggtatttagttctg

SEQ ID NO: 183764 - DNA, 74 bp, Homo sapiens
ggctagatatttgatgatattaagacttaactaattactttagatgtgatcatggtatttagttctgtttttta

SEQ ID NO: 183765 - DNA, 71 bp, Homo sapiens
tgatgatattaagacttaactaattactttagatgtgatcatggtatttagttctgttttttaaaaaagtc

SEQ ID NO: 183766 - DNA, 68 bp, Homo sapiens
taagacttaactaattactttagatgtgatcatggtatttagttctgttttttaaaaaagtccttatc

SEQ ID NO: 183767 - DNA, 70 bp, Homo sapiens
ttactttagatgtgatcatggtatttagttctgttttttaaaaaagtccttatcttttagagactcatat

SEQ ID NO: 183768 - DNA, 71 bp, Homo sapiens
gatgtgatcatggtatttagttctgttttttaaaaaagtccttatcttttagagactcatattaaaatatc

SEQ ID NO: 183769 - DNA, 72 bp, Homo sapiens
aaaagtccttatcttttagagactcatattaaaatatctataaatgaaataatgtatcttggatcttattaa

SEQ ID NO: 183770 - DNA, 74 bp, Homo sapiens
atcttttagagactcatattaaaatatctataaatgaaataatgtatcttggatcttattaaaaatcataccag

SEQ ID NO: 183771 - DNA, 77 bp, Homo sapiens
tagagactcatattaaaatatctataaatgaaataatgtatcttggatcttattaaaaatcataccaggctaggaga

SEQ ID NO: 183772 - DNA, 77 bp, Homo sapiens
taaatgaaataatgtatcttggatcttattaaaaatcataccaggctaggagaagatggcactacacatgaaacaaa

SEQ ID NO: 183773 - DNA, 76 bp, Homo sapiens
aataatgtatcttggatcttattaaaaatcataccaggctaggagaagatggcactacacatgaaacaaaactgac

SEQ ID NO: 183774 - DNA, 77 bp, Homo sapiens
tggatcttattaaaaatcataccaggctaggagaagatggcactacacatgaaacaaaactgaccatccattaataa

SEQ ID NO: 183775 - DNA, 79 bp, Homo sapiens
ataccaggctaggagaagatggcactacacatgaaacaaaactgaccatccattaataattgttgaagctgagtgatgg

SEQ ID NO: 183776 - DNA, 78 bp, Homo sapiens
agaagatggcactacacatgaaacaaaactgaccatccattaataattgttgaagctgagtgatggtccatgaagggt

SEQ ID NO: 183777 - DNA, 75 bp, Homo sapiens
tgaaacaaaactgaccatccattaataattgttgaagctgagtgatggtccatgaagggtttactattttgtgta

SEQ ID NO: 183778 - DNA, 76 bp, Homo sapiens
aactgaccatccattaataattgttgaagctgagtgatggtccatgaagggtttactattttgtgtatttcatgta

SEQ ID NO: 183779 - DNA, 75 bp, Homo sapiens
ccattaataattgttgaagctgagtgatggtccatgaagggtttactattttgtgtatttcatgtatacttgaaa

SEQ ID NO: 183780 - DNA, 77 bp, Homo sapiens
tgagtgatggtccatgaagggtttactattttgtgtatttcatgtatacttgaaaatcttcataatgaaggattaca

SEQ ID NO: 183781 - DNA, 72 bp, Homo sapiens
gtccatgaagggtttactattttgtgtatttcatgtatacttgaaaatcttcataatgaaggattacaaaaa

SEQ ID NO: 183782 - DNA, 69 bp, Homo sapiens
ggtttactattttgtgtatttcatgtatacttgaaaatcttcataatgaaggattacaaaaagaaaaaa

SEQ ID NO: 183783 - DNA, 70 bp, Homo sapiens
aaaaaaaacatgttaaagagaatttggtacttagtccatacaagtgctgcagttttgaaactatggaatg

SEQ ID NO: 183784 - DNA, 75 bp, Homo sapiens
gaatttggtacttagtccatacaagtgctgcagttttgaaactatggaatgtttcattaaactgccaattgtgaa

SEQ ID NO: 183785 - DNA, 76 bp, Homo sapiens
ggtacttagtccatacaagtgctgcagttttgaaactatggaatgtttcattaaactgccaattgtgaagataata

SEQ ID NO: 183786 - DNA, 75 bp, Homo sapiens
gctgcagttttgaaactatggaatgtttcattaaactgccaattgtgaagataatattttgaaagtgacccataa

SEQ ID NO: 183787 - DNA, 74 bp, Homo sapiens
tgaaactatggaatgtttcattaaactgccaattgtgaagataatattttgaaagtgacccataacaccataat

SEQ ID NO: 183788 - DNA, 71 bp, Homo sapiens
tgtttcattaaactgccaattgtgaagataatattttgaaagtgacccataacaccataattttaactagt

SEQ ID NO: 183789 - DNA, 72 bp, Homo sapiens
actgccaattgtgaagataatattttgaaagtgacccataacaccataattttaactagttgatttatatcc

SEQ ID NO: 183790 - DNA, 72 bp, Homo sapiens
gtgaagataatattttgaaagtgacccataacaccataattttaactagttgatttatatccttttgcatat

SEQ ID NO: 183791 - DNA, 70 bp, Homo sapiens
atattttgaaagtgacccataacaccataattttaactagttgatttatatccttttgcatattttcttc

SEQ ID NO: 183792 - DNA, 70 bp, Homo sapiens
gaaagtgacccataacaccataattttaactagttgatttatatccttttgcatattttcttctagaatt

SEQ ID NO: 183793 - DNA, 71 bp, Homo sapiens
cataacaccataattttaactagttgatttatatccttttgcatattttcttctagaatttgtattttaga

SEQ ID NO: 183794 - DNA, 70 bp, Homo sapiens
ttaactagttgatttatatccttttgcatattttcttctagaatttgtattttagaaagttttgtagaga

SEQ ID NO: 183795 - DNA, 72 bp, Homo sapiens
tgatttatatccttttgcatattttcttctagaatttgtattttagaaagttttgtagagaagaacctgaga

SEQ ID NO: 183796 - DNA, 69 bp, Homo sapiens
tccttttgcatattttcttctagaatttgtattttagaaagttttgtagagaagaacctgagaaaggaa

SEQ ID NO: 183797 - DNA, 69 bp, Homo sapiens
ttttcttctagaatttgtattttagaaagttttgtagagaagaacctgagaaaggaaagagacaggaga

SEQ ID NO: 183798 - DNA, 70 bp, Homo sapiens
gaatttgtattttagaaagttttgtagagaagaacctgagaaaggaaagagacaggagataggaagaaca

SEQ ID NO: 183799 - DNA, 70 bp, Homo sapiens
tttagaaagttttgtagagaagaacctgagaaaggaaagagacaggagataggaagaacaactcaaaatc

SEQ ID NO: 183800 - DNA, 70 bp, Homo sapiens
aaagttttgtagagaagaacctgagaaaggaaagagacaggagataggaagaacaactcaaaatctccaa

SEQ ID NO: 183801 - DNA, 71 bp, Homo sapiens
aagaacctgagaaaggaaagagacaggagataggaagaacaactcaaaatctccaacctcaattgagttaa

SEQ ID NO: 183802 - DNA, 73 bp, Homo sapiens
aaaggaaagagacaggagataggaagaacaactcaaaatctccaacctcaattgagttaatgtgataagaatc

SEQ ID NO: 183803 - DNA, 74 bp, Homo sapiens
agagacaggagataggaagaacaactcaaaatctccaacctcaattgagttaatgtgataagaatccaaactaa

SEQ ID NO: 183804 - DNA, 75 bp, Homo sapiens
taggaagaacaactcaaaatctccaacctcaattgagttaatgtgataagaatccaaactaagcgctgaatagaa

SEQ ID NO: 183805 - DNA, 75 bp, Homo sapiens
aacaactcaaaatctccaacctcaattgagttaatgtgataagaatccaaactaagcgctgaatagaagaagcag

SEQ ID NO: 183806 - DNA, 76 bp, Homo sapiens
aaatctccaacctcaattgagttaatgtgataagaatccaaactaagcgctgaatagaagaagcaggaggaggaga

SEQ ID NO: 183807 - DNA, 73 bp, Homo sapiens
aattgagttaatgtgataagaatccaaactaagcgctgaatagaagaagcaggaggaggagaaaaagggagag

SEQ ID NO: 183808 - DNA, 76 bp, Homo sapiens
ttaatgtgataagaatccaaactaagcgctgaatagaagaagcaggaggaggagaaaaagggagagtcacagacat

SEQ ID NO: 183809 - DNA, 75 bp, Homo sapiens
actaagcgctgaatagaagaagcaggaggaggagaaaaagggagagtcacagacatttttggagcaaacctgata

SEQ ID NO: 183810 - DNA, 74 bp, Homo sapiens
ggaggaggagaaaaagggagagtcacagacatttttggagcaaacctgataaggaatcataagcaaatgaaata

SEQ ID NO: 183811 - DNA, 73 bp, Homo sapiens
cagacatttttggagcaaacctgataaggaatcataagcaaatgaaataagatctgagggaaaagaaataatt

SEQ ID NO: 183812 - DNA, 76 bp, Homo sapiens
tggagcaaacctgataaggaatcataagcaaatgaaataagatctgagggaaaagaaataattttcacagcaccaa

SEQ ID NO: 183813 - DNA, 76 bp, Homo sapiens
ctgataaggaatcataagcaaatgaaataagatctgagggaaaagaaataattttcacagcaccaatcactaccta

SEQ ID NO: 183814 - DNA, 74 bp, Homo sapiens
cataagcaaatgaaataagatctgagggaaaagaaataattttcacagcaccaatcactacctaaaattataga

SEQ ID NO: 183815 - DNA, 71 bp, Homo sapiens
atgaaataagatctgagggaaaagaaataattttcacagcaccaatcactacctaaaattatagatttcct

SEQ ID NO: 183816 - DNA, 69 bp, Homo sapiens
gagggaaaagaaataattttcacagcaccaatcactacctaaaattatagatttccttttacatgaagg

SEQ ID NO: 183817 - DNA, 73 bp, Homo sapiens
gaaataattttcacagcaccaatcactacctaaaattatagatttccttttacatgaaggtaaagctctgctc

SEQ ID NO: 183818 - DNA, 74 bp, Homo sapiens
tttcacagcaccaatcactacctaaaattatagatttccttttacatgaaggtaaagctctgctcctatcttaa

SEQ ID NO: 183819 - DNA, 73 bp, Homo sapiens
aaaattatagatttccttttacatgaaggtaaagctctgctcctatcttaagcattgtattatccccagtgcc

SEQ ID NO: 183820 - DNA, 76 bp, Homo sapiens
ttttacatgaaggtaaagctctgctcctatcttaagcattgtattatccccagtgcccaataacccataatagaca

SEQ ID NO: 183821 - DNA, 74 bp, Homo sapiens
tctgctcctatcttaagcattgtattatccccagtgcccaataacccataatagacagtaagtattttttgaaa

SEQ ID NO: 183822 - DNA, 71 bp, Homo sapiens
tcttaagcattgtattatccccagtgcccaataacccataatagacagtaagtattttttgaaaaaatatg

SEQ ID NO: 183823 - DNA, 69 bp, Homo sapiens
ccagtgcccaataacccataatagacagtaagtattttttgaaaaaatatgttaataactgattttcta

SEQ ID NO: 183824 - DNA, 67 bp, Homo sapiens
tttttgaaaaaatatgttaataactgattttctaatttaggttaataaaaatagatggaatatatat

SEQ ID NO: 183825 - DNA, 67 bp, Homo sapiens
aaatatgttaataactgattttctaatttaggttaataaaaatagatggaatatatatttacctaat

SEQ ID NO: 183826 - DNA, 68 bp, Homo sapiens
taactgattttctaatttaggttaataaaaatagatggaatatatatttacctaattagaaaacacag

SEQ ID NO: 183827 - DNA, 67 bp, Homo sapiens
tctaatttaggttaataaaaatagatggaatatatatttacctaattagaaaacacaggaaggtgtt

SEQ ID NO: 183828 - DNA, 67 bp, Homo sapiens
ggttaataaaaatagatggaatatatatttacctaattagaaaacacaggaaggtgttttgggataa

SEQ ID NO: 183829 - DNA, 70 bp, Homo sapiens
atagatggaatatatatttacctaattagaaaacacaggaaggtgttttgggataatgggtacagctaaa

SEQ ID NO: 183830 - DNA, 69 bp, Homo sapiens
tatatatttacctaattagaaaacacaggaaggtgttttgggataatgggtacagctaaatcagttagg

SEQ ID NO: 183831 - DNA, 71 bp, Homo sapiens
aaacacaggaaggtgttttgggataatgggtacagctaaatcagttagggagtatgcccacctggcactaa

SEQ ID NO: 183832 - DNA, 76 bp, Homo sapiens
aaggtgttttgggataatgggtacagctaaatcagttagggagtatgcccacctggcactaatgtatacatcatga

SEQ ID NO: 183833 - DNA, 77 bp, Homo sapiens
ggataatgggtacagctaaatcagttagggagtatgcccacctggcactaatgtatacatcatgaactaacattgtt

SEQ ID NO: 183834 - DNA, 75 bp, Homo sapiens
atgggtacagctaaatcagttagggagtatgcccacctggcactaatgtatacatcatgaactaacattgttttt

SEQ ID NO: 183835 - DNA, 74 bp, Homo sapiens
ctaaatcagttagggagtatgcccacctggcactaatgtatacatcatgaactaacattgtttttttcattaaa

SEQ ID NO: 183836 - DNA, 76 bp, Homo sapiens
agtatgcccacctggcactaatgtatacatcatgaactaacattgtttttttcattaaatgagaaacccagtatga

SEQ ID NO: 183837 - DNA, 80 bp, Homo sapiens
actaatgtatacatcatgaactaacattgtttttttcattaaatgagaaacccagtatgacagacaggatcagcatggca

SEQ ID NO: 183838 - DNA, 79 bp, Homo sapiens
aacattgtttttttcattaaatgagaaacccagtatgacagacaggatcagcatggcagctctacaaggtcaagaatca

SEQ ID NO: 183839 - DNA, 81 bp, Homo sapiens
tttttcattaaatgagaaacccagtatgacagacaggatcagcatggcagctctacaaggtcaagaatcaggaatccagcc

SEQ ID NO: 183840 - DNA, 78 bp, Homo sapiens
acaggatcagcatggcagctctacaaggtcaagaatcaggaatccagccccttcctgtctttgtgttcctccatactt

SEQ ID NO: 183841 - DNA, 77 bp, Homo sapiens
atggcagctctacaaggtcaagaatcaggaatccagccccttcctgtctttgtgttcctccatactttccatatgct

SEQ ID NO: 183842 - DNA, 75 bp, Homo sapiens
tacaaggtcaagaatcaggaatccagccccttcctgtctttgtgttcctccatactttccatatgcttctaacaa

SEQ ID NO: 183843 - DNA, 74 bp, Homo sapiens
ggtcaagaatcaggaatccagccccttcctgtctttgtgttcctccatactttccatatgcttctaacaacgtg

SEQ ID NO: 183844 - DNA, 76 bp, Homo sapiens
aggaatccagccccttcctgtctttgtgttcctccatactttccatatgcttctaacaacgtggcagctagagcac

SEQ ID NO: 183845 - DNA, 78 bp, Homo sapiens
ttcctgtctttgtgttcctccatactttccatatgcttctaacaacgtggcagctagagcaccggtcatcacttccaa

SEQ ID NO: 183846 - DNA, 78 bp, Homo sapiens
tctttgtgttcctccatactttccatatgcttctaacaacgtggcagctagagcaccggtcatcacttccaagttcca

SEQ ID NO: 183847 - DNA, 78 bp, Homo sapiens
catactttccatatgcttctaacaacgtggcagctagagcaccggtcatcacttccaagttccagttccaggcaagaa

SEQ ID NO: 183848 - DNA, 79 bp, Homo sapiens
tttccatatgcttctaacaacgtggcagctagagcaccggtcatcacttccaagttccagttccaggcaagaagcagaa

SEQ ID NO: 183849 - DNA, 75 bp, Homo sapiens
cagctagagcaccggtcatcacttccaagttccagttccaggcaagaagcagaagagggaaagacaaaatggtac

SEQ ID NO: 183850 - DNA, 73 bp, Homo sapiens
agagcaccggtcatcacttccaagttccagttccaggcaagaagcagaagagggaaagacaaaatggtaccta

SEQ ID NO: 183851 - DNA, 72 bp, Homo sapiens
ttccagttccaggcaagaagcagaagagggaaagacaaaatggtacctaccagtgagtcagcttctttttaa

SEQ ID NO: 183852 - DNA, 72 bp, Homo sapiens
ttccaggcaagaagcagaagagggaaagacaaaatggtacctaccagtgagtcagcttctttttaatgaact

SEQ ID NO: 183853 - DNA, 69 bp, Homo sapiens
agaagagggaaagacaaaatggtacctaccagtgagtcagcttctttttaatgaacttccctgtaattc

SEQ ID NO: 183854 - DNA, 69 bp, Homo sapiens
aaaatggtacctaccagtgagtcagcttctttttaatgaacttccctgtaattcccacctaataactgc

SEQ ID NO: 183855 - DNA, 74 bp, Homo sapiens
cttctttttaatgaacttccctgtaattcccacctaataactgccatttatatctcattagccagattcagtca

SEQ ID NO: 183856 - DNA, 76 bp, Homo sapiens
tttaatgaacttccctgtaattcccacctaataactgccatttatatctcattagccagattcagtcacagaataa

SEQ ID NO: 183857 - DNA, 79 bp, Homo sapiens
ttccctgtaattcccacctaataactgccatttatatctcattagccagattcagtcacagaataatgtctaactgcaa

SEQ ID NO: 183858 - DNA, 79 bp, Homo sapiens
attcccacctaataactgccatttatatctcattagccagattcagtcacagaataatgtctaactgcaaggaaggctg

SEQ ID NO: 183859 - DNA, 74 bp, Homo sapiens
atttatatctcattagccagattcagtcacagaataatgtctaactgcaaggaaggctggggaaacttttttgt

SEQ ID NO: 183860 - DNA, 74 bp, Homo sapiens
attagccagattcagtcacagaataatgtctaactgcaaggaaggctggggaaacttttttgttaggcatgtta

SEQ ID NO: 183861 - DNA, 69 bp, Homo sapiens
agaataatgtctaactgcaaggaaggctggggaaacttttttgttaggcatgttactgttataataaaa

SEQ ID NO: 183862 - DNA, 68 bp, Homo sapiens
ctaactgcaaggaaggctggggaaacttttttgttaggcatgttactgttataataaaataaacattc

SEQ ID NO: 183863 - DNA, 68 bp, Homo sapiens
ggaaggctggggaaacttttttgttaggcatgttactgttataataaaataaacattctgttagaaga

SEQ ID NO: 183864 - DNA, 70 bp, Homo sapiens
acttttttgttaggcatgttactgttataataaaataaacattctgttagaagaataagaggataatgga

SEQ ID NO: 183865 - DNA, 76 bp, Homo sapiens
tgttaggcatgttactgttataataaaataaacattctgttagaagaataagaggataatggatattgaatagata

SEQ ID NO: 183866 - DNA, 78 bp, Homo sapiens
ctgttataataaaataaacattctgttagaagaataagaggataatggatattgaatagataactagcagtgtctgca

SEQ ID NO: 183867 - DNA, 77 bp, Homo sapiens
aaaataaacattctgttagaagaataagaggataatggatattgaatagataactagcagtgtctgcaagagatact

SEQ ID NO: 183868 - DNA, 80 bp, Homo sapiens
acattctgttagaagaataagaggataatggatattgaatagataactagcagtgtctgcaagagatactttagaatatg

SEQ ID NO: 183869 - DNA, 78 bp, Homo sapiens
aagaataagaggataatggatattgaatagataactagcagtgtctgcaagagatactttagaatatgttgtacctgg

SEQ ID NO: 183870 - DNA, 80 bp, Homo sapiens
gataatggatattgaatagataactagcagtgtctgcaagagatactttagaatatgttgtacctgggtatctgttctgt

SEQ ID NO: 183871 - DNA, 79 bp, Homo sapiens
tattgaatagataactagcagtgtctgcaagagatactttagaatatgttgtacctgggtatctgttctgtttcaagta

SEQ ID NO: 183872 - DNA, 74 bp, Homo sapiens
aagagatactttagaatatgttgtacctgggtatctgttctgtttcaagtacctgttgatcagaattgtccagt

SEQ ID NO: 183873 - DNA, 74 bp, Homo sapiens
ttagaatatgttgtacctgggtatctgttctgtttcaagtacctgttgatcagaattgtccagttggtagcttt

SEQ ID NO: 183874 - DNA, 74 bp, Homo sapiens
ttgtacctgggtatctgttctgtttcaagtacctgttgatcagaattgtccagttggtagcttttgagaatagt

SEQ ID NO: 183875 - DNA, 76 bp, Homo sapiens
tatctgttctgtttcaagtacctgttgatcagaattgtccagttggtagcttttgagaatagttggcgttgaagaa

SEQ ID NO: 183876 - DNA, 74 bp, Homo sapiens
gtacctgttgatcagaattgtccagttggtagcttttgagaatagttggcgttgaagaagatgtaaaaaatata

SEQ ID NO: 183877 - DNA, 71 bp, Homo sapiens
gaattgtccagttggtagcttttgagaatagttggcgttgaagaagatgtaaaaaatatattggtaacagg

SEQ ID NO: 183878 - DNA, 72 bp, Homo sapiens
agttggtagcttttgagaatagttggcgttgaagaagatgtaaaaaatatattggtaacaggtgattgtcca

SEQ ID NO: 183879 - DNA, 71 bp, Homo sapiens
aatagttggcgttgaagaagatgtaaaaaatatattggtaacaggtgattgtccagggaccgactatataa

SEQ ID NO: 183880 - DNA, 73 bp, Homo sapiens
tatattggtaacaggtgattgtccagggaccgactatataatagaaaaggagaaactgagaatggctaactta

SEQ ID NO: 183881 - DNA, 73 bp, Homo sapiens
tgattgtccagggaccgactatataatagaaaaggagaaactgagaatggctaacttaatggtggtagaggaa

SEQ ID NO: 183882 - DNA, 72 bp, Homo sapiens
tccagggaccgactatataatagaaaaggagaaactgagaatggctaacttaatggtggtagaggaaggtca

SEQ ID NO: 183883 - DNA, 71 bp, Homo sapiens
actatataatagaaaaggagaaactgagaatggctaacttaatggtggtagaggaaggtcagcaggtaaag

SEQ ID NO: 183884 - DNA, 73 bp, Homo sapiens
aaaaggagaaactgagaatggctaacttaatggtggtagaggaaggtcagcaggtaaaggagactcacacaga

SEQ ID NO: 183885 - DNA, 77 bp, Homo sapiens
agaaactgagaatggctaacttaatggtggtagaggaaggtcagcaggtaaaggagactcacacagagtgagatcaa

SEQ ID NO: 183886 - DNA, 75 bp, Homo sapiens
ctaacttaatggtggtagaggaaggtcagcaggtaaaggagactcacacagagtgagatcaaggtaggtataaca

SEQ ID NO: 183887 - DNA, 77 bp, Homo sapiens
ttaatggtggtagaggaaggtcagcaggtaaaggagactcacacagagtgagatcaaggtaggtataacagagtcaa

SEQ ID NO: 183888 - DNA, 77 bp, Homo sapiens
gaaggtcagcaggtaaaggagactcacacagagtgagatcaaggtaggtataacagagtcaaggaatcaagcaaaaa

SEQ ID NO: 183889 - DNA, 75 bp, Homo sapiens
aggtaaaggagactcacacagagtgagatcaaggtaggtataacagagtcaaggaatcaagcaaaaagtaagtca

SEQ ID NO: 183890 - DNA, 74 bp, Homo sapiens
aaggagactcacacagagtgagatcaaggtaggtataacagagtcaaggaatcaagcaaaaagtaagtcaaaag

SEQ ID NO: 183891 - DNA, 74 bp, Homo sapiens
gagtgagatcaaggtaggtataacagagtcaaggaatcaagcaaaaagtaagtcaaaagtgccagtaaagtcaa

SEQ ID NO: 183892 - DNA, 70 bp, Homo sapiens
aaggtaggtataacagagtcaaggaatcaagcaaaaagtaagtcaaaagtgccagtaaagtcaaagtcaa

SEQ ID NO: 183893 - DNA, 72 bp, Homo sapiens
aggtataacagagtcaaggaatcaagcaaaaagtaagtcaaaagtgccagtaaagtcaaagtcaatgcttag

SEQ ID NO: 183894 - DNA, 72 bp, Homo sapiens
aagcaaaaagtaagtcaaaagtgccagtaaagtcaaagtcaatgcttaggacatggtttctacattaggatc

SEQ ID NO: 183895 - DNA, 74 bp, Homo sapiens
aagtaagtcaaaagtgccagtaaagtcaaagtcaatgcttaggacatggtttctacattaggatctggaaggca

SEQ ID NO: 183896 - DNA, 74 bp, Homo sapiens
agtgccagtaaagtcaaagtcaatgcttaggacatggtttctacattaggatctggaaggcactagtgaacttt

SEQ ID NO: 183897 - DNA, 70 bp, Homo sapiens
atggtttctacattaggatctggaaggcactagtgaacttttccagcggtagttttaagaacagtttcaa

SEQ ID NO: 183898 - DNA, 72 bp, Homo sapiens
ttctacattaggatctggaaggcactagtgaacttttccagcggtagttttaagaacagtttcaagagcaaa

SEQ ID NO: 183899 - DNA, 72 bp, Homo sapiens
atctggaaggcactagtgaacttttccagcggtagttttaagaacagtttcaagagcaaaagccagaccaca

SEQ ID NO: 183900 - DNA, 70 bp, Homo sapiens
actagtgaacttttccagcggtagttttaagaacagtttcaagagcaaaagccagaccacaatgggttga

SEQ ID NO: 183901 - DNA, 69 bp, Homo sapiens
aacttttccagcggtagttttaagaacagtttcaagagcaaaagccagaccacaatgggttgaggaata

SEQ ID NO: 183902 - DNA, 72 bp, Homo sapiens
tagttttaagaacagtttcaagagcaaaagccagaccacaatgggttgaggaataagggagcttttgagatg

SEQ ID NO: 183903 - DNA, 76 bp, Homo sapiens
ttcaagagcaaaagccagaccacaatgggttgaggaataagggagcttttgagatgtccatcagagaaagaaagga

SEQ ID NO: 183904 - DNA, 74 bp, Homo sapiens
aaagccagaccacaatgggttgaggaataagggagcttttgagatgtccatcagagaaagaaaggatatgaagg

SEQ ID NO: 183905 - DNA, 75 bp, Homo sapiens
aataagggagcttttgagatgtccatcagagaaagaaaggatatgaaggtgccatagtctaaaaagcaccagagt

SEQ ID NO: 183906 - DNA, 77 bp, Homo sapiens
agcttttgagatgtccatcagagaaagaaaggatatgaaggtgccatagtctaaaaagcaccagagttcactggaaa

SEQ ID NO: 183907 - DNA, 77 bp, Homo sapiens
agatgtccatcagagaaagaaaggatatgaaggtgccatagtctaaaaagcaccagagttcactggaaagttgcagg

SEQ ID NO: 183908 - DNA, 73 bp, Homo sapiens
gaaagaaaggatatgaaggtgccatagtctaaaaagcaccagagttcactggaaagttgcagggaggtatgtt

SEQ ID NO: 183909 - DNA, 78 bp, Homo sapiens
tgccatagtctaaaaagcaccagagttcactggaaagttgcagggaggtatgtttggtctgaaggatgactcattata

SEQ ID NO: 183910 - DNA, 74 bp, Homo sapiens
agtctaaaaagcaccagagttcactggaaagttgcagggaggtatgtttggtctgaaggatgactcattatatt

SEQ ID NO: 183911 - DNA, 76 bp, Homo sapiens
agagttcactggaaagttgcagggaggtatgtttggtctgaaggatgactcattatatttgtagatagactaagaa

SEQ ID NO: 183912 - DNA, 75 bp, Homo sapiens
actggaaagttgcagggaggtatgtttggtctgaaggatgactcattatatttgtagatagactaagaagaacaa

SEQ ID NO: 183913 - DNA, 80 bp, Homo sapiens
gtctgaaggatgactcattatatttgtagatagactaagaagaacaatccaggacagagtcagatactgaagaacctgga

SEQ ID NO: 183914 - DNA, 76 bp, Homo sapiens
actcattatatttgtagatagactaagaagaacaatccaggacagagtcagatactgaagaacctggagggtggaa

SEQ ID NO: 183915 - DNA, 75 bp, Homo sapiens
tatttgtagatagactaagaagaacaatccaggacagagtcagatactgaagaacctggagggtggaacggagga

SEQ ID NO: 183916 - DNA, 72 bp, Homo sapiens
agaacaatccaggacagagtcagatactgaagaacctggagggtggaacggaggaggatctgggtttcgtcc

SEQ ID NO: 183917 - DNA, 73 bp, Homo sapiens
agagtcagatactgaagaacctggagggtggaacggaggaggatctgggtttcgtccgctgagaacagcagtt

SEQ ID NO: 183918 - DNA, 72 bp, Homo sapiens
atactgaagaacctggagggtggaacggaggaggatctgggtttcgtccgctgagaacagcagtttgtccaa

SEQ ID NO: 183919 - DNA, 72 bp, Homo sapiens
ctggagggtggaacggaggaggatctgggtttcgtccgctgagaacagcagtttgtccaagtaaaggcttca

SEQ ID NO: 183920 - DNA, 73 bp, Homo sapiens
tggaacggaggaggatctgggtttcgtccgctgagaacagcagtttgtccaagtaaaggcttcatttacactg

SEQ ID NO: 183921 - DNA, 69 bp, Homo sapiens
tgggtttcgtccgctgagaacagcagtttgtccaagtaaaggcttcatttacactggagtttttaaaac

SEQ ID NO: 183922 - DNA, 68 bp, Homo sapiens
gagaacagcagtttgtccaagtaaaggcttcatttacactggagtttttaaaacctctttccatgttt

SEQ ID NO: 183923 - DNA, 67 bp, Homo sapiens
cagcagtttgtccaagtaaaggcttcatttacactggagtttttaaaacctctttccatgtttttat

SEQ ID NO: 183924 - DNA, 67 bp, Homo sapiens
tccaagtaaaggcttcatttacactggagtttttaaaacctctttccatgtttttattatgaaacaa

SEQ ID NO: 183925 - DNA, 68 bp, Homo sapiens
ggcttcatttacactggagtttttaaaacctctttccatgtttttattatgaaacaatactgagactt

SEQ ID NO: 183926 - DNA, 70 bp, Homo sapiens
cactggagtttttaaaacctctttccatgtttttattatgaaacaatactgagacttttgatttgccaga

SEQ ID NO: 183927 - DNA, 71 bp, Homo sapiens
ccatgtttttattatgaaacaatactgagacttttgatttgccagatacctaaatgtgtcattttccgttt

SEQ ID NO: 183928 - DNA, 73 bp, Homo sapiens
attatgaaacaatactgagacttttgatttgccagatacctaaatgtgtcattttccgttttgcctagtgatt

SEQ ID NO: 183929 - DNA, 70 bp, Homo sapiens
atttgccagatacctaaatgtgtcattttccgttttgcctagtgatttttttcccccctgaaatacatca

SEQ ID NO: 183930 - DNA, 70 bp, Homo sapiens
atacctaaatgtgtcattttccgttttgcctagtgatttttttcccccctgaaatacatcaagtcatgat

SEQ ID NO: 183931 - DNA, 76 bp, Homo sapiens
ttgcctagtgatttttttcccccctgaaatacatcaagtcatgattattctggttggcaatatcccagagacaata

SEQ ID NO: 183932 - DNA, 74 bp, Homo sapiens
atttttttcccccctgaaatacatcaagtcatgattattctggttggcaatatcccagagacaataaaggatga

SEQ ID NO: 183933 - DNA, 77 bp, Homo sapiens
cccctgaaatacatcaagtcatgattattctggttggcaatatcccagagacaataaaggatgaccaggacacaaag

SEQ ID NO: 183934 - DNA, 79 bp, Homo sapiens
aaatacatcaagtcatgattattctggttggcaatatcccagagacaataaaggatgaccaggacacaaagtctatcaa

SEQ ID NO: 183935 - DNA, 78 bp, Homo sapiens
aagtcatgattattctggttggcaatatcccagagacaataaaggatgaccaggacacaaagtctatcaaaattctca

SEQ ID NO: 183936 - DNA, 76 bp, Homo sapiens
tattctggttggcaatatcccagagacaataaaggatgaccaggacacaaagtctatcaaaattctcaccaattaa

SEQ ID NO: 183937 - DNA, 76 bp, Homo sapiens
aatatcccagagacaataaaggatgaccaggacacaaagtctatcaaaattctcaccaattaacttacatgacatc

SEQ ID NO: 183938 - DNA, 73 bp, Homo sapiens
acaataaaggatgaccaggacacaaagtctatcaaaattctcaccaattaacttacatgacatcctttgggat

SEQ ID NO: 183939 - DNA, 74 bp, Homo sapiens
aaaggatgaccaggacacaaagtctatcaaaattctcaccaattaacttacatgacatcctttgggatttgcac

SEQ ID NO: 183940 - DNA, 70 bp, Homo sapiens
cacaaagtctatcaaaattctcaccaattaacttacatgacatcctttgggatttgcaccctaccctttt

SEQ ID NO: 183941 - DNA, 70 bp, Homo sapiens
atcaaaattctcaccaattaacttacatgacatcctttgggatttgcaccctacccttttttagacaaga

SEQ ID NO: 183942 - DNA, 71 bp, Homo sapiens
aattctcaccaattaacttacatgacatcctttgggatttgcaccctacccttttttagacaagacatgaa

SEQ ID NO: 183943 - DNA, 73 bp, Homo sapiens
aattaacttacatgacatcctttgggatttgcaccctacccttttttagacaagacatgaagcactgcaggtg

SEQ ID NO: 183944 - DNA, 75 bp, Homo sapiens
atgacatcctttgggatttgcaccctacccttttttagacaagacatgaagcactgcaggtggaattcagctggg

SEQ ID NO: 183945 - DNA, 76 bp, Homo sapiens
ttgggatttgcaccctacccttttttagacaagacatgaagcactgcaggtggaattcagctggggatatgggata

SEQ ID NO: 183946 - DNA, 80 bp, Homo sapiens
tttttagacaagacatgaagcactgcaggtggaattcagctggggatatgggatatgaggttcattcattcaacataggg

SEQ ID NO: 183947 - DNA, 84 bp, Homo sapiens
aagacatgaagcactgcaggtggaattcagctggggatatgggatatgaggttcattcattcaacataggggcacaggctgaga

SEQ ID NO: 183948 - DNA, 81 bp, Homo sapiens
gggatatgggatatgaggttcattcattcaacataggggcacaggctgagatgctggaccaagaggtcacattggccgtac

SEQ ID NO: 183949 - DNA, 83 bp, Homo sapiens
tgggatatgaggttcattcattcaacataggggcacaggctgagatgctggaccaagaggtcacattggccgtacgcctgaca

SEQ ID NO: 183950 - DNA, 79 bp, Homo sapiens
attcattcaacataggggcacaggctgagatgctggaccaagaggtcacattggccgtacgcctgacaggcttaaataa

SEQ ID NO: 183951 - DNA, 78 bp, Homo sapiens
aacataggggcacaggctgagatgctggaccaagaggtcacattggccgtacgcctgacaggcttaaataagtgtgta

SEQ ID NO: 183952 - DNA, 76 bp, Homo sapiens
caggctgagatgctggaccaagaggtcacattggccgtacgcctgacaggcttaaataagtgtgtaagggctagtt

SEQ ID NO: 183953 - DNA, 69 bp, Homo sapiens
aagaggtcacattggccgtacgcctgacaggcttaaataagtgtgtaagggctagtttttaaatggtaa

SEQ ID NO: 183954 - DNA, 69 bp, Homo sapiens
attggccgtacgcctgacaggcttaaataagtgtgtaagggctagtttttaaatggtaacaactcacta

SEQ ID NO: 183955 - DNA, 68 bp, Homo sapiens
gcctgacaggcttaaataagtgtgtaagggctagtttttaaatggtaacaactcactaggaaccactt

SEQ ID NO: 183956 - DNA, 66 bp, Homo sapiens
acaggcttaaataagtgtgtaagggctagtttttaaatggtaacaactcactaggaaccactttaa

SEQ ID NO: 183957 - DNA, 72 bp, Homo sapiens
taacaactcactaggaaccactttaaaatgttctagaggaggagagtttgggaaagtgagtgaaggatgtgc

SEQ ID NO: 183958 - DNA, 74 bp, Homo sapiens
taggaaccactttaaaatgttctagaggaggagagtttgggaaagtgagtgaaggatgtgcgaatcactgcaaa

SEQ ID NO: 183959 - DNA, 78 bp, Homo sapiens
taaaatgttctagaggaggagagtttgggaaagtgagtgaaggatgtgcgaatcactgcaaactggaaatgatcgata

SEQ ID NO: 183960 - DNA, 82 bp, Homo sapiens
tctagaggaggagagtttgggaaagtgagtgaaggatgtgcgaatcactgcaaactggaaatgatcgataatggcatgccaa

SEQ ID NO: 183961 - DNA, 79 bp, Homo sapiens
ggagagtttgggaaagtgagtgaaggatgtgcgaatcactgcaaactggaaatgatcgataatggcatgccaactgggg

SEQ ID NO: 183962 - DNA, 82 bp, Homo sapiens
agtgagtgaaggatgtgcgaatcactgcaaactggaaatgatcgataatggcatgccaactgggggcctgcatccgagggcc

SEQ ID NO: 183963 - DNA, 79 bp, Homo sapiens
gatgtgcgaatcactgcaaactggaaatgatcgataatggcatgccaactgggggcctgcatccgagggccccctttta

SEQ ID NO: 183964 - DNA, 74 bp, Homo sapiens
aatcactgcaaactggaaatgatcgataatggcatgccaactgggggcctgcatccgagggcccccttttaaaa

SEQ ID NO: 183965 - DNA, 69 bp, Homo sapiens
aaactggaaatgatcgataatggcatgccaactgggggcctgcatccgagggcccccttttaaaaaaaa

SEQ ID NO: 183966 - DNA, 69 bp, Homo sapiens
aaaaaaacaatgagacccctaggatcttgggcaagttattaaacttggcttccagttctcttctgcaaa

SEQ ID NO: 183967 - DNA, 69 bp, Homo sapiens
aaaaaacaatgagacccctaggatcttgggcaagttattaaacttggcttccagttctcttctgcaaaa

SEQ ID NO: 183968 - DNA, 71 bp, Homo sapiens
acaatgagacccctaggatcttgggcaagttattaaacttggcttccagttctcttctgcaaaattcaagt

SEQ ID NO: 183969 - DNA, 74 bp, Homo sapiens
taggatcttgggcaagttattaaacttggcttccagttctcttctgcaaaattcaagttgttgaatgagatttc

SEQ ID NO: 183970 - DNA, 73 bp, Homo sapiens
ggcaagttattaaacttggcttccagttctcttctgcaaaattcaagttgttgaatgagatttctgaagtttc

SEQ ID NO: 183971 - DNA, 73 bp, Homo sapiens
attaaacttggcttccagttctcttctgcaaaattcaagttgttgaatgagatttctgaagtttcttgttcta

SEQ ID NO: 183972 - DNA, 75 bp, Homo sapiens
gcttccagttctcttctgcaaaattcaagttgttgaatgagatttctgaagtttcttgttctaaaaactctgtga

SEQ ID NO: 183973 - DNA, 77 bp, Homo sapiens
ttgttgaatgagatttctgaagtttcttgttctaaaaactctgtgattatctaactcatgaaataaatgctgtataa

SEQ ID NO: 183974 - DNA, 75 bp, Homo sapiens
gatttctgaagtttcttgttctaaaaactctgtgattatctaactcatgaaataaatgctgtataaaactgtatg

SEQ ID NO: 183975 - DNA, 75 bp, Homo sapiens
gtttcttgttctaaaaactctgtgattatctaactcatgaaataaatgctgtataaaactgtatgtgatttctaa

SEQ ID NO: 183976 - DNA, 74 bp, Homo sapiens
ctaaaaactctgtgattatctaactcatgaaataaatgctgtataaaactgtatgtgatttctaaatttggtct

SEQ ID NO: 183977 - DNA, 75 bp, Homo sapiens
ctgtgattatctaactcatgaaataaatgctgtataaaactgtatgtgatttctaaatttggtcttaaaccttca

SEQ ID NO: 183978 - DNA, 71 bp, Homo sapiens
tcatgaaataaatgctgtataaaactgtatgtgatttctaaatttggtcttaaaccttcaaaaagagtacc

SEQ ID NO: 183979 - DNA, 68 bp, Homo sapiens
aatgctgtataaaactgtatgtgatttctaaatttggtcttaaaccttcaaaaagagtacctaagcct

SEQ ID NO: 183980 - DNA, 67 bp, Homo sapiens
actgtatgtgatttctaaatttggtcttaaaccttcaaaaagagtacctaagccttgagaggttttc

SEQ ID NO: 183981 - DNA, 66 bp, Homo sapiens
gtgatttctaaatttggtcttaaaccttcaaaaagagtacctaagccttgagaggttttctaaata

SEQ ID NO: 183982 - DNA, 68 bp, Homo sapiens
tttggtcttaaaccttcaaaaagagtacctaagccttgagaggttttctaaatacagaagagagacca

SEQ ID NO: 183983 - DNA, 71 bp, Homo sapiens
taaaccttcaaaaagagtacctaagccttgagaggttttctaaatacagaagagagaccacagagctgtta

SEQ ID NO: 183984 - DNA, 74 bp, Homo sapiens
ttcaaaaagagtacctaagccttgagaggttttctaaatacagaagagagaccacagagctgttaatgtatcta

SEQ ID NO: 183985 - DNA, 73 bp, Homo sapiens
aaaagagtacctaagccttgagaggttttctaaatacagaagagagaccacagagctgttaatgtatctacag

SEQ ID NO: 183986 - DNA, 77 bp, Homo sapiens
taagccttgagaggttttctaaatacagaagagagaccacagagctgttaatgtatctacaggcccaatgaagataa

SEQ ID NO: 183987 - DNA, 79 bp, Homo sapiens
ttttctaaatacagaagagagaccacagagctgttaatgtatctacaggcccaatgaagataaagagatgggtggcata

SEQ ID NO: 183988 - DNA, 81 bp, Homo sapiens
taaatacagaagagagaccacagagctgttaatgtatctacaggcccaatgaagataaagagatgggtggcatataacaca

SEQ ID NO: 183989 - DNA, 76 bp, Homo sapiens
agctgttaatgtatctacaggcccaatgaagataaagagatgggtggcatataacacacaacctccctccttcaaa

SEQ ID NO: 183990 - DNA, 74 bp, Homo sapiens
tatctacaggcccaatgaagataaagagatgggtggcatataacacacaacctccctccttcaaatcttgtttt

SEQ ID NO: 183991 - DNA, 69 bp, Homo sapiens
agatgggtggcatataacacacaacctccctccttcaaatcttgttttttggaggaggtaaactattag

SEQ ID NO: 183992 - DNA, 65 bp, Homo sapiens
acaacctccctccttcaaatcttgttttttggaggaggtaaactattaggcttattggtttatta

SEQ ID NO: 183993 - DNA, 67 bp, Homo sapiens
caaatcttgttttttggaggaggtaaactattaggcttattggtttattatacaaaacacagaggac

SEQ ID NO: 183994 - DNA, 72 bp, Homo sapiens
tttttggaggaggtaaactattaggcttattggtttattatacaaaacacagaggactatgcatgacttatc

SEQ ID NO: 183995 - DNA, 72 bp, Homo sapiens
ggaggaggtaaactattaggcttattggtttattatacaaaacacagaggactatgcatgacttatctttaa

SEQ ID NO: 183996 - DNA, 71 bp, Homo sapiens
ctattaggcttattggtttattatacaaaacacagaggactatgcatgacttatctttaaaggggaggaag

SEQ ID NO: 183997 - DNA, 72 bp, Homo sapiens
ttggtttattatacaaaacacagaggactatgcatgacttatctttaaaggggaggaagtgacttgttacaa

SEQ ID NO: 183998 - DNA, 74 bp, Homo sapiens
ttatacaaaacacagaggactatgcatgacttatctttaaaggggaggaagtgacttgttacaagtctctgaaa

SEQ ID NO: 183999 - DNA, 76 bp, Homo sapiens
agaggactatgcatgacttatctttaaaggggaggaagtgacttgttacaagtctctgaaagttgatagacaatga

SEQ ID NO: 184000 - DNA, 76 bp, Homo sapiens
actatgcatgacttatctttaaaggggaggaagtgacttgttacaagtctctgaaagttgatagacaatgacagga

SEQ ID NO: 184001 - DNA, 73 bp, Homo sapiens
tatctttaaaggggaggaagtgacttgttacaagtctctgaaagttgatagacaatgacaggaggcttggtaa

SEQ ID NO: 184002 - DNA, 73 bp, Homo sapiens
gggaggaagtgacttgttacaagtctctgaaagttgatagacaatgacaggaggcttggtaaacaacagtaaa

SEQ ID NO: 184003 - DNA, 77 bp, Homo sapiens
agtctctgaaagttgatagacaatgacaggaggcttggtaaacaacagtaaatgtgctagccctgtctgattcttaa

SEQ ID NO: 184004 - DNA, 75 bp, Homo sapiens
aaagttgatagacaatgacaggaggcttggtaaacaacagtaaatgtgctagccctgtctgattcttaactaaga

SEQ ID NO: 184005 - DNA, 78 bp, Homo sapiens
caatgacaggaggcttggtaaacaacagtaaatgtgctagccctgtctgattcttaactaagatcatcagataactta

SEQ ID NO: 184006 - DNA, 76 bp, Homo sapiens
aggcttggtaaacaacagtaaatgtgctagccctgtctgattcttaactaagatcatcagataacttagcacttta

SEQ ID NO: 184007 - DNA, 75 bp, Homo sapiens
ggtaaacaacagtaaatgtgctagccctgtctgattcttaactaagatcatcagataacttagcactttaaaata

SEQ ID NO: 184008 - DNA, 74 bp, Homo sapiens
ccctgtctgattcttaactaagatcatcagataacttagcactttaaaataacccaccacaagatcaacaagtc

SEQ ID NO: 184009 - DNA, 75 bp, Homo sapiens
ttcttaactaagatcatcagataacttagcactttaaaataacccaccacaagatcaacaagtctgaggctcact

SEQ ID NO: 184010 - DNA, 74 bp, Homo sapiens
aactaagatcatcagataacttagcactttaaaataacccaccacaagatcaacaagtctgaggctcactttaa

SEQ ID NO: 184011 - DNA, 71 bp, Homo sapiens
atcagataacttagcactttaaaataacccaccacaagatcaacaagtctgaggctcactttaaattaaaa

SEQ ID NO: 184012 - DNA, 71 bp, Homo sapiens
gcactttaaaataacccaccacaagatcaacaagtctgaggctcactttaaattaaaataacgctgcaaaa

SEQ ID NO: 184013 - DNA, 72 bp, Homo sapiens
aataacccaccacaagatcaacaagtctgaggctcactttaaattaaaataacgctgcaaaataatgtgaac

SEQ ID NO: 184014 - DNA, 74 bp, Homo sapiens
caagatcaacaagtctgaggctcactttaaattaaaataacgctgcaaaataatgtgaactaggacacgtgaaa

SEQ ID NO: 184015 - DNA, 74 bp, Homo sapiens
caagtctgaggctcactttaaattaaaataacgctgcaaaataatgtgaactaggacacgtgaaaatagagtga

SEQ ID NO: 184016 - DNA, 72 bp, Homo sapiens
gaggctcactttaaattaaaataacgctgcaaaataatgtgaactaggacacgtgaaaatagagtgaatact

SEQ ID NO: 184017 - DNA, 71 bp, Homo sapiens
aaattaaaataacgctgcaaaataatgtgaactaggacacgtgaaaatagagtgaatactttatattacta

SEQ ID NO: 184018 - DNA, 73 bp, Homo sapiens
acgctgcaaaataatgtgaactaggacacgtgaaaatagagtgaatactttatattactaaaaatgccctaga

SEQ ID NO: 184019 - DNA, 69 bp, Homo sapiens
aatgtgaactaggacacgtgaaaatagagtgaatactttatattactaaaaatgccctagaaattaggt

SEQ ID NO: 184020 - DNA, 70 bp, Homo sapiens
ctaggacacgtgaaaatagagtgaatactttatattactaaaaatgccctagaaattaggttatcttgag

SEQ ID NO: 184021 - DNA, 71 bp, Homo sapiens
cgtgaaaatagagtgaatactttatattactaaaaatgccctagaaattaggttatcttgagtagaattga

SEQ ID NO: 184022 - DNA, 72 bp, Homo sapiens
gtgaatactttatattactaaaaatgccctagaaattaggttatcttgagtagaattgatcagatactaaac

SEQ ID NO: 184023 - DNA, 67 bp, Homo sapiens
ctaaaaatgccctagaaattaggttatcttgagtagaattgatcagatactaaacttttttttgttt

SEQ ID NO: 184024 - DNA, 71 bp, Homo sapiens
tgtgaaccaccgcgcccagtcagatactaaacattttaaactaaggtggactttgagaaagattctgcttt

SEQ ID NO: 184025 - DNA, 70 bp, Homo sapiens
cgcgcccagtcagatactaaacattttaaactaaggtggactttgagaaagattctgcttttattcccaa

SEQ ID NO: 184026 - DNA, 69 bp, Homo sapiens
ccagtcagatactaaacattttaaactaaggtggactttgagaaagattctgcttttattcccaataaa

SEQ ID NO: 184027 - DNA, 68 bp, Homo sapiens
acattttaaactaaggtggactttgagaaagattctgcttttattcccaataaaatgaagcgttaggc

SEQ ID NO: 184028 - DNA, 69 bp, Homo sapiens
aactaaggtggactttgagaaagattctgcttttattcccaataaaatgaagcgttaggccaaatagga

SEQ ID NO: 184029 - DNA, 70 bp, Homo sapiens
tggactttgagaaagattctgcttttattcccaataaaatgaagcgttaggccaaataggaaatgacgtt

SEQ ID NO: 184030 - DNA, 69 bp, Homo sapiens
gaaagattctgcttttattcccaataaaatgaagcgttaggccaaataggaaatgacgttttagaaata

SEQ ID NO: 184031 - DNA, 71 bp, Homo sapiens
gcttttattcccaataaaatgaagcgttaggccaaataggaaatgacgttttagaaatatatgcaagaata

SEQ ID NO: 184032 - DNA, 70 bp, Homo sapiens
cccaataaaatgaagcgttaggccaaataggaaatgacgttttagaaatatatgcaagaataaaaacaca

SEQ ID NO: 184033 - DNA, 75 bp, Homo sapiens
gaagcgttaggccaaataggaaatgacgttttagaaatatatgcaagaataaaaacacattctgtgatcatggat

SEQ ID NO: 184034 - DNA, 76 bp, Homo sapiens
ggccaaataggaaatgacgttttagaaatatatgcaagaataaaaacacattctgtgatcatggattataaatcac

SEQ ID NO: 184035 - DNA, 79 bp, Homo sapiens
tgacgttttagaaatatatgcaagaataaaaacacattctgtgatcatggattataaatcactaggttcctagactgca

SEQ ID NO: 184036 - DNA, 78 bp, Homo sapiens
aaatatatgcaagaataaaaacacattctgtgatcatggattataaatcactaggttcctagactgcagttttgcctc

SEQ ID NO: 184037 - DNA, 76 bp, Homo sapiens
taaaaacacattctgtgatcatggattataaatcactaggttcctagactgcagttttgcctcccaatctttacaa

SEQ ID NO: 184038 - DNA, 76 bp, Homo sapiens
tgatcatggattataaatcactaggttcctagactgcagttttgcctcccaatctttacaagaacccctgccaaca

SEQ ID NO: 184039 - DNA, 72 bp, Homo sapiens
attataaatcactaggttcctagactgcagttttgcctcccaatctttacaagaacccctgccaacatcagg

SEQ ID NO: 184040 - DNA, 73 bp, Homo sapiens
actaggttcctagactgcagttttgcctcccaatctttacaagaacccctgccaacatcaggtcttcacataa

SEQ ID NO: 184041 - DNA, 77 bp, Homo sapiens
tagactgcagttttgcctcccaatctttacaagaacccctgccaacatcaggtcttcacataatgcaattgataaaa

SEQ ID NO: 184042 - DNA, 73 bp, Homo sapiens
agttttgcctcccaatctttacaagaacccctgccaacatcaggtcttcacataatgcaattgataaaattac

SEQ ID NO: 184043 - DNA, 73 bp, Homo sapiens
tcccaatctttacaagaacccctgccaacatcaggtcttcacataatgcaattgataaaattacctaacaaaa

SEQ ID NO: 184044 - DNA, 77 bp, Homo sapiens
tacaagaacccctgccaacatcaggtcttcacataatgcaattgataaaattacctaacaaaagctgtcttcatcta

SEQ ID NO: 184045 - DNA, 81 bp, Homo sapiens
cctgccaacatcaggtcttcacataatgcaattgataaaattacctaacaaaagctgtcttcatctatgacatcattaata

SEQ ID NO: 184046 - DNA, 76 bp, Homo sapiens
aatgcaattgataaaattacctaacaaaagctgtcttcatctatgacatcattaatattttgcttgaactaatacc

SEQ ID NO: 184047 - DNA, 77 bp, Homo sapiens
gataaaattacctaacaaaagctgtcttcatctatgacatcattaatattttgcttgaactaatacctgaatggcaa

SEQ ID NO: 184048 - DNA, 79 bp, Homo sapiens
attacctaacaaaagctgtcttcatctatgacatcattaatattttgcttgaactaatacctgaatggcaatttgcatc

SEQ ID NO: 184049 - DNA, 83 bp, Homo sapiens
agctgtcttcatctatgacatcattaatattttgcttgaactaatacctgaatggcaatttgcatctataataaggtgagcat

SEQ ID NO: 184050 - DNA, 78 bp, Homo sapiens
acatcattaatattttgcttgaactaatacctgaatggcaatttgcatctataataaggtgagcattactaattatta

SEQ ID NO: 184051 - DNA, 76 bp, Homo sapiens
attttgcttgaactaatacctgaatggcaatttgcatctataataaggtgagcattactaattattaaatccacat

SEQ ID NO: 184052 - DNA, 76 bp, Homo sapiens
ctaatacctgaatggcaatttgcatctataataaggtgagcattactaattattaaatccacattttacggctctc

SEQ ID NO: 184053 - DNA, 76 bp, Homo sapiens
atggcaatttgcatctataataaggtgagcattactaattattaaatccacattttacggctctctactacaaagc

SEQ ID NO: 184054 - DNA, 75 bp, Homo sapiens
tgcatctataataaggtgagcattactaattattaaatccacattttacggctctctactacaaagctaaacctg

SEQ ID NO: 184055 - DNA, 69 bp, Homo sapiens
gagcattactaattattaaatccacattttacggctctctactacaaagctaaacctgtttagttttag

SEQ ID NO: 184056 - DNA, 67 bp, Homo sapiens
ttaaatccacattttacggctctctactacaaagctaaacctgtttagttttagtttttgattttga

SEQ ID NO: 184057 - DNA, 66 bp, Homo sapiens
tccacattttacggctctctactacaaagctaaacctgtttagttttagtttttgattttgaaacg

SEQ ID NO: 184058 - DNA, 67 bp, Homo sapiens
acggctctctactacaaagctaaacctgtttagttttagtttttgattttgaaacggtctcactaca

SEQ ID NO: 184059 - DNA, 71 bp, Homo sapiens
aaagctaaacctgtttagttttagtttttgattttgaaacggtctcactacattgcttatgctggagtgca

SEQ ID NO: 184060 - DNA, 76 bp, Homo sapiens
tgtgcccagcctgtctagtctttttattccaagtgtagactcttgtaccacacttcctggaccactcctcctgagc

SEQ ID NO: 184061 - DNA, 73 bp, Homo sapiens
ctgtctagtctttttattccaagtgtagactcttgtaccacacttcctggaccactcctcctgagcccacaaa

SEQ ID NO: 184062 - DNA, 74 bp, Homo sapiens
tctttttattccaagtgtagactcttgtaccacacttcctggaccactcctcctgagcccacaaagataattga

SEQ ID NO: 184063 - DNA, 75 bp, Homo sapiens
aagtgtagactcttgtaccacacttcctggaccactcctcctgagcccacaaagataattgactggccaggtatg

SEQ ID NO: 184064 - DNA, 77 bp, Homo sapiens
tagactcttgtaccacacttcctggaccactcctcctgagcccacaaagataattgactggccaggtatggctatgt

SEQ ID NO: 184065 - DNA, 77 bp, Homo sapiens
taccacacttcctggaccactcctcctgagcccacaaagataattgactggccaggtatggctatgttcctgaggaa

SEQ ID NO: 184066 - DNA, 75 bp, Homo sapiens
cctggaccactcctcctgagcccacaaagataattgactggccaggtatggctatgttcctgaggaaggaaggaa

SEQ ID NO: 184067 - DNA, 75 bp, Homo sapiens
tattttattataatttttttctgacataatccacccggagatgcatgagtgcaacctttagataatacaatataa

SEQ ID NO: 184068 - DNA, 78 bp, Homo sapiens
taatttttttctgacataatccacccggagatgcatgagtgcaacctttagataatacaatataatatcaatacaata

SEQ ID NO: 184069 - DNA, 78 bp, Homo sapiens
tttttctgacataatccacccggagatgcatgagtgcaacctttagataatacaatataatatcaatacaataggttg

SEQ ID NO: 184070 - DNA, 78 bp, Homo sapiens
taatccacccggagatgcatgagtgcaacctttagataatacaatataatatcaatacaataggttggagccctcgta

SEQ ID NO: 184071 - DNA, 79 bp, Homo sapiens
agatgcatgagtgcaacctttagataatacaatataatatcaatacaataggttggagccctcgtagtaacactggcca

SEQ ID NO: 184072 - DNA, 76 bp, Homo sapiens
tgcaacctttagataatacaatataatatcaatacaataggttggagccctcgtagtaacactggccatgtccttg

SEQ ID NO: 184073 - DNA, 75 bp, Homo sapiens
tttagataatacaatataatatcaatacaataggttggagccctcgtagtaacactggccatgtccttggcccta

SEQ ID NO: 184074 - DNA, 76 bp, Homo sapiens
aatataatatcaatacaataggttggagccctcgtagtaacactggccatgtccttggccctagaaatgagatata

SEQ ID NO: 184075 - DNA, 77 bp, Homo sapiens
tatcaatacaataggttggagccctcgtagtaacactggccatgtccttggccctagaaatgagatatatgaaacaa

SEQ ID NO: 184076 - DNA, 75 bp, Homo sapiens
ttggagccctcgtagtaacactggccatgtccttggccctagaaatgagatatatgaaacaacctaataacatta

SEQ ID NO: 184077 - DNA, 73 bp, Homo sapiens
tcgtagtaacactggccatgtccttggccctagaaatgagatatatgaaacaacctaataacattagggaaaa

SEQ ID NO: 184078 - DNA, 72 bp, Homo sapiens
taacactggccatgtccttggccctagaaatgagatatatgaaacaacctaataacattagggaaaagttcc

SEQ ID NO: 184079 - DNA, 72 bp, Homo sapiens
agaaatgagatatatgaaacaacctaataacattagggaaaagttccctcagatagactctaaggtaccaca

SEQ ID NO: 184080 - DNA, 70 bp, Homo sapiens
agatatatgaaacaacctaataacattagggaaaagttccctcagatagactctaaggtaccacagcttt

SEQ ID NO: 184081 - DNA, 68 bp, Homo sapiens
acaacctaataacattagggaaaagttccctcagatagactctaaggtaccacagcttttcagtactt

SEQ ID NO: 184082 - DNA, 71 bp, Homo sapiens
aataacattagggaaaagttccctcagatagactctaaggtaccacagcttttcagtactttctgcaattc

SEQ ID NO: 184083 - DNA, 76 bp, Homo sapiens
aaagttccctcagatagactctaaggtaccacagcttttcagtactttctgcaattctgcttctcagaaaatgata

SEQ ID NO: 184084 - DNA, 77 bp, Homo sapiens
tctaaggtaccacagcttttcagtactttctgcaattctgcttctcagaaaatgatattaggttacataaagcaaga

SEQ ID NO: 184085 - DNA, 81 bp, Homo sapiens
tcagtactttctgcaattctgcttctcagaaaatgatattaggttacataaagcaagactcaatcagcattttagaaatca

SEQ ID NO: 184086 - DNA, 81 bp, Homo sapiens
caattctgcttctcagaaaatgatattaggttacataaagcaagactcaatcagcattttagaaatcatgccagagtccat

SEQ ID NO: 184087 - DNA, 81 bp, Homo sapiens
ttctcagaaaatgatattaggttacataaagcaagactcaatcagcattttagaaatcatgccagagtccattactcacac

SEQ ID NO: 184088 - DNA, 77 bp, Homo sapiens
ttaggttacataaagcaagactcaatcagcattttagaaatcatgccagagtccattactcacacccaagtttccaa

SEQ ID NO: 184089 - DNA, 78 bp, Homo sapiens
caagactcaatcagcattttagaaatcatgccagagtccattactcacacccaagtttccaagtactgtggctacatt

SEQ ID NO: 184090 - DNA, 75 bp, Homo sapiens
aatcagcattttagaaatcatgccagagtccattactcacacccaagtttccaagtactgtggctacattttatt

SEQ ID NO: 184091 - DNA, 73 bp, Homo sapiens
attttagaaatcatgccagagtccattactcacacccaagtttccaagtactgtggctacattttatttctta

SEQ ID NO: 184092 - DNA, 69 bp, Homo sapiens
ccagagtccattactcacacccaagtttccaagtactgtggctacattttatttcttactcttcccttt

SEQ ID NO: 184093 - DNA, 69 bp, Homo sapiens
attactcacacccaagtttccaagtactgtggctacattttatttcttactcttcccttttcaccagaa

SEQ ID NO: 184094 - DNA, 71 bp, Homo sapiens
ccaagtttccaagtactgtggctacattttatttcttactcttcccttttcaccagaatgtggcaccacta

SEQ ID NO: 184095 - DNA, 73 bp, Homo sapiens
tttccaagtactgtggctacattttatttcttactcttcccttttcaccagaatgtggcaccactaccagatg

SEQ ID NO: 184096 - DNA, 79 bp, Homo sapiens
gctacattttatttcttactcttcccttttcaccagaatgtggcaccactaccagatggtcagaggatgtcagatgatg

SEQ ID NO: 184097 - DNA, 77 bp, Homo sapiens
ttttatttcttactcttcccttttcaccagaatgtggcaccactaccagatggtcagaggatgtcagatgatgggaa

SEQ ID NO: 184098 - DNA, 78 bp, Homo sapiens
tcttcccttttcaccagaatgtggcaccactaccagatggtcagaggatgtcagatgatgggaaggttaacagtacta

SEQ ID NO: 184099 - DNA, 77 bp, Homo sapiens
tttcaccagaatgtggcaccactaccagatggtcagaggatgtcagatgatgggaaggttaacagtactaaatttta

SEQ ID NO: 184100 - DNA, 76 bp, Homo sapiens
aatgtggcaccactaccagatggtcagaggatgtcagatgatgggaaggttaacagtactaaattttattttctca

SEQ ID NO: 184101 - DNA, 73 bp, Homo sapiens
tggtcagaggatgtcagatgatgggaaggttaacagtactaaattttattttctcaaaagtgtttagtcaata

SEQ ID NO: 184102 - DNA, 73 bp, Homo sapiens
gatgtcagatgatgggaaggttaacagtactaaattttattttctcaaaagtgtttagtcaatatcacagtgg

SEQ ID NO: 184103 - DNA, 70 bp, Homo sapiens
cagtactaaattttattttctcaaaagtgtttagtcaatatcacagtggttttaattcgacatgacttcc

SEQ ID NO: 184104 - DNA, 71 bp, Homo sapiens
tttattttctcaaaagtgtttagtcaatatcacagtggttttaattcgacatgacttccctctgaacaagg

SEQ ID NO: 184105 - DNA, 75 bp, Homo sapiens
tctcaaaagtgtttagtcaatatcacagtggttttaattcgacatgacttccctctgaacaaggtttaatcatca

SEQ ID NO: 184106 - DNA, 75 bp, Homo sapiens
tttagtcaatatcacagtggttttaattcgacatgacttccctctgaacaaggtttaatcatcagtggtacaata

SEQ ID NO: 184107 - DNA, 74 bp, Homo sapiens
aatatcacagtggttttaattcgacatgacttccctctgaacaaggtttaatcatcagtggtacaatacaagaa

SEQ ID NO: 184108 - DNA, 74 bp, Homo sapiens
tggttttaattcgacatgacttccctctgaacaaggtttaatcatcagtggtacaatacaagaagcatgaattt

SEQ ID NO: 184109 - DNA, 77 bp, Homo sapiens
atgacttccctctgaacaaggtttaatcatcagtggtacaatacaagaagcatgaattttggcattattcagacctg

SEQ ID NO: 184110 - DNA, 78 bp, Homo sapiens
tctgaacaaggtttaatcatcagtggtacaatacaagaagcatgaattttggcattattcagacctggattcgaattc

SEQ ID NO: 184111 - DNA, 81 bp, Homo sapiens
tacaatacaagaagcatgaattttggcattattcagacctggattcgaattcttgctctgtcacttccacctgtaagatga

SEQ ID NO: 184112 - DNA, 78 bp, Homo sapiens
aagcatgaattttggcattattcagacctggattcgaattcttgctctgtcacttccacctgtaagatgagaacaaaa

SEQ ID NO: 184113 - DNA, 78 bp, Homo sapiens
ttttggcattattcagacctggattcgaattcttgctctgtcacttccacctgtaagatgagaacaaaagctatctta

SEQ ID NO: 184114 - DNA, 78 bp, Homo sapiens
ttcagacctggattcgaattcttgctctgtcacttccacctgtaagatgagaacaaaagctatcttacctattgtata

SEQ ID NO: 184115 - DNA, 76 bp, Homo sapiens
attcgaattcttgctctgtcacttccacctgtaagatgagaacaaaagctatcttacctattgtatagattaagta

SEQ ID NO: 184116 - DNA, 76 bp, Homo sapiens
gctctgtcacttccacctgtaagatgagaacaaaagctatcttacctattgtatagattaagtaagaagatataaa

SEQ ID NO: 184117 - DNA, 74 bp, Homo sapiens
gtcacttccacctgtaagatgagaacaaaagctatcttacctattgtatagattaagtaagaagatataaaata

SEQ ID NO: 184118 - DNA, 72 bp, Homo sapiens
aagatgagaacaaaagctatcttacctattgtatagattaagtaagaagatataaaataaaagagtcccaca

SEQ ID NO: 184119 - DNA, 71 bp, Homo sapiens
caaaagctatcttacctattgtatagattaagtaagaagatataaaataaaagagtcccacacaggtctac

SEQ ID NO: 184120 - DNA, 71 bp, Homo sapiens
attgtatagattaagtaagaagatataaaataaaagagtcccacacaggtctaccatggagggagtagagt

SEQ ID NO: 184121 - DNA, 70 bp, Homo sapiens
attaagtaagaagatataaaataaaagagtcccacacaggtctaccatggagggagtagagttcaataag

SEQ ID NO: 184122 - DNA, 70 bp, Homo sapiens
tataaaataaaagagtcccacacaggtctaccatggagggagtagagttcaataaggtttctttcattcc

SEQ ID NO: 184123 - DNA, 70 bp, Homo sapiens
aataaaagagtcccacacaggtctaccatggagggagtagagttcaataaggtttctttcattcccagta

SEQ ID NO: 184124 - DNA, 70 bp, Homo sapiens
cacaggtctaccatggagggagtagagttcaataaggtttctttcattcccagtaaaccagtttgataaa

SEQ ID NO: 184125 - DNA, 69 bp, Homo sapiens
gtctaccatggagggagtagagttcaataaggtttctttcattcccagtaaaccagtttgataaattaa

SEQ ID NO: 184126 - DNA, 69 bp, Homo sapiens
gagggagtagagttcaataaggtttctttcattcccagtaaaccagtttgataaattaactgcaggaat

SEQ ID NO: 184127 - DNA, 70 bp, Homo sapiens
gttcaataaggtttctttcattcccagtaaaccagtttgataaattaactgcaggaatttatttatgaga

SEQ ID NO: 184128 - DNA, 75 bp, Homo sapiens
tctttcattcccagtaaaccagtttgataaattaactgcaggaatttatttatgagattcttcttcattctcaga

SEQ ID NO: 184129 - DNA, 74 bp, Homo sapiens
attcccagtaaaccagtttgataaattaactgcaggaatttatttatgagattcttcttcattctcagagagga

SEQ ID NO: 184130 - DNA, 75 bp, Homo sapiens
ccagtttgataaattaactgcaggaatttatttatgagattcttcttcattctcagagaggataacacaaactat

SEQ ID NO: 184131 - DNA, 77 bp, Homo sapiens
ttaactgcaggaatttatttatgagattcttcttcattctcagagaggataacacaaactatttacacaatttgtca

SEQ ID NO: 184132 - DNA, 78 bp, Homo sapiens
gcaggaatttatttatgagattcttcttcattctcagagaggataacacaaactatttacacaatttgtcatcaattg

SEQ ID NO: 184133 - DNA, 76 bp, Homo sapiens
atttatgagattcttcttcattctcagagaggataacacaaactatttacacaatttgtcatcaattgtttgtgtt

SEQ ID NO: 184134 - DNA, 73 bp, Homo sapiens
ttcttcattctcagagaggataacacaaactatttacacaatttgtcatcaattgtttgtgtttttttccaag

SEQ ID NO: 184135 - DNA, 71 bp, Homo sapiens
ctcagagaggataacacaaactatttacacaatttgtcatcaattgtttgtgtttttttccaagttgtttc

SEQ ID NO: 184136 - DNA, 69 bp, Homo sapiens
ggataacacaaactatttacacaatttgtcatcaattgtttgtgtttttttccaagttgtttcctctta

SEQ ID NO: 184137 - DNA, 71 bp, Homo sapiens
atttacacaatttgtcatcaattgtttgtgtttttttccaagttgtttcctcttatcaagaatgccttctg

SEQ ID NO: 184138 - DNA, 70 bp, Homo sapiens
acaatttgtcatcaattgtttgtgtttttttccaagttgtttcctcttatcaagaatgccttctggccgg

SEQ ID NO: 184139 - DNA, 80 bp, Homo sapiens
tcatctctactaattcatgcctctttccttcaaagaccagctcaaattctaactttgtactatctggaccacctcatgca

SEQ ID NO: 184140 - DNA, 78 bp, Homo sapiens
ctactaattcatgcctctttccttcaaagaccagctcaaattctaactttgtactatctggaccacctcatgcagtga

SEQ ID NO: 184141 - DNA, 76 bp, Homo sapiens
tctttccttcaaagaccagctcaaattctaactttgtactatctggaccacctcatgcagtgaccgtacataggaa

SEQ ID NO: 184142 - DNA, 74 bp, Homo sapiens
aaagaccagctcaaattctaactttgtactatctggaccacctcatgcagtgaccgtacataggaagtacctac

SEQ ID NO: 184143 - DNA, 76 bp, Homo sapiens
ctcaaattctaactttgtactatctggaccacctcatgcagtgaccgtacataggaagtacctaccacatacatat

SEQ ID NO: 184144 - DNA, 75 bp, Homo sapiens
ttctaactttgtactatctggaccacctcatgcagtgaccgtacataggaagtacctaccacatacatattttta

SEQ ID NO: 184145 - DNA, 76 bp, Homo sapiens
tatctggaccacctcatgcagtgaccgtacataggaagtacctaccacatacatatttttaagcgttactgaacat

SEQ ID NO: 184146 - DNA, 75 bp, Homo sapiens
cctcatgcagtgaccgtacataggaagtacctaccacatacatatttttaagcgttactgaacattattagagta

SEQ ID NO: 184147 - DNA, 75 bp, Homo sapiens
tgcagtgaccgtacataggaagtacctaccacatacatatttttaagcgttactgaacattattagagtaatgaa

SEQ ID NO: 184148 - DNA, 72 bp, Homo sapiens
gtacataggaagtacctaccacatacatatttttaagcgttactgaacattattagagtaatgaaagaatat

SEQ ID NO: 184149 - DNA, 72 bp, Homo sapiens
acatatttttaagcgttactgaacattattagagtaatgaaagaatattacaaaccattaaacacatctaga

SEQ ID NO: 184150 - DNA, 72 bp, Homo sapiens
ttaagcgttactgaacattattagagtaatgaaagaatattacaaaccattaaacacatctagaagaaaatg

SEQ ID NO: 184151 - DNA, 71 bp, Homo sapiens
tactgaacattattagagtaatgaaagaatattacaaaccattaaacacatctagaagaaaatgtttttaa

SEQ ID NO: 184152 - DNA, 69 bp, Homo sapiens
gagtaatgaaagaatattacaaaccattaaacacatctagaagaaaatgtttttaataacttaaagtga

SEQ ID NO: 184153 - DNA, 71 bp, Homo sapiens
tgaaagaatattacaaaccattaaacacatctagaagaaaatgtttttaataacttaaagtgacatgatag

SEQ ID NO: 184154 - DNA, 71 bp, Homo sapiens
caaaccattaaacacatctagaagaaaatgtttttaataacttaaagtgacatgatagtttatcatactta

SEQ ID NO: 184155 - DNA, 69 bp, Homo sapiens
attaaacacatctagaagaaaatgtttttaataacttaaagtgacatgatagtttatcatacttaaaaa

SEQ ID NO: 184156 - DNA, 70 bp, Homo sapiens
gaagaaaatgtttttaataacttaaagtgacatgatagtttatcatacttaaaaaaataggagtgtcaca

SEQ ID NO: 184157 - DNA, 71 bp, Homo sapiens
gtttttaataacttaaagtgacatgatagtttatcatacttaaaaaaataggagtgtcacataataaagca

SEQ ID NO: 184158 - DNA, 74 bp, Homo sapiens
ataacttaaagtgacatgatagtttatcatacttaaaaaaataggagtgtcacataataaagcaaaggtcagca

SEQ ID NO: 184159 - DNA, 73 bp, Homo sapiens
acttaaagtgacatgatagtttatcatacttaaaaaaataggagtgtcacataataaagcaaaggtcagcaat

SEQ ID NO: 184160 - DNA, 74 bp, Homo sapiens
aagtgacatgatagtttatcatacttaaaaaaataggagtgtcacataataaagcaaaggtcagcaatttattg

SEQ ID NO: 184161 - DNA, 74 bp, Homo sapiens
gtgacatgatagtttatcatacttaaaaaaataggagtgtcacataataaagcaaaggtcagcaatttattgtt

SEQ ID NO: 184162 - DNA, 69 bp, Homo sapiens
atcatacttaaaaaaataggagtgtcacataataaagcaaaggtcagcaatttattgtttaaaaaccag

SEQ ID NO: 184163 - DNA, 67 bp, Homo sapiens
acttaaaaaaataggagtgtcacataataaagcaaaggtcagcaatttattgtttaaaaaccagtac

SEQ ID NO: 184164 - DNA, 68 bp, Homo sapiens
aaaaaataggagtgtcacataataaagcaaaggtcagcaatttattgtttaaaaaccagtaccgtgat

SEQ ID NO: 184165 - DNA, 72 bp, Homo sapiens
ataggagtgtcacataataaagcaaaggtcagcaatttattgtttaaaaaccagtaccgtgattctaagcac

SEQ ID NO: 184166 - DNA, 74 bp, Homo sapiens
taggagtgtcacataataaagcaaaggtcagcaatttattgtttaaaaaccagtaccgtgattctaagcactga

SEQ ID NO: 184167 - DNA, 74 bp, Homo sapiens
tcacataataaagcaaaggtcagcaatttattgtttaaaaaccagtaccgtgattctaagcactgaggtctcaa

SEQ ID NO: 184168 - DNA, 70 bp, Homo sapiens
aataaagcaaaggtcagcaatttattgtttaaaaaccagtaccgtgattctaagcactgaggtctcaaac

SEQ ID NO: 184169 - DNA, 71 bp, Homo sapiens
agcaatttattgtttaaaaaccagtaccgtgattctaagcactgaggtctcaaaccagggccactctagta

SEQ ID NO: 184170 - DNA, 69 bp, Homo sapiens
ttgtttaaaaaccagtaccgtgattctaagcactgaggtctcaaaccagggccactctagtaatttctt

SEQ ID NO: 184171 - DNA, 69 bp, Homo sapiens
aaaaaccagtaccgtgattctaagcactgaggtctcaaaccagggccactctagtaatttctttctttc

SEQ ID NO: 184172 - DNA, 70 bp, Homo sapiens
ctttctttctctatttatttaaagtaatacctgagggacccatatatgtattttccttctatgaccgtga

SEQ ID NO: 184173 - DNA, 74 bp, Homo sapiens
cccatatatgtattttccttctatgaccgtgaaaggcaagaaaattaccttttctgtgtcacagattctgaata

SEQ ID NO: 184174 - DNA, 71 bp, Homo sapiens
attttccttctatgaccgtgaaaggcaagaaaattaccttttctgtgtcacagattctgaatatttcttcc

SEQ ID NO: 184175 - DNA, 72 bp, Homo sapiens
ttttccttctatgaccgtgaaaggcaagaaaattaccttttctgtgtcacagattctgaatatttcttccta

SEQ ID NO: 184176 - DNA, 73 bp, Homo sapiens
atgaccgtgaaaggcaagaaaattaccttttctgtgtcacagattctgaatatttcttcctatccctgtactc

SEQ ID NO: 184177 - DNA, 71 bp, Homo sapiens
aagaaaattaccttttctgtgtcacagattctgaatatttcttcctatccctgtactcccacatccctaac

SEQ ID NO: 184178 - DNA, 73 bp, Homo sapiens
aattaccttttctgtgtcacagattctgaatatttcttcctatccctgtactcccacatccctaacctctata

SEQ ID NO: 184179 - DNA, 75 bp, Homo sapiens
ttttctgtgtcacagattctgaatatttcttcctatccctgtactcccacatccctaacctctatattttcagaa

SEQ ID NO: 184180 - DNA, 76 bp, Homo sapiens
tgtgtcacagattctgaatatttcttcctatccctgtactcccacatccctaacctctatattttcagaattcaaa

SEQ ID NO: 184181 - DNA, 74 bp, Homo sapiens
cagattctgaatatttcttcctatccctgtactcccacatccctaacctctatattttcagaattcaaagataa

SEQ ID NO: 184182 - DNA, 71 bp, Homo sapiens
ctgaatatttcttcctatccctgtactcccacatccctaacctctatattttcagaattcaaagataaaag

SEQ ID NO: 184183 - DNA, 70 bp, Homo sapiens
atttcttcctatccctgtactcccacatccctaacctctatattttcagaattcaaagataaaagtgttg

SEQ ID NO: 184184 - DNA, 71 bp, Homo sapiens
atccctgtactcccacatccctaacctctatattttcagaattcaaagataaaagtgttgtcttcaaacat

SEQ ID NO: 184185 - DNA, 70 bp, Homo sapiens
ctcccacatccctaacctctatattttcagaattcaaagataaaagtgttgtcttcaaacattttagtaa

SEQ ID NO: 184186 - DNA, 71 bp, Homo sapiens
cctaacctctatattttcagaattcaaagataaaagtgttgtcttcaaacattttagtaaatgcttctcca

SEQ ID NO: 184187 - DNA, 75 bp, Homo sapiens
tcaaagataaaagtgttgtcttcaaacattttagtaaatgcttctccatattatcctgcttaatagcaggatctt

SEQ ID NO: 184188 - DNA, 76 bp, Homo sapiens
gtgttgtcttcaaacattttagtaaatgcttctccatattatcctgcttaatagcaggatctttgactttatctgg

SEQ ID NO: 184189 - DNA, 77 bp, Homo sapiens
caaacattttagtaaatgcttctccatattatcctgcttaatagcaggatctttgactttatctgggaatatatcac

SEQ ID NO: 184190 - DNA, 81 bp, Homo sapiens
ttttagtaaatgcttctccatattatcctgcttaatagcaggatctttgactttatctgggaatatatcactgcacaatca

SEQ ID NO: 184191 - DNA, 82 bp, Homo sapiens
atgcttctccatattatcctgcttaatagcaggatctttgactttatctgggaatatatcactgcacaatcacctttggtga

SEQ ID NO: 184192 - DNA, 78 bp, Homo sapiens
cttaatagcaggatctttgactttatctgggaatatatcactgcacaatcacctttggtgacctaaggaagctgctta

SEQ ID NO: 184193 - DNA, 75 bp, Homo sapiens
tctttgactttatctgggaatatatcactgcacaatcacctttggtgacctaaggaagctgcttaggggtgattt

SEQ ID NO: 184194 - DNA, 75 bp, Homo sapiens
ttatctgggaatatatcactgcacaatcacctttggtgacctaaggaagctgcttaggggtgatttttccttgtg

SEQ ID NO: 184195 - DNA, 74 bp, Homo sapiens
aatatatcactgcacaatcacctttggtgacctaaggaagctgcttaggggtgatttttccttgtggaccttga

SEQ ID NO: 184196 - DNA, 72 bp, Homo sapiens
tttggtgacctaaggaagctgcttaggggtgatttttccttgtggaccttgacactgcttgcaaagtttaca

SEQ ID NO: 184197 - DNA, 73 bp, Homo sapiens
taaggaagctgcttaggggtgatttttccttgtggaccttgacactgcttgcaaagtttacagtcataaattg

SEQ ID NO: 184198 - DNA, 70 bp, Homo sapiens
cttaggggtgatttttccttgtggaccttgacactgcttgcaaagtttacagtcataaattgtaaccctc

SEQ ID NO: 184199 - DNA, 73 bp, Homo sapiens
cttgtggaccttgacactgcttgcaaagtttacagtcataaattgtaaccctctgagaacaatttctcaaact

SEQ ID NO: 184200 - DNA, 71 bp, Homo sapiens
gcttgcaaagtttacagtcataaattgtaaccctctgagaacaatttctcaaacttggttaaataattaca

SEQ ID NO: 184201 - DNA, 69 bp, Homo sapiens
cctctgagaacaatttctcaaacttggttaaataattacatagacaccaaaagaaaacaaccctctgtc

SEQ ID NO: 184202 - DNA, 71 bp, Homo sapiens
ttctcaaacttggttaaataattacatagacaccaaaagaaaacaaccctctgtctactcctaccattgca

SEQ ID NO: 184203 - DNA, 71 bp, Homo sapiens
cttggttaaataattacatagacaccaaaagaaaacaaccctctgtctactcctaccattgcattatcttg

SEQ ID NO: 184204 - DNA, 74 bp, Homo sapiens
taattacatagacaccaaaagaaaacaaccctctgtctactcctaccattgcattatcttgtctcctaattcaa

SEQ ID NO: 184205 - DNA, 73 bp, Homo sapiens
aaaacaaccctctgtctactcctaccattgcattatcttgtctcctaattcaaagaaagcacagcctacattt

SEQ ID NO: 184206 - DNA, 78 bp, Homo sapiens
tctgtctactcctaccattgcattatcttgtctcctaattcaaagaaagcacagcctacattttgaataacttagaga

SEQ ID NO: 184207 - DNA, 76 bp, Homo sapiens
tcctaccattgcattatcttgtctcctaattcaaagaaagcacagcctacattttgaataacttagagaggttata

SEQ ID NO: 184208 - DNA, 75 bp, Homo sapiens
gcattatcttgtctcctaattcaaagaaagcacagcctacattttgaataacttagagaggttataacatgaatt

SEQ ID NO: 184209 - DNA, 73 bp, Homo sapiens
cttgtctcctaattcaaagaaagcacagcctacattttgaataacttagagaggttataacatgaatttacaa

SEQ ID NO: 184210 - DNA, 72 bp, Homo sapiens
caaagaaagcacagcctacattttgaataacttagagaggttataacatgaatttacaaaatgtaactagga

SEQ ID NO: 184211 - DNA, 73 bp, Homo sapiens
agcacagcctacattttgaataacttagagaggttataacatgaatttacaaaatgtaactaggaaattcaga

SEQ ID NO: 184212 - DNA, 71 bp, Homo sapiens
tttgaataacttagagaggttataacatgaatttacaaaatgtaactaggaaattcagaaaggagtctcca

SEQ ID NO: 184213 - DNA, 70 bp, Homo sapiens
cttagagaggttataacatgaatttacaaaatgtaactaggaaattcagaaaggagtctccaaactggag

SEQ ID NO: 184214 - DNA, 70 bp, Homo sapiens
ggttataacatgaatttacaaaatgtaactaggaaattcagaaaggagtctccaaactggaggacaccat

SEQ ID NO: 184215 - DNA, 68 bp, Homo sapiens
atttacaaaatgtaactaggaaattcagaaaggagtctccaaactggaggacaccatttgttatttgg

SEQ ID NO: 184216 - DNA, 70 bp, Homo sapiens
aaaatgtaactaggaaattcagaaaggagtctccaaactggaggacaccatttgttatttggtggcatct

SEQ ID NO: 184217 - DNA, 75 bp, Homo sapiens
aaaggagtctccaaactggaggacaccatttgttatttggtggcatcttctgggaaaggttgatattgcagctca

SEQ ID NO: 184218 - DNA, 80 bp, Homo sapiens
acaccatttgttatttggtggcatcttctgggaaaggttgatattgcagctcagctctgtgaaacataaattctcttgca

SEQ ID NO: 184219 - DNA, 78 bp, Homo sapiens
tgggaaaggttgatattgcagctcagctctgtgaaacataaattctcttgcaaaagcacatgggaaaaactctggaaa

SEQ ID NO: 184220 - DNA, 78 bp, Homo sapiens
tcagctctgtgaaacataaattctcttgcaaaagcacatgggaaaaactctggaaacagaaaaataatcctgatgata

SEQ ID NO: 184221 - DNA, 75 bp, Homo sapiens
ctgtgaaacataaattctcttgcaaaagcacatgggaaaaactctggaaacagaaaaataatcctgatgatatag

SEQ ID NO: 184222 - DNA, 76 bp, Homo sapiens
attctcttgcaaaagcacatgggaaaaactctggaaacagaaaaataatcctgatgatatagtataataaggtgca

SEQ ID NO: 184223 - DNA, 76 bp, Homo sapiens
gcaaaagcacatgggaaaaactctggaaacagaaaaataatcctgatgatatagtataataaggtgcaatctagac

SEQ ID NO: 184224 - DNA, 75 bp, Homo sapiens
ggaaaaactctggaaacagaaaaataatcctgatgatatagtataataaggtgcaatctagacccaagagagtca

SEQ ID NO: 184225 - DNA, 75 bp, Homo sapiens
ctctggaaacagaaaaataatcctgatgatatagtataataaggtgcaatctagacccaagagagtcagttttat

SEQ ID NO: 184226 - DNA, 73 bp, Homo sapiens
acagaaaaataatcctgatgatatagtataataaggtgcaatctagacccaagagagtcagttttattttaag

SEQ ID NO: 184227 - DNA, 76 bp, Homo sapiens
cctgatgatatagtataataaggtgcaatctagacccaagagagtcagttttattttaagtgaggatgtgtaagaa

SEQ ID NO: 184228 - DNA, 75 bp, Homo sapiens
tatagtataataaggtgcaatctagacccaagagagtcagttttattttaagtgaggatgtgtaagaagctagag

SEQ ID NO: 184229 - DNA, 76 bp, Homo sapiens
atctagacccaagagagtcagttttattttaagtgaggatgtgtaagaagctagaggctcctggatgtttcacagc

SEQ ID NO: 184230 - DNA, 76 bp, Homo sapiens
agagtcagttttattttaagtgaggatgtgtaagaagctagaggctcctggatgtttcacagctcttccctcaatc

SEQ ID NO: 184231 - DNA, 83 bp, Homo sapiens
aggatgtgtaagaagctagaggctcctggatgtttcacagctcttccctcaatcctggctctgcatgccaaatccacctatga

SEQ ID NO: 184232 - DNA, 83 bp, Homo sapiens
tgtaagaagctagaggctcctggatgtttcacagctcttccctcaatcctggctctgcatgccaaatccacctatgaggacaa

SEQ ID NO: 184233 - DNA, 81 bp, Homo sapiens
ctggatgtttcacagctcttccctcaatcctggctctgcatgccaaatccacctatgaggacaacctgtcacctcctgaag

SEQ ID NO: 184234 - DNA, 77 bp, Homo sapiens
tctgcatgccaaatccacctatgaggacaacctgtcacctcctgaaggccactggtaaagcccaaaccaataggtca

SEQ ID NO: 184235 - DNA, 73 bp, Homo sapiens
tatgaggacaacctgtcacctcctgaaggccactggtaaagcccaaaccaataggtcaaagaaacaggattca

SEQ ID NO: 184236 - DNA, 71 bp, Homo sapiens
acaacctgtcacctcctgaaggccactggtaaagcccaaaccaataggtcaaagaaacaggattcatatgg

SEQ ID NO: 184237 - DNA, 73 bp, Homo sapiens
ctgaaggccactggtaaagcccaaaccaataggtcaaagaaacaggattcatatgggggacaacatgagatat

SEQ ID NO: 184238 - DNA, 72 bp, Homo sapiens
actggtaaagcccaaaccaataggtcaaagaaacaggattcatatgggggacaacatgagatattcaaggct

SEQ ID NO: 184239 - DNA, 72 bp, Homo sapiens
aaagcccaaaccaataggtcaaagaaacaggattcatatgggggacaacatgagatattcaaggctttccca

SEQ ID NO: 184240 - DNA, 78 bp, Homo sapiens
aataggtcaaagaaacaggattcatatgggggacaacatgagatattcaaggctttcccagcagcactgccaacttca

SEQ ID NO: 184241 - DNA, 80 bp, Homo sapiens
aaagaaacaggattcatatgggggacaacatgagatattcaaggctttcccagcagcactgccaacttcatgtagcacac

SEQ ID NO: 184242 - DNA, 81 bp, Homo sapiens
ttcatatgggggacaacatgagatattcaaggctttcccagcagcactgccaacttcatgtagcacacctctacaatttta

SEQ ID NO: 184243 - DNA, 81 bp, Homo sapiens
acaacatgagatattcaaggctttcccagcagcactgccaacttcatgtagcacacctctacaattttagtatgaatccaa

SEQ ID NO: 184244 - DNA, 77 bp, Homo sapiens
tttcccagcagcactgccaacttcatgtagcacacctctacaattttagtatgaatccaaggaagaataagatttgt

SEQ ID NO: 184245 - DNA, 71 bp, Homo sapiens
acttcatgtagcacacctctacaattttagtatgaatccaaggaagaataagatttgttttaccaccaacc

SEQ ID NO: 184246 - DNA, 70 bp, Homo sapiens
agcacacctctacaattttagtatgaatccaaggaagaataagatttgttttaccaccaacctcctctta

SEQ ID NO: 184247 - DNA, 68 bp, Homo sapiens
caattttagtatgaatccaaggaagaataagatttgttttaccaccaacctcctcttaggtaggtaca

SEQ ID NO: 184248 - DNA, 70 bp, Homo sapiens
tatgaatccaaggaagaataagatttgttttaccaccaacctcctcttaggtaggtacactacctatcaa

SEQ ID NO: 184249 - DNA, 66 bp, Homo sapiens
aggaagaataagatttgttttaccaccaacctcctcttaggtaggtacactacctatcaagtgggt

SEQ ID NO: 184250 - DNA, 67 bp, Homo sapiens
aataagatttgttttaccaccaacctcctcttaggtaggtacactacctatcaagtgggttcaaatc

SEQ ID NO: 184251 - DNA, 73 bp, Homo sapiens
aacctcctcttaggtaggtacactacctatcaagtgggttcaaatcctagctccatcacttctaaagatggca

SEQ ID NO: 184252 - DNA, 72 bp, Homo sapiens
ttaggtaggtacactacctatcaagtgggttcaaatcctagctccatcacttctaaagatggcaaccttggg

SEQ ID NO: 184253 - DNA, 75 bp, Homo sapiens
tacctatcaagtgggttcaaatcctagctccatcacttctaaagatggcaaccttggggaagattcttcatcttg

SEQ ID NO: 184254 - DNA, 75 bp, Homo sapiens
aagtgggttcaaatcctagctccatcacttctaaagatggcaaccttggggaagattcttcatcttggagcctca

SEQ ID NO: 184255 - DNA, 76 bp, Homo sapiens
aaatcctagctccatcacttctaaagatggcaaccttggggaagattcttcatcttggagcctcagctttttcatc

SEQ ID NO: 184256 - DNA, 76 bp, Homo sapiens
ctccatcacttctaaagatggcaaccttggggaagattcttcatcttggagcctcagctttttcatccataaaatg

SEQ ID NO: 184257 - DNA, 76 bp, Homo sapiens
ttctaaagatggcaaccttggggaagattcttcatcttggagcctcagctttttcatccataaaatggcaataata

SEQ ID NO: 184258 - DNA, 75 bp, Homo sapiens
aataataatacctatttcacagagctgtctcgaggggtgaatgagttaaatcatgttaagtacatagaagggtga

SEQ ID NO: 184259 - DNA, 76 bp, Homo sapiens
taatacctatttcacagagctgtctcgaggggtgaatgagttaaatcatgttaagtacatagaagggtgactaaca

SEQ ID NO: 184260 - DNA, 75 bp, Homo sapiens
agagctgtctcgaggggtgaatgagttaaatcatgttaagtacatagaagggtgactaacagactaaacactcaa

SEQ ID NO: 184261 - DNA, 73 bp, Homo sapiens
tctcgaggggtgaatgagttaaatcatgttaagtacatagaagggtgactaacagactaaacactcaagttta

SEQ ID NO: 184262 - DNA, 76 bp, Homo sapiens
ttaaatcatgttaagtacatagaagggtgactaacagactaaacactcaagtttagctatggctataaggcatctc

SEQ ID NO: 184263 - DNA, 77 bp, Homo sapiens
taagtacatagaagggtgactaacagactaaacactcaagtttagctatggctataaggcatctctgtggtatggta

SEQ ID NO: 184264 - DNA, 76 bp, Homo sapiens
aagggtgactaacagactaaacactcaagtttagctatggctataaggcatctctgtggtatggtaatgctagtct

SEQ ID NO: 184265 - DNA, 80 bp, Homo sapiens
agactaaacactcaagtttagctatggctataaggcatctctgtggtatggtaatgctagtcttgcaaagcccatgttga

SEQ ID NO: 184266 - DNA, 79 bp, Homo sapiens
aaacactcaagtttagctatggctataaggcatctctgtggtatggtaatgctagtcttgcaaagcccatgttgagtcc

SEQ ID NO: 184267 - DNA, 81 bp, Homo sapiens
ttagctatggctataaggcatctctgtggtatggtaatgctagtcttgcaaagcccatgttgagtcccattgttggcttta

SEQ ID NO: 184268 - DNA, 80 bp, Homo sapiens
tataaggcatctctgtggtatggtaatgctagtcttgcaaagcccatgttgagtcccattgttggctttatgtctaaaga

SEQ ID NO: 184269 - DNA, 79 bp, Homo sapiens
atctctgtggtatggtaatgctagtcttgcaaagcccatgttgagtcccattgttggctttatgtctaaagatgacaaa

SEQ ID NO: 184270 - DNA, 78 bp, Homo sapiens
tatggtaatgctagtcttgcaaagcccatgttgagtcccattgttggctttatgtctaaagatgacaaatgggataat

SEQ ID NO: 184271 - DNA, 77 bp, Homo sapiens
ctagtcttgcaaagcccatgttgagtcccattgttggctttatgtctaaagatgacaaatgggataattccatcaaa

SEQ ID NO: 184272 - DNA, 78 bp, Homo sapiens
cccatgttgagtcccattgttggctttatgtctaaagatgacaaatgggataattccatcaaatgcataggtcataaa

SEQ ID NO: 184273 - DNA, 79 bp, Homo sapiens
gttggctttatgtctaaagatgacaaatgggataattccatcaaatgcataggtcataaagcaagaaacaataatgcat

SEQ ID NO: 184274 - DNA, 82 bp, Homo sapiens
tgtctaaagatgacaaatgggataattccatcaaatgcataggtcataaagcaagaaacaataatgcattgaataggtgatg

SEQ ID NO: 184275 - DNA, 80 bp, Homo sapiens
ataattccatcaaatgcataggtcataaagcaagaaacaataatgcattgaataggtgatgtagctctcttaaagaaggc

SEQ ID NO: 184276 - DNA, 78 bp, Homo sapiens
ataggtcataaagcaagaaacaataatgcattgaataggtgatgtagctctcttaaagaaggctcacagaatttattg

SEQ ID NO: 184277 - DNA, 81 bp, Homo sapiens
aataatgcattgaataggtgatgtagctctcttaaagaaggctcacagaatttattggaagagagattctggctcaataca

SEQ ID NO: 184278 - DNA, 81 bp, Homo sapiens
attgaataggtgatgtagctctcttaaagaaggctcacagaatttattggaagagagattctggctcaatacatgtcagtg

SEQ ID NO: 184279 - DNA, 79 bp, Homo sapiens
ttaaagaaggctcacagaatttattggaagagagattctggctcaatacatgtcagtggaaatgctgagttttgccaat

SEQ ID NO: 184280 - DNA, 83 bp, Homo sapiens
tcacagaatttattggaagagagattctggctcaatacatgtcagtggaaatgctgagttttgccaattgttgatgacaacca

SEQ ID NO: 184281 - DNA, 80 bp, Homo sapiens
atttattggaagagagattctggctcaatacatgtcagtggaaatgctgagttttgccaattgttgatgacaaccagctt

SEQ ID NO: 184282 - DNA, 83 bp, Homo sapiens
tcaatacatgtcagtggaaatgctgagttttgccaattgttgatgacaaccagctttgcaaagatagagcccctgtgtattca

SEQ ID NO: 184283 - DNA, 81 bp, Homo sapiens
acatgtcagtggaaatgctgagttttgccaattgttgatgacaaccagctttgcaaagatagagcccctgtgtattcacaa

SEQ ID NO: 184284 - DNA, 79 bp, Homo sapiens
aaatgctgagttttgccaattgttgatgacaaccagctttgcaaagatagagcccctgtgtattcacaaccttctgcta

SEQ ID NO: 184285 - DNA, 76 bp, Homo sapiens
attgttgatgacaaccagctttgcaaagatagagcccctgtgtattcacaaccttctgctacccaagggcttctaa

SEQ ID NO: 184286 - DNA, 69 bp, Homo sapiens
aaagatagagcccctgtgtattcacaaccttctgctacccaagggcttctaaggaattccttaatttaa

SEQ ID NO: 184287 - DNA, 70 bp, Homo sapiens
ccctgtgtattcacaaccttctgctacccaagggcttctaaggaattccttaatttaagaactgagatac

SEQ ID NO: 184288 - DNA, 72 bp, Homo sapiens
tgtattcacaaccttctgctacccaagggcttctaaggaattccttaatttaagaactgagataccacactg

SEQ ID NO: 184289 - DNA, 72 bp, Homo sapiens
ttctgctacccaagggcttctaaggaattccttaatttaagaactgagataccacactggccctagtatgta

SEQ ID NO: 184290 - DNA, 70 bp, Homo sapiens
taaggaattccttaatttaagaactgagataccacactggccctagtatgtactgaaacacggaaacaaa

SEQ ID NO: 184291 - DNA, 70 bp, Homo sapiens
ttaatttaagaactgagataccacactggccctagtatgtactgaaacacggaaacaaaaaggcctccaa

SEQ ID NO: 184292 - DNA, 68 bp, Homo sapiens
aactgagataccacactggccctagtatgtactgaaacacggaaacaaaaaggcctccaactgttttt

SEQ ID NO: 184293 - DNA, 65 bp, Homo sapiens
ataccacactggccctagtatgtactgaaacacggaaacaaaaaggcctccaactgttttttttt

SEQ ID NO: 184294 - DNA, 67 bp, Homo sapiens
ttttttttaatctcctttttaactgcttttttcaaataaaccaggaatatggatgaataaatgaaca

SEQ ID NO: 184295 - DNA, 70 bp, Homo sapiens
tttaatctcctttttaactgcttttttcaaataaaccaggaatatggatgaataaatgaacagctggttg

SEQ ID NO: 184296 - DNA, 72 bp, Homo sapiens
tctcctttttaactgcttttttcaaataaaccaggaatatggatgaataaatgaacagctggttggcaaggc

SEQ ID NO: 184297 - DNA, 73 bp, Homo sapiens
tttttaactgcttttttcaaataaaccaggaatatggatgaataaatgaacagctggttggcaaggctgcctc

SEQ ID NO: 184298 - DNA, 75 bp, Homo sapiens
aactgcttttttcaaataaaccaggaatatggatgaataaatgaacagctggttggcaaggctgcctcctcctca

SEQ ID NO: 184299 - DNA, 78 bp, Homo sapiens
aaataaaccaggaatatggatgaataaatgaacagctggttggcaaggctgcctcctcctcagtgtgatcacacccaa

SEQ ID NO: 184300 - DNA, 80 bp, Homo sapiens
ataaaccaggaatatggatgaataaatgaacagctggttggcaaggctgcctcctcctcagtgtgatcacacccaacaca

SEQ ID NO: 184301 - DNA, 79 bp, Homo sapiens
aggaatatggatgaataaatgaacagctggttggcaaggctgcctcctcctcagtgtgatcacacccaacacagaaaaa

SEQ ID NO: 184302 - DNA, 78 bp, Homo sapiens
aatatggatgaataaatgaacagctggttggcaaggctgcctcctcctcagtgtgatcacacccaacacagaaaaaaa

SEQ ID NO: 184303 - DNA, 76 bp, Homo sapiens
ggatgaataaatgaacagctggttggcaaggctgcctcctcctcagtgtgatcacacccaacacagaaaaaaaaaa

SEQ ID NO: 184304 - DNA, 75 bp, Homo sapiens
cagctggttggcaaggctgcctcctcctcagtgtgatcacacccaacacagaaaaaaaaaatgcgttagaaaata

SEQ ID NO: 184305 - DNA, 73 bp, Homo sapiens
agtgtgatcacacccaacacagaaaaaaaaaatgcgttagaaaatagggacaggtgaaacatctccatgcacc

SEQ ID NO: 184306 - DNA, 67 bp, Homo sapiens
gaaaaaaaaaatgcgttagaaaatagggacaggtgaaacatctccatgcacccaacaaagttaactt

SEQ ID NO: 184307 - DNA, 70 bp, Homo sapiens
aaatgcgttagaaaatagggacaggtgaaacatctccatgcacccaacaaagttaacttttgtctggtaa

SEQ ID NO: 184308 - DNA, 70 bp, Homo sapiens
gaaaatagggacaggtgaaacatctccatgcacccaacaaagttaacttttgtctggtaatttcaattaa

SEQ ID NO: 184309 - DNA, 73 bp, Homo sapiens
acaggtgaaacatctccatgcacccaacaaagttaacttttgtctggtaatttcaattaatgttccacattga

SEQ ID NO: 184310 - DNA, 74 bp, Homo sapiens
catctccatgcacccaacaaagttaacttttgtctggtaatttcaattaatgttccacattgagcagaatttac

SEQ ID NO: 184311 - DNA, 71 bp, Homo sapiens
cacccaacaaagttaacttttgtctggtaatttcaattaatgttccacattgagcagaatttaccagagga

SEQ ID NO: 184312 - DNA, 71 bp, Homo sapiens
ttaacttttgtctggtaatttcaattaatgttccacattgagcagaatttaccagaggaagaactgtaacc

SEQ ID NO: 184313 - DNA, 72 bp, Homo sapiens
tctggtaatttcaattaatgttccacattgagcagaatttaccagaggaagaactgtaaccgttcaggtatt

SEQ ID NO: 184314 - DNA, 70 bp, Homo sapiens
tttcaattaatgttccacattgagcagaatttaccagaggaagaactgtaaccgttcaggtatttttacc

SEQ ID NO: 184315 - DNA, 70 bp, Homo sapiens
ttccacattgagcagaatttaccagaggaagaactgtaaccgttcaggtatttttacctccagttataaa

SEQ ID NO: 184316 - DNA, 69 bp, Homo sapiens
attgagcagaatttaccagaggaagaactgtaaccgttcaggtatttttacctccagttataaaacaca

SEQ ID NO: 184317 - DNA, 66 bp, Homo sapiens
tttaccagaggaagaactgtaaccgttcaggtatttttacctccagttataaaacacagaaaacag

SEQ ID NO: 184318 - DNA, 68 bp, Homo sapiens
aagaactgtaaccgttcaggtatttttacctccagttataaaacacagaaaacaggagcctccgatga

SEQ ID NO: 184319 - DNA, 69 bp, Homo sapiens
gtaaccgttcaggtatttttacctccagttataaaacacagaaaacaggagcctccgatgagaacctgc

SEQ ID NO: 184320 - DNA, 69 bp, Homo sapiens
aggtatttttacctccagttataaaacacagaaaacaggagcctccgatgagaacctgccccctggaga

SEQ ID NO: 184321 - DNA, 72 bp, Homo sapiens
cagttataaaacacagaaaacaggagcctccgatgagaacctgccccctggagagccagggcagccctttaa

SEQ ID NO: 184322 - DNA, 73 bp, Homo sapiens
ataaaacacagaaaacaggagcctccgatgagaacctgccccctggagagccagggcagccctttaatgaatg

SEQ ID NO: 184323 - DNA, 76 bp, Homo sapiens
aaaacaggagcctccgatgagaacctgccccctggagagccagggcagccctttaatgaatggcctctccagctgc

SEQ ID NO: 184324 - DNA, 83 bp, Homo sapiens
ttaatgaatggcctctccagctgctccctcaccatacttacagactttacagctcttgcatgtgctggaattacaagtcatta

SEQ ID NO: 184325 - DNA, 76 bp, Homo sapiens
catacttacagactttacagctcttgcatgtgctggaattacaagtcattaaaaagccactttgaaaacacaataa

SEQ ID NO: 184326 - DNA, 77 bp, Homo sapiens
tacagctcttgcatgtgctggaattacaagtcattaaaaagccactttgaaaacacaataaagaccttcttctctga

SEQ ID NO: 184327 - DNA, 73 bp, Homo sapiens
tgctggaattacaagtcattaaaaagccactttgaaaacacaataaagaccttcttctctgactgcaacaacc

SEQ ID NO: 184328 - DNA, 71 bp, Homo sapiens
attacaagtcattaaaaagccactttgaaaacacaataaagaccttcttctctgactgcaacaaccttcca

SEQ ID NO: 184329 - DNA, 70 bp, Homo sapiens
aaaaagccactttgaaaacacaataaagaccttcttctctgactgcaacaaccttccatcacataaaaac

SEQ ID NO: 184330 - DNA, 71 bp, Homo sapiens
ctttgaaaacacaataaagaccttcttctctgactgcaacaaccttccatcacataaaaacctaaggccaa

SEQ ID NO: 184331 - DNA, 73 bp, Homo sapiens
aaacacaataaagaccttcttctctgactgcaacaaccttccatcacataaaaacctaaggccaatgcttcaa

SEQ ID NO: 184332 - DNA, 75 bp, Homo sapiens
cttcttctctgactgcaacaaccttccatcacataaaaacctaaggccaatgcttcaacagcaggacgtttacta

SEQ ID NO: 184333 - DNA, 77 bp, Homo sapiens
tgactgcaacaaccttccatcacataaaaacctaaggccaatgcttcaacagcaggacgtttactaccagctccaga

SEQ ID NO: 184334 - DNA, 73 bp, Homo sapiens
accttccatcacataaaaacctaaggccaatgcttcaacagcaggacgtttactaccagctccagacagttta

SEQ ID NO: 184335 - DNA, 73 bp, Homo sapiens
acataaaaacctaaggccaatgcttcaacagcaggacgtttactaccagctccagacagtttaagcagggcaa

SEQ ID NO: 184336 - DNA, 71 bp, Homo sapiens
aacagcaggacgtttactaccagctccagacagtttaagcagggcaatgaacagggtggggcgggaggaaa

SEQ ID NO: 184337 - DNA, 72 bp, Homo sapiens
tttactaccagctccagacagtttaagcagggcaatgaacagggtggggcgggaggaaatgagaaacaacaa

SEQ ID NO: 184338 - DNA, 70 bp, Homo sapiens
tccagacagtttaagcagggcaatgaacagggtggggcgggaggaaatgagaaacaacaaaagaagggaa

SEQ ID NO: 184339 - DNA, 63 bp, Homo sapiens
agggcaatgaacagggtggggcgggaggaaatgagaaacaacaaaagaagggaagtttttttt

SEQ ID NO: 184340 - DNA, 72 bp, Homo sapiens
tccttctttctttttgaaagaaatttctggtaaggtgatttaaagcatttatcctgcatcggaatcaccatc

SEQ ID NO: 184341 - DNA, 70 bp, Homo sapiens
aagaaatttctggtaaggtgatttaaagcatttatcctgcatcggaatcaccatccacccttgggaaaaa

SEQ ID NO: 184342 - DNA, 77 bp, Homo sapiens
taaggtgatttaaagcatttatcctgcatcggaatcaccatccacccttgggaaaaatgctgccaactgatgagatt

SEQ ID NO: 184343 - DNA, 75 bp, Homo sapiens
tttaaagcatttatcctgcatcggaatcaccatccacccttgggaaaaatgctgccaactgatgagattttgttt

SEQ ID NO: 184344 - DNA, 74 bp, Homo sapiens
atttatcctgcatcggaatcaccatccacccttgggaaaaatgctgccaactgatgagattttgtttttctcct

SEQ ID NO: 184345 - DNA, 71 bp, Homo sapiens
ggaatcaccatccacccttgggaaaaatgctgccaactgatgagattttgtttttctccttcaagaaggtt

SEQ ID NO: 184346 - DNA, 70 bp, Homo sapiens
atccacccttgggaaaaatgctgccaactgatgagattttgtttttctccttcaagaaggttttctccaa

SEQ ID NO: 184347 - DNA, 69 bp, Homo sapiens
ccttgggaaaaatgctgccaactgatgagattttgtttttctccttcaagaaggttttctccaagaaaa

SEQ ID NO: 184348 - DNA, 66 bp, Homo sapiens
atgagattttgtttttctccttcaagaaggttttctccaagaaaaccccttggtaagctccaacta

SEQ ID NO: 184349 - DNA, 71 bp, Homo sapiens
aaggttttctccaagaaaaccccttggtaagctccaactatcaaaagacatgactgaaatctctcttctca

SEQ ID NO: 184350 - DNA, 78 bp, Homo sapiens
aaaaccccttggtaagctccaactatcaaaagacatgactgaaatctctcttctcatgctgcaggctgaaggatgtaa

SEQ ID NO: 184351 - DNA, 82 bp, Homo sapiens
ttggtaagctccaactatcaaaagacatgactgaaatctctcttctcatgctgcaggctgaaggatgtaacattttgccaaa

SEQ ID NO: 184352 - DNA, 81 bp, Homo sapiens
aactatcaaaagacatgactgaaatctctcttctcatgctgcaggctgaaggatgtaacattttgccaaatgtaatttgtc

SEQ ID NO: 184353 - DNA, 79 bp, Homo sapiens
aaaagacatgactgaaatctctcttctcatgctgcaggctgaaggatgtaacattttgccaaatgtaatttgtccattt

SEQ ID NO: 184354 - DNA, 78 bp, Homo sapiens
actgaaatctctcttctcatgctgcaggctgaaggatgtaacattttgccaaatgtaatttgtccattttcagggaaa

SEQ ID NO: 184355 - DNA, 78 bp, Homo sapiens
tcttctcatgctgcaggctgaaggatgtaacattttgccaaatgtaatttgtccattttcagggaaagatcattaaaa

SEQ ID NO: 184356 - DNA, 74 bp, Homo sapiens
atgctgcaggctgaaggatgtaacattttgccaaatgtaatttgtccattttcagggaaagatcattaaaactt

SEQ ID NO: 184357 - DNA, 69 bp, Homo sapiens
ctgaaggatgtaacattttgccaaatgtaatttgtccattttcagggaaagatcattaaaactttttac

SEQ ID NO: 184358 - DNA, 67 bp, Homo sapiens
aacattttgccaaatgtaatttgtccattttcagggaaagatcattaaaactttttacttcttcact

SEQ ID NO: 184359 - DNA, 69 bp, Homo sapiens
tgtccattttcagggaaagatcattaaaactttttacttcttcactttaaaattatgattaaatcctca

SEQ ID NO: 184360 - DNA, 70 bp, Homo sapiens
cactttaaaattatgattaaatcctcaaagtaaggcaagaaagaggaaggcaatgataagaaaactacca

SEQ ID NO: 184361 - DNA, 75 bp, Homo sapiens
tatgattaaatcctcaaagtaaggcaagaaagaggaaggcaatgataagaaaactaccaccataactgaatctga

SEQ ID NO: 184362 - DNA, 75 bp, Homo sapiens
ttaaatcctcaaagtaaggcaagaaagaggaaggcaatgataagaaaactaccaccataactgaatctgatcata

SEQ ID NO: 184363 - DNA, 74 bp, Homo sapiens
aaggcaatgataagaaaactaccaccataactgaatctgatcatacgtggttatctcaattttcatttactgtt

SEQ ID NO: 184364 - DNA, 76 bp, Homo sapiens
cataactgaatctgatcatacgtggttatctcaattttcatttactgtttttttcctcctctgctgtgaataccaa

SEQ ID NO: 184365 - DNA, 75 bp, Homo sapiens
tgaatctgatcatacgtggttatctcaattttcatttactgtttttttcctcctctgctgtgaataccaaacttc

SEQ ID NO: 184366 - DNA, 75 bp, Homo sapiens
tcatacgtggttatctcaattttcatttactgtttttttcctcctctgctgtgaataccaaacttcttcatatca

SEQ ID NO: 184367 - DNA, 75 bp, Homo sapiens
tcaattttcatttactgtttttttcctcctctgctgtgaataccaaacttcttcatatcagaagacaagatcaac

SEQ ID NO: 184368 - DNA, 75 bp, Homo sapiens
tttactgtttttttcctcctctgctgtgaataccaaacttcttcatatcagaagacaagatcaactctatacact

SEQ ID NO: 184369 - DNA, 80 bp, Homo sapiens
ttttcctcctctgctgtgaataccaaacttcttcatatcagaagacaagatcaactctatacacttctcttcaggagcaa

SEQ ID NO: 184370 - DNA, 82 bp, Homo sapiens
tctgctgtgaataccaaacttcttcatatcagaagacaagatcaactctatacacttctcttcaggagcaaaattatatgaa

SEQ ID NO: 184371 - DNA, 78 bp, Homo sapiens
gtgaataccaaacttcttcatatcagaagacaagatcaactctatacacttctcttcaggagcaaaattatatgaaaa

SEQ ID NO: 184372 - DNA, 75 bp, Homo sapiens
aacttcttcatatcagaagacaagatcaactctatacacttctcttcaggagcaaaattatatgaaaaacaaaaa

SEQ ID NO: 184373 - DNA, 75 bp, Homo sapiens
cagaagacaagatcaactctatacacttctcttcaggagcaaaattatatgaaaaacaaaaacaggaattacaga

SEQ ID NO: 184374 - DNA, 73 bp, Homo sapiens
caagatcaactctatacacttctcttcaggagcaaaattatatgaaaaacaaaaacaggaattacagaagagg

SEQ ID NO: 184375 - DNA, 71 bp, Homo sapiens
acacttctcttcaggagcaaaattatatgaaaaacaaaaacaggaattacagaagaggtgaaagatatttg

SEQ ID NO: 184376 - DNA, 69 bp, Homo sapiens
ctcttcaggagcaaaattatatgaaaaacaaaaacaggaattacagaagaggtgaaagatatttggttt

SEQ ID NO: 184377 - DNA, 65 bp, Homo sapiens
aaaacaaaaacaggaattacagaagaggtgaaagatatttggttttttccctattatcaattaaa

SEQ ID NO: 184378 - DNA, 67 bp, Homo sapiens
caggaattacagaagaggtgaaagatatttggttttttccctattatcaattaaagtttaagcaggt

SEQ ID NO: 184379 - DNA, 65 bp, Homo sapiens
ggtgaaagatatttggttttttccctattatcaattaaagtttaagcaggttaataaaaaataca

SEQ ID NO: 184380 - DNA, 63 bp, Homo sapiens
ttggttttttccctattatcaattaaagtttaagcaggttaataaaaaatacaattataaacc

SEQ ID NO: 184381 - DNA, 67 bp, Homo sapiens
cctattatcaattaaagtttaagcaggttaataaaaaatacaattataaacctttagttgacactga

SEQ ID NO: 184382 - DNA, 67 bp, Homo sapiens
caattaaagtttaagcaggttaataaaaaatacaattataaacctttagttgacactgatacactcc

SEQ ID NO: 184383 - DNA, 71 bp, Homo sapiens
agcaggttaataaaaaatacaattataaacctttagttgacactgatacactccctttgcagctgttagtg

SEQ ID NO: 184384 - DNA, 75 bp, Homo sapiens
taaaaaatacaattataaacctttagttgacactgatacactccctttgcagctgttagtgtcagtcaccagtca

SEQ ID NO: 184385 - DNA, 75 bp, Homo sapiens
aatacaattataaacctttagttgacactgatacactccctttgcagctgttagtgtcagtcaccagtcacttac

SEQ ID NO: 184386 - DNA, 75 bp, Homo sapiens
taaacctttagttgacactgatacactccctttgcagctgttagtgtcagtcaccagtcacttacctactaaaca

SEQ ID NO: 184387 - DNA, 77 bp, Homo sapiens
cactgatacactccctttgcagctgttagtgtcagtcaccagtcacttacctactaaacagtaagtacagtggaata

SEQ ID NO: 184388 - DNA, 78 bp, Homo sapiens
tacactccctttgcagctgttagtgtcagtcaccagtcacttacctactaaacagtaagtacagtggaatatcatgta

SEQ ID NO: 184389 - DNA, 76 bp, Homo sapiens
tttgcagctgttagtgtcagtcaccagtcacttacctactaaacagtaagtacagtggaatatcatgtaccccaaa

SEQ ID NO: 184390 - DNA, 75 bp, Homo sapiens
ttagtgtcagtcaccagtcacttacctactaaacagtaagtacagtggaatatcatgtaccccaaagagatgaac

SEQ ID NO: 184391 - DNA, 71 bp, Homo sapiens
ttacctactaaacagtaagtacagtggaatatcatgtaccccaaagagatgaactcctaaaccaggaacca

SEQ ID NO: 184392 - DNA, 72 bp, Homo sapiens
aaacagtaagtacagtggaatatcatgtaccccaaagagatgaactcctaaaccaggaaccactgtactcta

SEQ ID NO: 184393 - DNA, 74 bp, Homo sapiens
agtggaatatcatgtaccccaaagagatgaactcctaaaccaggaaccactgtactctaatgggaatagcctca

SEQ ID NO: 184394 - DNA, 70 bp, Homo sapiens
aactcctaaaccaggaaccactgtactctaatgggaatagcctcagttcttgaatgtaaaatattcttaa

SEQ ID NO: 184395 - DNA, 71 bp, Homo sapiens
ccaggaaccactgtactctaatgggaatagcctcagttcttgaatgtaaaatattcttaacaaaaacattc

SEQ ID NO: 184396 - DNA, 74 bp, Homo sapiens
cactgtactctaatgggaatagcctcagttcttgaatgtaaaatattcttaacaaaaacattcccctatcatgc

SEQ ID NO: 184397 - DNA, 76 bp, Homo sapiens
gcctcagttcttgaatgtaaaatattcttaacaaaaacattcccctatcatgctttctgtatttgctaaatgctca

SEQ ID NO: 184398 - DNA, 77 bp, Homo sapiens
acaaaaacattcccctatcatgctttctgtatttgctaaatgctcacccactataacacagtccttctgcctgtcta

SEQ ID NO: 184399 - DNA, 78 bp, Homo sapiens
ccctatcatgctttctgtatttgctaaatgctcacccactataacacagtccttctgcctgtctaccttatccaagcc

SEQ ID NO: 184400 - DNA, 75 bp, Homo sapiens
ttctgtatttgctaaatgctcacccactataacacagtccttctgcctgtctaccttatccaagcccctaccaaa

SEQ ID NO: 184401 - DNA, 74 bp, Homo sapiens
tatttgctaaatgctcacccactataacacagtccttctgcctgtctaccttatccaagcccctaccaaattct

SEQ ID NO: 184402 - DNA, 73 bp, Homo sapiens
atgctcacccactataacacagtccttctgcctgtctaccttatccaagcccctaccaaattcttctgtaggg

SEQ ID NO: 184403 - DNA, 70 bp, Homo sapiens
tataacacagtccttctgcctgtctaccttatccaagcccctaccaaattcttctgtaggggaaatttgt

SEQ ID NO: 184404 - DNA, 70 bp, Homo sapiens
ttctgcctgtctaccttatccaagcccctaccaaattcttctgtaggggaaatttgttgacaaactttca

SEQ ID NO: 184405 - DNA, 71 bp, Homo sapiens
tctaccttatccaagcccctaccaaattcttctgtaggggaaatttgttgacaaactttcatgtgacagta

SEQ ID NO: 184406 - DNA, 72 bp, Homo sapiens
ttatccaagcccctaccaaattcttctgtaggggaaatttgttgacaaactttcatgtgacagtattacatc

SEQ ID NO: 184407 - DNA, 73 bp, Homo sapiens
ccctaccaaattcttctgtaggggaaatttgttgacaaactttcatgtgacagtattacatctctttatgaga

SEQ ID NO: 184408 - DNA, 75 bp, Homo sapiens
ttcttctgtaggggaaatttgttgacaaactttcatgtgacagtattacatctctttatgagaaacatttcaata

SEQ ID NO: 184409 - DNA, 75 bp, Homo sapiens
gggaaatttgttgacaaactttcatgtgacagtattacatctctttatgagaaacatttcaataatcacaaaatg

SEQ ID NO: 184410 - DNA, 76 bp, Homo sapiens
tcatgtgacagtattacatctctttatgagaaacatttcaataatcacaaaatgtatttaaaaattattctttcag

SEQ ID NO: 184411 - DNA, 73 bp, Homo sapiens
cagtattacatctctttatgagaaacatttcaataatcacaaaatgtatttaaaaattattctttcagttata

SEQ ID NO: 184412 - DNA, 72 bp, Homo sapiens
ttatgagaaacatttcaataatcacaaaatgtatttaaaaattattctttcagttatattaacagtaactca

SEQ ID NO: 184413 - DNA, 70 bp, Homo sapiens
gaaacatttcaataatcacaaaatgtatttaaaaattattctttcagttatattaacagtaactcaaaga

SEQ ID NO: 184414 - DNA, 70 bp, Homo sapiens
caataatcacaaaatgtatttaaaaattattctttcagttatattaacagtaactcaaagataaatcatt

SEQ ID NO: 184415 - DNA, 68 bp, Homo sapiens
gtatttaaaaattattctttcagttatattaacagtaactcaaagataaatcatttcttaggatattt

SEQ ID NO: 184416 - DNA, 74 bp, Homo sapiens
attattctttcagttatattaacagtaactcaaagataaatcatttcttaggatattttaacagcaacagcaga

SEQ ID NO: 184417 - DNA, 73 bp, Homo sapiens
ctttcagttatattaacagtaactcaaagataaatcatttcttaggatattttaacagcaacagcagaaaaca

SEQ ID NO: 184418 - DNA, 72 bp, Homo sapiens
atattaacagtaactcaaagataaatcatttcttaggatattttaacagcaacagcagaaaacaaaaatgaa

SEQ ID NO: 184419 - DNA, 68 bp, Homo sapiens
aacaaaaatgaaaaaacaaaaatctaccaagtgcctacccagtgcagtacttggtatgttcttgtcct

SEQ ID NO: 184420 - DNA, 71 bp, Homo sapiens
gaaaaaacaaaaatctaccaagtgcctacccagtgcagtacttggtatgttcttgtcctttatctcattta

SEQ ID NO: 184421 - DNA, 70 bp, Homo sapiens
aaaaaacaaaaatctaccaagtgcctacccagtgcagtacttggtatgttcttgtcctttatctcattta

SEQ ID NO: 184422 - DNA, 71 bp, Homo sapiens
acaaaaatctaccaagtgcctacccagtgcagtacttggtatgttcttgtcctttatctcatttaattaaa

SEQ ID NO: 184423 - DNA, 74 bp, Homo sapiens
aagtgcctacccagtgcagtacttggtatgttcttgtcctttatctcatttaattaaaaagctgaaagatctga

SEQ ID NO: 184424 - DNA, 75 bp, Homo sapiens
ttggtatgttcttgtcctttatctcatttaattaaaaagctgaaagatctgagacactttggcttatctttcagc

SEQ ID NO: 184425 - DNA, 72 bp, Homo sapiens
cttgtcctttatctcatttaattaaaaagctgaaagatctgagacactttggcttatctttcagcttaaaac

SEQ ID NO: 184426 - DNA, 71 bp, Homo sapiens
atctcatttaattaaaaagctgaaagatctgagacactttggcttatctttcagcttaaaacttaagactt

SEQ ID NO: 184427 - DNA, 70 bp, Homo sapiens
aaagctgaaagatctgagacactttggcttatctttcagcttaaaacttaagactttttatcttgtattt

SEQ ID NO: 184428 - DNA, 74 bp, Homo sapiens
gagacactttggcttatctttcagcttaaaacttaagactttttatcttgtatttttacattgatcatgtagca

SEQ ID NO: 184429 - DNA, 76 bp, Homo sapiens
tggcttatctttcagcttaaaacttaagactttttatcttgtatttttacattgatcatgtagcagaaccatatca

SEQ ID NO: 184430 - DNA, 76 bp, Homo sapiens
acttaagactttttatcttgtatttttacattgatcatgtagcagaaccatatcaacatcaagaccatacaccttg

SEQ ID NO: 184431 - DNA, 78 bp, Homo sapiens
ctttttatcttgtatttttacattgatcatgtagcagaaccatatcaacatcaagaccatacaccttgtgacgacaaa

SEQ ID NO: 184432 - DNA, 81 bp, Homo sapiens
ttgtatttttacattgatcatgtagcagaaccatatcaacatcaagaccatacaccttgtgacgacaaaattcagagcaaa

SEQ ID NO: 184433 - DNA, 82 bp, Homo sapiens
ttacattgatcatgtagcagaaccatatcaacatcaagaccatacaccttgtgacgacaaaattcagagcaaagtgacaaaa

SEQ ID NO: 184434 - DNA, 80 bp, Homo sapiens
atcatgtagcagaaccatatcaacatcaagaccatacaccttgtgacgacaaaattcagagcaaagtgacaaaagacaaa

SEQ ID NO: 184435 - DNA, 78 bp, Homo sapiens
atgtagcagaaccatatcaacatcaagaccatacaccttgtgacgacaaaattcagagcaaagtgacaaaagacaaaa

SEQ ID NO: 184436 - DNA, 75 bp, Homo sapiens
aaccatatcaacatcaagaccatacaccttgtgacgacaaaattcagagcaaagtgacaaaagacaaaactcaaa

SEQ ID NO: 184437 - DNA, 73 bp, Homo sapiens
acatcaagaccatacaccttgtgacgacaaaattcagagcaaagtgacaaaagacaaaactcaaaacaaagtg

SEQ ID NO: 184438 - DNA, 73 bp, Homo sapiens
catacaccttgtgacgacaaaattcagagcaaagtgacaaaagacaaaactcaaaacaaagtggcttagagta

SEQ ID NO: 184439 - DNA, 72 bp, Homo sapiens
atacaccttgtgacgacaaaattcagagcaaagtgacaaaagacaaaactcaaaacaaagtggcttagagta

SEQ ID NO: 184440 - DNA, 74 bp, Homo sapiens
tgacgacaaaattcagagcaaagtgacaaaagacaaaactcaaaacaaagtggcttagagtaccaaatattgca

SEQ ID NO: 184441 - DNA, 75 bp, Homo sapiens
gacaaaattcagagcaaagtgacaaaagacaaaactcaaaacaaagtggcttagagtaccaaatattgcagcata

SEQ ID NO: 184442 - DNA, 72 bp, Homo sapiens
caaagtgacaaaagacaaaactcaaaacaaagtggcttagagtaccaaatattgcagcatataaacccacaa

SEQ ID NO: 184443 - DNA, 73 bp, Homo sapiens
aaagtggcttagagtaccaaatattgcagcatataaacccacaaccttgaaaaaggacaccagagttctgcaa

SEQ ID NO: 184444 - DNA, 73 bp, Homo sapiens
ttagagtaccaaatattgcagcatataaacccacaaccttgaaaaaggacaccagagttctgcaagagaaaaa

SEQ ID NO: 184445 - DNA, 70 bp, Homo sapiens
cacaaccttgaaaaaggacaccagagttctgcaagagaaaaaatcttgagtttgaaagagaaaaaatctc

SEQ ID NO: 184446 - DNA, 72 bp, Homo sapiens
cagagttctgcaagagaaaaaatcttgagtttgaaagagaaaaaatctctttcaaagctacaggttatatag

SEQ ID NO: 184447 - DNA, 70 bp, Homo sapiens
gcaagagaaaaaatcttgagtttgaaagagaaaaaatctctttcaaagctacaggttatataggtaccca

SEQ ID NO: 184448 - DNA, 72 bp, Homo sapiens
cttgagtttgaaagagaaaaaatctctttcaaagctacaggttatataggtacccagaagtcaagtcataca

SEQ ID NO: 184449 - DNA, 75 bp, Homo sapiens
gaaagagaaaaaatctctttcaaagctacaggttatataggtacccagaagtcaagtcatacatagcaatagcta

SEQ ID NO: 184450 - DNA, 72 bp, Homo sapiens
ctttcaaagctacaggttatataggtacccagaagtcaagtcatacatagcaatagctaacttacatttttt

SEQ ID NO: 184451 - DNA, 72 bp, Homo sapiens
acaggttatataggtacccagaagtcaagtcatacatagcaatagctaacttacattttttttattagtgtg

SEQ ID NO: 184452 - DNA, 71 bp, Homo sapiens
tacccagaagtcaagtcatacatagcaatagctaacttacattttttttattagtgtgttaacgtttcacc

SEQ ID NO: 184453 - DNA, 73 bp, Homo sapiens
gaagtcaagtcatacatagcaatagctaacttacattttttttattagtgtgttaacgtttcacccacattga

SEQ ID NO: 184454 - DNA, 72 bp, Homo sapiens
tcatacatagcaatagctaacttacattttttttattagtgtgttaacgtttcacccacattgatttattaa

SEQ ID NO: 184455 - DNA, 66 bp, Homo sapiens
caatagctaacttacattttttttattagtgtgttaacgtttcacccacattgatttattaaattt

SEQ ID NO: 184456 - DNA, 67 bp, Homo sapiens
cattttttttattagtgtgttaacgtttcacccacattgatttattaaattttcaacaataatccta

SEQ ID NO: 184457 - DNA, 70 bp, Homo sapiens
tattagtgtgttaacgtttcacccacattgatttattaaattttcaacaataatcctacaaagaagatac

SEQ ID NO: 184458 - DNA, 72 bp, Homo sapiens
aacgtttcacccacattgatttattaaattttcaacaataatcctacaaagaagatactattatgatctcca

SEQ ID NO: 184459 - DNA, 74 bp, Homo sapiens
ttcacccacattgatttattaaattttcaacaataatcctacaaagaagatactattatgatctccattttata

SEQ ID NO: 184460 - DNA, 70 bp, Homo sapiens
ttattaaattttcaacaataatcctacaaagaagatactattatgatctccattttataaaagaggaaac

SEQ ID NO: 184461 - DNA, 71 bp, Homo sapiens
caataatcctacaaagaagatactattatgatctccattttataaaagaggaaactaagaaacagagaaag

SEQ ID NO: 184462 - DNA, 70 bp, Homo sapiens
gaagatactattatgatctccattttataaaagaggaaactaagaaacagagaaagttaaattatttgcc

SEQ ID NO: 184463 - DNA, 69 bp, Homo sapiens
ttatgatctccattttataaaagaggaaactaagaaacagagaaagttaaattatttgcccaagatccc

SEQ ID NO: 184464 - DNA, 68 bp, Homo sapiens
cattttataaaagaggaaactaagaaacagagaaagttaaattatttgcccaagatccctagtggcac

SEQ ID NO: 184465 - DNA, 68 bp, Homo sapiens
aagaggaaactaagaaacagagaaagttaaattatttgcccaagatccctagtggcactgaaatttaa

SEQ ID NO: 184466 - DNA, 74 bp, Homo sapiens
aacagagaaagttaaattatttgcccaagatccctagtggcactgaaatttaagacacagcctgtctgacacca

SEQ ID NO: 184467 - DNA, 78 bp, Homo sapiens
attatttgcccaagatccctagtggcactgaaatttaagacacagcctgtctgacaccagacagcagaattctaatta

SEQ ID NO: 184468 - DNA, 78 bp, Homo sapiens
caagatccctagtggcactgaaatttaagacacagcctgtctgacaccagacagcagaattctaattacctatctacc

SEQ ID NO: 184469 - DNA, 78 bp, Homo sapiens
tagtggcactgaaatttaagacacagcctgtctgacaccagacagcagaattctaattacctatctacctacctttca

SEQ ID NO: 184470 - DNA, 75 bp, Homo sapiens
aaatttaagacacagcctgtctgacaccagacagcagaattctaattacctatctacctacctttcacttatcaa

SEQ ID NO: 184471 - DNA, 77 bp, Homo sapiens
taagacacagcctgtctgacaccagacagcagaattctaattacctatctacctacctttcacttatcaacaaataa

SEQ ID NO: 184472 - DNA, 78 bp, Homo sapiens
tctgacaccagacagcagaattctaattacctatctacctacctttcacttatcaacaaataagtgatcgatccctca

SEQ ID NO: 184473 - DNA, 74 bp, Homo sapiens
acagcagaattctaattacctatctacctacctttcacttatcaacaaataagtgatcgatccctcaaacacca

SEQ ID NO: 184474 - DNA, 73 bp, Homo sapiens
agaattctaattacctatctacctacctttcacttatcaacaaataagtgatcgatccctcaaacaccagcca

SEQ ID NO: 184475 - DNA, 77 bp, Homo sapiens
tatctacctacctttcacttatcaacaaataagtgatcgatccctcaaacaccagccagacatacaaaccatggatg

SEQ ID NO: 184476 - DNA, 76 bp, Homo sapiens
acttatcaacaaataagtgatcgatccctcaaacaccagccagacatacaaaccatggatgtccaacttctttctc

SEQ ID NO: 184477 - DNA, 78 bp, Homo sapiens
aaataagtgatcgatccctcaaacaccagccagacatacaaaccatggatgtccaacttctttctctcttctcacata

SEQ ID NO: 184478 - DNA, 78 bp, Homo sapiens
atcgatccctcaaacaccagccagacatacaaaccatggatgtccaacttctttctctcttctcacatacaaaggata

SEQ ID NO: 184479 - DNA, 77 bp, Homo sapiens
aacaccagccagacatacaaaccatggatgtccaacttctttctctcttctcacatacaaaggatatgaaaatccta

SEQ ID NO: 184480 - DNA, 74 bp, Homo sapiens
agacatacaaaccatggatgtccaacttctttctctcttctcacatacaaaggatatgaaaatcctaccaaaaa

SEQ ID NO: 184481 - DNA, 74 bp, Homo sapiens
atggatgtccaacttctttctctcttctcacatacaaaggatatgaaaatcctaccaaaaaggaccatatcaat

SEQ ID NO: 184482 - DNA, 74 bp, Homo sapiens
ctctcttctcacatacaaaggatatgaaaatcctaccaaaaaggaccatatcaattaataatctaagcttccta

SEQ ID NO: 184483 - DNA, 72 bp, Homo sapiens
cacatacaaaggatatgaaaatcctaccaaaaaggaccatatcaattaataatctaagcttcctaacccatc

SEQ ID NO: 184484 - DNA, 71 bp, Homo sapiens
gatatgaaaatcctaccaaaaaggaccatatcaattaataatctaagcttcctaacccatcttaatactac

SEQ ID NO: 184485 - DNA, 70 bp, Homo sapiens
aatcctaccaaaaaggaccatatcaattaataatctaagcttcctaacccatcttaatactactgacatt

SEQ ID NO: 184486 - DNA, 71 bp, Homo sapiens
caaaaaggaccatatcaattaataatctaagcttcctaacccatcttaatactactgacatttttatataa

SEQ ID NO: 184487 - DNA, 73 bp, Homo sapiens
catatcaattaataatctaagcttcctaacccatcttaatactactgacatttttatataaaacctgagtaga

SEQ ID NO: 184488 - DNA, 72 bp, Homo sapiens
atctaagcttcctaacccatcttaatactactgacatttttatataaaacctgagtagaatttgattctaga

SEQ ID NO: 184489 - DNA, 70 bp, Homo sapiens
gcttcctaacccatcttaatactactgacatttttatataaaacctgagtagaatttgattctagaaaag

SEQ ID NO: 184490 - DNA, 69 bp, Homo sapiens
actactgacatttttatataaaacctgagtagaatttgattctagaaaaggttctttaaaatgttcatc

SEQ ID NO: 184491 - DNA, 66 bp, Homo sapiens
tttatataaaacctgagtagaatttgattctagaaaaggttctttaaaatgttcatctttttaaac

SEQ ID NO: 184492 - DNA, 70 bp, Homo sapiens
ttgattctagaaaaggttctttaaaatgttcatctttttaaactataagacctatactgaggcgagatgt

SEQ ID NO: 184493 - DNA, 69 bp, Homo sapiens
tctagaaaaggttctttaaaatgttcatctttttaaactataagacctatactgaggcgagatgttttc

SEQ ID NO: 184494 - DNA, 73 bp, Homo sapiens
ttaaaatgttcatctttttaaactataagacctatactgaggcgagatgttttctttatagacatactagaca

SEQ ID NO: 184495 - DNA, 74 bp, Homo sapiens
gttcatctttttaaactataagacctatactgaggcgagatgttttctttatagacatactagacaaataatca

SEQ ID NO: 184496 - DNA, 72 bp, Homo sapiens
tttaaactataagacctatactgaggcgagatgttttctttatagacatactagacaaataatcattttccc

SEQ ID NO: 184497 - DNA, 73 bp, Homo sapiens
actgaggcgagatgttttctttatagacatactagacaaataatcattttccccagccttccttatacttcaa

SEQ ID NO: 184498 - DNA, 73 bp, Homo sapiens
gatgttttctttatagacatactagacaaataatcattttccccagccttccttatacttcaaattcttctga

SEQ ID NO: 184499 - DNA, 69 bp, Homo sapiens
actagacaaataatcattttccccagccttccttatacttcaaattcttctgatttatttgtgtctttt

SEQ ID NO: 184500 - DNA, 69 bp, Homo sapiens
aatcattttccccagccttccttatacttcaaattcttctgatttatttgtgtcttttttctgtttcca

SEQ ID NO: 184501 - DNA, 74 bp, Homo sapiens
cagccttccttatacttcaaattcttctgatttatttgtgtcttttttctgtttccaaagtccatgatctctgc

SEQ ID NO: 184502 - DNA, 73 bp, Homo sapiens
ccttatacttcaaattcttctgatttatttgtgtcttttttctgtttccaaagtccatgatctctgcccatta

SEQ ID NO: 184503 - DNA, 75 bp, Homo sapiens
ttcttctgatttatttgtgtcttttttctgtttccaaagtccatgatctctgcccattatgtctaaaatcaccca

SEQ ID NO: 184504 - DNA, 73 bp, Homo sapiens
atttatttgtgtcttttttctgtttccaaagtccatgatctctgcccattatgtctaaaatcacccatcaccc

SEQ ID NO: 184505 - DNA, 76 bp, Homo sapiens
ttttttctgtttccaaagtccatgatctctgcccattatgtctaaaatcacccatcaccccatgtcccacaaatga

SEQ ID NO: 184506 - DNA, 78 bp, Homo sapiens
tttccaaagtccatgatctctgcccattatgtctaaaatcacccatcaccccatgtcccacaaatgaatacgaatctg

SEQ ID NO: 184507 - DNA, 82 bp, Homo sapiens
catgatctctgcccattatgtctaaaatcacccatcaccccatgtcccacaaatgaatacgaatctggctcatattcaacta

SEQ ID NO: 184508 - DNA, 78 bp, Homo sapiens
tgcccattatgtctaaaatcacccatcaccccatgtcccacaaatgaatacgaatctggctcatattcaactaataaa

SEQ ID NO: 184509 - DNA, 78 bp, Homo sapiens
tatgtctaaaatcacccatcaccccatgtcccacaaatgaatacgaatctggctcatattcaactaataaagctggaa

SEQ ID NO: 184510 - DNA, 74 bp, Homo sapiens
acccatcaccccatgtcccacaaatgaatacgaatctggctcatattcaactaataaagctggaaaggacctta

SEQ ID NO: 184511 - DNA, 79 bp, Homo sapiens
catgtcccacaaatgaatacgaatctggctcatattcaactaataaagctggaaaggaccttagagagatcaggtcatc

SEQ ID NO: 184512 - DNA, 77 bp, Homo sapiens
aatacgaatctggctcatattcaactaataaagctggaaaggaccttagagagatcaggtcatctaatcacacttac

SEQ ID NO: 184513 - DNA, 81 bp, Homo sapiens
tcatattcaactaataaagctggaaaggaccttagagagatcaggtcatctaatcacacttactcagaggcagacacacaa

SEQ ID NO: 184514 - DNA, 77 bp, Homo sapiens
aactaataaagctggaaaggaccttagagagatcaggtcatctaatcacacttactcagaggcagacacacaactag

SEQ ID NO: 184515 - DNA, 83 bp, Homo sapiens
tggaaaggaccttagagagatcaggtcatctaatcacacttactcagaggcagacacacaactaggacaatgtgcacagtcac

SEQ ID NO: 184516 - DNA, 83 bp, Homo sapiens
ttagagagatcaggtcatctaatcacacttactcagaggcagacacacaactaggacaatgtgcacagtcacccctgaagttg

SEQ ID NO: 184517 - DNA, 81 bp, Homo sapiens
agatcaggtcatctaatcacacttactcagaggcagacacacaactaggacaatgtgcacagtcacccctgaagttgggcc

SEQ ID NO: 184518 - DNA, 79 bp, Homo sapiens
atctaatcacacttactcagaggcagacacacaactaggacaatgtgcacagtcacccctgaagttgggcctgccccaa

SEQ ID NO: 184519 - DNA, 77 bp, Homo sapiens
acttactcagaggcagacacacaactaggacaatgtgcacagtcacccctgaagttgggcctgccccaagccaccaa

SEQ ID NO: 184520 - DNA, 74 bp, Homo sapiens
ctaggacaatgtgcacagtcacccctgaagttgggcctgccccaagccaccaagtcaattactagccaaggtaa

SEQ ID NO: 184521 - DNA, 73 bp, Homo sapiens
acaatgtgcacagtcacccctgaagttgggcctgccccaagccaccaagtcaattactagccaaggtaacagg

SEQ ID NO: 184522 - DNA, 69 bp, Homo sapiens
acccctgaagttgggcctgccccaagccaccaagtcaattactagccaaggtaacaggggatacttgta

SEQ ID NO: 184523 - DNA, 69 bp, Homo sapiens
aagttgggcctgccccaagccaccaagtcaattactagccaaggtaacaggggatacttgtaacggaga

SEQ ID NO: 184524 - DNA, 75 bp, Homo sapiens
cccaagccaccaagtcaattactagccaaggtaacaggggatacttgtaacggagagcactagcagtccatagca

SEQ ID NO: 184525 - DNA, 77 bp, Homo sapiens
caagtcaattactagccaaggtaacaggggatacttgtaacggagagcactagcagtccatagcagtccatagctta

SEQ ID NO: 184526 - DNA, 75 bp, Homo sapiens
aattactagccaaggtaacaggggatacttgtaacggagagcactagcagtccatagcagtccatagcttagtgt

SEQ ID NO: 184527 - DNA, 76 bp, Homo sapiens
aaggtaacaggggatacttgtaacggagagcactagcagtccatagcagtccatagcttagtgttctccattacaa

SEQ ID NO: 184528 - DNA, 77 bp, Homo sapiens
atacttgtaacggagagcactagcagtccatagcagtccatagcttagtgttctccattacaagtgtcccctgttcc

SEQ ID NO: 184529 - DNA, 78 bp, Homo sapiens
actagcagtccatagcagtccatagcttagtgttctccattacaagtgtcccctgttccttttgtcttgctggcagga

SEQ ID NO: 184530 - DNA, 77 bp, Homo sapiens
atagcagtccatagcttagtgttctccattacaagtgtcccctgttccttttgtcttgctggcaggagggatgccag

SEQ ID NO: 184531 - DNA, 74 bp, Homo sapiens
attacaagtgtcccctgttccttttgtcttgctggcaggagggatgccaggtaggacaggtaggagacagtcca

SEQ ID NO: 184532 - DNA, 74 bp, Homo sapiens
ctgttccttttgtcttgctggcaggagggatgccaggtaggacaggtaggagacagtccaaacaaagcctgtct

SEQ ID NO: 184533 - DNA, 74 bp, Homo sapiens
gcaggagggatgccaggtaggacaggtaggagacagtccaaacaaagcctgtcttttctactggataaatggaa

SEQ ID NO: 184534 - DNA, 72 bp, Homo sapiens
atgccaggtaggacaggtaggagacagtccaaacaaagcctgtcttttctactggataaatggaatttcaat

SEQ ID NO: 184535 - DNA, 72 bp, Homo sapiens
ggtaggacaggtaggagacagtccaaacaaagcctgtcttttctactggataaatggaatttcaattctctc

SEQ ID NO: 184536 - DNA, 72 bp, Homo sapiens
taggagacagtccaaacaaagcctgtcttttctactggataaatggaatttcaattctctctcaccttcctt

SEQ ID NO: 184537 - DNA, 72 bp, Homo sapiens
aaacaaagcctgtcttttctactggataaatggaatttcaattctctctcaccttcctttgctcatagaaag

SEQ ID NO: 184538 - DNA, 72 bp, Homo sapiens
tgtcttttctactggataaatggaatttcaattctctctcaccttcctttgctcatagaaaggcctttgggt

SEQ ID NO: 184539 - DNA, 73 bp, Homo sapiens
tactggataaatggaatttcaattctctctcaccttcctttgctcatagaaaggcctttgggttcatggttta

SEQ ID NO: 184540 - DNA, 76 bp, Homo sapiens
taaatggaatttcaattctctctcaccttcctttgctcatagaaaggcctttgggttcatggtttacatgacatca

SEQ ID NO: 184541 - DNA, 72 bp, Homo sapiens
accttcctttgctcatagaaaggcctttgggttcatggtttacatgacatcacttttgttaattctcttctg

SEQ ID NO: 184542 - DNA, 74 bp, Homo sapiens
tttgctcatagaaaggcctttgggttcatggtttacatgacatcacttttgttaattctcttctgttacgctac

SEQ ID NO: 184543 - DNA, 69 bp, Homo sapiens
aaggcctttgggttcatggtttacatgacatcacttttgttaattctcttctgttacgctacctacttt

SEQ ID NO: 184544 - DNA, 73 bp, Homo sapiens
ggtttacatgacatcacttttgttaattctcttctgttacgctacctacttttcaagtattgaaccaatagca

SEQ ID NO: 184545 - DNA, 72 bp, Homo sapiens
acatcacttttgttaattctcttctgttacgctacctacttttcaagtattgaaccaatagcaacaacaata

SEQ ID NO: 184546 - DNA, 72 bp, Homo sapiens
ttctgttacgctacctacttttcaagtattgaaccaatagcaacaacaataaagccattactagtaccagaa

SEQ ID NO: 184547 - DNA, 71 bp, Homo sapiens
cctacttttcaagtattgaaccaatagcaacaacaataaagccattactagtaccagaagactaataagga

SEQ ID NO: 184548 - DNA, 70 bp, Homo sapiens
aagtattgaaccaatagcaacaacaataaagccattactagtaccagaagactaataaggaaagtacggc

SEQ ID NO: 184549 - DNA, 69 bp, Homo sapiens
caatagcaacaacaataaagccattactagtaccagaagactaataaggaaagtacggctgttgggttt

SEQ ID NO: 184550 - DNA, 69 bp, Homo sapiens
caacaataaagccattactagtaccagaagactaataaggaaagtacggctgttgggttttatacacaa

SEQ ID NO: 184551 - DNA, 68 bp, Homo sapiens
aagccattactagtaccagaagactaataaggaaagtacggctgttgggttttatacacaaatagtac

SEQ ID NO: 184552 - DNA, 67 bp, Homo sapiens
ctaataaggaaagtacggctgttgggttttatacacaaatagtacctgaaagtctttacaggctttc

SEQ ID NO: 184553 - DNA, 69 bp, Homo sapiens
aaggaaagtacggctgttgggttttatacacaaatagtacctgaaagtctttacaggctttctcagcaa

SEQ ID NO: 184554 - DNA, 77 bp, Homo sapiens
tgttgggttttatacacaaatagtacctgaaagtctttacaggctttctcagcaatgctatgcagagtacattacaa

SEQ ID NO: 184555 - DNA, 76 bp, Homo sapiens
atacacaaatagtacctgaaagtctttacaggctttctcagcaatgctatgcagagtacattacaaaaactactat

SEQ ID NO: 184556 - DNA, 77 bp, Homo sapiens
aatagtacctgaaagtctttacaggctttctcagcaatgctatgcagagtacattacaaaaactactattgtaatca

SEQ ID NO: 184557 - DNA, 77 bp, Homo sapiens
aaagtctttacaggctttctcagcaatgctatgcagagtacattacaaaaactactattgtaatcattggatttgtg

SEQ ID NO: 184558 - DNA, 83 bp, Homo sapiens
tctcagcaatgctatgcagagtacattacaaaaactactattgtaatcattggatttgtggctctaatatgtcatataccatt

SEQ ID NO: 184559 - DNA, 79 bp, Homo sapiens
gctatgcagagtacattacaaaaactactattgtaatcattggatttgtggctctaatatgtcatataccattttgaaa

SEQ ID NO: 184560 - DNA, 74 bp, Homo sapiens
gtacattacaaaaactactattgtaatcattggatttgtggctctaatatgtcatataccattttgaaaattta

SEQ ID NO: 184561 - DNA, 73 bp, Homo sapiens
tgtaatcattggatttgtggctctaatatgtcatataccattttgaaaatttactacctactgtaaagttttc

SEQ ID NO: 184562 - DNA, 71 bp, Homo sapiens
gctctaatatgtcatataccattttgaaaatttactacctactgtaaagttttccaattctaactcttcat

SEQ ID NO: 184563 - DNA, 69 bp, Homo sapiens
catataccattttgaaaatttactacctactgtaaagttttccaattctaactcttcattccagaagac

SEQ ID NO: 184564 - DNA, 69 bp, Homo sapiens
ttactacctactgtaaagttttccaattctaactcttcattccagaagacttttcaaggtatactttga

SEQ ID NO: 184565 - DNA, 71 bp, Homo sapiens
ctgtaaagttttccaattctaactcttcattccagaagacttttcaaggtatactttgaataaatacatca

SEQ ID NO: 184566 - DNA, 73 bp, Homo sapiens
ttccaattctaactcttcattccagaagacttttcaaggtatactttgaataaatacatcaaattgaacaaga

SEQ ID NO: 184567 - DNA, 70 bp, Homo sapiens
aactcttcattccagaagacttttcaaggtatactttgaataaatacatcaaattgaacaagaattttat

SEQ ID NO: 184568 - DNA, 69 bp, Homo sapiens
ttccagaagacttttcaaggtatactttgaataaatacatcaaattgaacaagaattttattaaaagga

SEQ ID NO: 184569 - DNA, 68 bp, Homo sapiens
cttttcaaggtatactttgaataaatacatcaaattgaacaagaattttattaaaaggaagacatact

SEQ ID NO: 184570 - DNA, 72 bp, Homo sapiens
tatactttgaataaatacatcaaattgaacaagaattttattaaaaggaagacatactttataaatcatata

SEQ ID NO: 184571 - DNA, 73 bp, Homo sapiens
tacatcaaattgaacaagaattttattaaaaggaagacatactttataaatcatatataaatgggagggagca

SEQ ID NO: 184572 - DNA, 74 bp, Homo sapiens
tgaacaagaattttattaaaaggaagacatactttataaatcatatataaatgggagggagcaagaggcagaca

SEQ ID NO: 184573 - DNA, 72 bp, Homo sapiens
ttttattaaaaggaagacatactttataaatcatatataaatgggagggagcaagaggcagacaaaaggaga

SEQ ID NO: 184574 - DNA, 72 bp, Homo sapiens
aaaaggaagacatactttataaatcatatataaatgggagggagcaagaggcagacaaaaggagaataaaca

SEQ ID NO: 184575 - DNA, 71 bp, Homo sapiens
tataaatgggagggagcaagaggcagacaaaaggagaataaacaaaattacctaaagaggaagaccatctg

SEQ ID NO: 184576 - DNA, 72 bp, Homo sapiens
agcaagaggcagacaaaaggagaataaacaaaattacctaaagaggaagaccatctgtgtttcatgtagaaa

SEQ ID NO: 184577 - DNA, 72 bp, Homo sapiens
cagacaaaaggagaataaacaaaattacctaaagaggaagaccatctgtgtttcatgtagaaagagctttca

SEQ ID NO: 184578 - DNA, 78 bp, Homo sapiens
aagaggaagaccatctgtgtttcatgtagaaagagctttcaatgatgctttatgaacgccatttggtcttctcataaa

SEQ ID NO: 184579 - DNA, 80 bp, Homo sapiens
catctgtgtttcatgtagaaagagctttcaatgatgctttatgaacgccatttggtcttctcataaatcggcaaacattc

SEQ ID NO: 184580 - DNA, 77 bp, Homo sapiens
tttcatgtagaaagagctttcaatgatgctttatgaacgccatttggtcttctcataaatcggcaaacattctaaaa

SEQ ID NO: 184581 - DNA, 74 bp, Homo sapiens
agagctttcaatgatgctttatgaacgccatttggtcttctcataaatcggcaaacattctaaaaaggtgcctt

SEQ ID NO: 184582 - DNA, 72 bp, Homo sapiens
aatgatgctttatgaacgccatttggtcttctcataaatcggcaaacattctaaaaaggtgcctttcaaaat

SEQ ID NO: 184583 - DNA, 71 bp, Homo sapiens
gctttatgaacgccatttggtcttctcataaatcggcaaacattctaaaaaggtgcctttcaaaattttga

SEQ ID NO: 184584 - DNA, 70 bp, Homo sapiens
cgccatttggtcttctcataaatcggcaaacattctaaaaaggtgcctttcaaaattttgaccactataa

SEQ ID NO: 184585 - DNA, 71 bp, Homo sapiens
cttctcataaatcggcaaacattctaaaaaggtgcctttcaaaattttgaccactataagaaacacacaca

SEQ ID NO: 184586 - DNA, 69 bp, Homo sapiens
aatcggcaaacattctaaaaaggtgcctttcaaaattttgaccactataagaaacacacacaccttctc

SEQ ID NO: 184587 - DNA, 69 bp, Homo sapiens
cattctaaaaaggtgcctttcaaaattttgaccactataagaaacacacacaccttctctgaaataaaa

SEQ ID NO: 184588 - DNA, 71 bp, Homo sapiens
ggtgcctttcaaaattttgaccactataagaaacacacacaccttctctgaaataaaattttcataagcca

SEQ ID NO: 184589 - DNA, 71 bp, Homo sapiens
ttttgaccactataagaaacacacacaccttctctgaaataaaattttcataagccattacttacccatac

SEQ ID NO: 184590 - DNA, 71 bp, Homo sapiens
cacacacaccttctctgaaataaaattttcataagccattacttacccatactaattatagttttctgatt

SEQ ID NO: 184591 - DNA, 70 bp, Homo sapiens
tcataagccattacttacccatactaattatagttttctgatttttttaatgctagtgatacgttaaatt

SEQ ID NO: 184592 - DNA, 71 bp, Homo sapiens
cttacccatactaattatagttttctgatttttttaatgctagtgatacgttaaatttatttcacagctca

SEQ ID NO: 184593 - DNA, 74 bp, Homo sapiens
gttttctgatttttttaatgctagtgatacgttaaatttatttcacagctcactagtgaatcacaacccatgat

SEQ ID NO: 184594 - DNA, 74 bp, Homo sapiens
tttttaatgctagtgatacgttaaatttatttcacagctcactagtgaatcacaacccatgatttgaaaacctc

SEQ ID NO: 184595 - DNA, 76 bp, Homo sapiens
gctagtgatacgttaaatttatttcacagctcactagtgaatcacaacccatgatttgaaaacctctatactagaa

SEQ ID NO: 184596 - DNA, 77 bp, Homo sapiens
ttaaatttatttcacagctcactagtgaatcacaacccatgatttgaaaacctctatactagaagaattgcaatgtg

SEQ ID NO: 184597 - DNA, 78 bp, Homo sapiens
tttatttcacagctcactagtgaatcacaacccatgatttgaaaacctctatactagaagaattgcaatgtgttagaa

SEQ ID NO: 184598 - DNA, 77 bp, Homo sapiens
agctcactagtgaatcacaacccatgatttgaaaacctctatactagaagaattgcaatgtgttagaatataaaatg

SEQ ID NO: 184599 - DNA, 77 bp, Homo sapiens
gaatcacaacccatgatttgaaaacctctatactagaagaattgcaatgtgttagaatataaaatggcaaagttgca

SEQ ID NO: 184600 - DNA, 73 bp, Homo sapiens
cccatgatttgaaaacctctatactagaagaattgcaatgtgttagaatataaaatggcaaagttgcaaaatt

SEQ ID NO: 184601 - DNA, 75 bp, Homo sapiens
acctctatactagaagaattgcaatgtgttagaatataaaatggcaaagttgcaaaatttgacaattttgattga

SEQ ID NO: 184602 - DNA, 77 bp, Homo sapiens
tactagaagaattgcaatgtgttagaatataaaatggcaaagttgcaaaatttgacaattttgattgaataatcaca

SEQ ID NO: 184603 - DNA, 77 bp, Homo sapiens
tgcaatgtgttagaatataaaatggcaaagttgcaaaatttgacaattttgattgaataatcacaacccaacagcat

SEQ ID NO: 184604 - DNA, 75 bp, Homo sapiens
gaatataaaatggcaaagttgcaaaatttgacaattttgattgaataatcacaacccaacagcatttcagggtga

SEQ ID NO: 184605 - DNA, 75 bp, Homo sapiens
tggcaaagttgcaaaatttgacaattttgattgaataatcacaacccaacagcatttcagggtgattggaaacaa

SEQ ID NO: 184606 - DNA, 74 bp, Homo sapiens
gttgcaaaatttgacaattttgattgaataatcacaacccaacagcatttcagggtgattggaaacaaaagtca

SEQ ID NO: 184607 - DNA, 75 bp, Homo sapiens
ttgacaattttgattgaataatcacaacccaacagcatttcagggtgattggaaacaaaagtcaaacacacacaa

SEQ ID NO: 184608 - DNA, 71 bp, Homo sapiens
taatcacaacccaacagcatttcagggtgattggaaacaaaagtcaaacacacacaaaaaaggtccaagta

SEQ ID NO: 184609 - DNA, 70 bp, Homo sapiens
agggtgattggaaacaaaagtcaaacacacacaaaaaaggtccaagtaacatctgcattaagaataagct

SEQ ID NO: 184610 - DNA, 70 bp, Homo sapiens
aacaaaagtcaaacacacacaaaaaaggtccaagtaacatctgcattaagaataagcttcaagttaagag

SEQ ID NO: 184611 - DNA, 70 bp, Homo sapiens
aggtccaagtaacatctgcattaagaataagcttcaagttaagaggaaaggtaagaagcaaagaaggaaa

SEQ ID NO: 184612 - DNA, 71 bp, Homo sapiens
catctgcattaagaataagcttcaagttaagaggaaaggtaagaagcaaagaaggaaaaataaatacttga

SEQ ID NO: 184613 - DNA, 68 bp, Homo sapiens
gaataagcttcaagttaagaggaaaggtaagaagcaaagaaggaaaaataaatacttgagttattgga

SEQ ID NO: 184614 - DNA, 67 bp, Homo sapiens
gcttcaagttaagaggaaaggtaagaagcaaagaaggaaaaataaatacttgagttattggaacaaa

SEQ ID NO: 184615 - DNA, 70 bp, Homo sapiens
ggaaaggtaagaagcaaagaaggaaaaataaatacttgagttattggaacaaacacattcaactctcatc

SEQ ID NO: 184616 - DNA, 73 bp, Homo sapiens
gtaagaagcaaagaaggaaaaataaatacttgagttattggaacaaacacattcaactctcatctccatttca

SEQ ID NO: 184617 - DNA, 74 bp, Homo sapiens
ggaaaaataaatacttgagttattggaacaaacacattcaactctcatctccatttcataaattatgactataa

SEQ ID NO: 184618 - DNA, 75 bp, Homo sapiens
atacttgagttattggaacaaacacattcaactctcatctccatttcataaattatgactataaagcctttacca

SEQ ID NO: 184619 - DNA, 75 bp, Homo sapiens
tgagttattggaacaaacacattcaactctcatctccatttcataaattatgactataaagcctttaccaaatac

SEQ ID NO: 184620 - DNA, 73 bp, Homo sapiens
acaaacacattcaactctcatctccatttcataaattatgactataaagcctttaccaaatactggaacaaat

SEQ ID NO: 184621 - DNA, 72 bp, Homo sapiens
caactctcatctccatttcataaattatgactataaagcctttaccaaatactggaacaaattttcccaatg

SEQ ID NO: 184622 - DNA, 70 bp, Homo sapiens
aattatgactataaagcctttaccaaatactggaacaaattttcccaatgtccagtattttatatgctac

SEQ ID NO: 184623 - DNA, 71 bp, Homo sapiens
gactataaagcctttaccaaatactggaacaaattttcccaatgtccagtattttatatgctactgtccta

SEQ ID NO: 184624 - DNA, 72 bp, Homo sapiens
cctttaccaaatactggaacaaattttcccaatgtccagtattttatatgctactgtcctaatctgatcttc

SEQ ID NO: 184625 - DNA, 73 bp, Homo sapiens
ctggaacaaattttcccaatgtccagtattttatatgctactgtcctaatctgatcttctaccaaaatttcga

SEQ ID NO: 184626 - DNA, 77 bp, Homo sapiens
tttcccaatgtccagtattttatatgctactgtcctaatctgatcttctaccaaaatttcgagattagctatagaga

SEQ ID NO: 184627 - DNA, 76 bp, Homo sapiens
aatgtccagtattttatatgctactgtcctaatctgatcttctaccaaaatttcgagattagctatagagagtagg

SEQ ID NO: 184628 - DNA, 81 bp, Homo sapiens
atttcgagattagctatagagagtagggagatctgtggaccactggggatcagtgtcagcaccatgtcctgaccctgactg

SEQ ID NO: 184629 - DNA, 81 bp, Homo sapiens
tagctatagagagtagggagatctgtggaccactggggatcagtgtcagcaccatgtcctgaccctgactggctttctacc

SEQ ID NO: 184630 - DNA, 80 bp, Homo sapiens
tagggagatctgtggaccactggggatcagtgtcagcaccatgtcctgaccctgactggctttctacccagaacagtaca

SEQ ID NO: 184631 - DNA, 77 bp, Homo sapiens
atctgtggaccactggggatcagtgtcagcaccatgtcctgaccctgactggctttctacccagaacagtacaaacc

SEQ ID NO: 184632 - DNA, 79 bp, Homo sapiens
gggatcagtgtcagcaccatgtcctgaccctgactggctttctacccagaacagtacaaacccggcacagcaaatctgc

SEQ ID NO: 184633 - DNA, 78 bp, Homo sapiens
agtgtcagcaccatgtcctgaccctgactggctttctacccagaacagtacaaacccggcacagcaaatctgctacta

SEQ ID NO: 184634 - DNA, 76 bp, Homo sapiens
atgtcctgaccctgactggctttctacccagaacagtacaaacccggcacagcaaatctgctactatgccctccta

SEQ ID NO: 184635 - DNA, 73 bp, Homo sapiens
accctgactggctttctacccagaacagtacaaacccggcacagcaaatctgctactatgccctcctagcctt

SEQ ID NO: 184636 - DNA, 75 bp, Homo sapiens
tttctacccagaacagtacaaacccggcacagcaaatctgctactatgccctcctagcctttgccagcatttaaa

SEQ ID NO: 184637 - DNA, 77 bp, Homo sapiens
agaacagtacaaacccggcacagcaaatctgctactatgccctcctagcctttgccagcatttaaactagagacatc

SEQ ID NO: 184638 - DNA, 79 bp, Homo sapiens
acaaacccggcacagcaaatctgctactatgccctcctagcctttgccagcatttaaactagagacatctgtgggcagc

SEQ ID NO: 184639 - DNA, 78 bp, Homo sapiens
caaatctgctactatgccctcctagcctttgccagcatttaaactagagacatctgtgggcagcccaagggacagaaa

SEQ ID NO: 184640 - DNA, 75 bp, Homo sapiens
ctactatgccctcctagcctttgccagcatttaaactagagacatctgtgggcagcccaagggacagaaagaaaa

SEQ ID NO: 184641 - DNA, 76 bp, Homo sapiens
tgccagcatttaaactagagacatctgtgggcagcccaagggacagaaagaaaagtgttctaagattgccagttat

SEQ ID NO: 184642 - DNA, 71 bp, Homo sapiens
atttaaactagagacatctgtgggcagcccaagggacagaaagaaaagtgttctaagattgccagttattt

SEQ ID NO: 184643 - DNA, 74 bp, Homo sapiens
acatctgtgggcagcccaagggacagaaagaaaagtgttctaagattgccagttatttttagccagatagcttc

SEQ ID NO: 184644 - DNA, 74 bp, Homo sapiens
gacagaaagaaaagtgttctaagattgccagttatttttagccagatagcttccttgaccattgcctagaaata

SEQ ID NO: 184645 - DNA, 72 bp, Homo sapiens
aaaagtgttctaagattgccagttatttttagccagatagcttccttgaccattgcctagaaatacggtcaa

SEQ ID NO: 184646 - DNA, 75 bp, Homo sapiens
ttctaagattgccagttatttttagccagatagcttccttgaccattgcctagaaatacggtcaagccaatgtaa

SEQ ID NO: 184647 - DNA, 73 bp, Homo sapiens
agttatttttagccagatagcttccttgaccattgcctagaaatacggtcaagccaatgtaaggagattattg

SEQ ID NO: 184648 - DNA, 78 bp, Homo sapiens
ttagccagatagcttccttgaccattgcctagaaatacggtcaagccaatgtaaggagattattgggactgatcatta

SEQ ID NO: 184649 - DNA, 75 bp, Homo sapiens
ttccttgaccattgcctagaaatacggtcaagccaatgtaaggagattattgggactgatcattactaataagta

SEQ ID NO: 184650 - DNA, 73 bp, Homo sapiens
attgcctagaaatacggtcaagccaatgtaaggagattattgggactgatcattactaataagtaactgaaaa

SEQ ID NO: 184651 - DNA, 71 bp, Homo sapiens
agaaatacggtcaagccaatgtaaggagattattgggactgatcattactaataagtaactgaaaaaaggc

SEQ ID NO: 184652 - DNA, 71 bp, Homo sapiens
ggtcaagccaatgtaaggagattattgggactgatcattactaataagtaactgaaaaaaggccaaaatta

SEQ ID NO: 184653 - DNA, 68 bp, Homo sapiens
atgtaaggagattattgggactgatcattactaataagtaactgaaaaaaggccaaaattagaaaaaa

SEQ ID NO: 184654 - DNA, 68 bp, Homo sapiens
ctgatcattactaataagtaactgaaaaaaggccaaaattagaaaaaatagtgaagtaaggagataac

SEQ ID NO: 184655 - DNA, 66 bp, Homo sapiens
taagtaactgaaaaaaggccaaaattagaaaaaatagtgaagtaaggagataacttcaaagtaatg

SEQ ID NO: 184656 - DNA, 66 bp, Homo sapiens
aaaaaggccaaaattagaaaaaatagtgaagtaaggagataacttcaaagtaatgtttattcttca

SEQ ID NO: 184657 - DNA, 66 bp, Homo sapiens
gccaaaattagaaaaaatagtgaagtaaggagataacttcaaagtaatgtttattcttcaaaaacg

SEQ ID NO: 184658 - DNA, 68 bp, Homo sapiens
gtgaagtaaggagataacttcaaagtaatgtttattcttcaaaaacgttatcaaatacttttgaatta

SEQ ID NO: 184659 - DNA, 68 bp, Homo sapiens
gtaatgtttattcttcaaaaacgttatcaaatacttttgaattagtaacaaccctgtcactagaagtg

SEQ ID NO: 184660 - DNA, 67 bp, Homo sapiens
tcttcaaaaacgttatcaaatacttttgaattagtaacaaccctgtcactagaagtgtaaggtttac

SEQ ID NO: 184661 - DNA, 67 bp, Homo sapiens
aacgttatcaaatacttttgaattagtaacaaccctgtcactagaagtgtaaggtttactacagagg

SEQ ID NO: 184662 - DNA, 68 bp, Homo sapiens
tacttttgaattagtaacaaccctgtcactagaagtgtaaggtttactacagaggttaaaatagataa

SEQ ID NO: 184663 - DNA, 69 bp, Homo sapiens
ttagtaacaaccctgtcactagaagtgtaaggtttactacagaggttaaaatagataatctgaaaatcc

SEQ ID NO: 184664 - DNA, 69 bp, Homo sapiens
acaaccctgtcactagaagtgtaaggtttactacagaggttaaaatagataatctgaaaatcccttcca

SEQ ID NO: 184665 - DNA, 71 bp, Homo sapiens
cactagaagtgtaaggtttactacagaggttaaaatagataatctgaaaatcccttccactgctgaaaatc

SEQ ID NO: 184666 - DNA, 71 bp, Homo sapiens
gtaaggtttactacagaggttaaaatagataatctgaaaatcccttccactgctgaaaatctgtaattata

SEQ ID NO: 184667 - DNA, 69 bp, Homo sapiens
cagaggttaaaatagataatctgaaaatcccttccactgctgaaaatctgtaattataagtttaaaccc

SEQ ID NO: 184668 - DNA, 70 bp, Homo sapiens
atagataatctgaaaatcccttccactgctgaaaatctgtaattataagtttaaaccccaatatcaaaaa

SEQ ID NO: 184669 - DNA, 65 bp, Homo sapiens
ccttccactgctgaaaatctgtaattataagtttaaaccccaatatcaaaaaacaccttttaggg

SEQ ID NO: 184670 - DNA, 66 bp, Homo sapiens
gctgaaaatctgtaattataagtttaaaccccaatatcaaaaaacaccttttaggggaattagatg

SEQ ID NO: 184671 - DNA, 73 bp, Homo sapiens
aatatcaaaaaacaccttttaggggaattagatggtcagatgctctcttaggcatccacaaaggataatccta

SEQ ID NO: 184672 - DNA, 72 bp, Homo sapiens
aaaacaccttttaggggaattagatggtcagatgctctcttaggcatccacaaaggataatcctacccatta

SEQ ID NO: 184673 - DNA, 73 bp, Homo sapiens
ttttaggggaattagatggtcagatgctctcttaggcatccacaaaggataatcctacccattagcaaaaact

SEQ ID NO: 184674 - DNA, 78 bp, Homo sapiens
attagatggtcagatgctctcttaggcatccacaaaggataatcctacccattagcaaaaacttgtagtgaatgaaga

SEQ ID NO: 184675 - DNA, 77 bp, Homo sapiens
agatgctctcttaggcatccacaaaggataatcctacccattagcaaaaacttgtagtgaatgaagatcacataccc

SEQ ID NO: 184676 - DNA, 71 bp, Homo sapiens
aaaggataatcctacccattagcaaaaacttgtagtgaatgaagatcacataccccaccccttccaaatca

SEQ ID NO: 184677 - DNA, 74 bp, Homo sapiens
tacccattagcaaaaacttgtagtgaatgaagatcacataccccaccccttccaaatcagtggctaaacaatga

SEQ ID NO: 184678 - DNA, 73 bp, Homo sapiens
attagcaaaaacttgtagtgaatgaagatcacataccccaccccttccaaatcagtggctaaacaatgaagaa

SEQ ID NO: 184679 - DNA, 72 bp, Homo sapiens
acttgtagtgaatgaagatcacataccccaccccttccaaatcagtggctaaacaatgaagaaaaatattaa

SEQ ID NO: 184680 - DNA, 72 bp, Homo sapiens
gaagatcacataccccaccccttccaaatcagtggctaaacaatgaagaaaaatattaaatattctctttca

SEQ ID NO: 184681 - DNA, 69 bp, Homo sapiens
ccccaccccttccaaatcagtggctaaacaatgaagaaaaatattaaatattctctttcaaaatgctac

SEQ ID NO: 184682 - DNA, 71 bp, Homo sapiens
cccttccaaatcagtggctaaacaatgaagaaaaatattaaatattctctttcaaaatgctactgcctggt

SEQ ID NO: 184683 - DNA, 72 bp, Homo sapiens
atcagtggctaaacaatgaagaaaaatattaaatattctctttcaaaatgctactgcctggttttacaggta

SEQ ID NO: 184684 - DNA, 72 bp, Homo sapiens
caatgaagaaaaatattaaatattctctttcaaaatgctactgcctggttttacaggtatacacaaatgtta

SEQ ID NO: 184685 - DNA, 71 bp, Homo sapiens
aatattaaatattctctttcaaaatgctactgcctggttttacaggtatacacaaatgttaaaatttatca

SEQ ID NO: 184686 - DNA, 71 bp, Homo sapiens
ttctctttcaaaatgctactgcctggttttacaggtatacacaaatgttaaaatttatcaaattatacatt

SEQ ID NO: 184687 - DNA, 72 bp, Homo sapiens
caaaatgctactgcctggttttacaggtatacacaaatgttaaaatttatcaaattatacattttacatatg

SEQ ID NO: 184688 - DNA, 72 bp, Homo sapiens
ctactgcctggttttacaggtatacacaaatgttaaaatttatcaaattatacattttacatatgtgtagta

SEQ ID NO: 184689 - DNA, 74 bp, Homo sapiens
tttacaggtatacacaaatgttaaaatttatcaaattatacattttacatatgtgtagtatattgttacatcat

SEQ ID NO: 184690 - DNA, 73 bp, Homo sapiens
aaatttatcaaattatacattttacatatgtgtagtatattgttacatcattttgcctcaataaaactggtta

SEQ ID NO: 184691 - DNA, 73 bp, Homo sapiens
tttacatatgtgtagtatattgttacatcattttgcctcaataaaactggttaaaaaaatactatcaccagcc

SEQ ID NO: 184692 - DNA, 74 bp, Homo sapiens
tgtagtatattgttacatcattttgcctcaataaaactggttaaaaaaatactatcaccagccttctatcaaca

SEQ ID NO: 184693 - DNA, 72 bp, Homo sapiens
catcattttgcctcaataaaactggttaaaaaaatactatcaccagccttctatcaacataaacatgttact

SEQ ID NO: 184694 - DNA, 74 bp, Homo sapiens
caataaaactggttaaaaaaatactatcaccagccttctatcaacataaacatgttacttcattccaatgatca

SEQ ID NO: 184695 - DNA, 75 bp, Homo sapiens
ggttaaaaaaatactatcaccagccttctatcaacataaacatgttacttcattccaatgatcaaaacatcaaca

SEQ ID NO: 184696 - DNA, 79 bp, Homo sapiens
atactatcaccagccttctatcaacataaacatgttacttcattccaatgatcaaaacatcaacattatagccctaata

SEQ ID NO: 184697 - DNA, 77 bp, Homo sapiens
caccagccttctatcaacataaacatgttacttcattccaatgatcaaaacatcaacattatagccctaatattttc

SEQ ID NO: 184698 - DNA, 75 bp, Homo sapiens
ctatcaacataaacatgttacttcattccaatgatcaaaacatcaacattatagccctaatattttctaagtttc

SEQ ID NO: 184699 - DNA, 72 bp, Homo sapiens
aaacatgttacttcattccaatgatcaaaacatcaacattatagccctaatattttctaagtttctctttta

SEQ ID NO: 184700 - DNA, 70 bp, Homo sapiens
cttcattccaatgatcaaaacatcaacattatagccctaatattttctaagtttctcttttaaatttatt

SEQ ID NO: 184701 - DNA, 71 bp, Homo sapiens
taaatttattttcccttgtattcaagttttattatattcttctcactttcctaagtcatcactcattggaa

SEQ ID NO: 184702 - DNA, 75 bp, Homo sapiens
ttcccttgtattcaagttttattatattcttctcactttcctaagtcatcactcattggaaagcatagataccaa

SEQ ID NO: 184703 - DNA, 77 bp, Homo sapiens
attatattcttctcactttcctaagtcatcactcattggaaagcatagataccaagctttgatgagcaacaaaattt

SEQ ID NO: 184704 - DNA, 81 bp, Homo sapiens
ttcttctcactttcctaagtcatcactcattggaaagcatagataccaagctttgatgagcaacaaaattttctgctgcta

SEQ ID NO: 184705 - DNA, 81 bp, Homo sapiens
ctttcctaagtcatcactcattggaaagcatagataccaagctttgatgagcaacaaaattttctgctgctattcaaatga

SEQ ID NO: 184706 - DNA, 81 bp, Homo sapiens
actcattggaaagcatagataccaagctttgatgagcaacaaaattttctgctgctattcaaatgacccattataatgcta

SEQ ID NO: 184707 - DNA, 81 bp, Homo sapiens
gaaagcatagataccaagctttgatgagcaacaaaattttctgctgctattcaaatgacccattataatgctatggaaata

SEQ ID NO: 184708 - DNA, 79 bp, Homo sapiens
agataccaagctttgatgagcaacaaaattttctgctgctattcaaatgacccattataatgctatggaaatatctttc

SEQ ID NO: 184709 - DNA, 74 bp, Homo sapiens
gcaacaaaattttctgctgctattcaaatgacccattataatgctatggaaatatctttcctttaacaacttaa

SEQ ID NO: 184710 - DNA, 75 bp, Homo sapiens
tttctgctgctattcaaatgacccattataatgctatggaaatatctttcctttaacaacttaaataacagccta

SEQ ID NO: 184711 - DNA, 74 bp, Homo sapiens
tcaaatgacccattataatgctatggaaatatctttcctttaacaacttaaataacagcctaaaattctgcaga

SEQ ID NO: 184712 - DNA, 71 bp, Homo sapiens
acccattataatgctatggaaatatctttcctttaacaacttaaataacagcctaaaattctgcagattcc

SEQ ID NO: 184713 - DNA, 72 bp, Homo sapiens
gctatggaaatatctttcctttaacaacttaaataacagcctaaaattctgcagattccttaatgacttcat

SEQ ID NO: 184714 - DNA, 70 bp, Homo sapiens
ggaaatatctttcctttaacaacttaaataacagcctaaaattctgcagattccttaatgacttcatttc

SEQ ID NO: 184715 - DNA, 69 bp, Homo sapiens
atctttcctttaacaacttaaataacagcctaaaattctgcagattccttaatgacttcatttcttcct

SEQ ID NO: 184716 - DNA, 69 bp, Homo sapiens
ctttcctttaacaacttaaataacagcctaaaattctgcagattccttaatgacttcatttcttccttc

SEQ ID NO: 184717 - DNA, 72 bp, Homo sapiens
caacttaaataacagcctaaaattctgcagattccttaatgacttcatttcttccttctcattagttaagga

SEQ ID NO: 184718 - DNA, 74 bp, Homo sapiens
ataacagcctaaaattctgcagattccttaatgacttcatttcttccttctcattagttaaggaaatgcatttc

SEQ ID NO: 184719 - DNA, 76 bp, Homo sapiens
aaattctgcagattccttaatgacttcatttcttccttctcattagttaaggaaatgcatttctaggccagatcta

SEQ ID NO: 184720 - DNA, 75 bp, Homo sapiens
acttcatttcttccttctcattagttaaggaaatgcatttctaggccagatctacctctgtgctaccattttatg

SEQ ID NO: 184721 - DNA, 79 bp, Homo sapiens
ttccttctcattagttaaggaaatgcatttctaggccagatctacctctgtgctaccattttatggctcagcattcatt

SEQ ID NO: 184722 - DNA, 77 bp, Homo sapiens
attagttaaggaaatgcatttctaggccagatctacctctgtgctaccattttatggctcagcattcattttcttcc

SEQ ID NO: 184723 - DNA, 76 bp, Homo sapiens
tacctctgtgctaccattttatggctcagcattcattttcttccctcattctttattacaaagctatccaaaataa

SEQ ID NO: 184724 - DNA, 76 bp, Homo sapiens
gtgctaccattttatggctcagcattcattttcttccctcattctttattacaaagctatccaaaataaaatctga

SEQ ID NO: 184725 - DNA, 73 bp, Homo sapiens
atggctcagcattcattttcttccctcattctttattacaaagctatccaaaataaaatctgaaaataaggga

SEQ ID NO: 184726 - DNA, 70 bp, Homo sapiens
gcattcattttcttccctcattctttattacaaagctatccaaaataaaatctgaaaataagggaaagga

SEQ ID NO: 184727 - DNA, 67 bp, Homo sapiens
tttattacaaagctatccaaaataaaatctgaaaataagggaaaggaagaaagccagtaagaactac

SEQ ID NO: 184728 - DNA, 71 bp, Homo sapiens
caaagctatccaaaataaaatctgaaaataagggaaaggaagaaagccagtaagaactactcacatcagat

SEQ ID NO: 184729 - DNA, 70 bp, Homo sapiens
ccaaaataaaatctgaaaataagggaaaggaagaaagccagtaagaactactcacatcagatttagagga

SEQ ID NO: 184730 - DNA, 73 bp, Homo sapiens
aatctgaaaataagggaaaggaagaaagccagtaagaactactcacatcagatttagaggatatattctcctc

SEQ ID NO: 184731 - DNA, 79 bp, Homo sapiens
gaaaggaagaaagccagtaagaactactcacatcagatttagaggatatattctcctccacatctgaatcattgggatc

SEQ ID NO: 184732 - DNA, 83 bp, Homo sapiens
aagccagtaagaactactcacatcagatttagaggatatattctcctccacatctgaatcattgggatccacaatatcatcaa

SEQ ID NO: 184733 - DNA, 83 bp, Homo sapiens
agtaagaactactcacatcagatttagaggatatattctcctccacatctgaatcattgggatccacaatatcatcaaatggc

SEQ ID NO: 184734 - DNA, 81 bp, Homo sapiens
catcagatttagaggatatattctcctccacatctgaatcattgggatccacaatatcatcaaatggcggtaacgttgatt

SEQ ID NO: 184735 - DNA, 78 bp, Homo sapiens
atttagaggatatattctcctccacatctgaatcattgggatccacaatatcatcaaatggcggtaacgttgatttct

SEQ ID NO: 184736 - DNA, 81 bp, Homo sapiens
atatattctcctccacatctgaatcattgggatccacaatatcatcaaatggcggtaacgttgatttcttcttctctgatg

SEQ ID NO: 184737 - DNA, 80 bp, Homo sapiens
acatctgaatcattgggatccacaatatcatcaaatggcggtaacgttgatttcttcttctctgatgtctcactttcaat

SEQ ID NO: 184738 - DNA, 75 bp, Homo sapiens
atccacaatatcatcaaatggcggtaacgttgatttcttcttctctgatgtctcactttcaattttgacctttcc

SEQ ID NO: 184739 - DNA, 76 bp, Homo sapiens
atcatcaaatggcggtaacgttgatttcttcttctctgatgtctcactttcaattttgacctttcccatcttgaca

SEQ ID NO: 184740 - DNA, 75 bp, Homo sapiens
gtaacgttgatttcttcttctctgatgtctcactttcaattttgacctttcccatcttgacatgagatttatctt

SEQ ID NO: 184741 - DNA, 76 bp, Homo sapiens
gatttcttcttctctgatgtctcactttcaattttgacctttcccatcttgacatgagatttatcttttatctgtt

SEQ ID NO: 184742 - DNA, 75 bp, Homo sapiens
cactttcaattttgacctttcccatcttgacatgagatttatcttttatctgttttttgtcagcagaacaagtga

SEQ ID NO: 184743 - DNA, 76 bp, Homo sapiens
attttgacctttcccatcttgacatgagatttatcttttatctgttttttgtcagcagaacaagtgagtatcagtg

SEQ ID NO: 184744 - DNA, 79 bp, Homo sapiens
ccatcttgacatgagatttatcttttatctgttttttgtcagcagaacaagtgagtatcagtggtggtgcgctagaaaa

SEQ ID NO: 184745 - DNA, 74 bp, Homo sapiens
atgagatttatcttttatctgttttttgtcagcagaacaagtgagtatcagtggtggtgcgctagaaaaacttt

SEQ ID NO: 184746 - DNA, 72 bp, Homo sapiens
atttatcttttatctgttttttgtcagcagaacaagtgagtatcagtggtggtgcgctagaaaaacttttaa

SEQ ID NO: 184747 - DNA, 73 bp, Homo sapiens
agcagaacaagtgagtatcagtggtggtgcgctagaaaaacttttaaataaagcctctgagctactctttttc

SEQ ID NO: 184748 - DNA, 69 bp, Homo sapiens
aagtgagtatcagtggtggtgcgctagaaaaacttttaaataaagcctctgagctactctttttccttt

SEQ ID NO: 184749 - DNA, 69 bp, Homo sapiens
tctttttcctttttttggctgagagttcttcagaatctgaaatgggcggccttttactaggagccttct

SEQ ID NO: 184750 - DNA, 73 bp, Homo sapiens
ttttttggctgagagttcttcagaatctgaaatgggcggccttttactaggagccttcttatcttgtccactg

SEQ ID NO: 184751 - DNA, 77 bp, Homo sapiens
tgagagttcttcagaatctgaaatgggcggccttttactaggagccttcttatcttgtccactggtgatggtgagta

SEQ ID NO: 184752 - DNA, 74 bp, Homo sapiens
cagaatctgaaatgggcggccttttactaggagccttcttatcttgtccactggtgatggtgagtaagttacta

SEQ ID NO: 184753 - DNA, 71 bp, Homo sapiens
aaatgggcggccttttactaggagccttcttatcttgtccactggtgatggtgagtaagttactatctggt

SEQ ID NO: 184754 - DNA, 71 bp, Homo sapiens
cttttactaggagccttcttatcttgtccactggtgatggtgagtaagttactatctggttttggctcttt

SEQ ID NO: 184755 - DNA, 72 bp, Homo sapiens
ttcttatcttgtccactggtgatggtgagtaagttactatctggttttggctcttttgacatgggtttaggt

SEQ ID NO: 184756 - DNA, 71 bp, Homo sapiens
actggtgatggtgagtaagttactatctggttttggctcttttgacatgggtttaggttccttgaaggcca

SEQ ID NO: 184757 - DNA, 70 bp, Homo sapiens
atggtgagtaagttactatctggttttggctcttttgacatgggtttaggttccttgaaggccatcttag

SEQ ID NO: 184758 - DNA, 69 bp, Homo sapiens
ttactatctggttttggctcttttgacatgggtttaggttccttgaaggccatcttaggaactattttc

SEQ ID NO: 184759 - DNA, 68 bp, Homo sapiens
tggttttggctcttttgacatgggtttaggttccttgaaggccatcttaggaactattttctcttctt

SEQ ID NO: 184760 - DNA, 68 bp, Homo sapiens
ttttgacatgggtttaggttccttgaaggccatcttaggaactattttctcttctttcagtggtttat

SEQ ID NO: 184761 - DNA, 66 bp, Homo sapiens
atgggtttaggttccttgaaggccatcttaggaactattttctcttctttcagtggtttattttct

SEQ ID NO: 184762 - DNA, 66 bp, Homo sapiens
tttaggttccttgaaggccatcttaggaactattttctcttctttcagtggtttattttctttggg

SEQ ID NO: 184763 - DNA, 66 bp, Homo sapiens
gttccttgaaggccatcttaggaactattttctcttctttcagtggtttattttctttgggtttct

SEQ ID NO: 184764 - DNA, 67 bp, Homo sapiens
gaaggccatcttaggaactattttctcttctttcagtggtttattttctttgggtttcttagaggat

SEQ ID NO: 184765 - DNA, 67 bp, Homo sapiens
ggccatcttaggaactattttctcttctttcagtggtttattttctttgggtttcttagaggattct

SEQ ID NO: 184766 - DNA, 66 bp, Homo sapiens
ggaactattttctcttctttcagtggtttattttctttgggtttcttagaggattctttggaagat

SEQ ID NO: 184767 - DNA, 69 bp, Homo sapiens
tctcttctttcagtggtttattttctttgggtttcttagaggattctttggaagatttgttgtgatccc

SEQ ID NO: 184768 - DNA, 69 bp, Homo sapiens
tctttcagtggtttattttctttgggtttcttagaggattctttggaagatttgttgtgatccctggaa

SEQ ID NO: 184769 - DNA, 67 bp, Homo sapiens
attttctttgggtttcttagaggattctttggaagatttgttgtgatccctggaaggttctttgaag

SEQ ID NO: 184770 - DNA, 70 bp, Homo sapiens
gtttcttagaggattctttggaagatttgttgtgatccctggaaggttctttgaaggcacttttatgttc

SEQ ID NO: 184771 - DNA, 72 bp, Homo sapiens
ttagaggattctttggaagatttgttgtgatccctggaaggttctttgaaggcacttttatgttctctggag

SEQ ID NO: 184772 - DNA, 71 bp, Homo sapiens
tttggaagatttgttgtgatccctggaaggttctttgaaggcacttttatgttctctggagtctttagaag

SEQ ID NO: 184773 - DNA, 69 bp, Homo sapiens
tttgttgtgatccctggaaggttctttgaaggcacttttatgttctctggagtctttagaaggtttttc

SEQ ID NO: 184774 - DNA, 70 bp, Homo sapiens
tggaaggttctttgaaggcacttttatgttctctggagtctttagaaggtttttccttgtgctccttcat

SEQ ID NO: 184775 - DNA, 69 bp, Homo sapiens
gttctttgaaggcacttttatgttctctggagtctttagaaggtttttccttgtgctccttcattaatt

SEQ ID NO: 184776 - DNA, 70 bp, Homo sapiens
cttttatgttctctggagtctttagaaggtttttccttgtgctccttcattaatttgtgaggctttgaaa

SEQ ID NO: 184777 - DNA, 70 bp, Homo sapiens
ttctctggagtctttagaaggtttttccttgtgctccttcattaatttgtgaggctttgaaaaactggta

SEQ ID NO: 184778 - DNA, 69 bp, Homo sapiens
agtctttagaaggtttttccttgtgctccttcattaatttgtgaggctttgaaaaactggtactactgc

SEQ ID NO: 184779 - DNA, 73 bp, Homo sapiens
gctgctgctgctggtatgaatactcctattagggtcctgcaaaaaggggagaagaaaatgaaactcccaaaac

SEQ ID NO: 184780 - DNA, 67 bp, Homo sapiens
ctggtatgaatactcctattagggtcctgcaaaaaggggagaagaaaatgaaactcccaaaactaaa

SEQ ID NO: 184781 - DNA, 68 bp, Homo sapiens
atgaatactcctattagggtcctgcaaaaaggggagaagaaaatgaaactcccaaaactaaatagcaa

SEQ ID NO: 184782 - DNA, 69 bp, Homo sapiens
tattagggtcctgcaaaaaggggagaagaaaatgaaactcccaaaactaaatagcaatgaagagtcaaa

SEQ ID NO: 184783 - DNA, 72 bp, Homo sapiens
ctgcaaaaaggggagaagaaaatgaaactcccaaaactaaatagcaatgaagagtcaaaagagatctacata

SEQ ID NO: 184784 - DNA, 73 bp, Homo sapiens
ggagaagaaaatgaaactcccaaaactaaatagcaatgaagagtcaaaagagatctacataaaatgatccttc

SEQ ID NO: 184785 - DNA, 75 bp, Homo sapiens
gaaactcccaaaactaaatagcaatgaagagtcaaaagagatctacataaaatgatccttctttgattcctctca

SEQ ID NO: 184786 - DNA, 77 bp, Homo sapiens
cccaaaactaaatagcaatgaagagtcaaaagagatctacataaaatgatccttctttgattcctctcaagctatca

SEQ ID NO: 184787 - DNA, 78 bp, Homo sapiens
aatagcaatgaagagtcaaaagagatctacataaaatgatccttctttgattcctctcaagctatcattaaaatacca

SEQ ID NO: 184788 - DNA, 74 bp, Homo sapiens
aagagtcaaaagagatctacataaaatgatccttctttgattcctctcaagctatcattaaaataccaaaaata

SEQ ID NO: 184789 - DNA, 74 bp, Homo sapiens
agagatctacataaaatgatccttctttgattcctctcaagctatcattaaaataccaaaaatattttaatata

SEQ ID NO: 184790 - DNA, 69 bp, Homo sapiens
atgatccttctttgattcctctcaagctatcattaaaataccaaaaatattttaatataaaccaaaaac

SEQ ID NO: 184791 - DNA, 68 bp, Homo sapiens
ccttctttgattcctctcaagctatcattaaaataccaaaaatattttaatataaaccaaaaaccaca

SEQ ID NO: 184792 - DNA, 72 bp, Homo sapiens
tttaatataaaccaaaaaccacaatataacaggtgagaatagtgtatgtgagaaacaggtgagagtaggtta

SEQ ID NO: 184793 - DNA, 76 bp, Homo sapiens
ccacaatataacaggtgagaatagtgtatgtgagaaacaggtgagagtaggttattatcaaataatttaatgagga

SEQ ID NO: 184794 - DNA, 75 bp, Homo sapiens
ataacaggtgagaatagtgtatgtgagaaacaggtgagagtaggttattatcaaataatttaatgaggaaagctg

SEQ ID NO: 184795 - DNA, 75 bp, Homo sapiens
tagtgtatgtgagaaacaggtgagagtaggttattatcaaataatttaatgaggaaagctgttttcttaatcatc

SEQ ID NO: 184796 - DNA, 76 bp, Homo sapiens
gagaaacaggtgagagtaggttattatcaaataatttaatgaggaaagctgttttcttaatcatctgaagcatgga

SEQ ID NO: 184797 - DNA, 74 bp, Homo sapiens
caggtgagagtaggttattatcaaataatttaatgaggaaagctgttttcttaatcatctgaagcatggagttt

SEQ ID NO: 184798 - DNA, 72 bp, Homo sapiens
taggttattatcaaataatttaatgaggaaagctgttttcttaatcatctgaagcatggagttttaaaacat

SEQ ID NO: 184799 - DNA, 72 bp, Homo sapiens
gaggaaagctgttttcttaatcatctgaagcatggagttttaaaacatttcaattcaacaaatgttaactac

SEQ ID NO: 184800 - DNA, 74 bp, Homo sapiens
gctgttttcttaatcatctgaagcatggagttttaaaacatttcaattcaacaaatgttaactactgcttgtcc

SEQ ID NO: 184801 - DNA, 75 bp, Homo sapiens
catctgaagcatggagttttaaaacatttcaattcaacaaatgttaactactgcttgtcctagaagatacaagga

SEQ ID NO: 184802 - DNA, 74 bp, Homo sapiens
gaagcatggagttttaaaacatttcaattcaacaaatgttaactactgcttgtcctagaagatacaaggatgaa

SEQ ID NO: 184803 - DNA, 73 bp, Homo sapiens
aaaacatttcaattcaacaaatgttaactactgcttgtcctagaagatacaaggatgaataacacatggaccc

SEQ ID NO: 184804 - DNA, 72 bp, Homo sapiens
aattcaacaaatgttaactactgcttgtcctagaagatacaaggatgaataacacatggaccccacccttaa

SEQ ID NO: 184805 - DNA, 73 bp, Homo sapiens
aaatgttaactactgcttgtcctagaagatacaaggatgaataacacatggaccccacccttaataactatga

SEQ ID NO: 184806 - DNA, 78 bp, Homo sapiens
tactgcttgtcctagaagatacaaggatgaataacacatggaccccacccttaataactatgacgtatctatgattga

SEQ ID NO: 184807 - DNA, 79 bp, Homo sapiens
tagaagatacaaggatgaataacacatggaccccacccttaataactatgacgtatctatgattgatagatgttgacaa

SEQ ID NO: 184808 - DNA, 75 bp, Homo sapiens
aaggatgaataacacatggaccccacccttaataactatgacgtatctatgattgatagatgttgacaaccaaaa

SEQ ID NO: 184809 - DNA, 73 bp, Homo sapiens
aataacacatggaccccacccttaataactatgacgtatctatgattgatagatgttgacaaccaaaagacgg

SEQ ID NO: 184810 - DNA, 71 bp, Homo sapiens
ccccacccttaataactatgacgtatctatgattgatagatgttgacaaccaaaagacgggaactattaat

SEQ ID NO: 184811 - DNA, 73 bp, Homo sapiens
cccttaataactatgacgtatctatgattgatagatgttgacaaccaaaagacgggaactattaattctgttg

SEQ ID NO: 184812 - DNA, 77 bp, Homo sapiens
tatgacgtatctatgattgatagatgttgacaaccaaaagacgggaactattaattctgttgggagcatggggcgaa

SEQ ID NO: 184813 - DNA, 71 bp, Homo sapiens
atagatgttgacaaccaaaagacgggaactattaattctgttgggagcatggggcgaagaataattcaaaa

SEQ ID NO: 184814 - DNA, 69 bp, Homo sapiens
acaaccaaaagacgggaactattaattctgttgggagcatggggcgaagaataattcaaaaattcataa

SEQ ID NO: 184815 - DNA, 72 bp, Homo sapiens
ttaattctgttgggagcatggggcgaagaataattcaaaaattcataaagaagtaacatctgaattaggtcc

SEQ ID NO: 184816 - DNA, 70 bp, Homo sapiens
gggcgaagaataattcaaaaattcataaagaagtaacatctgaattaggtcctggaggataaacaggtag

SEQ ID NO: 184817 - DNA, 71 bp, Homo sapiens
tcaaaaattcataaagaagtaacatctgaattaggtcctggaggataaacaggtagttactagaatgaaaa

SEQ ID NO: 184818 - DNA, 71 bp, Homo sapiens
aattcataaagaagtaacatctgaattaggtcctggaggataaacaggtagttactagaatgaaaagaatg

SEQ ID NO: 184819 - DNA, 68 bp, Homo sapiens
attaggtcctggaggataaacaggtagttactagaatgaaaagaatggaaaggtacttaagagaccaa

SEQ ID NO: 184820 - DNA, 69 bp, Homo sapiens
gaggataaacaggtagttactagaatgaaaagaatggaaaggtacttaagagaccaaggaccagaataa

SEQ ID NO: 184821 - DNA, 67 bp, Homo sapiens
aaacaggtagttactagaatgaaaagaatggaaaggtacttaagagaccaaggaccagaataaacta

SEQ ID NO: 184822 - DNA, 69 bp, Homo sapiens
tagaatgaaaagaatggaaaggtacttaagagaccaaggaccagaataaactaaaacaacagggagcaa

SEQ ID NO: 184823 - DNA, 68 bp, Homo sapiens
aaaagaatggaaaggtacttaagagaccaaggaccagaataaactaaaacaacagggagcaaagcaca

SEQ ID NO: 184824 - DNA, 69 bp, Homo sapiens
aaaggtacttaagagaccaaggaccagaataaactaaaacaacagggagcaaagcacagattgtatttg

SEQ ID NO: 184825 - DNA, 70 bp, Homo sapiens
ttaagagaccaaggaccagaataaactaaaacaacagggagcaaagcacagattgtatttggggaacacc

SEQ ID NO: 184826 - DNA, 73 bp, Homo sapiens
ataaactaaaacaacagggagcaaagcacagattgtatttggggaacacccagctatagaacaagattgagaa

SEQ ID NO: 184827 - DNA, 74 bp, Homo sapiens
aacagggagcaaagcacagattgtatttggggaacacccagctatagaacaagattgagaaggaggcagaaaaa

SEQ ID NO: 184828 - DNA, 77 bp, Homo sapiens
acacccagctatagaacaagattgagaaggaggcagaaaaatagcccagcttcacatagtaaggtcagattacatta

SEQ ID NO: 184829 - DNA, 75 bp, Homo sapiens
aggcagaaaaatagcccagcttcacatagtaaggtcagattacattaaatttcaaatggctttgcaatataagga

SEQ ID NO: 184830 - DNA, 73 bp, Homo sapiens
ccagcttcacatagtaaggtcagattacattaaatttcaaatggctttgcaatataaggaatcataaaacccc

SEQ ID NO: 184831 - DNA, 67 bp, Homo sapiens
gattacattaaatttcaaatggctttgcaatataaggaatcataaaacccccccaaaagaaataaag

SEQ ID NO: 184832 - DNA, 69 bp, Homo sapiens
ttcaaatggctttgcaatataaggaatcataaaacccccccaaaagaaataaagtaattctcaatttga

SEQ ID NO: 184833 - DNA, 69 bp, Homo sapiens
tggctttgcaatataaggaatcataaaacccccccaaaagaaataaagtaattctcaatttgagataaa

SEQ ID NO: 184834 - DNA, 66 bp, Homo sapiens
aatataaggaatcataaaacccccccaaaagaaataaagtaattctcaatttgagataaaaagcaa

SEQ ID NO: 184835 - DNA, 67 bp, Homo sapiens
tcataaaacccccccaaaagaaataaagtaattctcaatttgagataaaaagcaattatttttatgc

SEQ ID NO: 184836 - DNA, 71 bp, Homo sapiens
caaaagaaataaagtaattctcaatttgagataaaaagcaattatttttatgctgtataaaatttcatcag

SEQ ID NO: 184837 - DNA, 72 bp, Homo sapiens
taaagtaattctcaatttgagataaaaagcaattatttttatgctgtataaaatttcatcagttaagaactg

SEQ ID NO: 184838 - DNA, 75 bp, Homo sapiens
tcaatttgagataaaaagcaattatttttatgctgtataaaatttcatcagttaagaactgtatctctcacccac

SEQ ID NO: 184839 - DNA, 74 bp, Homo sapiens
gagataaaaagcaattatttttatgctgtataaaatttcatcagttaagaactgtatctctcacccactaggaa

SEQ ID NO: 184840 - DNA, 72 bp, Homo sapiens
agcaattatttttatgctgtataaaatttcatcagttaagaactgtatctctcacccactaggaaaaataaa

SEQ ID NO: 184841 - DNA, 72 bp, Homo sapiens
tgctgtataaaatttcatcagttaagaactgtatctctcacccactaggaaaaataaaaggaagttaataga

SEQ ID NO: 184842 - DNA, 69 bp, Homo sapiens
aatttcatcagttaagaactgtatctctcacccactaggaaaaataaaaggaagttaatagaacaaaga

SEQ ID NO: 184843 - DNA, 69 bp, Homo sapiens
tcagttaagaactgtatctctcacccactaggaaaaataaaaggaagttaatagaacaaagatttcacc

SEQ ID NO: 184844 - DNA, 69 bp, Homo sapiens
aaaggaagttaatagaacaaagatttcacctaaccatcaaatggactagaaagtctttagcaattactg

SEQ ID NO: 184845 - DNA, 74 bp, Homo sapiens
gaacaaagatttcacctaaccatcaaatggactagaaagtctttagcaattactgtattttgatcatgagaaaa

SEQ ID NO: 184846 - DNA, 75 bp, Homo sapiens
ttcacctaaccatcaaatggactagaaagtctttagcaattactgtattttgatcatgagaaaagacgtaattgc

SEQ ID NO: 184847 - DNA, 76 bp, Homo sapiens
ctaaccatcaaatggactagaaagtctttagcaattactgtattttgatcatgagaaaagacgtaattgctgccta

SEQ ID NO: 184848 - DNA, 74 bp, Homo sapiens
aatggactagaaagtctttagcaattactgtattttgatcatgagaaaagacgtaattgctgcctatttcattt

SEQ ID NO: 184849 - DNA, 76 bp, Homo sapiens
aaagtctttagcaattactgtattttgatcatgagaaaagacgtaattgctgcctatttcattttaaatatgatca

SEQ ID NO: 184850 - DNA, 76 bp, Homo sapiens
gcaattactgtattttgatcatgagaaaagacgtaattgctgcctatttcattttaaatatgatcaatttttccac

SEQ ID NO: 184851 - DNA, 80 bp, Homo sapiens
ttgatcatgagaaaagacgtaattgctgcctatttcattttaaatatgatcaatttttccactcatataaacatatcaga

SEQ ID NO: 184852 - DNA, 77 bp, Homo sapiens
atgagaaaagacgtaattgctgcctatttcattttaaatatgatcaatttttccactcatataaacatatcagaata

SEQ ID NO: 184853 - DNA, 76 bp, Homo sapiens
acgtaattgctgcctatttcattttaaatatgatcaatttttccactcatataaacatatcagaatatataaccta

SEQ ID NO: 184854 - DNA, 76 bp, Homo sapiens
gcctatttcattttaaatatgatcaatttttccactcatataaacatatcagaatatataacctatatataatctt

SEQ ID NO: 184855 - DNA, 77 bp, Homo sapiens
taaatatgatcaatttttccactcatataaacatatcagaatatataacctatatataatctttctgtttaggaaca

SEQ ID NO: 184856 - DNA, 76 bp, Homo sapiens
tgatcaatttttccactcatataaacatatcagaatatataacctatatataatctttctgtttaggaacaaaatc

SEQ ID NO: 184857 - DNA, 76 bp, Homo sapiens
tccactcatataaacatatcagaatatataacctatatataatctttctgtttaggaacaaaatctaagtccatac

SEQ ID NO: 184858 - DNA, 74 bp, Homo sapiens
catatcagaatatataacctatatataatctttctgtttaggaacaaaatctaagtccatacttaccatatttg

SEQ ID NO: 184859 - DNA, 72 bp, Homo sapiens
tatataacctatatataatctttctgtttaggaacaaaatctaagtccatacttaccatatttgtgaacctc

SEQ ID NO: 184860 - DNA, 70 bp, Homo sapiens
ctttctgtttaggaacaaaatctaagtccatacttaccatatttgtgaacctctaccattaatagtaaga

SEQ ID NO: 184861 - DNA, 70 bp, Homo sapiens
gtttaggaacaaaatctaagtccatacttaccatatttgtgaacctctaccattaatagtaagaataaga

SEQ ID NO: 184862 - DNA, 73 bp, Homo sapiens
ctaagtccatacttaccatatttgtgaacctctaccattaatagtaagaataagaaacagagaagatcctgga

SEQ ID NO: 184863 - DNA, 76 bp, Homo sapiens
tccatacttaccatatttgtgaacctctaccattaatagtaagaataagaaacagagaagatcctggacatgcaaa

SEQ ID NO: 184864 - DNA, 76 bp, Homo sapiens
tttgtgaacctctaccattaatagtaagaataagaaacagagaagatcctggacatgcaaaaatccacatcaatac

SEQ ID NO: 184865 - DNA, 75 bp, Homo sapiens
aatagtaagaataagaaacagagaagatcctggacatgcaaaaatccacatcaatactaaaagaagagctctttc

SEQ ID NO: 184866 - DNA, 75 bp, Homo sapiens
aataagaaacagagaagatcctggacatgcaaaaatccacatcaatactaaaagaagagctctttcttgcttact

SEQ ID NO: 184867 - DNA, 75 bp, Homo sapiens
agaagatcctggacatgcaaaaatccacatcaatactaaaagaagagctctttcttgcttacttccacttcctaa

SEQ ID NO: 184868 - DNA, 75 bp, Homo sapiens
tggacatgcaaaaatccacatcaatactaaaagaagagctctttcttgcttacttccacttcctaatggaaccaa

SEQ ID NO: 184869 - DNA, 71 bp, Homo sapiens
aaaatccacatcaatactaaaagaagagctctttcttgcttacttccacttcctaatggaaccaaagacaa

SEQ ID NO: 184870 - DNA, 72 bp, Homo sapiens
cacatcaatactaaaagaagagctctttcttgcttacttccacttcctaatggaaccaaagacaaataaatg

SEQ ID NO: 184871 - DNA, 70 bp, Homo sapiens
ctaaaagaagagctctttcttgcttacttccacttcctaatggaaccaaagacaaataaatgtccagatt

SEQ ID NO: 184872 - DNA, 71 bp, Homo sapiens
gctctttcttgcttacttccacttcctaatggaaccaaagacaaataaatgtccagattttcaactagaat

SEQ ID NO: 184873 - DNA, 71 bp, Homo sapiens
acttccacttcctaatggaaccaaagacaaataaatgtccagattttcaactagaatttacatcttcaggc

SEQ ID NO: 184874 - DNA, 73 bp, Homo sapiens
ataaatgtccagattttcaactagaatttacatcttcaggcttgcttattatctttcaccctaactcacccat

SEQ ID NO: 184875 - DNA, 74 bp, Homo sapiens
atttacatcttcaggcttgcttattatctttcaccctaactcacccatttaagccaatgatatgtaaaccaatc

SEQ ID NO: 184876 - DNA, 73 bp, Homo sapiens
ggcttgcttattatctttcaccctaactcacccatttaagccaatgatatgtaaaccaatcctatattcctta

SEQ ID NO: 184877 - DNA, 75 bp, Homo sapiens
atctttcaccctaactcacccatttaagccaatgatatgtaaaccaatcctatattccttaaatatctagcatga

SEQ ID NO: 184878 - DNA, 77 bp, Homo sapiens
ctaactcacccatttaagccaatgatatgtaaaccaatcctatattccttaaatatctagcatgacacaggacagta

SEQ ID NO: 184879 - DNA, 78 bp, Homo sapiens
acccatttaagccaatgatatgtaaaccaatcctatattccttaaatatctagcatgacacaggacagtaagcaagca

SEQ ID NO: 184880 - DNA, 77 bp, Homo sapiens
taaaccaatcctatattccttaaatatctagcatgacacaggacagtaagcaagcaggggctatgcttttcactaaa

SEQ ID NO: 184881 - DNA, 78 bp, Homo sapiens
tccttaaatatctagcatgacacaggacagtaagcaagcaggggctatgcttttcactaaaatgaacaatctacttat

SEQ ID NO: 184882 - DNA, 78 bp, Homo sapiens
catgacacaggacagtaagcaagcaggggctatgcttttcactaaaatgaacaatctacttattgggtatatgcaaaa

SEQ ID NO: 184883 - DNA, 74 bp, Homo sapiens
aggacagtaagcaagcaggggctatgcttttcactaaaatgaacaatctacttattgggtatatgcaaaaacaa

SEQ ID NO: 184884 - DNA, 73 bp, Homo sapiens
aagcaagcaggggctatgcttttcactaaaatgaacaatctacttattgggtatatgcaaaaacaaaacaaca

SEQ ID NO: 184885 - DNA, 75 bp, Homo sapiens
aaaatatatatataggtacatgtataagcatcacaaagtaatatccaaatgaaaacttattgttctatattagta

SEQ ID NO: 184886 - DNA, 76 bp, Homo sapiens
atatataggtacatgtataagcatcacaaagtaatatccaaatgaaaacttattgttctatattagtagaaatata

SEQ ID NO: 184887 - DNA, 73 bp, Homo sapiens
gtacatgtataagcatcacaaagtaatatccaaatgaaaacttattgttctatattagtagaaatatattttt

SEQ ID NO: 184888 - DNA, 67 bp, Homo sapiens
aagtaatatccaaatgaaaacttattgttctatattagtagaaatatattttttggtttcttaataa

SEQ ID NO: 184889 - DNA, 64 bp, Homo sapiens
caaatgaaaacttattgttctatattagtagaaatatattttttggtttcttaataaatttttt

SEQ ID NO: 184890 - DNA, 70 bp, Homo sapiens
tcttaataaatttttttttgtctcatttgctcaacaacaaaatgacatataacaaaattattccatttat

SEQ ID NO: 184891 - DNA, 69 bp, Homo sapiens
aaatttttttttgtctcatttgctcaacaacaaaatgacatataacaaaattattccatttattttctg

SEQ ID NO: 184892 - DNA, 71 bp, Homo sapiens
tttttttgtctcatttgctcaacaacaaaatgacatataacaaaattattccatttattttctggagtggt

SEQ ID NO: 184893 - DNA, 73 bp, Homo sapiens
ttgtctcatttgctcaacaacaaaatgacatataacaaaattattccatttattttctggagtggtttcaaaa

SEQ ID NO: 184894 - DNA, 72 bp, Homo sapiens
catttgctcaacaacaaaatgacatataacaaaattattccatttattttctggagtggtttcaaaattcta

SEQ ID NO: 184895 - DNA, 70 bp, Homo sapiens
caaaatgacatataacaaaattattccatttattttctggagtggtttcaaaattctaaactgaatgaag

SEQ ID NO: 184896 - DNA, 70 bp, Homo sapiens
atgacatataacaaaattattccatttattttctggagtggtttcaaaattctaaactgaatgaagttac

SEQ ID NO: 184897 - DNA, 70 bp, Homo sapiens
tataacaaaattattccatttattttctggagtggtttcaaaattctaaactgaatgaagttactaagca

SEQ ID NO: 184898 - DNA, 71 bp, Homo sapiens
tattttctggagtggtttcaaaattctaaactgaatgaagttactaagcaaagacttgtttttatgcacta

SEQ ID NO: 184899 - DNA, 71 bp, Homo sapiens
tggagtggtttcaaaattctaaactgaatgaagttactaagcaaagacttgtttttatgcactaaattaga

SEQ ID NO: 184900 - DNA, 70 bp, Homo sapiens
aaattctaaactgaatgaagttactaagcaaagacttgtttttatgcactaaattagataattccttaga

SEQ ID NO: 184901 - DNA, 73 bp, Homo sapiens
ctgaatgaagttactaagcaaagacttgtttttatgcactaaattagataattccttagaaaacatcataatc

SEQ ID NO: 184902 - DNA, 74 bp, Homo sapiens
tgaagttactaagcaaagacttgtttttatgcactaaattagataattccttagaaaacatcataatctgagat

SEQ ID NO: 184903 - DNA, 72 bp, Homo sapiens
agcaaagacttgtttttatgcactaaattagataattccttagaaaacatcataatctgagatttaaaagga

SEQ ID NO: 184904 - DNA, 71 bp, Homo sapiens
ttgtttttatgcactaaattagataattccttagaaaacatcataatctgagatttaaaaggaaaattcta

SEQ ID NO: 184905 - DNA, 72 bp, Homo sapiens
gataattccttagaaaacatcataatctgagatttaaaaggaaaattctaaagataggattcatattactaa

SEQ ID NO: 184906 - DNA, 71 bp, Homo sapiens
tcataatctgagatttaaaaggaaaattctaaagataggattcatattactaaaatttcattattttataa

SEQ ID NO: 184907 - DNA, 68 bp, Homo sapiens
taaaaggaaaattctaaagataggattcatattactaaaatttcattattttataaattctattacat

SEQ ID NO: 184908 - DNA, 74 bp, Homo sapiens
ttcatattactaaaatttcattattttataaattctattacatttcctgtcatgttaagcaatactatgaataa

SEQ ID NO: 184909 - DNA, 72 bp, Homo sapiens
tttcattattttataaattctattacatttcctgtcatgttaagcaatactatgaataattaaaataaagta

SEQ ID NO: 184910 - DNA, 73 bp, Homo sapiens
ttataaattctattacatttcctgtcatgttaagcaatactatgaataattaaaataaagtataatggacaaa

SEQ ID NO: 184911 - DNA, 73 bp, Homo sapiens
tctattacatttcctgtcatgttaagcaatactatgaataattaaaataaagtataatggacaaaccaaatta

SEQ ID NO: 184912 - DNA, 72 bp, Homo sapiens
tcctgtcatgttaagcaatactatgaataattaaaataaagtataatggacaaaccaaattaaggaacaaca

SEQ ID NO: 184913 - DNA, 70 bp, Homo sapiens
tgttaagcaatactatgaataattaaaataaagtataatggacaaaccaaattaaggaacaacattttga

SEQ ID NO: 184914 - DNA, 67 bp, Homo sapiens
taaaataaagtataatggacaaaccaaattaaggaacaacattttgaaatctaatatccttgagttt

SEQ ID NO: 184915 - DNA, 69 bp, Homo sapiens
tataatggacaaaccaaattaaggaacaacattttgaaatctaatatccttgagtttttttcaataggc

SEQ ID NO: 184916 - DNA, 69 bp, Homo sapiens
attaaggaacaacattttgaaatctaatatccttgagtttttttcaataggcttgttgacttactgatt

SEQ ID NO: 184917 - DNA, 74 bp, Homo sapiens
tgagtttttttcaataggcttgttgacttactgatttttgaaaatttgcaatcagtattctaattatggctcta

SEQ ID NO: 184918 - DNA, 77 bp, Homo sapiens
tcaataggcttgttgacttactgatttttgaaaatttgcaatcagtattctaattatggctctagaatactcaagta

SEQ ID NO: 184919 - DNA, 77 bp, Homo sapiens
ggcttgttgacttactgatttttgaaaatttgcaatcagtattctaattatggctctagaatactcaagtatcactg

SEQ ID NO: 184920 - DNA, 76 bp, Homo sapiens
ctgatttttgaaaatttgcaatcagtattctaattatggctctagaatactcaagtatcactgtttaatattcaac

SEQ ID NO: 184921 - DNA, 78 bp, Homo sapiens
tgaaaatttgcaatcagtattctaattatggctctagaatactcaagtatcactgtttaatattcaacctatatgaag

SEQ ID NO: 184922 - DNA, 76 bp, Homo sapiens
tggctctagaatactcaagtatcactgtttaatattcaacctatatgaagtattatacacatattttgtaaataag

SEQ ID NO: 184923 - DNA, 72 bp, Homo sapiens
aatactcaagtatcactgtttaatattcaacctatatgaagtattatacacatattttgtaaataagtttta

SEQ ID NO: 184924 - DNA, 73 bp, Homo sapiens
tatcactgtttaatattcaacctatatgaagtattatacacatattttgtaaataagttttaaaagcatacaa

SEQ ID NO: 184925 - DNA, 69 bp, Homo sapiens
tattcaacctatatgaagtattatacacatattttgtaaataagttttaaaagcatacaatttttaacc

SEQ ID NO: 184926 - DNA, 69 bp, Homo sapiens
ctatatgaagtattatacacatattttgtaaataagttttaaaagcatacaatttttaacctaccaaca

SEQ ID NO: 184927 - DNA, 68 bp, Homo sapiens
tatacacatattttgtaaataagttttaaaagcatacaatttttaacctaccaacatatttctaatgt

SEQ ID NO: 184928 - DNA, 66 bp, Homo sapiens
catattttgtaaataagttttaaaagcatacaatttttaacctaccaacatatttctaatgttaag

SEQ ID NO: 184929 - DNA, 64 bp, Homo sapiens
aataagttttaaaagcatacaatttttaacctaccaacatatttctaatgttaagtattaaaaa

SEQ ID NO: 184930 - DNA, 71 bp, Homo sapiens
gcatacaatttttaacctaccaacatatttctaatgttaagtattaaaaaacagcaacactccagcaccag

SEQ ID NO: 184931 - DNA, 69 bp, Homo sapiens
cctaccaacatatttctaatgttaagtattaaaaaacagcaacactccagcaccaggaaggaaaataaa

SEQ ID NO: 184932 - DNA, 70 bp, Homo sapiens
ctaatgttaagtattaaaaaacagcaacactccagcaccaggaaggaaaataaaacttctgtatagatcc

SEQ ID NO: 184933 - DNA, 72 bp, Homo sapiens
aaaaacagcaacactccagcaccaggaaggaaaataaaacttctgtatagatccttccatgatatattttta

SEQ ID NO: 184934 - DNA, 71 bp, Homo sapiens
acactccagcaccaggaaggaaaataaaacttctgtatagatccttccatgatatatttttaaaatccttc

SEQ ID NO: 184935 - DNA, 71 bp, Homo sapiens
tctgtatagatccttccatgatatatttttaaaatccttctttagaacaaactggaattctttaattcagg

SEQ ID NO: 184936 - DNA, 70 bp, Homo sapiens
gatccttccatgatatatttttaaaatccttctttagaacaaactggaattctttaattcagggtacaca

SEQ ID NO: 184937 - DNA, 70 bp, Homo sapiens
tatttttaaaatccttctttagaacaaactggaattctttaattcagggtacacattggtatctgacaca

SEQ ID NO: 184938 - DNA, 71 bp, Homo sapiens
aaaatccttctttagaacaaactggaattctttaattcagggtacacattggtatctgacacagcttcttg

SEQ ID NO: 184939 - DNA, 73 bp, Homo sapiens
ctttagaacaaactggaattctttaattcagggtacacattggtatctgacacagcttcttgtgtcataaaaa

SEQ ID NO: 184940 - DNA, 71 bp, Homo sapiens
ggaattctttaattcagggtacacattggtatctgacacagcttcttgtgtcataaaaaagttaagttcct

SEQ ID NO: 184941 - DNA, 69 bp, Homo sapiens
ctttaattcagggtacacattggtatctgacacagcttcttgtgtcataaaaaagttaagttccttttt

SEQ ID NO: 184942 - DNA, 72 bp, Homo sapiens
agggtacacattggtatctgacacagcttcttgtgtcataaaaaagttaagttccttttttaattacatgca

SEQ ID NO: 184943 - DNA, 75 bp, Homo sapiens
tggtatctgacacagcttcttgtgtcataaaaaagttaagttccttttttaattacatgcatataatgctaggta

SEQ ID NO: 184944 - DNA, 70 bp, Homo sapiens
ttgtgtcataaaaaagttaagttccttttttaattacatgcatataatgctaggtacaaaactctagaaa

SEQ ID NO: 184945 - DNA, 68 bp, Homo sapiens
aaaaagttaagttccttttttaattacatgcatataatgctaggtacaaaactctagaaatatgtctt

SEQ ID NO: 184946 - DNA, 70 bp, Homo sapiens
gttccttttttaattacatgcatataatgctaggtacaaaactctagaaatatgtctttttataatgttt

SEQ ID NO: 184947 - DNA, 75 bp, Homo sapiens
acatgcatataatgctaggtacaaaactctagaaatatgtctttttataatgttttacttctcatgttggtctgg

SEQ ID NO: 184948 - DNA, 72 bp, Homo sapiens
aatgctaggtacaaaactctagaaatatgtctttttataatgttttacttctcatgttggtctgggtattga

SEQ ID NO: 184949 - DNA, 71 bp, Homo sapiens
aggtacaaaactctagaaatatgtctttttataatgttttacttctcatgttggtctgggtattgaatgtc

SEQ ID NO: 184950 - DNA, 72 bp, Homo sapiens
ctctagaaatatgtctttttataatgttttacttctcatgttggtctgggtattgaatgtctactgttacct

SEQ ID NO: 184951 - DNA, 72 bp, Homo sapiens
tgttttacttctcatgttggtctgggtattgaatgtctactgttacctttttatccactcaataaatcttgg

SEQ ID NO: 184952 - DNA, 74 bp, Homo sapiens
tctgggtattgaatgtctactgttacctttttatccactcaataaatcttggtacaagcaagtgacccagacat

SEQ ID NO: 184953 - DNA, 73 bp, Homo sapiens
attgaatgtctactgttacctttttatccactcaataaatcttggtacaagcaagtgacccagacattcttgt

SEQ ID NO: 184954 - DNA, 70 bp, Homo sapiens
tgttacctttttatccactcaataaatcttggtacaagcaagtgacccagacattcttgttctttccttt

SEQ ID NO: 184955 - DNA, 69 bp, Homo sapiens
cctttttatccactcaataaatcttggtacaagcaagtgacccagacattcttgttctttccttttttg

SEQ ID NO: 184956 - DNA, 70 bp, Homo sapiens
caataaatcttggtacaagcaagtgacccagacattcttgttctttccttttttgtaattaccacctcaa

SEQ ID NO: 184957 - DNA, 69 bp, Homo sapiens
atcttggtacaagcaagtgacccagacattcttgttctttccttttttgtaattaccacctcaaaaatc

SEQ ID NO: 184958 - DNA, 69 bp, Homo sapiens
gcaagtgacccagacattcttgttctttccttttttgtaattaccacctcaaaaatctttaagctaaga

SEQ ID NO: 184959 - DNA, 67 bp, Homo sapiens
cccagacattcttgttctttccttttttgtaattaccacctcaaaaatctttaagctaagagaacaa

SEQ ID NO: 184960 - DNA, 67 bp, Homo sapiens
tctttccttttttgtaattaccacctcaaaaatctttaagctaagagaacaaaagaggacaaacaca

SEQ ID NO: 184961 - DNA, 70 bp, Homo sapiens
tttgtaattaccacctcaaaaatctttaagctaagagaacaaaagaggacaaacacattccataacaatg

SEQ ID NO: 184962 - DNA, 70 bp, Homo sapiens
aattaccacctcaaaaatctttaagctaagagaacaaaagaggacaaacacattccataacaatgtctta

SEQ ID NO: 184963 - DNA, 68 bp, Homo sapiens
caaaaatctttaagctaagagaacaaaagaggacaaacacattccataacaatgtcttaaataaaatt

SEQ ID NO: 184964 - DNA, 71 bp, Homo sapiens
aaaaaataaaaggagagagagcagtttttaaggcagcattttctttgtcctgggcccatgaccaatgtcaa

SEQ ID NO: 184965 - DNA, 74 bp, Homo sapiens
aaggagagagagcagtttttaaggcagcattttctttgtcctgggcccatgaccaatgtcaaagttcaaatata

SEQ ID NO: 184966 - DNA, 75 bp, Homo sapiens
agagcagtttttaaggcagcattttctttgtcctgggcccatgaccaatgtcaaagttcaaatatattgtcacca

SEQ ID NO: 184967 - DNA, 76 bp, Homo sapiens
ttaaggcagcattttctttgtcctgggcccatgaccaatgtcaaagttcaaatatattgtcaccagtctccatgtt

SEQ ID NO: 184968 - DNA, 77 bp, Homo sapiens
tttctttgtcctgggcccatgaccaatgtcaaagttcaaatatattgtcaccagtctccatgtttgttcatgtaata

SEQ ID NO: 184969 - DNA, 78 bp, Homo sapiens
tcctgggcccatgaccaatgtcaaagttcaaatatattgtcaccagtctccatgtttgttcatgtaatacatgtaaaa

SEQ ID NO: 184970 - DNA, 80 bp, Homo sapiens
ccatgaccaatgtcaaagttcaaatatattgtcaccagtctccatgtttgttcatgtaatacatgtaaaacagtggctca

SEQ ID NO: 184971 - DNA, 79 bp, Homo sapiens
accaatgtcaaagttcaaatatattgtcaccagtctccatgtttgttcatgtaatacatgtaaaacagtggctcagata

SEQ ID NO: 184972 - DNA, 80 bp, Homo sapiens
aatgtcaaagttcaaatatattgtcaccagtctccatgtttgttcatgtaatacatgtaaaacagtggctcagatacaca

SEQ ID NO: 184973 - DNA, 80 bp, Homo sapiens
aaagttcaaatatattgtcaccagtctccatgtttgttcatgtaatacatgtaaaacagtggctcagatacacagccaga

SEQ ID NO: 184974 - DNA, 82 bp, Homo sapiens
gttcaaatatattgtcaccagtctccatgtttgttcatgtaatacatgtaaaacagtggctcagatacacagccagacatta

SEQ ID NO: 184975 - DNA, 80 bp, Homo sapiens
aaatatattgtcaccagtctccatgtttgttcatgtaatacatgtaaaacagtggctcagatacacagccagacattaaa

SEQ ID NO: 184976 - DNA, 82 bp, Homo sapiens
atattgtcaccagtctccatgtttgttcatgtaatacatgtaaaacagtggctcagatacacagccagacattaaattgtca

SEQ ID NO: 184977 - DNA, 83 bp, Homo sapiens
cagtctccatgtttgttcatgtaatacatgtaaaacagtggctcagatacacagccagacattaaattgtcactgacacagaa

SEQ ID NO: 184978 - DNA, 82 bp, Homo sapiens
tccatgtttgttcatgtaatacatgtaaaacagtggctcagatacacagccagacattaaattgtcactgacacagaataaa

SEQ ID NO: 184979 - DNA, 80 bp, Homo sapiens
ttgttcatgtaatacatgtaaaacagtggctcagatacacagccagacattaaattgtcactgacacagaataaaagctt

SEQ ID NO: 184980 - DNA, 78 bp, Homo sapiens
tacatgtaaaacagtggctcagatacacagccagacattaaattgtcactgacacagaataaaagctttcaccgattt

SEQ ID NO: 184981 - DNA, 78 bp, Homo sapiens
aaacagtggctcagatacacagccagacattaaattgtcactgacacagaataaaagctttcaccgattttcagccta

SEQ ID NO: 184982 - DNA, 80 bp, Homo sapiens
gatacacagccagacattaaattgtcactgacacagaataaaagctttcaccgattttcagcctatctatctgatactta

SEQ ID NO: 184983 - DNA, 79 bp, Homo sapiens
agccagacattaaattgtcactgacacagaataaaagctttcaccgattttcagcctatctatctgatacttatataca

SEQ ID NO: 184984 - DNA, 77 bp, Homo sapiens
attaaattgtcactgacacagaataaaagctttcaccgattttcagcctatctatctgatacttatatacatatggg

SEQ ID NO: 184985 - DNA, 76 bp, Homo sapiens
acacagaataaaagctttcaccgattttcagcctatctatctgatacttatatacatatgggggtcttgtcaccag

SEQ ID NO: 184986 - DNA, 76 bp, Homo sapiens
aataaaagctttcaccgattttcagcctatctatctgatacttatatacatatgggggtcttgtcaccagtctcca

SEQ ID NO: 184987 - DNA, 78 bp, Homo sapiens
accgattttcagcctatctatctgatacttatatacatatgggggtcttgtcaccagtctccatgtttgtacatgtaa

SEQ ID NO: 184988 - DNA, 80 bp, Homo sapiens
tttcagcctatctatctgatacttatatacatatgggggtcttgtcaccagtctccatgtttgtacatgtaataaatgta

SEQ ID NO: 184989 - DNA, 78 bp, Homo sapiens
tctatctgatacttatatacatatgggggtcttgtcaccagtctccatgtttgtacatgtaataaatgtaaaacagta

SEQ ID NO: 184990 - DNA, 78 bp, Homo sapiens
ggggtcttgtcaccagtctccatgtttgtacatgtaataaatgtaaaacagtagctcagatacacagccagacattaa

SEQ ID NO: 184991 - DNA, 80 bp, Homo sapiens
cttgtcaccagtctccatgtttgtacatgtaataaatgtaaaacagtagctcagatacacagccagacattaaattgtca

SEQ ID NO: 184992 - DNA, 81 bp, Homo sapiens
tccatgtttgtacatgtaataaatgtaaaacagtagctcagatacacagccagacattaaattgtcactgacacagaataa

SEQ ID NO: 184993 - DNA, 78 bp, Homo sapiens
gtacatgtaataaatgtaaaacagtagctcagatacacagccagacattaaattgtcactgacacagaataaaagctt

SEQ ID NO: 184994 - DNA, 77 bp, Homo sapiens
aaatgtaaaacagtagctcagatacacagccagacattaaattgtcactgacacagaataaaagctttcactgattt

SEQ ID NO: 184995 - DNA, 82 bp, Homo sapiens
agtagctcagatacacagccagacattaaattgtcactgacacagaataaaagctttcactgattttcagcctatctgatat

SEQ ID NO: 184996 - DNA, 81 bp, Homo sapiens
agatacacagccagacattaaattgtcactgacacagaataaaagctttcactgattttcagcctatctgatatttatata

SEQ ID NO: 184997 - DNA, 78 bp, Homo sapiens
attatatatatatgggggtcttgtcaccagtctccatgtttgtacatgtaataaatgtaaaacagtggctcagataca

SEQ ID NO: 184998 - DNA, 79 bp, Homo sapiens
atatatatgggggtcttgtcaccagtctccatgtttgtacatgtaataaatgtaaaacagtggctcagatacacagcca

SEQ ID NO: 184999 - DNA, 81 bp, Homo sapiens
tcttgtcaccagtctccatgtttgtacatgtaataaatgtaaaacagtggctcagatacacagccagacattaaactgtca

SEQ ID NO: 185000 - DNA, 79 bp, Homo sapiens
tgtttgtacatgtaataaatgtaaaacagtggctcagatacacagccagacattaaactgtcactgacacagattaaaa

SEQ ID NO: 185001 - DNA, 78 bp, Homo sapiens
ataaatgtaaaacagtggctcagatacacagccagacattaaactgtcactgacacagattaaaagctttcgctgatt

SEQ ID NO: 185002 - DNA, 80 bp, Homo sapiens
taaaacagtggctcagatacacagccagacattaaactgtcactgacacagattaaaagctttcgctgattttcagccta

SEQ ID NO: 185003 - DNA, 83 bp, Homo sapiens
tcagatacacagccagacattaaactgtcactgacacagattaaaagctttcgctgattttcagcctatctgatatttacata

SEQ ID NO: 185004 - DNA, 80 bp, Homo sapiens
acacagccagacattaaactgtcactgacacagattaaaagctttcgctgattttcagcctatctgatatttacatatat

SEQ ID NO: 185005 - DNA, 78 bp, Homo sapiens
acattaaactgtcactgacacagattaaaagctttcgctgattttcagcctatctgatatttacatatattatataaa

SEQ ID NO: 185006 - DNA, 67 bp, Homo sapiens
atataatatacatgggggtcttgtcactggctttttaaatttttcaattaaccattaacctcaacgt

SEQ ID NO: 185007 - DNA, 66 bp, Homo sapiens
catgggggtcttgtcactggctttttaaatttttcaattaaccattaacctcaacgttaagtacca

SEQ ID NO: 185008 - DNA, 72 bp, Homo sapiens
tgtcactggctttttaaatttttcaattaaccattaacctcaacgttaagtaccactgagcagcacagacta

SEQ ID NO: 185009 - DNA, 70 bp, Homo sapiens
ctttttaaatttttcaattaaccattaacctcaacgttaagtaccactgagcagcacagactaattagca

SEQ ID NO: 185010 - DNA, 73 bp, Homo sapiens
tttcaattaaccattaacctcaacgttaagtaccactgagcagcacagactaattagcattcaatgtaaagtt

SEQ ID NO: 185011 - DNA, 74 bp, Homo sapiens
attaaccattaacctcaacgttaagtaccactgagcagcacagactaattagcattcaatgtaaagtttacaca

SEQ ID NO: 185012 - DNA, 76 bp, Homo sapiens
aacctcaacgttaagtaccactgagcagcacagactaattagcattcaatgtaaagtttacacatgtataattcaa

SEQ ID NO: 185013 - DNA, 78 bp, Homo sapiens
ttaagtaccactgagcagcacagactaattagcattcaatgtaaagtttacacatgtataattcaaattctcttcgcc

SEQ ID NO: 185014 - DNA, 81 bp, Homo sapiens
actgagcagcacagactaattagcattcaatgtaaagtttacacatgtataattcaaattctcttcgcctgaggctgatta

SEQ ID NO: 185015 - DNA, 80 bp, Homo sapiens
cagcacagactaattagcattcaatgtaaagtttacacatgtataattcaaattctcttcgcctgaggctgattaggaca

SEQ ID NO: 185016 - DNA, 77 bp, Homo sapiens
acagactaattagcattcaatgtaaagtttacacatgtataattcaaattctcttcgcctgaggctgattaggacaa

SEQ ID NO: 185017 - DNA, 76 bp, Homo sapiens
gactaattagcattcaatgtaaagtttacacatgtataattcaaattctcttcgcctgaggctgattaggacaaac

SEQ ID NO: 185018 - DNA, 78 bp, Homo sapiens
agcattcaatgtaaagtttacacatgtataattcaaattctcttcgcctgaggctgattaggacaaactgaatatcaa

SEQ ID NO: 185019 - DNA, 78 bp, Homo sapiens
atgtaaagtttacacatgtataattcaaattctcttcgcctgaggctgattaggacaaactgaatatcaagcaatcta

SEQ ID NO: 185020 - DNA, 80 bp, Homo sapiens
gtttacacatgtataattcaaattctcttcgcctgaggctgattaggacaaactgaatatcaagcaatctaacacagaga

SEQ ID NO: 185021 - DNA, 84 bp, Homo sapiens
tgtataattcaaattctcttcgcctgaggctgattaggacaaactgaatatcaagcaatctaacacagagagcacgtgtgcata

SEQ ID NO: 185022 - DNA, 83 bp, Homo sapiens
attcaaattctcttcgcctgaggctgattaggacaaactgaatatcaagcaatctaacacagagagcacgtgtgcataattca

SEQ ID NO: 185023 - DNA, 82 bp, Homo sapiens
aattctcttcgcctgaggctgattaggacaaactgaatatcaagcaatctaacacagagagcacgtgtgcataattcaaatc

SEQ ID NO: 185024 - DNA, 80 bp, Homo sapiens
gattaggacaaactgaatatcaagcaatctaacacagagagcacgtgtgcataattcaaatctcaaatatttaaggcaaa

SEQ ID NO: 185025 - DNA, 80 bp, Homo sapiens
aactgaatatcaagcaatctaacacagagagcacgtgtgcataattcaaatctcaaatatttaaggcaaatgattgttta

SEQ ID NO: 185026 - DNA, 78 bp, Homo sapiens
caagcaatctaacacagagagcacgtgtgcataattcaaatctcaaatatttaaggcaaatgattgtttaaacataaa

SEQ ID NO: 185027 - DNA, 78 bp, Homo sapiens
aacacagagagcacgtgtgcataattcaaatctcaaatatttaaggcaaatgattgtttaaacataaatatacatata

SEQ ID NO: 185028 - DNA, 73 bp, Homo sapiens
tcaaatctcaaatatttaaggcaaatgattgtttaaacataaatatacatatatttgcactaactttacaacc

SEQ ID NO: 185029 - DNA, 74 bp, Homo sapiens
tctcaaatatttaaggcaaatgattgtttaaacataaatatacatatatttgcactaactttacaacctgtgac

SEQ ID NO: 185030 - DNA, 74 bp, Homo sapiens
aaggcaaatgattgtttaaacataaatatacatatatttgcactaactttacaacctgtgactataggatacaa

SEQ ID NO: 185031 - DNA, 75 bp, Homo sapiens
tgattgtttaaacataaatatacatatatttgcactaactttacaacctgtgactataggatacaatattttctc

SEQ ID NO: 185032 - DNA, 79 bp, Homo sapiens
aaatatacatatatttgcactaactttacaacctgtgactataggatacaatattttctctcatctattcagattgcac

SEQ ID NO: 185033 - DNA, 82 bp, Homo sapiens
catatatttgcactaactttacaacctgtgactataggatacaatattttctctcatctattcagattgcactgaatgcttc

SEQ ID NO: 185034 - DNA, 77 bp, Homo sapiens
actaactttacaacctgtgactataggatacaatattttctctcatctattcagattgcactgaatgcttccttgtt

SEQ ID NO: 185035 - DNA, 77 bp, Homo sapiens
ttacaacctgtgactataggatacaatattttctctcatctattcagattgcactgaatgcttccttgttttaattt

SEQ ID NO: 185036 - DNA, 77 bp, Homo sapiens
gactataggatacaatattttctctcatctattcagattgcactgaatgcttccttgttttaattttttggaacaga

SEQ ID NO: 185037 - DNA, 74 bp, Homo sapiens
atattttctctcatctattcagattgcactgaatgcttccttgttttaattttttggaacagaatgggtatctt

SEQ ID NO: 185038 - DNA, 74 bp, Homo sapiens
ctctcatctattcagattgcactgaatgcttccttgttttaattttttggaacagaatgggtatctttaatgtt

SEQ ID NO: 185039 - DNA, 72 bp, Homo sapiens
cagattgcactgaatgcttccttgttttaattttttggaacagaatgggtatctttaatgtttaatctcttc

SEQ ID NO: 185040 - DNA, 71 bp, Homo sapiens
gcactgaatgcttccttgttttaattttttggaacagaatgggtatctttaatgtttaatctcttctaata

SEQ ID NO: 185041 - DNA, 70 bp, Homo sapiens
cttgttttaattttttggaacagaatgggtatctttaatgtttaatctcttctaatactacttgtcagca

SEQ ID NO: 185042 - DNA, 73 bp, Homo sapiens
tttttggaacagaatgggtatctttaatgtttaatctcttctaatactacttgtcagcaactcaagtggagga

SEQ ID NO: 185043 - DNA, 74 bp, Homo sapiens
gaacagaatgggtatctttaatgtttaatctcttctaatactacttgtcagcaactcaagtggaggacttaaga

SEQ ID NO: 185044 - DNA, 70 bp, Homo sapiens
gggtatctttaatgtttaatctcttctaatactacttgtcagcaactcaagtggaggacttaagaaaaaa

SEQ ID NO: 185045 - DNA, 73 bp, Homo sapiens
tttaatctcttctaatactacttgtcagcaactcaagtggaggacttaagaaaaaaatcagaactactggcca

SEQ ID NO: 185046 - DNA, 73 bp, Homo sapiens
ctcttctaatactacttgtcagcaactcaagtggaggacttaagaaaaaaatcagaactactggccagaataa

SEQ ID NO: 185047 - DNA, 73 bp, Homo sapiens
ttgtcagcaactcaagtggaggacttaagaaaaaaatcagaactactggccagaataaggttttctgattata

SEQ ID NO: 185048 - DNA, 72 bp, Homo sapiens
agcaactcaagtggaggacttaagaaaaaaatcagaactactggccagaataaggttttctgattatatgtg

SEQ ID NO: 185049 - DNA, 73 bp, Homo sapiens
aaaaaatcagaactactggccagaataaggttttctgattatatgtggctttcagtttccatgttatctccaa

SEQ ID NO: 185050 - DNA, 72 bp, Homo sapiens
aactactggccagaataaggttttctgattatatgtggctttcagtttccatgttatctccaagtctacttt

SEQ ID NO: 185051 - DNA, 73 bp, Homo sapiens
ctggccagaataaggttttctgattatatgtggctttcagtttccatgttatctccaagtctacttttaagaa

SEQ ID NO: 185052 - DNA, 75 bp, Homo sapiens
gttttctgattatatgtggctttcagtttccatgttatctccaagtctacttttaagaaccactgacaactcata

SEQ ID NO: 185053 - DNA, 76 bp, Homo sapiens
attatatgtggctttcagtttccatgttatctccaagtctacttttaagaaccactgacaactcatagctgattct

SEQ ID NO: 185054 - DNA, 74 bp, Homo sapiens
ttcagtttccatgttatctccaagtctacttttaagaaccactgacaactcatagctgattcttggcttccgtt

SEQ ID NO: 185055 - DNA, 74 bp, Homo sapiens
tttccatgttatctccaagtctacttttaagaaccactgacaactcatagctgattcttggcttccgtttcttc

SEQ ID NO: 185056 - DNA, 74 bp, Homo sapiens
atctccaagtctacttttaagaaccactgacaactcatagctgattcttggcttccgtttcttcccgctggcta

SEQ ID NO: 185057 - DNA, 72 bp, Homo sapiens
tttaagaaccactgacaactcatagctgattcttggcttccgtttcttcccgctggctatccctcttatttt

SEQ ID NO: 185058 - DNA, 73 bp, Homo sapiens
aaccactgacaactcatagctgattcttggcttccgtttcttcccgctggctatccctcttatttttggtctc

SEQ ID NO: 185059 - DNA, 73 bp, Homo sapiens
tcatagctgattcttggcttccgtttcttcccgctggctatccctcttatttttggtctctgttctactttaa

SEQ ID NO: 185060 - DNA, 70 bp, Homo sapiens
ctgattcttggcttccgtttcttcccgctggctatccctcttatttttggtctctgttctactttaactg

SEQ ID NO: 185061 - DNA, 69 bp, Homo sapiens
cttccgtttcttcccgctggctatccctcttatttttggtctctgttctactttaactggcttctgtct

SEQ ID NO: 185062 - DNA, 76 bp, Homo sapiens
ttttggtctctgttctactttaactggcttctgtcttgtgaaagattttcagatcaatcatattttgttcaatgaa

SEQ ID NO: 185063 - DNA, 78 bp, Homo sapiens
ctctgttctactttaactggcttctgtcttgtgaaagattttcagatcaatcatattttgttcaatgaaatttgcata

SEQ ID NO: 185064 - DNA, 77 bp, Homo sapiens
actttaactggcttctgtcttgtgaaagattttcagatcaatcatattttgttcaatgaaatttgcatatagacaaa

SEQ ID NO: 185065 - DNA, 79 bp, Homo sapiens
gcttctgtcttgtgaaagattttcagatcaatcatattttgttcaatgaaatttgcatatagacaaataaactctccca

SEQ ID NO: 185066 - DNA, 76 bp, Homo sapiens
gtgaaagattttcagatcaatcatattttgttcaatgaaatttgcatatagacaaataaactctcccagaagagtt

SEQ ID NO: 185067 - DNA, 77 bp, Homo sapiens
tttcagatcaatcatattttgttcaatgaaatttgcatatagacaaataaactctcccagaagagttttacttatca

SEQ ID NO: 185068 - DNA, 71 bp, Homo sapiens
attttgttcaatgaaatttgcatatagacaaataaactctcccagaagagttttacttatcaaaaccaaca

SEQ ID NO: 185069 - DNA, 71 bp, Homo sapiens
caatgaaatttgcatatagacaaataaactctcccagaagagttttacttatcaaaaccaacaaactctcc

SEQ ID NO: 185070 - DNA, 69 bp, Homo sapiens
actctcccagaagagttttacttatcaaaaccaacaaactctcctagaagtttatttgttcaaactgca

SEQ ID NO: 185071 - DNA, 67 bp, Homo sapiens
gagttttacttatcaaaaccaacaaactctcctagaagtttatttgttcaaactgcatttttacaag

SEQ ID NO: 185072 - DNA, 68 bp, Homo sapiens
cttatcaaaaccaacaaactctcctagaagtttatttgttcaaactgcatttttacaaggacacttcc

SEQ ID NO: 185073 - DNA, 67 bp, Homo sapiens
ccaacaaactctcctagaagtttatttgttcaaactgcatttttacaaggacacttcctaaaaattg

SEQ ID NO: 185074 - DNA, 69 bp, Homo sapiens
ctcctagaagtttatttgttcaaactgcatttttacaaggacacttcctaaaaattgtagtgtggtcca

SEQ ID NO: 185075 - DNA, 72 bp, Homo sapiens
tgcatttttacaaggacacttcctaaaaattgtagtgtggtccaagaggttatgcatatgtaggggtaggaa

SEQ ID NO: 185076 - DNA, 70 bp, Homo sapiens
ttcctaaaaattgtagtgtggtccaagaggttatgcatatgtaggggtaggaaaaaccgtgacagtcaaa

SEQ ID NO: 185077 - DNA, 69 bp, Homo sapiens
aaaattgtagtgtggtccaagaggttatgcatatgtaggggtaggaaaaaccgtgacagtcaaaggtaa

SEQ ID NO: 185078 - DNA, 69 bp, Homo sapiens
tccaagaggttatgcatatgtaggggtaggaaaaaccgtgacagtcaaaggtaaggttccaaaatacaa

SEQ ID NO: 185079 - DNA, 70 bp, Homo sapiens
tatgcatatgtaggggtaggaaaaaccgtgacagtcaaaggtaaggttccaaaatacaagtctcctctaa

SEQ ID NO: 185080 - DNA, 66 bp, Homo sapiens
atatgtaggggtaggaaaaaccgtgacagtcaaaggtaaggttccaaaatacaagtctcctctaaa

SEQ ID NO: 185081 - DNA, 71 bp, Homo sapiens
caaaggtaaggttccaaaatacaagtctcctctaaaatgtcaataaacacacaatgaataacacagaggga

SEQ ID NO: 185082 - DNA, 77 bp, Homo sapiens
acaagtctcctctaaaatgtcaataaacacacaatgaataacacagagggatgacaagccatctgaaactacaaata

SEQ ID NO: 185083 - DNA, 80 bp, Homo sapiens
tctaaaatgtcaataaacacacaatgaataacacagagggatgacaagccatctgaaactacaaatagctttgtgcagtg

SEQ ID NO: 185084 - DNA, 78 bp, Homo sapiens
cagtggcaggatcatagccaatgaggtttatgcgaggcacaattactgctaactgaaactacgaatggagtattaaaa

SEQ ID NO: 185085 - DNA, 76 bp, Homo sapiens
atcatagccaatgaggtttatgcgaggcacaattactgctaactgaaactacgaatggagtattaaaattcagaat

SEQ ID NO: 185086 - DNA, 73 bp, Homo sapiens
aatgaggtttatgcgaggcacaattactgctaactgaaactacgaatggagtattaaaattcagaattctggg

SEQ ID NO: 185087 - DNA, 73 bp, Homo sapiens
gtttatgcgaggcacaattactgctaactgaaactacgaatggagtattaaaattcagaattctggggtcagg

SEQ ID NO: 185088 - DNA, 70 bp, Homo sapiens
aattactgctaactgaaactacgaatggagtattaaaattcagaattctggggtcaggggaggccttgaa

SEQ ID NO: 185089 - DNA, 70 bp, Homo sapiens
taactgaaactacgaatggagtattaaaattcagaattctggggtcaggggaggccttgaatttgattta

SEQ ID NO: 185090 - DNA, 68 bp, Homo sapiens
agtattaaaattcagaattctggggtcaggggaggccttgaatttgatttacttttcccacttcaatc

SEQ ID NO: 185091 - DNA, 69 bp, Homo sapiens
attcagaattctggggtcaggggaggccttgaatttgatttacttttcccacttcaatcccaaatctaa

SEQ ID NO: 185092 - DNA, 66 bp, Homo sapiens
gggtcaggggaggccttgaatttgatttacttttcccacttcaatcccaaatctaaccccatttac

SEQ ID NO: 185093 - DNA, 67 bp, Homo sapiens
aggccttgaatttgatttacttttcccacttcaatcccaaatctaaccccatttacgtctcttgaac

SEQ ID NO: 185094 - DNA, 68 bp, Homo sapiens
atttgatttacttttcccacttcaatcccaaatctaaccccatttacgtctcttgaactagttagctc

SEQ ID NO: 185095 - DNA, 67 bp, Homo sapiens
tttacttttcccacttcaatcccaaatctaaccccatttacgtctcttgaactagttagctctgggg

SEQ ID NO: 185096 - DNA, 75 bp, Homo sapiens
ttcaatcccaaatctaaccccatttacgtctcttgaactagttagctctgggggcagcaggcagtggcctgaaga

SEQ ID NO: 185097 - DNA, 75 bp, Homo sapiens
aaatctaaccccatttacgtctcttgaactagttagctctgggggcagcaggcagtggcctgaagaatgtggcca

SEQ ID NO: 185098 - DNA, 76 bp, Homo sapiens
atttacgtctcttgaactagttagctctgggggcagcaggcagtggcctgaagaatgtggccacgagctaacgggc

SEQ ID NO: 185099 - DNA, 78 bp, Homo sapiens
tcttgaactagttagctctgggggcagcaggcagtggcctgaagaatgtggccacgagctaacgggcgtcttgagaaa

SEQ ID NO: 185100 - DNA, 76 bp, Homo sapiens
actagttagctctgggggcagcaggcagtggcctgaagaatgtggccacgagctaacgggcgtcttgagaaaaata

SEQ ID NO: 185101 - DNA, 78 bp, Homo sapiens
gggcagcaggcagtggcctgaagaatgtggccacgagctaacgggcgtcttgagaaaaataattggtgcaggatttgc

SEQ ID NO: 185102 - DNA, 78 bp, Homo sapiens
cagtggcctgaagaatgtggccacgagctaacgggcgtcttgagaaaaataattggtgcaggatttgctctgcttgac

SEQ ID NO: 185103 - DNA, 72 bp, Homo sapiens
ccacgagctaacgggcgtcttgagaaaaataattggtgcaggatttgctctgcttgacccaaaagagtttat

SEQ ID NO: 185104 - DNA, 70 bp, Homo sapiens
taacgggcgtcttgagaaaaataattggtgcaggatttgctctgcttgacccaaaagagtttatttgttt

SEQ ID NO: 185105 - DNA, 69 bp, Homo sapiens
cgtcttgagaaaaataattggtgcaggatttgctctgcttgacccaaaagagtttatttgtttttttta

SEQ ID NO: 185106 - DNA, 80 bp, Homo sapiens
caccatacccagcttccaggagagtttcacgcacacaggtatggccagccttcccagcactcagaaggcacttgatacag

SEQ ID NO: 185107 - DNA, 80 bp, Homo sapiens
agcttccaggagagtttcacgcacacaggtatggccagccttcccagcactcagaaggcacttgatacaggaggagagtc

SEQ ID NO: 185108 - DNA, 81 bp, Homo sapiens
aggagagtttcacgcacacaggtatggccagccttcccagcactcagaaggcacttgatacaggaggagagtctgctctta

SEQ ID NO: 185109 - DNA, 84 bp, Homo sapiens
gcacacaggtatggccagccttcccagcactcagaaggcacttgatacaggaggagagtctgctcttagggctgcagaatgtaa

SEQ ID NO: 185110 - DNA, 85 bp, Homo sapiens
tatggccagccttcccagcactcagaaggcacttgatacaggaggagagtctgctcttagggctgcagaatgtaaggagatcaga

SEQ ID NO: 185111 - DNA, 81 bp, Homo sapiens
ccttcccagcactcagaaggcacttgatacaggaggagagtctgctcttagggctgcagaatgtaaggagatcagaaggaa

SEQ ID NO: 185112 - DNA, 82 bp, Homo sapiens
actcagaaggcacttgatacaggaggagagtctgctcttagggctgcagaatgtaaggagatcagaaggaaggcacagaatc

SEQ ID NO: 185113 - DNA, 81 bp, Homo sapiens
cttgatacaggaggagagtctgctcttagggctgcagaatgtaaggagatcagaaggaaggcacagaatcctctaggtgta

SEQ ID NO: 185114 - DNA, 80 bp, Homo sapiens
gaggagagtctgctcttagggctgcagaatgtaaggagatcagaaggaaggcacagaatcctctaggtgtataaacaaga

SEQ ID NO: 185115 - DNA, 78 bp, Homo sapiens
agtctgctcttagggctgcagaatgtaaggagatcagaaggaaggcacagaatcctctaggtgtataaacaagaaata

SEQ ID NO: 185116 - DNA, 79 bp, Homo sapiens
ttagggctgcagaatgtaaggagatcagaaggaaggcacagaatcctctaggtgtataaacaagaaatagataatatgc

SEQ ID NO: 185117 - DNA, 79 bp, Homo sapiens
agaatgtaaggagatcagaaggaaggcacagaatcctctaggtgtataaacaagaaatagataatatgcttgctgctac

SEQ ID NO: 185118 - DNA, 82 bp, Homo sapiens
agatcagaaggaaggcacagaatcctctaggtgtataaacaagaaatagataatatgcttgctgctactgtgcaggttgaga

SEQ ID NO: 185119 - DNA, 83 bp, Homo sapiens
gcacagaatcctctaggtgtataaacaagaaatagataatatgcttgctgctactgtgcaggttgagatgcctgtacctttca

SEQ ID NO: 185120 - DNA, 82 bp, Homo sapiens
ctctaggtgtataaacaagaaatagataatatgcttgctgctactgtgcaggttgagatgcctgtacctttcatcacttata

SEQ ID NO: 185121 - DNA, 81 bp, Homo sapiens
ataaacaagaaatagataatatgcttgctgctactgtgcaggttgagatgcctgtacctttcatcacttatagaattacaa

SEQ ID NO: 185122 - DNA, 81 bp, Homo sapiens
aaatagataatatgcttgctgctactgtgcaggttgagatgcctgtacctttcatcacttatagaattacaacagcctaaa

SEQ ID NO: 185123 - DNA, 80 bp, Homo sapiens
ataatatgcttgctgctactgtgcaggttgagatgcctgtacctttcatcacttatagaattacaacagcctaaagtccc

SEQ ID NO: 185124 - DNA, 74 bp, Homo sapiens
aggttgagatgcctgtacctttcatcacttatagaattacaacagcctaaagtcccctaacagctcaacctcaa

SEQ ID NO: 185125 - DNA, 74 bp, Homo sapiens
agatgcctgtacctttcatcacttatagaattacaacagcctaaagtcccctaacagctcaacctcaatcccaa

SEQ ID NO: 185126 - DNA, 76 bp, Homo sapiens
ttatagaattacaacagcctaaagtcccctaacagctcaacctcaatcccaatgcacatataagtgacatacttaa

SEQ ID NO: 185127 - DNA, 74 bp, Homo sapiens
ttacaacagcctaaagtcccctaacagctcaacctcaatcccaatgcacatataagtgacatacttaagggtgg

SEQ ID NO: 185128 - DNA, 73 bp, Homo sapiens
ctaaagtcccctaacagctcaacctcaatcccaatgcacatataagtgacatacttaagggtgggaggaaata

SEQ ID NO: 185129 - DNA, 78 bp, Homo sapiens
taacagctcaacctcaatcccaatgcacatataagtgacatacttaagggtgggaggaaataggaggaagcagatcta

SEQ ID NO: 185130 - DNA, 77 bp, Homo sapiens
tcaatcccaatgcacatataagtgacatacttaagggtgggaggaaataggaggaagcagatctaacagattttctg

SEQ ID NO: 185131 - DNA, 76 bp, Homo sapiens
atgcacatataagtgacatacttaagggtgggaggaaataggaggaagcagatctaacagattttctggaggagaa

SEQ ID NO: 185132 - DNA, 75 bp, Homo sapiens
tataagtgacatacttaagggtgggaggaaataggaggaagcagatctaacagattttctggaggagaaagatga

SEQ ID NO: 185133 - DNA, 73 bp, Homo sapiens
atacttaagggtgggaggaaataggaggaagcagatctaacagattttctggaggagaaagatgaaatattga

SEQ ID NO: 185134 - DNA, 76 bp, Homo sapiens
aggaaataggaggaagcagatctaacagattttctggaggagaaagatgaaatattgaggtcaaaagcagtatgac

SEQ ID NO: 185135 - DNA, 77 bp, Homo sapiens
taggaggaagcagatctaacagattttctggaggagaaagatgaaatattgaggtcaaaagcagtatgactacttaa

SEQ ID NO: 185136 - DNA, 76 bp, Homo sapiens
agatctaacagattttctggaggagaaagatgaaatattgaggtcaaaagcagtatgactacttaaggagaatcaa

SEQ ID NO: 185137 - DNA, 76 bp, Homo sapiens
gattttctggaggagaaagatgaaatattgaggtcaaaagcagtatgactacttaaggagaatcaagtgaagtata

SEQ ID NO: 185138 - DNA, 73 bp, Homo sapiens
ggaggagaaagatgaaatattgaggtcaaaagcagtatgactacttaaggagaatcaagtgaagtataaaaaa

SEQ ID NO: 185139 - DNA, 74 bp, Homo sapiens
gatgaaatattgaggtcaaaagcagtatgactacttaaggagaatcaagtgaagtataaaaaataacttctgga

SEQ ID NO: 185140 - DNA, 69 bp, Homo sapiens
gaggtcaaaagcagtatgactacttaaggagaatcaagtgaagtataaaaaataacttctggaaaaaaa

SEQ ID NO: 185141 - DNA, 68 bp, Homo sapiens
agcagtatgactacttaaggagaatcaagtgaagtataaaaaataacttctggaaaaaaatgtttaat

SEQ ID NO: 185142 - DNA, 64 bp, Homo sapiens
ctacttaaggagaatcaagtgaagtataaaaaataacttctggaaaaaaatgtttaattaaaaa

SEQ ID NO: 185143 - DNA, 70 bp, Homo sapiens
aattaaaaactaaaatttaaatatttatattctcaagctgaataattcagtagataaagtagaagatcga

SEQ ID NO: 185144 - DNA, 76 bp, Homo sapiens
ctaaaatttaaatatttatattctcaagctgaataattcagtagataaagtagaagatcgatgctaactggcagta

SEQ ID NO: 185145 - DNA, 72 bp, Homo sapiens
aatgaatgaaatttcaaagcacaaagtaaaaatacaaagcgatgaaagtcataatgggaaaagagaagagcc

SEQ ID NO: 185146 - DNA, 74 bp, Homo sapiens
atttcaaagcacaaagtaaaaatacaaagcgatgaaagtcataatgggaaaagagaagagccttgaatggatca

SEQ ID NO: 185147 - DNA, 71 bp, Homo sapiens
acaaagtaaaaatacaaagcgatgaaagtcataatgggaaaagagaagagccttgaatggatcaaggaaac

SEQ ID NO: 185148 - DNA, 72 bp, Homo sapiens
aaaaatacaaagcgatgaaagtcataatgggaaaagagaagagccttgaatggatcaaggaaacctaacata

SEQ ID NO: 185149 - DNA, 75 bp, Homo sapiens
aaagcgatgaaagtcataatgggaaaagagaagagccttgaatggatcaaggaaacctaacatacagccataaga

SEQ ID NO: 185150 - DNA, 74 bp, Homo sapiens
aagtcataatgggaaaagagaagagccttgaatggatcaaggaaacctaacatacagccataagaagagttcca

SEQ ID NO: 185151 - DNA, 72 bp, Homo sapiens
aaaagagaagagccttgaatggatcaaggaaacctaacatacagccataagaagagttccagaaggaagaaa

SEQ ID NO: 185152 - DNA, 72 bp, Homo sapiens
aagagccttgaatggatcaaggaaacctaacatacagccataagaagagttccagaaggaagaaagagaaaa

SEQ ID NO: 185153 - DNA, 72 bp, Homo sapiens
aatggatcaaggaaacctaacatacagccataagaagagttccagaaggaagaaagagaaaagacagaagag

SEQ ID NO: 185154 - DNA, 65 bp, Homo sapiens
agaaagagaaaagacagaagaggtaataattaaagtaatatggaaaaaaattttcataaactaaa

SEQ ID NO: 185155 - DNA, 67 bp, Homo sapiens
aaagacagaagaggtaataattaaagtaatatggaaaaaaattttcataaactaaagagagggctga

SEQ ID NO: 185156 - DNA, 73 bp, Homo sapiens
taaagtaatatggaaaaaaattttcataaactaaagagagggctgaattacaatctcacagagctcactatac

SEQ ID NO: 185157 - DNA, 71 bp, Homo sapiens
atggaaaaaaattttcataaactaaagagagggctgaattacaatctcacagagctcactatacttaaaaa

SEQ ID NO: 185158 - DNA, 70 bp, Homo sapiens
aattttcataaactaaagagagggctgaattacaatctcacagagctcactatacttaaaaaaaaaggga

SEQ ID NO: 185159 - DNA, 73 bp, Homo sapiens
cctgacaagtatccagaaagaataattacttaaaattgaataataattaaactcacattgtgcttctcatttg

SEQ ID NO: 185160 - DNA, 74 bp, Homo sapiens
gtatccagaaagaataattacttaaaattgaataataattaaactcacattgtgcttctcatttgtaatactga

SEQ ID NO: 185161 - DNA, 74 bp, Homo sapiens
gaataattacttaaaattgaataataattaaactcacattgtgcttctcatttgtaatactgaaatctagaaga

SEQ ID NO: 185162 - DNA, 75 bp, Homo sapiens
aattgaataataattaaactcacattgtgcttctcatttgtaatactgaaatctagaagaaagaacagtaacatc

SEQ ID NO: 185163 - DNA, 77 bp, Homo sapiens
ataattaaactcacattgtgcttctcatttgtaatactgaaatctagaagaaagaacagtaacatccagacagctgg

SEQ ID NO: 185164 - DNA, 77 bp, Homo sapiens
aaactcacattgtgcttctcatttgtaatactgaaatctagaagaaagaacagtaacatccagacagctgggagaaa

SEQ ID NO: 185165 - DNA, 74 bp, Homo sapiens
cttctcatttgtaatactgaaatctagaagaaagaacagtaacatccagacagctgggagaaaaagaagtagaa

SEQ ID NO: 185166 - DNA, 73 bp, Homo sapiens
taatactgaaatctagaagaaagaacagtaacatccagacagctgggagaaaaagaagtagaacccaaatatc

SEQ ID NO: 185167 - DNA, 72 bp, Homo sapiens
aaatctagaagaaagaacagtaacatccagacagctgggagaaaaagaagtagaacccaaatatcccacaca

SEQ ID NO: 185168 - DNA, 73 bp, Homo sapiens
aagaaagaacagtaacatccagacagctgggagaaaaagaagtagaacccaaatatcccacacacacagtctg

SEQ ID NO: 185169 - DNA, 75 bp, Homo sapiens
taacatccagacagctgggagaaaaagaagtagaacccaaatatcccacacacacagtctgttgcgaaagaagta

SEQ ID NO: 185170 - DNA, 72 bp, Homo sapiens
agctgggagaaaaagaagtagaacccaaatatcccacacacacagtctgttgcgaaagaagtatttgccaaa

SEQ ID NO: 185171 - DNA, 70 bp, Homo sapiens
aaaagaagtagaacccaaatatcccacacacacagtctgttgcgaaagaagtatttgccaaaatttaaga

SEQ ID NO: 185172 - DNA, 70 bp, Homo sapiens
aaagaagtagaacccaaatatcccacacacacagtctgttgcgaaagaagtatttgccaaaatttaagaa

SEQ ID NO: 185173 - DNA, 71 bp, Homo sapiens
aagtagaacccaaatatcccacacacacagtctgttgcgaaagaagtatttgccaaaatttaagaattcaa

SEQ ID NO: 185174 - DNA, 73 bp, Homo sapiens
aacccaaatatcccacacacacagtctgttgcgaaagaagtatttgccaaaatttaagaattcaaatagcaca

SEQ ID NO: 185175 - DNA, 75 bp, Homo sapiens
aaatatcccacacacacagtctgttgcgaaagaagtatttgccaaaatttaagaattcaaatagcacatcaacca

SEQ ID NO: 185176 - DNA, 74 bp, Homo sapiens
acacacacagtctgttgcgaaagaagtatttgccaaaatttaagaattcaaatagcacatcaaccactgtcccc

SEQ ID NO: 185177 - DNA, 72 bp, Homo sapiens
agtctgttgcgaaagaagtatttgccaaaatttaagaattcaaatagcacatcaaccactgtccccgccaaa

SEQ ID NO: 185178 - DNA, 70 bp, Homo sapiens
aagtatttgccaaaatttaagaattcaaatagcacatcaaccactgtccccgccaaaggaaaggacttga

SEQ ID NO: 185179 - DNA, 70 bp, Homo sapiens
tttgccaaaatttaagaattcaaatagcacatcaaccactgtccccgccaaaggaaaggacttgagaaaa

SEQ ID NO: 185180 - DNA, 72 bp, Homo sapiens
attcaaatagcacatcaaccactgtccccgccaaaggaaaggacttgagaaaagagtctagtcaaacaataa

SEQ ID NO: 185181 - DNA, 67 bp, Homo sapiens
tccccgccaaaggaaaggacttgagaaaagagtctagtcaaacaataactgaaccagaaacgtttta

SEQ ID NO: 185182 - DNA, 68 bp, Homo sapiens
aaggaaaggacttgagaaaagagtctagtcaaacaataactgaaccagaaacgttttatgtgtgggaa

SEQ ID NO: 185183 - DNA, 68 bp, Homo sapiens
acttgagaaaagagtctagtcaaacaataactgaaccagaaacgttttatgtgtgggaagggaagaaa

SEQ ID NO: 185184 - DNA, 68 bp, Homo sapiens
tcaaacaataactgaaccagaaacgttttatgtgtgggaagggaagaaatgaggggtaaaatgtatct

SEQ ID NO: 185185 - DNA, 70 bp, Homo sapiens
gaaacgttttatgtgtgggaagggaagaaatgaggggtaaaatgtatcttgcacaatatacagatttaaa

SEQ ID NO: 185186 - DNA, 72 bp, Homo sapiens
atgtgtgggaagggaagaaatgaggggtaaaatgtatcttgcacaatatacagatttaaatctaaatgaaaa

SEQ ID NO: 185187 - DNA, 71 bp, Homo sapiens
gggtaaaatgtatcttgcacaatatacagatttaaatctaaatgaaaaaaaaactgtaatataagtcctca

SEQ ID NO: 185188 - DNA, 75 bp, Homo sapiens
tatcttgcacaatatacagatttaaatctaaatgaaaaaaaaactgtaatataagtcctcaacatgaattcctga

SEQ ID NO: 185189 - DNA, 75 bp, Homo sapiens
gcacaatatacagatttaaatctaaatgaaaaaaaaactgtaatataagtcctcaacatgaattcctgacacaga

SEQ ID NO: 185190 - DNA, 71 bp, Homo sapiens
cagatttaaatctaaatgaaaaaaaaactgtaatataagtcctcaacatgaattcctgacacagaaaagtc

SEQ ID NO: 185191 - DNA, 72 bp, Homo sapiens
atgaaaaaaaaactgtaatataagtcctcaacatgaattcctgacacagaaaagtctaacaatctggaccta

SEQ ID NO: 185192 - DNA, 72 bp, Homo sapiens
aactgtaatataagtcctcaacatgaattcctgacacagaaaagtctaacaatctggacctaaacaactaaa

SEQ ID NO: 185193 - DNA, 73 bp, Homo sapiens
taagtcctcaacatgaattcctgacacagaaaagtctaacaatctggacctaaacaactaaattatttccaca

SEQ ID NO: 185194 - DNA, 72 bp, Homo sapiens
cctcaacatgaattcctgacacagaaaagtctaacaatctggacctaaacaactaaattatttccacagaaa

SEQ ID NO: 185195 - DNA, 70 bp, Homo sapiens
cctgacacagaaaagtctaacaatctggacctaaacaactaaattatttccacagaaatttaggaatgaa

SEQ ID NO: 185196 - DNA, 69 bp, Homo sapiens
caatctggacctaaacaactaaattatttccacagaaatttaggaatgaaagaggattagggtgtcaag

SEQ ID NO: 185197 - DNA, 68 bp, Homo sapiens
ggacctaaacaactaaattatttccacagaaatttaggaatgaaagaggattagggtgtcaaggtgaa

SEQ ID NO: 185198 - DNA, 70 bp, Homo sapiens
aattatttccacagaaatttaggaatgaaagaggattagggtgtcaaggtgaaagaaagtgctggtatct

SEQ ID NO: 185199 - DNA, 69 bp, Homo sapiens
tttccacagaaatttaggaatgaaagaggattagggtgtcaaggtgaaagaaagtgctggtatcttttt

SEQ ID NO: 185200 - DNA, 70 bp, Homo sapiens
taggaatgaaagaggattagggtgtcaaggtgaaagaaagtgctggtatctttttttatgttaaagtgga

SEQ ID NO: 185201 - DNA, 69 bp, Homo sapiens
tgaaagaggattagggtgtcaaggtgaaagaaagtgctggtatctttttttatgttaaagtggaataaa

SEQ ID NO: 185202 - DNA, 71 bp, Homo sapiens
ggtgtcaaggtgaaagaaagtgctggtatctttttttatgttaaagtggaataaaaattggattatgagca

SEQ ID NO: 185203 - DNA, 70 bp, Homo sapiens
ggtgaaagaaagtgctggtatctttttttatgttaaagtggaataaaaattggattatgagcaattagaa

SEQ ID NO: 185204 - DNA, 68 bp, Homo sapiens
ttttttatgttaaagtggaataaaaattggattatgagcaattagaaaggaaggtggtcatttattaa

SEQ ID NO: 185205 - DNA, 71 bp, Homo sapiens
taaagtggaataaaaattggattatgagcaattagaaaggaaggtggtcatttattaaatggaaaagtgca

SEQ ID NO: 185206 - DNA, 73 bp, Homo sapiens
ataaaaattggattatgagcaattagaaaggaaggtggtcatttattaaatggaaaagtgcagaactgtcaca

SEQ ID NO: 185207 - DNA, 74 bp, Homo sapiens
ttggattatgagcaattagaaaggaaggtggtcatttattaaatggaaaagtgcagaactgtcacataaaggga

SEQ ID NO: 185208 - DNA, 71 bp, Homo sapiens
agcaattagaaaggaaggtggtcatttattaaatggaaaagtgcagaactgtcacataaagggaaaatgga

SEQ ID NO: 185209 - DNA, 72 bp, Homo sapiens
aggaaggtggtcatttattaaatggaaaagtgcagaactgtcacataaagggaaaatggaaaatgaatatca

SEQ ID NO: 185210 - DNA, 72 bp, Homo sapiens
ggtcatttattaaatggaaaagtgcagaactgtcacataaagggaaaatggaaaatgaatatcaacttgaaa

SEQ ID NO: 185211 - DNA, 72 bp, Homo sapiens
aaatggaaaagtgcagaactgtcacataaagggaaaatggaaaatgaatatcaacttgaaaatataggcaaa

SEQ ID NO: 185212 - DNA, 72 bp, Homo sapiens
agtgcagaactgtcacataaagggaaaatggaaaatgaatatcaacttgaaaatataggcaaaattaagaaa

SEQ ID NO: 185213 - DNA, 72 bp, Homo sapiens
tgaatatcaacttgaaaatataggcaaaattaagaaaagtgaaaaaagtcacaaatatgaataatgaacaag

SEQ ID NO: 185214 - DNA, 70 bp, Homo sapiens
ataggcaaaattaagaaaagtgaaaaaagtcacaaatatgaataatgaacaaggtgaaaagacagtaata

SEQ ID NO: 185215 - DNA, 72 bp, Homo sapiens
taagaaaagtgaaaaaagtcacaaatatgaataatgaacaaggtgaaaagacagtaataagatcaagtataa

SEQ ID NO: 185216 - DNA, 73 bp, Homo sapiens
agtcacaaatatgaataatgaacaaggtgaaaagacagtaataagatcaagtataacttagaataaaaatgga

SEQ ID NO: 185217 - DNA, 72 bp, Homo sapiens
tgaataatgaacaaggtgaaaagacagtaataagatcaagtataacttagaataaaaatggaagaactgaat

SEQ ID NO: 185218 - DNA, 71 bp, Homo sapiens
aggtgaaaagacagtaataagatcaagtataacttagaataaaaatggaagaactgaattctccctctgga

SEQ ID NO: 185219 - DNA, 72 bp, Homo sapiens
gatcaagtataacttagaataaaaatggaagaactgaattctccctctggaaaataaactgtcagactgggc

SEQ ID NO: 185220 - DNA, 70 bp, Homo sapiens
gtataacttagaataaaaatggaagaactgaattctccctctggaaaataaactgtcagactgggctaaa

SEQ ID NO: 185221 - DNA, 70 bp, Homo sapiens
gaataaaaatggaagaactgaattctccctctggaaaataaactgtcagactgggctaaaaagacaaaga

SEQ ID NO: 185222 - DNA, 73 bp, Homo sapiens
gaactgaattctccctctggaaaataaactgtcagactgggctaaaaagacaaagatcagataaaggctgtta

SEQ ID NO: 185223 - DNA, 73 bp, Homo sapiens
tctccctctggaaaataaactgtcagactgggctaaaaagacaaagatcagataaaggctgttacaagaaata

SEQ ID NO: 185224 - DNA, 74 bp, Homo sapiens
actgtcagactgggctaaaaagacaaagatcagataaaggctgttacaagaaatactttaaatcaattgattga

SEQ ID NO: 185225 - DNA, 70 bp, Homo sapiens
actgggctaaaaagacaaagatcagataaaggctgttacaagaaatactttaaatcaattgattgaaaaa

SEQ ID NO: 185226 - DNA, 68 bp, Homo sapiens
aaagacaaagatcagataaaggctgttacaagaaatactttaaatcaattgattgaaaaaagtttaaa

SEQ ID NO: 185227 - DNA, 69 bp, Homo sapiens
gataaaggctgttacaagaaatactttaaatcaattgattgaaaaaagtttaaaataatggaatgggca

SEQ ID NO: 185228 - DNA, 70 bp, Homo sapiens
tactttaaatcaattgattgaaaaaagtttaaaataatggaatgggcaaagaaatatcagctaaatgccc

SEQ ID NO: 185229 - DNA, 69 bp, Homo sapiens
caattgattgaaaaaagtttaaaataatggaatgggcaaagaaatatcagctaaatgcccccaaaagaa

SEQ ID NO: 185230 - DNA, 79 bp, Homo sapiens
aatgggcaaagaaatatcagctaaatgcccccaaaagaaagtatgagtgctagattaatatcagatcatgtggaattca

SEQ ID NO: 185231 - DNA, 76 bp, Homo sapiens
aaagaaatatcagctaaatgcccccaaaagaaagtatgagtgctagattaatatcagatcatgtggaattcaacgt

SEQ ID NO: 185232 - DNA, 76 bp, Homo sapiens
cccaaaagaaagtatgagtgctagattaatatcagatcatgtggaattcaacgttgagagtaccaaataggataaa

SEQ ID NO: 185233 - DNA, 77 bp, Homo sapiens
agaaagtatgagtgctagattaatatcagatcatgtggaattcaacgttgagagtaccaaataggataaaaaatgta

SEQ ID NO: 185234 - DNA, 70 bp, Homo sapiens
catgtggaattcaacgttgagagtaccaaataggataaaaaatgtaaaaatctaaattatataaagcaaa

SEQ ID NO: 185235 - DNA, 67 bp, Homo sapiens
ttcaacgttgagagtaccaaataggataaaaaatgtaaaaatctaaattatataaagcaaaaggtat

SEQ ID NO: 185236 - DNA, 66 bp, Homo sapiens
agagtaccaaataggataaaaaatgtaaaaatctaaattatataaagcaaaaggtatttaataaga

SEQ ID NO: 185237 - DNA, 65 bp, Homo sapiens
ataggataaaaaatgtaaaaatctaaattatataaagcaaaaggtatttaataagaagatttaaa

SEQ ID NO: 185238 - DNA, 65 bp, Homo sapiens
tgtaaaaatctaaattatataaagcaaaaggtatttaataagaagatttaaaaatacttagttaa

SEQ ID NO: 185239 - DNA, 67 bp, Homo sapiens
ctaaattatataaagcaaaaggtatttaataagaagatttaaaaatacttagttaaatgagaaatca

SEQ ID NO: 185240 - DNA, 70 bp, Homo sapiens
agcaaaaggtatttaataagaagatttaaaaatacttagttaaatgagaaatcaatatatctttgtcata

SEQ ID NO: 185241 - DNA, 72 bp, Homo sapiens
tatttaataagaagatttaaaaatacttagttaaatgagaaatcaatatatctttgtcataaattgacagac

SEQ ID NO: 185242 - DNA, 73 bp, Homo sapiens
gaagatttaaaaatacttagttaaatgagaaatcaatatatctttgtcataaattgacagacctcataaaaca

SEQ ID NO: 185243 - DNA, 77 bp, Homo sapiens
aatacttagttaaatgagaaatcaatatatctttgtcataaattgacagacctcataaaacacaatgagtacagaca

SEQ ID NO: 185244 - DNA, 79 bp, Homo sapiens
gagaaatcaatatatctttgtcataaattgacagacctcataaaacacaatgagtacagacacagtataattgaccaaa

SEQ ID NO: 185245 - DNA, 76 bp, Homo sapiens
atctttgtcataaattgacagacctcataaaacacaatgagtacagacacagtataattgaccaaaacaacccaca

SEQ ID NO: 185246 - DNA, 76 bp, Homo sapiens
taaattgacagacctcataaaacacaatgagtacagacacagtataattgaccaaaacaacccacacgctcattta

SEQ ID NO: 185247 - DNA, 73 bp, Homo sapiens
cacaatgagtacagacacagtataattgaccaaaacaacccacacgctcatttaataattatacgtagaattt

SEQ ID NO: 185248 - DNA, 72 bp, Homo sapiens
gagtacagacacagtataattgaccaaaacaacccacacgctcatttaataattatacgtagaatttttcta

SEQ ID NO: 185249 - DNA, 70 bp, Homo sapiens
cacagtataattgaccaaaacaacccacacgctcatttaataattatacgtagaatttttctatctcgtt

SEQ ID NO: 185250 - DNA, 66 bp, Homo sapiens
ttgaccaaaacaacccacacgctcatttaataattatacgtagaatttttctatctcgtttttttt

SEQ ID NO: 185251 - DNA, 67 bp, Homo sapiens
caacccacacgctcatttaataattatacgtagaatttttctatctcgtttttttttatacttgaag

SEQ ID NO: 185252 - DNA, 67 bp, Homo sapiens
gctcatttaataattatacgtagaatttttctatctcgtttttttttatacttgaagttctagggta

SEQ ID NO: 185253 - DNA, 75 bp, Homo sapiens
cctaatgctatccttgaataaagttcagaagttttatatgtatccatagaacactgataaaaatcaatcataagg

SEQ ID NO: 185254 - DNA, 77 bp, Homo sapiens
tgctatccttgaataaagttcagaagttttatatgtatccatagaacactgataaaaatcaatcataaggtaacata

SEQ ID NO: 185255 - DNA, 74 bp, Homo sapiens
gaataaagttcagaagttttatatgtatccatagaacactgataaaaatcaatcataaggtaacataagcttta

SEQ ID NO: 185256 - DNA, 72 bp, Homo sapiens
cagaagttttatatgtatccatagaacactgataaaaatcaatcataaggtaacataagctttaaaacaccc

SEQ ID NO: 185257 - DNA, 69 bp, Homo sapiens
gtatccatagaacactgataaaaatcaatcataaggtaacataagctttaaaacaccccttttaaaatg

SEQ ID NO: 185258 - DNA, 67 bp, Homo sapiens
atagaacactgataaaaatcaatcataaggtaacataagctttaaaacaccccttttaaaatgtttg

SEQ ID NO: 185259 - DNA, 68 bp, Homo sapiens
cactgataaaaatcaatcataaggtaacataagctttaaaacaccccttttaaaatgtttgtatagat

SEQ ID NO: 185260 - DNA, 68 bp, Homo sapiens
aaatcaatcataaggtaacataagctttaaaacaccccttttaaaatgtttgtatagattacattggc

SEQ ID NO: 185261 - DNA, 69 bp, Homo sapiens
tcaatcataaggtaacataagctttaaaacaccccttttaaaatgtttgtatagattacattggctacc

SEQ ID NO: 185262 - DNA, 66 bp, Homo sapiens
taaggtaacataagctttaaaacaccccttttaaaatgtttgtatagattacattggctaccctac

SEQ ID NO: 185263 - DNA, 67 bp, Homo sapiens
ggtaacataagctttaaaacaccccttttaaaatgtttgtatagattacattggctaccctactcca

SEQ ID NO: 185264 - DNA, 67 bp, Homo sapiens
cataagctttaaaacaccccttttaaaatgtttgtatagattacattggctaccctactccaagaaa

SEQ ID NO: 185265 - DNA, 66 bp, Homo sapiens
taagctttaaaacaccccttttaaaatgtttgtatagattacattggctaccctactccaagaaaa

SEQ ID NO: 185266 - DNA, 66 bp, Homo sapiens
tttaaaacaccccttttaaaatgtttgtatagattacattggctaccctactccaagaaaattaga

SEQ ID NO: 185267 - DNA, 67 bp, Homo sapiens
cccttttaaaatgtttgtatagattacattggctaccctactccaagaaaattagaaaattaggcca

SEQ ID NO: 185268 - DNA, 67 bp, Homo sapiens
taaataaattaaagacaaataaatcaaaagaaaacaatgaaaatagcacttcatataaaaaaaactc

SEQ ID NO: 185269 - DNA, 70 bp, Homo sapiens
aaagacaaataaatcaaaagaaaacaatgaaaatagcacttcatataaaaaaaactctggaggcacagaa

SEQ ID NO: 185270 - DNA, 72 bp, Homo sapiens
aaatcaaaagaaaacaatgaaaatagcacttcatataaaaaaaactctggaggcacagaaaaacatgctcca

SEQ ID NO: 185271 - DNA, 71 bp, Homo sapiens
gaaaacaatgaaaatagcacttcatataaaaaaaactctggaggcacagaaaaacatgctccagggaaaat

SEQ ID NO: 185272 - DNA, 71 bp, Homo sapiens
aaaatagcacttcatataaaaaaaactctggaggcacagaaaaacatgctccagggaaaattcatagcctt

SEQ ID NO: 185273 - DNA, 72 bp, Homo sapiens
tcatataaaaaaaactctggaggcacagaaaaacatgctccagggaaaattcatagcctttattgcgtttgt

SEQ ID NO: 185274 - DNA, 68 bp, Homo sapiens
aaaaaactctggaggcacagaaaaacatgctccagggaaaattcatagcctttattgcgtttgttttt

SEQ ID NO: 185275 - DNA, 70 bp, Homo sapiens
tctggaggcacagaaaaacatgctccagggaaaattcatagcctttattgcgtttgttttttaaacaaaa

SEQ ID NO: 185276 - DNA, 67 bp, Homo sapiens
cagaaaaacatgctccagggaaaattcatagcctttattgcgtttgttttttaaacaaaaaagaaga

SEQ ID NO: 185277 - DNA, 67 bp, Homo sapiens
ttcatagcctttattgcgtttgttttttaaacaaaaaagaagaggtacaaggagaagagagaaacca

SEQ ID NO: 185278 - DNA, 64 bp, Homo sapiens
gttttttaaacaaaaaagaagaggtacaaggagaagagagaaaccaagtacaaagctaaactta

SEQ ID NO: 185279 - DNA, 69 bp, Homo sapiens
caaaaaagaagaggtacaaggagaagagagaaaccaagtacaaagctaaacttagtattcactttgaga

SEQ ID NO: 185280 - DNA, 69 bp, Homo sapiens
aagaagaggtacaaggagaagagagaaaccaagtacaaagctaaacttagtattcactttgagaaactg

SEQ ID NO: 185281 - DNA, 71 bp, Homo sapiens
agagaaaccaagtacaaagctaaacttagtattcactttgagaaactgggaaaagatccacaaaacatgca

SEQ ID NO: 185282 - DNA, 71 bp, Homo sapiens
caaagctaaacttagtattcactttgagaaactgggaaaagatccacaaaacatgcaaacattataatacc

SEQ ID NO: 185283 - DNA, 71 bp, Homo sapiens
ctaaacttagtattcactttgagaaactgggaaaagatccacaaaacatgcaaacattataatacccaaca

SEQ ID NO: 185284 - DNA, 72 bp, Homo sapiens
attcactttgagaaactgggaaaagatccacaaaacatgcaaacattataatacccaacataatgaagaaag

SEQ ID NO: 185285 - DNA, 71 bp, Homo sapiens
gagaaactgggaaaagatccacaaaacatgcaaacattataatacccaacataatgaagaaagtaaaagaa

SEQ ID NO: 185286 - DNA, 72 bp, Homo sapiens
gatccacaaaacatgcaaacattataatacccaacataatgaagaaagtaaaagaaacaagtttcaccaaca

SEQ ID NO: 185287 - DNA, 73 bp, Homo sapiens
caaaacatgcaaacattataatacccaacataatgaagaaagtaaaagaaacaagtttcaccaacatcagtgc

SEQ ID NO: 185288 - DNA, 70 bp, Homo sapiens
caaacattataatacccaacataatgaagaaagtaaaagaaacaagtttcaccaacatcagtgctttaat

SEQ ID NO: 185289 - DNA, 70 bp, Homo sapiens
aatacccaacataatgaagaaagtaaaagaaacaagtttcaccaacatcagtgctttaattatataattg

SEQ ID NO: 185290 - DNA, 74 bp, Homo sapiens
gaagaaagtaaaagaaacaagtttcaccaacatcagtgctttaattatataattgtataatgtcctgacatata

SEQ ID NO: 185291 - DNA, 74 bp, Homo sapiens
aaagaaacaagtttcaccaacatcagtgctttaattatataattgtataatgtcctgacatatatgtttagtgt

SEQ ID NO: 185292 - DNA, 77 bp, Homo sapiens
caagtttcaccaacatcagtgctttaattatataattgtataatgtcctgacatatatgtttagtgttccaatccta

SEQ ID NO: 185293 - DNA, 76 bp, Homo sapiens
accaacatcagtgctttaattatataattgtataatgtcctgacatatatgtttagtgttccaatcctaaggagaa

SEQ ID NO: 185294 - DNA, 74 bp, Homo sapiens
gctttaattatataattgtataatgtcctgacatatatgtttagtgttccaatcctaaggagaaatttgccaag

SEQ ID NO: 185295 - DNA, 73 bp, Homo sapiens
aattgtataatgtcctgacatatatgtttagtgttccaatcctaaggagaaatttgccaagttaattctgact

SEQ ID NO: 185296 - DNA, 72 bp, Homo sapiens
aatgtcctgacatatatgtttagtgttccaatcctaaggagaaatttgccaagttaattctgacttaaagaa

SEQ ID NO: 185297 - DNA, 70 bp, Homo sapiens
gacatatatgtttagtgttccaatcctaaggagaaatttgccaagttaattctgacttaaagaaaattta

SEQ ID NO: 185298 - DNA, 72 bp, Homo sapiens
ttctgacttaaagaaaatttacaatctacttctctacattaactgaaagaagtgaaatttcttgcatgtaaa

SEQ ID NO: 185299 - DNA, 71 bp, Homo sapiens
gaaaatttacaatctacttctctacattaactgaaagaagtgaaatttcttgcatgtaaaatttcttgaat

SEQ ID NO: 185300 - DNA, 72 bp, Homo sapiens
caatctacttctctacattaactgaaagaagtgaaatttcttgcatgtaaaatttcttgaattaaaaactca

SEQ ID NO: 185301 - DNA, 72 bp, Homo sapiens
tctctacattaactgaaagaagtgaaatttcttgcatgtaaaatttcttgaattaaaaactcagattttcca

SEQ ID NO: 185302 - DNA, 69 bp, Homo sapiens
actgaaagaagtgaaatttcttgcatgtaaaatttcttgaattaaaaactcagattttccataaaagga

SEQ ID NO: 185303 - DNA, 71 bp, Homo sapiens
tgaaatttcttgcatgtaaaatttcttgaattaaaaactcagattttccataaaaggaataagattaatga

SEQ ID NO: 185304 - DNA, 73 bp, Homo sapiens
cttgcatgtaaaatttcttgaattaaaaactcagattttccataaaaggaataagattaatgaggagacagca

SEQ ID NO: 185305 - DNA, 74 bp, Homo sapiens
tcttgaattaaaaactcagattttccataaaaggaataagattaatgaggagacagcaatttagaaacatgtca

SEQ ID NO: 185306 - DNA, 71 bp, Homo sapiens
aaaactcagattttccataaaaggaataagattaatgaggagacagcaatttagaaacatgtcaaaatagg

SEQ ID NO: 185307 - DNA, 72 bp, Homo sapiens
cagattttccataaaaggaataagattaatgaggagacagcaatttagaaacatgtcaaaataggtacttaa

SEQ ID NO: 185308 - DNA, 70 bp, Homo sapiens
aaaggaataagattaatgaggagacagcaatttagaaacatgtcaaaataggtacttaaataccaaaaga

SEQ ID NO: 185309 - DNA, 73 bp, Homo sapiens
agattaatgaggagacagcaatttagaaacatgtcaaaataggtacttaaataccaaaagaatcaacccatca

SEQ ID NO: 185310 - DNA, 75 bp, Homo sapiens
tgaggagacagcaatttagaaacatgtcaaaataggtacttaaataccaaaagaatcaacccatcaattggcaga

SEQ ID NO: 185311 - DNA, 76 bp, Homo sapiens
gaaagagagagagaatgtactaagggaaagagtgaagcaaaatggactgctgatgctttttataggatttttagca

SEQ ID NO: 185312 - DNA, 76 bp, Homo sapiens
gtactaagggaaagagtgaagcaaaatggactgctgatgctttttataggatttttagcaagatatgagttcatat

SEQ ID NO: 185313 - DNA, 77 bp, Homo sapiens
gaaagagtgaagcaaaatggactgctgatgctttttataggatttttagcaagatatgagttcatattgtaaatgtt

SEQ ID NO: 185314 - DNA, 75 bp, Homo sapiens
agcaaaatggactgctgatgctttttataggatttttagcaagatatgagttcatattgtaaatgttttattaaa

SEQ ID NO: 185315 - DNA, 73 bp, Homo sapiens
actgctgatgctttttataggatttttagcaagatatgagttcatattgtaaatgttttattaaaaattaatg

SEQ ID NO: 185316 - DNA, 69 bp, Homo sapiens
ctttttataggatttttagcaagatatgagttcatattgtaaatgttttattaaaaattaatgttataa

SEQ ID NO: 185317 - DNA, 70 bp, Homo sapiens
gatttttagcaagatatgagttcatattgtaaatgttttattaaaaattaatgttataataaaattataa

SEQ ID NO: 185318 - DNA, 65 bp, Homo sapiens
ttaaaaattaatgttataataaaattataaaacagaaaacaccttaacaattggtaggattaatg

SEQ ID NO: 185319 - DNA, 66 bp, Homo sapiens
atgttataataaaattataaaacagaaaacaccttaacaattggtaggattaatgtgttttaaaga

SEQ ID NO: 185320 - DNA, 64 bp, Homo sapiens
aaaattataaaacagaaaacaccttaacaattggtaggattaatgtgttttaaagaatcaaaac

SEQ ID NO: 185321 - DNA, 65 bp, Homo sapiens
aacagaaaacaccttaacaattggtaggattaatgtgttttaaagaatcaaaacctatttaaaca

SEQ ID NO: 185322 - DNA, 65 bp, Homo sapiens
aacaccttaacaattggtaggattaatgtgttttaaagaatcaaaacctatttaaacaccgagtc

SEQ ID NO: 185323 - DNA, 69 bp, Homo sapiens
taatgtgttttaaagaatcaaaacctatttaaacaccgagtctaaacagagccactgagacccaaaatc

SEQ ID NO: 185324 - DNA, 73 bp, Homo sapiens
aatcaaaacctatttaaacaccgagtctaaacagagccactgagacccaaaatctaacatgtctcagtcaatg

SEQ ID NO: 185325 - DNA, 76 bp, Homo sapiens
tatttaaacaccgagtctaaacagagccactgagacccaaaatctaacatgtctcagtcaatgggcagaagactaa

SEQ ID NO: 185326 - DNA, 78 bp, Homo sapiens
agtctaaacagagccactgagacccaaaatctaacatgtctcagtcaatgggcagaagactaaaagaacatgccacaa

SEQ ID NO: 185327 - DNA, 76 bp, Homo sapiens
acccaaaatctaacatgtctcagtcaatgggcagaagactaaaagaacatgccacaagtggaagagaaatggcact

SEQ ID NO: 185328 - DNA, 79 bp, Homo sapiens
aatctaacatgtctcagtcaatgggcagaagactaaaagaacatgccacaagtggaagagaaatggcacttgagaagcc

SEQ ID NO: 185329 - DNA, 79 bp, Homo sapiens
aacatgtctcagtcaatgggcagaagactaaaagaacatgccacaagtggaagagaaatggcacttgagaagcccaaga

SEQ ID NO: 185330 - DNA, 76 bp, Homo sapiens
agtcaatgggcagaagactaaaagaacatgccacaagtggaagagaaatggcacttgagaagcccaagagtctttc

SEQ ID NO: 185331 - DNA, 74 bp, Homo sapiens
gactaaaagaacatgccacaagtggaagagaaatggcacttgagaagcccaagagtctttcgttcaaaacaata

SEQ ID NO: 185332 - DNA, 74 bp, Homo sapiens
ctaaaagaacatgccacaagtggaagagaaatggcacttgagaagcccaagagtctttcgttcaaaacaatata

SEQ ID NO: 185333 - DNA, 75 bp, Homo sapiens
aaagaacatgccacaagtggaagagaaatggcacttgagaagcccaagagtctttcgttcaaaacaatatatgtg

SEQ ID NO: 185334 - DNA, 77 bp, Homo sapiens
ccacaagtggaagagaaatggcacttgagaagcccaagagtctttcgttcaaaacaatatatgtggccagtgcacaa

SEQ ID NO: 185335 - DNA, 75 bp, Homo sapiens
agtggaagagaaatggcacttgagaagcccaagagtctttcgttcaaaacaatatatgtggccagtgcacaaaaa

SEQ ID NO: 185336 - DNA, 71 bp, Homo sapiens
ctttcgttcaaaacaatatatgtggccagtgcacaaaaaggacaaaaaatatttatacacactcaagaaaa

SEQ ID NO: 185337 - DNA, 72 bp, Homo sapiens
caatatatgtggccagtgcacaaaaaggacaaaaaatatttatacacactcaagaaaaagaaaggtctcctg

SEQ ID NO: 185338 - DNA, 71 bp, Homo sapiens
gtggccagtgcacaaaaaggacaaaaaatatttatacacactcaagaaaaagaaaggtctcctgttatgaa

SEQ ID NO: 185339 - DNA, 71 bp, Homo sapiens
gcacaaaaaggacaaaaaatatttatacacactcaagaaaaagaaaggtctcctgttatgaaatacaatgc

SEQ ID NO: 185340 - DNA, 69 bp, Homo sapiens
atacacactcaagaaaaagaaaggtctcctgttatgaaatacaatgctttggaaggttttacttgtttc

SEQ ID NO: 185341 - DNA, 66 bp, Homo sapiens
caagaaaaagaaaggtctcctgttatgaaatacaatgctttggaaggttttacttgtttcgacttt

SEQ ID NO: 185342 - DNA, 69 bp, Homo sapiens
aaggtctcctgttatgaaatacaatgctttggaaggttttacttgtttcgacttttgaataatctccca

SEQ ID NO: 185343 - DNA, 68 bp, Homo sapiens
ctcctgttatgaaatacaatgctttggaaggttttacttgtttcgacttttgaataatctcccatttt

SEQ ID NO: 185344 - DNA, 69 bp, Homo sapiens
tacaatgctttggaaggttttacttgtttcgacttttgaataatctcccattttttaaggtgacattca

SEQ ID NO: 185345 - DNA, 67 bp, Homo sapiens
gctttggaaggttttacttgtttcgacttttgaataatctcccattttttaaggtgacattcaacca

SEQ ID NO: 185346 - DNA, 68 bp, Homo sapiens
ttacttgtttcgacttttgaataatctcccattttttaaggtgacattcaaccagaaagttagaggga

SEQ ID NO: 185347 - DNA, 69 bp, Homo sapiens
cgacttttgaataatctcccattttttaaggtgacattcaaccagaaagttagagggaactctacaata

SEQ ID NO: 185348 - DNA, 72 bp, Homo sapiens
aataatctcccattttttaaggtgacattcaaccagaaagttagagggaactctacaatatatcctcgcaga

SEQ ID NO: 185349 - DNA, 72 bp, Homo sapiens
tttttaaggtgacattcaaccagaaagttagagggaactctacaatatatcctcgcagatccaaaataataa

SEQ ID NO: 185350 - DNA, 73 bp, Homo sapiens
aaggtgacattcaaccagaaagttagagggaactctacaatatatcctcgcagatccaaaataataaagccat

SEQ ID NO: 185351 - DNA, 76 bp, Homo sapiens
tacaatatatcctcgcagatccaaaataataaagccatttctagacctgaccagggaagagcagcagttttacaaa

SEQ ID NO: 185352 - DNA, 70 bp, Homo sapiens
ccaaaataataaagccatttctagacctgaccagggaagagcagcagttttacaaaactaaagaattaca

SEQ ID NO: 185353 - DNA, 70 bp, Homo sapiens
taaagccatttctagacctgaccagggaagagcagcagttttacaaaactaaagaattacatccttaaat

SEQ ID NO: 185354 - DNA, 70 bp, Homo sapiens
atttctagacctgaccagggaagagcagcagttttacaaaactaaagaattacatccttaaattcctcaa

SEQ ID NO: 185355 - DNA, 69 bp, Homo sapiens
accagggaagagcagcagttttacaaaactaaagaattacatccttaaattcctcaatttacccagatc

SEQ ID NO: 185356 - DNA, 70 bp, Homo sapiens
gaagagcagcagttttacaaaactaaagaattacatccttaaattcctcaatttacccagatctgtaaaa

SEQ ID NO: 185357 - DNA, 71 bp, Homo sapiens
ctaaagaattacatccttaaattcctcaatttacccagatctgtaaaataaccaatatagatataaccaca

SEQ ID NO: 185358 - DNA, 72 bp, Homo sapiens
cctcaatttacccagatctgtaaaataaccaatatagatataaccacacttacagaaatacaaataagtctg

SEQ ID NO: 185359 - DNA, 74 bp, Homo sapiens
ctgtaaaataaccaatatagatataaccacacttacagaaatacaaataagtctggattttgcactaatgacga

SEQ ID NO: 185360 - DNA, 79 bp, Homo sapiens
caatatagatataaccacacttacagaaatacaaataagtctggattttgcactaatgacgaaagatacagcaatcatc

SEQ ID NO: 185361 - DNA, 76 bp, Homo sapiens
taaccacacttacagaaatacaaataagtctggattttgcactaatgacgaaagatacagcaatcatcctaacagt

SEQ ID NO: 185362 - DNA, 77 bp, Homo sapiens
tacagaaatacaaataagtctggattttgcactaatgacgaaagatacagcaatcatcctaacagttaagcaagaac

SEQ ID NO: 185363 - DNA, 76 bp, Homo sapiens
aatacaaataagtctggattttgcactaatgacgaaagatacagcaatcatcctaacagttaagcaagaaccaaca

SEQ ID NO: 185364 - DNA, 78 bp, Homo sapiens
aagtctggattttgcactaatgacgaaagatacagcaatcatcctaacagttaagcaagaaccaacacataacatgaa

SEQ ID NO: 185365 - DNA, 79 bp, Homo sapiens
tttgcactaatgacgaaagatacagcaatcatcctaacagttaagcaagaaccaacacataacatgaaagagcaaaaga

SEQ ID NO: 185366 - DNA, 79 bp, Homo sapiens
caatcatcctaacagttaagcaagaaccaacacataacatgaaagagcaaaagatgatgctgaccgttcaaggagagat

SEQ ID NO: 185367 - DNA, 78 bp, Homo sapiens
accaacacataacatgaaagagcaaaagatgatgctgaccgttcaaggagagattcgagagaataatgaaagattccc

SEQ ID NO: 185368 - DNA, 79 bp, Homo sapiens
aacatgaaagagcaaaagatgatgctgaccgttcaaggagagattcgagagaataatgaaagattcccctcagccatac

SEQ ID NO: 185369 - DNA, 78 bp, Homo sapiens
aaaagatgatgctgaccgttcaaggagagattcgagagaataatgaaagattcccctcagccatacctgactatgaat

SEQ ID NO: 185370 - DNA, 78 bp, Homo sapiens
ttcaaggagagattcgagagaataatgaaagattcccctcagccatacctgactatgaattctgacaattatttatta

SEQ ID NO: 185371 - DNA, 76 bp, Homo sapiens
ttcccctcagccatacctgactatgaattctgacaattatttattaggaaagacaggccttaatagcagccgcaaa

SEQ ID NO: 185372 - DNA, 77 bp, Homo sapiens
atacctgactatgaattctgacaattatttattaggaaagacaggccttaatagcagccgcaaagagtagtgacatc

SEQ ID NO: 185373 - DNA, 77 bp, Homo sapiens
tatgaattctgacaattatttattaggaaagacaggccttaatagcagccgcaaagagtagtgacatctgggagtag

SEQ ID NO: 185374 - DNA, 76 bp, Homo sapiens
acaattatttattaggaaagacaggccttaatagcagccgcaaagagtagtgacatctgggagtagtgacatctgg

SEQ ID NO: 185375 - DNA, 76 bp, Homo sapiens
ttattaggaaagacaggccttaatagcagccgcaaagagtagtgacatctgggagtagtgacatctgggaaacaaa

SEQ ID NO: 185376 - DNA, 74 bp, Homo sapiens
aaagacaggccttaatagcagccgcaaagagtagtgacatctgggagtagtgacatctgggaaacaaaagaaac

SEQ ID NO: 185377 - DNA, 74 bp, Homo sapiens
ttaatagcagccgcaaagagtagtgacatctgggagtagtgacatctgggaaacaaaagaaacccacctgaaaa

SEQ ID NO: 185378 - DNA, 70 bp, Homo sapiens
caaagagtagtgacatctgggagtagtgacatctgggaaacaaaagaaacccacctgaaaactttaaaga

SEQ ID NO: 185379 - DNA, 72 bp, Homo sapiens
tgacatctgggagtagtgacatctgggaaacaaaagaaacccacctgaaaactttaaagaggagatcaatat

SEQ ID NO: 185380 - DNA, 69 bp, Homo sapiens
ggagtagtgacatctgggaaacaaaagaaacccacctgaaaactttaaagaggagatcaatattaacta

SEQ ID NO: 185381 - DNA, 69 bp, Homo sapiens
gtgacatctgggaaacaaaagaaacccacctgaaaactttaaagaggagatcaatattaactaatcact

SEQ ID NO: 185382 - DNA, 68 bp, Homo sapiens
caaaagaaacccacctgaaaactttaaagaggagatcaatattaactaatcactttaggaaggtcatc

SEQ ID NO: 185383 - DNA, 70 bp, Homo sapiens
aacccacctgaaaactttaaagaggagatcaatattaactaatcactttaggaaggtcatctggtagcaa

SEQ ID NO: 185384 - DNA, 73 bp, Homo sapiens
aaaactttaaagaggagatcaatattaactaatcactttaggaaggtcatctggtagcaatgtgggacagtga

SEQ ID NO: 185385 - DNA, 79 bp, Homo sapiens
aatattaactaatcactttaggaaggtcatctggtagcaatgtgggacagtgatggtgacaatgatggtgacagtggtg

SEQ ID NO: 185386 - DNA, 82 bp, Homo sapiens
taatcactttaggaaggtcatctggtagcaatgtgggacagtgatggtgacaatgatggtgacagtggtggcagcggtaata

SEQ ID NO: 185387 - DNA, 83 bp, Homo sapiens
taggaaggtcatctggtagcaatgtgggacagtgatggtgacaatgatggtgacagtggtggcagcggtaatagcttaatgaa

SEQ ID NO: 185388 - DNA, 83 bp, Homo sapiens
atctggtagcaatgtgggacagtgatggtgacaatgatggtgacagtggtggcagcggtaatagcttaatgaatgcttactaa

SEQ ID NO: 185389 - DNA, 81 bp, Homo sapiens
tggtgacaatgatggtgacagtggtggcagcggtaatagcttaatgaatgcttactaatccagactgatgtagaagtttta

SEQ ID NO: 185390 - DNA, 80 bp, Homo sapiens
gatggtgacagtggtggcagcggtaatagcttaatgaatgcttactaatccagactgatgtagaagttttatcattatta

SEQ ID NO: 185391 - DNA, 77 bp, Homo sapiens
agtggtggcagcggtaatagcttaatgaatgcttactaatccagactgatgtagaagttttatcattattaactcaa

SEQ ID NO: 185392 - DNA, 77 bp, Homo sapiens
ggcagcggtaatagcttaatgaatgcttactaatccagactgatgtagaagttttatcattattaactcaacaatct

SEQ ID NO: 185393 - DNA, 78 bp, Homo sapiens
agcttaatgaatgcttactaatccagactgatgtagaagttttatcattattaactcaacaatcttgtgaaatagcta

SEQ ID NO: 185394 - DNA, 77 bp, Homo sapiens
tgcttactaatccagactgatgtagaagttttatcattattaactcaacaatcttgtgaaatagctattattagccc

SEQ ID NO: 185395 - DNA, 74 bp, Homo sapiens
aatccagactgatgtagaagttttatcattattaactcaacaatcttgtgaaatagctattattagccccaatt

SEQ ID NO: 185396 - DNA, 75 bp, Homo sapiens
tgatgtagaagttttatcattattaactcaacaatcttgtgaaatagctattattagccccaatttataagtgag

SEQ ID NO: 185397 - DNA, 73 bp, Homo sapiens
gttttatcattattaactcaacaatcttgtgaaatagctattattagccccaatttataagtgaggaaactga

SEQ ID NO: 185398 - DNA, 74 bp, Homo sapiens
actcaacaatcttgtgaaatagctattattagccccaatttataagtgaggaaactgaggtacgaatatcaatg

SEQ ID NO: 185399 - DNA, 76 bp, Homo sapiens
atagctattattagccccaatttataagtgaggaaactgaggtacgaatatcaatgtgcccaaagacacatatata

SEQ ID NO: 185400 - DNA, 78 bp, Homo sapiens
tataagtgaggaaactgaggtacgaatatcaatgtgcccaaagacacatatataattagtgataaaactgacactcaa

SEQ ID NO: 185401 - DNA, 77 bp, Homo sapiens
gtgaggaaactgaggtacgaatatcaatgtgcccaaagacacatatataattagtgataaaactgacactcaagccc

SEQ ID NO: 185402 - DNA, 77 bp, Homo sapiens
tacgaatatcaatgtgcccaaagacacatatataattagtgataaaactgacactcaagcccccagttagtctgact

SEQ ID NO: 185403 - DNA, 76 bp, Homo sapiens
atatcaatgtgcccaaagacacatatataattagtgataaaactgacactcaagcccccagttagtctgacttctt

SEQ ID NO: 185404 - DNA, 73 bp, Homo sapiens
acatatataattagtgataaaactgacactcaagcccccagttagtctgacttcttttctttggagatggtct

SEQ ID NO: 185405 - DNA, 70 bp, Homo sapiens
catgcaccaccactatatttttatagtcttaaccactacatttttatttacacttgtaaagtcagtgggt

SEQ ID NO: 185406 - DNA, 68 bp, Homo sapiens
caccactatatttttatagtcttaaccactacatttttatttacacttgtaaagtcagtgggtttcaa

SEQ ID NO: 185407 - DNA, 73 bp, Homo sapiens
tatagtcttaaccactacatttttatttacacttgtaaagtcagtgggtttcaaaatcagctgtcaatcttgc

SEQ ID NO: 185408 - DNA, 72 bp, Homo sapiens
ccactacatttttatttacacttgtaaagtcagtgggtttcaaaatcagctgtcaatcttgccaatataacc

SEQ ID NO: 185409 - DNA, 73 bp, Homo sapiens
tttatttacacttgtaaagtcagtgggtttcaaaatcagctgtcaatcttgccaatataacctgggccagaaa

SEQ ID NO: 185410 - DNA, 75 bp, Homo sapiens
ttacacttgtaaagtcagtgggtttcaaaatcagctgtcaatcttgccaatataacctgggccagaaatgaaaga

SEQ ID NO: 185411 - DNA, 75 bp, Homo sapiens
aaagtcagtgggtttcaaaatcagctgtcaatcttgccaatataacctgggccagaaatgaaagaagatatagaa

SEQ ID NO: 185412 - DNA, 75 bp, Homo sapiens
ggtttcaaaatcagctgtcaatcttgccaatataacctgggccagaaatgaaagaagatatagaatgggggagag

SEQ ID NO: 185413 - DNA, 77 bp, Homo sapiens
tgtcaatcttgccaatataacctgggccagaaatgaaagaagatatagaatgggggagaggctcaatgactgtaaaa

SEQ ID NO: 185414 - DNA, 75 bp, Homo sapiens
atcttgccaatataacctgggccagaaatgaaagaagatatagaatgggggagaggctcaatgactgtaaaagaa

SEQ ID NO: 185415 - DNA, 76 bp, Homo sapiens
tataacctgggccagaaatgaaagaagatatagaatgggggagaggctcaatgactgtaaaagaacatcatcaaaa

SEQ ID NO: 185416 - DNA, 77 bp, Homo sapiens
aaatgaaagaagatatagaatgggggagaggctcaatgactgtaaaagaacatcatcaaaaatatgcctgttgtcta

SEQ ID NO: 185417 - DNA, 79 bp, Homo sapiens
agatatagaatgggggagaggctcaatgactgtaaaagaacatcatcaaaaatatgcctgttgtctaggcagaactata

SEQ ID NO: 185418 - DNA, 78 bp, Homo sapiens
tagaatgggggagaggctcaatgactgtaaaagaacatcatcaaaaatatgcctgttgtctaggcagaactatacaaa

SEQ ID NO: 185419 - DNA, 77 bp, Homo sapiens
aggctcaatgactgtaaaagaacatcatcaaaaatatgcctgttgtctaggcagaactatacaaatgaagttctatt

SEQ ID NO: 185420 - DNA, 75 bp, Homo sapiens
ctgtaaaagaacatcatcaaaaatatgcctgttgtctaggcagaactatacaaatgaagttctatttatttccag

SEQ ID NO: 185421 - DNA, 75 bp, Homo sapiens
agaacatcatcaaaaatatgcctgttgtctaggcagaactatacaaatgaagttctatttatttccagtagaggg

SEQ ID NO: 185422 - DNA, 71 bp, Homo sapiens
caaaaatatgcctgttgtctaggcagaactatacaaatgaagttctatttatttccagtagagggggtaaa

SEQ ID NO: 185423 - DNA, 70 bp, Homo sapiens
gcctgttgtctaggcagaactatacaaatgaagttctatttatttccagtagagggggtaaaatattatt

SEQ ID NO: 185424 - DNA, 67 bp, Homo sapiens
tacaaatgaagttctatttatttccagtagagggggtaaaatattattttttggcaggtgattaaaa

SEQ ID NO: 185425 - DNA, 67 bp, Homo sapiens
ctatttatttccagtagagggggtaaaatattattttttggcaggtgattaaaaaatgcaatgggcc

SEQ ID NO: 185426 - DNA, 66 bp, Homo sapiens
tatttccagtagagggggtaaaatattattttttggcaggtgattaaaaaatgcaatgggcccccc

SEQ ID NO: 185427 - DNA, 67 bp, Homo sapiens
gggtaaaatattattttttggcaggtgattaaaaaatgcaatgggcccccctggccccccatatcca

SEQ ID NO: 185428 - DNA, 66 bp, Homo sapiens
aatattattttttggcaggtgattaaaaaatgcaatgggcccccctggccccccatatccaagggt

SEQ ID NO: 185429 - DNA, 71 bp, Homo sapiens
ttttggcaggtgattaaaaaatgcaatgggcccccctggccccccatatccaagggttctgtatccacaga

SEQ ID NO: 185430 - DNA, 69 bp, Homo sapiens
attaaaaaatgcaatgggcccccctggccccccatatccaagggttctgtatccacagattcaaccaac

SEQ ID NO: 185431 - DNA, 71 bp, Homo sapiens
atgcaatgggcccccctggccccccatatccaagggttctgtatccacagattcaaccaaccacggaccaa

SEQ ID NO: 185432 - DNA, 71 bp, Homo sapiens
ctggccccccatatccaagggttctgtatccacagattcaaccaaccacggaccaagaatattcaggaaaa

SEQ ID NO: 185433 - DNA, 72 bp, Homo sapiens
atatccaagggttctgtatccacagattcaaccaaccacggaccaagaatattcaggaaaaggccaggtaca

SEQ ID NO: 185434 - DNA, 78 bp, Homo sapiens
ctatttacatagcacttacattgtgttgagtagtataacaaatctagaaataatttaaggcatacaggaggatgtgca

SEQ ID NO: 185435 - DNA, 78 bp, Homo sapiens
catagcacttacattgtgttgagtagtataacaaatctagaaataatttaaggcatacaggaggatgtgcataaatta

SEQ ID NO: 185436 - DNA, 78 bp, Homo sapiens
cattgtgttgagtagtataacaaatctagaaataatttaaggcatacaggaggatgtgcataaattatatgcaaatac

SEQ ID NO: 185437 - DNA, 76 bp, Homo sapiens
tatgcaaatactatgccattttgtacaagggatttgaggattcatagattttggcaactgagaaggtcctggaacc

SEQ ID NO: 185438 - DNA, 75 bp, Homo sapiens
actatgccattttgtacaagggatttgaggattcatagattttggcaactgagaaggtcctggaacccatcaatc

SEQ ID NO: 185439 - DNA, 72 bp, Homo sapiens
attttgtacaagggatttgaggattcatagattttggcaactgagaaggtcctggaacccatcaatccccta

SEQ ID NO: 185440 - DNA, 75 bp, Homo sapiens
aagggatttgaggattcatagattttggcaactgagaaggtcctggaacccatcaatcccctatgaatactgaga

SEQ ID NO: 185441 - DNA, 75 bp, Homo sapiens
attcatagattttggcaactgagaaggtcctggaacccatcaatcccctatgaatactgagaggcaactgtaatt

SEQ ID NO: 185442 - DNA, 76 bp, Homo sapiens
ttcatagattttggcaactgagaaggtcctggaacccatcaatcccctatgaatactgagaggcaactgtaattta

SEQ ID NO: 185443 - DNA, 72 bp, Homo sapiens
attttggcaactgagaaggtcctggaacccatcaatcccctatgaatactgagaggcaactgtaatttattt

SEQ ID NO: 185444 - DNA, 72 bp, Homo sapiens
aactgagaaggtcctggaacccatcaatcccctatgaatactgagaggcaactgtaatttattttaaaatca

SEQ ID NO: 185445 - DNA, 75 bp, Homo sapiens
tggaacccatcaatcccctatgaatactgagaggcaactgtaatttattttaaaatcagaggctcttcttgtata

SEQ ID NO: 185446 - DNA, 76 bp, Homo sapiens
ccatcaatcccctatgaatactgagaggcaactgtaatttattttaaaatcagaggctcttcttgtatacatttca

SEQ ID NO: 185447 - DNA, 73 bp, Homo sapiens
cctatgaatactgagaggcaactgtaatttattttaaaatcagaggctcttcttgtatacatttcaagtgggt

SEQ ID NO: 185448 - DNA, 72 bp, Homo sapiens
tgagaggcaactgtaatttattttaaaatcagaggctcttcttgtatacatttcaagtgggttaaactttga

SEQ ID NO: 185449 - DNA, 69 bp, Homo sapiens
taaaatcagaggctcttcttgtatacatttcaagtgggttaaactttgagtcttttggtactaaataaa

SEQ ID NO: 185450 - DNA, 68 bp, Homo sapiens
cagaggctcttcttgtatacatttcaagtgggttaaactttgagtcttttggtactaaataaatattt

SEQ ID NO: 185451 - DNA, 66 bp, Homo sapiens
cttgtatacatttcaagtgggttaaactttgagtcttttggtactaaataaatatttttaagttga

SEQ ID NO: 185452 - DNA, 65 bp, Homo sapiens
tcaagtgggttaaactttgagtcttttggtactaaataaatatttttaagttgataaacttatta

SEQ ID NO: 185453 - DNA, 66 bp, Homo sapiens
taaactttgagtcttttggtactaaataaatatttttaagttgataaacttattagtagagttgtg

SEQ ID NO: 185454 - DNA, 69 bp, Homo sapiens
tgagtcttttggtactaaataaatatttttaagttgataaacttattagtagagttgtgttcagagggc

SEQ ID NO: 185455 - DNA, 72 bp, Homo sapiens
ctaaataaatatttttaagttgataaacttattagtagagttgtgttcagagggctcttgtgatactgagaa

SEQ ID NO: 185456 - DNA, 72 bp, Homo sapiens
tttttaagttgataaacttattagtagagttgtgttcagagggctcttgtgatactgagaaaaatcaccctc

SEQ ID NO: 185457 - DNA, 73 bp, Homo sapiens
ttttaagttgataaacttattagtagagttgtgttcagagggctcttgtgatactgagaaaaatcaccctctc

SEQ ID NO: 185458 - DNA, 74 bp, Homo sapiens
agttgataaacttattagtagagttgtgttcagagggctcttgtgatactgagaaaaatcaccctctcctataa

SEQ ID NO: 185459 - DNA, 74 bp, Homo sapiens
ataaacttattagtagagttgtgttcagagggctcttgtgatactgagaaaaatcaccctctcctataatgccc

SEQ ID NO: 185460 - DNA, 77 bp, Homo sapiens
acttattagtagagttgtgttcagagggctcttgtgatactgagaaaaatcaccctctcctataatgccctggcaga

SEQ ID NO: 185461 - DNA, 83 bp, Homo sapiens
tagtagagttgtgttcagagggctcttgtgatactgagaaaaatcaccctctcctataatgccctggcagagcacatgatgct

SEQ ID NO: 185462 - DNA, 83 bp, Homo sapiens
tgtgttcagagggctcttgtgatactgagaaaaatcaccctctcctataatgccctggcagagcacatgatgcttccaattat

SEQ ID NO: 185463 - DNA, 80 bp, Homo sapiens
agggctcttgtgatactgagaaaaatcaccctctcctataatgccctggcagagcacatgatgcttccaattatttcaaa

SEQ ID NO: 185464 - DNA, 78 bp, Homo sapiens
ttgtgatactgagaaaaatcaccctctcctataatgccctggcagagcacatgatgcttccaattatttcaaagggtt

SEQ ID NO: 185465 - DNA, 77 bp, Homo sapiens
tgagaaaaatcaccctctcctataatgccctggcagagcacatgatgcttccaattatttcaaagggtttcagaaaa

SEQ ID NO: 185466 - DNA, 77 bp, Homo sapiens
aaaatcaccctctcctataatgccctggcagagcacatgatgcttccaattatttcaaagggtttcagaaaactgca

SEQ ID NO: 185467 - DNA, 78 bp, Homo sapiens
agcacatgatgcttccaattatttcaaagggtttcagaaaactgcaagatacttctcatctcacattaaatgttttca

SEQ ID NO: 185468 - DNA, 77 bp, Homo sapiens
tcagaaaactgcaagatacttctcatctcacattaaatgttttcaaattttgaagtcataaaaatttatagtgctca

SEQ ID NO: 185469 - DNA, 77 bp, Homo sapiens
actgcaagatacttctcatctcacattaaatgttttcaaattttgaagtcataaaaatttatagtgctcaaatcaca

SEQ ID NO: 185470 - DNA, 76 bp, Homo sapiens
tctcatctcacattaaatgttttcaaattttgaagtcataaaaatttatagtgctcaaatcacataaataatcacc

SEQ ID NO: 185471 - DNA, 74 bp, Homo sapiens
ctcacattaaatgttttcaaattttgaagtcataaaaatttatagtgctcaaatcacataaataatcacctcca

SEQ ID NO: 185472 - DNA, 73 bp, Homo sapiens
ttcaaattttgaagtcataaaaatttatagtgctcaaatcacataaataatcacctccaaaaaggatgaggcg

SEQ ID NO: 185473 - DNA, 73 bp, Homo sapiens
tttgaagtcataaaaatttatagtgctcaaatcacataaataatcacctccaaaaaggatgaggcgggagagg

SEQ ID NO: 185474 - DNA, 72 bp, Homo sapiens
aaatttatagtgctcaaatcacataaataatcacctccaaaaaggatgaggcgggagaggtcactgttttaa

SEQ ID NO: 185475 - DNA, 73 bp, Homo sapiens
tatagtgctcaaatcacataaataatcacctccaaaaaggatgaggcgggagaggtcactgttttaagaaaac

SEQ ID NO: 185476 - DNA, 70 bp, Homo sapiens
acataaataatcacctccaaaaaggatgaggcgggagaggtcactgttttaagaaaactggagaatctta

SEQ ID NO: 185477 - DNA, 69 bp, Homo sapiens
aataatcacctccaaaaaggatgaggcgggagaggtcactgttttaagaaaactggagaatcttataag

SEQ ID NO: 185478 - DNA, 67 bp, Homo sapiens
aaaaaggatgaggcgggagaggtcactgttttaagaaaactggagaatcttataagggcccctatag

SEQ ID NO: 185479 - DNA, 71 bp, Homo sapiens
atgaggcgggagaggtcactgttttaagaaaactggagaatcttataagggcccctataggctgtcattag

SEQ ID NO: 185480 - DNA, 71 bp, Homo sapiens
gtcactgttttaagaaaactggagaatcttataagggcccctataggctgtcattaggaagagagagaatt

SEQ ID NO: 185481 - DNA, 71 bp, Homo sapiens
tttaagaaaactggagaatcttataagggcccctataggctgtcattaggaagagagagaatttgaaatat

SEQ ID NO: 185482 - DNA, 72 bp, Homo sapiens
aactggagaatcttataagggcccctataggctgtcattaggaagagagagaatttgaaatattttacacaa

SEQ ID NO: 185483 - DNA, 74 bp, Homo sapiens
tataagggcccctataggctgtcattaggaagagagagaatttgaaatattttacacaaaaacaggcagcaata

SEQ ID NO: 185484 - DNA, 72 bp, Homo sapiens
ccctataggctgtcattaggaagagagagaatttgaaatattttacacaaaaacaggcagcaataaagaaaa

SEQ ID NO: 185485 - DNA, 69 bp, Homo sapiens
ggaagagagagaatttgaaatattttacacaaaaacaggcagcaataaagaaaaccaaaagctacaaaa

SEQ ID NO: 185486 - DNA, 73 bp, Homo sapiens
tgaaatattttacacaaaaacaggcagcaataaagaaaaccaaaagctacaaaaatatatggctgtgcaagaa

SEQ ID NO: 185487 - DNA, 73 bp, Homo sapiens
caggcagcaataaagaaaaccaaaagctacaaaaatatatggctgtgcaagaaagaaaatctaacattttagc

SEQ ID NO: 185488 - DNA, 73 bp, Homo sapiens
gcaataaagaaaaccaaaagctacaaaaatatatggctgtgcaagaaagaaaatctaacattttagctgcaaa

SEQ ID NO: 185489 - DNA, 73 bp, Homo sapiens
ccaaaagctacaaaaatatatggctgtgcaagaaagaaaatctaacattttagctgcaaataaacattctacc

SEQ ID NO: 185490 - DNA, 76 bp, Homo sapiens
gctacaaaaatatatggctgtgcaagaaagaaaatctaacattttagctgcaaataaacattctacctagtgataa

SEQ ID NO: 185491 - DNA, 75 bp, Homo sapiens
gcaagaaagaaaatctaacattttagctgcaaataaacattctacctagtgataacaataaacaatattcactga

SEQ ID NO: 185492 - DNA, 73 bp, Homo sapiens
aatctaacattttagctgcaaataaacattctacctagtgataacaataaacaatattcactgattttcaact

SEQ ID NO: 185493 - DNA, 72 bp, Homo sapiens
tttagctgcaaataaacattctacctagtgataacaataaacaatattcactgattttcaacttttggaaac

SEQ ID NO: 185494 - DNA, 73 bp, Homo sapiens
ctacctagtgataacaataaacaatattcactgattttcaacttttggaaactaatctactcagctccaccac

SEQ ID NO: 185495 - DNA, 73 bp, Homo sapiens
acaataaacaatattcactgattttcaacttttggaaactaatctactcagctccaccacttgctaagtgcct

SEQ ID NO: 185496 - DNA, 72 bp, Homo sapiens
atattcactgattttcaacttttggaaactaatctactcagctccaccacttgctaagtgccttaaattttc

SEQ ID NO: 185497 - DNA, 71 bp, Homo sapiens
attttcaacttttggaaactaatctactcagctccaccacttgctaagtgccttaaattttcttgtcagta

SEQ ID NO: 185498 - DNA, 71 bp, Homo sapiens
aacttttggaaactaatctactcagctccaccacttgctaagtgccttaaattttcttgtcagtaaaatga

SEQ ID NO: 185499 - DNA, 74 bp, Homo sapiens
actaatctactcagctccaccacttgctaagtgccttaaattttcttgtcagtaaaatgaggaccataatatta

SEQ ID NO: 185500 - DNA, 73 bp, Homo sapiens
gctccaccacttgctaagtgccttaaattttcttgtcagtaaaatgaggaccataatattaccacaatattac

SEQ ID NO: 185501 - DNA, 72 bp, Homo sapiens
ccacttgctaagtgccttaaattttcttgtcagtaaaatgaggaccataatattaccacaatattacctata

SEQ ID NO: 185502 - DNA, 72 bp, Homo sapiens
gccttaaattttcttgtcagtaaaatgaggaccataatattaccacaatattacctataccacaaagtgagc

SEQ ID NO: 185503 - DNA, 75 bp, Homo sapiens
tcttgtcagtaaaatgaggaccataatattaccacaatattacctataccacaaagtgagcctaatgattacaaa

SEQ ID NO: 185504 - DNA, 73 bp, Homo sapiens
cagtaaaatgaggaccataatattaccacaatattacctataccacaaagtgagcctaatgattacaaaagct

SEQ ID NO: 185505 - DNA, 76 bp, Homo sapiens
ttacctataccacaaagtgagcctaatgattacaaaagcttaatatatgtaaagtacctatgtctgtatatgtgtg

SEQ ID NO: 185506 - DNA, 77 bp, Homo sapiens
ataccacaaagtgagcctaatgattacaaaagcttaatatatgtaaagtacctatgtctgtatatgtgtgtgcttta

SEQ ID NO: 185507 - DNA, 78 bp, Homo sapiens
gtgagcctaatgattacaaaagcttaatatatgtaaagtacctatgtctgtatatgtgtgtgctttataaataacatg

SEQ ID NO: 185508 - DNA, 79 bp, Homo sapiens
acaaaagcttaatatatgtaaagtacctatgtctgtatatgtgtgtgctttataaataacatgtatatgcaatgtggcc

SEQ ID NO: 185509 - DNA, 81 bp, Homo sapiens
aatatatgtaaagtacctatgtctgtatatgtgtgtgctttataaataacatgtatatgcaatgtggccgggcacaaagca

SEQ ID NO: 185510 - DNA, 80 bp, Homo sapiens
atgtaaagtacctatgtctgtatatgtgtgtgctttataaataacatgtatatgcaatgtggccgggcacaaagcaggaa

SEQ ID NO: 185511 - DNA, 83 bp, Homo sapiens
gtctgtatatgtgtgtgctttataaataacatgtatatgcaatgtggccgggcacaaagcaggaactatgtgagtgctttcta

SEQ ID NO: 185512 - DNA, 82 bp, Homo sapiens
tatgtgtgtgctttataaataacatgtatatgcaatgtggccgggcacaaagcaggaactatgtgagtgctttctattacta

SEQ ID NO: 185513 - DNA, 78 bp, Homo sapiens
tttataaataacatgtatatgcaatgtggccgggcacaaagcaggaactatgtgagtgctttctattactaccaccac

SEQ ID NO: 185514 - DNA, 81 bp, Homo sapiens
ataacatgtatatgcaatgtggccgggcacaaagcaggaactatgtgagtgctttctattactaccaccaccactagtgca

SEQ ID NO: 185515 - DNA, 76 bp, Homo sapiens
aggaactatgtgagtgctttctattactaccaccaccactagtgcagacaagcacagaagacttaacattttatta

SEQ ID NO: 185516 - DNA, 80 bp, Homo sapiens
tatgtgagtgctttctattactaccaccaccactagtgcagacaagcacagaagacttaacattttattacatagcacaa

SEQ ID NO: 185517 - DNA, 77 bp, Homo sapiens
taccaccaccactagtgcagacaagcacagaagacttaacattttattacatagcacaatgttatcaacccttacaa

SEQ ID NO: 185518 - DNA, 75 bp, Homo sapiens
actagtgcagacaagcacagaagacttaacattttattacatagcacaatgttatcaacccttacaacgtaagtg

SEQ ID NO: 185519 - DNA, 72 bp, Homo sapiens
agacttaacattttattacatagcacaatgttatcaacccttacaacgtaagtgtctgaacagaagagaagg

SEQ ID NO: 185520 - DNA, 72 bp, Homo sapiens
cattttattacatagcacaatgttatcaacccttacaacgtaagtgtctgaacagaagagaagggaaataac

SEQ ID NO: 185521 - DNA, 69 bp, Homo sapiens
atgttatcaacccttacaacgtaagtgtctgaacagaagagaagggaaataactttaggataacctgaa

SEQ ID NO: 185522 - DNA, 73 bp, Homo sapiens
tgtctgaacagaagagaagggaaataactttaggataacctgaacttgagaatcaagggacattgtccatagt

SEQ ID NO: 185523 - DNA, 73 bp, Homo sapiens
gaagagaagggaaataactttaggataacctgaacttgagaatcaagggacattgtccatagttggtgagcca

SEQ ID NO: 185524 - DNA, 73 bp, Homo sapiens
gaaataactttaggataacctgaacttgagaatcaagggacattgtccatagttggtgagccaactaatatag

SEQ ID NO: 185525 - DNA, 73 bp, Homo sapiens
aactttaggataacctgaacttgagaatcaagggacattgtccatagttggtgagccaactaatatagttcta

SEQ ID NO: 185526 - DNA, 76 bp, Homo sapiens
taacctgaacttgagaatcaagggacattgtccatagttggtgagccaactaatatagttctacattaaacatcta

SEQ ID NO: 185527 - DNA, 75 bp, Homo sapiens
gagaatcaagggacattgtccatagttggtgagccaactaatatagttctacattaaacatctagaaagttataa

SEQ ID NO: 185528 - DNA, 73 bp, Homo sapiens
gggacattgtccatagttggtgagccaactaatatagttctacattaaacatctagaaagttataaaggtatc

SEQ ID NO: 185529 - DNA, 72 bp, Homo sapiens
gtgagccaactaatatagttctacattaaacatctagaaagttataaaggtatccaagagatcaatttaaaa

SEQ ID NO: 185530 - DNA, 72 bp, Homo sapiens
tagttctacattaaacatctagaaagttataaaggtatccaagagatcaatttaaaatggtgtcatattagg

SEQ ID NO: 185531 - DNA, 73 bp, Homo sapiens
ctacattaaacatctagaaagttataaaggtatccaagagatcaatttaaaatggtgtcatattaggtgtcat

SEQ ID NO: 185532 - DNA, 75 bp, Homo sapiens
gttataaaggtatccaagagatcaatttaaaatggtgtcatattaggtgtcattaaaatggtataatatggagca

SEQ ID NO: 185533 - DNA, 75 bp, Homo sapiens
atccaagagatcaatttaaaatggtgtcatattaggtgtcattaaaatggtataatatggagcaaatgggttaga

SEQ ID NO: 185534 - DNA, 75 bp, Homo sapiens
caatttaaaatggtgtcatattaggtgtcattaaaatggtataatatggagcaaatgggttagattctcatgtaa

SEQ ID NO: 185535 - DNA, 79 bp, Homo sapiens
ggtgtcattaaaatggtataatatggagcaaatgggttagattctcatgtaaaaatagcagcatagcatatagttagga

SEQ ID NO: 185536 - DNA, 78 bp, Homo sapiens
aaatggtataatatggagcaaatgggttagattctcatgtaaaaatagcagcatagcatatagttaggaaactctgga

SEQ ID NO: 185537 - DNA, 79 bp, Homo sapiens
atatggagcaaatgggttagattctcatgtaaaaatagcagcatagcatatagttaggaaactctggacattcacctta

SEQ ID NO: 185538 - DNA, 76 bp, Homo sapiens
caaatgggttagattctcatgtaaaaatagcagcatagcatatagttaggaaactctggacattcaccttagaatt

SEQ ID NO: 185539 - DNA, 77 bp, Homo sapiens
gttagattctcatgtaaaaatagcagcatagcatatagttaggaaactctggacattcaccttagaatttaaatata

SEQ ID NO: 185540 - DNA, 75 bp, Homo sapiens
catgtaaaaatagcagcatagcatatagttaggaaactctggacattcaccttagaatttaaatatagaaacagt

SEQ ID NO: 185541 - DNA, 74 bp, Homo sapiens
gcagcatagcatatagttaggaaactctggacattcaccttagaatttaaatatagaaacagttaaagtggttc

SEQ ID NO: 185542 - DNA, 69 bp, Homo sapiens
tagttaggaaactctggacattcaccttagaatttaaatatagaaacagttaaagtggttccttccaga

SEQ ID NO: 185543 - DNA, 67 bp, Homo sapiens
gacattcaccttagaatttaaatatagaaacagttaaagtggttccttccagaaagtcggaaggagg

SEQ ID NO: 185544 - DNA, 66 bp, Homo sapiens
agaatttaaatatagaaacagttaaagtggttccttccagaaagtcggaaggaggttcaggaagat

SEQ ID NO: 185545 - DNA, 68 bp, Homo sapiens
ttccttccagaaagtcggaaggaggttcaggaagattagaacataggacttctactttttgttaaaca

SEQ ID NO: 185546 - DNA, 67 bp, Homo sapiens
aaagtcggaaggaggttcaggaagattagaacataggacttctactttttgttaaacacttcgctat

SEQ ID NO: 185547 - DNA, 71 bp, Homo sapiens
cataggacttctactttttgttaaacacttcgctatttttttcagccatgtaaatatcttcgacttcacaa

SEQ ID NO: 185548 - DNA, 76 bp, Homo sapiens
ttcgctatttttttcagccatgtaaatatcttcgacttcacaaatgtactttatcctcttccttttcatgcactca

SEQ ID NO: 185549 - DNA, 76 bp, Homo sapiens
tttttcagccatgtaaatatcttcgacttcacaaatgtactttatcctcttccttttcatgcactcatttgcactt

SEQ ID NO: 185550 - DNA, 76 bp, Homo sapiens
tgtaaatatcttcgacttcacaaatgtactttatcctcttccttttcatgcactcatttgcactttagagactttg

SEQ ID NO: 185551 - DNA, 76 bp, Homo sapiens
ttcgacttcacaaatgtactttatcctcttccttttcatgcactcatttgcactttagagactttgtgaaatacat

SEQ ID NO: 185552 - DNA, 77 bp, Homo sapiens
caaatgtactttatcctcttccttttcatgcactcatttgcactttagagactttgtgaaatacattttgcattaga

SEQ ID NO: 185553 - DNA, 75 bp, Homo sapiens
ctttatcctcttccttttcatgcactcatttgcactttagagactttgtgaaatacattttgcattagaaaaata

SEQ ID NO: 185554 - DNA, 74 bp, Homo sapiens
ttccttttcatgcactcatttgcactttagagactttgtgaaatacattttgcattagaaaaataaaaagataa

SEQ ID NO: 185555 - DNA, 76 bp, Homo sapiens
tgcactcatttgcactttagagactttgtgaaatacattttgcattagaaaaataaaaagataaatgattcaacaa

SEQ ID NO: 185556 - DNA, 74 bp, Homo sapiens
gcactttagagactttgtgaaatacattttgcattagaaaaataaaaagataaatgattcaacaatgtgactag

SEQ ID NO: 185557 - DNA, 76 bp, Homo sapiens
gactttgtgaaatacattttgcattagaaaaataaaaagataaatgattcaacaatgtgactagtatcattctatg

SEQ ID NO: 185558 - DNA, 73 bp, Homo sapiens
aatacattttgcattagaaaaataaaaagataaatgattcaacaatgtgactagtatcattctatgttttaaa

SEQ ID NO: 185559 - DNA, 76 bp, Homo sapiens
atgattcaacaatgtgactagtatcattctatgttttaaaaacacttcaattttccttctgatgtcatttgttatc

SEQ ID NO: 185560 - DNA, 74 bp, Homo sapiens
caacaatgtgactagtatcattctatgttttaaaaacacttcaattttccttctgatgtcatttgttatcttac

SEQ ID NO: 185561 - DNA, 73 bp, Homo sapiens
gtatcattctatgttttaaaaacacttcaattttccttctgatgtcatttgttatcttactgttttcgagcaa

SEQ ID NO: 185562 - DNA, 72 bp, Homo sapiens
tgttttaaaaacacttcaattttccttctgatgtcatttgttatcttactgttttcgagcaaactacaatca

SEQ ID NO: 185563 - DNA, 78 bp, Homo sapiens
acacttcaattttccttctgatgtcatttgttatcttactgttttcgagcaaactacaatcaagcatcaatctacaga

SEQ ID NO: 185564 - DNA, 77 bp, Homo sapiens
atgtcatttgttatcttactgttttcgagcaaactacaatcaagcatcaatctacagacgtagcttcttactaagat

SEQ ID NO: 185565 - DNA, 78 bp, Homo sapiens
ttactgttttcgagcaaactacaatcaagcatcaatctacagacgtagcttcttactaagattgcactttgagttata

SEQ ID NO: 185566 - DNA, 80 bp, Homo sapiens
gcaaactacaatcaagcatcaatctacagacgtagcttcttactaagattgcactttgagttatatacatttagcttaca

SEQ ID NO: 185567 - DNA, 80 bp, Homo sapiens
acaatcaagcatcaatctacagacgtagcttcttactaagattgcactttgagttatatacatttagcttacatcattaa

SEQ ID NO: 185568 - DNA, 74 bp, Homo sapiens
agacgtagcttcttactaagattgcactttgagttatatacatttagcttacatcattaataagatgaaaaaaa

SEQ ID NO: 185569 - DNA, 75 bp, Homo sapiens
tcttactaagattgcactttgagttatatacatttagcttacatcattaataagatgaaaaaaatctacaaatta

SEQ ID NO: 185570 - DNA, 76 bp, Homo sapiens
tgcactttgagttatatacatttagcttacatcattaataagatgaaaaaaatctacaaattatatttataattga

SEQ ID NO: 185571 - DNA, 74 bp, Homo sapiens
gttatatacatttagcttacatcattaataagatgaaaaaaatctacaaattatatttataattgagaaataga

SEQ ID NO: 185572 - DNA, 75 bp, Homo sapiens
catttagcttacatcattaataagatgaaaaaaatctacaaattatatttataattgagaaatagaaacacatga

SEQ ID NO: 185573 - DNA, 69 bp, Homo sapiens
cacatgaaaaaatttatttcaactatgaagagaaaagaataagtagtaaattttcatttgcccagcctt

SEQ ID NO: 185574 - DNA, 69 bp, Homo sapiens
tttatttcaactatgaagagaaaagaataagtagtaaattttcatttgcccagccttttgttctaaaga

SEQ ID NO: 185575 - DNA, 67 bp, Homo sapiens
ctatgaagagaaaagaataagtagtaaattttcatttgcccagccttttgttctaaagaatttaagg

SEQ ID NO: 185576 - DNA, 64 bp, Homo sapiens
aagtagtaaattttcatttgcccagccttttgttctaaagaatttaaggtaaacccaataaata

SEQ ID NO: 185577 - DNA, 62 bp, Homo sapiens
aaattttcatttgcccagccttttgttctaaagaatttaaggtaaacccaataaatattttt

SEQ ID NO: 185578 - DNA, 69 bp, Homo sapiens
tattttttaatattaaaaatatcctgaagtactgtatttgcacttaaatgaagcttaagtgtaaagtac

SEQ ID NO: 185579 - DNA, 73 bp, Homo sapiens
tttaatattaaaaatatcctgaagtactgtatttgcacttaaatgaagcttaagtgtaaagtactgattggca

SEQ ID NO: 185580 - DNA, 72 bp, Homo sapiens
tattaaaaatatcctgaagtactgtatttgcacttaaatgaagcttaagtgtaaagtactgattggcaaaaa

SEQ ID NO: 185581 - DNA, 71 bp, Homo sapiens
aaaaatatcctgaagtactgtatttgcacttaaatgaagcttaagtgtaaagtactgattggcaaaaatat

SEQ ID NO: 185582 - DNA, 71 bp, Homo sapiens
aaaatatcctgaagtactgtatttgcacttaaatgaagcttaagtgtaaagtactgattggcaaaaatatt

SEQ ID NO: 185583 - DNA, 72 bp, Homo sapiens
atcctgaagtactgtatttgcacttaaatgaagcttaagtgtaaagtactgattggcaaaaatatttaatat

SEQ ID NO: 185584 - DNA, 71 bp, Homo sapiens
gaagtactgtatttgcacttaaatgaagcttaagtgtaaagtactgattggcaaaaatatttaatatttta

SEQ ID NO: 185585 - DNA, 69 bp, Homo sapiens
atttgcacttaaatgaagcttaagtgtaaagtactgattggcaaaaatatttaatattttacaaaataa

SEQ ID NO: 185586 - DNA, 68 bp, Homo sapiens
cacttaaatgaagcttaagtgtaaagtactgattggcaaaaatatttaatattttacaaaataatatt

SEQ ID NO: 185587 - DNA, 70 bp, Homo sapiens
acaaaataatattttaaatagacaaaatatataatgcccttttttcctcaaatgactatgacttgtttca

SEQ ID NO: 185588 - DNA, 72 bp, Homo sapiens
attttaaatagacaaaatatataatgcccttttttcctcaaatgactatgacttgtttcagctatgttgtac

SEQ ID NO: 185589 - DNA, 72 bp, Homo sapiens
ataatgcccttttttcctcaaatgactatgacttgtttcagctatgttgtacgtgctataaaatccttttgt

SEQ ID NO: 185590 - DNA, 75 bp, Homo sapiens
cctcaaatgactatgacttgtttcagctatgttgtacgtgctataaaatccttttgtttcagaatccaatttcat

SEQ ID NO: 185591 - DNA, 72 bp, Homo sapiens
ctatgacttgtttcagctatgttgtacgtgctataaaatccttttgtttcagaatccaatttcatttaaaat

SEQ ID NO: 185592 - DNA, 71 bp, Homo sapiens
tttcagctatgttgtacgtgctataaaatccttttgtttcagaatccaatttcatttaaaattctcctatt

SEQ ID NO: 185593 - DNA, 70 bp, Homo sapiens
gtacgtgctataaaatccttttgtttcagaatccaatttcatttaaaattctcctatttatatatactcc

SEQ ID NO: 185594 - DNA, 71 bp, Homo sapiens
aaatccttttgtttcagaatccaatttcatttaaaattctcctatttatatatactccctgacttgctatg

SEQ ID NO: 185595 - DNA, 74 bp, Homo sapiens
tgtttcagaatccaatttcatttaaaattctcctatttatatatactccctgacttgctatggcttaagttcta

SEQ ID NO: 185596 - DNA, 73 bp, Homo sapiens
tccaatttcatttaaaattctcctatttatatatactccctgacttgctatggcttaagttctaaatcatagt

SEQ ID NO: 185597 - DNA, 72 bp, Homo sapiens
ttaaaattctcctatttatatatactccctgacttgctatggcttaagttctaaatcatagttaagtactac

SEQ ID NO: 185598 - DNA, 75 bp, Homo sapiens
tatatactccctgacttgctatggcttaagttctaaatcatagttaagtactactgactgtaagttatatttaga

SEQ ID NO: 185599 - DNA, 73 bp, Homo sapiens
ccctgacttgctatggcttaagttctaaatcatagttaagtactactgactgtaagttatatttagaagactg

SEQ ID NO: 185600 - DNA, 73 bp, Homo sapiens
gctatggcttaagttctaaatcatagttaagtactactgactgtaagttatatttagaagactgtagtttcaa

SEQ ID NO: 185601 - DNA, 71 bp, Homo sapiens
ctaaatcatagttaagtactactgactgtaagttatatttagaagactgtagtttcaagtaaacttctgcc

SEQ ID NO: 185602 - DNA, 72 bp, Homo sapiens
gtactactgactgtaagttatatttagaagactgtagtttcaagtaaacttctgcctatctttgtggtttga

SEQ ID NO: 185603 - DNA, 69 bp, Homo sapiens
ctgtaagttatatttagaagactgtagtttcaagtaaacttctgcctatctttgtggtttgaaactaaa

SEQ ID NO: 185604 - DNA, 67 bp, Homo sapiens
atttagaagactgtagtttcaagtaaacttctgcctatctttgtggtttgaaactaaaaatttgaag

SEQ ID NO: 185605 - DNA, 67 bp, Homo sapiens
actgtagtttcaagtaaacttctgcctatctttgtggtttgaaactaaaaatttgaagtaatattta

SEQ ID NO: 185606 - DNA, 69 bp, Homo sapiens
tctgcctatctttgtggtttgaaactaaaaatttgaagtaatatttatatcacttctctttctaggttt

SEQ ID NO: 185607 - DNA, 67 bp, Homo sapiens
tttgtggtttgaaactaaaaatttgaagtaatatttatatcacttctctttctaggtttttgtatat

SEQ ID NO: 185608 - DNA, 72 bp, Homo sapiens
tgaagtaatatttatatcacttctctttctaggtttttgtatatttagctttgtacagttcctgctttatta

SEQ ID NO: 185609 - DNA, 71 bp, Homo sapiens
tatatcacttctctttctaggtttttgtatatttagctttgtacagttcctgctttattaaaccagcttaa

SEQ ID NO: 185610 - DNA, 69 bp, Homo sapiens
tctctttctaggtttttgtatatttagctttgtacagttcctgctttattaaaccagcttaaaaacaca

SEQ ID NO: 185611 - DNA, 71 bp, Homo sapiens
ggtttttgtatatttagctttgtacagttcctgctttattaaaccagcttaaaaacacattggccagatca

SEQ ID NO: 185612 - DNA, 73 bp, Homo sapiens
atatttagctttgtacagttcctgctttattaaaccagcttaaaaacacattggccagatcattccagccttc

SEQ ID NO: 185613 - DNA, 74 bp, Homo sapiens
tttgtacagttcctgctttattaaaccagcttaaaaacacattggccagatcattccagccttctctcttagta

SEQ ID NO: 185614 - DNA, 77 bp, Homo sapiens
tgctttattaaaccagcttaaaaacacattggccagatcattccagccttctctcttagtactagcttgatttctga

SEQ ID NO: 185615 - DNA, 76 bp, Homo sapiens
tattaaaccagcttaaaaacacattggccagatcattccagccttctctcttagtactagcttgatttctgataat

SEQ ID NO: 185616 - DNA, 78 bp, Homo sapiens
taaaaacacattggccagatcattccagccttctctcttagtactagcttgatttctgataattagccttgataaata

SEQ ID NO: 185617 - DNA, 76 bp, Homo sapiens
cattccagccttctctcttagtactagcttgatttctgataattagccttgataaataatcgttaaataacagaga

SEQ ID NO: 185618 - DNA, 76 bp, Homo sapiens
gccttctctcttagtactagcttgatttctgataattagccttgataaataatcgttaaataacagagaatagcca

SEQ ID NO: 185619 - DNA, 76 bp, Homo sapiens
ttagtactagcttgatttctgataattagccttgataaataatcgttaaataacagagaatagccaatcttcagat

SEQ ID NO: 185620 - DNA, 77 bp, Homo sapiens
tttctgataattagccttgataaataatcgttaaataacagagaatagccaatcttcagattatattactaatcaca

SEQ ID NO: 185621 - DNA, 76 bp, Homo sapiens
ttagccttgataaataatcgttaaataacagagaatagccaatcttcagattatattactaatcacaaataatggc

SEQ ID NO: 185622 - DNA, 76 bp, Homo sapiens
cttgataaataatcgttaaataacagagaatagccaatcttcagattatattactaatcacaaataatggctggaa

SEQ ID NO: 185623 - DNA, 76 bp, Homo sapiens
atcgttaaataacagagaatagccaatcttcagattatattactaatcacaaataatggctggaagtataaaatga

SEQ ID NO: 185624 - DNA, 75 bp, Homo sapiens
cagagaatagccaatcttcagattatattactaatcacaaataatggctggaagtataaaatgaaaaacagtacc

SEQ ID NO: 185625 - DNA, 75 bp, Homo sapiens
tcagattatattactaatcacaaataatggctggaagtataaaatgaaaaacagtacctgacacacacaaattta

SEQ ID NO: 185626 - DNA, 75 bp, Homo sapiens
taatcacaaataatggctggaagtataaaatgaaaaacagtacctgacacacacaaatttaataaatatactgca

SEQ ID NO: 185627 - DNA, 73 bp, Homo sapiens
caaataatggctggaagtataaaatgaaaaacagtacctgacacacacaaatttaataaatatactgcataaa

SEQ ID NO: 185628 - DNA, 75 bp, Homo sapiens
atgaaaaacagtacctgacacacacaaatttaataaatatactgcataaataaaagcccaaagagatgcaactga

SEQ ID NO: 185629 - DNA, 76 bp, Homo sapiens
cagtacctgacacacacaaatttaataaatatactgcataaataaaagcccaaagagatgcaactgaacaatggga

SEQ ID NO: 185630 - DNA, 75 bp, Homo sapiens
cacacaaatttaataaatatactgcataaataaaagcccaaagagatgcaactgaacaatgggaaaatataatca

SEQ ID NO: 185631 - DNA, 76 bp, Homo sapiens
ataaatatactgcataaataaaagcccaaagagatgcaactgaacaatgggaaaatataatcaggtttatgctatc

SEQ ID NO: 185632 - DNA, 75 bp, Homo sapiens
ctgcataaataaaagcccaaagagatgcaactgaacaatgggaaaatataatcaggtttatgctatcttgttacc

SEQ ID NO: 185633 - DNA, 75 bp, Homo sapiens
ataaaagcccaaagagatgcaactgaacaatgggaaaatataatcaggtttatgctatcttgttaccttctctca

SEQ ID NO: 185634 - DNA, 75 bp, Homo sapiens
ccaaagagatgcaactgaacaatgggaaaatataatcaggtttatgctatcttgttaccttctctcagtagttat

SEQ ID NO: 185635 - DNA, 75 bp, Homo sapiens
gcaactgaacaatgggaaaatataatcaggtttatgctatcttgttaccttctctcagtagttattttatacata

SEQ ID NO: 185636 - DNA, 74 bp, Homo sapiens
ggaaaatataatcaggtttatgctatcttgttaccttctctcagtagttattttatacatatttatgaggtctc

SEQ ID NO: 185637 - DNA, 79 bp, Homo sapiens
ttatgctatcttgttaccttctctcagtagttattttatacatatttatgaggtctccagcatacgcaaaggaatatgc

SEQ ID NO: 185638 - DNA, 77 bp, Homo sapiens
taccttctctcagtagttattttatacatatttatgaggtctccagcatacgcaaaggaatatgctgaaactgttaa

SEQ ID NO: 185639 - DNA, 78 bp, Homo sapiens
tcagtagttattttatacatatttatgaggtctccagcatacgcaaaggaatatgctgaaactgttaaatactatggc

SEQ ID NO: 185640 - DNA, 77 bp, Homo sapiens
atatttatgaggtctccagcatacgcaaaggaatatgctgaaactgttaaatactatggctttgcagaaaacaactc

SEQ ID NO: 185641 - DNA, 76 bp, Homo sapiens
tctccagcatacgcaaaggaatatgctgaaactgttaaatactatggctttgcagaaaacaactcgtctaatttgg

SEQ ID NO: 185642 - DNA, 74 bp, Homo sapiens
atatgctgaaactgttaaatactatggctttgcagaaaacaactcgtctaatttgggcaatatggtggactctt

SEQ ID NO: 185643 - DNA, 71 bp, Homo sapiens
aaactgttaaatactatggctttgcagaaaacaactcgtctaatttgggcaatatggtggactctttggga

SEQ ID NO: 185644 - DNA, 72 bp, Homo sapiens
aatactatggctttgcagaaaacaactcgtctaatttgggcaatatggtggactctttgggagttcttacta

SEQ ID NO: 185645 - DNA, 75 bp, Homo sapiens
tgcagaaaacaactcgtctaatttgggcaatatggtggactctttgggagttcttactatgatacaactagatat

SEQ ID NO: 185646 - DNA, 73 bp, Homo sapiens
aaacaactcgtctaatttgggcaatatggtggactctttgggagttcttactatgatacaactagatattaga

SEQ ID NO: 185647 - DNA, 74 bp, Homo sapiens
ctaatttgggcaatatggtggactctttgggagttcttactatgatacaactagatattagataattacaacaa

SEQ ID NO: 185648 - DNA, 76 bp, Homo sapiens
gcaatatggtggactctttgggagttcttactatgatacaactagatattagataattacaacaaaacttcattgc

SEQ ID NO: 185649 - DNA, 72 bp, Homo sapiens
actctttgggagttcttactatgatacaactagatattagataattacaacaaaacttcattgctgggccgt

SEQ ID NO: 185650 - DNA, 71 bp, Homo sapiens
ggagttcttactatgatacaactagatattagataattacaacaaaacttcattgctgggccgttaaaaaa

SEQ ID NO: 185651 - DNA, 70 bp, Homo sapiens
ctatgatacaactagatattagataattacaacaaaacttcattgctgggccgttaaaaaaataaagaaa

SEQ ID NO: 185652 - DNA, 70 bp, Homo sapiens
aataaagaaaaagttcaagaatcaagagtatatgaaagagaaatagaaacataaaaggcaggccataaaa

SEQ ID NO: 185653 - DNA, 78 bp, Homo sapiens
atcaagagtatatgaaagagaaatagaaacataaaaggcaggccataaaatgtgaactacaatcactcatgaaagatg

SEQ ID NO: 185654 - DNA, 73 bp, Homo sapiens
aaatagaaacataaaaggcaggccataaaatgtgaactacaatcactcatgaaagatggggttgccctaagga

SEQ ID NO: 185655 - DNA, 78 bp, Homo sapiens
aggccataaaatgtgaactacaatcactcatgaaagatggggttgccctaaggacacacgcatgactgtgttctcctg

SEQ ID NO: 185656 - DNA, 78 bp, Homo sapiens
taaaatgtgaactacaatcactcatgaaagatggggttgccctaaggacacacgcatgactgtgttctcctgggtctc

SEQ ID NO: 185657 - DNA, 77 bp, Homo sapiens
tacaatcactcatgaaagatggggttgccctaaggacacacgcatgactgtgttctcctgggtctctaaagaccaaa

SEQ ID NO: 185658 - DNA, 74 bp, Homo sapiens
ctcatgaaagatggggttgccctaaggacacacgcatgactgtgttctcctgggtctctaaagaccaaacctgg

SEQ ID NO: 185659 - DNA, 72 bp, Homo sapiens
atggggttgccctaaggacacacgcatgactgtgttctcctgggtctctaaagaccaaacctgggccctata

SEQ ID NO: 185660 - DNA, 74 bp, Homo sapiens
gttgccctaaggacacacgcatgactgtgttctcctgggtctctaaagaccaaacctgggccctatagcacatt

SEQ ID NO: 185661 - DNA, 75 bp, Homo sapiens
cctaaggacacacgcatgactgtgttctcctgggtctctaaagaccaaacctgggccctatagcacatttggaga

SEQ ID NO: 185662 - DNA, 74 bp, Homo sapiens
acacacgcatgactgtgttctcctgggtctctaaagaccaaacctgggccctatagcacatttggagacctaaa

SEQ ID NO: 185663 - DNA, 73 bp, Homo sapiens
atgactgtgttctcctgggtctctaaagaccaaacctgggccctatagcacatttggagacctaaacctcaga

SEQ ID NO: 185664 - DNA, 73 bp, Homo sapiens
ttctcctgggtctctaaagaccaaacctgggccctatagcacatttggagacctaaacctcagagtctcaaca

SEQ ID NO: 185665 - DNA, 72 bp, Homo sapiens
tgggtctctaaagaccaaacctgggccctatagcacatttggagacctaaacctcagagtctcaacagaaac

SEQ ID NO: 185666 - DNA, 72 bp, Homo sapiens
tctaaagaccaaacctgggccctatagcacatttggagacctaaacctcagagtctcaacagaaaccaagaa

SEQ ID NO: 185667 - DNA, 71 bp, Homo sapiens
aacctgggccctatagcacatttggagacctaaacctcagagtctcaacagaaaccaagaagaagccttta

SEQ ID NO: 185668 - DNA, 75 bp, Homo sapiens
ctatagcacatttggagacctaaacctcagagtctcaacagaaaccaagaagaagcctttacaaatctgctgttg

SEQ ID NO: 185669 - DNA, 71 bp, Homo sapiens
atttggagacctaaacctcagagtctcaacagaaaccaagaagaagcctttacaaatctgctgttggggaa

SEQ ID NO: 185670 - DNA, 72 bp, Homo sapiens
taaacctcagagtctcaacagaaaccaagaagaagcctttacaaatctgctgttggggaaaaatactctgaa

SEQ ID NO: 185671 - DNA, 73 bp, Homo sapiens
agtctcaacagaaaccaagaagaagcctttacaaatctgctgttggggaaaaatactctgaattcaggtctca

SEQ ID NO: 185672 - DNA, 72 bp, Homo sapiens
aagcctttacaaatctgctgttggggaaaaatactctgaattcaggtctcaggattcccaatgttcacctaa

SEQ ID NO: 185673 - DNA, 73 bp, Homo sapiens
tactctgaattcaggtctcaggattcccaatgttcacctaaatcaaatacgaattcgcgatttaaaaatattc

SEQ ID NO: 185674 - DNA, 73 bp, Homo sapiens
tgttcacctaaatcaaatacgaattcgcgatttaaaaatattcctgaacacaaagaaacaagccaccatgatg

SEQ ID NO: 185675 - DNA, 72 bp, Homo sapiens
acctaaatcaaatacgaattcgcgatttaaaaatattcctgaacacaaagaaacaagccaccatgatgtgag

SEQ ID NO: 185676 - DNA, 71 bp, Homo sapiens
aatacgaattcgcgatttaaaaatattcctgaacacaaagaaacaagccaccatgatgtgaggtaaaagga

SEQ ID NO: 185677 - DNA, 69 bp, Homo sapiens
cgatttaaaaatattcctgaacacaaagaaacaagccaccatgatgtgaggtaaaaggaccttaaagac

SEQ ID NO: 185678 - DNA, 70 bp, Homo sapiens
aaatattcctgaacacaaagaaacaagccaccatgatgtgaggtaaaaggaccttaaagacttactatag

SEQ ID NO: 185679 - DNA, 71 bp, Homo sapiens
acacaaagaaacaagccaccatgatgtgaggtaaaaggaccttaaagacttactatagggaaatcatcaaa

SEQ ID NO: 185680 - DNA, 74 bp, Homo sapiens
aagccaccatgatgtgaggtaaaaggaccttaaagacttactatagggaaatcatcaaatgcagactataaata

SEQ ID NO: 185681 - DNA, 74 bp, Homo sapiens
ccatgatgtgaggtaaaaggaccttaaagacttactatagggaaatcatcaaatgcagactataaataactata

SEQ ID NO: 185682 - DNA, 71 bp, Homo sapiens
aggtaaaaggaccttaaagacttactatagggaaatcatcaaatgcagactataaataactatatatgaag

SEQ ID NO: 185683 - DNA, 72 bp, Homo sapiens
accttaaagacttactatagggaaatcatcaaatgcagactataaataactatatatgaagtataaaaagga

SEQ ID NO: 185684 - DNA, 74 bp, Homo sapiens
ctatagggaaatcatcaaatgcagactataaataactatatatgaagtataaaaaggaaaaacactggaatcca

SEQ ID NO: 185685 - DNA, 74 bp, Homo sapiens
tcatcaaatgcagactataaataactatatatgaagtataaaaaggaaaaacactggaatccaaaaagcgacca

SEQ ID NO: 185686 - DNA, 72 bp, Homo sapiens
gcagactataaataactatatatgaagtataaaaaggaaaaacactggaatccaaaaagcgaccaagcaata

SEQ ID NO: 185687 - DNA, 68 bp, Homo sapiens
aaataactatatatgaagtataaaaaggaaaaacactggaatccaaaaagcgaccaagcaataagaaa

SEQ ID NO: 185688 - DNA, 69 bp, Homo sapiens
atgaagtataaaaaggaaaaacactggaatccaaaaagcgaccaagcaataagaaattaataagaatga

SEQ ID NO: 185689 - DNA, 68 bp, Homo sapiens
aaaaggaaaaacactggaatccaaaaagcgaccaagcaataagaaattaataagaatgactgggccac

SEQ ID NO: 185690 - DNA, 70 bp, Homo sapiens
aaaacactggaatccaaaaagcgaccaagcaataagaaattaataagaatgactgggccactgaaaagaa

SEQ ID NO: 185691 - DNA, 70 bp, Homo sapiens
ggaatccaaaaagcgaccaagcaataagaaattaataagaatgactgggccactgaaaagaaacaaatac

SEQ ID NO: 185692 - DNA, 69 bp, Homo sapiens
gcaataagaaattaataagaatgactgggccactgaaaagaaacaaatacgactttaagaaatgaaaaa

SEQ ID NO: 185693 - DNA, 71 bp, Homo sapiens
aaaaaaaaaaacactgttggaatcaatatctcaatggactagttaaacagcggactgaacacagctgaaaa

SEQ ID NO: 185694 - DNA, 75 bp, Homo sapiens
aaaaacactgttggaatcaatatctcaatggactagttaaacagcggactgaacacagctgaaaagaattagtga

SEQ ID NO: 185695 - DNA, 76 bp, Homo sapiens
aatcaatatctcaatggactagttaaacagcggactgaacacagctgaaaagaattagtgaactggaagataaata

SEQ ID NO: 185696 - DNA, 77 bp, Homo sapiens
atatctcaatggactagttaaacagcggactgaacacagctgaaaagaattagtgaactggaagataaatatgaata

SEQ ID NO: 185697 - DNA, 75 bp, Homo sapiens
actagttaaacagcggactgaacacagctgaaaagaattagtgaactggaagataaatatgaataaactgccata

SEQ ID NO: 185698 - DNA, 76 bp, Homo sapiens
aacagcggactgaacacagctgaaaagaattagtgaactggaagataaatatgaataaactgccataatacaaaga

SEQ ID NO: 185699 - DNA, 73 bp, Homo sapiens
tgaaaagaattagtgaactggaagataaatatgaataaactgccataatacaaagacacaagaaaatgggaaa

SEQ ID NO: 185700 - DNA, 73 bp, Homo sapiens
gtgaactggaagataaatatgaataaactgccataatacaaagacacaagaaaatgggaaatataaaagctat

SEQ ID NO: 185701 - DNA, 75 bp, Homo sapiens
taaatatgaataaactgccataatacaaagacacaagaaaatgggaaatataaaagctattaagatacatggaga

SEQ ID NO: 185702 - DNA, 74 bp, Homo sapiens
gaataaactgccataatacaaagacacaagaaaatgggaaatataaaagctattaagatacatggagaacagaa

SEQ ID NO: 185703 - DNA, 74 bp, Homo sapiens
tgccataatacaaagacacaagaaaatgggaaatataaaagctattaagatacatggagaacagaataaaaata

SEQ ID NO: 185704 - DNA, 71 bp, Homo sapiens
caaagacacaagaaaatgggaaatataaaagctattaagatacatggagaacagaataaaaataacaaata

SEQ ID NO: 185705 - DNA, 73 bp, Homo sapiens
tataaaagctattaagatacatggagaacagaataaaaataacaaatatcaaattagagacccagaaagaata

SEQ ID NO: 185706 - DNA, 73 bp, Homo sapiens
gctattaagatacatggagaacagaataaaaataacaaatatcaaattagagacccagaaagaataaagaaca

SEQ ID NO: 185707 - DNA, 71 bp, Homo sapiens
ggagaacagaataaaaataacaaatatcaaattagagacccagaaagaataaagaacatagggacacaatg

SEQ ID NO: 185708 - DNA, 71 bp, Homo sapiens
cagaataaaaataacaaatatcaaattagagacccagaaagaataaagaacatagggacacaatggtggaa

SEQ ID NO: 185709 - DNA, 72 bp, Homo sapiens
caaatatcaaattagagacccagaaagaataaagaacatagggacacaatggtggaaattttccaaatatga

SEQ ID NO: 185710 - DNA, 74 bp, Homo sapiens
attagagacccagaaagaataaagaacatagggacacaatggtggaaattttccaaatatgatcaaagtcatga

SEQ ID NO: 185711 - DNA, 75 bp, Homo sapiens
cccagaaagaataaagaacatagggacacaatggtggaaattttccaaatatgatcaaagtcatgaatctacaga

SEQ ID NO: 185712 - DNA, 74 bp, Homo sapiens
ataaagaacatagggacacaatggtggaaattttccaaatatgatcaaagtcatgaatctacagataaaccaag

SEQ ID NO: 185713 - DNA, 76 bp, Homo sapiens
acatagggacacaatggtggaaattttccaaatatgatcaaagtcatgaatctacagataaaccaagtatagtata

SEQ ID NO: 185714 - DNA, 73 bp, Homo sapiens
acaatggtggaaattttccaaatatgatcaaagtcatgaatctacagataaaccaagtatagtataaaaataa

SEQ ID NO: 185715 - DNA, 73 bp, Homo sapiens
aaattttccaaatatgatcaaagtcatgaatctacagataaaccaagtatagtataaaaataatatacataaa

SEQ ID NO: 185716 - DNA, 73 bp, Homo sapiens
aatatgatcaaagtcatgaatctacagataaaccaagtatagtataaaaataatatacataaattaaaaggaa

SEQ ID NO: 185717 - DNA, 72 bp, Homo sapiens
tcatgaatctacagataaaccaagtatagtataaaaataatatacataaattaaaaggaatttaatcctaga

SEQ ID NO: 185718 - DNA, 70 bp, Homo sapiens
tacagataaaccaagtatagtataaaaataatatacataaattaaaaggaatttaatcctagacacattg

SEQ ID NO: 185719 - DNA, 68 bp, Homo sapiens
aaccaagtatagtataaaaataatatacataaattaaaaggaatttaatcctagacacattgtactaa

SEQ ID NO: 185720 - DNA, 67 bp, Homo sapiens
tacataaattaaaaggaatttaatcctagacacattgtactaaaaatgaagaacaccaaaacaaaaa

SEQ ID NO: 185721 - DNA, 64 bp, Homo sapiens
aattaaaaggaatttaatcctagacacattgtactaaaaatgaagaacaccaaaacaaaaaaac

SEQ ID NO: 185722 - DNA, 69 bp, Homo sapiens
tgaagaacaccaaaacaaaaaaactataaagacagtaagaaacaagagatcatgtattaaaaaaagagc

SEQ ID NO: 185723 - DNA, 69 bp, Homo sapiens
acaaaaaaactataaagacagtaagaaacaagagatcatgtattaaaaaaagagctagtggtacactgg

SEQ ID NO: 185724 - DNA, 75 bp, Homo sapiens
actataaagacagtaagaaacaagagatcatgtattaaaaaaagagctagtggtacactggtgccagctaataga

SEQ ID NO: 185725 - DNA, 76 bp, Homo sapiens
acagtaagaaacaagagatcatgtattaaaaaaagagctagtggtacactggtgccagctaatagaggcttgactg

SEQ ID NO: 185726 - DNA, 78 bp, Homo sapiens
agagatcatgtattaaaaaaagagctagtggtacactggtgccagctaatagaggcttgactgggagccagctgttaa

SEQ ID NO: 185727 - DNA, 73 bp, Homo sapiens
tattaaaaaaagagctagtggtacactggtgccagctaatagaggcttgactgggagccagctgttaaatttt

SEQ ID NO: 185728 - DNA, 73 bp, Homo sapiens
aaaaagagctagtggtacactggtgccagctaatagaggcttgactgggagccagctgttaaatttttaggaa

SEQ ID NO: 185729 - DNA, 73 bp, Homo sapiens
tagtggtacactggtgccagctaatagaggcttgactgggagccagctgttaaatttttaggaatttttttca

SEQ ID NO: 185730 - DNA, 71 bp, Homo sapiens
tgccagctaatagaggcttgactgggagccagctgttaaatttttaggaatttttttcagccagtttttaa

SEQ ID NO: 185731 - DNA, 68 bp, Homo sapiens
ctaatagaggcttgactgggagccagctgttaaatttttaggaatttttttcagccagtttttaaaca

SEQ ID NO: 185732 - DNA, 69 bp, Homo sapiens
ttgactgggagccagctgttaaatttttaggaatttttttcagccagtttttaaacagtaaatgcactg

SEQ ID NO: 185733 - DNA, 67 bp, Homo sapiens
agccagctgttaaatttttaggaatttttttcagccagtttttaaacagtaaatgcactgtataaat

SEQ ID NO: 185734 - DNA, 67 bp, Homo sapiens
ttttaggaatttttttcagccagtttttaaacagtaaatgcactgtataaattaaacaagactatta

SEQ ID NO: 185735 - DNA, 67 bp, Homo sapiens
ggaatttttttcagccagtttttaaacagtaaatgcactgtataaattaaacaagactattatttta

SEQ ID NO: 185736 - DNA, 70 bp, Homo sapiens
tcagccagtttttaaacagtaaatgcactgtataaattaaacaagactattattttatataatataaaat

SEQ ID NO: 185737 - DNA, 74 bp, Homo sapiens
taaacagtaaatgcactgtataaattaaacaagactattattttatataatataaaattgcaagcagagaaata

SEQ ID NO: 185738 - DNA, 74 bp, Homo sapiens
tattttatataatataaaattgcaagcagagaaatattaaaagcagtggtaattaataatcaaaactcagcact

SEQ ID NO: 185739 - DNA, 73 bp, Homo sapiens
aatataaaattgcaagcagagaaatattaaaagcagtggtaattaataatcaaaactcagcactttctaatta

SEQ ID NO: 185740 - DNA, 73 bp, Homo sapiens
gcagagaaatattaaaagcagtggtaattaataatcaaaactcagcactttctaattagtttactacatatta

SEQ ID NO: 185741 - DNA, 71 bp, Homo sapiens
attaaaagcagtggtaattaataatcaaaactcagcactttctaattagtttactacatattattatttgc

SEQ ID NO: 185742 - DNA, 72 bp, Homo sapiens
agcagtggtaattaataatcaaaactcagcactttctaattagtttactacatattattatttgctgttttc

SEQ ID NO: 185743 - DNA, 72 bp, Homo sapiens
gtggtaattaataatcaaaactcagcactttctaattagtttactacatattattatttgctgttttcttga

SEQ ID NO: 185744 - DNA, 73 bp, Homo sapiens
tcaaaactcagcactttctaattagtttactacatattattatttgctgttttcttgaggtaattctctctgt

SEQ ID NO: 185745 - DNA, 76 bp, Homo sapiens
ctttctaattagtttactacatattattatttgctgttttcttgaggtaattctctctgttgcataggatggcaga

SEQ ID NO: 185746 - DNA, 77 bp, Homo sapiens
tctaattagtttactacatattattatttgctgttttcttgaggtaattctctctgttgcataggatggcagaaata

SEQ ID NO: 185747 - DNA, 77 bp, Homo sapiens
ttagtttactacatattattatttgctgttttcttgaggtaattctctctgttgcataggatggcagaaataattca

SEQ ID NO: 185748 - DNA, 79 bp, Homo sapiens
catattattatttgctgttttcttgaggtaattctctctgttgcataggatggcagaaataattcataactgtatgttc

SEQ ID NO: 185749 - DNA, 78 bp, Homo sapiens
ttcttgaggtaattctctctgttgcataggatggcagaaataattcataactgtatgttctttccaactttgcaataa

SEQ ID NO: 185750 - DNA, 80 bp, Homo sapiens
tctctgttgcataggatggcagaaataattcataactgtatgttctttccaactttgcaataactgatataatacggtga

SEQ ID NO: 185751 - DNA, 75 bp, Homo sapiens
ggcagaaataattcataactgtatgttctttccaactttgcaataactgatataatacggtgagagtatttccac

SEQ ID NO: 185752 - DNA, 74 bp, Homo sapiens
cataactgtatgttctttccaactttgcaataactgatataatacggtgagagtatttccaccacacaaataag

SEQ ID NO: 185753 - DNA, 73 bp, Homo sapiens
ctgtatgttctttccaactttgcaataactgatataatacggtgagagtatttccaccacacaaataagtaaa

SEQ ID NO: 185754 - DNA, 72 bp, Homo sapiens
ccaactttgcaataactgatataatacggtgagagtatttccaccacacaaataagtaaacactaaaaatca

SEQ ID NO: 185755 - DNA, 72 bp, Homo sapiens
gcaataactgatataatacggtgagagtatttccaccacacaaataagtaaacactaaaaatcatgactttt

SEQ ID NO: 185756 - DNA, 72 bp, Homo sapiens
gatataatacggtgagagtatttccaccacacaaataagtaaacactaaaaatcatgactttttccctcaga

SEQ ID NO: 185757 - DNA, 72 bp, Homo sapiens
gtgagagtatttccaccacacaaataagtaaacactaaaaatcatgactttttccctcagaaagatagttgc

SEQ ID NO: 185758 - DNA, 69 bp, Homo sapiens
caaataagtaaacactaaaaatcatgactttttccctcagaaagatagttgctaaacatcagaaaaacc

SEQ ID NO: 185759 - DNA, 71 bp, Homo sapiens
ctaaaaatcatgactttttccctcagaaagatagttgctaaacatcagaaaaaccctaaatcagacttaca

SEQ ID NO: 185760 - DNA, 72 bp, Homo sapiens
atgactttttccctcagaaagatagttgctaaacatcagaaaaaccctaaatcagacttacaccagacttca

SEQ ID NO: 185761 - DNA, 71 bp, Homo sapiens
tttccctcagaaagatagttgctaaacatcagaaaaaccctaaatcagacttacaccagacttcacaaaaa

SEQ ID NO: 185762 - DNA, 71 bp, Homo sapiens
gaaagatagttgctaaacatcagaaaaaccctaaatcagacttacaccagacttcacaaaaacaatagaaa

SEQ ID NO: 185763 - DNA, 71 bp, Homo sapiens
tgctaaacatcagaaaaaccctaaatcagacttacaccagacttcacaaaaacaatagaaaaatattttca

SEQ ID NO: 185764 - DNA, 64 bp, Homo sapiens
tagaaaaatattttcaaatattgaaaggaagtaagtaaaaacctagaattgtaaaaccagaaaa

SEQ ID NO: 185765 - DNA, 62 bp, Homo sapiens
ttgaaaggaagtaagtaaaaacctagaattgtaaaaccagaaaaaacactttcaaaataggg

SEQ ID NO: 185766 - DNA, 65 bp, Homo sapiens
gaagtaagtaaaaacctagaattgtaaaaccagaaaaaacactttcaaaataggggcaataatca

SEQ ID NO: 185767 - DNA, 65 bp, Homo sapiens
acctagaattgtaaaaccagaaaaaacactttcaaaataggggcaataatcaaaactttatagat

SEQ ID NO: 185768 - DNA, 65 bp, Homo sapiens
gtaaaaccagaaaaaacactttcaaaataggggcaataatcaaaactttatagattaacacaaac

SEQ ID NO: 185769 - DNA, 67 bp, Homo sapiens
ccagaaaaaacactttcaaaataggggcaataatcaaaactttatagattaacacaaactgagtgtt

SEQ ID NO: 185770 - DNA, 69 bp, Homo sapiens
ctttcaaaataggggcaataatcaaaactttatagattaacacaaactgagtgtttactaacaggagcc

SEQ ID NO: 185771 - DNA, 68 bp, Homo sapiens
gggcaataatcaaaactttatagattaacacaaactgagtgtttactaacaggagccttttagtaaaa

SEQ ID NO: 185772 - DNA, 69 bp, Homo sapiens
caaaactttatagattaacacaaactgagtgtttactaacaggagccttttagtaaaagaacatccaca

SEQ ID NO: 185773 - DNA, 72 bp, Homo sapiens
tagattaacacaaactgagtgtttactaacaggagccttttagtaaaagaacatccacaggatttatatcag

SEQ ID NO: 185774 - DNA, 71 bp, Homo sapiens
cacaaactgagtgtttactaacaggagccttttagtaaaagaacatccacaggatttatatcaggaataag

SEQ ID NO: 185775 - DNA, 69 bp, Homo sapiens
gagtgtttactaacaggagccttttagtaaaagaacatccacaggatttatatcaggaataaggaaaac

SEQ ID NO: 185776 - DNA, 69 bp, Homo sapiens
caggagccttttagtaaaagaacatccacaggatttatatcaggaataaggaaaactagtttaagaaga

SEQ ID NO: 185777 - DNA, 69 bp, Homo sapiens
ttttagtaaaagaacatccacaggatttatatcaggaataaggaaaactagtttaagaagacattatgg

SEQ ID NO: 185778 - DNA, 73 bp, Homo sapiens
agaacatccacaggatttatatcaggaataaggaaaactagtttaagaagacattatggtaatataattatgc

SEQ ID NO: 185779 - DNA, 71 bp, Homo sapiens
cacaggatttatatcaggaataaggaaaactagtttaagaagacattatggtaatataattatgctaaaat

SEQ ID NO: 185780 - DNA, 66 bp, Homo sapiens
caggaataaggaaaactagtttaagaagacattatggtaatataattatgctaaaatttaaaaacg

SEQ ID NO: 185781 - DNA, 65 bp, Homo sapiens
ggaaaactagtttaagaagacattatggtaatataattatgctaaaatttaaaaacgttttaatg

SEQ ID NO: 185782 - DNA, 65 bp, Homo sapiens
tagtttaagaagacattatggtaatataattatgctaaaatttaaaaacgttttaatgtttttaa

SEQ ID NO: 185783 - DNA, 63 bp, Homo sapiens
agacattatggtaatataattatgctaaaatttaaaaacgttttaatgtttttaaaaaaactg

SEQ ID NO: 185784 - DNA, 65 bp, Homo sapiens
atgtttttaaaaaaactgtatatatttggaattataaaaatatacttcaataattttcaggttaa

SEQ ID NO: 185785 - DNA, 66 bp, Homo sapiens
aaaaactgtatatatttggaattataaaaatatacttcaataattttcaggttaaagaagaaatta

SEQ ID NO: 185786 - DNA, 70 bp, Homo sapiens
aaaataaaaattttcaacttcatcacattgaatgataaagaaaatgctacattaattttgtggaattaaa

SEQ ID NO: 185787 - DNA, 73 bp, Homo sapiens
attttcaacttcatcacattgaatgataaagaaaatgctacattaattttgtggaattaaaataggacttgaa

SEQ ID NO: 185788 - DNA, 71 bp, Homo sapiens
aacttcatcacattgaatgataaagaaaatgctacattaattttgtggaattaaaataggacttgaaaaaa

SEQ ID NO: 185789 - DNA, 69 bp, Homo sapiens
gaatgataaagaaaatgctacattaattttgtggaattaaaataggacttgaaaaaattttagccacca

SEQ ID NO: 185790 - DNA, 70 bp, Homo sapiens
gctacattaattttgtggaattaaaataggacttgaaaaaattttagccaccaatcctcgtctgtgaaga

SEQ ID NO: 185791 - DNA, 72 bp, Homo sapiens
gtggaattaaaataggacttgaaaaaattttagccaccaatcctcgtctgtgaagaaaatgatggatgataa

SEQ ID NO: 185792 - DNA, 76 bp, Homo sapiens
ataggacttgaaaaaattttagccaccaatcctcgtctgtgaagaaaatgatggatgataaatgcacagaagaata

SEQ ID NO: 185793 - DNA, 76 bp, Homo sapiens
gaaaaaattttagccaccaatcctcgtctgtgaagaaaatgatggatgataaatgcacagaagaataataaactca

SEQ ID NO: 185794 - DNA, 77 bp, Homo sapiens
attttagccaccaatcctcgtctgtgaagaaaatgatggatgataaatgcacagaagaataataaactcaagcaaaa

SEQ ID NO: 185795 - DNA, 78 bp, Homo sapiens
caatcctcgtctgtgaagaaaatgatggatgataaatgcacagaagaataataaactcaagcaaaagaaagactacaa

SEQ ID NO: 185796 - DNA, 75 bp, Homo sapiens
gtgaagaaaatgatggatgataaatgcacagaagaataataaactcaagcaaaagaaagactacaaagatttttg

SEQ ID NO: 185797 - DNA, 74 bp, Homo sapiens
atgatggatgataaatgcacagaagaataataaactcaagcaaaagaaagactacaaagatttttgtaacccta

SEQ ID NO: 185798 - DNA, 69 bp, Homo sapiens
aatgcacagaagaataataaactcaagcaaaagaaagactacaaagatttttgtaaccctaataaaaca

SEQ ID NO: 185799 - DNA, 68 bp, Homo sapiens
gaagaataataaactcaagcaaaagaaagactacaaagatttttgtaaccctaataaaacagtcaaca

SEQ ID NO: 185800 - DNA, 67 bp, Homo sapiens
actcaagcaaaagaaagactacaaagatttttgtaaccctaataaaacagtcaacaaagcctaagga

SEQ ID NO: 185801 - DNA, 66 bp, Homo sapiens
gcaaaagaaagactacaaagatttttgtaaccctaataaaacagtcaacaaagcctaaggaaagaa

SEQ ID NO: 185802 - DNA, 65 bp, Homo sapiens
agactacaaagatttttgtaaccctaataaaacagtcaacaaagcctaaggaaagaactttgaaa

SEQ ID NO: 185803 - DNA, 65 bp, Homo sapiens
gatttttgtaaccctaataaaacagtcaacaaagcctaaggaaagaactttgaaaagaactaata

SEQ ID NO: 185804 - DNA, 69 bp, Homo sapiens
aacagtcaacaaagcctaaggaaagaactttgaaaagaactaataaaattcacagtcctcactgaaaga

SEQ ID NO: 185805 - DNA, 71 bp, Homo sapiens
cagtcaacaaagcctaaggaaagaactttgaaaagaactaataaaattcacagtcctcactgaaagactga

SEQ ID NO: 185806 - DNA, 69 bp, Homo sapiens
caacaaagcctaaggaaagaactttgaaaagaactaataaaattcacagtcctcactgaaagactgaat

SEQ ID NO: 185807 - DNA, 69 bp, Homo sapiens
gcctaaggaaagaactttgaaaagaactaataaaattcacagtcctcactgaaagactgaattaaaaca

SEQ ID NO: 185808 - DNA, 69 bp, Homo sapiens
gaaagaactttgaaaagaactaataaaattcacagtcctcactgaaagactgaattaaaacaaaggaga

SEQ ID NO: 185809 - DNA, 69 bp, Homo sapiens
aagaactttgaaaagaactaataaaattcacagtcctcactgaaagactgaattaaaacaaaggagaga

SEQ ID NO: 185810 - DNA, 72 bp, Homo sapiens
agaactaataaaattcacagtcctcactgaaagactgaattaaaacaaaggagagaaagcgtaaatacagca

SEQ ID NO: 185811 - DNA, 73 bp, Homo sapiens
ctaataaaattcacagtcctcactgaaagactgaattaaaacaaaggagagaaagcgtaaatacagcatagga

SEQ ID NO: 185812 - DNA, 72 bp, Homo sapiens
aaaattcacagtcctcactgaaagactgaattaaaacaaaggagagaaagcgtaaatacagcataggaagaa

SEQ ID NO: 185813 - DNA, 72 bp, Homo sapiens
aaattcacagtcctcactgaaagactgaattaaaacaaaggagagaaagcgtaaatacagcataggaagaaa

SEQ ID NO: 185814 - DNA, 70 bp, Homo sapiens
cctcactgaaagactgaattaaaacaaaggagagaaagcgtaaatacagcataggaagaaaaaaataaga

SEQ ID NO: 185815 - DNA, 72 bp, Homo sapiens
gaagaaaaaaataagaaaacatctacaagtatagcacagataaaacagataagaatatatcataaataattt

SEQ ID NO: 185816 - DNA, 78 bp, Homo sapiens
catctacaagtatagcacagataaaacagataagaatatatcataaataattttattgcaacaaatgtgaaagcaaac

SEQ ID NO: 185817 - DNA, 76 bp, Homo sapiens
gtatagcacagataaaacagataagaatatatcataaataattttattgcaacaaatgtgaaagcaaaccttggga

SEQ ID NO: 185818 - DNA, 72 bp, Homo sapiens
gataaaacagataagaatatatcataaataattttattgcaacaaatgtgaaagcaaaccttgggaaaaatg

SEQ ID NO: 185819 - DNA, 70 bp, Homo sapiens
aagaatatatcataaataattttattgcaacaaatgtgaaagcaaaccttgggaaaaatgtaacttacca

SEQ ID NO: 185820 - DNA, 70 bp, Homo sapiens
cataaataattttattgcaacaaatgtgaaagcaaaccttgggaaaaatgtaacttaccaaagctgactc

SEQ ID NO: 185821 - DNA, 68 bp, Homo sapiens
ataattttattgcaacaaatgtgaaagcaaaccttgggaaaaatgtaacttaccaaagctgactcccc

SEQ ID NO: 185822 - DNA, 68 bp, Homo sapiens
tgcaacaaatgtgaaagcaaaccttgggaaaaatgtaacttaccaaagctgactcccccaaaaaaata

SEQ ID NO: 185823 - DNA, 71 bp, Homo sapiens
ataaaaattaggaagaatcctgtattaatatcagataagtagtttgaaatcttcctacaaagaaaacatca

SEQ ID NO: 185824 - DNA, 72 bp, Homo sapiens
aggaagaatcctgtattaatatcagataagtagtttgaaatcttcctacaaagaaaacatcaagcccacagg

SEQ ID NO: 185825 - DNA, 73 bp, Homo sapiens
tgtattaatatcagataagtagtttgaaatcttcctacaaagaaaacatcaagcccacagggttttagaagca

SEQ ID NO: 185826 - DNA, 71 bp, Homo sapiens
atatcagataagtagtttgaaatcttcctacaaagaaaacatcaagcccacagggttttagaagcaagttc

SEQ ID NO: 185827 - DNA, 69 bp, Homo sapiens
taagtagtttgaaatcttcctacaaagaaaacatcaagcccacagggttttagaagcaagttctaggaa

SEQ ID NO: 185828 - DNA, 68 bp, Homo sapiens
gaaatcttcctacaaagaaaacatcaagcccacagggttttagaagcaagttctaggaaaagataatt

SEQ ID NO: 185829 - DNA, 66 bp, Homo sapiens
agaaaacatcaagcccacagggttttagaagcaagttctaggaaaagataattttaacgttaaaga

SEQ ID NO: 185830 - DNA, 66 bp, Homo sapiens
catcaagcccacagggttttagaagcaagttctaggaaaagataattttaacgttaaagaaactct

SEQ ID NO: 185831 - DNA, 65 bp, Homo sapiens
cacagggttttagaagcaagttctaggaaaagataattttaacgttaaagaaactcttctaaaga

SEQ ID NO: 185832 - DNA, 67 bp, Homo sapiens
gcaagttctaggaaaagataattttaacgttaaagaaactcttctaaagaatagaaaagacaggcag

SEQ ID NO: 185833 - DNA, 66 bp, Homo sapiens
ggaaaagataattttaacgttaaagaaactcttctaaagaatagaaaagacaggcaggtatggtag

SEQ ID NO: 185834 - DNA, 69 bp, Homo sapiens
agataattttaacgttaaagaaactcttctaaagaatagaaaagacaggcaggtatggtagttcatgcc

SEQ ID NO: 185835 - DNA, 68 bp, Homo sapiens
gtctcttaaaaaactaataataatagagaaaaggaaacatattttatttcctgtggttaatattatca

SEQ ID NO: 185836 - DNA, 69 bp, Homo sapiens
actaataataatagagaaaaggaaacatattttatttcctgtggttaatattatcaaagcaacaaatcc

SEQ ID NO: 185837 - DNA, 70 bp, Homo sapiens
atagagaaaaggaaacatattttatttcctgtggttaatattatcaaagcaacaaatcctaccaagaaga

SEQ ID NO: 185838 - DNA, 69 bp, Homo sapiens
aggaaacatattttatttcctgtggttaatattatcaaagcaacaaatcctaccaagaagagtaagaaa

SEQ ID NO: 185839 - DNA, 72 bp, Homo sapiens
tttatttcctgtggttaatattatcaaagcaacaaatcctaccaagaagagtaagaaaaagaagcatatggc

SEQ ID NO: 185840 - DNA, 73 bp, Homo sapiens
cctgtggttaatattatcaaagcaacaaatcctaccaagaagagtaagaaaaagaagcatatggcctaatcta

SEQ ID NO: 185841 - DNA, 75 bp, Homo sapiens
tattatcaaagcaacaaatcctaccaagaagagtaagaaaaagaagcatatggcctaatctaactcaagaatata

SEQ ID NO: 185842 - DNA, 74 bp, Homo sapiens
aaagcaacaaatcctaccaagaagagtaagaaaaagaagcatatggcctaatctaactcaagaatataaatgca

SEQ ID NO: 185843 - DNA, 71 bp, Homo sapiens
atcctaccaagaagagtaagaaaaagaagcatatggcctaatctaactcaagaatataaatgcaaaaattt

SEQ ID NO: 185844 - DNA, 74 bp, Homo sapiens
gtaagaaaaagaagcatatggcctaatctaactcaagaatataaatgcaaaaatttttgaatagaatattagca

SEQ ID NO: 185845 - DNA, 76 bp, Homo sapiens
agaagcatatggcctaatctaactcaagaatataaatgcaaaaatttttgaatagaatattagcataactaatcca

SEQ ID NO: 185846 - DNA, 74 bp, Homo sapiens
tggcctaatctaactcaagaatataaatgcaaaaatttttgaatagaatattagcataactaatccaattgtag

SEQ ID NO: 185847 - DNA, 73 bp, Homo sapiens
gcctaatctaactcaagaatataaatgcaaaaatttttgaatagaatattagcataactaatccaattgtagg

SEQ ID NO: 185848 - DNA, 71 bp, Homo sapiens
atctaactcaagaatataaatgcaaaaatttttgaatagaatattagcataactaatccaattgtaggggg

SEQ ID NO: 185849 - DNA, 70 bp, Homo sapiens
ctcaagaatataaatgcaaaaatttttgaatagaatattagcataactaatccaattgtaggggggaaaa

SEQ ID NO: 185850 - DNA, 68 bp, Homo sapiens
agaatataaatgcaaaaatttttgaatagaatattagcataactaatccaattgtaggggggaaaaaa

SEQ ID NO: 185851 - DNA, 67 bp, Homo sapiens
ataaatgcaaaaatttttgaatagaatattagcataactaatccaattgtaggggggaaaaaaagga

SEQ ID NO: 185852 - DNA, 66 bp, Homo sapiens
tgcaaaaatttttgaatagaatattagcataactaatccaattgtaggggggaaaaaaaggaaaaa

SEQ ID NO: 185853 - DNA, 63 bp, Homo sapiens
aaaaggaaaaaaatctaatagaccaaaaccacattgggtttaatcccaaaattcaagagtact

SEQ ID NO: 185854 - DNA, 67 bp, Homo sapiens
aaatctaatagaccaaaaccacattgggtttaatcccaaaattcaagagtactttggcgtgacaaaa

SEQ ID NO: 185855 - DNA, 69 bp, Homo sapiens
taatagaccaaaaccacattgggtttaatcccaaaattcaagagtactttggcgtgacaaaaatgcttg

SEQ ID NO: 185856 - DNA, 72 bp, Homo sapiens
acattgggtttaatcccaaaattcaagagtactttggcgtgacaaaaatgcttgtcaagcactacattaaca

SEQ ID NO: 185857 - DNA, 74 bp, Homo sapiens
agtactttggcgtgacaaaaatgcttgtcaagcactacattaacagattaaaggagaacaaaaccatctgttca

SEQ ID NO: 185858 - DNA, 78 bp, Homo sapiens
gacaaaaatgcttgtcaagcactacattaacagattaaaggagaacaaaaccatctgttcatctcaatagatactgaa

SEQ ID NO: 185859 - DNA, 76 bp, Homo sapiens
tgcttgtcaagcactacattaacagattaaaggagaacaaaaccatctgttcatctcaatagatactgaaacgttt

SEQ ID NO: 185860 - DNA, 76 bp, Homo sapiens
caagcactacattaacagattaaaggagaacaaaaccatctgttcatctcaatagatactgaaacgttttctgata

SEQ ID NO: 185861 - DNA, 72 bp, Homo sapiens
cagattaaaggagaacaaaaccatctgttcatctcaatagatactgaaacgttttctgataaaatcaaaaat

SEQ ID NO: 185862 - DNA, 74 bp, Homo sapiens
ggagaacaaaaccatctgttcatctcaatagatactgaaacgttttctgataaaatcaaaaattcatccatggt

SEQ ID NO: 185863 - DNA, 74 bp, Homo sapiens
caaaaccatctgttcatctcaatagatactgaaacgttttctgataaaatcaaaaattcatccatggtttttca

SEQ ID NO: 185864 - DNA, 73 bp, Homo sapiens
ccatctgttcatctcaatagatactgaaacgttttctgataaaatcaaaaattcatccatggtttttcaaaaa

SEQ ID NO: 185865 - DNA, 72 bp, Homo sapiens
gttcatctcaatagatactgaaacgttttctgataaaatcaaaaattcatccatggtttttcaaaaaatgaa

SEQ ID NO: 185866 - DNA, 70 bp, Homo sapiens
ctcaatagatactgaaacgttttctgataaaatcaaaaattcatccatggtttttcaaaaaatgaaaaca

SEQ ID NO: 185867 - DNA, 68 bp, Homo sapiens
aatagatactgaaacgttttctgataaaatcaaaaattcatccatggtttttcaaaaaatgaaaacaa

SEQ ID NO: 185868 - DNA, 67 bp, Homo sapiens
atactgaaacgttttctgataaaatcaaaaattcatccatggtttttcaaaaaatgaaaacaaacaa

SEQ ID NO: 185869 - DNA, 66 bp, Homo sapiens
aaaatgaaaacaaacaaaattccttacaaacatgactaggagataaattccttaacttgaaaaaga

SEQ ID NO: 185870 - DNA, 68 bp, Homo sapiens
caaacaaaattccttacaaacatgactaggagataaattccttaacttgaaaaagagtagctaccaaa

SEQ ID NO: 185871 - DNA, 70 bp, Homo sapiens
attccttacaaacatgactaggagataaattccttaacttgaaaaagagtagctaccaaagtcccatgga

SEQ ID NO: 185872 - DNA, 69 bp, Homo sapiens
aaacatgactaggagataaattccttaacttgaaaaagagtagctaccaaagtcccatggagacaacct

SEQ ID NO: 185873 - DNA, 69 bp, Homo sapiens
ccttaacttgaaaaagagtagctaccaaagtcccatggagacaaccttctaaatagcaaattattagaa

SEQ ID NO: 185874 - DNA, 69 bp, Homo sapiens
aaaaagagtagctaccaaagtcccatggagacaaccttctaaatagcaaattattagaatcagtccctt

SEQ ID NO: 185875 - DNA, 70 bp, Homo sapiens
agtcccatggagacaaccttctaaatagcaaattattagaatcagtccctttgtaatcagtttttactgg

SEQ ID NO: 185876 - DNA, 70 bp, Homo sapiens
ggagacaaccttctaaatagcaaattattagaatcagtccctttgtaatcagtttttactggtattccta

SEQ ID NO: 185877 - DNA, 72 bp, Homo sapiens
aattattagaatcagtccctttgtaatcagtttttactggtattcctactaactcaggactgcaaaatgcac

SEQ ID NO: 185878 - DNA, 69 bp, Homo sapiens
agtccctttgtaatcagtttttactggtattcctactaactcaggactgcaaaatgcactggggggaaa

SEQ ID NO: 185879 - DNA, 70 bp, Homo sapiens
ctttgtaatcagtttttactggtattcctactaactcaggactgcaaaatgcactggggggaaaaggata

SEQ ID NO: 185880 - DNA, 70 bp, Homo sapiens
taatcagtttttactggtattcctactaactcaggactgcaaaatgcactggggggaaaaggataggaaa

SEQ ID NO: 185881 - DNA, 67 bp, Homo sapiens
agtttttactggtattcctactaactcaggactgcaaaatgcactggggggaaaaggataggaaaat

SEQ ID NO: 185882 - DNA, 70 bp, Homo sapiens
ttactggtattcctactaactcaggactgcaaaatgcactggggggaaaaggataggaaaattggaaata

SEQ ID NO: 185883 - DNA, 70 bp, Homo sapiens
ggtattcctactaactcaggactgcaaaatgcactggggggaaaaggataggaaaattggaaataagaca

SEQ ID NO: 185884 - DNA, 73 bp, Homo sapiens
tactaactcaggactgcaaaatgcactggggggaaaaggataggaaaattggaaataagacaggtatgtgtca

SEQ ID NO: 185885 - DNA, 73 bp, Homo sapiens
taactcaggactgcaaaatgcactggggggaaaaggataggaaaattggaaataagacaggtatgtgtcatta

SEQ ID NO: 185886 - DNA, 72 bp, Homo sapiens
actgcaaaatgcactggggggaaaaggataggaaaattggaaataagacaggtatgtgtcattattcacatt

SEQ ID NO: 185887 - DNA, 71 bp, Homo sapiens
caaaatgcactggggggaaaaggataggaaaattggaaataagacaggtatgtgtcattattcacatttaa

SEQ ID NO: 185888 - DNA, 72 bp, Homo sapiens
gggaaaaggataggaaaattggaaataagacaggtatgtgtcattattcacatttaattgtccacacagaaa

SEQ ID NO: 185889 - DNA, 73 bp, Homo sapiens
ggataggaaaattggaaataagacaggtatgtgtcattattcacatttaattgtccacacagaaatacaaaag

SEQ ID NO: 185890 - DNA, 74 bp, Homo sapiens
agacaggtatgtgtcattattcacatttaattgtccacacagaaatacaaaaggatctgtaaagaattaataag

SEQ ID NO: 185891 - DNA, 72 bp, Homo sapiens
cattattcacatttaattgtccacacagaaatacaaaaggatctgtaaagaattaataagtttagtaagatg

SEQ ID NO: 185892 - DNA, 70 bp, Homo sapiens
catttaattgtccacacagaaatacaaaaggatctgtaaagaattaataagtttagtaagatgttagaag

SEQ ID NO: 185893 - DNA, 73 bp, Homo sapiens
ccacacagaaatacaaaaggatctgtaaagaattaataagtttagtaagatgttagaagtcatatcaatatcc

SEQ ID NO: 185894 - DNA, 72 bp, Homo sapiens
tacaaaaggatctgtaaagaattaataagtttagtaagatgttagaagtcatatcaatatcctaaggtagac

SEQ ID NO: 185895 - DNA, 75 bp, Homo sapiens
ggatctgtaaagaattaataagtttagtaagatgttagaagtcatatcaatatcctaaggtagactgcatattta

SEQ ID NO: 185896 - DNA, 76 bp, Homo sapiens
aagtttagtaagatgttagaagtcatatcaatatcctaaggtagactgcatatttacacatcaggaacaaacagga

SEQ ID NO: 185897 - DNA, 75 bp, Homo sapiens
aagtcatatcaatatcctaaggtagactgcatatttacacatcaggaacaaacaggaaacatttaatattaataa

SEQ ID NO: 185898 - DNA, 74 bp, Homo sapiens
atatcctaaggtagactgcatatttacacatcaggaacaaacaggaaacatttaatattaataatagcaaaaca

SEQ ID NO: 185899 - DNA, 73 bp, Homo sapiens
ggtagactgcatatttacacatcaggaacaaacaggaaacatttaatattaataatagcaaaacaaaatataa

SEQ ID NO: 185900 - DNA, 71 bp, Homo sapiens
ttacacatcaggaacaaacaggaaacatttaatattaataatagcaaaacaaaatataaagtagctaggaa

SEQ ID NO: 185901 - DNA, 70 bp, Homo sapiens
tcaggaacaaacaggaaacatttaatattaataatagcaaaacaaaatataaagtagctaggaataaata

SEQ ID NO: 185902 - DNA, 69 bp, Homo sapiens
aacaggaaacatttaatattaataatagcaaaacaaaatataaagtagctaggaataaataaagcataa

SEQ ID NO: 185903 - DNA, 70 bp, Homo sapiens
atattaataatagcaaaacaaaatataaagtagctaggaataaataaagcataaaactacacagatactt

SEQ ID NO: 185904 - DNA, 71 bp, Homo sapiens
tagcaaaacaaaatataaagtagctaggaataaataaagcataaaactacacagatactttaaagacatta

SEQ ID NO: 185905 - DNA, 71 bp, Homo sapiens
gaataaataaagcataaaactacacagatactttaaagacattaaataacatttaaataaactcattgaga

SEQ ID NO: 185906 - DNA, 71 bp, Homo sapiens
gcataaaactacacagatactttaaagacattaaataacatttaaataaactcattgagaaactaggttca

SEQ ID NO: 185907 - DNA, 73 bp, Homo sapiens
actacacagatactttaaagacattaaataacatttaaataaactcattgagaaactaggttcatagatgaga

SEQ ID NO: 185908 - DNA, 75 bp, Homo sapiens
aaataacatttaaataaactcattgagaaactaggttcatagatgagaatattcttcaaccacagattcaatgta

SEQ ID NO: 185909 - DNA, 79 bp, Homo sapiens
ctcattgagaaactaggttcatagatgagaatattcttcaaccacagattcaatgtaatttcaattcaaatctcaacag

SEQ ID NO: 185910 - DNA, 78 bp, Homo sapiens
ctaggttcatagatgagaatattcttcaaccacagattcaatgtaatttcaattcaaatctcaacagtttttcagaga

SEQ ID NO: 185911 - DNA, 77 bp, Homo sapiens
tagatgagaatattcttcaaccacagattcaatgtaatttcaattcaaatctcaacagtttttcagagaacttacac

SEQ ID NO: 185912 - DNA, 76 bp, Homo sapiens
gaatattcttcaaccacagattcaatgtaatttcaattcaaatctcaacagtttttcagagaacttacactgagtc

SEQ ID NO: 185913 - DNA, 74 bp, Homo sapiens
caatgtaatttcaattcaaatctcaacagtttttcagagaacttacactgagtctaaaatgtatatgaagaaaa

SEQ ID NO: 185914 - DNA, 75 bp, Homo sapiens
tcaattcaaatctcaacagtttttcagagaacttacactgagtctaaaatgtatatgaagaaaaaaatgatctac

SEQ ID NO: 185915 - DNA, 74 bp, Homo sapiens
tctcaacagtttttcagagaacttacactgagtctaaaatgtatatgaagaaaaaaatgatctactagaacttg

SEQ ID NO: 185916 - DNA, 76 bp, Homo sapiens
ttcagagaacttacactgagtctaaaatgtatatgaagaaaaaaatgatctactagaacttgttacattatatagc

SEQ ID NO: 185917 - DNA, 74 bp, Homo sapiens
cttacactgagtctaaaatgtatatgaagaaaaaaatgatctactagaacttgttacattatatagccaacctc

SEQ ID NO: 185918 - DNA, 75 bp, Homo sapiens
ctgagtctaaaatgtatatgaagaaaaaaatgatctactagaacttgttacattatatagccaacctctttatga

SEQ ID NO: 185919 - DNA, 74 bp, Homo sapiens
gtatatgaagaaaaaaatgatctactagaacttgttacattatatagccaacctctttatgaaatgatagtaat

SEQ ID NO: 185920 - DNA, 74 bp, Homo sapiens
aaaaatgatctactagaacttgttacattatatagccaacctctttatgaaatgatagtaattacaacattgta

SEQ ID NO: 185921 - DNA, 78 bp, Homo sapiens
tgatctactagaacttgttacattatatagccaacctctttatgaaatgatagtaattacaacattgtagtattgcta

SEQ ID NO: 185922 - DNA, 78 bp, Homo sapiens
gaacttgttacattatatagccaacctctttatgaaatgatagtaattacaacattgtagtattgctacagagatcaa

SEQ ID NO: 185923 - DNA, 80 bp, Homo sapiens
atatagccaacctctttatgaaatgatagtaattacaacattgtagtattgctacagagatcaacaaactgatcaatgga

SEQ ID NO: 185924 - DNA, 76 bp, Homo sapiens
agaaatgtacacccttccaaacagactcataaatattttaaaagctgatgcttgacatggcggatcattgataaaa

SEQ ID NO: 185925 - DNA, 80 bp, Homo sapiens
ttccaaacagactcataaatattttaaaagctgatgcttgacatggcggatcattgataaaagcatagacaacgcaataa

SEQ ID NO: 185926 - DNA, 79 bp, Homo sapiens
aacagactcataaatattttaaaagctgatgcttgacatggcggatcattgataaaagcatagacaacgcaataaaaca

SEQ ID NO: 185927 - DNA, 80 bp, Homo sapiens
attttaaaagctgatgcttgacatggcggatcattgataaaagcatagacaacgcaataaaacatgctggagctggtttc

SEQ ID NO: 185928 - DNA, 83 bp, Homo sapiens
taaaagctgatgcttgacatggcggatcattgataaaagcatagacaacgcaataaaacatgctggagctggtttcctatata

SEQ ID NO: 185929 - DNA, 82 bp, Homo sapiens
aaaagctgatgcttgacatggcggatcattgataaaagcatagacaacgcaataaaacatgctggagctggtttcctatata

SEQ ID NO: 185930 - DNA, 80 bp, Homo sapiens
atgcttgacatggcggatcattgataaaagcatagacaacgcaataaaacatgctggagctggtttcctatataggaaaa

SEQ ID NO: 185931 - DNA, 77 bp, Homo sapiens
acatggcggatcattgataaaagcatagacaacgcaataaaacatgctggagctggtttcctatataggaaaacatt

SEQ ID NO: 185932 - DNA, 75 bp, Homo sapiens
cggatcattgataaaagcatagacaacgcaataaaacatgctggagctggtttcctatataggaaaacatttaaa

SEQ ID NO: 185933 - DNA, 75 bp, Homo sapiens
tgataaaagcatagacaacgcaataaaacatgctggagctggtttcctatataggaaaacatttaaattagactc

SEQ ID NO: 185934 - DNA, 74 bp, Homo sapiens
catagacaacgcaataaaacatgctggagctggtttcctatataggaaaacatttaaattagactcttacctca

SEQ ID NO: 185935 - DNA, 74 bp, Homo sapiens
gacaacgcaataaaacatgctggagctggtttcctatataggaaaacatttaaattagactcttacctcataca

SEQ ID NO: 185936 - DNA, 74 bp, Homo sapiens
acgcaataaaacatgctggagctggtttcctatataggaaaacatttaaattagactcttacctcatacataca

SEQ ID NO: 185937 - DNA, 73 bp, Homo sapiens
agctggtttcctatataggaaaacatttaaattagactcttacctcatacatacataaaatcaattccagata

SEQ ID NO: 185938 - DNA, 73 bp, Homo sapiens
ctatataggaaaacatttaaattagactcttacctcatacatacataaaatcaattccagatatttgaaaata

SEQ ID NO: 185939 - DNA, 75 bp, Homo sapiens
catttaaattagactcttacctcatacatacataaaatcaattccagatatttgaaaatatttcaatgttagaca

SEQ ID NO: 185940 - DNA, 75 bp, Homo sapiens
tagactcttacctcatacatacataaaatcaattccagatatttgaaaatatttcaatgttagacaaaacttcta

SEQ ID NO: 185941 - DNA, 71 bp, Homo sapiens
tccagatatttgaaaatatttcaatgttagacaaaacttctaaaacttttcagaaaattcaggagaatatc

SEQ ID NO: 185942 - DNA, 73 bp, Homo sapiens
tcaatgttagacaaaacttctaaaacttttcagaaaattcaggagaatatctatatgaccttggtataggaga

SEQ ID NO: 185943 - DNA, 72 bp, Homo sapiens
ctaaaacttttcagaaaattcaggagaatatctatatgaccttggtataggagaatatactaaatgggacat

SEQ ID NO: 185944 - DNA, 73 bp, Homo sapiens
cagaaaattcaggagaatatctatatgaccttggtataggagaatatactaaatgggacattaaaaagaacta

SEQ ID NO: 185945 - DNA, 71 bp, Homo sapiens
caggagaatatctatatgaccttggtataggagaatatactaaatgggacattaaaaagaactaactattt

SEQ ID NO: 185946 - DNA, 69 bp, Homo sapiens
aatatctatatgaccttggtataggagaatatactaaatgggacattaaaaagaactaactattttaaa

SEQ ID NO: 185947 - DNA, 71 bp, Homo sapiens
tgaccttggtataggagaatatactaaatgggacattaaaaagaactaactattttaaaaatctgatcaca

SEQ ID NO: 185948 - DNA, 69 bp, Homo sapiens
ggagaatatactaaatgggacattaaaaagaactaactattttaaaaatctgatcacattaagaatttg

SEQ ID NO: 185949 - DNA, 69 bp, Homo sapiens
atactaaatgggacattaaaaagaactaactattttaaaaatctgatcacattaagaatttgtttatca

SEQ ID NO: 185950 - DNA, 69 bp, Homo sapiens
ggacattaaaaagaactaactattttaaaaatctgatcacattaagaatttgtttatcaaaagatacca

SEQ ID NO: 185951 - DNA, 68 bp, Homo sapiens
aagaactaactattttaaaaatctgatcacattaagaatttgtttatcaaaagataccataaagtaaa

SEQ ID NO: 185952 - DNA, 71 bp, Homo sapiens
taaaaatctgatcacattaagaatttgtttatcaaaagataccataaagtaaaaaagccactaactgagaa

SEQ ID NO: 185953 - DNA, 71 bp, Homo sapiens
tctgatcacattaagaatttgtttatcaaaagataccataaagtaaaaaagccactaactgagaaaactag

SEQ ID NO: 185954 - DNA, 69 bp, Homo sapiens
gaatttgtttatcaaaagataccataaagtaaaaaagccactaactgagaaaactaggaaaatatgtca

SEQ ID NO: 185955 - DNA, 69 bp, Homo sapiens
gtttatcaaaagataccataaagtaaaaaagccactaactgagaaaactaggaaaatatgtcaatagta

SEQ ID NO: 185956 - DNA, 69 bp, Homo sapiens
agataccataaagtaaaaaagccactaactgagaaaactaggaaaatatgtcaatagtaaatagaaaca

SEQ ID NO: 185957 - DNA, 69 bp, Homo sapiens
gtaaaaaagccactaactgagaaaactaggaaaatatgtcaatagtaaatagaaacaacaatgaactcc

SEQ ID NO: 185958 - DNA, 73 bp, Homo sapiens
agccactaactgagaaaactaggaaaatatgtcaatagtaaatagaaacaacaatgaactcctatctccagga

SEQ ID NO: 185959 - DNA, 72 bp, Homo sapiens
gaaaatatgtcaatagtaaatagaaacaacaatgaactcctatctccaggatattaaaagacctctaataag

SEQ ID NO: 185960 - DNA, 72 bp, Homo sapiens
gtcaatagtaaatagaaacaacaatgaactcctatctccaggatattaaaagacctctaataagtaaataga

SEQ ID NO: 185961 - DNA, 70 bp, Homo sapiens
gaaacaacaatgaactcctatctccaggatattaaaagacctctaataagtaaatagaaaaataagtgga

SEQ ID NO: 185962 - DNA, 72 bp, Homo sapiens
acaatgaactcctatctccaggatattaaaagacctctaataagtaaatagaaaaataagtggaagacatga

SEQ ID NO: 185963 - DNA, 74 bp, Homo sapiens
ctctaataagtaaatagaaaaataagtggaagacatgaacaaacatttcacagaataagaaacatgaatggcca

SEQ ID NO: 185964 - DNA, 75 bp, Homo sapiens
aaatagaaaaataagtggaagacatgaacaaacatttcacagaataagaaacatgaatggccaatgaaatatatg

SEQ ID NO: 185965 - DNA, 79 bp, Homo sapiens
aataagtggaagacatgaacaaacatttcacagaataagaaacatgaatggccaatgaaatatatgttcagcttcatta

SEQ ID NO: 185966 - DNA, 81 bp, Homo sapiens
ggaagacatgaacaaacatttcacagaataagaaacatgaatggccaatgaaatatatgttcagcttcattaatgaacata

SEQ ID NO: 185967 - DNA, 85 bp, Homo sapiens
caaacatttcacagaataagaaacatgaatggccaatgaaatatatgttcagcttcattaatgaacatataatcactgcaatgca

SEQ ID NO: 185968 - DNA, 84 bp, Homo sapiens
cacagaataagaaacatgaatggccaatgaaatatatgttcagcttcattaatgaacatataatcactgcaatgcaaaataaga

SEQ ID NO: 185969 - DNA, 84 bp, Homo sapiens
agaaacatgaatggccaatgaaatatatgttcagcttcattaatgaacatataatcactgcaatgcaaaataagagaataatga

SEQ ID NO: 185970 - DNA, 82 bp, Homo sapiens
ggccaatgaaatatatgttcagcttcattaatgaacatataatcactgcaatgcaaaataagagaataatgatacaacttta

SEQ ID NO: 185971 - DNA, 82 bp, Homo sapiens
aatatatgttcagcttcattaatgaacatataatcactgcaatgcaaaataagagaataatgatacaactttatgtgcttac

SEQ ID NO: 185972 - DNA, 84 bp, Homo sapiens
gcttcattaatgaacatataatcactgcaatgcaaaataagagaataatgatacaactttatgtgcttactaaatgtgcataga

SEQ ID NO: 185973 - DNA, 84 bp, Homo sapiens
tgaacatataatcactgcaatgcaaaataagagaataatgatacaactttatgtgcttactaaatgtgcatagatgaacaagtc

SEQ ID NO: 185974 - DNA, 83 bp, Homo sapiens
atcactgcaatgcaaaataagagaataatgatacaactttatgtgcttactaaatgtgcatagatgaacaagtctgacaagaa

SEQ ID NO: 185975 - DNA, 81 bp, Homo sapiens
gcaatgcaaaataagagaataatgatacaactttatgtgcttactaaatgtgcatagatgaacaagtctgacaagaaaata

SEQ ID NO: 185976 - DNA, 82 bp, Homo sapiens
gagaataatgatacaactttatgtgcttactaaatgtgcatagatgaacaagtctgacaagaaaatagaacaatgagatctc

SEQ ID NO: 185977 - DNA, 81 bp, Homo sapiens
tacaactttatgtgcttactaaatgtgcatagatgaacaagtctgacaagaaaatagaacaatgagatctcttttacatgc

SEQ ID NO: 185978 - DNA, 83 bp, Homo sapiens
tactaaatgtgcatagatgaacaagtctgacaagaaaatagaacaatgagatctcttttacatgctgacatgagactctaaat

SEQ ID NO: 185979 - DNA, 83 bp, Homo sapiens
catagatgaacaagtctgacaagaaaatagaacaatgagatctcttttacatgctgacatgagactctaaattgctataacta

SEQ ID NO: 185980 - DNA, 78 bp, Homo sapiens
gaacaatgagatctcttttacatgctgacatgagactctaaattgctataactattatataaaataaaccaaggctaa

SEQ ID NO: 185981 - DNA, 77 bp, Homo sapiens
tcttttacatgctgacatgagactctaaattgctataactattatataaaataaaccaaggctaaataggtgactgc

SEQ ID NO: 185982 - DNA, 78 bp, Homo sapiens
atgctgacatgagactctaaattgctataactattatataaaataaaccaaggctaaataggtgactgctctatgacc

SEQ ID NO: 185983 - DNA, 76 bp, Homo sapiens
atgagactctaaattgctataactattatataaaataaaccaaggctaaataggtgactgctctatgacccagcaa

SEQ ID NO: 185984 - DNA, 74 bp, Homo sapiens
gctataactattatataaaataaaccaaggctaaataggtgactgctctatgacccagcaattttattcatagg

SEQ ID NO: 185985 - DNA, 80 bp, Homo sapiens
aggctaaataggtgactgctctatgacccagcaattttattcataggtatacaatataagacagcatttctctgaatgta

SEQ ID NO: 185986 - DNA, 81 bp, Homo sapiens
tgacccagcaattttattcataggtatacaatataagacagcatttctctgaatgtagtcggcagaccagcaatattagta

SEQ ID NO: 185987 - DNA, 78 bp, Homo sapiens
caattttattcataggtatacaatataagacagcatttctctgaatgtagtcggcagaccagcaatattagtattacc

SEQ ID NO: 185988 - DNA, 80 bp, Homo sapiens
ataggtatacaatataagacagcatttctctgaatgtagtcggcagaccagcaatattagtattacctagatgcttatta

SEQ ID NO: 185989 - DNA, 78 bp, Homo sapiens
acaatataagacagcatttctctgaatgtagtcggcagaccagcaatattagtattacctagatgcttattagaaatt

SEQ ID NO: 185990 - DNA, 77 bp, Homo sapiens
agacagcatttctctgaatgtagtcggcagaccagcaatattagtattacctagatgcttattagaaatttatattt

SEQ ID NO: 185991 - DNA, 75 bp, Homo sapiens
tctctgaatgtagtcggcagaccagcaatattagtattacctagatgcttattagaaatttatatttttaggccc

SEQ ID NO: 185992 - DNA, 69 bp, Homo sapiens
accagcaatattagtattacctagatgcttattagaaatttatatttttaggccccaccctagacctac

SEQ ID NO: 185993 - DNA, 69 bp, Homo sapiens
tattacctagatgcttattagaaatttatatttttaggccccaccctagacctactaaataagaatctc

SEQ ID NO: 185994 - DNA, 72 bp, Homo sapiens
ctagatgcttattagaaatttatatttttaggccccaccctagacctactaaataagaatctctgcagctgg

SEQ ID NO: 185995 - DNA, 70 bp, Homo sapiens
attagaaatttatatttttaggccccaccctagacctactaaataagaatctctgcagctgggcccagga

SEQ ID NO: 185996 - DNA, 73 bp, Homo sapiens
tatatttttaggccccaccctagacctactaaataagaatctctgcagctgggcccaggagtcctcatgtttc

SEQ ID NO: 185997 - DNA, 74 bp, Homo sapiens
caccctagacctactaaataagaatctctgcagctgggcccaggagtcctcatgtttcttaattctccaggtaa

SEQ ID NO: 185998 - DNA, 76 bp, Homo sapiens
acctactaaataagaatctctgcagctgggcccaggagtcctcatgtttcttaattctccaggtaattctcatgta

SEQ ID NO: 185999 - DNA, 76 bp, Homo sapiens
aaataagaatctctgcagctgggcccaggagtcctcatgtttcttaattctccaggtaattctcatgtaccctaga

SEQ ID NO: 186000 - DNA, 73 bp, Homo sapiens
cagctgggcccaggagtcctcatgtttcttaattctccaggtaattctcatgtaccctagagtttgggaacca

SEQ ID NO: 186001 - DNA, 73 bp, Homo sapiens
caggagtcctcatgtttcttaattctccaggtaattctcatgtaccctagagtttgggaaccactgagttaca

SEQ ID NO: 186002 - DNA, 74 bp, Homo sapiens
tcatgtttcttaattctccaggtaattctcatgtaccctagagtttgggaaccactgagttacagcagtattat

SEQ ID NO: 186003 - DNA, 72 bp, Homo sapiens
gtaattctcatgtaccctagagtttgggaaccactgagttacagcagtattattcaaacagaactggtttag

SEQ ID NO: 186004 - DNA, 71 bp, Homo sapiens
agtttgggaaccactgagttacagcagtattattcaaacagaactggtttaggtaaggctggaaagcaata

SEQ ID NO: 186005 - DNA, 73 bp, Homo sapiens
aaccactgagttacagcagtattattcaaacagaactggtttaggtaaggctggaaagcaatatagtagactc

SEQ ID NO: 186006 - DNA, 72 bp, Homo sapiens
tattcaaacagaactggtttaggtaaggctggaaagcaatatagtagactccataattgtttataagtcaac

SEQ ID NO: 186007 - DNA, 70 bp, Homo sapiens
ggtttaggtaaggctggaaagcaatatagtagactccataattgtttataagtcaaccagtacaaaatta

SEQ ID NO: 186008 - DNA, 73 bp, Homo sapiens
ggctggaaagcaatatagtagactccataattgtttataagtcaaccagtacaaaattaaatagactgaattc

SEQ ID NO: 186009 - DNA, 74 bp, Homo sapiens
gcaatatagtagactccataattgtttataagtcaaccagtacaaaattaaatagactgaattccatgtagtaa

SEQ ID NO: 186010 - DNA, 71 bp, Homo sapiens
ccataattgtttataagtcaaccagtacaaaattaaatagactgaattccatgtagtaaaggttaagcatg

SEQ ID NO: 186011 - DNA, 69 bp, Homo sapiens
agtcaaccagtacaaaattaaatagactgaattccatgtagtaaaggttaagcatggtttatgaaactt

SEQ ID NO: 186012 - DNA, 74 bp, Homo sapiens
aattaaatagactgaattccatgtagtaaaggttaagcatggtttatgaaacttttgtctcatttgtccatgca

SEQ ID NO: 186013 - DNA, 75 bp, Homo sapiens
aatagactgaattccatgtagtaaaggttaagcatggtttatgaaacttttgtctcatttgtccatgcatattta

SEQ ID NO: 186014 - DNA, 75 bp, Homo sapiens
ccatgtagtaaaggttaagcatggtttatgaaacttttgtctcatttgtccatgcatatttatttatgtatatgg

SEQ ID NO: 186015 - DNA, 77 bp, Homo sapiens
ggttaagcatggtttatgaaacttttgtctcatttgtccatgcatatttatttatgtatatgggtacttgatcatta

SEQ ID NO: 186016 - DNA, 78 bp, Homo sapiens
gcatggtttatgaaacttttgtctcatttgtccatgcatatttatttatgtatatgggtacttgatcattatggaaaa

SEQ ID NO: 186017 - DNA, 73 bp, Homo sapiens
acttttgtctcatttgtccatgcatatttatttatgtatatgggtacttgatcattatggaaaaccggtttct

SEQ ID NO: 186018 - DNA, 75 bp, Homo sapiens
catgcatatttatttatgtatatgggtacttgatcattatggaaaaccggtttcttactatgggtcacggtcata

SEQ ID NO: 186019 - DNA, 70 bp, Homo sapiens
atttatgtatatgggtacttgatcattatggaaaaccggtttcttactatgggtcacggtcataaaagtc

SEQ ID NO: 186020 - DNA, 72 bp, Homo sapiens
tatatgggtacttgatcattatggaaaaccggtttcttactatgggtcacggtcataaaagtctgaaatcta

SEQ ID NO: 186021 - DNA, 71 bp, Homo sapiens
atcattatggaaaaccggtttcttactatgggtcacggtcataaaagtctgaaatctaatgccctacagaa

SEQ ID NO: 186022 - DNA, 75 bp, Homo sapiens
tttcttactatgggtcacggtcataaaagtctgaaatctaatgccctacagaaactcttgcatgggtatactaga

SEQ ID NO: 186023 - DNA, 79 bp, Homo sapiens
tatgggtcacggtcataaaagtctgaaatctaatgccctacagaaactcttgcatgggtatactagacatatgcacaaa

SEQ ID NO: 186024 - DNA, 76 bp, Homo sapiens
ataaaagtctgaaatctaatgccctacagaaactcttgcatgggtatactagacatatgcacaaaaaggttcataa

SEQ ID NO: 186025 - DNA, 78 bp, Homo sapiens
agtctgaaatctaatgccctacagaaactcttgcatgggtatactagacatatgcacaaaaaggttcataattgcaaa

SEQ ID NO: 186026 - DNA, 76 bp, Homo sapiens
taatgccctacagaaactcttgcatgggtatactagacatatgcacaaaaaggttcataattgcaaaaccaaataa

SEQ ID NO: 186027 - DNA, 72 bp, Homo sapiens
cagaaactcttgcatgggtatactagacatatgcacaaaaaggttcataattgcaaaaccaaataaaaaggg

SEQ ID NO: 186028 - DNA, 73 bp, Homo sapiens
gcatgggtatactagacatatgcacaaaaaggttcataattgcaaaaccaaataaaaaggggtaatctagata

SEQ ID NO: 186029 - DNA, 73 bp, Homo sapiens
ctagacatatgcacaaaaaggttcataattgcaaaaccaaataaaaaggggtaatctagatatctagataaca

SEQ ID NO: 186030 - DNA, 72 bp, Homo sapiens
gcacaaaaaggttcataattgcaaaaccaaataaaaaggggtaatctagatatctagataacaagacaatga

SEQ ID NO: 186031 - DNA, 77 bp, Homo sapiens
tcataattgcaaaaccaaataaaaaggggtaatctagatatctagataacaagacaatgaatacacaactcatgata

SEQ ID NO: 186032 - DNA, 76 bp, Homo sapiens
gcaaaaccaaataaaaaggggtaatctagatatctagataacaagacaatgaatacacaactcatgatataatcac

SEQ ID NO: 186033 - DNA, 79 bp, Homo sapiens
aaaaaggggtaatctagatatctagataacaagacaatgaatacacaactcatgatataatcactctttggactatgca

SEQ ID NO: 186034 - DNA, 87 bp, Homo sapiens
taatctagatatctagataacaagacaatgaatacacaactcatgatataatcactctttggactatgcacagcagtgaaatagaca

SEQ ID NO: 186035 - DNA, 85 bp, Homo sapiens
agatatctagataacaagacaatgaatacacaactcatgatataatcactctttggactatgcacagcagtgaaatagacaataa

SEQ ID NO: 186036 - DNA, 83 bp, Homo sapiens
ataacaagacaatgaatacacaactcatgatataatcactctttggactatgcacagcagtgaaatagacaataataaagaca

SEQ ID NO: 186037 - DNA, 83 bp, Homo sapiens
caactcatgatataatcactctttggactatgcacagcagtgaaatagacaataataaagacaaatcttataatgctgaataa

SEQ ID NO: 186038 - DNA, 81 bp, Homo sapiens
tcactctttggactatgcacagcagtgaaatagacaataataaagacaaatcttataatgctgaataaataaagcaagtca

SEQ ID NO: 186039 - DNA, 80 bp, Homo sapiens
ttggactatgcacagcagtgaaatagacaataataaagacaaatcttataatgctgaataaataaagcaagtcaaagtca

SEQ ID NO: 186040 - DNA, 77 bp, Homo sapiens
gcacagcagtgaaatagacaataataaagacaaatcttataatgctgaataaataaagcaagtcaaagtcataaaaa

SEQ ID NO: 186041 - DNA, 74 bp, Homo sapiens
gaaatagacaataataaagacaaatcttataatgctgaataaataaagcaagtcaaagtcataaaaaatacata

SEQ ID NO: 186042 - DNA, 74 bp, Homo sapiens
acaaatcttataatgctgaataaataaagcaagtcaaagtcataaaaaatacatatactattataccattttca

SEQ ID NO: 186043 - DNA, 72 bp, Homo sapiens
gctgaataaataaagcaagtcaaagtcataaaaaatacatatactattataccattttcataacaataaaaa

SEQ ID NO: 186044 - DNA, 71 bp, Homo sapiens
aataaagcaagtcaaagtcataaaaaatacatatactattataccattttcataacaataaaaaataagca

SEQ ID NO: 186045 - DNA, 74 bp, Homo sapiens
tcaaagtcataaaaaatacatatactattataccattttcataacaataaaaaataagcaaagatgagcaaaca

SEQ ID NO: 186046 - DNA, 72 bp, Homo sapiens
aaaatacatatactattataccattttcataacaataaaaaataagcaaagatgagcaaacaaacatacatt

SEQ ID NO: 186047 - DNA, 74 bp, Homo sapiens
catatactattataccattttcataacaataaaaaataagcaaagatgagcaaacaaacatacatttatggtaa

SEQ ID NO: 186048 - DNA, 72 bp, Homo sapiens
ttataccattttcataacaataaaaaataagcaaagatgagcaaacaaacatacatttatggtaaaaccatg

SEQ ID NO: 186049 - DNA, 72 bp, Homo sapiens
cataacaataaaaaataagcaaagatgagcaaacaaacatacatttatggtaaaaccatgtttaaaagctca

SEQ ID NO: 186050 - DNA, 70 bp, Homo sapiens
aataagcaaagatgagcaaacaaacatacatttatggtaaaaccatgtttaaaagctcaagaaactttag

SEQ ID NO: 186051 - DNA, 70 bp, Homo sapiens
gcaaagatgagcaaacaaacatacatttatggtaaaaccatgtttaaaagctcaagaaactttaggaagg

SEQ ID NO: 186052 - DNA, 69 bp, Homo sapiens
caaacatacatttatggtaaaaccatgtttaaaagctcaagaaactttaggaaggtaattatatcgaga

SEQ ID NO: 186053 - DNA, 69 bp, Homo sapiens
catttatggtaaaaccatgtttaaaagctcaagaaactttaggaaggtaattatatcgagagaaggcaa

SEQ ID NO: 186054 - DNA, 70 bp, Homo sapiens
aaccatgtttaaaagctcaagaaactttaggaaggtaattatatcgagagaaggcaaaggaatcgagtga

SEQ ID NO: 186055 - DNA, 73 bp, Homo sapiens
tttaaaagctcaagaaactttaggaaggtaattatatcgagagaaggcaaaggaatcgagtgagaggcatata

SEQ ID NO: 186056 - DNA, 74 bp, Homo sapiens
aagaaactttaggaaggtaattatatcgagagaaggcaaaggaatcgagtgagaggcatatacagatagttaga

SEQ ID NO: 186057 - DNA, 76 bp, Homo sapiens
aattatatcgagagaaggcaaaggaatcgagtgagaggcatatacagatagttagagtggtttgtaatataacatt

SEQ ID NO: 186058 - DNA, 76 bp, Homo sapiens
gagagaaggcaaaggaatcgagtgagaggcatatacagatagttagagtggtttgtaatataacatttttattata

SEQ ID NO: 186059 - DNA, 72 bp, Homo sapiens
aaaggaatcgagtgagaggcatatacagatagttagagtggtttgtaatataacatttttattataagaaaa

SEQ ID NO: 186060 - DNA, 72 bp, Homo sapiens
atatacagatagttagagtggtttgtaatataacatttttattataagaaaaattcaaaattcctgatgtca

SEQ ID NO: 186061 - DNA, 70 bp, Homo sapiens
gagtggtttgtaatataacatttttattataagaaaaattcaaaattcctgatgtcaaaatcttctagtc

SEQ ID NO: 186062 - DNA, 71 bp, Homo sapiens
gtaatataacatttttattataagaaaaattcaaaattcctgatgtcaaaatcttctagtctaggaagaga

SEQ ID NO: 186063 - DNA, 75 bp, Homo sapiens
aagaaaaattcaaaattcctgatgtcaaaatcttctagtctaggaagagaaattcacattcaaattcagcagata

SEQ ID NO: 186064 - DNA, 76 bp, Homo sapiens
ttcaaaattcctgatgtcaaaatcttctagtctaggaagagaaattcacattcaaattcagcagatacttatttat

SEQ ID NO: 186065 - DNA, 82 bp, Homo sapiens
ctgatgtcaaaatcttctagtctaggaagagaaattcacattcaaattcagcagatacttatttattagctgctatgagcaa

SEQ ID NO: 186066 - DNA, 81 bp, Homo sapiens
taggaagagaaattcacattcaaattcagcagatacttatttattagctgctatgagcaaaacacaaacacagtgtctcat

SEQ ID NO: 186067 - DNA, 81 bp, Homo sapiens
gagaaattcacattcaaattcagcagatacttatttattagctgctatgagcaaaacacaaacacagtgtctcatttaatc

SEQ ID NO: 186068 - DNA, 79 bp, Homo sapiens
tcaaattcagcagatacttatttattagctgctatgagcaaaacacaaacacagtgtctcatttaatcttcttaaagag

SEQ ID NO: 186069 - DNA, 77 bp, Homo sapiens
agatacttatttattagctgctatgagcaaaacacaaacacagtgtctcatttaatcttcttaaagagtcctgtgcg

SEQ ID NO: 186070 - DNA, 75 bp, Homo sapiens
ctatgagcaaaacacaaacacagtgtctcatttaatcttcttaaagagtcctgtgcggtaagtacttgataaaga

SEQ ID NO: 186071 - DNA, 73 bp, Homo sapiens
aacacaaacacagtgtctcatttaatcttcttaaagagtcctgtgcggtaagtacttgataaagaataggcaa

SEQ ID NO: 186072 - DNA, 76 bp, Homo sapiens
tttaatcttcttaaagagtcctgtgcggtaagtacttgataaagaataggcaatcaagtatgtgctcagtgaataa

SEQ ID NO: 186073 - DNA, 78 bp, Homo sapiens
ttaaagagtcctgtgcggtaagtacttgataaagaataggcaatcaagtatgtgctcagtgaataaatgcttgaataa

SEQ ID NO: 186074 - DNA, 76 bp, Homo sapiens
cggtaagtacttgataaagaataggcaatcaagtatgtgctcagtgaataaatgcttgaataattttataatatta

SEQ ID NO: 186075 - DNA, 77 bp, Homo sapiens
gataaagaataggcaatcaagtatgtgctcagtgaataaatgcttgaataattttataatattaaaagagacagagt

SEQ ID NO: 186076 - DNA, 78 bp, Homo sapiens
ggcaatcaagtatgtgctcagtgaataaatgcttgaataattttataatattaaaagagacagagtttgattatatag

SEQ ID NO: 186077 - DNA, 77 bp, Homo sapiens
gtatgtgctcagtgaataaatgcttgaataattttataatattaaaagagacagagtttgattatatagtattatag

SEQ ID NO: 186078 - DNA, 76 bp, Homo sapiens
tgaataaatgcttgaataattttataatattaaaagagacagagtttgattatatagtattatagttctactgaca

SEQ ID NO: 186079 - DNA, 74 bp, Homo sapiens
gcttgaataattttataatattaaaagagacagagtttgattatatagtattatagttctactgacaggagtta

SEQ ID NO: 186080 - DNA, 74 bp, Homo sapiens
ttataatattaaaagagacagagtttgattatatagtattatagttctactgacaggagttaaatgaaataaca

SEQ ID NO: 186081 - DNA, 72 bp, Homo sapiens
aaaagagacagagtttgattatatagtattatagttctactgacaggagttaaatgaaataacataacttta

SEQ ID NO: 186082 - DNA, 72 bp, Homo sapiens
agacagagtttgattatatagtattatagttctactgacaggagttaaatgaaataacataactttaaagag

SEQ ID NO: 186083 - DNA, 71 bp, Homo sapiens
atatagtattatagttctactgacaggagttaaatgaaataacataactttaaagagttactaatatattc

SEQ ID NO: 186084 - DNA, 70 bp, Homo sapiens
gtattatagttctactgacaggagttaaatgaaataacataactttaaagagttactaatatattcttac

SEQ ID NO: 186085 - DNA, 67 bp, Homo sapiens
tctactgacaggagttaaatgaaataacataactttaaagagttactaatatattcttacctttttt

SEQ ID NO: 186086 - DNA, 64 bp, Homo sapiens
ggagttaaatgaaataacataactttaaagagttactaatatattcttacctttttttacctta

SEQ ID NO: 186087 - DNA, 64 bp, Homo sapiens
aacataactttaaagagttactaatatattcttacctttttttaccttatattacttattacca

SEQ ID NO: 186088 - DNA, 66 bp, Homo sapiens
taaagagttactaatatattcttacctttttttaccttatattacttattaccaaaagtataatga

SEQ ID NO: 186089 - DNA, 65 bp, Homo sapiens
cttacctttttttaccttatattacttattaccaaaagtataatgagaaaaatattcaagtcaaa

SEQ ID NO: 186090 - DNA, 66 bp, Homo sapiens
tttttaccttatattacttattaccaaaagtataatgagaaaaatattcaagtcaaatcacttttt

SEQ ID NO: 186091 - DNA, 69 bp, Homo sapiens
cttatattacttattaccaaaagtataatgagaaaaatattcaagtcaaatcacttttttctatggaag

SEQ ID NO: 186092 - DNA, 73 bp, Homo sapiens
taatgagaaaaatattcaagtcaaatcacttttttctatggaagtattatattgctggtcaaaggtgtacaaa

SEQ ID NO: 186093 - DNA, 71 bp, Homo sapiens
aatattcaagtcaaatcacttttttctatggaagtattatattgctggtcaaaggtgtacaaactaacaaa

SEQ ID NO: 186094 - DNA, 71 bp, Homo sapiens
tcaaatcacttttttctatggaagtattatattgctggtcaaaggtgtacaaactaacaaaccgtagggca

SEQ ID NO: 186095 - DNA, 72 bp, Homo sapiens
tttttctatggaagtattatattgctggtcaaaggtgtacaaactaacaaaccgtagggcagaattagctga

SEQ ID NO: 186096 - DNA, 71 bp, Homo sapiens
gaagtattatattgctggtcaaaggtgtacaaactaacaaaccgtagggcagaattagctgatacgtaact

SEQ ID NO: 186097 - DNA, 74 bp, Homo sapiens
ttatattgctggtcaaaggtgtacaaactaacaaaccgtagggcagaattagctgatacgtaacttcagcaata

SEQ ID NO: 186098 - DNA, 68 bp, Homo sapiens
aaaggtgtacaaactaacaaaccgtagggcagaattagctgatacgtaacttcagcaatacccctttg

SEQ ID NO: 186099 - DNA, 68 bp, Homo sapiens
aaactaacaaaccgtagggcagaattagctgatacgtaacttcagcaatacccctttgtcctaatacg

SEQ ID NO: 186100 - DNA, 70 bp, Homo sapiens
acaaaccgtagggcagaattagctgatacgtaacttcagcaatacccctttgtcctaatacgtggagtta

SEQ ID NO: 186101 - DNA, 77 bp, Homo sapiens
agaattagctgatacgtaacttcagcaatacccctttgtcctaatacgtggagttagctctatgtgcggcacataca

SEQ ID NO: 186102 - DNA, 77 bp, Homo sapiens
tagctgatacgtaacttcagcaatacccctttgtcctaatacgtggagttagctctatgtgcggcacatacagggtg

SEQ ID NO: 186103 - DNA, 71 bp, Homo sapiens
aatacccctttgtcctaatacgtggagttagctctatgtgcggcacatacagggtggggggaaaaagcaga

SEQ ID NO: 186104 - DNA, 74 bp, Homo sapiens
acgtggagttagctctatgtgcggcacatacagggtggggggaaaaagcagagctgtcctaatatagaaaaaga

SEQ ID NO: 186105 - DNA, 69 bp, Homo sapiens
acatacagggtggggggaaaaagcagagctgtcctaatatagaaaaagaagtcaccaaggctggaaaaa

SEQ ID NO: 186106 - DNA, 67 bp, Homo sapiens
ggaaaaagcagagctgtcctaatatagaaaaagaagtcaccaaggctggaaaaaaaatcgctttttt

SEQ ID NO: 186107 - DNA, 68 bp, Homo sapiens
ggctggaaaaaaaatcgctttttttttcagtctatgcactttaataagaacaacagtttaaaagtgca

SEQ ID NO: 186108 - DNA, 68 bp, Homo sapiens
aaatcgctttttttttcagtctatgcactttaataagaacaacagtttaaaagtgcaaaatcaaaatc

SEQ ID NO: 186109 - DNA, 73 bp, Homo sapiens
tatgcactttaataagaacaacagtttaaaagtgcaaaatcaaaatctttttgttcattgaatacatatcggc

SEQ ID NO: 186110 - DNA, 70 bp, Homo sapiens
aataagaacaacagtttaaaagtgcaaaatcaaaatctttttgttcattgaatacatatcggcgtaaaca

SEQ ID NO: 186111 - DNA, 70 bp, Homo sapiens
acagtttaaaagtgcaaaatcaaaatctttttgttcattgaatacatatcggcgtaaacaaacacacttg

SEQ ID NO: 186112 - DNA, 70 bp, Homo sapiens
aagtgcaaaatcaaaatctttttgttcattgaatacatatcggcgtaaacaaacacacttgggaaacggc

SEQ ID NO: 186113 - DNA, 70 bp, Homo sapiens
caaaatctttttgttcattgaatacatatcggcgtaaacaaacacacttgggaaacggctgccttacaaa

SEQ ID NO: 186114 - DNA, 68 bp, Homo sapiens
atatcggcgtaaacaaacacacttgggaaacggctgccttacaaaattatttccatccttcacaaaaa

SEQ ID NO: 186115 - DNA, 67 bp, Homo sapiens
aacacacttgggaaacggctgccttacaaaattatttccatccttcacaaaaaactatttcccttca

SEQ ID NO: 186116 - DNA, 68 bp, Homo sapiens
acttgggaaacggctgccttacaaaattatttccatccttcacaaaaaactatttcccttcacagagc

SEQ ID NO: 186117 - DNA, 72 bp, Homo sapiens
gccttacaaaattatttccatccttcacaaaaaactatttcccttcacagagctcctacatatgtatgcttt

SEQ ID NO: 186118 - DNA, 71 bp, Homo sapiens
caaaattatttccatccttcacaaaaaactatttcccttcacagagctcctacatatgtatgcttttgttt

SEQ ID NO: 186119 - DNA, 70 bp, Homo sapiens
ttccatccttcacaaaaaactatttcccttcacagagctcctacatatgtatgcttttgtttttaaattt

SEQ ID NO: 186120 - DNA, 72 bp, Homo sapiens
aaaactatttcccttcacagagctcctacatatgtatgcttttgtttttaaattttgattcactgttgtatc

SEQ ID NO: 186121 - DNA, 77 bp, Homo sapiens
tatttcccttcacagagctcctacatatgtatgcttttgtttttaaattttgattcactgttgtatctctccagcac

SEQ ID NO: 186122 - DNA, 77 bp, Homo sapiens
acagagctcctacatatgtatgcttttgtttttaaattttgattcactgttgtatctctccagcacctggactaatg

SEQ ID NO: 186123 - DNA, 75 bp, Homo sapiens
tatgtatgcttttgtttttaaattttgattcactgttgtatctctccagcacctggactaatggctgaccctaaa

SEQ ID NO: 186124 - DNA, 75 bp, Homo sapiens
tttaaattttgattcactgttgtatctctccagcacctggactaatggctgaccctaaaaggcacataataagta

SEQ ID NO: 186125 - DNA, 79 bp, Homo sapiens
ttcactgttgtatctctccagcacctggactaatggctgaccctaaaaggcacataataagtatgtgcctttgaatgaa

SEQ ID NO: 186126 - DNA, 80 bp, Homo sapiens
ttgtatctctccagcacctggactaatggctgaccctaaaaggcacataataagtatgtgcctttgaatgaatgtataca

SEQ ID NO: 186127 - DNA, 76 bp, Homo sapiens
acctggactaatggctgaccctaaaaggcacataataagtatgtgcctttgaatgaatgtatacatttattgagta

SEQ ID NO: 186128 - DNA, 76 bp, Homo sapiens
gactaatggctgaccctaaaaggcacataataagtatgtgcctttgaatgaatgtatacatttattgagtatttac

SEQ ID NO: 186129 - DNA, 76 bp, Homo sapiens
cctaaaaggcacataataagtatgtgcctttgaatgaatgtatacatttattgagtatttactatacagtaggcac

SEQ ID NO: 186130 - DNA, 77 bp, Homo sapiens
cataataagtatgtgcctttgaatgaatgtatacatttattgagtatttactatacagtaggcacctggggatacca

SEQ ID NO: 186131 - DNA, 78 bp, Homo sapiens
atgtgcctttgaatgaatgtatacatttattgagtatttactatacagtaggcacctggggataccacatcaaatata

SEQ ID NO: 186132 - DNA, 77 bp, Homo sapiens
gaatgaatgtatacatttattgagtatttactatacagtaggcacctggggataccacatcaaatatattatagtcc

SEQ ID NO: 186133 - DNA, 76 bp, Homo sapiens
tgagtatttactatacagtaggcacctggggataccacatcaaatatattatagtccccatccacttggagctaac

SEQ ID NO: 186134 - DNA, 75 bp, Homo sapiens
atttactatacagtaggcacctggggataccacatcaaatatattatagtccccatccacttggagctaacgcaa

SEQ ID NO: 186135 - DNA, 76 bp, Homo sapiens
agtaggcacctggggataccacatcaaatatattatagtccccatccacttggagctaacgcaagtgatgaaatta

SEQ ID NO: 186136 - DNA, 73 bp, Homo sapiens
atcaaatatattatagtccccatccacttggagctaacgcaagtgatgaaattatgcctttttgcccccttaa

SEQ ID NO: 186137 - DNA, 73 bp, Homo sapiens
atattatagtccccatccacttggagctaacgcaagtgatgaaattatgcctttttgcccccttaacaattca

SEQ ID NO: 186138 - DNA, 73 bp, Homo sapiens
tccacttggagctaacgcaagtgatgaaattatgcctttttgcccccttaacaattcagtccaaaagctctta

SEQ ID NO: 186139 - DNA, 73 bp, Homo sapiens
ttggagctaacgcaagtgatgaaattatgcctttttgcccccttaacaattcagtccaaaagctcttatgtcg

SEQ ID NO: 186140 - DNA, 71 bp, Homo sapiens
aagtgatgaaattatgcctttttgcccccttaacaattcagtccaaaagctcttatgtcgggccaagcaaa

SEQ ID NO: 186141 - DNA, 70 bp, Homo sapiens
tttttgcccccttaacaattcagtccaaaagctcttatgtcgggccaagcaaagtaggcaacggtgagga

SEQ ID NO: 186142 - DNA, 72 bp, Homo sapiens
ttaacaattcagtccaaaagctcttatgtcgggccaagcaaagtaggcaacggtgaggaggaacggctacag

SEQ ID NO: 186143 - DNA, 73 bp, Homo sapiens
agtccaaaagctcttatgtcgggccaagcaaagtaggcaacggtgaggaggaacggctacaggtggagagaca

SEQ ID NO: 186144 - DNA, 73 bp, Homo sapiens
agctcttatgtcgggccaagcaaagtaggcaacggtgaggaggaacggctacaggtggagagacacccgtaca

SEQ ID NO: 186145 - DNA, 71 bp, Homo sapiens
tcgggccaagcaaagtaggcaacggtgaggaggaacggctacaggtggagagacacccgtacaggggctgg

SEQ ID NO: 186146 - DNA, 70 bp, Homo sapiens
aaagtaggcaacggtgaggaggaacggctacaggtggagagacacccgtacaggggctgggagccaccaa

SEQ ID NO: 186147 - DNA, 68 bp, Homo sapiens
aacggtgaggaggaacggctacaggtggagagacacccgtacaggggctgggagccaccaaaagggcc

SEQ ID NO: 186148 - DNA, 70 bp, Homo sapiens
aacggctacaggtggagagacacccgtacaggggctgggagccaccaaaagggcctgctcttcggagaaa

SEQ ID NO: 186149 - DNA, 76 bp, Homo sapiens
ggctgggagccaccaaaagggcctgctcttcggagaaatgctgaattcagagcagggacaagaagtacaaaatgaa

SEQ ID NO: 186150 - DNA, 77 bp, Homo sapiens
caccaaaagggcctgctcttcggagaaatgctgaattcagagcagggacaagaagtacaaaatgaacttgacatatc

SEQ ID NO: 186151 - DNA, 78 bp, Homo sapiens
gcctgctcttcggagaaatgctgaattcagagcagggacaagaagtacaaaatgaacttgacatatctttttatagaa

SEQ ID NO: 186152 - DNA, 71 bp, Homo sapiens
cagagcagggacaagaagtacaaaatgaacttgacatatctttttatagaaaaaggttaaaaagtatgcaa

SEQ ID NO: 186153 - DNA, 67 bp, Homo sapiens
agaagtacaaaatgaacttgacatatctttttatagaaaaaggttaaaaagtatgcaaagaaaccag

SEQ ID NO: 186154 - DNA, 65 bp, Homo sapiens
aatgaacttgacatatctttttatagaaaaaggttaaaaagtatgcaaagaaaccaggttaaagg

SEQ ID NO: 186155 - DNA, 65 bp, Homo sapiens
gacatatctttttatagaaaaaggttaaaaagtatgcaaagaaaccaggttaaaggggctcccac

SEQ ID NO: 186156 - DNA, 64 bp, Homo sapiens
tttttatagaaaaaggttaaaaagtatgcaaagaaaccaggttaaaggggctcccactggccaa

SEQ ID NO: 186157 - DNA, 65 bp, Homo sapiens
aaggttaaaaagtatgcaaagaaaccaggttaaaggggctcccactggccaagtcaggaaaatta

SEQ ID NO: 186158 - DNA, 67 bp, Homo sapiens
aaaaagtatgcaaagaaaccaggttaaaggggctcccactggccaagtcaggaaaattaaattatca

SEQ ID NO: 186159 - DNA, 66 bp, Homo sapiens
caaagaaaccaggttaaaggggctcccactggccaagtcaggaaaattaaattatcaaaataaata

SEQ ID NO: 186160 - DNA, 68 bp, Homo sapiens
ggttaaaggggctcccactggccaagtcaggaaaattaaattatcaaaataaataatgatagtaatag

SEQ ID NO: 186161 - DNA, 70 bp, Homo sapiens
ggctcccactggccaagtcaggaaaattaaattatcaaaataaataatgatagtaataggttataaccca

SEQ ID NO: 186162 - DNA, 68 bp, Homo sapiens
ggccaagtcaggaaaattaaattatcaaaataaataatgatagtaataggttataacccattgaaaaa

SEQ ID NO: 186163 - DNA, 70 bp, Homo sapiens
attaaattatcaaaataaataatgatagtaataggttataacccattgaaaaaatatatacccatgagtc

SEQ ID NO: 186164 - DNA, 73 bp, Homo sapiens
caaaataaataatgatagtaataggttataacccattgaaaaaatatatacccatgagtccatgatgataaaa

SEQ ID NO: 186165 - DNA, 74 bp, Homo sapiens
aatgatagtaataggttataacccattgaaaaaatatatacccatgagtccatgatgataaaataaacataaga

SEQ ID NO: 186166 - DNA, 73 bp, Homo sapiens
acccattgaaaaaatatatacccatgagtccatgatgataaaataaacataagaataaacttaagtctgagga

SEQ ID NO: 186167 - DNA, 74 bp, Homo sapiens
tacccatgagtccatgatgataaaataaacataagaataaacttaagtctgaggaaaaatgggatatttacatc

SEQ ID NO: 186168 - DNA, 74 bp, Homo sapiens
gagtccatgatgataaaataaacataagaataaacttaagtctgaggaaaaatgggatatttacatcttctcaa

SEQ ID NO: 186169 - DNA, 68 bp, Homo sapiens
aagaataaacttaagtctgaggaaaaatgggatatttacatcttctcaaagtaccttccaataaaaca

SEQ ID NO: 186170 - DNA, 67 bp, Homo sapiens
aaacttaagtctgaggaaaaatgggatatttacatcttctcaaagtaccttccaataaaacacttat

SEQ ID NO: 186171 - DNA, 72 bp, Homo sapiens
ggatatttacatcttctcaaagtaccttccaataaaacacttattaattacagagagaaactgtacagtgga

SEQ ID NO: 186172 - DNA, 72 bp, Homo sapiens
aagtaccttccaataaaacacttattaattacagagagaaactgtacagtggagaagcctggaggatgccat

SEQ ID NO: 186173 - DNA, 74 bp, Homo sapiens
aataaaacacttattaattacagagagaaactgtacagtggagaagcctggaggatgccattcgaatcaagtaa

SEQ ID NO: 186174 - DNA, 76 bp, Homo sapiens
ttattaattacagagagaaactgtacagtggagaagcctggaggatgccattcgaatcaagtaatgggtgttaaca

SEQ ID NO: 186175 - DNA, 77 bp, Homo sapiens
attacagagagaaactgtacagtggagaagcctggaggatgccattcgaatcaagtaatgggtgttaacatcaacag

SEQ ID NO: 186176 - DNA, 79 bp, Homo sapiens
tgtacagtggagaagcctggaggatgccattcgaatcaagtaatgggtgttaacatcaacagtaatgtctcagtggaaa

SEQ ID NO: 186177 - DNA, 80 bp, Homo sapiens
agaagcctggaggatgccattcgaatcaagtaatgggtgttaacatcaacagtaatgtctcagtggaaatcaggatcatg

SEQ ID NO: 186178 - DNA, 82 bp, Homo sapiens
aggatgccattcgaatcaagtaatgggtgttaacatcaacagtaatgtctcagtggaaatcaggatcatgtgatgtggttca

SEQ ID NO: 186179 - DNA, 81 bp, Homo sapiens
attcgaatcaagtaatgggtgttaacatcaacagtaatgtctcagtggaaatcaggatcatgtgatgtggttcaatgagaa

SEQ ID NO: 186180 - DNA, 83 bp, Homo sapiens
aagtaatgggtgttaacatcaacagtaatgtctcagtggaaatcaggatcatgtgatgtggttcaatgagaagagtgcagata

SEQ ID NO: 186181 - DNA, 86 bp, Homo sapiens
agtaatgtctcagtggaaatcaggatcatgtgatgtggttcaatgagaagagtgcagatattcctaccaaagatgcataacatgaa

SEQ ID NO: 186182 - DNA, 87 bp, Homo sapiens
tcaggatcatgtgatgtggttcaatgagaagagtgcagatattcctaccaaagatgcataacatgaatctagttgcagggaaatata

SEQ ID NO: 186183 - DNA, 84 bp, Homo sapiens
atgtgatgtggttcaatgagaagagtgcagatattcctaccaaagatgcataacatgaatctagttgcagggaaatatacataa

SEQ ID NO: 186184 - DNA, 83 bp, Homo sapiens
tcaatgagaagagtgcagatattcctaccaaagatgcataacatgaatctagttgcagggaaatatacataaccaagtatgta

SEQ ID NO: 186185 - DNA, 81 bp, Homo sapiens
agtgcagatattcctaccaaagatgcataacatgaatctagttgcagggaaatatacataaccaagtatgtatatctacta

SEQ ID NO: 186186 - DNA, 77 bp, Homo sapiens
ttcctaccaaagatgcataacatgaatctagttgcagggaaatatacataaccaagtatgtatatctactaaataac

SEQ ID NO: 186187 - DNA, 78 bp, Homo sapiens
aagatgcataacatgaatctagttgcagggaaatatacataaccaagtatgtatatctactaaataactggcctgaag

SEQ ID NO: 186188 - DNA, 76 bp, Homo sapiens
cataacatgaatctagttgcagggaaatatacataaccaagtatgtatatctactaaataactggcctgaagtctt

SEQ ID NO: 186189 - DNA, 72 bp, Homo sapiens
ctagttgcagggaaatatacataaccaagtatgtatatctactaaataactggcctgaagtctttaaaatct

SEQ ID NO: 186190 - DNA, 72 bp, Homo sapiens
gggaaatatacataaccaagtatgtatatctactaaataactggcctgaagtctttaaaatcttcaagttca

SEQ ID NO: 186191 - DNA, 73 bp, Homo sapiens
cataaccaagtatgtatatctactaaataactggcctgaagtctttaaaatcttcaagttcatgaaagtcaag

SEQ ID NO: 186192 - DNA, 71 bp, Homo sapiens
gtatatctactaaataactggcctgaagtctttaaaatcttcaagttcatgaaagtcaaggaaagaccaag

SEQ ID NO: 186193 - DNA, 70 bp, Homo sapiens
tactaaataactggcctgaagtctttaaaatcttcaagttcatgaaagtcaaggaaagaccaaggaactc

SEQ ID NO: 186194 - DNA, 71 bp, Homo sapiens
cctgaagtctttaaaatcttcaagttcatgaaagtcaaggaaagaccaaggaactctttccagttgatgga

SEQ ID NO: 186195 - DNA, 72 bp, Homo sapiens
tttaaaatcttcaagttcatgaaagtcaaggaaagaccaaggaactctttccagttgatggaggctaagaca

SEQ ID NO: 186196 - DNA, 75 bp, Homo sapiens
atcttcaagttcatgaaagtcaaggaaagaccaaggaactctttccagttgatggaggctaagacatgacaacta

SEQ ID NO: 186197 - DNA, 74 bp, Homo sapiens
aaagtcaaggaaagaccaaggaactctttccagttgatggaggctaagacatgacaactaaatgctacgtatga

SEQ ID NO: 186198 - DNA, 75 bp, Homo sapiens
aaggaaagaccaaggaactctttccagttgatggaggctaagacatgacaactaaatgctacgtatgattgtaga

SEQ ID NO: 186199 - DNA, 75 bp, Homo sapiens
aaggaactctttccagttgatggaggctaagacatgacaactaaatgctacgtatgattgtagactggatccttt

SEQ ID NO: 186200 - DNA, 79 bp, Homo sapiens
tttccagttgatggaggctaagacatgacaactaaatgctacgtatgattgtagactggatccttttgctatcaaaata

SEQ ID NO: 186201 - DNA, 77 bp, Homo sapiens
atggaggctaagacatgacaactaaatgctacgtatgattgtagactggatccttttgctatcaaaataaaggacag

SEQ ID NO: 186202 - DNA, 77 bp, Homo sapiens
aagacatgacaactaaatgctacgtatgattgtagactggatccttttgctatcaaaataaaggacagggccaggca

SEQ ID NO: 186203 - DNA, 70 bp, Homo sapiens
aaaaaaataaaggacattactggaacaatctgcaacaaaactggagtaggatctgaggataacaagttaa

SEQ ID NO: 186204 - DNA, 75 bp, Homo sapiens
ataaaggacattactggaacaatctgcaacaaaactggagtaggatctgaggataacaagttaataatgtatcag

SEQ ID NO: 186205 - DNA, 76 bp, Homo sapiens
attactggaacaatctgcaacaaaactggagtaggatctgaggataacaagttaataatgtatcagtgctaattcc

SEQ ID NO: 186206 - DNA, 78 bp, Homo sapiens
tgcaacaaaactggagtaggatctgaggataacaagttaataatgtatcagtgctaattcctgacttggatggttgta

SEQ ID NO: 186207 - DNA, 76 bp, Homo sapiens
aaactggagtaggatctgaggataacaagttaataatgtatcagtgctaattcctgacttggatggttgtactgta

SEQ ID NO: 186208 - DNA, 77 bp, Homo sapiens
gtaggatctgaggataacaagttaataatgtatcagtgctaattcctgacttggatggttgtactgtagttatataa

SEQ ID NO: 186209 - DNA, 76 bp, Homo sapiens
aggataacaagttaataatgtatcagtgctaattcctgacttggatggttgtactgtagttatataagagaatgcc

SEQ ID NO: 186210 - DNA, 76 bp, Homo sapiens
tatcagtgctaattcctgacttggatggttgtactgtagttatataagagaatgcccttgtttgcaagaaataaat

SEQ ID NO: 186211 - DNA, 72 bp, Homo sapiens
attcctgacttggatggttgtactgtagttatataagagaatgcccttgtttgcaagaaataaattctaaag

SEQ ID NO: 186212 - DNA, 73 bp, Homo sapiens
ggatggttgtactgtagttatataagagaatgcccttgtttgcaagaaataaattctaaagtattcagggaca

SEQ ID NO: 186213 - DNA, 75 bp, Homo sapiens
tactgtagttatataagagaatgcccttgtttgcaagaaataaattctaaagtattcagggacaacggagcatca

SEQ ID NO: 186214 - DNA, 76 bp, Homo sapiens
tatataagagaatgcccttgtttgcaagaaataaattctaaagtattcagggacaacggagcatcaatattggcaa

SEQ ID NO: 186215 - DNA, 73 bp, Homo sapiens
aatgcccttgtttgcaagaaataaattctaaagtattcagggacaacggagcatcaatattggcaacttactc

SEQ ID NO: 186216 - DNA, 74 bp, Homo sapiens
ttgcaagaaataaattctaaagtattcagggacaacggagcatcaatattggcaacttactctcaaagaaagaa

SEQ ID NO: 186217 - DNA, 71 bp, Homo sapiens
gaaataaattctaaagtattcagggacaacggagcatcaatattggcaacttactctcaaagaaagaaaag

SEQ ID NO: 186218 - DNA, 70 bp, Homo sapiens
ataaattctaaagtattcagggacaacggagcatcaatattggcaacttactctcaaagaaagaaaagtt

SEQ ID NO: 186219 - DNA, 70 bp, Homo sapiens
aagtattcagggacaacggagcatcaatattggcaacttactctcaaagaaagaaaagttttttgtacca

SEQ ID NO: 186220 - DNA, 70 bp, Homo sapiens
agggacaacggagcatcaatattggcaacttactctcaaagaaagaaaagttttttgtaccatacttgta

SEQ ID NO: 186221 - DNA, 71 bp, Homo sapiens
cggagcatcaatattggcaacttactctcaaagaaagaaaagttttttgtaccatacttgtattacaagtg

SEQ ID NO: 186222 - DNA, 71 bp, Homo sapiens
gcatcaatattggcaacttactctcaaagaaagaaaagttttttgtaccatacttgtattacaagtgtaaa

SEQ ID NO: 186223 - DNA, 71 bp, Homo sapiens
tggcaacttactctcaaagaaagaaaagttttttgtaccatacttgtattacaagtgtaaatgtgagatta

SEQ ID NO: 186224 - DNA, 70 bp, Homo sapiens
ttactctcaaagaaagaaaagttttttgtaccatacttgtattacaagtgtaaatgtgagattatttcca

SEQ ID NO: 186225 - DNA, 66 bp, Homo sapiens
aagaaagaaaagttttttgtaccatacttgtattacaagtgtaaatgtgagattatttccaatttt

SEQ ID NO: 186226 - DNA, 65 bp, Homo sapiens
aagttttttgtaccatacttgtattacaagtgtaaatgtgagattatttccaattttttttaaat

SEQ ID NO: 186227 - DNA, 72 bp, Homo sapiens
agtaagtaaatagtatttggggaagccccacatctcaatctatgcacagtggactaagggactctgggaagg

SEQ ID NO: 186228 - DNA, 77 bp, Homo sapiens
tagtatttggggaagccccacatctcaatctatgcacagtggactaagggactctgggaagggcactgaaatcagag

SEQ ID NO: 186229 - DNA, 78 bp, Homo sapiens
aagccccacatctcaatctatgcacagtggactaagggactctgggaagggcactgaaatcagaggatgtcttcaagg

SEQ ID NO: 186230 - DNA, 78 bp, Homo sapiens
atctcaatctatgcacagtggactaagggactctgggaagggcactgaaatcagaggatgtcttcaaggggccttcag

SEQ ID NO: 186231 - DNA, 74 bp, Homo sapiens
acagtggactaagggactctgggaagggcactgaaatcagaggatgtcttcaaggggccttcagtctgtttcaa

SEQ ID NO: 186232 - DNA, 74 bp, Homo sapiens
actaagggactctgggaagggcactgaaatcagaggatgtcttcaaggggccttcagtctgtttcaatttgctc

SEQ ID NO: 186233 - DNA, 77 bp, Homo sapiens
tgggaagggcactgaaatcagaggatgtcttcaaggggccttcagtctgtttcaatttgctccacttggctgtctct

SEQ ID NO: 186234 - DNA, 76 bp, Homo sapiens
actgaaatcagaggatgtcttcaaggggccttcagtctgtttcaatttgctccacttggctgtctcttcaaggacc

SEQ ID NO: 186235 - DNA, 76 bp, Homo sapiens
agaggatgtcttcaaggggccttcagtctgtttcaatttgctccacttggctgtctcttcaaggacccataacata

SEQ ID NO: 186236 - DNA, 78 bp, Homo sapiens
tcaaggggccttcagtctgtttcaatttgctccacttggctgtctcttcaaggacccataacatactgtgcagaccta

SEQ ID NO: 186237 - DNA, 80 bp, Homo sapiens
tcagtctgtttcaatttgctccacttggctgtctcttcaaggacccataacatactgtgcagacctaaattgcaccatat

SEQ ID NO: 186238 - DNA, 78 bp, Homo sapiens
ccacttggctgtctcttcaaggacccataacatactgtgcagacctaaattgcaccatattatcctaagaggaatcga

SEQ ID NO: 186239 - DNA, 79 bp, Homo sapiens
tgtctcttcaaggacccataacatactgtgcagacctaaattgcaccatattatcctaagaggaatcgaaatgccatcc

SEQ ID NO: 186240 - DNA, 76 bp, Homo sapiens
ataacatactgtgcagacctaaattgcaccatattatcctaagaggaatcgaaatgccatcctgaaaggaacaaag

SEQ ID NO: 186241 - DNA, 73 bp, Homo sapiens
agacctaaattgcaccatattatcctaagaggaatcgaaatgccatcctgaaaggaacaaaggcttccttata

SEQ ID NO: 186242 - DNA, 73 bp, Homo sapiens
taaattgcaccatattatcctaagaggaatcgaaatgccatcctgaaaggaacaaaggcttccttatacaaat

SEQ ID NO: 186243 - DNA, 73 bp, Homo sapiens
ttatcctaagaggaatcgaaatgccatcctgaaaggaacaaaggcttccttatacaaattagttgatctgtta

SEQ ID NO: 186244 - DNA, 73 bp, Homo sapiens
taagaggaatcgaaatgccatcctgaaaggaacaaaggcttccttatacaaattagttgatctgttagctaaa

SEQ ID NO: 186245 - DNA, 71 bp, Homo sapiens
aaatgccatcctgaaaggaacaaaggcttccttatacaaattagttgatctgttagctaaatcaagccttt

SEQ ID NO: 186246 - DNA, 70 bp, Homo sapiens
cctgaaaggaacaaaggcttccttatacaaattagttgatctgttagctaaatcaagccttttctaataa

SEQ ID NO: 186247 - DNA, 70 bp, Homo sapiens
aggcttccttatacaaattagttgatctgttagctaaatcaagccttttctaataaaaggaaaggcagtg

SEQ ID NO: 186248 - DNA, 72 bp, Homo sapiens
tatacaaattagttgatctgttagctaaatcaagccttttctaataaaaggaaaggcagtggttttctctca

SEQ ID NO: 186249 - DNA, 70 bp, Homo sapiens
ctgttagctaaatcaagccttttctaataaaaggaaaggcagtggttttctctcaaaaatgccaaatgag

SEQ ID NO: 186250 - DNA, 70 bp, Homo sapiens
tcaagccttttctaataaaaggaaaggcagtggttttctctcaaaaatgccaaatgaggttgttcttcta

SEQ ID NO: 186251 - DNA, 75 bp, Homo sapiens
tctaataaaaggaaaggcagtggttttctctcaaaaatgccaaatgaggttgttcttctatctatatcacacaca

SEQ ID NO: 186252 - DNA, 72 bp, Homo sapiens
aaaggaaaggcagtggttttctctcaaaaatgccaaatgaggttgttcttctatctatatcacacacaaaaa

SEQ ID NO: 186253 - DNA, 75 bp, Homo sapiens
cagtggttttctctcaaaaatgccaaatgaggttgttcttctatctatatcacacacaaaaacagagcaaacaaa

SEQ ID NO: 186254 - DNA, 76 bp, Homo sapiens
ctctcaaaaatgccaaatgaggttgttcttctatctatatcacacacaaaaacagagcaaacaaaaaacaagcata

SEQ ID NO: 186255 - DNA, 76 bp, Homo sapiens
aatgaggttgttcttctatctatatcacacacaaaaacagagcaaacaaaaaacaagcataatctgaagccttcag

SEQ ID NO: 186256 - DNA, 77 bp, Homo sapiens
tatatcacacacaaaaacagagcaaacaaaaaacaagcataatctgaagccttcagttcatctcctctcaactaaaa

SEQ ID NO: 186257 - DNA, 76 bp, Homo sapiens
cacacacaaaaacagagcaaacaaaaaacaagcataatctgaagccttcagttcatctcctctcaactaaaatata

SEQ ID NO: 186258 - DNA, 77 bp, Homo sapiens
agcaaacaaaaaacaagcataatctgaagccttcagttcatctcctctcaactaaaatatattgtctcggttgcaga

SEQ ID NO: 186259 - DNA, 75 bp, Homo sapiens
aaaacaagcataatctgaagccttcagttcatctcctctcaactaaaatatattgtctcggttgcagaaaaaaga

SEQ ID NO: 186260 - DNA, 76 bp, Homo sapiens
agcataatctgaagccttcagttcatctcctctcaactaaaatatattgtctcggttgcagaaaaaagacaataaa

SEQ ID NO: 186261 - DNA, 73 bp, Homo sapiens
gaagccttcagttcatctcctctcaactaaaatatattgtctcggttgcagaaaaaagacaataaacttgtaa

SEQ ID NO: 186262 - DNA, 70 bp, Homo sapiens
ctcaactaaaatatattgtctcggttgcagaaaaaagacaataaacttgtaatataaattcaaaggtgta

SEQ ID NO: 186263 - DNA, 70 bp, Homo sapiens
acttgtaatataaattcaaaggtgtatttgggaaaaacatttccacatcttgttgggaaaatcagcttca

SEQ ID NO: 186264 - DNA, 69 bp, Homo sapiens
taaattcaaaggtgtatttgggaaaaacatttccacatcttgttgggaaaatcagcttcacttaggatt

SEQ ID NO: 186265 - DNA, 70 bp, Homo sapiens
aggtgtatttgggaaaaacatttccacatcttgttgggaaaatcagcttcacttaggatttgttgtagaa

SEQ ID NO: 186266 - DNA, 70 bp, Homo sapiens
gggaaaaacatttccacatcttgttgggaaaatcagcttcacttaggatttgttgtagaaacaagacaat

SEQ ID NO: 186267 - DNA, 75 bp, Homo sapiens
atttccacatcttgttgggaaaatcagcttcacttaggatttgttgtagaaacaagacaattttacacacatgca

SEQ ID NO: 186268 - DNA, 76 bp, Homo sapiens
atcttgttgggaaaatcagcttcacttaggatttgttgtagaaacaagacaattttacacacatgcactttgatca

SEQ ID NO: 186269 - DNA, 80 bp, Homo sapiens
aaatcagcttcacttaggatttgttgtagaaacaagacaattttacacacatgcactttgatcatctgatgatttacaca

SEQ ID NO: 186270 - DNA, 82 bp, Homo sapiens
tcacttaggatttgttgtagaaacaagacaattttacacacatgcactttgatcatctgatgatttacacaaaagatcagca

SEQ ID NO: 186271 - DNA, 81 bp, Homo sapiens
gatttgttgtagaaacaagacaattttacacacatgcactttgatcatctgatgatttacacaaaagatcagcattcttaa

SEQ ID NO: 186272 - DNA, 77 bp, Homo sapiens
agaaacaagacaattttacacacatgcactttgatcatctgatgatttacacaaaagatcagcattcttaaaaaaaa

SEQ ID NO: 186273 - DNA, 79 bp, Homo sapiens
ttacacacatgcactttgatcatctgatgatttacacaaaagatcagcattcttaaaaaaaaatgttgtttttgccatc

SEQ ID NO: 186274 - DNA, 77 bp, Homo sapiens
catgcactttgatcatctgatgatttacacaaaagatcagcattcttaaaaaaaaatgttgtttttgccatccttag

SEQ ID NO: 186275 - DNA, 74 bp, Homo sapiens
catctgatgatttacacaaaagatcagcattcttaaaaaaaaatgttgtttttgccatccttagtctttagaga

SEQ ID NO: 186276 - DNA, 72 bp, Homo sapiens
tttacacaaaagatcagcattcttaaaaaaaaatgttgtttttgccatccttagtctttagagactcagagc

SEQ ID NO: 186277 - DNA, 74 bp, Homo sapiens
aaatgttgtttttgccatccttagtctttagagactcagagcctgcctggagtgggatggggaatggagtccaa

SEQ ID NO: 186278 - DNA, 74 bp, Homo sapiens
tgtttttgccatccttagtctttagagactcagagcctgcctggagtgggatggggaatggagtccaataaaaa

SEQ ID NO: 186279 - DNA, 75 bp, Homo sapiens
atccttagtctttagagactcagagcctgcctggagtgggatggggaatggagtccaataaaaaagcttctggca

SEQ ID NO: 186280 - DNA, 74 bp, Homo sapiens
tagagactcagagcctgcctggagtgggatggggaatggagtccaataaaaaagcttctggcaccccactaaaa

SEQ ID NO: 186281 - DNA, 73 bp, Homo sapiens
agcctgcctggagtgggatggggaatggagtccaataaaaaagcttctggcaccccactaaaagaagcagatg

SEQ ID NO: 186282 - DNA, 73 bp, Homo sapiens
agtgggatggggaatggagtccaataaaaaagcttctggcaccccactaaaagaagcagatgtctgagtacca

SEQ ID NO: 186283 - DNA, 73 bp, Homo sapiens
ggaatggagtccaataaaaaagcttctggcaccccactaaaagaagcagatgtctgagtaccacagctttttc

SEQ ID NO: 186284 - DNA, 73 bp, Homo sapiens
agtccaataaaaaagcttctggcaccccactaaaagaagcagatgtctgagtaccacagctttttctcctgaa

SEQ ID NO: 186285 - DNA, 75 bp, Homo sapiens
aaaaagcttctggcaccccactaaaagaagcagatgtctgagtaccacagctttttctcctgaaagcacatgagg

SEQ ID NO: 186286 - DNA, 75 bp, Homo sapiens
accccactaaaagaagcagatgtctgagtaccacagctttttctcctgaaagcacatgagggcggcctggactgg

SEQ ID NO: 186287 - DNA, 79 bp, Homo sapiens
taaaagaagcagatgtctgagtaccacagctttttctcctgaaagcacatgagggcggcctggactggtggctgtgaat

SEQ ID NO: 186288 - DNA, 76 bp, Homo sapiens
atgtctgagtaccacagctttttctcctgaaagcacatgagggcggcctggactggtggctgtgaatttgttttgt

SEQ ID NO: 186289 - DNA, 73 bp, Homo sapiens
agtaccacagctttttctcctgaaagcacatgagggcggcctggactggtggctgtgaatttgttttgttttc

SEQ ID NO: 186290 - DNA, 71 bp, Homo sapiens
tttttctcctgaaagcacatgagggcggcctggactggtggctgtgaatttgttttgttttccttctttct

SEQ ID NO: 186291 - DNA, 67 bp, Homo sapiens
aaagaagaaactgaggtagattattccaatcctattaaaagatgagaatttattatcccttaaaagt

SEQ ID NO: 186292 - DNA, 68 bp, Homo sapiens
actgaggtagattattccaatcctattaaaagatgagaatttattatcccttaaaagttgaccaaggg

SEQ ID NO: 186293 - DNA, 67 bp, Homo sapiens
agattattccaatcctattaaaagatgagaatttattatcccttaaaagttgaccaagggttaaggc

SEQ ID NO: 186294 - DNA, 69 bp, Homo sapiens
tcctattaaaagatgagaatttattatcccttaaaagttgaccaagggttaaggcttgatagaaagcaa

SEQ ID NO: 186295 - DNA, 71 bp, Homo sapiens
gatgagaatttattatcccttaaaagttgaccaagggttaaggcttgatagaaagcaaaacaactcagtga

SEQ ID NO: 186296 - DNA, 70 bp, Homo sapiens
ttattatcccttaaaagttgaccaagggttaaggcttgatagaaagcaaaacaactcagtgatctttcac

SEQ ID NO: 186297 - DNA, 71 bp, Homo sapiens
taaaagttgaccaagggttaaggcttgatagaaagcaaaacaactcagtgatctttcactatatacccaaa

SEQ ID NO: 186298 - DNA, 73 bp, Homo sapiens
ccaagggttaaggcttgatagaaagcaaaacaactcagtgatctttcactatatacccaaaatctggcattaa

SEQ ID NO: 186299 - DNA, 76 bp, Homo sapiens
ttaaggcttgatagaaagcaaaacaactcagtgatctttcactatatacccaaaatctggcattaagtgtggccca

SEQ ID NO: 186300 - DNA, 75 bp, Homo sapiens
atagaaagcaaaacaactcagtgatctttcactatatacccaaaatctggcattaagtgtggcccacagtaggta

SEQ ID NO: 186301 - DNA, 74 bp, Homo sapiens
aaaacaactcagtgatctttcactatatacccaaaatctggcattaagtgtggcccacagtaggtactcaaata

SEQ ID NO: 186302 - DNA, 73 bp, Homo sapiens
atctttcactatatacccaaaatctggcattaagtgtggcccacagtaggtactcaaatacttcaaaatgaaa

SEQ ID NO: 186303 - DNA, 71 bp, Homo sapiens
actatatacccaaaatctggcattaagtgtggcccacagtaggtactcaaatacttcaaaatgaaaagtat

SEQ ID NO: 186304 - DNA, 71 bp, Homo sapiens
acccaaaatctggcattaagtgtggcccacagtaggtactcaaatacttcaaaatgaaaagtatttatatg

SEQ ID NO: 186305 - DNA, 72 bp, Homo sapiens
aaaatctggcattaagtgtggcccacagtaggtactcaaatacttcaaaatgaaaagtatttatatgtcctc

SEQ ID NO: 186306 - DNA, 75 bp, Homo sapiens
atctggcattaagtgtggcccacagtaggtactcaaatacttcaaaatgaaaagtatttatatgtcctccagata

SEQ ID NO: 186307 - DNA, 73 bp, Homo sapiens
ttaagtgtggcccacagtaggtactcaaatacttcaaaatgaaaagtatttatatgtcctccagataaggcaa

SEQ ID NO: 186308 - DNA, 75 bp, Homo sapiens
tgtggcccacagtaggtactcaaatacttcaaaatgaaaagtatttatatgtcctccagataaggcaagcactaa

SEQ ID NO: 186309 - DNA, 74 bp, Homo sapiens
ccacagtaggtactcaaatacttcaaaatgaaaagtatttatatgtcctccagataaggcaagcactaagctaa

SEQ ID NO: 186310 - DNA, 73 bp, Homo sapiens
caaatacttcaaaatgaaaagtatttatatgtcctccagataaggcaagcactaagctaaaaaatgcctcttg

SEQ ID NO: 186311 - DNA, 72 bp, Homo sapiens
acttcaaaatgaaaagtatttatatgtcctccagataaggcaagcactaagctaaaaaatgcctcttggaag

SEQ ID NO: 186312 - DNA, 71 bp, Homo sapiens
aaagtatttatatgtcctccagataaggcaagcactaagctaaaaaatgcctcttggaaggacatttttat

SEQ ID NO: 186313 - DNA, 72 bp, Homo sapiens
atttttgtttatttatacactccgagctatgtaggcagaaagtgggaggtgtaaggatggtatctgaaggaa

SEQ ID NO: 186314 - DNA, 73 bp, Homo sapiens
tgtttatttatacactccgagctatgtaggcagaaagtgggaggtgtaaggatggtatctgaaggaaaaagga

SEQ ID NO: 186315 - DNA, 72 bp, Homo sapiens
tacactccgagctatgtaggcagaaagtgggaggtgtaaggatggtatctgaaggaaaaaggagtacgggaa

SEQ ID NO: 186316 - DNA, 70 bp, Homo sapiens
tatgtaggcagaaagtgggaggtgtaaggatggtatctgaaggaaaaaggagtacgggaagacttaggaa

SEQ ID NO: 186317 - DNA, 66 bp, Homo sapiens
aaagtgggaggtgtaaggatggtatctgaaggaaaaaggagtacgggaagacttaggaaggtcctc

SEQ ID NO: 186318 - DNA, 68 bp, Homo sapiens
tgtaaggatggtatctgaaggaaaaaggagtacgggaagacttaggaaggtcctctcgaacttgattt

SEQ ID NO: 186319 - DNA, 69 bp, Homo sapiens
tatctgaaggaaaaaggagtacgggaagacttaggaaggtcctctcgaacttgattttcagaagcaaaa

SEQ ID NO: 186320 - DNA, 66 bp, Homo sapiens
aaaaaggagtacgggaagacttaggaaggtcctctcgaacttgattttcagaagcaaaagaaatta

SEQ ID NO: 186321 - DNA, 67 bp, Homo sapiens
agtacgggaagacttaggaaggtcctctcgaacttgattttcagaagcaaaagaaattagttttgta

SEQ ID NO: 186322 - DNA, 68 bp, Homo sapiens
gaagacttaggaaggtcctctcgaacttgattttcagaagcaaaagaaattagttttgtatagggaac

SEQ ID NO: 186323 - DNA, 72 bp, Homo sapiens
aggtcctctcgaacttgattttcagaagcaaaagaaattagttttgtatagggaacttcaatctatgaagca

SEQ ID NO: 186324 - DNA, 72 bp, Homo sapiens
cctctcgaacttgattttcagaagcaaaagaaattagttttgtatagggaacttcaatctatgaagcagaaa

SEQ ID NO: 186325 - DNA, 71 bp, Homo sapiens
cgaacttgattttcagaagcaaaagaaattagttttgtatagggaacttcaatctatgaagcagaaacaaa

SEQ ID NO: 186326 - DNA, 72 bp, Homo sapiens
ttgattttcagaagcaaaagaaattagttttgtatagggaacttcaatctatgaagcagaaacaaaagaata

SEQ ID NO: 186327 - DNA, 73 bp, Homo sapiens
tagttttgtatagggaacttcaatctatgaagcagaaacaaaagaataaaaatcttctgccagaagtcttcca

SEQ ID NO: 186328 - DNA, 74 bp, Homo sapiens
tatagggaacttcaatctatgaagcagaaacaaaagaataaaaatcttctgccagaagtcttccaggacttgaa

SEQ ID NO: 186329 - DNA, 74 bp, Homo sapiens
acttcaatctatgaagcagaaacaaaagaataaaaatcttctgccagaagtcttccaggacttgaaaagcatct

SEQ ID NO: 186330 - DNA, 74 bp, Homo sapiens
aaagaataaaaatcttctgccagaagtcttccaggacttgaaaagcatcttggatttcctgagcctgtcttatc

SEQ ID NO: 186331 - DNA, 75 bp, Homo sapiens
taaaaatcttctgccagaagtcttccaggacttgaaaagcatcttggatttcctgagcctgtcttatcggtccta

SEQ ID NO: 186332 - DNA, 76 bp, Homo sapiens
agaagtcttccaggacttgaaaagcatcttggatttcctgagcctgtcttatcggtcctagattcaaatattctca

SEQ ID NO: 186333 - DNA, 75 bp, Homo sapiens
aaaagcatcttggatttcctgagcctgtcttatcggtcctagattcaaatattctcaaccatttttagatcataa

SEQ ID NO: 186334 - DNA, 76 bp, Homo sapiens
atcttggatttcctgagcctgtcttatcggtcctagattcaaatattctcaaccatttttagatcataaatgctaa

SEQ ID NO: 186335 - DNA, 77 bp, Homo sapiens
agcctgtcttatcggtcctagattcaaatattctcaaccatttttagatcataaatgctaaggactgtacacgcatg

SEQ ID NO: 186336 - DNA, 76 bp, Homo sapiens
gtcttatcggtcctagattcaaatattctcaaccatttttagatcataaatgctaaggactgtacacgcatggcgg

SEQ ID NO: 186337 - DNA, 78 bp, Homo sapiens
tagattcaaatattctcaaccatttttagatcataaatgctaaggactgtacacgcatggcggggtagtggaatatga

SEQ ID NO: 186338 - DNA, 76 bp, Homo sapiens
atattctcaaccatttttagatcataaatgctaaggactgtacacgcatggcggggtagtggaatatgactataaa

SEQ ID NO: 186339 - DNA, 75 bp, Homo sapiens
tttttagatcataaatgctaaggactgtacacgcatggcggggtagtggaatatgactataaagaggccaaagta

SEQ ID NO: 186340 - DNA, 76 bp, Homo sapiens
agatcataaatgctaaggactgtacacgcatggcggggtagtggaatatgactataaagaggccaaagtagctccc

SEQ ID NO: 186341 - DNA, 73 bp, Homo sapiens
taaggactgtacacgcatggcggggtagtggaatatgactataaagaggccaaagtagctcccccagagaaaa

SEQ ID NO: 186342 - DNA, 73 bp, Homo sapiens
tacacgcatggcggggtagtggaatatgactataaagaggccaaagtagctcccccagagaaaaggtagcaaa

SEQ ID NO: 186343 - DNA, 71 bp, Homo sapiens
gggtagtggaatatgactataaagaggccaaagtagctcccccagagaaaaggtagcaaagtcagccacgg

SEQ ID NO: 186344 - DNA, 70 bp, Homo sapiens
atatgactataaagaggccaaagtagctcccccagagaaaaggtagcaaagtcagccacggtaaactaat

SEQ ID NO: 186345 - DNA, 69 bp, Homo sapiens
ataaagaggccaaagtagctcccccagagaaaaggtagcaaagtcagccacggtaaactaattctatta

SEQ ID NO: 186346 - DNA, 67 bp, Homo sapiens
cccagagaaaaggtagcaaagtcagccacggtaaactaattctattaaagggtactaccatcctact

SEQ ID NO: 186347 - DNA, 66 bp, Homo sapiens
aaaaggtagcaaagtcagccacggtaaactaattctattaaagggtactaccatcctactttccta

SEQ ID NO: 186348 - DNA, 67 bp, Homo sapiens
aagtcagccacggtaaactaattctattaaagggtactaccatcctactttcctaccctgagcggaa

SEQ ID NO: 186349 - DNA, 65 bp, Homo sapiens
ggtaaactaattctattaaagggtactaccatcctactttcctaccctgagcggaaaatctttta

SEQ ID NO: 186350 - DNA, 69 bp, Homo sapiens
taaagggtactaccatcctactttcctaccctgagcggaaaatcttttaatatctaagcactcaaagaa

SEQ ID NO: 186351 - DNA, 74 bp, Homo sapiens
agcggaaaatcttttaatatctaagcactcaaagaatcacaataccccatggcttacttgtatctctactttca

SEQ ID NO: 186352 - DNA, 73 bp, Homo sapiens
tttaatatctaagcactcaaagaatcacaataccccatggcttacttgtatctctactttcaaaaccctggta

SEQ ID NO: 186353 - DNA, 75 bp, Homo sapiens
tatctaagcactcaaagaatcacaataccccatggcttacttgtatctctactttcaaaaccctggtagattaca

SEQ ID NO: 186354 - DNA, 70 bp, Homo sapiens
aaagaatcacaataccccatggcttacttgtatctctactttcaaaaccctggtagattacagttatttc

SEQ ID NO: 186355 - DNA, 69 bp, Homo sapiens
acaataccccatggcttacttgtatctctactttcaaaaccctggtagattacagttatttcttgactt

SEQ ID NO: 186356 - DNA, 72 bp, Homo sapiens
catggcttacttgtatctctactttcaaaaccctggtagattacagttatttcttgactttatgataggctt

SEQ ID NO: 186357 - DNA, 74 bp, Homo sapiens
gtatctctactttcaaaaccctggtagattacagttatttcttgactttatgataggctttttcatatgctgat

SEQ ID NO: 186358 - DNA, 75 bp, Homo sapiens
ctttcaaaaccctggtagattacagttatttcttgactttatgataggctttttcatatgctgattaatgttgca

SEQ ID NO: 186359 - DNA, 75 bp, Homo sapiens
ccctggtagattacagttatttcttgactttatgataggctttttcatatgctgattaatgttgcattaaccatt

SEQ ID NO: 186360 - DNA, 77 bp, Homo sapiens
cagttatttcttgactttatgataggctttttcatatgctgattaatgttgcattaaccatttttagaccacatata

SEQ ID NO: 186361 - DNA, 79 bp, Homo sapiens
gactttatgataggctttttcatatgctgattaatgttgcattaaccatttttagaccacatataaagtcatgcataac

SEQ ID NO: 186362 - DNA, 79 bp, Homo sapiens
gataggctttttcatatgctgattaatgttgcattaaccatttttagaccacatataaagtcatgcataaccttgctgt

SEQ ID NO: 186363 - DNA, 80 bp, Homo sapiens
catatgctgattaatgttgcattaaccatttttagaccacatataaagtcatgcataaccttgctgttcaactgagtaaa

SEQ ID NO: 186364 - DNA, 78 bp, Homo sapiens
gctgattaatgttgcattaaccatttttagaccacatataaagtcatgcataaccttgctgttcaactgagtaaaaga

SEQ ID NO: 186365 - DNA, 71 bp, Homo sapiens
ccatttttagaccacatataaagtcatgcataaccttgctgttcaactgagtaaaagaaaaactccaaaaa

SEQ ID NO: 186366 - DNA, 74 bp, Homo sapiens
accacatataaagtcatgcataaccttgctgttcaactgagtaaaagaaaaactccaaaaattatgattgcctc

SEQ ID NO: 186367 - DNA, 71 bp, Homo sapiens
accttgctgttcaactgagtaaaagaaaaactccaaaaattatgattgcctcttaacttacagaaaatgca

SEQ ID NO: 186368 - DNA, 69 bp, Homo sapiens
gttcaactgagtaaaagaaaaactccaaaaattatgattgcctcttaacttacagaaaatgcaaactta

SEQ ID NO: 186369 - DNA, 67 bp, Homo sapiens
taaaagaaaaactccaaaaattatgattgcctcttaacttacagaaaatgcaaacttaaccaatccc

SEQ ID NO: 186370 - DNA, 71 bp, Homo sapiens
actccaaaaattatgattgcctcttaacttacagaaaatgcaaacttaaccaatccccacagataggttga

SEQ ID NO: 186371 - DNA, 74 bp, Homo sapiens
ttatgattgcctcttaacttacagaaaatgcaaacttaaccaatccccacagataggttgatgctggctttaaa

SEQ ID NO: 186372 - DNA, 69 bp, Homo sapiens
ctcttaacttacagaaaatgcaaacttaaccaatccccacagataggttgatgctggctttaaaaagtt

SEQ ID NO: 186373 - DNA, 66 bp, Homo sapiens
aaaatgcaaacttaaccaatccccacagataggttgatgctggctttaaaaagtttaggggaaagg

SEQ ID NO: 186374 - DNA, 66 bp, Homo sapiens
aacttaaccaatccccacagataggttgatgctggctttaaaaagtttaggggaaagggatttcta

SEQ ID NO: 186375 - DNA, 69 bp, Homo sapiens
aatccccacagataggttgatgctggctttaaaaagtttaggggaaagggatttctaattatcatattc

SEQ ID NO: 186376 - DNA, 71 bp, Homo sapiens
cagataggttgatgctggctttaaaaagtttaggggaaagggatttctaattatcatattctccacataaa

SEQ ID NO: 186377 - DNA, 69 bp, Homo sapiens
gatgctggctttaaaaagtttaggggaaagggatttctaattatcatattctccacataaattgtattt

SEQ ID NO: 186378 - DNA, 76 bp, Homo sapiens
tctaattatcatattctccacataaattgtattttcagaagcaagagaaatacaggaaactttagtctacaaagca

SEQ ID NO: 186379 - DNA, 74 bp, Homo sapiens
catattctccacataaattgtattttcagaagcaagagaaatacaggaaactttagtctacaaagcaataaaca

SEQ ID NO: 186380 - DNA, 71 bp, Homo sapiens
ctccacataaattgtattttcagaagcaagagaaatacaggaaactttagtctacaaagcaataaacaaaa

SEQ ID NO: 186381 - DNA, 71 bp, Homo sapiens
tgtattttcagaagcaagagaaatacaggaaactttagtctacaaagcaataaacaaaaatatgaagtccg

SEQ ID NO: 186382 - DNA, 70 bp, Homo sapiens
aaatacaggaaactttagtctacaaagcaataaacaaaaatatgaagtccgttgctgccaaccagtgaac

SEQ ID NO: 186383 - DNA, 74 bp, Homo sapiens
acaaaaatatgaagtccgttgctgccaaccagtgaactgcttcactggcagtttacccaagttgtcttcagaaa

SEQ ID NO: 186384 - DNA, 75 bp, Homo sapiens
aatatgaagtccgttgctgccaaccagtgaactgcttcactggcagtttacccaagttgtcttcagaaaggagac

SEQ ID NO: 186385 - DNA, 81 bp, Homo sapiens
ttgctgccaaccagtgaactgcttcactggcagtttacccaagttgtcttcagaaaggagactcatgcaagattgctccat

SEQ ID NO: 186386 - DNA, 78 bp, Homo sapiens
agtgaactgcttcactggcagtttacccaagttgtcttcagaaaggagactcatgcaagattgctccattggtcctaa

SEQ ID NO: 186387 - DNA, 79 bp, Homo sapiens
ttcactggcagtttacccaagttgtcttcagaaaggagactcatgcaagattgctccattggtcctaatgcaactaaga

SEQ ID NO: 186388 - DNA, 76 bp, Homo sapiens
agtttacccaagttgtcttcagaaaggagactcatgcaagattgctccattggtcctaatgcaactaagagaagtg

SEQ ID NO: 186389 - DNA, 77 bp, Homo sapiens
cccaagttgtcttcagaaaggagactcatgcaagattgctccattggtcctaatgcaactaagagaagtggccctgg

SEQ ID NO: 186390 - DNA, 74 bp, Homo sapiens
agaaaggagactcatgcaagattgctccattggtcctaatgcaactaagagaagtggccctggggatttttatt

SEQ ID NO: 186391 - DNA, 73 bp, Homo sapiens
agactcatgcaagattgctccattggtcctaatgcaactaagagaagtggccctggggatttttattttttaa

SEQ ID NO: 186392 - DNA, 69 bp, Homo sapiens
attttttaattctttgtcttcttttcattgcatttccaaaaagaaagctaatatcactatgtgtaaccg

SEQ ID NO: 186393 - DNA, 75 bp, Homo sapiens
tctttgtcttcttttcattgcatttccaaaaagaaagctaatatcactatgtgtaaccgtagaaagaatatgcaa

SEQ ID NO: 186394 - DNA, 75 bp, Homo sapiens
gtcttcttttcattgcatttccaaaaagaaagctaatatcactatgtgtaaccgtagaaagaatatgcaagaaca

SEQ ID NO: 186395 - DNA, 75 bp, Homo sapiens
cattgcatttccaaaaagaaagctaatatcactatgtgtaaccgtagaaagaatatgcaagaacaatgaacaaaa

SEQ ID NO: 186396 - DNA, 75 bp, Homo sapiens
aagaaagctaatatcactatgtgtaaccgtagaaagaatatgcaagaacaatgaacaaaaaccctgactcagcta

SEQ ID NO: 186397 - DNA, 79 bp, Homo sapiens
taatatcactatgtgtaaccgtagaaagaatatgcaagaacaatgaacaaaaaccctgactcagctatctcttgcttga

SEQ ID NO: 186398 - DNA, 76 bp, Homo sapiens
accgtagaaagaatatgcaagaacaatgaacaaaaaccctgactcagctatctcttgcttgactgatttcagtatt

SEQ ID NO: 186399 - DNA, 79 bp, Homo sapiens
atatgcaagaacaatgaacaaaaaccctgactcagctatctcttgcttgactgatttcagtatttgatgccttagttta

SEQ ID NO: 186400 - DNA, 78 bp, Homo sapiens
aacaatgaacaaaaaccctgactcagctatctcttgcttgactgatttcagtatttgatgccttagtttactcatctg

SEQ ID NO: 186401 - DNA, 76 bp, Homo sapiens
tctgtaaaatggtgaccttgacctattatatcaaagaatttcatcagctacaaaactgtatgatttactcatttta

SEQ ID NO: 186402 - DNA, 75 bp, Homo sapiens
gacctattatatcaaagaatttcatcagctacaaaactgtatgatttactcattttatagccataaaaatacacc

SEQ ID NO: 186403 - DNA, 78 bp, Homo sapiens
tcaaagaatttcatcagctacaaaactgtatgatttactcattttatagccataaaaatacaccctgatccacatgcc

SEQ ID NO: 186404 - DNA, 77 bp, Homo sapiens
aatttcatcagctacaaaactgtatgatttactcattttatagccataaaaatacaccctgatccacatgcccagaa

SEQ ID NO: 186405 - DNA, 76 bp, Homo sapiens
agctacaaaactgtatgatttactcattttatagccataaaaatacaccctgatccacatgcccagaatctaaatg

SEQ ID NO: 186406 - DNA, 75 bp, Homo sapiens
ctgtatgatttactcattttatagccataaaaatacaccctgatccacatgcccagaatctaaatgtattaaaaa

SEQ ID NO: 186407 - DNA, 74 bp, Homo sapiens
ctcattttatagccataaaaatacaccctgatccacatgcccagaatctaaatgtattaaaaataatgaaagtg

SEQ ID NO: 186408 - DNA, 73 bp, Homo sapiens
gccataaaaatacaccctgatccacatgcccagaatctaaatgtattaaaaataatgaaagtgttcatgggtt

SEQ ID NO: 186409 - DNA, 72 bp, Homo sapiens
caccctgatccacatgcccagaatctaaatgtattaaaaataatgaaagtgttcatgggtttttcctaaaca

SEQ ID NO: 186410 - DNA, 75 bp, Homo sapiens
tgatccacatgcccagaatctaaatgtattaaaaataatgaaagtgttcatgggtttttcctaaacagcagtcac

SEQ ID NO: 186411 - DNA, 77 bp, Homo sapiens
gtattaaaaataatgaaagtgttcatgggtttttcctaaacagcagtcactgtgctaatcatttctcatgcattatc

SEQ ID NO: 186412 - DNA, 79 bp, Homo sapiens
aaaataatgaaagtgttcatgggtttttcctaaacagcagtcactgtgctaatcatttctcatgcattatctcaagtca

SEQ ID NO: 186413 - DNA, 83 bp, Homo sapiens
tgttcatgggtttttcctaaacagcagtcactgtgctaatcatttctcatgcattatctcaagtcatcctcacaactactata

SEQ ID NO: 186414 - DNA, 83 bp, Homo sapiens
tttttcctaaacagcagtcactgtgctaatcatttctcatgcattatctcaagtcatcctcacaactactatatcctggtaga

SEQ ID NO: 186415 - DNA, 85 bp, Homo sapiens
taaacagcagtcactgtgctaatcatttctcatgcattatctcaagtcatcctcacaactactatatcctggtagatggtaccaa

SEQ ID NO: 186416 - DNA, 83 bp, Homo sapiens
tgtgctaatcatttctcatgcattatctcaagtcatcctcacaactactatatcctggtagatggtaccaacacctcatttta

SEQ ID NO: 186417 - DNA, 81 bp, Homo sapiens
taatcatttctcatgcattatctcaagtcatcctcacaactactatatcctggtagatggtaccaacacctcattttacaa

SEQ ID NO: 186418 - DNA, 80 bp, Homo sapiens
atgcattatctcaagtcatcctcacaactactatatcctggtagatggtaccaacacctcattttacaaatgagcaaaca

SEQ ID NO: 186419 - DNA, 78 bp, Homo sapiens
tatatcctggtagatggtaccaacacctcattttacaaatgagcaaacagactgatagagattagtaatgtgcccaaa

SEQ ID NO: 186420 - DNA, 80 bp, Homo sapiens
aatgagcaaacagactgatagagattagtaatgtgcccaaagacacacagctactaagcaccaataccagcatttgaaaa

SEQ ID NO: 186421 - DNA, 76 bp, Homo sapiens
actgatagagattagtaatgtgcccaaagacacacagctactaagcaccaataccagcatttgaaaaaaagggctg

SEQ ID NO: 186422 - DNA, 77 bp, Homo sapiens
agattagtaatgtgcccaaagacacacagctactaagcaccaataccagcatttgaaaaaaagggctgtgctatgag

SEQ ID NO: 186423 - DNA, 76 bp, Homo sapiens
cccaaagacacacagctactaagcaccaataccagcatttgaaaaaaagggctgtgctatgagtctgcctttctaa

SEQ ID NO: 186424 - DNA, 79 bp, Homo sapiens
cacagctactaagcaccaataccagcatttgaaaaaaagggctgtgctatgagtctgcctttctaactgttatgctgta

SEQ ID NO: 186425 - DNA, 78 bp, Homo sapiens
tactaagcaccaataccagcatttgaaaaaaagggctgtgctatgagtctgcctttctaactgttatgctgtatccat

SEQ ID NO: 186426 - DNA, 77 bp, Homo sapiens
aataccagcatttgaaaaaaagggctgtgctatgagtctgcctttctaactgttatgctgtatccattgcattaaaa

SEQ ID NO: 186427 - DNA, 74 bp, Homo sapiens
catttgaaaaaaagggctgtgctatgagtctgcctttctaactgttatgctgtatccattgcattaaaaaaaaa

SEQ ID NO: 186428 - DNA, 81 bp, Homo sapiens
gctgtgctatgagtctgcctttctaactgttatgctgtatccattgcattaaaaaaaaatcaagatcagtatgcagaaaat

SEQ ID NO: 186429 - DNA, 77 bp, Homo sapiens
gcattaaaaaaaaatcaagatcagtatgcagaaaattgagcagtgagaaagttactacacatctcaatttctatagg

SEQ ID NO: 186430 - DNA, 79 bp, Homo sapiens
aaaaatcaagatcagtatgcagaaaattgagcagtgagaaagttactacacatctcaatttctataggtgtcactatta

SEQ ID NO: 186431 - DNA, 80 bp, Homo sapiens
aaaatcaagatcagtatgcagaaaattgagcagtgagaaagttactacacatctcaatttctataggtgtcactattatc

SEQ ID NO: 186432 - DNA, 79 bp, Homo sapiens
agatcagtatgcagaaaattgagcagtgagaaagttactacacatctcaatttctataggtgtcactattatctttaag

SEQ ID NO: 186433 - DNA, 78 bp, Homo sapiens
agaaaattgagcagtgagaaagttactacacatctcaatttctataggtgtcactattatctttaaggctgatcaatc

SEQ ID NO: 186434 - DNA, 73 bp, Homo sapiens
agttactacacatctcaatttctataggtgtcactattatctttaaggctgatcaatccaaagtagtttaacc

SEQ ID NO: 186435 - DNA, 75 bp, Homo sapiens
catctcaatttctataggtgtcactattatctttaaggctgatcaatccaaagtagtttaacctaagacctgtga

SEQ ID NO: 186436 - DNA, 75 bp, Homo sapiens
tttctataggtgtcactattatctttaaggctgatcaatccaaagtagtttaacctaagacctgtgagacattca

SEQ ID NO: 186437 - DNA, 78 bp, Homo sapiens
tcactattatctttaaggctgatcaatccaaagtagtttaacctaagacctgtgagacattcacattctatgttgctc

SEQ ID NO: 186438 - DNA, 79 bp, Homo sapiens
ttatctttaaggctgatcaatccaaagtagtttaacctaagacctgtgagacattcacattctatgttgctctgcagta

SEQ ID NO: 186439 - DNA, 83 bp, Homo sapiens
atcaatccaaagtagtttaacctaagacctgtgagacattcacattctatgttgctctgcagtacagaggcacatacatctga

SEQ ID NO: 186440 - DNA, 84 bp, Homo sapiens
aagtagtttaacctaagacctgtgagacattcacattctatgttgctctgcagtacagaggcacatacatctgatgtcaagcta

SEQ ID NO: 186441 - DNA, 85 bp, Homo sapiens
tttaacctaagacctgtgagacattcacattctatgttgctctgcagtacagaggcacatacatctgatgtcaagctattttcat

SEQ ID NO: 186442 - DNA, 84 bp, Homo sapiens
tgtgagacattcacattctatgttgctctgcagtacagaggcacatacatctgatgtcaagctattttcattttaaaaaggtaa

SEQ ID NO: 186443 - DNA, 83 bp, Homo sapiens
tcacattctatgttgctctgcagtacagaggcacatacatctgatgtcaagctattttcattttaaaaaggtaaatcagaata

SEQ ID NO: 186444 - DNA, 80 bp, Homo sapiens
tctatgttgctctgcagtacagaggcacatacatctgatgtcaagctattttcattttaaaaaggtaaatcagaataaag

SEQ ID NO: 186445 - DNA, 75 bp, Homo sapiens
ctgcagtacagaggcacatacatctgatgtcaagctattttcattttaaaaaggtaaatcagaataaaggtttaa

SEQ ID NO: 186446 - DNA, 74 bp, Homo sapiens
cagaggcacatacatctgatgtcaagctattttcattttaaaaaggtaaatcagaataaaggtttaattacagc

SEQ ID NO: 186447 - DNA, 73 bp, Homo sapiens
agaggcacatacatctgatgtcaagctattttcattttaaaaaggtaaatcagaataaaggtttaattacagc

SEQ ID NO: 186448 - DNA, 71 bp, Homo sapiens
cacatacatctgatgtcaagctattttcattttaaaaaggtaaatcagaataaaggtttaattacagcttt

SEQ ID NO: 186449 - DNA, 68 bp, Homo sapiens
acatctgatgtcaagctattttcattttaaaaaggtaaatcagaataaaggtttaattacagcttttt

SEQ ID NO: 186450 - DNA, 67 bp, Homo sapiens
tgatgtcaagctattttcattttaaaaaggtaaatcagaataaaggtttaattacagctttttttaa

SEQ ID NO: 186451 - DNA, 65 bp, Homo sapiens
tcaagctattttcattttaaaaaggtaaatcagaataaaggtttaattacagctttttttaatta

SEQ ID NO: 186452 - DNA, 67 bp, Homo sapiens
aaaaagaaaaataaactgaagccaaaattaagtgtacgtatataagccacaaaaatatcttccagaa

SEQ ID NO: 186453 - DNA, 71 bp, Homo sapiens
aataaaaaagaagagatttcagataaaatgatcccaggggttggtgtgtatagagaagtaaagaagctcaa

SEQ ID NO: 186454 - DNA, 71 bp, Homo sapiens
aaaagaagagatttcagataaaatgatcccaggggttggtgtgtatagagaagtaaagaagctcaagaaac

SEQ ID NO: 186455 - DNA, 71 bp, Homo sapiens
atttcagataaaatgatcccaggggttggtgtgtatagagaagtaaagaagctcaagaaacctgaccctgg

SEQ ID NO: 186456 - DNA, 71 bp, Homo sapiens
aatgatcccaggggttggtgtgtatagagaagtaaagaagctcaagaaacctgaccctgggagagggtgta

SEQ ID NO: 186457 - DNA, 71 bp, Homo sapiens
gttggtgtgtatagagaagtaaagaagctcaagaaacctgaccctgggagagggtgtagtggacgaaagaa

SEQ ID NO: 186458 - DNA, 72 bp, Homo sapiens
gtgtatagagaagtaaagaagctcaagaaacctgaccctgggagagggtgtagtggacgaaagaagccaatc

SEQ ID NO: 186459 - DNA, 69 bp, Homo sapiens
aagtaaagaagctcaagaaacctgaccctgggagagggtgtagtggacgaaagaagccaatcccttctc

SEQ ID NO: 186460 - DNA, 72 bp, Homo sapiens
agaagctcaagaaacctgaccctgggagagggtgtagtggacgaaagaagccaatcccttctctcaagagta

SEQ ID NO: 186461 - DNA, 71 bp, Homo sapiens
ggagagggtgtagtggacgaaagaagccaatcccttctctcaagagtaggaacagaaatctaggaagaaaa

SEQ ID NO: 186462 - DNA, 70 bp, Homo sapiens
agagggtgtagtggacgaaagaagccaatcccttctctcaagagtaggaacagaaatctaggaagaaaaa

SEQ ID NO: 186463 - DNA, 71 bp, Homo sapiens
gtgtagtggacgaaagaagccaatcccttctctcaagagtaggaacagaaatctaggaagaaaaaatacaa

SEQ ID NO: 186464 - DNA, 67 bp, Homo sapiens
aatcccttctctcaagagtaggaacagaaatctaggaagaaaaaatacaaaggggacgtaagagaaa

SEQ ID NO: 186465 - DNA, 70 bp, Homo sapiens
tcaagagtaggaacagaaatctaggaagaaaaaatacaaaggggacgtaagagaaatgactcaactagaa

SEQ ID NO: 186466 - DNA, 67 bp, Homo sapiens
aaatctaggaagaaaaaatacaaaggggacgtaagagaaatgactcaactagaagtagttctagccc

SEQ ID NO: 186467 - DNA, 70 bp, Homo sapiens
aaaatacaaaggggacgtaagagaaatgactcaactagaagtagttctagccctggccctgagacccata

SEQ ID NO: 186468 - DNA, 77 bp, Homo sapiens
taagagaaatgactcaactagaagtagttctagccctggccctgagacccatatgaagagccaaatcagataaagta

SEQ ID NO: 186469 - DNA, 74 bp, Homo sapiens
cctggccctgagacccatatgaagagccaaatcagataaagtacatcttaaaactggaacatagtagaaggtat

SEQ ID NO: 186470 - DNA, 72 bp, Homo sapiens
ccctgagacccatatgaagagccaaatcagataaagtacatcttaaaactggaacatagtagaaggtatttt

SEQ ID NO: 186471 - DNA, 75 bp, Homo sapiens
gaagagccaaatcagataaagtacatcttaaaactggaacatagtagaaggtatttttattaatgctgatctaga

SEQ ID NO: 186472 - DNA, 74 bp, Homo sapiens
gccaaatcagataaagtacatcttaaaactggaacatagtagaaggtatttttattaatgctgatctagaatat

SEQ ID NO: 186473 - DNA, 76 bp, Homo sapiens
gtacatcttaaaactggaacatagtagaaggtatttttattaatgctgatctagaatattcctgatttagagctca

SEQ ID NO: 186474 - DNA, 80 bp, Homo sapiens
ggaacatagtagaaggtatttttattaatgctgatctagaatattcctgatttagagctcactgatgatctctttgccaa

SEQ ID NO: 186475 - DNA, 82 bp, Homo sapiens
gtatttttattaatgctgatctagaatattcctgatttagagctcactgatgatctctttgccaaagtattcagagctcaaa

SEQ ID NO: 186476 - DNA, 86 bp, Homo sapiens
tttattaatgctgatctagaatattcctgatttagagctcactgatgatctctttgccaaagtattcagagctcaaaatcatcaga

SEQ ID NO: 186477 - DNA, 80 bp, Homo sapiens
atattcctgatttagagctcactgatgatctctttgccaaagtattcagagctcaaaatcatcagaaaggaaaattccac

SEQ ID NO: 186478 - DNA, 79 bp, Homo sapiens
tttagagctcactgatgatctctttgccaaagtattcagagctcaaaatcatcagaaaggaaaattccacttcacttaa

SEQ ID NO: 186479 - DNA, 71 bp, Homo sapiens
ctttgccaaagtattcagagctcaaaatcatcagaaaggaaaattccacttcacttaatctttactttaaa

SEQ ID NO: 186480 - DNA, 69 bp, Homo sapiens
agtattcagagctcaaaatcatcagaaaggaaaattccacttcacttaatctttactttaaaaaaacaa

SEQ ID NO: 186481 - DNA, 67 bp, Homo sapiens
gctcaaaatcatcagaaaggaaaattccacttcacttaatctttactttaaaaaaacaataaataac

SEQ ID NO: 186482 - DNA, 64 bp, Homo sapiens
gaaaggaaaattccacttcacttaatctttactttaaaaaaacaataaataactatcttttgtg

SEQ ID NO: 186483 - DNA, 67 bp, Homo sapiens
tccacttcacttaatctttactttaaaaaaacaataaataactatcttttgtgtgaaattccctaca

SEQ ID NO: 186484 - DNA, 66 bp, Homo sapiens
cttaatctttactttaaaaaaacaataaataactatcttttgtgtgaaattccctacagcaagggc

SEQ ID NO: 186485 - DNA, 70 bp, Homo sapiens
ctttaaaaaaacaataaataactatcttttgtgtgaaattccctacagcaagggctacattattcagctg

SEQ ID NO: 186486 - DNA, 72 bp, Homo sapiens
acaataaataactatcttttgtgtgaaattccctacagcaagggctacattattcagctggtcctctagttt

SEQ ID NO: 186487 - DNA, 72 bp, Homo sapiens
aaataactatcttttgtgtgaaattccctacagcaagggctacattattcagctggtcctctagtttttgta

SEQ ID NO: 186488 - DNA, 75 bp, Homo sapiens
tttgtgtgaaattccctacagcaagggctacattattcagctggtcctctagtttttgtagccatgttctttcaa

SEQ ID NO: 186489 - DNA, 72 bp, Homo sapiens
aaattccctacagcaagggctacattattcagctggtcctctagtttttgtagccatgttctttcaaaggat

SEQ ID NO: 186490 - DNA, 74 bp, Homo sapiens
aagggctacattattcagctggtcctctagtttttgtagccatgttctttcaaaggattagcttggtctcatag

SEQ ID NO: 186491 - DNA, 76 bp, Homo sapiens
attattcagctggtcctctagtttttgtagccatgttctttcaaaggattagcttggtctcatagtcactggcatt

SEQ ID NO: 186492 - DNA, 75 bp, Homo sapiens
agctggtcctctagtttttgtagccatgttctttcaaaggattagcttggtctcatagtcactggcatttgaaac

SEQ ID NO: 186493 - DNA, 72 bp, Homo sapiens
gtttttgtagccatgttctttcaaaggattagcttggtctcatagtcactggcatttgaaacccctggttta

SEQ ID NO: 186494 - DNA, 72 bp, Homo sapiens
atgttctttcaaaggattagcttggtctcatagtcactggcatttgaaacccctggtttagcaaaacagtct

SEQ ID NO: 186495 - DNA, 73 bp, Homo sapiens
tttcaaaggattagcttggtctcatagtcactggcatttgaaacccctggtttagcaaaacagtcttatcaaa

SEQ ID NO: 186496 - DNA, 70 bp, Homo sapiens
attagcttggtctcatagtcactggcatttgaaacccctggtttagcaaaacagtcttatcaaaagtttt

SEQ ID NO: 186497 - DNA, 69 bp, Homo sapiens
ccctggtttagcaaaacagtcttatcaaaagtttttgctccctatgcttaaaccagacctttatagata

SEQ ID NO: 186498 - DNA, 76 bp, Homo sapiens
tagcaaaacagtcttatcaaaagtttttgctccctatgcttaaaccagacctttatagatatctatgaatgctgga

SEQ ID NO: 186499 - DNA, 75 bp, Homo sapiens
gtcttatcaaaagtttttgctccctatgcttaaaccagacctttatagatatctatgaatgctggacaatagtgt

SEQ ID NO: 186500 - DNA, 79 bp, Homo sapiens
ttaaaccagacctttatagatatctatgaatgctggacaatagtgttataagctaaaagcacaaagcagagtggcagaa

SEQ ID NO: 186501 - DNA, 83 bp, Homo sapiens
ttatagatatctatgaatgctggacaatagtgttataagctaaaagcacaaagcagagtggcagaatgagaggtcaagctaaa

SEQ ID NO: 186502 - DNA, 77 bp, Homo sapiens
aatgctggacaatagtgttataagctaaaagcacaaagcagagtggcagaatgagaggtcaagctaaacctttgaaa

SEQ ID NO: 186503 - DNA, 77 bp, Homo sapiens
aagcagagtggcagaatgagaggtcaagctaaacctttgaaagaacatgactattcaaaaccagaacactctgataa

SEQ ID NO: 186504 - DNA, 74 bp, Homo sapiens
gcagaatgagaggtcaagctaaacctttgaaagaacatgactattcaaaaccagaacactctgataacaaattt

SEQ ID NO: 186505 - DNA, 71 bp, Homo sapiens
aagctaaacctttgaaagaacatgactattcaaaaccagaacactctgataacaaattttcaagaaagatg

SEQ ID NO: 186506 - DNA, 74 bp, Homo sapiens
tgaaagaacatgactattcaaaaccagaacactctgataacaaattttcaagaaagatgtatttattatttctc

SEQ ID NO: 186507 - DNA, 73 bp, Homo sapiens
gactattcaaaaccagaacactctgataacaaattttcaagaaagatgtatttattatttctccagataactc

SEQ ID NO: 186508 - DNA, 77 bp, Homo sapiens
ccagaacactctgataacaaattttcaagaaagatgtatttattatttctccagataactctgtctagactatatca

SEQ ID NO: 186509 - DNA, 76 bp, Homo sapiens
ctctgataacaaattttcaagaaagatgtatttattatttctccagataactctgtctagactatatcaaacaaga

SEQ ID NO: 186510 - DNA, 75 bp, Homo sapiens
attttcaagaaagatgtatttattatttctccagataactctgtctagactatatcaaacaagatagctttaaca

SEQ ID NO: 186511 - DNA, 73 bp, Homo sapiens
tttattatttctccagataactctgtctagactatatcaaacaagatagctttaacatcaaaatcaccttttt

SEQ ID NO: 186512 - DNA, 75 bp, Homo sapiens
ttctccagataactctgtctagactatatcaaacaagatagctttaacatcaaaatcaccttttttatgaaccta

SEQ ID NO: 186513 - DNA, 75 bp, Homo sapiens
gactatatcaaacaagatagctttaacatcaaaatcaccttttttatgaacctataaatagtgccactgcaaatg

SEQ ID NO: 186514 - DNA, 75 bp, Homo sapiens
caagatagctttaacatcaaaatcaccttttttatgaacctataaatagtgccactgcaaatggttgtccagatg

SEQ ID NO: 186515 - DNA, 73 bp, Homo sapiens
aaaatcaccttttttatgaacctataaatagtgccactgcaaatggttgtccagatggtaccctgcataggaa

SEQ ID NO: 186516 - DNA, 76 bp, Homo sapiens
tttttatgaacctataaatagtgccactgcaaatggttgtccagatggtaccctgcataggaagtgtggccaatgg

SEQ ID NO: 186517 - DNA, 78 bp, Homo sapiens
acctataaatagtgccactgcaaatggttgtccagatggtaccctgcataggaagtgtggccaatgggatgaggatta

SEQ ID NO: 186518 - DNA, 81 bp, Homo sapiens
ccactgcaaatggttgtccagatggtaccctgcataggaagtgtggccaatgggatgaggattagctgaaattcagctaca

SEQ ID NO: 186519 - DNA, 81 bp, Homo sapiens
aatggttgtccagatggtaccctgcataggaagtgtggccaatgggatgaggattagctgaaattcagctacactatgcta

SEQ ID NO: 186520 - DNA, 85 bp, Homo sapiens
agatggtaccctgcataggaagtgtggccaatgggatgaggattagctgaaattcagctacactatgctagccatgccatgctcc

SEQ ID NO: 186521 - DNA, 85 bp, Homo sapiens
taccctgcataggaagtgtggccaatgggatgaggattagctgaaattcagctacactatgctagccatgccatgctccttgggc

SEQ ID NO: 186522 - DNA, 83 bp, Homo sapiens
agtgtggccaatgggatgaggattagctgaaattcagctacactatgctagccatgccatgctccttgggctggggtgttata

SEQ ID NO: 186523 - DNA, 81 bp, Homo sapiens
aatgggatgaggattagctgaaattcagctacactatgctagccatgccatgctccttgggctggggtgttatagagtggg

SEQ ID NO: 186524 - DNA, 80 bp, Homo sapiens
aggattagctgaaattcagctacactatgctagccatgccatgctccttgggctggggtgttatagagtggggagaggta

SEQ ID NO: 186525 - DNA, 80 bp, Homo sapiens
aaattcagctacactatgctagccatgccatgctccttgggctggggtgttatagagtggggagaggtagcagcacttta

SEQ ID NO: 186526 - DNA, 79 bp, Homo sapiens
tacactatgctagccatgccatgctccttgggctggggtgttatagagtggggagaggtagcagcactttacttattta

SEQ ID NO: 186527 - DNA, 78 bp, Homo sapiens
gattataagcatgacatttatttttaatttgcccaaagacacaatggtcaccatacgcatggacttctgtctatatta

SEQ ID NO: 186528 - DNA, 76 bp, Homo sapiens
atgacatttatttttaatttgcccaaagacacaatggtcaccatacgcatggacttctgtctatattacccatata

SEQ ID NO: 186529 - DNA, 73 bp, Homo sapiens
atttttaatttgcccaaagacacaatggtcaccatacgcatggacttctgtctatattacccatataaattcc

SEQ ID NO: 186530 - DNA, 74 bp, Homo sapiens
tttttaatttgcccaaagacacaatggtcaccatacgcatggacttctgtctatattacccatataaattccta

SEQ ID NO: 186531 - DNA, 75 bp, Homo sapiens
aatttgcccaaagacacaatggtcaccatacgcatggacttctgtctatattacccatataaattcctatcttaa

SEQ ID NO: 186532 - DNA, 77 bp, Homo sapiens
acacaatggtcaccatacgcatggacttctgtctatattacccatataaattcctatcttaagtcaccacaagttca

SEQ ID NO: 186533 - DNA, 76 bp, Homo sapiens
ggtcaccatacgcatggacttctgtctatattacccatataaattcctatcttaagtcaccacaagttcatgtaaa

SEQ ID NO: 186534 - DNA, 76 bp, Homo sapiens
catggacttctgtctatattacccatataaattcctatcttaagtcaccacaagttcatgtaaaggctgatatttg

SEQ ID NO: 186535 - DNA, 76 bp, Homo sapiens
tctgtctatattacccatataaattcctatcttaagtcaccacaagttcatgtaaaggctgatatttgtaaggcca

SEQ ID NO: 186536 - DNA, 71 bp, Homo sapiens
acccatataaattcctatcttaagtcaccacaagttcatgtaaaggctgatatttgtaaggccaactaaat

SEQ ID NO: 186537 - DNA, 69 bp, Homo sapiens
aaattcctatcttaagtcaccacaagttcatgtaaaggctgatatttgtaaggccaactaaatttttat

SEQ ID NO: 186538 - DNA, 69 bp, Homo sapiens
cttaagtcaccacaagttcatgtaaaggctgatatttgtaaggccaactaaatttttattttacttcat

SEQ ID NO: 186539 - DNA, 69 bp, Homo sapiens
cacaagttcatgtaaaggctgatatttgtaaggccaactaaatttttattttacttcattttactctaa

SEQ ID NO: 186540 - DNA, 69 bp, Homo sapiens
aggctgatatttgtaaggccaactaaatttttattttacttcattttactctaactgtagttgattgga

SEQ ID NO: 186541 - DNA, 67 bp, Homo sapiens
ttgtaaggccaactaaatttttattttacttcattttactctaactgtagttgattggaccagtttg

SEQ ID NO: 186542 - DNA, 69 bp, Homo sapiens
ggccaactaaatttttattttacttcattttactctaactgtagttgattggaccagtttgtttcatga

SEQ ID NO: 186543 - DNA, 73 bp, Homo sapiens
ttattttacttcattttactctaactgtagttgattggaccagtttgtttcatgaatagggatccttatctca

SEQ ID NO: 186544 - DNA, 75 bp, Homo sapiens
ttacttcattttactctaactgtagttgattggaccagtttgtttcatgaatagggatccttatctcactcaatc

SEQ ID NO: 186545 - DNA, 76 bp, Homo sapiens
ttactctaactgtagttgattggaccagtttgtttcatgaatagggatccttatctcactcaatctgtccattatt

SEQ ID NO: 186546 - DNA, 75 bp, Homo sapiens
ctaactgtagttgattggaccagtttgtttcatgaatagggatccttatctcactcaatctgtccattattttac

SEQ ID NO: 186547 - DNA, 77 bp, Homo sapiens
tgtagttgattggaccagtttgtttcatgaatagggatccttatctcactcaatctgtccattattttaccatttca

SEQ ID NO: 186548 - DNA, 77 bp, Homo sapiens
ttgattggaccagtttgtttcatgaatagggatccttatctcactcaatctgtccattattttaccatttcacacta

SEQ ID NO: 186549 - DNA, 75 bp, Homo sapiens
accagtttgtttcatgaatagggatccttatctcactcaatctgtccattattttaccatttcacactacccaca

SEQ ID NO: 186550 - DNA, 75 bp, Homo sapiens
agtttgtttcatgaatagggatccttatctcactcaatctgtccattattttaccatttcacactacccacaggc

SEQ ID NO: 186551 - DNA, 78 bp, Homo sapiens
ttcatgaatagggatccttatctcactcaatctgtccattattttaccatttcacactacccacaggcccacaatgta

SEQ ID NO: 186552 - DNA, 76 bp, Homo sapiens
atgaatagggatccttatctcactcaatctgtccattattttaccatttcacactacccacaggcccacaatgtac

SEQ ID NO: 186553 - DNA, 77 bp, Homo sapiens
gatccttatctcactcaatctgtccattattttaccatttcacactacccacaggcccacaatgtaccctatagtga

SEQ ID NO: 186554 - DNA, 75 bp, Homo sapiens
ttatctcactcaatctgtccattattttaccatttcacactacccacaggcccacaatgtaccctatagtgaaag

SEQ ID NO: 186555 - DNA, 72 bp, Homo sapiens
actcaatctgtccattattttaccatttcacactacccacaggcccacaatgtaccctatagtgaaagggaa

SEQ ID NO: 186556 - DNA, 72 bp, Homo sapiens
attattttaccatttcacactacccacaggcccacaatgtaccctatagtgaaagggaaggtgtgaatcata

SEQ ID NO: 186557 - DNA, 74 bp, Homo sapiens
tttaccatttcacactacccacaggcccacaatgtaccctatagtgaaagggaaggtgtgaatcatatttgcaa

SEQ ID NO: 186558 - DNA, 76 bp, Homo sapiens
tacccacaggcccacaatgtaccctatagtgaaagggaaggtgtgaatcatatttgcaaagacaagctgcaaaatc

SEQ ID NO: 186559 - DNA, 77 bp, Homo sapiens
cccacaatgtaccctatagtgaaagggaaggtgtgaatcatatttgcaaagacaagctgcaaaatctacacctgcaa

SEQ ID NO: 186560 - DNA, 78 bp, Homo sapiens
taccctatagtgaaagggaaggtgtgaatcatatttgcaaagacaagctgcaaaatctacacctgcaataatctatat

SEQ ID NO: 186561 - DNA, 78 bp, Homo sapiens
gtgaaagggaaggtgtgaatcatatttgcaaagacaagctgcaaaatctacacctgcaataatctatattaaattaca

SEQ ID NO: 186562 - DNA, 79 bp, Homo sapiens
gtgtgaatcatatttgcaaagacaagctgcaaaatctacacctgcaataatctatattaaattacaaatcttaggccag

SEQ ID NO: 186563 - DNA, 78 bp, Homo sapiens
aatcatatttgcaaagacaagctgcaaaatctacacctgcaataatctatattaaattacaaatcttaggccaggtgc

SEQ ID NO: 186564 - DNA, 71 bp, Homo sapiens
aaaacagaaacaaaatatttacagatctttccaaataactgatctatggactaaacagtcatcaggaaaaa

SEQ ID NO: 186565 - DNA, 69 bp, Homo sapiens
aaacaaaatatttacagatctttccaaataactgatctatggactaaacagtcatcaggaaaaaaaaaa

SEQ ID NO: 186566 - DNA, 72 bp, Homo sapiens
aaaaaagctagtacatcatacttctgtattgtcaaaaccatgaagagaaaatttcaaatttgtgcaaaacag

SEQ ID NO: 186567 - DNA, 74 bp, Homo sapiens
gctagtacatcatacttctgtattgtcaaaaccatgaagagaaaatttcaaatttgtgcaaaacagttcttttg

SEQ ID NO: 186568 - DNA, 74 bp, Homo sapiens
tcatacttctgtattgtcaaaaccatgaagagaaaatttcaaatttgtgcaaaacagttcttttgttctcaatg

SEQ ID NO: 186569 - DNA, 70 bp, Homo sapiens
gtattgtcaaaaccatgaagagaaaatttcaaatttgtgcaaaacagttcttttgttctcaatgttaaaa

SEQ ID NO: 186570 - DNA, 68 bp, Homo sapiens
aaccatgaagagaaaatttcaaatttgtgcaaaacagttcttttgttctcaatgttaaaatttctggg

SEQ ID NO: 186571 - DNA, 69 bp, Homo sapiens
ccatgaagagaaaatttcaaatttgtgcaaaacagttcttttgttctcaatgttaaaatttctgggtct

SEQ ID NO: 186572 - DNA, 69 bp, Homo sapiens
gagaaaatttcaaatttgtgcaaaacagttcttttgttctcaatgttaaaatttctgggtcttaagcca

SEQ ID NO: 186573 - DNA, 69 bp, Homo sapiens
tgtgcaaaacagttcttttgttctcaatgttaaaatttctgggtcttaagccagtaagtttaattttga

SEQ ID NO: 186574 - DNA, 71 bp, Homo sapiens
cagttcttttgttctcaatgttaaaatttctgggtcttaagccagtaagtttaattttgagaagcagagca

SEQ ID NO: 186575 - DNA, 70 bp, Homo sapiens
cttttgttctcaatgttaaaatttctgggtcttaagccagtaagtttaattttgagaagcagagcaccag

SEQ ID NO: 186576 - DNA, 71 bp, Homo sapiens
tttgttctcaatgttaaaatttctgggtcttaagccagtaagtttaattttgagaagcagagcaccaggaa

SEQ ID NO: 186577 - DNA, 68 bp, Homo sapiens
taaaatttctgggtcttaagccagtaagtttaattttgagaagcagagcaccaggaaggggagtgggg

SEQ ID NO: 186578 - DNA, 70 bp, Homo sapiens
ttaagccagtaagtttaattttgagaagcagagcaccaggaaggggagtggggggatggcggagaaagaa

SEQ ID NO: 186579 - DNA, 71 bp, Homo sapiens
taagtttaattttgagaagcagagcaccaggaaggggagtggggggatggcggagaaagaaagcaatagaa

SEQ ID NO: 186580 - DNA, 73 bp, Homo sapiens
taattttgagaagcagagcaccaggaaggggagtggggggatggcggagaaagaaagcaatagaacacattaa

SEQ ID NO: 186581 - DNA, 70 bp, Homo sapiens
aaggggagtggggggatggcggagaaagaaagcaatagaacacattaatggtaagttctcaacaaccaga

SEQ ID NO: 186582 - DNA, 72 bp, Homo sapiens
gggggatggcggagaaagaaagcaatagaacacattaatggtaagttctcaacaaccagaaagtttatatca

SEQ ID NO: 186583 - DNA, 74 bp, Homo sapiens
gcggagaaagaaagcaatagaacacattaatggtaagttctcaacaaccagaaagtttatatcaatcctctgaa

SEQ ID NO: 186584 - DNA, 76 bp, Homo sapiens
cacattaatggtaagttctcaacaaccagaaagtttatatcaatcctctgaagtgtgaggacatagaataaagtca

SEQ ID NO: 186585 - DNA, 75 bp, Homo sapiens
ggtaagttctcaacaaccagaaagtttatatcaatcctctgaagtgtgaggacatagaataaagtcatatatgtt

SEQ ID NO: 186586 - DNA, 77 bp, Homo sapiens
caacaaccagaaagtttatatcaatcctctgaagtgtgaggacatagaataaagtcatatatgtttaaaatctatgc

SEQ ID NO: 186587 - DNA, 77 bp, Homo sapiens
ccagaaagtttatatcaatcctctgaagtgtgaggacatagaataaagtcatatatgtttaaaatctatgcgttatg

SEQ ID NO: 186588 - DNA, 79 bp, Homo sapiens
tatatcaatcctctgaagtgtgaggacatagaataaagtcatatatgtttaaaatctatgcgttatgtttaatatatta

SEQ ID NO: 186589 - DNA, 77 bp, Homo sapiens
ctctgaagtgtgaggacatagaataaagtcatatatgtttaaaatctatgcgttatgtttaatatattaaatgcaaa

SEQ ID NO: 186590 - DNA, 76 bp, Homo sapiens
tgaggacatagaataaagtcatatatgtttaaaatctatgcgttatgtttaatatattaaatgcaaaatatagatt

SEQ ID NO: 186591 - DNA, 76 bp, Homo sapiens
tgtttaaaatctatgcgttatgtttaatatattaaatgcaaaatatagattttcagtgggatctcatctacataaa

SEQ ID NO: 186592 - DNA, 75 bp, Homo sapiens
aaaatctatgcgttatgtttaatatattaaatgcaaaatatagattttcagtgggatctcatctacataaaaata

SEQ ID NO: 186593 - DNA, 78 bp, Homo sapiens
tgtttaatatattaaatgcaaaatatagattttcagtgggatctcatctacataaaaatataatgtgaaatactgaca

SEQ ID NO: 186594 - DNA, 77 bp, Homo sapiens
attaaatgcaaaatatagattttcagtgggatctcatctacataaaaatataatgtgaaatactgacagaggttata

SEQ ID NO: 186595 - DNA, 79 bp, Homo sapiens
gcaaaatatagattttcagtgggatctcatctacataaaaatataatgtgaaatactgacagaggttatagtcaccaga

SEQ ID NO: 186596 - DNA, 79 bp, Homo sapiens
tttcagtgggatctcatctacataaaaatataatgtgaaatactgacagaggttatagtcaccagaaagattacaatga

SEQ ID NO: 186597 - DNA, 78 bp, Homo sapiens
gtgggatctcatctacataaaaatataatgtgaaatactgacagaggttatagtcaccagaaagattacaatgactta

SEQ ID NO: 186598 - DNA, 74 bp, Homo sapiens
ctacataaaaatataatgtgaaatactgacagaggttatagtcaccagaaagattacaatgacttattttcttc

SEQ ID NO: 186599 - DNA, 71 bp, Homo sapiens
aaatataatgtgaaatactgacagaggttatagtcaccagaaagattacaatgacttattttcttcttttt

SEQ ID NO: 186600 - DNA, 70 bp, Homo sapiens
ttcttcttttttgcttttctagatgtccacactttctaaaattaacacatacttatttcaaaatcaggga

SEQ ID NO: 186601 - DNA, 71 bp, Homo sapiens
ttctagatgtccacactttctaaaattaacacatacttatttcaaaatcagggaaaatgttagattccttc

SEQ ID NO: 186602 - DNA, 69 bp, Homo sapiens
tccacactttctaaaattaacacatacttatttcaaaatcagggaaaatgttagattccttcttgaaac

SEQ ID NO: 186603 - DNA, 67 bp, Homo sapiens
ctttctaaaattaacacatacttatttcaaaatcagggaaaatgttagattccttcttgaaactaaa

SEQ ID NO: 186604 - DNA, 68 bp, Homo sapiens
aattaacacatacttatttcaaaatcagggaaaatgttagattccttcttgaaactaaaatatgttct

SEQ ID NO: 186605 - DNA, 69 bp, Homo sapiens
acacatacttatttcaaaatcagggaaaatgttagattccttcttgaaactaaaatatgttctttctgg

SEQ ID NO: 186606 - DNA, 69 bp, Homo sapiens
cttatttcaaaatcagggaaaatgttagattccttcttgaaactaaaatatgttctttctggtagaaca

SEQ ID NO: 186607 - DNA, 69 bp, Homo sapiens
caaaatcagggaaaatgttagattccttcttgaaactaaaatatgttctttctggtagaacattattat

SEQ ID NO: 186608 - DNA, 70 bp, Homo sapiens
agggaaaatgttagattccttcttgaaactaaaatatgttctttctggtagaacattattattatgtcaa

SEQ ID NO: 186609 - DNA, 72 bp, Homo sapiens
ttagattccttcttgaaactaaaatatgttctttctggtagaacattattattatgtcaaatccttgtaatg

SEQ ID NO: 186610 - DNA, 72 bp, Homo sapiens
gattccttcttgaaactaaaatatgttctttctggtagaacattattattatgtcaaatccttgtaatggaa

SEQ ID NO: 186611 - DNA, 70 bp, Homo sapiens
cttcttgaaactaaaatatgttctttctggtagaacattattattatgtcaaatccttgtaatggaaacc

SEQ ID NO: 186612 - DNA, 69 bp, Homo sapiens
aaaatatgttctttctggtagaacattattattatgtcaaatccttgtaatggaaaccttttactttca

SEQ ID NO: 186613 - DNA, 71 bp, Homo sapiens
tgttctttctggtagaacattattattatgtcaaatccttgtaatggaaaccttttactttcaccattcca

SEQ ID NO: 186614 - DNA, 68 bp, Homo sapiens
gtcaaatccttgtaatggaaaccttttactttcaccattccagataacagaaaattatggtttaacca

SEQ ID NO: 186615 - DNA, 67 bp, Homo sapiens
tgtaatggaaaccttttactttcaccattccagataacagaaaattatggtttaaccaaaaatataa

SEQ ID NO: 186616 - DNA, 69 bp, Homo sapiens
accttttactttcaccattccagataacagaaaattatggtttaaccaaaaatataataaatctgcaga

SEQ ID NO: 186617 - DNA, 71 bp, Homo sapiens
cagataacagaaaattatggtttaaccaaaaatataataaatctgcagaaaaaaagtcatgtcaataaata

SEQ ID NO: 186618 - DNA, 72 bp, Homo sapiens
ccaaaaatataataaatctgcagaaaaaaagtcatgtcaataaataaactaattatctgctgactacttaac

SEQ ID NO: 186619 - DNA, 76 bp, Homo sapiens
ctgcagaaaaaaagtcatgtcaataaataaactaattatctgctgactacttaactatgtaccagatagcatttaa

SEQ ID NO: 186620 - DNA, 78 bp, Homo sapiens
gtcatgtcaataaataaactaattatctgctgactacttaactatgtaccagatagcatttaataatctcaaatggga

SEQ ID NO: 186621 - DNA, 75 bp, Homo sapiens
taaataaactaattatctgctgactacttaactatgtaccagatagcatttaataatctcaaatgggagaaagga

SEQ ID NO: 186622 - DNA, 78 bp, Homo sapiens
ctaattatctgctgactacttaactatgtaccagatagcatttaataatctcaaatgggagaaaggagatattatgct

SEQ ID NO: 186623 - DNA, 77 bp, Homo sapiens
ctgctgactacttaactatgtaccagatagcatttaataatctcaaatgggagaaaggagatattatgcttatttta

SEQ ID NO: 186624 - DNA, 74 bp, Homo sapiens
acttaactatgtaccagatagcatttaataatctcaaatgggagaaaggagatattatgcttattttagattta

SEQ ID NO: 186625 - DNA, 74 bp, Homo sapiens
cagatagcatttaataatctcaaatgggagaaaggagatattatgcttattttagatttatacaaacctaagcc

SEQ ID NO: 186626 - DNA, 72 bp, Homo sapiens
gcatttaataatctcaaatgggagaaaggagatattatgcttattttagatttatacaaacctaagcccaag

SEQ ID NO: 186627 - DNA, 73 bp, Homo sapiens
tcaaatgggagaaaggagatattatgcttattttagatttatacaaacctaagcccaaggtaaattagcagca

SEQ ID NO: 186628 - DNA, 74 bp, Homo sapiens
tatgcttattttagatttatacaaacctaagcccaaggtaaattagcagcagatcctacaattgaatttgtgcc

SEQ ID NO: 186629 - DNA, 76 bp, Homo sapiens
ttagatttatacaaacctaagcccaaggtaaattagcagcagatcctacaattgaatttgtgccttcagatatcaa

SEQ ID NO: 186630 - DNA, 76 bp, Homo sapiens
tttatacaaacctaagcccaaggtaaattagcagcagatcctacaattgaatttgtgccttcagatatcaaatcaa

SEQ ID NO: 186631 - DNA, 77 bp, Homo sapiens
taagcccaaggtaaattagcagcagatcctacaattgaatttgtgccttcagatatcaaatcaaacattctttctgt

SEQ ID NO: 186632 - DNA, 81 bp, Homo sapiens
aattagcagcagatcctacaattgaatttgtgccttcagatatcaaatcaaacattctttctgttataccatggctatatc

SEQ ID NO: 186633 - DNA, 77 bp, Homo sapiens
aattgaatttgtgccttcagatatcaaatcaaacattctttctgttataccatggctatatcccctgtggtaatgaa

SEQ ID NO: 186634 - DNA, 76 bp, Homo sapiens
tgccttcagatatcaaatcaaacattctttctgttataccatggctatatcccctgtggtaatgaaggtttttata

SEQ ID NO: 186635 - DNA, 74 bp, Homo sapiens
gatatcaaatcaaacattctttctgttataccatggctatatcccctgtggtaatgaaggtttttatattaagc

SEQ ID NO: 186636 - DNA, 70 bp, Homo sapiens
aaacattctttctgttataccatggctatatcccctgtggtaatgaaggtttttatattaagccacctac

SEQ ID NO: 186637 - DNA, 74 bp, Homo sapiens
ttctgttataccatggctatatcccctgtggtaatgaaggtttttatattaagccacctaccatctatcctcaa

SEQ ID NO: 186638 - DNA, 71 bp, Homo sapiens
atggctatatcccctgtggtaatgaaggtttttatattaagccacctaccatctatcctcaacccctgaaa

SEQ ID NO: 186639 - DNA, 71 bp, Homo sapiens
tatatcccctgtggtaatgaaggtttttatattaagccacctaccatctatcctcaacccctgaaaatgaa

SEQ ID NO: 186640 - DNA, 72 bp, Homo sapiens
taatgaaggtttttatattaagccacctaccatctatcctcaacccctgaaaatgaaccacatatgcctact

SEQ ID NO: 186641 - DNA, 75 bp, Homo sapiens
tttttatattaagccacctaccatctatcctcaacccctgaaaatgaaccacatatgcctacttcgagtctcaga

SEQ ID NO: 186642 - DNA, 75 bp, Homo sapiens
attaagccacctaccatctatcctcaacccctgaaaatgaaccacatatgcctacttcgagtctcagacatttgt

SEQ ID NO: 186643 - DNA, 74 bp, Homo sapiens
atctatcctcaacccctgaaaatgaaccacatatgcctacttcgagtctcagacatttgtttcttaaagtgtta

SEQ ID NO: 186644 - DNA, 72 bp, Homo sapiens
aacccctgaaaatgaaccacatatgcctacttcgagtctcagacatttgtttcttaaagtgttaccttcaga

SEQ ID NO: 186645 - DNA, 74 bp, Homo sapiens
aaaatgaaccacatatgcctacttcgagtctcagacatttgtttcttaaagtgttaccttcagatcctgattat

SEQ ID NO: 186646 - DNA, 73 bp, Homo sapiens
ctacttcgagtctcagacatttgtttcttaaagtgttaccttcagatcctgattattgtcaggttttcttaca

SEQ ID NO: 186647 - DNA, 72 bp, Homo sapiens
aaagtgttaccttcagatcctgattattgtcaggttttcttacaactcatggaacaagaaaacaggcagaaa

SEQ ID NO: 186648 - DNA, 73 bp, Homo sapiens
cttcagatcctgattattgtcaggttttcttacaactcatggaacaagaaaacaggcagaaaacaaaatgtta

SEQ ID NO: 186649 - DNA, 66 bp, Homo sapiens
aagaaaacaggcagaaaacaaaatgttaatcatagcccccgttctcctcctcaatttcccctaaaa

SEQ ID NO: 186650 - DNA, 67 bp, Homo sapiens
gcagaaaacaaaatgttaatcatagcccccgttctcctcctcaatttcccctaaaattgttttcact

SEQ ID NO: 186651 - DNA, 67 bp, Homo sapiens
cccgttctcctcctcaatttcccctaaaattgttttcacttaatattatagagtatgaaactcaaaa

SEQ ID NO: 186652 - DNA, 69 bp, Homo sapiens
tcctcaatttcccctaaaattgttttcacttaatattatagagtatgaaactcaaaaatatctggtggg

SEQ ID NO: 186653 - DNA, 69 bp, Homo sapiens
ccctaaaattgttttcacttaatattatagagtatgaaactcaaaaatatctggtggggacagtcaaaa

SEQ ID NO: 186654 - DNA, 79 bp, Homo sapiens
tttcacttaatattatagagtatgaaactcaaaaatatctggtggggacagtcaaaataggcatctgcactcacagaca

SEQ ID NO: 186655 - DNA, 78 bp, Homo sapiens
ttaatattatagagtatgaaactcaaaaatatctggtggggacagtcaaaataggcatctgcactcacagacaactcc

SEQ ID NO: 186656 - DNA, 78 bp, Homo sapiens
tatgaaactcaaaaatatctggtggggacagtcaaaataggcatctgcactcacagacaactcccttaccatcctaga

SEQ ID NO: 186657 - DNA, 81 bp, Homo sapiens
tatctggtggggacagtcaaaataggcatctgcactcacagacaactcccttaccatcctagaagagaatgaactcagaca

SEQ ID NO: 186658 - DNA, 79 bp, Homo sapiens
tcacagacaactcccttaccatcctagaagagaatgaactcagacaaagtattagatacactttgtatgcatccttgaa

SEQ ID NO: 186659 - DNA, 75 bp, Homo sapiens
aactcccttaccatcctagaagagaatgaactcagacaaagtattagatacactttgtatgcatccttgaaacaa

SEQ ID NO: 186660 - DNA, 78 bp, Homo sapiens
taccatcctagaagagaatgaactcagacaaagtattagatacactttgtatgcatccttgaaacaagtacataaaga

SEQ ID NO: 186661 - DNA, 76 bp, Homo sapiens
actcagacaaagtattagatacactttgtatgcatccttgaaacaagtacataaagagctagtacctaagcaaaga

SEQ ID NO: 186662 - DNA, 76 bp, Homo sapiens
gtattagatacactttgtatgcatccttgaaacaagtacataaagagctagtacctaagcaaagacgaaatagaga

SEQ ID NO: 186663 - DNA, 75 bp, Homo sapiens
tgaaacaagtacataaagagctagtacctaagcaaagacgaaatagagaaacagaatcaacagttttcaactgca

SEQ ID NO: 186664 - DNA, 73 bp, Homo sapiens
cataaagagctagtacctaagcaaagacgaaatagagaaacagaatcaacagttttcaactgcaatatttttg

SEQ ID NO: 186665 - DNA, 71 bp, Homo sapiens
ctagtacctaagcaaagacgaaatagagaaacagaatcaacagttttcaactgcaatatttttgtatttaa

SEQ ID NO: 186666 - DNA, 72 bp, Homo sapiens
agcaaagacgaaatagagaaacagaatcaacagttttcaactgcaatatttttgtatttaaacagagaaaca

SEQ ID NO: 186667 - DNA, 71 bp, Homo sapiens
gagaaacagaatcaacagttttcaactgcaatatttttgtatttaaacagagaaacaattatttcttaatc

SEQ ID NO: 186668 - DNA, 71 bp, Homo sapiens
cagaatcaacagttttcaactgcaatatttttgtatttaaacagagaaacaattatttcttaatctgaaac

SEQ ID NO: 186669 - DNA, 70 bp, Homo sapiens
cagttttcaactgcaatatttttgtatttaaacagagaaacaattatttcttaatctgaaacttctccca

SEQ ID NO: 186670 - DNA, 72 bp, Homo sapiens
ctgcaatatttttgtatttaaacagagaaacaattatttcttaatctgaaacttctcccaacattcacatcc

SEQ ID NO: 186671 - DNA, 71 bp, Homo sapiens
tttgtatttaaacagagaaacaattatttcttaatctgaaacttctcccaacattcacatcctttcatatt

SEQ ID NO: 186672 - DNA, 71 bp, Homo sapiens
caattatttcttaatctgaaacttctcccaacattcacatcctttcatatttttccttttctgttcatttc

SEQ ID NO: 186673 - DNA, 70 bp, Homo sapiens
ctgaaacttctcccaacattcacatcctttcatatttttccttttctgttcatttcttattttcttggct

SEQ ID NO: 186674 - DNA, 72 bp, Homo sapiens
tctcccaacattcacatcctttcatatttttccttttctgttcatttcttattttcttggctttttgtgcaa

SEQ ID NO: 186675 - DNA, 69 bp, Homo sapiens
catatttttccttttctgttcatttcttattttcttggctttttgtgcaattggggacaggaggtagta

SEQ ID NO: 186676 - DNA, 71 bp, Homo sapiens
tccttttctgttcatttcttattttcttggctttttgtgcaattggggacaggaggtagtagcaggattaa

SEQ ID NO: 186677 - DNA, 71 bp, Homo sapiens
catttcttattttcttggctttttgtgcaattggggacaggaggtagtagcaggattaagtgacaacttta

SEQ ID NO: 186678 - DNA, 75 bp, Homo sapiens
tttcttggctttttgtgcaattggggacaggaggtagtagcaggattaagtgacaactttaagatatcacagcat

SEQ ID NO: 186679 - DNA, 73 bp, Homo sapiens
ctttttgtgcaattggggacaggaggtagtagcaggattaagtgacaactttaagatatcacagcatttcctt

SEQ ID NO: 186680 - DNA, 72 bp, Homo sapiens
aattggggacaggaggtagtagcaggattaagtgacaactttaagatatcacagcatttcctttcaaaacta

SEQ ID NO: 186681 - DNA, 70 bp, Homo sapiens
ggaggtagtagcaggattaagtgacaactttaagatatcacagcatttcctttcaaaactaaattacggt

SEQ ID NO: 186682 - DNA, 71 bp, Homo sapiens
gtagcaggattaagtgacaactttaagatatcacagcatttcctttcaaaactaaattacggttactatat

SEQ ID NO: 186683 - DNA, 69 bp, Homo sapiens
gtgacaactttaagatatcacagcatttcctttcaaaactaaattacggttactatattaagagtttcg

SEQ ID NO: 186684 - DNA, 72 bp, Homo sapiens
aagatatcacagcatttcctttcaaaactaaattacggttactatattaagagtttcgtacatacagtcagc

SEQ ID NO: 186685 - DNA, 71 bp, Homo sapiens
cagcatttcctttcaaaactaaattacggttactatattaagagtttcgtacatacagtcagctaaactgc

SEQ ID NO: 186686 - DNA, 69 bp, Homo sapiens
ttcaaaactaaattacggttactatattaagagtttcgtacatacagtcagctaaactgctacttcggg

SEQ ID NO: 186687 - DNA, 68 bp, Homo sapiens
aactaaattacggttactatattaagagtttcgtacatacagtcagctaaactgctacttcggggagg

SEQ ID NO: 186688 - DNA, 72 bp, Homo sapiens
cggttactatattaagagtttcgtacatacagtcagctaaactgctacttcggggaggtctgcagaaagaaa

SEQ ID NO: 186689 - DNA, 73 bp, Homo sapiens
attaagagtttcgtacatacagtcagctaaactgctacttcggggaggtctgcagaaagaaatggggcacacc

SEQ ID NO: 186690 - DNA, 73 bp, Homo sapiens
agtcagctaaactgctacttcggggaggtctgcagaaagaaatggggcacaccttccaatactgacaactaaa

SEQ ID NO: 186691 - DNA, 70 bp, Homo sapiens
aggtctgcagaaagaaatggggcacaccttccaatactgacaactaaacactcaaaacaacttttcttag

SEQ ID NO: 186692 - DNA, 69 bp, Homo sapiens
aaagaaatggggcacaccttccaatactgacaactaaacactcaaaacaacttttcttagtacacattc

SEQ ID NO: 186693 - DNA, 70 bp, Homo sapiens
accttccaatactgacaactaaacactcaaaacaacttttcttagtacacattctaggaacatctccctc

SEQ ID NO: 186694 - DNA, 70 bp, Homo sapiens
aaacactcaaaacaacttttcttagtacacattctaggaacatctccctctctcctctgtttttctttca

SEQ ID NO: 186695 - DNA, 71 bp, Homo sapiens
cttttcttagtacacattctaggaacatctccctctctcctctgtttttctttcagtctttgcttagttta

SEQ ID NO: 186696 - DNA, 75 bp, Homo sapiens
ttagtacacattctaggaacatctccctctctcctctgtttttctttcagtctttgcttagtttatgcagtaatg

SEQ ID NO: 186697 - DNA, 74 bp, Homo sapiens
attctaggaacatctccctctctcctctgtttttctttcagtctttgcttagtttatgcagtaatggcgtttga

SEQ ID NO: 186698 - DNA, 77 bp, Homo sapiens
tccctctctcctctgtttttctttcagtctttgcttagtttatgcagtaatggcgtttgagctttcagcagagtgga

SEQ ID NO: 186699 - DNA, 73 bp, Homo sapiens
cctctgtttttctttcagtctttgcttagtttatgcagtaatggcgtttgagctttcagcagagtggaaagtt

SEQ ID NO: 186700 - DNA, 74 bp, Homo sapiens
tttcagtctttgcttagtttatgcagtaatggcgtttgagctttcagcagagtggaaagtttgctcctgttttt

SEQ ID NO: 186701 - DNA, 73 bp, Homo sapiens
tttatgcagtaatggcgtttgagctttcagcagagtggaaagtttgctcctgtttttttccttgtcacttaaa

SEQ ID NO: 186702 - DNA, 70 bp, Homo sapiens
taatggcgtttgagctttcagcagagtggaaagtttgctcctgtttttttccttgtcacttaaaaggtaa

SEQ ID NO: 186703 - DNA, 64 bp, Homo sapiens
agtggaaagtttgctcctgtttttttccttgtcacttaaaaggtaaacaggtagttgggaagga

SEQ ID NO: 186704 - DNA, 63 bp, Homo sapiens
aaagtttgctcctgtttttttccttgtcacttaaaaggtaaacaggtagttgggaaggaagga

SEQ ID NO: 186705 - DNA, 65 bp, Homo sapiens
ttttttccttgtcacttaaaaggtaaacaggtagttgggaaggaaggaacaaatgaagacacgaa

SEQ ID NO: 186706 - DNA, 65 bp, Homo sapiens
gtcacttaaaaggtaaacaggtagttgggaaggaaggaacaaatgaagacacgaaagttgtttta

SEQ ID NO: 186707 - DNA, 69 bp, Homo sapiens
acaggtagttgggaaggaaggaacaaatgaagacacgaaagttgttttatcacacagatttttctggta

SEQ ID NO: 186708 - DNA, 71 bp, Homo sapiens
acgaaagttgttttatcacacagatttttctggtacctattttcaaaagtctgtaactgccctgcaatcaa

SEQ ID NO: 186709 - DNA, 72 bp, Homo sapiens
ttttctggtacctattttcaaaagtctgtaactgccctgcaatcaacgtgtgtgactttaagaagacattaa

SEQ ID NO: 186710 - DNA, 73 bp, Homo sapiens
tttcaaaagtctgtaactgccctgcaatcaacgtgtgtgactttaagaagacattaaatcataaaaccactaa

SEQ ID NO: 186711 - DNA, 72 bp, Homo sapiens
aaagtctgtaactgccctgcaatcaacgtgtgtgactttaagaagacattaaatcataaaaccactaaatag

SEQ ID NO: 186712 - DNA, 75 bp, Homo sapiens
tgccctgcaatcaacgtgtgtgactttaagaagacattaaatcataaaaccactaaataggttgagtgacataaa

SEQ ID NO: 186713 - DNA, 71 bp, Homo sapiens
aatcaacgtgtgtgactttaagaagacattaaatcataaaaccactaaataggttgagtgacataaataac

SEQ ID NO: 186714 - DNA, 72 bp, Homo sapiens
ctttaagaagacattaaatcataaaaccactaaataggttgagtgacataaataactttgtactgtcatgac

SEQ ID NO: 186715 - DNA, 74 bp, Homo sapiens
gacattaaatcataaaaccactaaataggttgagtgacataaataactttgtactgtcatgaccatgctttccc

SEQ ID NO: 186716 - DNA, 73 bp, Homo sapiens
aaatcataaaaccactaaataggttgagtgacataaataactttgtactgtcatgaccatgctttccctgaaa

SEQ ID NO: 186717 - DNA, 77 bp, Homo sapiens
ttgtactgtcatgaccatgctttccctgaaataatttatgagatcgacattacatttggaattaaggctcacaattt

SEQ ID NO: 186718 - DNA, 76 bp, Homo sapiens
catgaccatgctttccctgaaataatttatgagatcgacattacatttggaattaaggctcacaattttgactttc

SEQ ID NO: 186719 - DNA, 73 bp, Homo sapiens
gctttccctgaaataatttatgagatcgacattacatttggaattaaggctcacaattttgactttctactta

SEQ ID NO: 186720 - DNA, 73 bp, Homo sapiens
aataatttatgagatcgacattacatttggaattaaggctcacaattttgactttctacttaacatttatatg

SEQ ID NO: 186721 - DNA, 72 bp, Homo sapiens
catttggaattaaggctcacaattttgactttctacttaacatttatatgtatgttccactttcataactta

SEQ ID NO: 186722 - DNA, 72 bp, Homo sapiens
taaggctcacaattttgactttctacttaacatttatatgtatgttccactttcataacttaattttccaga

SEQ ID NO: 186723 - DNA, 69 bp, Homo sapiens
aacatttatatgtatgttccactttcataacttaattttccagagtttgtggggggaggtggccgacaa

SEQ ID NO: 186724 - DNA, 68 bp, Homo sapiens
tatgttccactttcataacttaattttccagagtttgtggggggaggtggccgacaaggttatagaaa

SEQ ID NO: 186725 - DNA, 66 bp, Homo sapiens
actttcataacttaattttccagagtttgtggggggaggtggccgacaaggttatagaaagaagga

SEQ ID NO: 186726 - DNA, 66 bp, Homo sapiens
aacttaattttccagagtttgtggggggaggtggccgacaaggttatagaaagaaggagaaaatgc

SEQ ID NO: 186727 - DNA, 68 bp, Homo sapiens
agtttgtggggggaggtggccgacaaggttatagaaagaaggagaaaatgccaaatatgacagaaaat

SEQ ID NO: 186728 - DNA, 71 bp, Homo sapiens
gggaggtggccgacaaggttatagaaagaaggagaaaatgccaaatatgacagaaaattagcttctaagaa

SEQ ID NO: 186729 - DNA, 71 bp, Homo sapiens
gtggccgacaaggttatagaaagaaggagaaaatgccaaatatgacagaaaattagcttctaagaaataac

SEQ ID NO: 186730 - DNA, 75 bp, Homo sapiens
tatagaaagaaggagaaaatgccaaatatgacagaaaattagcttctaagaaataaccacacaaatgaagcagcc

SEQ ID NO: 186731 - DNA, 76 bp, Homo sapiens
ggagaaaatgccaaatatgacagaaaattagcttctaagaaataaccacacaaatgaagcagcctgcttcgtctta

SEQ ID NO: 186732 - DNA, 76 bp, Homo sapiens
tgccaaatatgacagaaaattagcttctaagaaataaccacacaaatgaagcagcctgcttcgtcttacatttatt

SEQ ID NO: 186733 - DNA, 74 bp, Homo sapiens
atgacagaaaattagcttctaagaaataaccacacaaatgaagcagcctgcttcgtcttacatttatttaaata

SEQ ID NO: 186734 - DNA, 72 bp, Homo sapiens
aaataaccacacaaatgaagcagcctgcttcgtcttacatttatttaaataaaccaccttttatcagtgcca

SEQ ID NO: 186735 - DNA, 72 bp, Homo sapiens
cacacaaatgaagcagcctgcttcgtcttacatttatttaaataaaccaccttttatcagtgccagtaaaaa

SEQ ID NO: 186736 - DNA, 72 bp, Homo sapiens
agcctgcttcgtcttacatttatttaaataaaccaccttttatcagtgccagtaaaaaagcagcagcattct

SEQ ID NO: 186737 - DNA, 70 bp, Homo sapiens
cgtcttacatttatttaaataaaccaccttttatcagtgccagtaaaaaagcagcagcattcttttatcg

SEQ ID NO: 186738 - DNA, 72 bp, Homo sapiens
tatttaaataaaccaccttttatcagtgccagtaaaaaagcagcagcattcttttatcgtttgaagtgacaa

SEQ ID NO: 186739 - DNA, 78 bp, Homo sapiens
gtgccagtaaaaaagcagcagcattcttttatcgtttgaagtgacaattacagaattatatatatcagaaaataatca

SEQ ID NO: 186740 - DNA, 75 bp, Homo sapiens
agcagcagcattcttttatcgtttgaagtgacaattacagaattatatatatcagaaaataatcaaaaaggtact

SEQ ID NO: 186741 - DNA, 73 bp, Homo sapiens
gcattcttttatcgtttgaagtgacaattacagaattatatatatcagaaaataatcaaaaaggtacttattc

SEQ ID NO: 186742 - DNA, 71 bp, Homo sapiens
atcgtttgaagtgacaattacagaattatatatatcagaaaataatcaaaaaggtacttattccaaaacaa

SEQ ID NO: 186743 - DNA, 71 bp, Homo sapiens
gtgacaattacagaattatatatatcagaaaataatcaaaaaggtacttattccaaaacaaatatccaaaa

SEQ ID NO: 186744 - DNA, 72 bp, Homo sapiens
ttatatatatcagaaaataatcaaaaaggtacttattccaaaacaaatatccaaaaatccaatgaagctgcc

SEQ ID NO: 186745 - DNA, 72 bp, Homo sapiens
cagaaaataatcaaaaaggtacttattccaaaacaaatatccaaaaatccaatgaagctgcccagtgacagc

SEQ ID NO: 186746 - DNA, 71 bp, Homo sapiens
aatcaaaaaggtacttattccaaaacaaatatccaaaaatccaatgaagctgcccagtgacagccactaaa

SEQ ID NO: 186747 - DNA, 71 bp, Homo sapiens
aaggtacttattccaaaacaaatatccaaaaatccaatgaagctgcccagtgacagccactaaaataatct

SEQ ID NO: 186748 - DNA, 74 bp, Homo sapiens
ttccaaaacaaatatccaaaaatccaatgaagctgcccagtgacagccactaaaataatcttctctgtattatt

SEQ ID NO: 186749 - DNA, 76 bp, Homo sapiens
tgcccagtgacagccactaaaataatcttctctgtattattttctttgagtcatttttaaaataagcagccagcta

SEQ ID NO: 186750 - DNA, 80 bp, Homo sapiens
taatcttctctgtattattttctttgagtcatttttaaaataagcagccagctatccatctctaggcactgtctagatga

SEQ ID NO: 186751 - DNA, 78 bp, Homo sapiens
ttctctgtattattttctttgagtcatttttaaaataagcagccagctatccatctctaggcactgtctagatgagtt

SEQ ID NO: 186752 - DNA, 78 bp, Homo sapiens
tattttctttgagtcatttttaaaataagcagccagctatccatctctaggcactgtctagatgagtttgccacaaaa

SEQ ID NO: 186753 - DNA, 76 bp, Homo sapiens
atttttaaaataagcagccagctatccatctctaggcactgtctagatgagtttgccacaaaagccacttatattt

SEQ ID NO: 186754 - DNA, 79 bp, Homo sapiens
taaaataagcagccagctatccatctctaggcactgtctagatgagtttgccacaaaagccacttatatttttagaagc

SEQ ID NO: 186755 - DNA, 78 bp, Homo sapiens
agctatccatctctaggcactgtctagatgagtttgccacaaaagccacttatatttttagaagccaaagtcttgaca

SEQ ID NO: 186756 - DNA, 74 bp, Homo sapiens
tgtctagatgagtttgccacaaaagccacttatatttttagaagccaaagtcttgacaaatcagttcctaagaa

SEQ ID NO: 186757 - DNA, 73 bp, Homo sapiens
gatgagtttgccacaaaagccacttatatttttagaagccaaagtcttgacaaatcagttcctaagaacataa

SEQ ID NO: 186758 - DNA, 70 bp, Homo sapiens
ccacaaaagccacttatatttttagaagccaaagtcttgacaaatcagttcctaagaacataatttgtta

SEQ ID NO: 186759 - DNA, 71 bp, Homo sapiens
atatttttagaagccaaagtcttgacaaatcagttcctaagaacataatttgttacacatcgaagaaagcc

SEQ ID NO: 186760 - DNA, 74 bp, Homo sapiens
tagaagccaaagtcttgacaaatcagttcctaagaacataatttgttacacatcgaagaaagcctgaaaacaca

SEQ ID NO: 186761 - DNA, 71 bp, Homo sapiens
aaagtcttgacaaatcagttcctaagaacataatttgttacacatcgaagaaagcctgaaaacacagacct

SEQ ID NO: 186762 - DNA, 70 bp, Homo sapiens
aatcagttcctaagaacataatttgttacacatcgaagaaagcctgaaaacacagaccttggttaaagag

SEQ ID NO: 186763 - DNA, 70 bp, Homo sapiens
gaacataatttgttacacatcgaagaaagcctgaaaacacagaccttggttaaagaggcttccgtatctt

SEQ ID NO: 186764 - DNA, 67 bp, Homo sapiens
acatcgaagaaagcctgaaaacacagaccttggttaaagaggcttccgtatctttttgtaacctttc

SEQ ID NO: 186765 - DNA, 67 bp, Homo sapiens
ctgaaaacacagaccttggttaaagaggcttccgtatctttttgtaacctttccaaatgtaagtatg

SEQ ID NO: 186766 - DNA, 67 bp, Homo sapiens
gttaaagaggcttccgtatctttttgtaacctttccaaatgtaagtatgtgggaagagtacccataa

SEQ ID NO: 186767 - DNA, 66 bp, Homo sapiens
ggcttccgtatctttttgtaacctttccaaatgtaagtatgtgggaagagtacccataaatttaag

SEQ ID NO: 186768 - DNA, 67 bp, Homo sapiens
ccataaatttaagttgaaactgaaacacttagaatatttccaatttaaaatacattaaaatgtggtc

SEQ ID NO: 186769 - DNA, 68 bp, Homo sapiens
taagttgaaactgaaacacttagaatatttccaatttaaaatacattaaaatgtggtctttgaaagga

SEQ ID NO: 186770 - DNA, 69 bp, Homo sapiens
tgaaacacttagaatatttccaatttaaaatacattaaaatgtggtctttgaaaggaaatgaaaatggc

SEQ ID NO: 186771 - DNA, 68 bp, Homo sapiens
gaatatttccaatttaaaatacattaaaatgtggtctttgaaaggaaatgaaaatggctttttaagca

SEQ ID NO: 186772 - DNA, 69 bp, Homo sapiens
ttccaatttaaaatacattaaaatgtggtctttgaaaggaaatgaaaatggctttttaagcatatgaaa

SEQ ID NO: 186773 - DNA, 74 bp, Homo sapiens
acattaaaatgtggtctttgaaaggaaatgaaaatggctttttaagcatatgaaaagttgctcaccatcactca

SEQ ID NO: 186774 - DNA, 76 bp, Homo sapiens
aaatgtggtctttgaaaggaaatgaaaatggctttttaagcatatgaaaagttgctcaccatcactcatgagagaa

SEQ ID NO: 186775 - DNA, 77 bp, Homo sapiens
gaaaggaaatgaaaatggctttttaagcatatgaaaagttgctcaccatcactcatgagagaaatgtgaattacaaa

SEQ ID NO: 186776 - DNA, 81 bp, Homo sapiens
aatgaaaatggctttttaagcatatgaaaagttgctcaccatcactcatgagagaaatgtgaattacaaatgagatgccat

SEQ ID NO: 186777 - DNA, 84 bp, Homo sapiens
ttttaagcatatgaaaagttgctcaccatcactcatgagagaaatgtgaattacaaatgagatgccatttttcatccatcagat

SEQ ID NO: 186778 - DNA, 83 bp, Homo sapiens
atatgaaaagttgctcaccatcactcatgagagaaatgtgaattacaaatgagatgccatttttcatccatcagattggggga

SEQ ID NO: 186779 - DNA, 77 bp, Homo sapiens
ctcatgagagaaatgtgaattacaaatgagatgccatttttcatccatcagattgggggagagggtagtttaataaa

SEQ ID NO: 186780 - DNA, 75 bp, Homo sapiens
ttacaaatgagatgccatttttcatccatcagattgggggagagggtagtttaataaatcatcctgtggagaaaa

SEQ ID NO: 186781 - DNA, 73 bp, Homo sapiens
ttcatccatcagattgggggagagggtagtttaataaatcatcctgtggagaaaaaggcactcacgtactatt

SEQ ID NO: 186782 - DNA, 75 bp, Homo sapiens
gagggtagtttaataaatcatcctgtggagaaaaaggcactcacgtactatttggtgcaggcatagagtagtata

SEQ ID NO: 186783 - DNA, 74 bp, Homo sapiens
tttaataaatcatcctgtggagaaaaaggcactcacgtactatttggtgcaggcatagagtagtataacctctt

SEQ ID NO: 186784 - DNA, 76 bp, Homo sapiens
aaaaaggcactcacgtactatttggtgcaggcatagagtagtataacctctttggcaggaaatgtgtagatgtcta

SEQ ID NO: 186785 - DNA, 76 bp, Homo sapiens
tcacgtactatttggtgcaggcatagagtagtataacctctttggcaggaaatgtgtagatgtctaccaaaattta

SEQ ID NO: 186786 - DNA, 74 bp, Homo sapiens
tactatttggtgcaggcatagagtagtataacctctttggcaggaaatgtgtagatgtctaccaaaatttaaat

SEQ ID NO: 186787 - DNA, 72 bp, Homo sapiens
aggcatagagtagtataacctctttggcaggaaatgtgtagatgtctaccaaaatttaaatttcactttgcc

SEQ ID NO: 186788 - DNA, 70 bp, Homo sapiens
agtagtataacctctttggcaggaaatgtgtagatgtctaccaaaatttaaatttcactttgccttggac

SEQ ID NO: 186789 - DNA, 72 bp, Homo sapiens
tttggcaggaaatgtgtagatgtctaccaaaatttaaatttcactttgccttggacccacaattctactcta

SEQ ID NO: 186790 - DNA, 70 bp, Homo sapiens
aggaaatgtgtagatgtctaccaaaatttaaatttcactttgccttggacccacaattctactctaagga

SEQ ID NO: 186791 - DNA, 69 bp, Homo sapiens
gtagatgtctaccaaaatttaaatttcactttgccttggacccacaattctactctaaggaatttatcc

SEQ ID NO: 186792 - DNA, 70 bp, Homo sapiens
aatttaaatttcactttgccttggacccacaattctactctaaggaatttatcctacggacatatccatg

SEQ ID NO: 186793 - DNA, 73 bp, Homo sapiens
aaatttcactttgccttggacccacaattctactctaaggaatttatcctacggacatatccatgtgcacaaa

SEQ ID NO: 186794 - DNA, 76 bp, Homo sapiens
ttggacccacaattctactctaaggaatttatcctacggacatatccatgtgcacaaagaactatgtatgagttta

SEQ ID NO: 186795 - DNA, 76 bp, Homo sapiens
caattctactctaaggaatttatcctacggacatatccatgtgcacaaagaactatgtatgagtttatttactaca

SEQ ID NO: 186796 - DNA, 75 bp, Homo sapiens
taaggaatttatcctacggacatatccatgtgcacaaagaactatgtatgagtttatttactacagtattactgg

SEQ ID NO: 186797 - DNA, 76 bp, Homo sapiens
atttatcctacggacatatccatgtgcacaaagaactatgtatgagtttatttactacagtattactggtgtccta

SEQ ID NO: 186798 - DNA, 75 bp, Homo sapiens
acggacatatccatgtgcacaaagaactatgtatgagtttatttactacagtattactggtgtcctagaggaaaa

SEQ ID NO: 186799 - DNA, 75 bp, Homo sapiens
tgcacaaagaactatgtatgagtttatttactacagtattactggtgtcctagaggaaaacctaactgtatgtca

SEQ ID NO: 186800 - DNA, 75 bp, Homo sapiens
agtttatttactacagtattactggtgtcctagaggaaaacctaactgtatgtcatgatgcactgtgtgtatatt

SEQ ID NO: 186801 - DNA, 76 bp, Homo sapiens
atttactacagtattactggtgtcctagaggaaaacctaactgtatgtcatgatgcactgtgtgtatatttaccta

SEQ ID NO: 186802 - DNA, 75 bp, Homo sapiens
gtattactggtgtcctagaggaaaacctaactgtatgtcatgatgcactgtgtgtatatttacctattcaaaaaa

SEQ ID NO: 186803 - DNA, 72 bp, Homo sapiens
gtcctagaggaaaacctaactgtatgtcatgatgcactgtgtgtatatttacctattcaaaaaaattaaaat

SEQ ID NO: 186804 - DNA, 71 bp, Homo sapiens
aaaaaattaaaatttgaagagaagagattgtgatccatacagttgagaaattagaagtgttctcaactccc

SEQ ID NO: 186805 - DNA, 73 bp, Homo sapiens
aatttgaagagaagagattgtgatccatacagttgagaaattagaagtgttctcaactcccctacaaaggaaa

SEQ ID NO: 186806 - DNA, 73 bp, Homo sapiens
aagagaagagattgtgatccatacagttgagaaattagaagtgttctcaactcccctacaaaggaaacactaa

SEQ ID NO: 186807 - DNA, 71 bp, Homo sapiens
ttgtgatccatacagttgagaaattagaagtgttctcaactcccctacaaaggaaacactaaaccacccta

SEQ ID NO: 186808 - DNA, 69 bp, Homo sapiens
agttgagaaattagaagtgttctcaactcccctacaaaggaaacactaaaccaccctacacaagattca

SEQ ID NO: 186809 - DNA, 68 bp, Homo sapiens
aaattagaagtgttctcaactcccctacaaaggaaacactaaaccaccctacacaagattcattccaa

SEQ ID NO: 186810 - DNA, 69 bp, Homo sapiens
ttctcaactcccctacaaaggaaacactaaaccaccctacacaagattcattccaaatccttgtaataa

SEQ ID NO: 186811 - DNA, 71 bp, Homo sapiens
cctacaaaggaaacactaaaccaccctacacaagattcattccaaatccttgtaataaaatgctgtgttca

SEQ ID NO: 186812 - DNA, 75 bp, Homo sapiens
aaacactaaaccaccctacacaagattcattccaaatccttgtaataaaatgctgtgttcagatggcttgacaca

SEQ ID NO: 186813 - DNA, 79 bp, Homo sapiens
ctaaaccaccctacacaagattcattccaaatccttgtaataaaatgctgtgttcagatggcttgacacagctgcatta

SEQ ID NO: 186814 - DNA, 82 bp, Homo sapiens
tacacaagattcattccaaatccttgtaataaaatgctgtgttcagatggcttgacacagctgcattactgaaagctcctta

SEQ ID NO: 186815 - DNA, 80 bp, Homo sapiens
attccaaatccttgtaataaaatgctgtgttcagatggcttgacacagctgcattactgaaagctccttatcctaagatc

SEQ ID NO: 186816 - DNA, 79 bp, Homo sapiens
atccttgtaataaaatgctgtgttcagatggcttgacacagctgcattactgaaagctccttatcctaagatccttttg

SEQ ID NO: 186817 - DNA, 78 bp, Homo sapiens
aatgctgtgttcagatggcttgacacagctgcattactgaaagctccttatcctaagatccttttggccctttaataa

SEQ ID NO: 186818 - DNA, 77 bp, Homo sapiens
tgttcagatggcttgacacagctgcattactgaaagctccttatcctaagatccttttggccctttaataagcaaaa

SEQ ID NO: 186819 - DNA, 72 bp, Homo sapiens
cttgacacagctgcattactgaaagctccttatcctaagatccttttggccctttaataagcaaaacccctc

SEQ ID NO: 186820 - DNA, 68 bp, Homo sapiens
attactgaaagctccttatcctaagatccttttggccctttaataagcaaaacccctcgctggaggtc

SEQ ID NO: 186821 - DNA, 68 bp, Homo sapiens
aaagctccttatcctaagatccttttggccctttaataagcaaaacccctcgctggaggtccactgtg

SEQ ID NO: 186822 - DNA, 69 bp, Homo sapiens
ttatcctaagatccttttggccctttaataagcaaaacccctcgctggaggtccactgtggacctgaat

SEQ ID NO: 186823 - DNA, 69 bp, Homo sapiens
taagatccttttggccctttaataagcaaaacccctcgctggaggtccactgtggacctgaatttcact

SEQ ID NO: 186824 - DNA, 70 bp, Homo sapiens
ttttggccctttaataagcaaaacccctcgctggaggtccactgtggacctgaatttcacttgacaataa

SEQ ID NO: 186825 - DNA, 72 bp, Homo sapiens
tttggccctttaataagcaaaacccctcgctggaggtccactgtggacctgaatttcacttgacaataagca

SEQ ID NO: 186826 - DNA, 75 bp, Homo sapiens
ttaataagcaaaacccctcgctggaggtccactgtggacctgaatttcacttgacaataagcagcatttcagaaa

SEQ ID NO: 186827 - DNA, 74 bp, Homo sapiens
aaaacccctcgctggaggtccactgtggacctgaatttcacttgacaataagcagcatttcagaaagattccaa

SEQ ID NO: 186828 - DNA, 76 bp, Homo sapiens
ctcgctggaggtccactgtggacctgaatttcacttgacaataagcagcatttcagaaagattccaatttattcct

SEQ ID NO: 186829 - DNA, 77 bp, Homo sapiens
tggaggtccactgtggacctgaatttcacttgacaataagcagcatttcagaaagattccaatttattccttgtgaa

SEQ ID NO: 186830 - DNA, 75 bp, Homo sapiens
aggtccactgtggacctgaatttcacttgacaataagcagcatttcagaaagattccaatttattccttgtgaaa

SEQ ID NO: 186831 - DNA, 80 bp, Homo sapiens
gacaataagcagcatttcagaaagattccaatttattccttgtgaaaacagatcatatataaatgtaactgtcactctca

SEQ ID NO: 186832 - DNA, 78 bp, Homo sapiens
gcatttcagaaagattccaatttattccttgtgaaaacagatcatatataaatgtaactgtcactctcagaaacagga

SEQ ID NO: 186833 - DNA, 79 bp, Homo sapiens
aagattccaatttattccttgtgaaaacagatcatatataaatgtaactgtcactctcagaaacaggactgcattatgc

SEQ ID NO: 186834 - DNA, 83 bp, Homo sapiens
taaatgtaactgtcactctcagaaacaggactgcattatgctgcagatttaatacagactggaagcatgttccccatgtcttc

SEQ ID NO: 186835 - DNA, 84 bp, Homo sapiens
actctcagaaacaggactgcattatgctgcagatttaatacagactggaagcatgttccccatgtcttctccagcaaatcttgc

SEQ ID NO: 186836 - DNA, 81 bp, Homo sapiens
attatgctgcagatttaatacagactggaagcatgttccccatgtcttctccagcaaatcttgccaaatgggcgtctgaaa

SEQ ID NO: 186837 - DNA, 78 bp, Homo sapiens
agatttaatacagactggaagcatgttccccatgtcttctccagcaaatcttgccaaatgggcgtctgaaatgtccta

SEQ ID NO: 186838 - DNA, 78 bp, Homo sapiens
aatacagactggaagcatgttccccatgtcttctccagcaaatcttgccaaatgggcgtctgaaatgtcctactgaaa

SEQ ID NO: 186839 - DNA, 77 bp, Homo sapiens
aagcatgttccccatgtcttctccagcaaatcttgccaaatgggcgtctgaaatgtcctactgaaacaggtggtgtc

SEQ ID NO: 186840 - DNA, 78 bp, Homo sapiens
atgtcttctccagcaaatcttgccaaatgggcgtctgaaatgtcctactgaaacaggtggtgtctgaacagaattgga

SEQ ID NO: 186841 - DNA, 77 bp, Homo sapiens
ttctccagcaaatcttgccaaatgggcgtctgaaatgtcctactgaaacaggtggtgtctgaacagaattggatttc

SEQ ID NO: 186842 - DNA, 77 bp, Homo sapiens
aatcttgccaaatgggcgtctgaaatgtcctactgaaacaggtggtgtctgaacagaattggatttctgcctataga

SEQ ID NO: 186843 - DNA, 73 bp, Homo sapiens
gcgtctgaaatgtcctactgaaacaggtggtgtctgaacagaattggatttctgcctatagaaaccctagttt

SEQ ID NO: 186844 - DNA, 71 bp, Homo sapiens
aatgtcctactgaaacaggtggtgtctgaacagaattggatttctgcctatagaaaccctagttttaacaa

SEQ ID NO: 186845 - DNA, 71 bp, Homo sapiens
aaacaggtggtgtctgaacagaattggatttctgcctatagaaaccctagttttaacaactgctgtggtta

SEQ ID NO: 186846 - DNA, 70 bp, Homo sapiens
gtgtctgaacagaattggatttctgcctatagaaaccctagttttaacaactgctgtggttagttttaat

SEQ ID NO: 186847 - DNA, 69 bp, Homo sapiens
cagaattggatttctgcctatagaaaccctagttttaacaactgctgtggttagttttaattttcagtc

SEQ ID NO: 186848 - DNA, 68 bp, Homo sapiens
ggatttctgcctatagaaaccctagttttaacaactgctgtggttagttttaattttcagtcctcaaa

SEQ ID NO: 186849 - DNA, 68 bp, Homo sapiens
gaaaccctagttttaacaactgctgtggttagttttaattttcagtcctcaaaattaactgcttgcca

SEQ ID NO: 186850 - DNA, 71 bp, Homo sapiens
cctagttttaacaactgctgtggttagttttaattttcagtcctcaaaattaactgcttgccagtgattca

SEQ ID NO: 186851 - DNA, 73 bp, Homo sapiens
agttttaattttcagtcctcaaaattaactgcttgccagtgattcagaaataggactgaacaacatgtttaga

SEQ ID NO: 186852 - DNA, 73 bp, Homo sapiens
aaaattaactgcttgccagtgattcagaaataggactgaacaacatgtttagactttgccctgtttaattgag

SEQ ID NO: 186853 - DNA, 71 bp, Homo sapiens
ccagtgattcagaaataggactgaacaacatgtttagactttgccctgtttaattgaggaaaggaaggaag

SEQ ID NO: 186854 - DNA, 67 bp, Homo sapiens
aggaagaaagaaaggcagcaggaacaaacaaacacccaacaccctaccaccatcccataaaaaacaa

SEQ ID NO: 186855 - DNA, 67 bp, Homo sapiens
aaaggcagcaggaacaaacaaacacccaacaccctaccaccatcccataaaaaacaacagaaccaaa

SEQ ID NO: 186856 - DNA, 67 bp, Homo sapiens
ggaacaaacaaacacccaacaccctaccaccatcccataaaaaacaacagaaccaaagcaggccatt

SEQ ID NO: 186857 - DNA, 66 bp, Homo sapiens
aacaaacacccaacaccctaccaccatcccataaaaaacaacagaaccaaagcaggccatttggtt

SEQ ID NO: 186858 - DNA, 67 bp, Homo sapiens
aacaccctaccaccatcccataaaaaacaacagaaccaaagcaggccatttggtttccaggccaaaa

SEQ ID NO: 186859 - DNA, 66 bp, Homo sapiens
accaccatcccataaaaaacaacagaaccaaagcaggccatttggtttccaggccaaaaaaagaaa

SEQ ID NO: 186860 - DNA, 69 bp, Homo sapiens
aagaaaaaagaaactgcaaaataaacttgattttccaaagatgcttgcctattttgtgctttcttcgta

SEQ ID NO: 186861 - DNA, 73 bp, Homo sapiens
aaactgcaaaataaacttgattttccaaagatgcttgcctattttgtgctttcttcgtagaagcacaaggatc

SEQ ID NO: 186862 - DNA, 72 bp, Homo sapiens
aaaataaacttgattttccaaagatgcttgcctattttgtgctttcttcgtagaagcacaaggatccaacta

SEQ ID NO: 186863 - DNA, 76 bp, Homo sapiens
attttccaaagatgcttgcctattttgtgctttcttcgtagaagcacaaggatccaactaccttgctggtcatata

SEQ ID NO: 186864 - DNA, 79 bp, Homo sapiens
ttccaaagatgcttgcctattttgtgctttcttcgtagaagcacaaggatccaactaccttgctggtcatatatgtgaa

SEQ ID NO: 186865 - DNA, 78 bp, Homo sapiens
aaagatgcttgcctattttgtgctttcttcgtagaagcacaaggatccaactaccttgctggtcatatatgtgaactc

SEQ ID NO: 186866 - DNA, 77 bp, Homo sapiens
ttgcctattttgtgctttcttcgtagaagcacaaggatccaactaccttgctggtcatatatgtgaactcttctaag

SEQ ID NO: 186867 - DNA, 75 bp, Homo sapiens
attttgtgctttcttcgtagaagcacaaggatccaactaccttgctggtcatatatgtgaactcttctaaggaaa

SEQ ID NO: 186868 - DNA, 76 bp, Homo sapiens
tttcttcgtagaagcacaaggatccaactaccttgctggtcatatatgtgaactcttctaaggaaacacacagcct

SEQ ID NO: 186869 - DNA, 76 bp, Homo sapiens
aagcacaaggatccaactaccttgctggtcatatatgtgaactcttctaaggaaacacacagccttgagaagcctt

SEQ ID NO: 186870 - DNA, 75 bp, Homo sapiens
acaaggatccaactaccttgctggtcatatatgtgaactcttctaaggaaacacacagccttgagaagcctttaa

SEQ ID NO: 186871 - DNA, 75 bp, Homo sapiens
aaggatccaactaccttgctggtcatatatgtgaactcttctaaggaaacacacagccttgagaagcctttaatc

SEQ ID NO: 186872 - DNA, 74 bp, Homo sapiens
actaccttgctggtcatatatgtgaactcttctaaggaaacacacagccttgagaagcctttaatccgctaaaa

SEQ ID NO: 186873 - DNA, 74 bp, Homo sapiens
ctggtcatatatgtgaactcttctaaggaaacacacagccttgagaagcctttaatccgctaaaaattcagaat

SEQ ID NO: 186874 - DNA, 72 bp, Homo sapiens
atatgtgaactcttctaaggaaacacacagccttgagaagcctttaatccgctaaaaattcagaattaagaa

SEQ ID NO: 186875 - DNA, 70 bp, Homo sapiens
actcttctaaggaaacacacagccttgagaagcctttaatccgctaaaaattcagaattaagaacaatgt

SEQ ID NO: 186876 - DNA, 71 bp, Homo sapiens
ggaaacacacagccttgagaagcctttaatccgctaaaaattcagaattaagaacaatgttaagaatccat

SEQ ID NO: 186877 - DNA, 67 bp, Homo sapiens
agcctttaatccgctaaaaattcagaattaagaacaatgttaagaatccatttttctaatgaaaagt

SEQ ID NO: 186878 - DNA, 69 bp, Homo sapiens
ccgctaaaaattcagaattaagaacaatgttaagaatccatttttctaatgaaaagttacatcttacaa

SEQ ID NO: 186879 - DNA, 71 bp, Homo sapiens
tctaatgaaaagttacatcttacaaaataatattccgagccctttacacaagcaaaatacaaacaagcact

SEQ ID NO: 186880 - DNA, 72 bp, Homo sapiens
acaaaataatattccgagccctttacacaagcaaaatacaaacaagcacttcatacaagcaaaatacaaaca

SEQ ID NO: 186881 - DNA, 75 bp, Homo sapiens
ataatattccgagccctttacacaagcaaaatacaaacaagcacttcatacaagcaaaatacaaacagagtgcca

SEQ ID NO: 186882 - DNA, 74 bp, Homo sapiens
ctttacacaagcaaaatacaaacaagcacttcatacaagcaaaatacaaacagagtgccaacaccttgaaggaa

SEQ ID NO: 186883 - DNA, 73 bp, Homo sapiens
aagcaaaatacaaacaagcacttcatacaagcaaaatacaaacagagtgccaacaccttgaaggaagaaacca

SEQ ID NO: 186884 - DNA, 70 bp, Homo sapiens
acttcatacaagcaaaatacaaacagagtgccaacaccttgaaggaagaaaccacgggctaatctttaaa

SEQ ID NO: 186885 - DNA, 70 bp, Homo sapiens
aaaatacaaacagagtgccaacaccttgaaggaagaaaccacgggctaatctttaaacacaacacagatc

SEQ ID NO: 186886 - DNA, 74 bp, Homo sapiens
acaaacagagtgccaacaccttgaaggaagaaaccacgggctaatctttaaacacaacacagatctatcaatgc

SEQ ID NO: 186887 - DNA, 73 bp, Homo sapiens
acaccttgaaggaagaaaccacgggctaatctttaaacacaacacagatctatcaatgcgctggttacactaa

SEQ ID NO: 186888 - DNA, 72 bp, Homo sapiens
aaggaagaaaccacgggctaatctttaaacacaacacagatctatcaatgcgctggttacactaacttggtg

SEQ ID NO: 186889 - DNA, 72 bp, Homo sapiens
acgggctaatctttaaacacaacacagatctatcaatgcgctggttacactaacttggtggtaaacatgttt

SEQ ID NO: 186890 - DNA, 74 bp, Homo sapiens
aatctttaaacacaacacagatctatcaatgcgctggttacactaacttggtggtaaacatgttttcctgtgaa

SEQ ID NO: 186891 - DNA, 76 bp, Homo sapiens
aacacaacacagatctatcaatgcgctggttacactaacttggtggtaaacatgttttcctgtgaataaatattga

SEQ ID NO: 186892 - DNA, 76 bp, Homo sapiens
agatctatcaatgcgctggttacactaacttggtggtaaacatgttttcctgtgaataaatattgagtagcttaca

SEQ ID NO: 186893 - DNA, 73 bp, Homo sapiens
ggtggtaaacatgttttcctgtgaataaatattgagtagcttacactgaatagcaaatctttttcaccatacc

SEQ ID NO: 186894 - DNA, 75 bp, Homo sapiens
gaataaatattgagtagcttacactgaatagcaaatctttttcaccatacctttaagtgtctgatataaagatgg

SEQ ID NO: 186895 - DNA, 78 bp, Homo sapiens
ttgagtagcttacactgaatagcaaatctttttcaccatacctttaagtgtctgatataaagatggttaagcatctgc

SEQ ID NO: 186896 - DNA, 78 bp, Homo sapiens
cttacactgaatagcaaatctttttcaccatacctttaagtgtctgatataaagatggttaagcatctgctgatattc

SEQ ID NO: 186897 - DNA, 75 bp, Homo sapiens
ttttcaccatacctttaagtgtctgatataaagatggttaagcatctgctgatattctaaactagtaactgaggg

SEQ ID NO: 186898 - DNA, 73 bp, Homo sapiens
acctttaagtgtctgatataaagatggttaagcatctgctgatattctaaactagtaactgaggggaaaagaa

SEQ ID NO: 186899 - DNA, 74 bp, Homo sapiens
tctgatataaagatggttaagcatctgctgatattctaaactagtaactgaggggaaaagaactaaggtactgg

SEQ ID NO: 186900 - DNA, 72 bp, Homo sapiens
aagatggttaagcatctgctgatattctaaactagtaactgaggggaaaagaactaaggtactgggtatcta

SEQ ID NO: 186901 - DNA, 75 bp, Homo sapiens
aagcatctgctgatattctaaactagtaactgaggggaaaagaactaaggtactgggtatctactatgtgccata

SEQ ID NO: 186902 - DNA, 70 bp, Homo sapiens
actagtaactgaggggaaaagaactaaggtactgggtatctactatgtgccatacaccatggttacacgt

SEQ ID NO: 186903 - DNA, 74 bp, Homo sapiens
aactaaggtactgggtatctactatgtgccatacaccatggttacacgttccctatgaggaaaacactgccata

SEQ ID NO: 186904 - DNA, 76 bp, Homo sapiens
tactatgtgccatacaccatggttacacgttccctatgaggaaaacactgccatatccgtttcacagctaataaac

SEQ ID NO: 186905 - DNA, 76 bp, Homo sapiens
atacaccatggttacacgttccctatgaggaaaacactgccatatccgtttcacagctaataaactgagatgcaaa

SEQ ID NO: 186906 - DNA, 77 bp, Homo sapiens
tggttacacgttccctatgaggaaaacactgccatatccgtttcacagctaataaactgagatgcaaaaagatgcaa

SEQ ID NO: 186907 - DNA, 73 bp, Homo sapiens
aaaacactgccatatccgtttcacagctaataaactgagatgcaaaaagatgcaatggtttttcccagggtta

SEQ ID NO: 186908 - DNA, 73 bp, Homo sapiens
atatccgtttcacagctaataaactgagatgcaaaaagatgcaatggtttttcccagggttacccagcttgaa

SEQ ID NO: 186909 - DNA, 75 bp, Homo sapiens
tttcacagctaataaactgagatgcaaaaagatgcaatggtttttcccagggttacccagcttgaagatgataaa

SEQ ID NO: 186910 - DNA, 72 bp, Homo sapiens
actgagatgcaaaaagatgcaatggtttttcccagggttacccagcttgaagatgataaaggttttatctaa

SEQ ID NO: 186911 - DNA, 70 bp, Homo sapiens
atgcaaaaagatgcaatggtttttcccagggttacccagcttgaagatgataaaggttttatctaaacca

SEQ ID NO: 186912 - DNA, 66 bp, Homo sapiens
tttttcccagggttacccagcttgaagatgataaaggttttatctaaaccagcttgaatttaaaac

SEQ ID NO: 186913 - DNA, 70 bp, Homo sapiens
cccagcttgaagatgataaaggttttatctaaaccagcttgaatttaaaacttttccaattgtatcacac

SEQ ID NO: 186914 - DNA, 69 bp, Homo sapiens
gaagatgataaaggttttatctaaaccagcttgaatttaaaacttttccaattgtatcacacttctttc

SEQ ID NO: 186915 - DNA, 67 bp, Homo sapiens
aggttttatctaaaccagcttgaatttaaaacttttccaattgtatcacacttctttccaaccagaa

SEQ ID NO: 186916 - DNA, 69 bp, Homo sapiens
atctaaaccagcttgaatttaaaacttttccaattgtatcacacttctttccaaccagaaattcagaaa

SEQ ID NO: 186917 - DNA, 68 bp, Homo sapiens
aaacttttccaattgtatcacacttctttccaaccagaaattcagaaaaacaagttagtagaataata

SEQ ID NO: 186918 - DNA, 68 bp, Homo sapiens
tgtatcacacttctttccaaccagaaattcagaaaaacaagttagtagaataataaattttagttccc

SEQ ID NO: 186919 - DNA, 66 bp, Homo sapiens
cacacttctttccaaccagaaattcagaaaaacaagttagtagaataataaattttagttccccaa

SEQ ID NO: 186920 - DNA, 71 bp, Homo sapiens
agttagtagaataataaattttagttccccaatatacaatatctaatatacagtatatgtttactttgcca

SEQ ID NO: 186921 - DNA, 70 bp, Homo sapiens
agaataataaattttagttccccaatatacaatatctaatatacagtatatgtttactttgccaacaccc

SEQ ID NO: 186922 - DNA, 73 bp, Homo sapiens
ttagttccccaatatacaatatctaatatacagtatatgtttactttgccaacaccccaaagaaaagctcatc

SEQ ID NO: 186923 - DNA, 75 bp, Homo sapiens
tctaatatacagtatatgtttactttgccaacaccccaaagaaaagctcatcttctttcatctatcttatagtaa

SEQ ID NO: 186924 - DNA, 76 bp, Homo sapiens
cagtatatgtttactttgccaacaccccaaagaaaagctcatcttctttcatctatcttatagtaatagatgacaa

SEQ ID NO: 186925 - DNA, 73 bp, Homo sapiens
gtttactttgccaacaccccaaagaaaagctcatcttctttcatctatcttatagtaatagatgacaaactct

SEQ ID NO: 186926 - DNA, 75 bp, Homo sapiens
ccaacaccccaaagaaaagctcatcttctttcatctatcttatagtaatagatgacaaactcttctgcaatgttt

SEQ ID NO: 186927 - DNA, 81 bp, Homo sapiens
gaaaagctcatcttctttcatctatcttatagtaatagatgacaaactcttctgcaatgttttcagtatgactgaattcca

SEQ ID NO: 186928 - DNA, 81 bp, Homo sapiens
gctcatcttctttcatctatcttatagtaatagatgacaaactcttctgcaatgttttcagtatgactgaattccaactac

SEQ ID NO: 186929 - DNA, 79 bp, Homo sapiens
tcatctatcttatagtaatagatgacaaactcttctgcaatgttttcagtatgactgaattccaactactaaaaagtga

SEQ ID NO: 186930 - DNA, 74 bp, Homo sapiens
agtaatagatgacaaactcttctgcaatgttttcagtatgactgaattccaactactaaaaagtgataagggaa

SEQ ID NO: 186931 - DNA, 76 bp, Homo sapiens
agatgacaaactcttctgcaatgttttcagtatgactgaattccaactactaaaaagtgataagggaatagagaga

SEQ ID NO: 186932 - DNA, 75 bp, Homo sapiens
tctgcaatgttttcagtatgactgaattccaactactaaaaagtgataagggaatagagagaaaattatctgtcg

SEQ ID NO: 186933 - DNA, 74 bp, Homo sapiens
gtatgactgaattccaactactaaaaagtgataagggaatagagagaaaattatctgtcgtgatcataagcctt

SEQ ID NO: 186934 - DNA, 71 bp, Homo sapiens
attccaactactaaaaagtgataagggaatagagagaaaattatctgtcgtgatcataagccttttaatct

SEQ ID NO: 186935 - DNA, 76 bp, Homo sapiens
aagtgataagggaatagagagaaaattatctgtcgtgatcataagccttttaatcttaacatcctaatgagcacaa

SEQ ID NO: 186936 - DNA, 78 bp, Homo sapiens
ggaatagagagaaaattatctgtcgtgatcataagccttttaatcttaacatcctaatgagcacaatttgagaatcac

SEQ ID NO: 186937 - DNA, 79 bp, Homo sapiens
gagaaaattatctgtcgtgatcataagccttttaatcttaacatcctaatgagcacaatttgagaatcactgatccaaa

SEQ ID NO: 186938 - DNA, 81 bp, Homo sapiens
ttatctgtcgtgatcataagccttttaatcttaacatcctaatgagcacaatttgagaatcactgatccaaaagtgatcaa

SEQ ID NO: 186939 - DNA, 82 bp, Homo sapiens
tgatcataagccttttaatcttaacatcctaatgagcacaatttgagaatcactgatccaaaagtgatcaatcagttcattc

SEQ ID NO: 186940 - DNA, 77 bp, Homo sapiens
gagaatcactgatccaaaagtgatcaatcagttcattctttaaaaatgggaaataaatagaaatatctcagcaaata

SEQ ID NO: 186941 - DNA, 75 bp, Homo sapiens
cactgatccaaaagtgatcaatcagttcattctttaaaaatgggaaataaatagaaatatctcagcaaataggga

SEQ ID NO: 186942 - DNA, 76 bp, Homo sapiens
gtgatcaatcagttcattctttaaaaatgggaaataaatagaaatatctcagcaaatagggaggtgcttctccaca

SEQ ID NO: 186943 - DNA, 75 bp, Homo sapiens
tcagttcattctttaaaaatgggaaataaatagaaatatctcagcaaatagggaggtgcttctccacagagtaca

SEQ ID NO: 186944 - DNA, 72 bp, Homo sapiens
taaaaatgggaaataaatagaaatatctcagcaaatagggaggtgcttctccacagagtacacttggtcctt

SEQ ID NO: 186945 - DNA, 72 bp, Homo sapiens
aataaatagaaatatctcagcaaatagggaggtgcttctccacagagtacacttggtccttttgcttaaaat

SEQ ID NO: 186946 - DNA, 72 bp, Homo sapiens
atagaaatatctcagcaaatagggaggtgcttctccacagagtacacttggtccttttgcttaaaattaaaa

SEQ ID NO: 186947 - DNA, 70 bp, Homo sapiens
caaatagggaggtgcttctccacagagtacacttggtccttttgcttaaaattaaaagacatattatgtt

SEQ ID NO: 186948 - DNA, 69 bp, Homo sapiens
ccacagagtacacttggtccttttgcttaaaattaaaagacatattatgtttgttcttgccctcaaaag

SEQ ID NO: 186949 - DNA, 70 bp, Homo sapiens
cacttggtccttttgcttaaaattaaaagacatattatgtttgttcttgccctcaaaagtttactgctca

SEQ ID NO: 186950 - DNA, 72 bp, Homo sapiens
tttgcttaaaattaaaagacatattatgtttgttcttgccctcaaaagtttactgctcactgctctcttccc

SEQ ID NO: 186951 - DNA, 74 bp, Homo sapiens
attaaaagacatattatgtttgttcttgccctcaaaagtttactgctcactgctctcttccctctaccaatcaa

SEQ ID NO: 186952 - DNA, 74 bp, Homo sapiens
acatattatgtttgttcttgccctcaaaagtttactgctcactgctctcttccctctaccaatcaaagaataaa

SEQ ID NO: 186953 - DNA, 75 bp, Homo sapiens
atgtttgttcttgccctcaaaagtttactgctcactgctctcttccctctaccaatcaaagaataaagatctcaa

SEQ ID NO: 186954 - DNA, 75 bp, Homo sapiens
ttgccctcaaaagtttactgctcactgctctcttccctctaccaatcaaagaataaagatctcaaaggaaatatc

SEQ ID NO: 186955 - DNA, 76 bp, Homo sapiens
tactgctcactgctctcttccctctaccaatcaaagaataaagatctcaaaggaaatatcctcccttaatataata

SEQ ID NO: 186956 - DNA, 74 bp, Homo sapiens
ctcactgctctcttccctctaccaatcaaagaataaagatctcaaaggaaatatcctcccttaatataataaca

SEQ ID NO: 186957 - DNA, 71 bp, Homo sapiens
tcttccctctaccaatcaaagaataaagatctcaaaggaaatatcctcccttaatataataacatacaaaa

SEQ ID NO: 186958 - DNA, 71 bp, Homo sapiens
gaataaagatctcaaaggaaatatcctcccttaatataataacatacaaaaatttatataataaatatgaa

SEQ ID NO: 186959 - DNA, 69 bp, Homo sapiens
ctcaaaggaaatatcctcccttaatataataacatacaaaaatttatataataaatatgaataataatt

SEQ ID NO: 186960 - DNA, 67 bp, Homo sapiens
tatgaataataatttttaaagtaagttctcaagttgttctttctcatttcataacccctaccctctt

SEQ ID NO: 186961 - DNA, 65 bp, Homo sapiens
aatttttaaagtaagttctcaagttgttctttctcatttcataacccctaccctctttctcttac

SEQ ID NO: 186962 - DNA, 68 bp, Homo sapiens
gtaagttctcaagttgttctttctcatttcataacccctaccctctttctcttacttaaagccttaca

SEQ ID NO: 186963 - DNA, 67 bp, Homo sapiens
ttctcaagttgttctttctcatttcataacccctaccctctttctcttacttaaagccttacaaggg

SEQ ID NO: 186964 - DNA, 68 bp, Homo sapiens
gttctttctcatttcataacccctaccctctttctcttacttaaagccttacaaggggctggacgcag

SEQ ID NO: 186965 - DNA, 69 bp, Homo sapiens
atttcataacccctaccctctttctcttacttaaagccttacaaggggctggacgcagtgactcacacc

SEQ ID NO: 186966 - DNA, 69 bp, Homo sapiens
aaaaaaaaaaagttcgtcgggctagatcttaaatcaaatccacaatttccccagcaagctcccatgagc

SEQ ID NO: 186967 - DNA, 73 bp, Homo sapiens
aaaagttcgtcgggctagatcttaaatcaaatccacaatttccccagcaagctcccatgagctgtctaattta

SEQ ID NO: 186968 - DNA, 76 bp, Homo sapiens
gctagatcttaaatcaaatccacaatttccccagcaagctcccatgagctgtctaatttagaggaaactactttca

SEQ ID NO: 186969 - DNA, 73 bp, Homo sapiens
atcttaaatcaaatccacaatttccccagcaagctcccatgagctgtctaatttagaggaaactactttcacg

SEQ ID NO: 186970 - DNA, 72 bp, Homo sapiens
cacaatttccccagcaagctcccatgagctgtctaatttagaggaaactactttcacggtcctataaagtaa

SEQ ID NO: 186971 - DNA, 74 bp, Homo sapiens
ccagcaagctcccatgagctgtctaatttagaggaaactactttcacggtcctataaagtaaatcactctgtat

SEQ ID NO: 186972 - DNA, 73 bp, Homo sapiens
aagctcccatgagctgtctaatttagaggaaactactttcacggtcctataaagtaaatcactctgtattcaa

SEQ ID NO: 186973 - DNA, 74 bp, Homo sapiens
gagctgtctaatttagaggaaactactttcacggtcctataaagtaaatcactctgtattcaatactctcagaa

SEQ ID NO: 186974 - DNA, 71 bp, Homo sapiens
atttagaggaaactactttcacggtcctataaagtaaatcactctgtattcaatactctcagaaaataatg

SEQ ID NO: 186975 - DNA, 74 bp, Homo sapiens
ctttcacggtcctataaagtaaatcactctgtattcaatactctcagaaaataatgtttgaatctaaatgtgcc

SEQ ID NO: 186976 - DNA, 76 bp, Homo sapiens
gtcctataaagtaaatcactctgtattcaatactctcagaaaataatgtttgaatctaaatgtgccctgcccacaa

SEQ ID NO: 186977 - DNA, 76 bp, Homo sapiens
agtaaatcactctgtattcaatactctcagaaaataatgtttgaatctaaatgtgccctgcccacaatacttcttc

SEQ ID NO: 186978 - DNA, 75 bp, Homo sapiens
actctgtattcaatactctcagaaaataatgtttgaatctaaatgtgccctgcccacaatacttcttcttttata

SEQ ID NO: 186979 - DNA, 73 bp, Homo sapiens
ctctcagaaaataatgtttgaatctaaatgtgccctgcccacaatacttcttcttttataacaagaatatact

SEQ ID NO: 186980 - DNA, 72 bp, Homo sapiens
ataatgtttgaatctaaatgtgccctgcccacaatacttcttcttttataacaagaatatacttaatattag

SEQ ID NO: 186981 - DNA, 76 bp, Homo sapiens
tgaatctaaatgtgccctgcccacaatacttcttcttttataacaagaatatacttaatattagggagccatgtca

SEQ ID NO: 186982 - DNA, 74 bp, Homo sapiens
aaatgtgccctgcccacaatacttcttcttttataacaagaatatacttaatattagggagccatgtcacagaa

SEQ ID NO: 186983 - DNA, 72 bp, Homo sapiens
gcccacaatacttcttcttttataacaagaatatacttaatattagggagccatgtcacagaaaaacacagg

SEQ ID NO: 186984 - DNA, 71 bp, Homo sapiens
cttcttttataacaagaatatacttaatattagggagccatgtcacagaaaaacacagggtatatttcttc

SEQ ID NO: 186985 - DNA, 72 bp, Homo sapiens
ttataacaagaatatacttaatattagggagccatgtcacagaaaaacacagggtatatttcttccaagagg

SEQ ID NO: 186986 - DNA, 73 bp, Homo sapiens
acaagaatatacttaatattagggagccatgtcacagaaaaacacagggtatatttcttccaagagggacata

SEQ ID NO: 186987 - DNA, 73 bp, Homo sapiens
aagaatatacttaatattagggagccatgtcacagaaaaacacagggtatatttcttccaagagggacataca

SEQ ID NO: 186988 - DNA, 73 bp, Homo sapiens
atatacttaatattagggagccatgtcacagaaaaacacagggtatatttcttccaagagggacatacaccaa

SEQ ID NO: 186989 - DNA, 71 bp, Homo sapiens
ttaatattagggagccatgtcacagaaaaacacagggtatatttcttccaagagggacatacaccaagttt

SEQ ID NO: 186990 - DNA, 73 bp, Homo sapiens
atattagggagccatgtcacagaaaaacacagggtatatttcttccaagagggacatacaccaagttttgaga

SEQ ID NO: 186991 - DNA, 69 bp, Homo sapiens
cagaaaaacacagggtatatttcttccaagagggacatacaccaagttttgagactatttaggaaatag

SEQ ID NO: 186992 - DNA, 71 bp, Homo sapiens
aaacacagggtatatttcttccaagagggacatacaccaagttttgagactatttaggaaatagtatgaca

SEQ ID NO: 186993 - DNA, 71 bp, Homo sapiens
aacacagggtatatttcttccaagagggacatacaccaagttttgagactatttaggaaatagtatgacat

SEQ ID NO: 186994 - DNA, 70 bp, Homo sapiens
gagggacatacaccaagttttgagactatttaggaaatagtatgacattgaaattaaaaacaaaatccag

SEQ ID NO: 186995 - DNA, 69 bp, Homo sapiens
atacaccaagttttgagactatttaggaaatagtatgacattgaaattaaaaacaaaatccagtgaaaa

SEQ ID NO: 186996 - DNA, 64 bp, Homo sapiens
attaaaaacaaaatccagtgaaaaaaacagaatgttattgacccctctcccaaaaaagttgtta

SEQ ID NO: 186997 - DNA, 68 bp, Homo sapiens
caaaatccagtgaaaaaaacagaatgttattgacccctctcccaaaaaagttgttataggcttataga

SEQ ID NO: 186998 - DNA, 69 bp, Homo sapiens
gaaaaaaacagaatgttattgacccctctcccaaaaaagttgttataggcttatagattatgaagtaga

SEQ ID NO: 186999 - DNA, 72 bp, Homo sapiens
cagaatgttattgacccctctcccaaaaaagttgttataggcttatagattatgaagtagaaaaaatctgca

SEQ ID NO: 187000 - DNA, 72 bp, Homo sapiens
cccaaaaaagttgttataggcttatagattatgaagtagaaaaaatctgcagtttttcaagattctctggca

SEQ ID NO: 187001 - DNA, 72 bp, Homo sapiens
agttgttataggcttatagattatgaagtagaaaaaatctgcagtttttcaagattctctggcaaaaagttc

SEQ ID NO: 187002 - DNA, 71 bp, Homo sapiens
aggcttatagattatgaagtagaaaaaatctgcagtttttcaagattctctggcaaaaagttctttggaat

SEQ ID NO: 187003 - DNA, 70 bp, Homo sapiens
ttatgaagtagaaaaaatctgcagtttttcaagattctctggcaaaaagttctttggaattattttcttc

SEQ ID NO: 187004 - DNA, 70 bp, Homo sapiens
aaatctgcagtttttcaagattctctggcaaaaagttctttggaattattttcttctaagagctgaaaaa

SEQ ID NO: 187005 - DNA, 69 bp, Homo sapiens
gcagtttttcaagattctctggcaaaaagttctttggaattattttcttctaagagctgaaaaacattt

SEQ ID NO: 187006 - DNA, 70 bp, Homo sapiens
ttctctggcaaaaagttctttggaattattttcttctaagagctgaaaaacattttttccaagatgctcc

SEQ ID NO: 187007 - DNA, 70 bp, Homo sapiens
ggcaaaaagttctttggaattattttcttctaagagctgaaaaacattttttccaagatgctcccagctc

SEQ ID NO: 187008 - DNA, 69 bp, Homo sapiens
tggaattattttcttctaagagctgaaaaacattttttccaagatgctcccagctctaaaaacaacctt

SEQ ID NO: 187009 - DNA, 73 bp, Homo sapiens
ttcttctaagagctgaaaaacattttttccaagatgctcccagctctaaaaacaacctttctgatctcttgaa

SEQ ID NO: 187010 - DNA, 73 bp, Homo sapiens
taagagctgaaaaacattttttccaagatgctcccagctctaaaaacaacctttctgatctcttgaaaagcaa

SEQ ID NO: 187011 - DNA, 72 bp, Homo sapiens
cattttttccaagatgctcccagctctaaaaacaacctttctgatctcttgaaaagcaacactcaactttta

SEQ ID NO: 187012 - DNA, 75 bp, Homo sapiens
aagatgctcccagctctaaaaacaacctttctgatctcttgaaaagcaacactcaacttttagtagctctatgta

SEQ ID NO: 187013 - DNA, 72 bp, Homo sapiens
cagctctaaaaacaacctttctgatctcttgaaaagcaacactcaacttttagtagctctatgtacttttag

SEQ ID NO: 187014 - DNA, 69 bp, Homo sapiens
ctaaaaacaacctttctgatctcttgaaaagcaacactcaacttttagtagctctatgtacttttagtt

SEQ ID NO: 187015 - DNA, 66 bp, Homo sapiens
aaaagaaaataataaaagagaaggaaccatagccaaacactaagtttactccacccatgccttaac

SEQ ID NO: 187016 - DNA, 69 bp, Homo sapiens
aataaaagagaaggaaccatagccaaacactaagtttactccacccatgccttaacttatatattaaga

SEQ ID NO: 187017 - DNA, 72 bp, Homo sapiens
aagagaaggaaccatagccaaacactaagtttactccacccatgccttaacttatatattaagatgagaaga

SEQ ID NO: 187018 - DNA, 72 bp, Homo sapiens
aaccatagccaaacactaagtttactccacccatgccttaacttatatattaagatgagaagagaggttcaa

SEQ ID NO: 187019 - DNA, 71 bp, Homo sapiens
agccaaacactaagtttactccacccatgccttaacttatatattaagatgagaagagaggttcaattatt

SEQ ID NO: 187020 - DNA, 69 bp, Homo sapiens
aacactaagtttactccacccatgccttaacttatatattaagatgagaagagaggttcaattattttt

SEQ ID NO: 187021 - DNA, 69 bp, Homo sapiens
taagtttactccacccatgccttaacttatatattaagatgagaagagaggttcaattattttttcctt

SEQ ID NO: 187022 - DNA, 69 bp, Homo sapiens
tactccacccatgccttaacttatatattaagatgagaagagaggttcaattattttttccttttaagg

SEQ ID NO: 187023 - DNA, 69 bp, Homo sapiens
ccacccatgccttaacttatatattaagatgagaagagaggttcaattattttttccttttaaggtaga

SEQ ID NO: 187024 - DNA, 70 bp, Homo sapiens
gccttaacttatatattaagatgagaagagaggttcaattattttttccttttaaggtagaatatataca

SEQ ID NO: 187025 - DNA, 73 bp, Homo sapiens
cttatatattaagatgagaagagaggttcaattattttttccttttaaggtagaatatatacatctatgtcaa

SEQ ID NO: 187026 - DNA, 75 bp, Homo sapiens
tatattaagatgagaagagaggttcaattattttttccttttaaggtagaatatatacatctatgtcaacacata

SEQ ID NO: 187027 - DNA, 72 bp, Homo sapiens
aagatgagaagagaggttcaattattttttccttttaaggtagaatatatacatctatgtcaacacataatt

SEQ ID NO: 187028 - DNA, 71 bp, Homo sapiens
gagaagagaggttcaattattttttccttttaaggtagaatatatacatctatgtcaacacataattttta

SEQ ID NO: 187029 - DNA, 71 bp, Homo sapiens
caattattttttccttttaaggtagaatatatacatctatgtcaacacataatttttaagtatgaggagga

SEQ ID NO: 187030 - DNA, 73 bp, Homo sapiens
atatacatctatgtcaacacataatttttaagtatgaggaggaaagtatcctctctcccaccacaaaacccag

SEQ ID NO: 187031 - DNA, 71 bp, Homo sapiens
tatgtcaacacataatttttaagtatgaggaggaaagtatcctctctcccaccacaaaacccaggccaaaa

SEQ ID NO: 187032 - DNA, 67 bp, Homo sapiens
taatttttaagtatgaggaggaaagtatcctctctcccaccacaaaacccaggccaaaaaataagaa

SEQ ID NO: 187033 - DNA, 77 bp, Homo sapiens
agaagaagaagaagtttatctgaagacataatcgtgaactcatttctcattaaatcagaatggctcataagttagta

SEQ ID NO: 187034 - DNA, 79 bp, Homo sapiens
gaagtttatctgaagacataatcgtgaactcatttctcattaaatcagaatggctcataagttagtaacaccatgatag

SEQ ID NO: 187035 - DNA, 83 bp, Homo sapiens
tctgaagacataatcgtgaactcatttctcattaaatcagaatggctcataagttagtaacaccatgataggctgcattaata

SEQ ID NO: 187036 - DNA, 81 bp, Homo sapiens
cataatcgtgaactcatttctcattaaatcagaatggctcataagttagtaacaccatgataggctgcattaatactaaga

SEQ ID NO: 187037 - DNA, 79 bp, Homo sapiens
catttctcattaaatcagaatggctcataagttagtaacaccatgataggctgcattaatactaagataagacaaatgg

SEQ ID NO: 187038 - DNA, 78 bp, Homo sapiens
taaatcagaatggctcataagttagtaacaccatgataggctgcattaatactaagataagacaaatggttaaagcca

SEQ ID NO: 187039 - DNA, 78 bp, Homo sapiens
tggctcataagttagtaacaccatgataggctgcattaatactaagataagacaaatggttaaagccaggtatcaata

SEQ ID NO: 187040 - DNA, 76 bp, Homo sapiens
cataagttagtaacaccatgataggctgcattaatactaagataagacaaatggttaaagccaggtatcaataata

SEQ ID NO: 187041 - DNA, 78 bp, Homo sapiens
taacaccatgataggctgcattaatactaagataagacaaatggttaaagccaggtatcaataatataaggcagtcaa

SEQ ID NO: 187042 - DNA, 72 bp, Homo sapiens
gataagacaaatggttaaagccaggtatcaataatataaggcagtcaaaaatctaggtaagccaaaagatgt

SEQ ID NO: 187043 - DNA, 71 bp, Homo sapiens
ccaggtatcaataatataaggcagtcaaaaatctaggtaagccaaaagatgtttattagtctactgatttt

SEQ ID NO: 187044 - DNA, 69 bp, Homo sapiens
ataatataaggcagtcaaaaatctaggtaagccaaaagatgtttattagtctactgattttttttacat

SEQ ID NO: 187045 - DNA, 67 bp, Homo sapiens
atctaggtaagccaaaagatgtttattagtctactgattttttttacatttctatagaagtttattt

SEQ ID NO: 187046 - DNA, 71 bp, Homo sapiens
ttagtctactgattttttttacatttctatagaagtttattttaatcttcccatatgaaatagacagaatc

SEQ ID NO: 187047 - DNA, 73 bp, Homo sapiens
tttacatttctatagaagtttattttaatcttcccatatgaaatagacagaatctgtggaattattatgattt

SEQ ID NO: 187048 - DNA, 74 bp, Homo sapiens
tctatagaagtttattttaatcttcccatatgaaatagacagaatctgtggaattattatgatttttaatgaat

SEQ ID NO: 187049 - DNA, 73 bp, Homo sapiens
ttattttaatcttcccatatgaaatagacagaatctgtggaattattatgatttttaatgaatttttaaatgc

SEQ ID NO: 187050 - DNA, 74 bp, Homo sapiens
tcccatatgaaatagacagaatctgtggaattattatgatttttaatgaatttttaaatgcttattttactaca

SEQ ID NO: 187051 - DNA, 72 bp, Homo sapiens
tctgtggaattattatgatttttaatgaatttttaaatgcttattttactacaaaattcactgtgattagtc

SEQ ID NO: 187052 - DNA, 68 bp, Homo sapiens
attatgatttttaatgaatttttaaatgcttattttactacaaaattcactgtgattagtcccttaag

SEQ ID NO: 187053 - DNA, 68 bp, Homo sapiens
ttaatgaatttttaaatgcttattttactacaaaattcactgtgattagtcccttaagtaacttgtaa

SEQ ID NO: 187054 - DNA, 69 bp, Homo sapiens
tttaaatgcttattttactacaaaattcactgtgattagtcccttaagtaacttgtaatatttcaaaca

SEQ ID NO: 187055 - DNA, 73 bp, Homo sapiens
gcttattttactacaaaattcactgtgattagtcccttaagtaacttgtaatatttcaaacagcatatgcctg

SEQ ID NO: 187056 - DNA, 75 bp, Homo sapiens
ctacaaaattcactgtgattagtcccttaagtaacttgtaatatttcaaacagcatatgcctggaatagttcaca

SEQ ID NO: 187057 - DNA, 75 bp, Homo sapiens
ttcactgtgattagtcccttaagtaacttgtaatatttcaaacagcatatgcctggaatagttcacatttcaact

SEQ ID NO: 187058 - DNA, 72 bp, Homo sapiens
ttagtcccttaagtaacttgtaatatttcaaacagcatatgcctggaatagttcacatttcaacttattatt

SEQ ID NO: 187059 - DNA, 77 bp, Homo sapiens
tttcaaacagcatatgcctggaatagttcacatttcaacttattattttagagttgtcaagacacaatctaattcta

SEQ ID NO: 187060 - DNA, 76 bp, Homo sapiens
gttcacatttcaacttattattttagagttgtcaagacacaatctaattctaataggaaaatatctgctggcttca

SEQ ID NO: 187061 - DNA, 76 bp, Homo sapiens
tattattttagagttgtcaagacacaatctaattctaataggaaaatatctgctggcttcaaacagcacttaaaca

SEQ ID NO: 187062 - DNA, 76 bp, Homo sapiens
tagagttgtcaagacacaatctaattctaataggaaaatatctgctggcttcaaacagcacttaaacacaaagaag

SEQ ID NO: 187063 - DNA, 74 bp, Homo sapiens
gtcaagacacaatctaattctaataggaaaatatctgctggcttcaaacagcacttaaacacaaagaaggaaag

SEQ ID NO: 187064 - DNA, 73 bp, Homo sapiens
atctaattctaataggaaaatatctgctggcttcaaacagcacttaaacacaaagaaggaaagttagaagtca

SEQ ID NO: 187065 - DNA, 74 bp, Homo sapiens
taggaaaatatctgctggcttcaaacagcacttaaacacaaagaaggaaagttagaagtcaagaagaatcattc

SEQ ID NO: 187066 - DNA, 76 bp, Homo sapiens
atatctgctggcttcaaacagcacttaaacacaaagaaggaaagttagaagtcaagaagaatcattctgagataaa

SEQ ID NO: 187067 - DNA, 75 bp, Homo sapiens
ttcaaacagcacttaaacacaaagaaggaaagttagaagtcaagaagaatcattctgagataaaggctgagtaga

SEQ ID NO: 187068 - DNA, 77 bp, Homo sapiens
taaacacaaagaaggaaagttagaagtcaagaagaatcattctgagataaaggctgagtagagcacaagatgagaaa

SEQ ID NO: 187069 - DNA, 77 bp, Homo sapiens
aaagaaggaaagttagaagtcaagaagaatcattctgagataaaggctgagtagagcacaagatgagaaatcaacta

SEQ ID NO: 187070 - DNA, 85 bp, Homo sapiens
agaagaatcattctgagataaaggctgagtagagcacaagatgagaaatcaactagagaccttatcaggatgcagtgctgcactt

SEQ ID NO: 187071 - DNA, 86 bp, Homo sapiens
aatcaactagagaccttatcaggatgcagtgctgcactttgctgcattatcactgactgtaacctctcttccagctcacaggcaac

SEQ ID NO: 187072 - DNA, 84 bp, Homo sapiens
accttatcaggatgcagtgctgcactttgctgcattatcactgactgtaacctctcttccagctcacaggcaaccctcgacttc

SEQ ID NO: 187073 - DNA, 84 bp, Homo sapiens
atgcagtgctgcactttgctgcattatcactgactgtaacctctcttccagctcacaggcaaccctcgacttctctgggactaa

SEQ ID NO: 187074 - DNA, 74 bp, Homo sapiens
tctcttccagctcacaggcaaccctcgacttctctgggactaagtggttgctttaaaaagttcttgtgtcatat

SEQ ID NO: 187075 - DNA, 70 bp, Homo sapiens
tcacaggcaaccctcgacttctctgggactaagtggttgctttaaaaagttcttgtgtcatatttacgtt

SEQ ID NO: 187076 - DNA, 67 bp, Homo sapiens
accctcgacttctctgggactaagtggttgctttaaaaagttcttgtgtcatatttacgttttccta

SEQ ID NO: 187077 - DNA, 67 bp, Homo sapiens
ttctctgggactaagtggttgctttaaaaagttcttgtgtcatatttacgttttcctacgaccctta

SEQ ID NO: 187078 - DNA, 70 bp, Homo sapiens
actaagtggttgctttaaaaagttcttgtgtcatatttacgttttcctacgacccttatcagaagcatga

SEQ ID NO: 187079 - DNA, 69 bp, Homo sapiens
gctttaaaaagttcttgtgtcatatttacgttttcctacgacccttatcagaagcatgacgtactaaag

SEQ ID NO: 187080 - DNA, 70 bp, Homo sapiens
aaagttcttgtgtcatatttacgttttcctacgacccttatcagaagcatgacgtactaaagttacataa

SEQ ID NO: 187081 - DNA, 71 bp, Homo sapiens
atatttacgttttcctacgacccttatcagaagcatgacgtactaaagttacataatttgcactctccaat

SEQ ID NO: 187082 - DNA, 70 bp, Homo sapiens
acgttttcctacgacccttatcagaagcatgacgtactaaagttacataatttgcactctccaatttacc

SEQ ID NO: 187083 - DNA, 72 bp, Homo sapiens
agaagcatgacgtactaaagttacataatttgcactctccaatttacccacccaactacacaacccaagaga

SEQ ID NO: 187084 - DNA, 72 bp, Homo sapiens
tactaaagttacataatttgcactctccaatttacccacccaactacacaacccaagagagataatcagaaa

SEQ ID NO: 187085 - DNA, 72 bp, Homo sapiens
agttacataatttgcactctccaatttacccacccaactacacaacccaagagagataatcagaaatgtaaa

SEQ ID NO: 187086 - DNA, 72 bp, Homo sapiens
actctccaatttacccacccaactacacaacccaagagagataatcagaaatgtaaaatgccgaattcatta

SEQ ID NO: 187087 - DNA, 73 bp, Homo sapiens
cacaacccaagagagataatcagaaatgtaaaatgccgaattcattaaaaaaatgagattgattaggatttta

SEQ ID NO: 187088 - DNA, 73 bp, Homo sapiens
gagagataatcagaaatgtaaaatgccgaattcattaaaaaaatgagattgattaggattttaaatggaccag

SEQ ID NO: 187089 - DNA, 71 bp, Homo sapiens
cagaaatgtaaaatgccgaattcattaaaaaaatgagattgattaggattttaaatggaccagttagttga

SEQ ID NO: 187090 - DNA, 72 bp, Homo sapiens
taaaaaaatgagattgattaggattttaaatggaccagttagttgattgttaatggcatagccataggtaaa

SEQ ID NO: 187091 - DNA, 76 bp, Homo sapiens
tgagattgattaggattttaaatggaccagttagttgattgttaatggcatagccataggtaaatggcatcaaaac

SEQ ID NO: 187092 - DNA, 76 bp, Homo sapiens
aaatggaccagttagttgattgttaatggcatagccataggtaaatggcatcaaaactatactcctgataactata

SEQ ID NO: 187093 - DNA, 75 bp, Homo sapiens
cagttagttgattgttaatggcatagccataggtaaatggcatcaaaactatactcctgataactataaaaggag

SEQ ID NO: 187094 - DNA, 71 bp, Homo sapiens
gccataggtaaatggcatcaaaactatactcctgataactataaaaggagtaaaacagagttacttttcca

SEQ ID NO: 187095 - DNA, 69 bp, Homo sapiens
ggtaaatggcatcaaaactatactcctgataactataaaaggagtaaaacagagttacttttccaaaca

SEQ ID NO: 187096 - DNA, 65 bp, Homo sapiens
atactcctgataactataaaaggagtaaaacagagttacttttccaaacaacttctttaataaaa

SEQ ID NO: 187097 - DNA, 63 bp, Homo sapiens
actataaaaggagtaaaacagagttacttttccaaacaacttctttaataaaattataataag

SEQ ID NO: 187098 - DNA, 63 bp, Homo sapiens
aggagtaaaacagagttacttttccaaacaacttctttaataaaattataataagttcctaat

SEQ ID NO: 187099 - DNA, 63 bp, Homo sapiens
cagagttacttttccaaacaacttctttaataaaattataataagttcctaattttaaaataa

SEQ ID NO: 187100 - DNA, 64 bp, Homo sapiens
tccaaacaacttctttaataaaattataataagttcctaattttaaaataagttgtgttacaaa

SEQ ID NO: 187101 - DNA, 62 bp, Homo sapiens
acttctttaataaaattataataagttcctaattttaaaataagttgtgttacaaaaataaa

SEQ ID NO: 187102 - DNA, 69 bp, Homo sapiens
ttataataagttcctaattttaaaataagttgtgttacaaaaataaatacatttcttcatgaagctgta

SEQ ID NO: 187103 - DNA, 69 bp, Homo sapiens
gttcctaattttaaaataagttgtgttacaaaaataaatacatttcttcatgaagctgtatttctccca

SEQ ID NO: 187104 - DNA, 72 bp, Homo sapiens
taaaataagttgtgttacaaaaataaatacatttcttcatgaagctgtatttctcccatagaatactctaag

SEQ ID NO: 187105 - DNA, 75 bp, Homo sapiens
agttgtgttacaaaaataaatacatttcttcatgaagctgtatttctcccatagaatactctaagtggcatttca

SEQ ID NO: 187106 - DNA, 76 bp, Homo sapiens
aaataaatacatttcttcatgaagctgtatttctcccatagaatactctaagtggcatttcatttccaaagctggc

SEQ ID NO: 187107 - DNA, 78 bp, Homo sapiens
aatacatttcttcatgaagctgtatttctcccatagaatactctaagtggcatttcatttccaaagctggctcaatac

SEQ ID NO: 187108 - DNA, 77 bp, Homo sapiens
ttcatgaagctgtatttctcccatagaatactctaagtggcatttcatttccaaagctggctcaatacccacttaaa

SEQ ID NO: 187109 - DNA, 75 bp, Homo sapiens
tatttctcccatagaatactctaagtggcatttcatttccaaagctggctcaatacccacttaaaccataatcta

SEQ ID NO: 187110 - DNA, 78 bp, Homo sapiens
catagaatactctaagtggcatttcatttccaaagctggctcaatacccacttaaaccataatctattgacatatata

SEQ ID NO: 187111 - DNA, 78 bp, Homo sapiens
agtggcatttcatttccaaagctggctcaatacccacttaaaccataatctattgacatatatatgataaggaatgaa

SEQ ID NO: 187112 - DNA, 77 bp, Homo sapiens
catttccaaagctggctcaatacccacttaaaccataatctattgacatatatatgataaggaatgaaatatggtaa

SEQ ID NO: 187113 - DNA, 78 bp, Homo sapiens
gctggctcaatacccacttaaaccataatctattgacatatatatgataaggaatgaaatatggtaaaagtacttgca

SEQ ID NO: 187114 - DNA, 77 bp, Homo sapiens
ctcaatacccacttaaaccataatctattgacatatatatgataaggaatgaaatatggtaaaagtacttgcaatgc

SEQ ID NO: 187115 - DNA, 79 bp, Homo sapiens
acttaaaccataatctattgacatatatatgataaggaatgaaatatggtaaaagtacttgcaatgcttcaaatgcata

SEQ ID NO: 187116 - DNA, 78 bp, Homo sapiens
aatatggtaaaagtacttgcaatgcttcaaatgcatattcataattcaagtaaaaggacagcagcctagcaaaacaga

SEQ ID NO: 187117 - DNA, 77 bp, Homo sapiens
aaaagtacttgcaatgcttcaaatgcatattcataattcaagtaaaaggacagcagcctagcaaaacagaactcaaa

SEQ ID NO: 187118 - DNA, 75 bp, Homo sapiens
aatgcttcaaatgcatattcataattcaagtaaaaggacagcagcctagcaaaacagaactcaaaaaatggggtc

SEQ ID NO: 187119 - DNA, 75 bp, Homo sapiens
aaatgcatattcataattcaagtaaaaggacagcagcctagcaaaacagaactcaaaaaatggggtccacatcac

SEQ ID NO: 187120 - DNA, 72 bp, Homo sapiens
ataattcaagtaaaaggacagcagcctagcaaaacagaactcaaaaaatggggtccacatcacccagaatag

SEQ ID NO: 187121 - DNA, 75 bp, Homo sapiens
taaaaggacagcagcctagcaaaacagaactcaaaaaatggggtccacatcacccagaatagtcacacaattata

SEQ ID NO: 187122 - DNA, 75 bp, Homo sapiens
gcctagcaaaacagaactcaaaaaatggggtccacatcacccagaatagtcacacaattatatacatgggcaact

SEQ ID NO: 187123 - DNA, 76 bp, Homo sapiens
acagaactcaaaaaatggggtccacatcacccagaatagtcacacaattatatacatgggcaactttctcataata

SEQ ID NO: 187124 - DNA, 75 bp, Homo sapiens
aaaaatggggtccacatcacccagaatagtcacacaattatatacatgggcaactttctcataataggaacaata

SEQ ID NO: 187125 - DNA, 75 bp, Homo sapiens
atcacccagaatagtcacacaattatatacatgggcaactttctcataataggaacaatagcttttcttaggttc

SEQ ID NO: 187126 - DNA, 74 bp, Homo sapiens
gtcacacaattatatacatgggcaactttctcataataggaacaatagcttttcttaggttctcaaagtggttg

SEQ ID NO: 187127 - DNA, 76 bp, Homo sapiens
tatatacatgggcaactttctcataataggaacaatagcttttcttaggttctcaaagtggttgttcatgtatcca

SEQ ID NO: 187128 - DNA, 73 bp, Homo sapiens
ctcataataggaacaatagcttttcttaggttctcaaagtggttgttcatgtatccaataaagaaaactgtgc

SEQ ID NO: 187129 - DNA, 71 bp, Homo sapiens
ggaacaatagcttttcttaggttctcaaagtggttgttcatgtatccaataaagaaaactgtgccacaaaa

SEQ ID NO: 187130 - DNA, 69 bp, Homo sapiens
gcttttcttaggttctcaaagtggttgttcatgtatccaataaagaaaactgtgccacaaaaaaaccac

SEQ ID NO: 187131 - DNA, 72 bp, Homo sapiens
ttgttcatgtatccaataaagaaaactgtgccacaaaaaaaccacctgcttcctacaaagccctcaggtaga

SEQ ID NO: 187132 - DNA, 71 bp, Homo sapiens
tatccaataaagaaaactgtgccacaaaaaaaccacctgcttcctacaaagccctcaggtagagtttatca

SEQ ID NO: 187133 - DNA, 72 bp, Homo sapiens
taaagaaaactgtgccacaaaaaaaccacctgcttcctacaaagccctcaggtagagtttatcagtgatata

SEQ ID NO: 187134 - DNA, 73 bp, Homo sapiens
cacaaaaaaaccacctgcttcctacaaagccctcaggtagagtttatcagtgatataaggcatcttgatgggt

SEQ ID NO: 187135 - DNA, 79 bp, Homo sapiens
ttcctacaaagccctcaggtagagtttatcagtgatataaggcatcttgatgggttatggtctacaaatgcatatagaa

SEQ ID NO: 187136 - DNA, 79 bp, Homo sapiens
cagtgatataaggcatcttgatgggttatggtctacaaatgcatatagaaaataacttcataaatagaaaactgcacaa

SEQ ID NO: 187137 - DNA, 74 bp, Homo sapiens
aggcatcttgatgggttatggtctacaaatgcatatagaaaataacttcataaatagaaaactgcacaaaaacc

SEQ ID NO: 187138 - DNA, 74 bp, Homo sapiens
gatgggttatggtctacaaatgcatatagaaaataacttcataaatagaaaactgcacaaaaaccttccagaga

SEQ ID NO: 187139 - DNA, 74 bp, Homo sapiens
gcatatagaaaataacttcataaatagaaaactgcacaaaaaccttccagagaaactaagtgaagatgatcctg

SEQ ID NO: 187140 - DNA, 71 bp, Homo sapiens
aacttcataaatagaaaactgcacaaaaaccttccagagaaactaagtgaagatgatcctggagaaaagaa

SEQ ID NO: 187141 - DNA, 74 bp, Homo sapiens
taaatagaaaactgcacaaaaaccttccagagaaactaagtgaagatgatcctggagaaaagaacacatctcaa

SEQ ID NO: 187142 - DNA, 74 bp, Homo sapiens
aaactgcacaaaaaccttccagagaaactaagtgaagatgatcctggagaaaagaacacatctcaaaatagatg

SEQ ID NO: 187143 - DNA, 73 bp, Homo sapiens
aaaaccttccagagaaactaagtgaagatgatcctggagaaaagaacacatctcaaaatagatggggtgtgaa

SEQ ID NO: 187144 - DNA, 78 bp, Homo sapiens
aaactaagtgaagatgatcctggagaaaagaacacatctcaaaatagatggggtgtgaagtgcccacataatatgaca

SEQ ID NO: 187145 - DNA, 80 bp, Homo sapiens
aagatgatcctggagaaaagaacacatctcaaaatagatggggtgtgaagtgcccacataatatgacacataagttcatg

SEQ ID NO: 187146 - DNA, 81 bp, Homo sapiens
atcctggagaaaagaacacatctcaaaatagatggggtgtgaagtgcccacataatatgacacataagttcatgtgcagta

SEQ ID NO: 187147 - DNA, 84 bp, Homo sapiens
aaaatagatggggtgtgaagtgcccacataatatgacacataagttcatgtgcagtaggagctgatgatcccagtgacactcat

SEQ ID NO: 187148 - DNA, 86 bp, Homo sapiens
ggtgtgaagtgcccacataatatgacacataagttcatgtgcagtaggagctgatgatcccagtgacactcattgtcaaatagatt

SEQ ID NO: 187149 - DNA, 85 bp, Homo sapiens
aagtgcccacataatatgacacataagttcatgtgcagtaggagctgatgatcccagtgacactcattgtcaaatagattttgac

SEQ ID NO: 187150 - DNA, 85 bp, Homo sapiens
ataatatgacacataagttcatgtgcagtaggagctgatgatcccagtgacactcattgtcaaatagattttgaccaatcaatag

SEQ ID NO: 187151 - DNA, 83 bp, Homo sapiens
ataagttcatgtgcagtaggagctgatgatcccagtgacactcattgtcaaatagattttgaccaatcaatagtgtttgtaca

SEQ ID NO: 187152 - DNA, 84 bp, Homo sapiens
atgtgcagtaggagctgatgatcccagtgacactcattgtcaaatagattttgaccaatcaatagtgtttgtacagctgaccca

SEQ ID NO: 187153 - DNA, 83 bp, Homo sapiens
aggagctgatgatcccagtgacactcattgtcaaatagattttgaccaatcaatagtgtttgtacagctgacccagcttcaga

SEQ ID NO: 187154 - DNA, 78 bp, Homo sapiens
tcattgtcaaatagattttgaccaatcaatagtgtttgtacagctgacccagcttcagaagcaaacacaccaaatgtt

SEQ ID NO: 187155 - DNA, 75 bp, Homo sapiens
aaatagattttgaccaatcaatagtgtttgtacagctgacccagcttcagaagcaaacacaccaaatgtttatgt

SEQ ID NO: 187156 - DNA, 76 bp, Homo sapiens
tttgaccaatcaatagtgtttgtacagctgacccagcttcagaagcaaacacaccaaatgtttatgtttccaagag

SEQ ID NO: 187157 - DNA, 74 bp, Homo sapiens
atagtgtttgtacagctgacccagcttcagaagcaaacacaccaaatgtttatgtttccaagaggtaccactta

SEQ ID NO: 187158 - DNA, 72 bp, Homo sapiens
tacagctgacccagcttcagaagcaaacacaccaaatgtttatgtttccaagaggtaccacttaaaattctt

SEQ ID NO: 187159 - DNA, 70 bp, Homo sapiens
agcttcagaagcaaacacaccaaatgtttatgtttccaagaggtaccacttaaaattctttcccatacta

SEQ ID NO: 187160 - DNA, 71 bp, Homo sapiens
gcaaacacaccaaatgtttatgtttccaagaggtaccacttaaaattctttcccatactagtcaaatcaca

SEQ ID NO: 187161 - DNA, 69 bp, Homo sapiens
ccaaatgtttatgtttccaagaggtaccacttaaaattctttcccatactagtcaaatcacaagggcaa

SEQ ID NO: 187162 - DNA, 67 bp, Homo sapiens
gtttccaagaggtaccacttaaaattctttcccatactagtcaaatcacaagggcaaaagtttacaa

SEQ ID NO: 187163 - DNA, 68 bp, Homo sapiens
gaggtaccacttaaaattctttcccatactagtcaaatcacaagggcaaaagtttacaacacttttgc

SEQ ID NO: 187164 - DNA, 67 bp, Homo sapiens
ctttcccatactagtcaaatcacaagggcaaaagtttacaacacttttgctaccattactttaaaaa

SEQ ID NO: 187165 - DNA, 67 bp, Homo sapiens
ctagtcaaatcacaagggcaaaagtttacaacacttttgctaccattactttaaaaaggaaaatcca

SEQ ID NO: 187166 - DNA, 67 bp, Homo sapiens
agtttacaacacttttgctaccattactttaaaaaggaaaatccatcttttatcaacataaaattca

SEQ ID NO: 187167 - DNA, 68 bp, Homo sapiens
aacaaacaaaaatgtctatttaaatgacccaaacatgtagtatgagtgaagataccttttttaataat

SEQ ID NO: 187168 - DNA, 72 bp, Homo sapiens
aatgtctatttaaatgacccaaacatgtagtatgagtgaagataccttttttaataattgtgatcaagaaaa

SEQ ID NO: 187169 - DNA, 72 bp, Homo sapiens
taaatgacccaaacatgtagtatgagtgaagataccttttttaataattgtgatcaagaaaatttggatttc

SEQ ID NO: 187170 - DNA, 70 bp, Homo sapiens
gacccaaacatgtagtatgagtgaagataccttttttaataattgtgatcaagaaaatttggatttcttt

SEQ ID NO: 187171 - DNA, 70 bp, Homo sapiens
aaacatgtagtatgagtgaagataccttttttaataattgtgatcaagaaaatttggatttctttttata

SEQ ID NO: 187172 - DNA, 70 bp, Homo sapiens
tgtagtatgagtgaagataccttttttaataattgtgatcaagaaaatttggatttctttttatataatt

SEQ ID NO: 187173 - DNA, 69 bp, Homo sapiens
tatgagtgaagataccttttttaataattgtgatcaagaaaatttggatttctttttatataattttta

SEQ ID NO: 187174 - DNA, 67 bp, Homo sapiens
gtgaagataccttttttaataattgtgatcaagaaaatttggatttctttttatataatttttaatg

SEQ ID NO: 187175 - DNA, 69 bp, Homo sapiens
taccttttttaataattgtgatcaagaaaatttggatttctttttatataatttttaatgtgacttgca

SEQ ID NO: 187176 - DNA, 69 bp, Homo sapiens
ttaataattgtgatcaagaaaatttggatttctttttatataatttttaatgtgacttgcaacttaacc

SEQ ID NO: 187177 - DNA, 70 bp, Homo sapiens
taataattgtgatcaagaaaatttggatttctttttatataatttttaatgtgacttgcaacttaaccca

SEQ ID NO: 187178 - DNA, 66 bp, Homo sapiens
gaaaatttggatttctttttatataatttttaatgtgacttgcaacttaacccaaaagtttctata

SEQ ID NO: 187179 - DNA, 71 bp, Homo sapiens
ttatataatttttaatgtgacttgcaacttaacccaaaagtttctataactgatataacacagttcaaata

SEQ ID NO: 187180 - DNA, 70 bp, Homo sapiens
atttttaatgtgacttgcaacttaacccaaaagtttctataactgatataacacagttcaaatattattc

SEQ ID NO: 187181 - DNA, 70 bp, Homo sapiens
gtgacttgcaacttaacccaaaagtttctataactgatataacacagttcaaatattattcttttcttaa

SEQ ID NO: 187182 - DNA, 71 bp, Homo sapiens
aagtttctataactgatataacacagttcaaatattattcttttcttaaatgagagtttattgcttgtttg

SEQ ID NO: 187183 - DNA, 70 bp, Homo sapiens
ataactgatataacacagttcaaatattattcttttcttaaatgagagtttattgcttgtttgttttggg

SEQ ID NO: 187184 - DNA, 69 bp, Homo sapiens
taacacagttcaaatattattcttttcttaaatgagagtttattgcttgtttgttttggggttttgtca

SEQ ID NO: 187185 - DNA, 67 bp, Homo sapiens
attattcttttcttaaatgagagtttattgcttgtttgttttggggttttgtcataattaaatttga

SEQ ID NO: 187186 - DNA, 73 bp, Homo sapiens
tcttaaatgagagtttattgcttgtttgttttggggttttgtcataattaaatttgagctgcatagatcttaa

SEQ ID NO: 187187 - DNA, 71 bp, Homo sapiens
gcttgtttgttttggggttttgtcataattaaatttgagctgcatagatcttaaggctgttttaataaata

SEQ ID NO: 187188 - DNA, 72 bp, Homo sapiens
tttggggttttgtcataattaaatttgagctgcatagatcttaaggctgttttaataaatagtgtaatttca

SEQ ID NO: 187189 - DNA, 73 bp, Homo sapiens
gtcataattaaatttgagctgcatagatcttaaggctgttttaataaatagtgtaatttcaaacttaagccta

SEQ ID NO: 187190 - DNA, 73 bp, Homo sapiens
gagctgcatagatcttaaggctgttttaataaatagtgtaatttcaaacttaagcctatctaaaatattattg

SEQ ID NO: 187191 - DNA, 70 bp, Homo sapiens
taaggctgttttaataaatagtgtaatttcaaacttaagcctatctaaaatattattgtctacctgttca

SEQ ID NO: 187192 - DNA, 74 bp, Homo sapiens
ttaataaatagtgtaatttcaaacttaagcctatctaaaatattattgtctacctgttcatctcaacacatgaa

SEQ ID NO: 187193 - DNA, 77 bp, Homo sapiens
gtgtaatttcaaacttaagcctatctaaaatattattgtctacctgttcatctcaacacatgaatccacagctaagc

SEQ ID NO: 187194 - DNA, 77 bp, Homo sapiens
ttcaaacttaagcctatctaaaatattattgtctacctgttcatctcaacacatgaatccacagctaagccattaag

SEQ ID NO: 187195 - DNA, 76 bp, Homo sapiens
aaatattattgtctacctgttcatctcaacacatgaatccacagctaagccattaaggtacatcatttcttttacc

SEQ ID NO: 187196 - DNA, 77 bp, Homo sapiens
ttgtctacctgttcatctcaacacatgaatccacagctaagccattaaggtacatcatttcttttacctctcccaaa

SEQ ID NO: 187197 - DNA, 73 bp, Homo sapiens
atctcaacacatgaatccacagctaagccattaaggtacatcatttcttttacctctcccaaaaccttatact

SEQ ID NO: 187198 - DNA, 70 bp, Homo sapiens
acacatgaatccacagctaagccattaaggtacatcatttcttttacctctcccaaaaccttatactttt

SEQ ID NO: 187199 - DNA, 70 bp, Homo sapiens
ccacagctaagccattaaggtacatcatttcttttacctctcccaaaaccttatactttttaacacatga

SEQ ID NO: 187200 - DNA, 68 bp, Homo sapiens
gccattaaggtacatcatttcttttacctctcccaaaaccttatactttttaacacatgaggaactag

SEQ ID NO: 187201 - DNA, 66 bp, Homo sapiens
catcatttcttttacctctcccaaaaccttatactttttaacacatgaggaactagtttgtttgtt

SEQ ID NO: 187202 - DNA, 71 bp, Homo sapiens
tttttaataggaatgcttttcacaagagagtgccacttacccctcctgccttcagcaactttctcctaaag

SEQ ID NO: 187203 - DNA, 74 bp, Homo sapiens
taggaatgcttttcacaagagagtgccacttacccctcctgccttcagcaactttctcctaaagtcctctgtgg

SEQ ID NO: 187204 - DNA, 71 bp, Homo sapiens
acaagagagtgccacttacccctcctgccttcagcaactttctcctaaagtcctctgtggggttgttgaaa

SEQ ID NO: 187205 - DNA, 68 bp, Homo sapiens
ccacttacccctcctgccttcagcaactttctcctaaagtcctctgtggggttgttgaaagttagctt

SEQ ID NO: 187206 - DNA, 73 bp, Homo sapiens
ttcagcaactttctcctaaagtcctctgtggggttgttgaaagttagcttttcacagcggaggtgattcactg

SEQ ID NO: 187207 - DNA, 71 bp, Homo sapiens
actttctcctaaagtcctctgtggggttgttgaaagttagcttttcacagcggaggtgattcactggtgga

SEQ ID NO: 187208 - DNA, 79 bp, Homo sapiens
gttgttgaaagttagcttttcacagcggaggtgattcactggtggatggccttcaagatgcaggaataagtcataatca

SEQ ID NO: 187209 - DNA, 77 bp, Homo sapiens
aaagttagcttttcacagcggaggtgattcactggtggatggccttcaagatgcaggaataagtcataatcaaagcg

SEQ ID NO: 187210 - DNA, 78 bp, Homo sapiens
ttttcacagcggaggtgattcactggtggatggccttcaagatgcaggaataagtcataatcaaagcggactttccta

SEQ ID NO: 187211 - DNA, 75 bp, Homo sapiens
aggtgattcactggtggatggccttcaagatgcaggaataagtcataatcaaagcggactttcctaggttcttcc

SEQ ID NO: 187212 - DNA, 74 bp, Homo sapiens
tggtggatggccttcaagatgcaggaataagtcataatcaaagcggactttcctaggttcttcctggaggttaa

SEQ ID NO: 187213 - DNA, 70 bp, Homo sapiens
cttcaagatgcaggaataagtcataatcaaagcggactttcctaggttcttcctggaggttaacaaaaat

SEQ ID NO: 187214 - DNA, 71 bp, Homo sapiens
agatgcaggaataagtcataatcaaagcggactttcctaggttcttcctggaggttaacaaaaattatgaa

SEQ ID NO: 187215 - DNA, 67 bp, Homo sapiens
ataagtcataatcaaagcggactttcctaggttcttcctggaggttaacaaaaattatgaaagaaaa

SEQ ID NO: 187216 - DNA, 71 bp, Homo sapiens
aacatcatttggctaatggtggatcgtctactgaaagattaatgggtaaagattacataccttgtttttaa

SEQ ID NO: 187217 - DNA, 68 bp, Homo sapiens
ggctaatggtggatcgtctactgaaagattaatgggtaaagattacataccttgtttttaaaataaac

SEQ ID NO: 187218 - DNA, 69 bp, Homo sapiens
ggatcgtctactgaaagattaatgggtaaagattacataccttgtttttaaaataaacttcaattggca

SEQ ID NO: 187219 - DNA, 68 bp, Homo sapiens
agattaatgggtaaagattacataccttgtttttaaaataaacttcaattggcaaaatgaaaccagca

SEQ ID NO: 187220 - DNA, 69 bp, Homo sapiens
tgggtaaagattacataccttgtttttaaaataaacttcaattggcaaaatgaaaccagcatacccaga

SEQ ID NO: 187221 - DNA, 69 bp, Homo sapiens
cataccttgtttttaaaataaacttcaattggcaaaatgaaaccagcatacccagattcttctactttg

SEQ ID NO: 187222 - DNA, 70 bp, Homo sapiens
ttttaaaataaacttcaattggcaaaatgaaaccagcatacccagattcttctactttgtaaggtggatc

SEQ ID NO: 187223 - DNA, 73 bp, Homo sapiens
aaataaacttcaattggcaaaatgaaaccagcatacccagattcttctactttgtaaggtggatctttgcaca

SEQ ID NO: 187224 - DNA, 75 bp, Homo sapiens
ttggcaaaatgaaaccagcatacccagattcttctactttgtaaggtggatctttgcacactgcaacattaaaaa

SEQ ID NO: 187225 - DNA, 73 bp, Homo sapiens
aatgaaaccagcatacccagattcttctactttgtaaggtggatctttgcacactgcaacattaaaaaagaaa

SEQ ID NO: 187226 - DNA, 72 bp, Homo sapiens
catacccagattcttctactttgtaaggtggatctttgcacactgcaacattaaaaaagaaaataggtaaga

SEQ ID NO: 187227 - DNA, 73 bp, Homo sapiens
cttctactttgtaaggtggatctttgcacactgcaacattaaaaaagaaaataggtaagatgagaataataga

SEQ ID NO: 187228 - DNA, 67 bp, Homo sapiens
tgtttcaaagacattttttatcaagacccttttgtattcgagccctacctctttttggcctaggaaa

SEQ ID NO: 187229 - DNA, 67 bp, Homo sapiens
attttttatcaagacccttttgtattcgagccctacctctttttggcctaggaaagctttcgtgcaa

SEQ ID NO: 187230 - DNA, 70 bp, Homo sapiens
ttatcaagacccttttgtattcgagccctacctctttttggcctaggaaagctttcgtgcaagtggaaga

SEQ ID NO: 187231 - DNA, 71 bp, Homo sapiens
agccctacctctttttggcctaggaaagctttcgtgcaagtggaagacgactttctccacaaagtgctgta

SEQ ID NO: 187232 - DNA, 72 bp, Homo sapiens
cctctttttggcctaggaaagctttcgtgcaagtggaagacgactttctccacaaagtgctgtatgttactg

SEQ ID NO: 187233 - DNA, 75 bp, Homo sapiens
taggaaagctttcgtgcaagtggaagacgactttctccacaaagtgctgtatgttactgtgctccggaccgcgta

SEQ ID NO: 187234 - DNA, 75 bp, Homo sapiens
tttcgtgcaagtggaagacgactttctccacaaagtgctgtatgttactgtgctccggaccgcgtacgaacacca

SEQ ID NO: 187235 - DNA, 74 bp, Homo sapiens
aagtggaagacgactttctccacaaagtgctgtatgttactgtgctccggaccgcgtacgaacaccatccagtc

SEQ ID NO: 187236 - DNA, 74 bp, Homo sapiens
actttctccacaaagtgctgtatgttactgtgctccggaccgcgtacgaacaccatccagtcgtgggtgaagcc

SEQ ID NO: 187237 - DNA, 73 bp, Homo sapiens
aaagtgctgtatgttactgtgctccggaccgcgtacgaacaccatccagtcgtgggtgaagccctccacggtg

SEQ ID NO: 187238 - DNA, 70 bp, Homo sapiens
tatgttactgtgctccggaccgcgtacgaacaccatccagtcgtgggtgaagccctccacggtgggtttt

SEQ ID NO: 187239 - DNA, 70 bp, Homo sapiens
tgtgctccggaccgcgtacgaacaccatccagtcgtgggtgaagccctccacggtgggttttttcctcac

SEQ ID NO: 187240 - DNA, 68 bp, Homo sapiens
accgcgtacgaacaccatccagtcgtgggtgaagccctccacggtgggttttttcctcacctgggcgc

SEQ ID NO: 187241 - DNA, 69 bp, Homo sapiens
aacaccatccagtcgtgggtgaagccctccacggtgggttttttcctcacctgggcgcggtgccccagc

SEQ ID NO: 187242 - DNA, 70 bp, Homo sapiens
agtcgtgggtgaagccctccacggtgggttttttcctcacctgggcgcggtgccccagctccagcttcac

SEQ ID NO: 187243 - DNA, 72 bp, Homo sapiens
aagccctccacggtgggttttttcctcacctgggcgcggtgccccagctccagcttcacctgcacggcacac

SEQ ID NO: 187244 - DNA, 73 bp, Homo sapiens
acggtgggttttttcctcacctgggcgcggtgccccagctccagcttcacctgcacggcacactgcgggcagg

SEQ ID NO: 187245 - DNA, 78 bp, Homo sapiens
ttttcctcacctgggcgcggtgccccagctccagcttcacctgcacggcacactgcgggcagggggaggagagacagc

SEQ ID NO: 187246 - DNA, 78 bp, Homo sapiens
cgcggtgccccagctccagcttcacctgcacggcacactgcgggcagggggaggagagacagccgtgaataacaggaa

SEQ ID NO: 187247 - DNA, 77 bp, Homo sapiens
cagctccagcttcacctgcacggcacactgcgggcagggggaggagagacagccgtgaataacaggaaggcgaggtt

SEQ ID NO: 187248 - DNA, 77 bp, Homo sapiens
ttcacctgcacggcacactgcgggcagggggaggagagacagccgtgaataacaggaaggcgaggtttcggcagtga

SEQ ID NO: 187249 - DNA, 72 bp, Homo sapiens
acggcacactgcgggcagggggaggagagacagccgtgaataacaggaaggcgaggtttcggcagtgaacgt

SEQ ID NO: 187250 - DNA, 73 bp, Homo sapiens
cgggcagggggaggagagacagccgtgaataacaggaaggcgaggtttcggcagtgaacgttgcgcctgacat

SEQ ID NO: 187251 - DNA, 72 bp, Homo sapiens
gggaggagagacagccgtgaataacaggaaggcgaggtttcggcagtgaacgttgcgcctgacatttttttc

SEQ ID NO: 187252 - DNA, 71 bp, Homo sapiens
agacagccgtgaataacaggaaggcgaggtttcggcagtgaacgttgcgcctgacatttttttcctccttc

SEQ ID NO: 187253 - DNA, 70 bp, Homo sapiens
aataacaggaaggcgaggtttcggcagtgaacgttgcgcctgacatttttttcctccttcttgaaacgca

SEQ ID NO: 187254 - DNA, 69 bp, Homo sapiens
cgaggtttcggcagtgaacgttgcgcctgacatttttttcctccttcttgaaacgcacataaaaggaaa

SEQ ID NO: 187255 - DNA, 70 bp, Homo sapiens
aacgttgcgcctgacatttttttcctccttcttgaaacgcacataaaaggaaacggcggtgccctctgca

SEQ ID NO: 187256 - DNA, 69 bp, Homo sapiens
acatttttttcctccttcttgaaacgcacataaaaggaaacggcggtgccctctgcatccacgtttcac

SEQ ID NO: 187257 - DNA, 75 bp, Homo sapiens
ctccttcttgaaacgcacataaaaggaaacggcggtgccctctgcatccacgtttcacgcgcgtgggcgcgcaca

SEQ ID NO: 187258 - DNA, 77 bp, Homo sapiens
tcttgaaacgcacataaaaggaaacggcggtgccctctgcatccacgtttcacgcgcgtgggcgcgcacactccaca

SEQ ID NO: 187259 - DNA, 72 bp, Homo sapiens
ataaaaggaaacggcggtgccctctgcatccacgtttcacgcgcgtgggcgcgcacactccacacccccaaa

SEQ ID NO: 187260 - DNA, 73 bp, Homo sapiens
aaacggcggtgccctctgcatccacgtttcacgcgcgtgggcgcgcacactccacacccccaaatatacccgc

SEQ ID NO: 187261 - DNA, 72 bp, Homo sapiens
ccctctgcatccacgtttcacgcgcgtgggcgcgcacactccacacccccaaatatacccgcccgcccggcc

SEQ ID NO: 187262 - DNA, 69 bp, Homo sapiens
atccacgtttcacgcgcgtgggcgcgcacactccacacccccaaatatacccgcccgcccggcccggct

SEQ ID NO: 187263 - DNA, 69 bp, Homo sapiens
acgcgcgtgggcgcgcacactccacacccccaaatatacccgcccgcccggcccggcttggccccaggc

SEQ ID NO: 187264 - DNA, 66 bp, Homo sapiens
cgcacactccacacccccaaatatacccgcccgcccggcccggcttggccccaggcgccccgggcc

SEQ ID NO: 187265 - DNA, 65 bp, Homo sapiens
acacccccaaatatacccgcccgcccggcccggcttggccccaggcgccccgggccccgcatcta

SEQ ID NO: 187266 - DNA, 67 bp, Homo sapiens
aaatatacccgcccgcccggcccggcttggccccaggcgccccgggccccgcatctacatcggacag

SEQ ID NO: 187267 - DNA, 69 bp, Homo sapiens
cgcccggcccggcttggccccaggcgccccgggccccgcatctacatcggacaggattgtaacggaatg

SEQ ID NO: 187268 - DNA, 69 bp, Homo sapiens
cccggcttggccccaggcgccccgggccccgcatctacatcggacaggattgtaacggaatgttatccc

SEQ ID NO: 187269 - DNA, 69 bp, Homo sapiens
caggcgccccgggccccgcatctacatcggacaggattgtaacggaatgttatccccagtcgggaaggg

SEQ ID NO: 187270 - DNA, 67 bp, Homo sapiens
cccgggccccgcatctacatcggacaggattgtaacggaatgttatccccagtcgggaagggggtcg

SEQ ID NO: 187271 - DNA, 66 bp, Homo sapiens
atctacatcggacaggattgtaacggaatgttatccccagtcgggaagggggtcggggaaaagagg

SEQ ID NO: 187272 - DNA, 65 bp, Homo sapiens
atcggacaggattgtaacggaatgttatccccagtcgggaagggggtcggggaaaagagggagaa

SEQ ID NO: 187273 - DNA, 67 bp, Homo sapiens
attgtaacggaatgttatccccagtcgggaagggggtcggggaaaagagggagaacacactcagcca

SEQ ID NO: 187274 - DNA, 69 bp, Homo sapiens
aatgttatccccagtcgggaagggggtcggggaaaagagggagaacacactcagccacgacaagcacga

SEQ ID NO: 187275 - DNA, 72 bp, Homo sapiens
tcgggaagggggtcggggaaaagagggagaacacactcagccacgacaagcacgacaacaaatgcatcggaa

SEQ ID NO: 187276 - DNA, 76 bp, Homo sapiens
aaaagagggagaacacactcagccacgacaagcacgacaacaaatgcatcggaaacaaatcagaaggcgatgccgg

SEQ ID NO: 187277 - DNA, 76 bp, Homo sapiens
agaacacactcagccacgacaagcacgacaacaaatgcatcggaaacaaatcagaaggcgatgccggggcggtttc

SEQ ID NO: 187278 - DNA, 79 bp, Homo sapiens
tgtcagccccgcacacttcggctcacacacgcgcgccgcggagaacgcaccatcgtagcggccgcggcgctttgcggag

SEQ ID NO: 187279 - DNA, 77 bp, Homo sapiens
acacttcggctcacacacgcgcgccgcggagaacgcaccatcgtagcggccgcggcgctttgcggaggtgcggccgc

SEQ ID NO: 187280 - DNA, 79 bp, Homo sapiens
ctcacacacgcgcgccgcggagaacgcaccatcgtagcggccgcggcgctttgcggaggtgcggccgccgaggctgctc

SEQ ID NO: 187281 - DNA, 76 bp, Homo sapiens
cgccgcggagaacgcaccatcgtagcggccgcggcgctttgcggaggtgcggccgccgaggctgctcgccgcgtcc

SEQ ID NO: 187282 - DNA, 74 bp, Homo sapiens
agaacgcaccatcgtagcggccgcggcgctttgcggaggtgcggccgccgaggctgctcgccgcgtccccggac

SEQ ID NO: 187283 - DNA, 76 bp, Homo sapiens
ccatcgtagcggccgcggcgctttgcggaggtgcggccgccgaggctgctcgccgcgtccccggactgtgcccgca

SEQ ID NO: 187284 - DNA, 75 bp, Homo sapiens
ggccgcggcgctttgcggaggtgcggccgccgaggctgctcgccgcgtccccggactgtgcccgcagctcccggc

SEQ ID NO: 187285 - DNA, 74 bp, Homo sapiens
ctttgcggaggtgcggccgccgaggctgctcgccgcgtccccggactgtgcccgcagctcccggcggcggcggc

SEQ ID NO: 187286 - DNA, 77 bp, Homo sapiens
gccgccgaggctgctcgccgcgtccccggactgtgcccgcagctcccggcggcggcggctgaaatatggctgagtta

SEQ ID NO: 187287 - DNA, 76 bp, Homo sapiens
aggctgctcgccgcgtccccggactgtgcccgcagctcccggcggcggcggctgaaatatggctgagttattattc

SEQ ID NO: 187288 - DNA, 74 bp, Homo sapiens
cgtccccggactgtgcccgcagctcccggcggcggcggctgaaatatggctgagttattattcgcctccttcca

SEQ ID NO: 187289 - DNA, 76 bp, Homo sapiens
actgtgcccgcagctcccggcggcggcggctgaaatatggctgagttattattcgcctccttccaccgtgtgtgtg

SEQ ID NO: 187290 - DNA, 70 bp, Homo sapiens
ttattattatttttgcgcgtacttaccgagctagccatgcctgggggcccggaggtttgctggggtgttg

SEQ ID NO: 187291 - DNA, 71 bp, Homo sapiens
ttatttttgcgcgtacttaccgagctagccatgcctgggggcccggaggtttgctggggtgttgtgtggta

SEQ ID NO: 187292 - DNA, 68 bp, Homo sapiens
cgcgtacttaccgagctagccatgcctgggggcccggaggtttgctggggtgttgtgtggtacccccc

SEQ ID NO: 187293 - DNA, 68 bp, Homo sapiens
ccgagctagccatgcctgggggcccggaggtttgctggggtgttgtgtggtacccccccctcctccgc

SEQ ID NO: 187294 - DNA, 63 bp, Homo sapiens
cctgggggcccggaggtttgctggggtgttgtgtggtacccccccctcctccgccccccctca

SEQ ID NO: 187295 - DNA, 69 bp, Homo sapiens
ggaggtttgctggggtgttgtgtggtacccccccctcctccgccccccctcagctgtaattcatgaaga

SEQ ID NO: 187296 - DNA, 74 bp, Homo sapiens
tggggtgttgtgtggtacccccccctcctccgccccccctcagctgtaattcatgaagaggctgctatgaatga

SEQ ID NO: 187297 - DNA, 77 bp, Homo sapiens
tgttgtgtggtacccccccctcctccgccccccctcagctgtaattcatgaagaggctgctatgaatgagagcgcgc

SEQ ID NO: 187298 - DNA, 76 bp, Homo sapiens
ccccctcctccgccccccctcagctgtaattcatgaagaggctgctatgaatgagagcgcgcccaggagcggaggg

SEQ ID NO: 187299 - DNA, 80 bp, Homo sapiens
cgccccccctcagctgtaattcatgaagaggctgctatgaatgagagcgcgcccaggagcggagggtagatggcggacat

SEQ ID NO: 187300 - DNA, 83 bp, Homo sapiens
tcagctgtaattcatgaagaggctgctatgaatgagagcgcgcccaggagcggagggtagatggcggacattctctgcctttt

SEQ ID NO: 187301 - DNA, 80 bp, Homo sapiens
gtaattcatgaagaggctgctatgaatgagagcgcgcccaggagcggagggtagatggcggacattctctgcctttttcc

SEQ ID NO: 187302 - DNA, 76 bp, Homo sapiens
aagaggctgctatgaatgagagcgcgcccaggagcggagggtagatggcggacattctctgcctttttccccccgc

SEQ ID NO: 187303 - DNA, 78 bp, Homo sapiens
tatgaatgagagcgcgcccaggagcggagggtagatggcggacattctctgcctttttccccccgcgctcgcttgctc

SEQ ID NO: 187304 - DNA, 76 bp, Homo sapiens
gcccaggagcggagggtagatggcggacattctctgcctttttccccccgcgctcgcttgctcgctcgctcgctta

SEQ ID NO: 187305 - DNA, 75 bp, Homo sapiens
ggagggtagatggcggacattctctgcctttttccccccgcgctcgcttgctcgctcgctcgcttattaaactca

SEQ ID NO: 187306 - DNA, 76 bp, Homo sapiens
tagatggcggacattctctgcctttttccccccgcgctcgcttgctcgctcgctcgcttattaaactcagccccaa

SEQ ID NO: 187307 - DNA, 72 bp, Homo sapiens
attctctgcctttttccccccgcgctcgcttgctcgctcgctcgcttattaaactcagccccaaaagcaaaa

SEQ ID NO: 187308 - DNA, 76 bp, Homo sapiens
cctttttccccccgcgctcgcttgctcgctcgctcgcttattaaactcagccccaaaagcaaaagcagcagcagca

SEQ ID NO: 187309 - DNA, 84 bp, Homo sapiens
agcagcagcagcagctccagggtaaagaagatgattgcggagcatgcgccgtggcgcctgacacccgggctccgagcctcacag

SEQ ID NO: 187310 - DNA, 79 bp, Homo sapiens
agcagctccagggtaaagaagatgattgcggagcatgcgccgtggcgcctgacacccgggctccgagcctcacagggcg

SEQ ID NO: 187311 - DNA, 71 bp, Homo sapiens
ggggacttagggaacaaaatacttagcggtggccagaggaagtctgctttttctccctgcatggtcctggc

SEQ ID NO: 187312 - DNA, 71 bp, Homo sapiens
ttagggaacaaaatacttagcggtggccagaggaagtctgctttttctccctgcatggtcctggccttccc

SEQ ID NO: 187313 - DNA, 72 bp, Homo sapiens
aaaatacttagcggtggccagaggaagtctgctttttctccctgcatggtcctggccttccccaagctgggc

SEQ ID NO: 187314 - DNA, 69 bp, Homo sapiens
gcctcagtttcccacaagggaagttgggctaggtctttttccaggctcttctgattcccgcccctccga

SEQ ID NO: 187315 - DNA, 67 bp, Homo sapiens
aagggaagttgggctaggtctttttccaggctcttctgattcccgcccctccgagtgttcttgtttc

SEQ ID NO: 187316 - DNA, 69 bp, Homo sapiens
taggtctttttccaggctcttctgattcccgcccctccgagtgttcttgtttcccacttggtccaaata

SEQ ID NO: 187317 - DNA, 69 bp, Homo sapiens
tttttccaggctcttctgattcccgcccctccgagtgttcttgtttcccacttggtccaaatattattg

SEQ ID NO: 187318 - DNA, 71 bp, Homo sapiens
ctcttctgattcccgcccctccgagtgttcttgtttcccacttggtccaaatattattgggcctcaggtgc

SEQ ID NO: 187319 - DNA, 68 bp, Homo sapiens
tcccgcccctccgagtgttcttgtttcccacttggtccaaatattattgggcctcaggtgcccacccc

SEQ ID NO: 187320 - DNA, 72 bp, Homo sapiens
agtgttcttgtttcccacttggtccaaatattattgggcctcaggtgcccacccccatctgcttgcttggaa

SEQ ID NO: 187321 - DNA, 72 bp, Homo sapiens
ttgtttcccacttggtccaaatattattgggcctcaggtgcccacccccatctgcttgcttggaagtggagg

SEQ ID NO: 187322 - DNA, 76 bp, Homo sapiens
ttggtccaaatattattgggcctcaggtgcccacccccatctgcttgcttggaagtggagggcctgccccagatga

SEQ ID NO: 187323 - DNA, 79 bp, Homo sapiens
atattattgggcctcaggtgcccacccccatctgcttgcttggaagtggagggcctgccccagatgatcctctcacagc

SEQ ID NO: 187324 - DNA, 76 bp, Homo sapiens
aggtgcccacccccatctgcttgcttggaagtggagggcctgccccagatgatcctctcacagccccggctccctg

SEQ ID NO: 187325 - DNA, 77 bp, Homo sapiens
cccacccccatctgcttgcttggaagtggagggcctgccccagatgatcctctcacagccccggctccctggagaga

SEQ ID NO: 187326 - DNA, 77 bp, Homo sapiens
ccccatctgcttgcttggaagtggagggcctgccccagatgatcctctcacagccccggctccctggagagaggagg

SEQ ID NO: 187327 - DNA, 77 bp, Homo sapiens
cccatctgcttgcttggaagtggagggcctgccccagatgatcctctcacagccccggctccctggagagaggaggg

SEQ ID NO: 187328 - DNA, 77 bp, Homo sapiens
tctgcttgcttggaagtggagggcctgccccagatgatcctctcacagccccggctccctggagagaggaggggaag

SEQ ID NO: 187329 - DNA, 75 bp, Homo sapiens
ttgcttggaagtggagggcctgccccagatgatcctctcacagccccggctccctggagagaggaggggaaggaa

SEQ ID NO: 187330 - DNA, 75 bp, Homo sapiens
gtggagggcctgccccagatgatcctctcacagccccggctccctggagagaggaggggaaggaaagagctgtgg

SEQ ID NO: 187331 - DNA, 77 bp, Homo sapiens
cagatgatcctctcacagccccggctccctggagagaggaggggaaggaaagagctgtggggtggccctacagatga

SEQ ID NO: 187332 - DNA, 73 bp, Homo sapiens
atcctctcacagccccggctccctggagagaggaggggaaggaaagagctgtggggtggccctacagatgacc

SEQ ID NO: 187333 - DNA, 78 bp, Homo sapiens
tggagagaggaggggaaggaaagagctgtggggtggccctacagatgaccctgctgcaccaaggcagccaaggctcaa

SEQ ID NO: 187334 - DNA, 77 bp, Homo sapiens
aggggaaggaaagagctgtggggtggccctacagatgaccctgctgcaccaaggcagccaaggctcaaagaggtgca

SEQ ID NO: 187335 - DNA, 76 bp, Homo sapiens
aaagagctgtggggtggccctacagatgaccctgctgcaccaaggcagccaaggctcaaagaggtgcagggttttg

SEQ ID NO: 187336 - DNA, 78 bp, Homo sapiens
ggtggccctacagatgaccctgctgcaccaaggcagccaaggctcaaagaggtgcagggttttgtctgaggtcccaca

SEQ ID NO: 187337 - DNA, 80 bp, Homo sapiens
ctacagatgaccctgctgcaccaaggcagccaaggctcaaagaggtgcagggttttgtctgaggtcccacagcaaagaca

SEQ ID NO: 187338 - DNA, 79 bp, Homo sapiens
accctgctgcaccaaggcagccaaggctcaaagaggtgcagggttttgtctgaggtcccacagcaaagacatgtggcca

SEQ ID NO: 187339 - DNA, 76 bp, Homo sapiens
aaggctcaaagaggtgcagggttttgtctgaggtcccacagcaaagacatgtggccaggaccaggacaagacctgc

SEQ ID NO: 187340 - DNA, 75 bp, Homo sapiens
aaagaggtgcagggttttgtctgaggtcccacagcaaagacatgtggccaggaccaggacaagacctgcctggcc

SEQ ID NO: 187341 - DNA, 77 bp, Homo sapiens
agggttttgtctgaggtcccacagcaaagacatgtggccaggaccaggacaagacctgcctggcctgctgatcccaa

SEQ ID NO: 187342 - DNA, 81 bp, Homo sapiens
aggtcccacagcaaagacatgtggccaggaccaggacaagacctgcctggcctgctgatcccaagtccagtctctctctgc

SEQ ID NO: 187343 - DNA, 82 bp, Homo sapiens
acagcaaagacatgtggccaggaccaggacaagacctgcctggcctgctgatcccaagtccagtctctctctgccctggctc

SEQ ID NO: 187344 - DNA, 83 bp, Homo sapiens
atgtggccaggaccaggacaagacctgcctggcctgctgatcccaagtccagtctctctctgccctggctctctgccatcctg

SEQ ID NO: 187345 - DNA, 85 bp, Homo sapiens
aggacaagacctgcctggcctgctgatcccaagtccagtctctctctgccctggctctctgccatcctggtgacatacagatatg

SEQ ID NO: 187346 - DNA, 85 bp, Homo sapiens
tgctgatcccaagtccagtctctctctgccctggctctctgccatcctggtgacatacagatatgggggacattgtcacctaaga

SEQ ID NO: 187347 - DNA, 81 bp, Homo sapiens
atcccaagtccagtctctctctgccctggctctctgccatcctggtgacatacagatatgggggacattgtcacctaagaa

SEQ ID NO: 187348 - DNA, 80 bp, Homo sapiens
agtctctctctgccctggctctctgccatcctggtgacatacagatatgggggacattgtcacctaagaaggccaagccc

SEQ ID NO: 187349 - DNA, 82 bp, Homo sapiens
ctggctctctgccatcctggtgacatacagatatgggggacattgtcacctaagaaggccaagccccctctcatcactgtca

SEQ ID NO: 187350 - DNA, 83 bp, Homo sapiens
tctctgccatcctggtgacatacagatatgggggacattgtcacctaagaaggccaagccccctctcatcactgtcattcagc

SEQ ID NO: 187351 - DNA, 79 bp, Homo sapiens
tgacatacagatatgggggacattgtcacctaagaaggccaagccccctctcatcactgtcattcagcccaggtttgga

SEQ ID NO: 187352 - DNA, 77 bp, Homo sapiens
tacagatatgggggacattgtcacctaagaaggccaagccccctctcatcactgtcattcagcccaggtttggacaa

SEQ ID NO: 187353 - DNA, 76 bp, Homo sapiens
taagaaggccaagccccctctcatcactgtcattcagcccaggtttggacaagggctctacctggctgttctgact

SEQ ID NO: 187354 - DNA, 78 bp, Homo sapiens
actgtcattcagcccaggtttggacaagggctctacctggctgttctgacttgacaagagagactatgcaaggaatta

SEQ ID NO: 187355 - DNA, 74 bp, Homo sapiens
agcccaggtttggacaagggctctacctggctgttctgacttgacaagagagactatgcaaggaattaaggccc

SEQ ID NO: 187356 - DNA, 76 bp, Homo sapiens
acaagggctctacctggctgttctgacttgacaagagagactatgcaaggaattaaggccccaggtaaagagatga

SEQ ID NO: 187357 - DNA, 78 bp, Homo sapiens
ctctacctggctgttctgacttgacaagagagactatgcaaggaattaaggccccaggtaaagagatgatggcacctg

SEQ ID NO: 187358 - DNA, 79 bp, Homo sapiens
ttctgacttgacaagagagactatgcaaggaattaaggccccaggtaaagagatgatggcacctggcacccccatgtca

SEQ ID NO: 187359 - DNA, 78 bp, Homo sapiens
ttgacaagagagactatgcaaggaattaaggccccaggtaaagagatgatggcacctggcacccccatgtcaaaatca

SEQ ID NO: 187360 - DNA, 75 bp, Homo sapiens
agactatgcaaggaattaaggccccaggtaaagagatgatggcacctggcacccccatgtcaaaatcactcccag

SEQ ID NO: 187361 - DNA, 76 bp, Homo sapiens
aggaattaaggccccaggtaaagagatgatggcacctggcacccccatgtcaaaatcactcccaggtcacacagca

SEQ ID NO: 187362 - DNA, 82 bp, Homo sapiens
aggtaaagagatgatggcacctggcacccccatgtcaaaatcactcccaggtcacacagcagctcctcactgctctcctgcc

SEQ ID NO: 187363 - DNA, 82 bp, Homo sapiens
aagagatgatggcacctggcacccccatgtcaaaatcactcccaggtcacacagcagctcctcactgctctcctgcccctcc

SEQ ID NO: 187364 - DNA, 79 bp, Homo sapiens
acctggcacccccatgtcaaaatcactcccaggtcacacagcagctcctcactgctctcctgcccctccctcaggaggc

SEQ ID NO: 187365 - DNA, 80 bp, Homo sapiens
cccatgtcaaaatcactcccaggtcacacagcagctcctcactgctctcctgcccctccctcaggaggccttcctctgtc

SEQ ID NO: 187366 - DNA, 79 bp, Homo sapiens
aggtcacacagcagctcctcactgctctcctgcccctccctcaggaggccttcctctgtcccccagatcttccctgctg

SEQ ID NO: 187367 - DNA, 76 bp, Homo sapiens
tgctctcctgcccctccctcaggaggccttcctctgtcccccagatcttccctgctggcttcctctgaccacccta

SEQ ID NO: 187368 - DNA, 73 bp, Homo sapiens
cccctccctcaggaggccttcctctgtcccccagatcttccctgctggcttcctctgaccaccctagcccaca

SEQ ID NO: 187369 - DNA, 75 bp, Homo sapiens
aggaggccttcctctgtcccccagatcttccctgctggcttcctctgaccaccctagcccacagtgagttctcca

SEQ ID NO: 187370 - DNA, 76 bp, Homo sapiens
ttcctctgtcccccagatcttccctgctggcttcctctgaccaccctagcccacagtgagttctccaagctccctc

SEQ ID NO: 187371 - DNA, 72 bp, Homo sapiens
ttcctctgaccaccctagcccacagtgagttctccaagctccctctccaagttcccgtggcccttggccgtg

SEQ ID NO: 187372 - DNA, 71 bp, Homo sapiens
accctagcccacagtgagttctccaagctccctctccaagttcccgtggcccttggccgtggccctgacca

SEQ ID NO: 187373 - DNA, 73 bp, Homo sapiens
agcccacagtgagttctccaagctccctctccaagttcccgtggcccttggccgtggccctgaccatcgcggc

SEQ ID NO: 187374 - DNA, 74 bp, Homo sapiens
cctctccaagttcccgtggcccttggccgtggccctgaccatcgcggccccttagatcaacaggtgggcatgca

SEQ ID NO: 187375 - DNA, 75 bp, Homo sapiens
ttcccgtggcccttggccgtggccctgaccatcgcggccccttagatcaacaggtgggcatgcattgtgcgaaat

SEQ ID NO: 187376 - DNA, 78 bp, Homo sapiens
gtggcccttggccgtggccctgaccatcgcggccccttagatcaacaggtgggcatgcattgtgcgaaattaggcatc

SEQ ID NO: 187377 - DNA, 78 bp, Homo sapiens
ccgtggccctgaccatcgcggccccttagatcaacaggtgggcatgcattgtgcgaaattaggcatctgccccagccc

SEQ ID NO: 187378 - DNA, 83 bp, Homo sapiens
tgaccatcgcggccccttagatcaacaggtgggcatgcattgtgcgaaattaggcatctgccccagccccagcacctccatgc

SEQ ID NO: 187379 - DNA, 84 bp, Homo sapiens
ccttagatcaacaggtgggcatgcattgtgcgaaattaggcatctgccccagccccagcacctccatgcccagctgcctgctaa

SEQ ID NO: 187380 - DNA, 83 bp, Homo sapiens
gggcatgcattgtgcgaaattaggcatctgccccagccccagcacctccatgcccagctgcctgctaagctccacgaggacgg

SEQ ID NO: 187381 - DNA, 79 bp, Homo sapiens
tgtgcgaaattaggcatctgccccagccccagcacctccatgcccagctgcctgctaagctccacgaggacggggaggg

SEQ ID NO: 187382 - DNA, 77 bp, Homo sapiens
atctgccccagccccagcacctccatgcccagctgcctgctaagctccacgaggacggggagggtctgccccgagag

SEQ ID NO: 187383 - DNA, 79 bp, Homo sapiens
agccccagcacctccatgcccagctgcctgctaagctccacgaggacggggagggtctgccccgagaggatgctcagaa

SEQ ID NO: 187384 - DNA, 80 bp, Homo sapiens
ctccatgcccagctgcctgctaagctccacgaggacggggagggtctgccccgagaggatgctcagaagttctggctgta

SEQ ID NO: 187385 - DNA, 77 bp, Homo sapiens
agctgcctgctaagctccacgaggacggggagggtctgccccgagaggatgctcagaagttctggctgtaggctgtt

SEQ ID NO: 187386 - DNA, 75 bp, Homo sapiens
agggtctgccccgagaggatgctcagaagttctggctgtaggctgtttgtgatctgggtgtgggggaaagtcctc

SEQ ID NO: 187387 - DNA, 76 bp, Homo sapiens
ccgagaggatgctcagaagttctggctgtaggctgtttgtgatctgggtgtgggggaaagtcctctgtgttaatta

SEQ ID NO: 187388 - DNA, 74 bp, Homo sapiens
aagttctggctgtaggctgtttgtgatctgggtgtgggggaaagtcctctgtgttaattattgtctacatcacc

SEQ ID NO: 187389 - DNA, 74 bp, Homo sapiens
tgtaggctgtttgtgatctgggtgtgggggaaagtcctctgtgttaattattgtctacatcaccggaacaggct

SEQ ID NO: 187390 - DNA, 74 bp, Homo sapiens
tgtgggggaaagtcctctgtgttaattattgtctacatcaccggaacaggcttgcccagaatccacttgctggg

SEQ ID NO: 187391 - DNA, 74 bp, Homo sapiens
aaagtcctctgtgttaattattgtctacatcaccggaacaggcttgcccagaatccacttgctggggtcctgga

SEQ ID NO: 187392 - DNA, 74 bp, Homo sapiens
tgttaattattgtctacatcaccggaacaggcttgcccagaatccacttgctggggtcctggagggtgggtgaa

SEQ ID NO: 187393 - DNA, 75 bp, Homo sapiens
attgtctacatcaccggaacaggcttgcccagaatccacttgctggggtcctggagggtgggtgaagtgtccatg

SEQ ID NO: 187394 - DNA, 74 bp, Homo sapiens
cggaacaggcttgcccagaatccacttgctggggtcctggagggtgggtgaagtgtccatggcaggtgtccgaa

SEQ ID NO: 187395 - DNA, 75 bp, Homo sapiens
ttgcccagaatccacttgctggggtcctggagggtgggtgaagtgtccatggcaggtgtccgaagtgacctgaac

SEQ ID NO: 187396 - DNA, 73 bp, Homo sapiens
agaatccacttgctggggtcctggagggtgggtgaagtgtccatggcaggtgtccgaagtgacctgaacctgg

SEQ ID NO: 187397 - DNA, 75 bp, Homo sapiens
gggtcctggagggtgggtgaagtgtccatggcaggtgtccgaagtgacctgaacctgggcatgcctcagaaaaca

SEQ ID NO: 187398 - DNA, 74 bp, Homo sapiens
agggtgggtgaagtgtccatggcaggtgtccgaagtgacctgaacctgggcatgcctcagaaaacaccgttcca

SEQ ID NO: 187399 - DNA, 76 bp, Homo sapiens
ggtgaagtgtccatggcaggtgtccgaagtgacctgaacctgggcatgcctcagaaaacaccgttccaggggctga

SEQ ID NO: 187400 - DNA, 75 bp, Homo sapiens
tgtccgaagtgacctgaacctgggcatgcctcagaaaacaccgttccaggggctgagggagtagggagagcctca

SEQ ID NO: 187401 - DNA, 72 bp, Homo sapiens
acctgaacctgggcatgcctcagaaaacaccgttccaggggctgagggagtagggagagcctcaggcccctc

SEQ ID NO: 187402 - DNA, 78 bp, Homo sapiens
gttccaggggctgagggagtagggagagcctcaggcccctccttggctgggatcagatgatctcctgcgtcccatcca

SEQ ID NO: 187403 - DNA, 79 bp, Homo sapiens
agggagtagggagagcctcaggcccctccttggctgggatcagatgatctcctgcgtcccatccagccctcacattcaa

SEQ ID NO: 187404 - DNA, 82 bp, Homo sapiens
gagagcctcaggcccctccttggctgggatcagatgatctcctgcgtcccatccagccctcacattcaaagtccacaatgta

SEQ ID NO: 187405 - DNA, 80 bp, Homo sapiens
aggcccctccttggctgggatcagatgatctcctgcgtcccatccagccctcacattcaaagtccacaatgtaatcaata

SEQ ID NO: 187406 - DNA, 83 bp, Homo sapiens
ttggctgggatcagatgatctcctgcgtcccatccagccctcacattcaaagtccacaatgtaatcaatacctcggatgacat

SEQ ID NO: 187407 - DNA, 83 bp, Homo sapiens
atcagatgatctcctgcgtcccatccagccctcacattcaaagtccacaatgtaatcaatacctcggatgacattctgcttcg

SEQ ID NO: 187408 - DNA, 79 bp, Homo sapiens
atctcctgcgtcccatccagccctcacattcaaagtccacaatgtaatcaatacctcggatgacattctgcttcggaaa

SEQ ID NO: 187409 - DNA, 78 bp, Homo sapiens
atccagccctcacattcaaagtccacaatgtaatcaatacctcggatgacattctgcttcggaaaagtagctgaggaa

SEQ ID NO: 187410 - DNA, 80 bp, Homo sapiens
tcacattcaaagtccacaatgtaatcaatacctcggatgacattctgcttcggaaaagtagctgaggaatctcccagaca

SEQ ID NO: 187411 - DNA, 75 bp, Homo sapiens
aaagtccacaatgtaatcaatacctcggatgacattctgcttcggaaaagtagctgaggaatctcccagacagtt

SEQ ID NO: 187412 - DNA, 75 bp, Homo sapiens
aatgtaatcaatacctcggatgacattctgcttcggaaaagtagctgaggaatctcccagacagttttctttgag

SEQ ID NO: 187413 - DNA, 74 bp, Homo sapiens
aatacctcggatgacattctgcttcggaaaagtagctgaggaatctcccagacagttttctttgagttctttga

SEQ ID NO: 187414 - DNA, 75 bp, Homo sapiens
atgacattctgcttcggaaaagtagctgaggaatctcccagacagttttctttgagttctttgatctggaaaaga

SEQ ID NO: 187415 - DNA, 75 bp, Homo sapiens
cttcggaaaagtagctgaggaatctcccagacagttttctttgagttctttgatctggaaaagagctgctgatac

SEQ ID NO: 187416 - DNA, 79 bp, Homo sapiens
ctgaggaatctcccagacagttttctttgagttctttgatctggaaaagagctgctgatactgcatcggtcccagagaa

SEQ ID NO: 187417 - DNA, 77 bp, Homo sapiens
acagttttctttgagttctttgatctggaaaagagctgctgatactgcatcggtcccagagaaatggaggcaggaaa

SEQ ID NO: 187418 - DNA, 74 bp, Homo sapiens
tcggtcccagagaaatggaggcaggaaaccaggacatctccccaaagtgtgctcctcttggagaggggcctcag

SEQ ID NO: 187419 - DNA, 75 bp, Homo sapiens
aggaaaccaggacatctccccaaagtgtgctcctcttggagaggggcctcagggggagcctgcagcacaaccagc

SEQ ID NO: 187420 - DNA, 77 bp, Homo sapiens
aggacatctccccaaagtgtgctcctcttggagaggggcctcagggggagcctgcagcacaaccagcccagtgagac

SEQ ID NO: 187421 - DNA, 77 bp, Homo sapiens
aagtgtgctcctcttggagaggggcctcagggggagcctgcagcacaaccagcccagtgagactcctcgtaaagata

SEQ ID NO: 187422 - DNA, 75 bp, Homo sapiens
ctcttggagaggggcctcagggggagcctgcagcacaaccagcccagtgagactcctcgtaaagatactaaagaa

SEQ ID NO: 187423 - DNA, 77 bp, Homo sapiens
gggcctcagggggagcctgcagcacaaccagcccagtgagactcctcgtaaagatactaaagaaggagggatgagca

SEQ ID NO: 187424 - DNA, 77 bp, Homo sapiens
gggagcctgcagcacaaccagcccagtgagactcctcgtaaagatactaaagaaggagggatgagcaggaggctggg

SEQ ID NO: 187425 - DNA, 74 bp, Homo sapiens
agcacaaccagcccagtgagactcctcgtaaagatactaaagaaggagggatgagcaggaggctggggcccaag

SEQ ID NO: 187426 - DNA, 73 bp, Homo sapiens
aaccagcccagtgagactcctcgtaaagatactaaagaaggagggatgagcaggaggctggggcccaagggca

SEQ ID NO: 187427 - DNA, 79 bp, Homo sapiens
gtaaagatactaaagaaggagggatgagcaggaggctggggcccaagggcagcatcctccatcttgaggacagctctga

SEQ ID NO: 187428 - DNA, 81 bp, Homo sapiens
actaaagaaggagggatgagcaggaggctggggcccaagggcagcatcctccatcttgaggacagctctgagcgcacctgc

SEQ ID NO: 187429 - DNA, 82 bp, Homo sapiens
agggatgagcaggaggctggggcccaagggcagcatcctccatcttgaggacagctctgagcgcacctgccagggtcaccca

SEQ ID NO: 187430 - DNA, 81 bp, Homo sapiens
aggaggctggggcccaagggcagcatcctccatcttgaggacagctctgagcgcacctgccagggtcacccagggcagaga

SEQ ID NO: 187431 - DNA, 86 bp, Homo sapiens
caagggcagcatcctccatcttgaggacagctctgagcgcacctgccagggtcacccagggcagagaggatgctctgccataggtc

SEQ ID NO: 187432 - DNA, 84 bp, Homo sapiens
atcttgaggacagctctgagcgcacctgccagggtcacccagggcagagaggatgctctgccataggtctaagatgtccggtga

SEQ ID NO: 187433 - DNA, 85 bp, Homo sapiens
acagctctgagcgcacctgccagggtcacccagggcagagaggatgctctgccataggtctaagatgtccggtgatgcaccaaga

SEQ ID NO: 187434 - DNA, 85 bp, Homo sapiens
agggtcacccagggcagagaggatgctctgccataggtctaagatgtccggtgatgcaccaagagtgcgagatgcatcatgggtg

SEQ ID NO: 187435 - DNA, 90 bp, Homo sapiens
gcagagaggatgctctgccataggtctaagatgtccggtgatgcaccaagagtgcgagatgcatcatgggtggagcagtcttctcagtcg

SEQ ID NO: 187436 - DNA, 88 bp, Homo sapiens
tgctctgccataggtctaagatgtccggtgatgcaccaagagtgcgagatgcatcatgggtggagcagtcttctcagtcggaccttca

SEQ ID NO: 187437 - DNA, 83 bp, Homo sapiens
ataggtctaagatgtccggtgatgcaccaagagtgcgagatgcatcatgggtggagcagtcttctcagtcggaccttcaggcc

SEQ ID NO: 187438 - DNA, 84 bp, Homo sapiens
taagatgtccggtgatgcaccaagagtgcgagatgcatcatgggtggagcagtcttctcagtcggaccttcaggcccacagaaa

SEQ ID NO: 187439 - DNA, 83 bp, Homo sapiens
cggtgatgcaccaagagtgcgagatgcatcatgggtggagcagtcttctcagtcggaccttcaggcccacagaaaagcaagaa

SEQ ID NO: 187440 - DNA, 79 bp, Homo sapiens
aagagtgcgagatgcatcatgggtggagcagtcttctcagtcggaccttcaggcccacagaaaagcaagaaggtattta

SEQ ID NO: 187441 - DNA, 79 bp, Homo sapiens
agatgcatcatgggtggagcagtcttctcagtcggaccttcaggcccacagaaaagcaagaaggtatttacatgggtgc

SEQ ID NO: 187442 - DNA, 79 bp, Homo sapiens
tggagcagtcttctcagtcggaccttcaggcccacagaaaagcaagaaggtatttacatgggtgctgctgaagcaacaa

SEQ ID NO: 187443 - DNA, 75 bp, Homo sapiens
agtcttctcagtcggaccttcaggcccacagaaaagcaagaaggtatttacatgggtgctgctgaagcaacaaaa

SEQ ID NO: 187444 - DNA, 76 bp, Homo sapiens
agtcggaccttcaggcccacagaaaagcaagaaggtatttacatgggtgctgctgaagcaacaaaagcaagctctc

SEQ ID NO: 187445 - DNA, 74 bp, Homo sapiens
aaagcaagaaggtatttacatgggtgctgctgaagcaacaaaagcaagctctccttcccaggctggggtggtta

SEQ ID NO: 187446 - DNA, 78 bp, Homo sapiens
aggtatttacatgggtgctgctgaagcaacaaaagcaagctctccttcccaggctggggtggttatgatggatggata

SEQ ID NO: 187447 - DNA, 82 bp, Homo sapiens
atgggtgctgctgaagcaacaaaagcaagctctccttcccaggctggggtggttatgatggatggatagtcagacagctgga

SEQ ID NO: 187448 - DNA, 79 bp, Homo sapiens
aagcaacaaaagcaagctctccttcccaggctggggtggttatgatggatggatagtcagacagctggaggacaggcag

SEQ ID NO: 187449 - DNA, 79 bp, Homo sapiens
acaaaagcaagctctccttcccaggctggggtggttatgatggatggatagtcagacagctggaggacaggcaggctgg

SEQ ID NO: 187450 - DNA, 81 bp, Homo sapiens
ctggggtggttatgatggatggatagtcagacagctggaggacaggcaggctgggctggggctgcggttatttgcaggaca

SEQ ID NO: 187451 - DNA, 82 bp, Homo sapiens
tatgatggatggatagtcagacagctggaggacaggcaggctgggctggggctgcggttatttgcaggacagtctattggtt

SEQ ID NO: 187452 - DNA, 82 bp, Homo sapiens
atggatagtcagacagctggaggacaggcaggctgggctggggctgcggttatttgcaggacagtctattggtttgcagaga

SEQ ID NO: 187453 - DNA, 79 bp, Homo sapiens
agacagctggaggacaggcaggctgggctggggctgcggttatttgcaggacagtctattggtttgcagagacccagtg

SEQ ID NO: 187454 - DNA, 79 bp, Homo sapiens
gacaggcaggctgggctggggctgcggttatttgcaggacagtctattggtttgcagagacccagtggccatcgggaga

SEQ ID NO: 187455 - DNA, 79 bp, Homo sapiens
ctgggctggggctgcggttatttgcaggacagtctattggtttgcagagacccagtggccatcgggagaagctcataga

SEQ ID NO: 187456 - DNA, 79 bp, Homo sapiens
gctgcggttatttgcaggacagtctattggtttgcagagacccagtggccatcgggagaagctcatagattggctttta

SEQ ID NO: 187457 - DNA, 78 bp, Homo sapiens
ttatttgcaggacagtctattggtttgcagagacccagtggccatcgggagaagctcatagattggcttttagaaata

SEQ ID NO: 187458 - DNA, 79 bp, Homo sapiens
agtctattggtttgcagagacccagtggccatcgggagaagctcatagattggcttttagaaatagacaagcatccaga

SEQ ID NO: 187459 - DNA, 78 bp, Homo sapiens
attggtttgcagagacccagtggccatcgggagaagctcatagattggcttttagaaatagacaagcatccagaagtc

SEQ ID NO: 187460 - DNA, 76 bp, Homo sapiens
agagacccagtggccatcgggagaagctcatagattggcttttagaaatagacaagcatccagaagtccaacggcc

SEQ ID NO: 187461 - DNA, 73 bp, Homo sapiens
ccatcgggagaagctcatagattggcttttagaaatagacaagcatccagaagtccaacggccccaccaaagg

SEQ ID NO: 187462 - DNA, 73 bp, Homo sapiens
agaagctcatagattggcttttagaaatagacaagcatccagaagtccaacggccccaccaaagggccccaga

SEQ ID NO: 187463 - DNA, 71 bp, Homo sapiens
tagattggcttttagaaatagacaagcatccagaagtccaacggccccaccaaagggccccagagtccctg

SEQ ID NO: 187464 - DNA, 71 bp, Homo sapiens
tttagaaatagacaagcatccagaagtccaacggccccaccaaagggccccagagtccctggaggaagaga

SEQ ID NO: 187465 - DNA, 68 bp, Homo sapiens
agaagtccaacggccccaccaaagggccccagagtccctggaggaagagaggaagaggggagcttcag

SEQ ID NO: 187466 - DNA, 68 bp, Homo sapiens
acggccccaccaaagggccccagagtccctggaggaagagaggaagaggggagcttcaggcaagtggg

SEQ ID NO: 187467 - DNA, 70 bp, Homo sapiens
aaagggccccagagtccctggaggaagagaggaagaggggagcttcaggcaagtgggggatgctggggga

SEQ ID NO: 187468 - DNA, 75 bp, Homo sapiens
tccctggaggaagagaggaagaggggagcttcaggcaagtgggggatgctgggggacggtctcatgggctctctg

SEQ ID NO: 187469 - DNA, 76 bp, Homo sapiens
aagagaggaagaggggagcttcaggcaagtgggggatgctgggggacggtctcatgggctctctggctatcttcag

SEQ ID NO: 187470 - DNA, 75 bp, Homo sapiens
aggaagaggggagcttcaggcaagtgggggatgctgggggacggtctcatgggctctctggctatcttcaggagg

SEQ ID NO: 187471 - DNA, 79 bp, Homo sapiens
agcttcaggcaagtgggggatgctgggggacggtctcatgggctctctggctatcttcaggagggctgggtggctgtca

SEQ ID NO: 187472 - DNA, 77 bp, Homo sapiens
agtgggggatgctgggggacggtctcatgggctctctggctatcttcaggagggctgggtggctgtcaccctcaata

SEQ ID NO: 187473 - DNA, 79 bp, Homo sapiens
tgggggacggtctcatgggctctctggctatcttcaggagggctgggtggctgtcaccctcaataggtgccatcagtgt

SEQ ID NO: 187474 - DNA, 80 bp, Homo sapiens
acggtctcatgggctctctggctatcttcaggagggctgggtggctgtcaccctcaataggtgccatcagtgtttggtgc

SEQ ID NO: 187475 - DNA, 80 bp, Homo sapiens
tctctggctatcttcaggagggctgggtggctgtcaccctcaataggtgccatcagtgtttggtgcccgcctggctccaa

SEQ ID NO: 187476 - DNA, 78 bp, Homo sapiens
tatcttcaggagggctgggtggctgtcaccctcaataggtgccatcagtgtttggtgcccgcctggctccaagggtca

SEQ ID NO: 187477 - DNA, 78 bp, Homo sapiens
gctgggtggctgtcaccctcaataggtgccatcagtgtttggtgcccgcctggctccaagggtcagtgacggtcatag

SEQ ID NO: 187478 - DNA, 79 bp, Homo sapiens
gtggctgtcaccctcaataggtgccatcagtgtttggtgcccgcctggctccaagggtcagtgacggtcataggcagtg

SEQ ID NO: 187479 - DNA, 80 bp, Homo sapiens
ctcaataggtgccatcagtgtttggtgcccgcctggctccaagggtcagtgacggtcataggcagtggcggctgcaggtg

SEQ ID NO: 187480 - DNA, 77 bp, Homo sapiens
atcagtgtttggtgcccgcctggctccaagggtcagtgacggtcataggcagtggcggctgcaggtggggcggctcc

SEQ ID NO: 187481 - DNA, 79 bp, Homo sapiens
tggctccaagggtcagtgacggtcataggcagtggcggctgcaggtggggcggctcctcgggcggcagcgctataatag

SEQ ID NO: 187482 - DNA, 76 bp, Homo sapiens
aagggtcagtgacggtcataggcagtggcggctgcaggtggggcggctcctcgggcggcagcgctataatagtagg

SEQ ID NO: 187483 - DNA, 78 bp, Homo sapiens
tgacggtcataggcagtggcggctgcaggtggggcggctcctcgggcggcagcgctataatagtagggggagcctgga

SEQ ID NO: 187484 - DNA, 75 bp, Homo sapiens
cggctcctcgggcggcagcgctataatagtagggggagcctggaagagacgggagagagcaccgaggtcagatcc

SEQ ID NO: 187485 - DNA, 72 bp, Homo sapiens
ctggatggggtagctgatggcccaagggccccgcagggcctccgccagtactcaccaagcagccccgggttg

SEQ ID NO: 187486 - DNA, 71 bp, Homo sapiens
tagctgatggcccaagggccccgcagggcctccgccagtactcaccaagcagccccgggttggggaacctc

SEQ ID NO: 187487 - DNA, 68 bp, Homo sapiens
caagggccccgcagggcctccgccagtactcaccaagcagccccgggttggggaacctccaggagtcg

SEQ ID NO: 187488 - DNA, 70 bp, Homo sapiens
gcagggcctccgccagtactcaccaagcagccccgggttggggaacctccaggagtcgttgtacgaggaa

SEQ ID NO: 187489 - DNA, 70 bp, Homo sapiens
tccgccagtactcaccaagcagccccgggttggggaacctccaggagtcgttgtacgaggaatactgagg

SEQ ID NO: 187490 - DNA, 71 bp, Homo sapiens
tactcaccaagcagccccgggttggggaacctccaggagtcgttgtacgaggaatactgagggtggctgta

SEQ ID NO: 187491 - DNA, 67 bp, Homo sapiens
agccccgggttggggaacctccaggagtcgttgtacgaggaatactgagggtggctgtagggactcc

SEQ ID NO: 187492 - DNA, 69 bp, Homo sapiens
gggaacctccaggagtcgttgtacgaggaatactgagggtggctgtagggactcccggaaaactcactc

SEQ ID NO: 187493 - DNA, 70 bp, Homo sapiens
aggagtcgttgtacgaggaatactgagggtggctgtagggactcccggaaaactcactccctgtgtatgg

SEQ ID NO: 187494 - DNA, 71 bp, Homo sapiens
tcgttgtacgaggaatactgagggtggctgtagggactcccggaaaactcactccctgtgtatggtgggtg

SEQ ID NO: 187495 - DNA, 71 bp, Homo sapiens
aggaatactgagggtggctgtagggactcccggaaaactcactccctgtgtatggtgggtggagagagaaa

SEQ ID NO: 187496 - DNA, 70 bp, Homo sapiens
ggtggctgtagggactcccggaaaactcactccctgtgtatggtgggtggagagagaaacaggaaccaaa

SEQ ID NO: 187497 - DNA, 79 bp, Homo sapiens
aaaccccgtccgctgcctgctgtggagacgccgacagtgcaaactcaccaggcaccatccctgtcagcgtcggtgctga

SEQ ID NO: 187498 - DNA, 85 bp, Homo sapiens
tccgctgcctgctgtggagacgccgacagtgcaaactcaccaggcaccatccctgtcagcgtcggtgctgagtagctgccctgtc

SEQ ID NO: 187499 - DNA, 81 bp, Homo sapiens
ctgtggagacgccgacagtgcaaactcaccaggcaccatccctgtcagcgtcggtgctgagtagctgccctgtccagcggg

SEQ ID NO: 187500 - DNA, 79 bp, Homo sapiens
gacagtgcaaactcaccaggcaccatccctgtcagcgtcggtgctgagtagctgccctgtccagcgggggggacgtgtg

SEQ ID NO: 187501 - DNA, 75 bp, Homo sapiens
aaactcaccaggcaccatccctgtcagcgtcggtgctgagtagctgccctgtccagcgggggggacgtgtggagg

SEQ ID NO: 187502 - DNA, 72 bp, Homo sapiens
caccatccctgtcagcgtcggtgctgagtagctgccctgtccagcgggggggacgtgtggagggtacccggg

SEQ ID NO: 187503 - DNA, 71 bp, Homo sapiens
tccctgtcagcgtcggtgctgagtagctgccctgtccagcgggggggacgtgtggagggtacccggggagg

SEQ ID NO: 187504 - DNA, 71 bp, Homo sapiens
gtgctgagtagctgccctgtccagcgggggggacgtgtggagggtacccggggagggtcgtgctcgccaag

SEQ ID NO: 187505 - DNA, 69 bp, Homo sapiens
agtagctgccctgtccagcgggggggacgtgtggagggtacccggggagggtcgtgctcgccaagtcac

SEQ ID NO: 187506 - DNA, 70 bp, Homo sapiens
tccagcgggggggacgtgtggagggtacccggggagggtcgtgctcgccaagtcacggcctgaggaatca

SEQ ID NO: 187507 - DNA, 72 bp, Homo sapiens
ggacgtgtggagggtacccggggagggtcgtgctcgccaagtcacggcctgaggaatcaaagcaacaaatca

SEQ ID NO: 187508 - DNA, 73 bp, Homo sapiens
tggagggtacccggggagggtcgtgctcgccaagtcacggcctgaggaatcaaagcaacaaatcacagggtga

SEQ ID NO: 187509 - DNA, 77 bp, Homo sapiens
ctctctccctcactcatcccccatgccccaggtgccctcacctgtcacaatggggtaggactgcgggcctggcacac

SEQ ID NO: 187510 - DNA, 79 bp, Homo sapiens
tcactcatcccccatgccccaggtgccctcacctgtcacaatggggtaggactgcgggcctggcacactgctcccgatg

SEQ ID NO: 187511 - DNA, 78 bp, Homo sapiens
cccatgccccaggtgccctcacctgtcacaatggggtaggactgcgggcctggcacactgctcccgatgtcagcaggg

SEQ ID NO: 187512 - DNA, 76 bp, Homo sapiens
cccaggtgccctcacctgtcacaatggggtaggactgcgggcctggcacactgctcccgatgtcagcaggggtggg

SEQ ID NO: 187513 - DNA, 79 bp, Homo sapiens
ctcacctgtcacaatggggtaggactgcgggcctggcacactgctcccgatgtcagcaggggtggggctggccagattg

SEQ ID NO: 187514 - DNA, 78 bp, Homo sapiens
acaatggggtaggactgcgggcctggcacactgctcccgatgtcagcaggggtggggctggccagattggccttcatg

SEQ ID NO: 187515 - DNA, 81 bp, Homo sapiens
taggactgcgggcctggcacactgctcccgatgtcagcaggggtggggctggccagattggccttcatgtcgtccagccca

SEQ ID NO: 187516 - DNA, 83 bp, Homo sapiens
tggcacactgctcccgatgtcagcaggggtggggctggccagattggccttcatgtcgtccagcccaccagccagcgaggcca

SEQ ID NO: 187517 - DNA, 82 bp, Homo sapiens
tcccgatgtcagcaggggtggggctggccagattggccttcatgtcgtccagcccaccagccagcgaggccatggctgaata

SEQ ID NO: 187518 - DNA, 80 bp, Homo sapiens
agcaggggtggggctggccagattggccttcatgtcgtccagcccaccagccagcgaggccatggctgaatactctgtgg

SEQ ID NO: 187519 - DNA, 82 bp, Homo sapiens
gggctggccagattggccttcatgtcgtccagcccaccagccagcgaggccatggctgaatactctgtggtctgaaagaaga

SEQ ID NO: 187520 - DNA, 81 bp, Homo sapiens
ggccagattggccttcatgtcgtccagcccaccagccagcgaggccatggctgaatactctgtggtctgaaagaagaaaca

SEQ ID NO: 187521 - DNA, 81 bp, Homo sapiens
ccttcatgtcgtccagcccaccagccagcgaggccatggctgaatactctgtggtctgaaagaagaaacagagacgtctca

SEQ ID NO: 187522 - DNA, 81 bp, Homo sapiens
agcccaccagccagcgaggccatggctgaatactctgtggtctgaaagaagaaacagagacgtctcagcaccaagactcca

SEQ ID NO: 187523 - DNA, 73 bp, Homo sapiens
aagggactcaaggaggcacgtgccccaggagagtgtgcactgggcatcatttgggtccctaggaaattacctg

SEQ ID NO: 187524 - DNA, 72 bp, Homo sapiens
aaggaggcacgtgccccaggagagtgtgcactgggcatcatttgggtccctaggaaattacctggaaaagga

SEQ ID NO: 187525 - DNA, 72 bp, Homo sapiens
acgtgccccaggagagtgtgcactgggcatcatttgggtccctaggaaattacctggaaaaggactgcctgg

SEQ ID NO: 187526 - DNA, 73 bp, Homo sapiens
agtgtgcactgggcatcatttgggtccctaggaaattacctggaaaaggactgcctggggctgcaccaagtat

SEQ ID NO: 187527 - DNA, 73 bp, Homo sapiens
actgggcatcatttgggtccctaggaaattacctggaaaaggactgcctggggctgcaccaagtattgtctca

SEQ ID NO: 187528 - DNA, 72 bp, Homo sapiens
atttgggtccctaggaaattacctggaaaaggactgcctggggctgcaccaagtattgtctcatcagcacgg

SEQ ID NO: 187529 - DNA, 77 bp, Homo sapiens
ctaggaaattacctggaaaaggactgcctggggctgcaccaagtattgtctcatcagcacggggcaccactgccata

SEQ ID NO: 187530 - DNA, 80 bp, Homo sapiens
ctggaaaaggactgcctggggctgcaccaagtattgtctcatcagcacggggcaccactgccatagcatggaggagaaaa

SEQ ID NO: 187531 - DNA, 81 bp, Homo sapiens
aggactgcctggggctgcaccaagtattgtctcatcagcacggggcaccactgccatagcatggaggagaaaagaaacaca

SEQ ID NO: 187532 - DNA, 82 bp, Homo sapiens
tgcaccaagtattgtctcatcagcacggggcaccactgccatagcatggaggagaaaagaaacacagacacgtgagaaggag

SEQ ID NO: 187533 - DNA, 80 bp, Homo sapiens
aagtattgtctcatcagcacggggcaccactgccatagcatggaggagaaaagaaacacagacacgtgagaaggagggca

SEQ ID NO: 187534 - DNA, 79 bp, Homo sapiens
cggtgtggcggtggcaggtgtggtgggcgtgcatcacgaggcgtacctgctcgggcttgatgggctctgtggtggtgaa

SEQ ID NO: 187535 - DNA, 82 bp, Homo sapiens
gtggcaggtgtggtgggcgtgcatcacgaggcgtacctgctcgggcttgatgggctctgtggtggtgaagatgtctgagtag

SEQ ID NO: 187536 - DNA, 85 bp, Homo sapiens
tggtgggcgtgcatcacgaggcgtacctgctcgggcttgatgggctctgtggtggtgaagatgtctgagtagtgctgcctctcaa

SEQ ID NO: 187537 - DNA, 84 bp, Homo sapiens
ggcgtgcatcacgaggcgtacctgctcgggcttgatgggctctgtggtggtgaagatgtctgagtagtgctgcctctcaaacac

SEQ ID NO: 187538 - DNA, 82 bp, Homo sapiens
aggcgtacctgctcgggcttgatgggctctgtggtggtgaagatgtctgagtagtgctgcctctcaaacacgcggtccagca

SEQ ID NO: 187539 - DNA, 83 bp, Homo sapiens
cctgctcgggcttgatgggctctgtggtggtgaagatgtctgagtagtgctgcctctcaaacacgcggtccagcacctccagc

SEQ ID NO: 187540 - DNA, 86 bp, Homo sapiens
atgggctctgtggtggtgaagatgtctgagtagtgctgcctctcaaacacgcggtccagcacctccagctgctgctgtgtgaacaa

SEQ ID NO: 187541 - DNA, 86 bp, Homo sapiens
tctgtggtggtgaagatgtctgagtagtgctgcctctcaaacacgcggtccagcacctccagctgctgctgtgtgaacaagtctcc

SEQ ID NO: 187542 - DNA, 85 bp, Homo sapiens
aagatgtctgagtagtgctgcctctcaaacacgcggtccagcacctccagctgctgctgtgtgaacaagtctccccgcatctgct

SEQ ID NO: 187543 - DNA, 83 bp, Homo sapiens
tagtgctgcctctcaaacacgcggtccagcacctccagctgctgctgtgtgaacaagtctccccgcatctgcttccggaggaa

SEQ ID NO: 187544 - DNA, 80 bp, Homo sapiens
cctctcaaacacgcggtccagcacctccagctgctgctgtgtgaacaagtctccccgcatctgcttccggaggaagtctc

SEQ ID NO: 187545 - DNA, 79 bp, Homo sapiens
acgcggtccagcacctccagctgctgctgtgtgaacaagtctccccgcatctgcttccggaggaagtctctgcccggaa

SEQ ID NO: 187546 - DNA, 78 bp, Homo sapiens
cctccagctgctgctgtgtgaacaagtctccccgcatctgcttccggaggaagtctctgcccggaagcgagtggccgt

SEQ ID NO: 187547 - DNA, 76 bp, Homo sapiens
ctgctgtgtgaacaagtctccccgcatctgcttccggaggaagtctctgcccggaagcgagtggccgttcggcacc

SEQ ID NO: 187548 - DNA, 75 bp, Homo sapiens
tgtgaacaagtctccccgcatctgcttccggaggaagtctctgcccggaagcgagtggccgttcggcaccggaga

SEQ ID NO: 187549 - DNA, 73 bp, Homo sapiens
cccgcatctgcttccggaggaagtctctgcccggaagcgagtggccgttcggcaccggagactcctgaatacc

SEQ ID NO: 187550 - DNA, 73 bp, Homo sapiens
atctgcttccggaggaagtctctgcccggaagcgagtggccgttcggcaccggagactcctgaatacctttga

SEQ ID NO: 187551 - DNA, 75 bp, Homo sapiens
aggaagtctctgcccggaagcgagtggccgttcggcaccggagactcctgaatacctttgatgagcaggagagag

SEQ ID NO: 187552 - DNA, 76 bp, Homo sapiens
tctgcccggaagcgagtggccgttcggcaccggagactcctgaatacctttgatgagcaggagagaggaagggtga

SEQ ID NO: 187553 - DNA, 72 bp, Homo sapiens
aacagaccccgtggagcgcatccccgacggggctgcgcgggcctctcttaccttcgtctctcttgcgcttgt

SEQ ID NO: 187554 - DNA, 76 bp, Homo sapiens
gtggagcgcatccccgacggggctgcgcgggcctctcttaccttcgtctctcttgcgcttgttggtgtcggcgctg

SEQ ID NO: 187555 - DNA, 75 bp, Homo sapiens
gacggggctgcgcgggcctctcttaccttcgtctctcttgcgcttgttggtgtcggcgctgggggacgtgatgcc

SEQ ID NO: 187556 - DNA, 77 bp, Homo sapiens
ctgcgcgggcctctcttaccttcgtctctcttgcgcttgttggtgtcggcgctgggggacgtgatgcccaggatgcc

SEQ ID NO: 187557 - DNA, 79 bp, Homo sapiens
tcttaccttcgtctctcttgcgcttgttggtgtcggcgctgggggacgtgatgcccaggatgccgctgatggagtacga

SEQ ID NO: 187558 - DNA, 79 bp, Homo sapiens
cttcgtctctcttgcgcttgttggtgtcggcgctgggggacgtgatgcccaggatgccgctgatggagtacgacgagcc

SEQ ID NO: 187559 - DNA, 79 bp, Homo sapiens
tcttgcgcttgttggtgtcggcgctgggggacgtgatgcccaggatgccgctgatggagtacgacgagccggccgaatc

SEQ ID NO: 187560 - DNA, 78 bp, Homo sapiens
ttggtgtcggcgctgggggacgtgatgcccaggatgccgctgatggagtacgacgagccggccgaatccgtgctcacc

SEQ ID NO: 187561 - DNA, 78 bp, Homo sapiens
ctgggggacgtgatgcccaggatgccgctgatggagtacgacgagccggccgaatccgtgctcaccgaggacacctgc

SEQ ID NO: 187562 - DNA, 79 bp, Homo sapiens
atgcccaggatgccgctgatggagtacgacgagccggccgaatccgtgctcaccgaggacacctgcgtcacggagccag

SEQ ID NO: 187563 - DNA, 79 bp, Homo sapiens
aggatgccgctgatggagtacgacgagccggccgaatccgtgctcaccgaggacacctgcgtcacggagccagtggaca

SEQ ID NO: 187564 - DNA, 80 bp, Homo sapiens
tgatggagtacgacgagccggccgaatccgtgctcaccgaggacacctgcgtcacggagccagtggacactgcgcggaga

SEQ ID NO: 187565 - DNA, 76 bp, Homo sapiens
acgacgagccggccgaatccgtgctcaccgaggacacctgcgtcacggagccagtggacactgcgcggagaaagac

SEQ ID NO: 187566 - DNA, 75 bp, Homo sapiens
ccgaatccgtgctcaccgaggacacctgcgtcacggagccagtggacactgcgcggagaaagacgggcggtcagg

SEQ ID NO: 187567 - DNA, 77 bp, Homo sapiens
gtgctcaccgaggacacctgcgtcacggagccagtggacactgcgcggagaaagacgggcggtcagggccgcagagg

SEQ ID NO: 187568 - DNA, 70 bp, Homo sapiens
attttttttaaaagttcctcttacctatgctgtgactggaagctgggactggttggttgggtggctgctg

SEQ ID NO: 187569 - DNA, 71 bp, Homo sapiens
ttttaaaagttcctcttacctatgctgtgactggaagctgggactggttggttgggtggctgctgtacttt

SEQ ID NO: 187570 - DNA, 77 bp, Homo sapiens
tcttacctatgctgtgactggaagctgggactggttggttgggtggctgctgtacttttgtccggatgatcctgtgg

SEQ ID NO: 187571 - DNA, 76 bp, Homo sapiens
tgtgactggaagctgggactggttggttgggtggctgctgtacttttgtccggatgatcctgtgggcagttgaaaa

SEQ ID NO: 187572 - DNA, 72 bp, Homo sapiens
aagctgggactggttggttgggtggctgctgtacttttgtccggatgatcctgtgggcagttgaaaaacaaa

SEQ ID NO: 187573 - DNA, 73 bp, Homo sapiens
tggttggttgggtggctgctgtacttttgtccggatgatcctgtgggcagttgaaaaacaaaattgctattta

SEQ ID NO: 187574 - DNA, 75 bp, Homo sapiens
ttgggtggctgctgtacttttgtccggatgatcctgtgggcagttgaaaaacaaaattgctatttaccatcagga

SEQ ID NO: 187575 - DNA, 73 bp, Homo sapiens
ctgtacttttgtccggatgatcctgtgggcagttgaaaaacaaaattgctatttaccatcaggaaggagaaga

SEQ ID NO: 187576 - DNA, 74 bp, Homo sapiens
tgccatccctccaaatccccaacccccacaggcacgagcccctcacctgttgatggaactgacgctaggcacgg

SEQ ID NO: 187577 - DNA, 76 bp, Homo sapiens
tccaaatccccaacccccacaggcacgagcccctcacctgttgatggaactgacgctaggcacggtgtcattgtca

SEQ ID NO: 187578 - DNA, 76 bp, Homo sapiens
aacccccacaggcacgagcccctcacctgttgatggaactgacgctaggcacggtgtcattgtcacacacccgctc

SEQ ID NO: 187579 - DNA, 81 bp, Homo sapiens
acaggcacgagcccctcacctgttgatggaactgacgctaggcacggtgtcattgtcacacacccgctctgccagcagccg

SEQ ID NO: 187580 - DNA, 81 bp, Homo sapiens
cctcacctgttgatggaactgacgctaggcacggtgtcattgtcacacacccgctctgccagcagccggtccctgatctcc

SEQ ID NO: 187581 - DNA, 82 bp, Homo sapiens
ttgatggaactgacgctaggcacggtgtcattgtcacacacccgctctgccagcagccggtccctgatctcccaggcaaaca

SEQ ID NO: 187582 - DNA, 80 bp, Homo sapiens
aactgacgctaggcacggtgtcattgtcacacacccgctctgccagcagccggtccctgatctcccaggcaaacatggtg

SEQ ID NO: 187583 - DNA, 79 bp, Homo sapiens
taggcacggtgtcattgtcacacacccgctctgccagcagccggtccctgatctcccaggcaaacatggtgggattttg

SEQ ID NO: 187584 - DNA, 76 bp, Homo sapiens
attgtcacacacccgctctgccagcagccggtccctgatctcccaggcaaacatggtgggattttggcgtttatat

SEQ ID NO: 187585 - DNA, 75 bp, Homo sapiens
ccgctctgccagcagccggtccctgatctcccaggcaaacatggtgggattttggcgtttatattcagcgatttt

SEQ ID NO: 187586 - DNA, 73 bp, Homo sapiens
agcagccggtccctgatctcccaggcaaacatggtgggattttggcgtttatattcagcgattttttccacca

SEQ ID NO: 187587 - DNA, 70 bp, Homo sapiens
cggtccctgatctcccaggcaaacatggtgggattttggcgtttatattcagcgattttttccaccactt

SEQ ID NO: 187588 - DNA, 71 bp, Homo sapiens
atctcccaggcaaacatggtgggattttggcgtttatattcagcgattttttccaccactttgggtgtggc

SEQ ID NO: 187589 - DNA, 67 bp, Homo sapiens
atggtgggattttggcgtttatattcagcgattttttccaccactttgggtgtggcgacctttggtt

SEQ ID NO: 187590 - DNA, 68 bp, Homo sapiens
attttggcgtttatattcagcgattttttccaccactttgggtgtggcgacctttggtttggatcctc

SEQ ID NO: 187591 - DNA, 68 bp, Homo sapiens
cgtttatattcagcgattttttccaccactttgggtgtggcgacctttggtttggatcctccaattac

SEQ ID NO: 187592 - DNA, 68 bp, Homo sapiens
attttttccaccactttgggtgtggcgacctttggtttggatcctccaattaccccaggcttgatgct

SEQ ID NO: 187593 - DNA, 73 bp, Homo sapiens
ccactttgggtgtggcgacctttggtttggatcctccaattaccccaggcttgatgcttcctgtctcataata

SEQ ID NO: 187594 - DNA, 73 bp, Homo sapiens
ttgggtgtggcgacctttggtttggatcctccaattaccccaggcttgatgcttcctgtctcataatacctag

SEQ ID NO: 187595 - DNA, 72 bp, Homo sapiens
tttggtttggatcctccaattaccccaggcttgatgcttcctgtctcataatacctaggacccaaagagaaa

SEQ ID NO: 187596 - DNA, 73 bp, Homo sapiens
tttggatcctccaattaccccaggcttgatgcttcctgtctcataatacctaggacccaaagagaaagaagct

SEQ ID NO: 187597 - DNA, 74 bp, Homo sapiens
aattaccccaggcttgatgcttcctgtctcataatacctaggacccaaagagaaagaagcttagccatgaggaa

SEQ ID NO: 187598 - DNA, 74 bp, Homo sapiens
ttaggtctttatttgaaagatcaagggaagcctcgagctactgcctttacctgccaagaattttgctgacacaa

SEQ ID NO: 187599 - DNA, 77 bp, Homo sapiens
tatttgaaagatcaagggaagcctcgagctactgcctttacctgccaagaattttgctgacacaaccatggctgacc

SEQ ID NO: 187600 - DNA, 77 bp, Homo sapiens
atcaagggaagcctcgagctactgcctttacctgccaagaattttgctgacacaaccatggctgacccgaagctgcc

SEQ ID NO: 187601 - DNA, 80 bp, Homo sapiens
cctcgagctactgcctttacctgccaagaattttgctgacacaaccatggctgacccgaagctgcctggagatgtcgcag

SEQ ID NO: 187602 - DNA, 80 bp, Homo sapiens
actgcctttacctgccaagaattttgctgacacaaccatggctgacccgaagctgcctggagatgtcgcagggcctgaca

SEQ ID NO: 187603 - DNA, 82 bp, Homo sapiens
caagaattttgctgacacaaccatggctgacccgaagctgcctggagatgtcgcagggcctgacaccttgatgagcaagttc

SEQ ID NO: 187604 - DNA, 82 bp, Homo sapiens
attttgctgacacaaccatggctgacccgaagctgcctggagatgtcgcagggcctgacaccttgatgagcaagttccacta

SEQ ID NO: 187605 - DNA, 81 bp, Homo sapiens
aaccatggctgacccgaagctgcctggagatgtcgcagggcctgacaccttgatgagcaagttccactatcctctggcgga

SEQ ID NO: 187606 - DNA, 79 bp, Homo sapiens
acccgaagctgcctggagatgtcgcagggcctgacaccttgatgagcaagttccactatcctctggcggactacatccg

SEQ ID NO: 187607 - DNA, 78 bp, Homo sapiens
cctggagatgtcgcagggcctgacaccttgatgagcaagttccactatcctctggcggactacatccgggagtggccg

SEQ ID NO: 187608 - DNA, 79 bp, Homo sapiens
tcgcagggcctgacaccttgatgagcaagttccactatcctctggcggactacatccgggagtggccgtccattcacaa

SEQ ID NO: 187609 - DNA, 75 bp, Homo sapiens
cctgacaccttgatgagcaagttccactatcctctggcggactacatccgggagtggccgtccattcacaaaaac

SEQ ID NO: 187610 - DNA, 72 bp, Homo sapiens
ccttgatgagcaagttccactatcctctggcggactacatccgggagtggccgtccattcacaaaaaccccc

SEQ ID NO: 187611 - DNA, 70 bp, Homo sapiens
agttccactatcctctggcggactacatccgggagtggccgtccattcacaaaaacccccccaagctgat

SEQ ID NO: 187612 - DNA, 73 bp, Homo sapiens
tatcctctggcggactacatccgggagtggccgtccattcacaaaaacccccccaagctgattcactcctcca

SEQ ID NO: 187613 - DNA, 72 bp, Homo sapiens
actacatccgggagtggccgtccattcacaaaaacccccccaagctgattcactcctccatgtcctgaaaca

SEQ ID NO: 187614 - DNA, 73 bp, Homo sapiens
agtggccgtccattcacaaaaacccccccaagctgattcactcctccatgtcctgaaacagatcagaaacaaa

SEQ ID NO: 187615 - DNA, 72 bp, Homo sapiens
cgtccattcacaaaaacccccccaagctgattcactcctccatgtcctgaaacagatcagaaacaaaaggaa

SEQ ID NO: 187616 - DNA, 69 bp, Homo sapiens
acaaaaacccccccaagctgattcactcctccatgtcctgaaacagatcagaaacaaaaggaaagggaa

SEQ ID NO: 187617 - DNA, 69 bp, Homo sapiens
ttagtacctgacccacggtccggcacccccaacccggtcccggcgggagagtgagagaagcgagctcgc

SEQ ID NO: 187618 - DNA, 68 bp, Homo sapiens
acggtccggcacccccaacccggtcccggcgggagagtgagagaagcgagctcgccgcctacttacta

SEQ ID NO: 187619 - DNA, 73 bp, Homo sapiens
acccccaacccggtcccggcgggagagtgagagaagcgagctcgccgcctacttactatgcatggatgcaaac

SEQ ID NO: 187620 - DNA, 77 bp, Homo sapiens
cggtcccggcgggagagtgagagaagcgagctcgccgcctacttactatgcatggatgcaaacgggtcgtgcttaca

SEQ ID NO: 187621 - DNA, 80 bp, Homo sapiens
ggagagtgagagaagcgagctcgccgcctacttactatgcatggatgcaaacgggtcgtgcttacagtgtatttccatcg

SEQ ID NO: 187622 - DNA, 79 bp, Homo sapiens
gtgagagaagcgagctcgccgcctacttactatgcatggatgcaaacgggtcgtgcttacagtgtatttccatcggggc

SEQ ID NO: 187623 - DNA, 80 bp, Homo sapiens
agctcgccgcctacttactatgcatggatgcaaacgggtcgtgcttacagtgtatttccatcggggcgctccagactgca

SEQ ID NO: 187624 - DNA, 79 bp, Homo sapiens
tacttactatgcatggatgcaaacgggtcgtgcttacagtgtatttccatcggggcgctccagactgcaggccggccca

SEQ ID NO: 187625 - DNA, 79 bp, Homo sapiens
tatgcatggatgcaaacgggtcgtgcttacagtgtatttccatcggggcgctccagactgcaggccggcccacgccgcc

SEQ ID NO: 187626 - DNA, 72 bp, Homo sapiens
aaacgggtcgtgcttacagtgtatttccatcggggcgctccagactgcaggccggcccacgccgccgcctcc

SEQ ID NO: 187627 - DNA, 75 bp, Homo sapiens
tcgtgcttacagtgtatttccatcggggcgctccagactgcaggccggcccacgccgccgcctcccggcgccaag

SEQ ID NO: 187628 - DNA, 73 bp, Homo sapiens
agtgtatttccatcggggcgctccagactgcaggccggcccacgccgccgcctcccggcgccaaggggctgcc

SEQ ID NO: 187629 - DNA, 74 bp, Homo sapiens
ccgtgtcccggagtttgcacatctggagcccgtatcgcggtcctacctgtcctgctggtccgaggagtcggata

SEQ ID NO: 187630 - DNA, 74 bp, Homo sapiens
ggagtttgcacatctggagcccgtatcgcggtcctacctgtcctgctggtccgaggagtcggataatttttctc

SEQ ID NO: 187631 - DNA, 72 bp, Homo sapiens
atctggagcccgtatcgcggtcctacctgtcctgctggtccgaggagtcggataatttttctctaaatccat

SEQ ID NO: 187632 - DNA, 70 bp, Homo sapiens
ccgtatcgcggtcctacctgtcctgctggtccgaggagtcggataatttttctctaaatccattttgatt

SEQ ID NO: 187633 - DNA, 72 bp, Homo sapiens
tcctacctgtcctgctggtccgaggagtcggataatttttctctaaatccattttgatttttcaggacttga

SEQ ID NO: 187634 - DNA, 74 bp, Homo sapiens
tgtcctgctggtccgaggagtcggataatttttctctaaatccattttgatttttcaggacttgatggaatgga

SEQ ID NO: 187635 - DNA, 70 bp, Homo sapiens
cgaggagtcggataatttttctctaaatccattttgatttttcaggacttgatggaatggacagggaaaa

SEQ ID NO: 187636 - DNA, 69 bp, Homo sapiens
gtcggataatttttctctaaatccattttgatttttcaggacttgatggaatggacagggaaaagtttc

SEQ ID NO: 187637 - DNA, 67 bp, Homo sapiens
ttttctctaaatccattttgatttttcaggacttgatggaatggacagggaaaagtttccacttttt

SEQ ID NO: 187638 - DNA, 66 bp, Homo sapiens
ccattttgatttttcaggacttgatggaatggacagggaaaagtttccacttttttgtgccttttt

SEQ ID NO: 187639 - DNA, 65 bp, Homo sapiens
gatttttcaggacttgatggaatggacagggaaaagtttccacttttttgtgcctttttttttct

SEQ ID NO: 187640 - DNA, 69 bp, Homo sapiens
tttttttggtgccaggggccgctcacaggtcggaataattcaagccttccgctcccccgccgagctggg

SEQ ID NO: 187641 - DNA, 75 bp, Homo sapiens
ttggtgccaggggccgctcacaggtcggaataattcaagccttccgctcccccgccgagctggggtagctgatca

SEQ ID NO: 187642 - DNA, 76 bp, Homo sapiens
gctcacaggtcggaataattcaagccttccgctcccccgccgagctggggtagctgatcactgagctgaaactaaa

SEQ ID NO: 187643 - DNA, 72 bp, Homo sapiens
tcggaataattcaagccttccgctcccccgccgagctggggtagctgatcactgagctgaaactaaacgttt

SEQ ID NO: 187644 - DNA, 72 bp, Homo sapiens
taattcaagccttccgctcccccgccgagctggggtagctgatcactgagctgaaactaaacgttttaggtg

SEQ ID NO: 187645 - DNA, 69 bp, Homo sapiens
cttccgctcccccgccgagctggggtagctgatcactgagctgaaactaaacgttttaggtggaaaaaa

SEQ ID NO: 187646 - DNA, 70 bp, Homo sapiens
cgagctggggtagctgatcactgagctgaaactaaacgttttaggtggaaaaaaagcgtccgaaggcacc

SEQ ID NO: 187647 - DNA, 72 bp, Homo sapiens
tagctgatcactgagctgaaactaaacgttttaggtggaaaaaaagcgtccgaaggcaccgtgaaatgatta

SEQ ID NO: 187648 - DNA, 67 bp, Homo sapiens
actgagctgaaactaaacgttttaggtggaaaaaaagcgtccgaaggcaccgtgaaatgattaagga

SEQ ID NO: 187649 - DNA, 63 bp, Homo sapiens
aaactaaacgttttaggtggaaaaaaagcgtccgaaggcaccgtgaaatgattaaggaactaa

SEQ ID NO: 187650 - DNA, 81 bp, Homo sapiens
actaaagagcttctcgccatgtgagatcatgtcctgttctcgccaacatcacaagatgtccccagacacgccgcgccccca

SEQ ID NO: 187651 - DNA, 82 bp, Homo sapiens
cttctcgccatgtgagatcatgtcctgttctcgccaacatcacaagatgtccccagacacgccgcgcccccagcgcgccgcc

SEQ ID NO: 187652 - DNA, 79 bp, Homo sapiens
agatcatgtcctgttctcgccaacatcacaagatgtccccagacacgccgcgcccccagcgcgccgccccacactgccg

SEQ ID NO: 187653 - DNA, 77 bp, Homo sapiens
tgtcctgttctcgccaacatcacaagatgtccccagacacgccgcgcccccagcgcgccgccccacactgccggccc

SEQ ID NO: 187654 - DNA, 74 bp, Homo sapiens
aacatcacaagatgtccccagacacgccgcgcccccagcgcgccgccccacactgccggcccggagcgaggaaa

SEQ ID NO: 187655 - DNA, 71 bp, Homo sapiens
aagatgtccccagacacgccgcgcccccagcgcgccgccccacactgccggcccggagcgaggaaagggta

SEQ ID NO: 187656 - DNA, 73 bp, Homo sapiens
ccagacacgccgcgcccccagcgcgccgccccacactgccggcccggagcgaggaaagggtaggcgctgcgcg

SEQ ID NO: 187657 - DNA, 74 bp, Homo sapiens
gcccccagcgcgccgccccacactgccggcccggagcgaggaaagggtaggcgctgcgcggccgggcctgctca

SEQ ID NO: 187658 - DNA, 75 bp, Homo sapiens
cgccgccccacactgccggcccggagcgaggaaagggtaggcgctgcgcggccgggcctgctcagcgcgccagac

SEQ ID NO: 187659 - DNA, 75 bp, Homo sapiens
acactgccggcccggagcgaggaaagggtaggcgctgcgcggccgggcctgctcagcgcgccagacgtggcggac

SEQ ID NO: 187660 - DNA, 72 bp, Homo sapiens
cccggagcgaggaaagggtaggcgctgcgcggccgggcctgctcagcgcgccagacgtggcggacccggccc

SEQ ID NO: 187661 - DNA, 73 bp, Homo sapiens
gaaagggtaggcgctgcgcggccgggcctgctcagcgcgccagacgtggcggacccggcccggccggagtaga

SEQ ID NO: 187662 - DNA, 74 bp, Homo sapiens
gtaggcgctgcgcggccgggcctgctcagcgcgccagacgtggcggacccggcccggccggagtagagcgggaa

SEQ ID NO: 187663 - DNA, 71 bp, Homo sapiens
cggccgggcctgctcagcgcgccagacgtggcggacccggcccggccggagtagagcgggaagccgggaga

SEQ ID NO: 187664 - DNA, 79 bp, Homo sapiens
cctgctcagcgcgccagacgtggcggacccggcccggccggagtagagcgggaagccgggagagcagcagtgctgctgc

SEQ ID NO: 187665 - DNA, 75 bp, Homo sapiens
ccagacgtggcggacccggcccggccggagtagagcgggaagccgggagagcagcagtgctgctgccgcgccgcc

SEQ ID NO: 187666 - DNA, 74 bp, Homo sapiens
cggcccggccggagtagagcgggaagccgggagagcagcagtgctgctgccgcgccgccccagacttttatagg

SEQ ID NO: 187667 - DNA, 76 bp, Homo sapiens
tgcaggacgcgcgtccggctctcccccagcctctatccggcccggtctcctgccattcggggagactgcaggccaa

SEQ ID NO: 187668 - DNA, 71 bp, Homo sapiens
cgtccggctctcccccagcctctatccggcccggtctcctgccattcggggagactgcaggccaaccggga

SEQ ID NO: 187669 - DNA, 73 bp, Homo sapiens
tcccccagcctctatccggcccggtctcctgccattcggggagactgcaggccaaccgggaggctgagttcga

SEQ ID NO: 187670 - DNA, 75 bp, Homo sapiens
agcctctatccggcccggtctcctgccattcggggagactgcaggccaaccgggaggctgagttcgaagctagca

SEQ ID NO: 187671 - DNA, 75 bp, Homo sapiens
ccggtctcctgccattcggggagactgcaggccaaccgggaggctgagttcgaagctagcagggcggcgaagcca

SEQ ID NO: 187672 - DNA, 77 bp, Homo sapiens
tcctgccattcggggagactgcaggccaaccgggaggctgagttcgaagctagcagggcggcgaagccagtgtcgcc

SEQ ID NO: 187673 - DNA, 76 bp, Homo sapiens
agactgcaggccaaccgggaggctgagttcgaagctagcagggcggcgaagccagtgtcgcccgcggcgttgagaa

SEQ ID NO: 187674 - DNA, 73 bp, Homo sapiens
ccaaccgggaggctgagttcgaagctagcagggcggcgaagccagtgtcgcccgcggcgttgagaagacggtg

SEQ ID NO: 187675 - DNA, 74 bp, Homo sapiens
cgggaggctgagttcgaagctagcagggcggcgaagccagtgtcgcccgcggcgttgagaagacggtgtggccc

SEQ ID NO: 187676 - DNA, 72 bp, Homo sapiens
agttcgaagctagcagggcggcgaagccagtgtcgcccgcggcgttgagaagacggtgtggccccggagagg

SEQ ID NO: 187677 - DNA, 73 bp, Homo sapiens
tagcagggcggcgaagccagtgtcgcccgcggcgttgagaagacggtgtggccccggagagggtggagacaac

SEQ ID NO: 187678 - DNA, 71 bp, Homo sapiens
aagccagtgtcgcccgcggcgttgagaagacggtgtggccccggagagggtggagacaactgtgacgggct

SEQ ID NO: 187679 - DNA, 71 bp, Homo sapiens
ttgagaagacggtgtggccccggagagggtggagacaactgtgacgggcttcccggctgcccgaagtggga

SEQ ID NO: 187680 - DNA, 73 bp, Homo sapiens
agacaactgtgacgggcttcccggctgcccgaagtgggagtggtgtggggctgcaggaaggagagaggaagag

SEQ ID NO: 187681 - DNA, 74 bp, Homo sapiens
tgacgggcttcccggctgcccgaagtgggagtggtgtggggctgcaggaaggagagaggaagaggagcagaagg

SEQ ID NO: 187682 - DNA, 76 bp, Homo sapiens
ctgcccgaagtgggagtggtgtggggctgcaggaaggagagaggaagaggagcagaagggggcagcagcggacgcc

SEQ ID NO: 187683 - DNA, 75 bp, Homo sapiens
aagtgggagtggtgtggggctgcaggaaggagagaggaagaggagcagaagggggcagcagcggacgccgctaac

SEQ ID NO: 187684 - DNA, 76 bp, Homo sapiens
tggtgtggggctgcaggaaggagagaggaagaggagcagaagggggcagcagcggacgccgctaacggcctccctc

SEQ ID NO: 187685 - DNA, 75 bp, Homo sapiens
aggaaggagagaggaagaggagcagaagggggcagcagcggacgccgctaacggcctccctcggcgctgacaggc

SEQ ID NO: 187686 - DNA, 75 bp, Homo sapiens
agaggaagaggagcagaagggggcagcagcggacgccgctaacggcctccctcggcgctgacaggctgggccggc

SEQ ID NO: 187687 - DNA, 75 bp, Homo sapiens
agcagaagggggcagcagcggacgccgctaacggcctccctcggcgctgacaggctgggccggcgcccggctcgc

SEQ ID NO: 187688 - DNA, 75 bp, Homo sapiens
ggcagcagcggacgccgctaacggcctccctcggcgctgacaggctgggccggcgcccggctcgcttgggtgttc

SEQ ID NO: 187689 - DNA, 74 bp, Homo sapiens
gacgccgctaacggcctccctcggcgctgacaggctgggccggcgcccggctcgcttgggtgttcgcgtcgcca

SEQ ID NO: 187690 - DNA, 74 bp, Homo sapiens
tcggcgctgacaggctgggccggcgcccggctcgcttgggtgttcgcgtcgccacttcggcttctcggccggtc

SEQ ID NO: 187691 - DNA, 72 bp, Homo sapiens
tgacaggctgggccggcgcccggctcgcttgggtgttcgcgtcgccacttcggcttctcggccggtcgggcc

SEQ ID NO: 187692 - DNA, 68 bp, Homo sapiens
ccggcgcccggctcgcttgggtgttcgcgtcgccacttcggcttctcggccggtcgggcccctcggcc

SEQ ID NO: 187693 - DNA, 67 bp, Homo sapiens
ccggctcgcttgggtgttcgcgtcgccacttcggcttctcggccggtcgggcccctcggcccgggct

SEQ ID NO: 187694 - DNA, 69 bp, Homo sapiens
ttgggtgttcgcgtcgccacttcggcttctcggccggtcgggcccctcggcccgggcttgcggcgcgcg

SEQ ID NO: 187695 - DNA, 69 bp, Homo sapiens
cgtcgccacttcggcttctcggccggtcgggcccctcggcccgggcttgcggcgcgcgtcggggctgag

SEQ ID NO: 187696 - DNA, 72 bp, Homo sapiens
ttcggcttctcggccggtcgggcccctcggcccgggcttgcggcgcgcgtcggggctgagggctgctgcggc

SEQ ID NO: 187697 - DNA, 72 bp, Homo sapiens
cggccggtcgggcccctcggcccgggcttgcggcgcgcgtcggggctgagggctgctgcggcgcagggagag

SEQ ID NO: 187698 - DNA, 77 bp, Homo sapiens
ctcggcccgggcttgcggcgcgcgtcggggctgagggctgctgcggcgcagggagaggcctggtcctcgctgccgag

SEQ ID NO: 187699 - DNA, 80 bp, Homo sapiens
gggcttgcggcgcgcgtcggggctgagggctgctgcggcgcagggagaggcctggtcctcgctgccgagggatgtgagtg

SEQ ID NO: 187700 - DNA, 81 bp, Homo sapiens
cggcgcgcgtcggggctgagggctgctgcggcgcagggagaggcctggtcctcgctgccgagggatgtgagtgggagctga

SEQ ID NO: 187701 - DNA, 82 bp, Homo sapiens
ggctgagggctgctgcggcgcagggagaggcctggtcctcgctgccgagggatgtgagtgggagctgagcccacactggagg

SEQ ID NO: 187702 - DNA, 80 bp, Homo sapiens
ggctgctgcggcgcagggagaggcctggtcctcgctgccgagggatgtgagtgggagctgagcccacactggagggcccc

SEQ ID NO: 187703 - DNA, 74 bp, Homo sapiens
agggagaggcctggtcctcgctgccgagggatgtgagtgggagctgagcccacactggagggcccccgagggcc

SEQ ID NO: 187704 - DNA, 75 bp, Homo sapiens
aggcctggtcctcgctgccgagggatgtgagtgggagctgagcccacactggagggcccccgagggcccagcctg

SEQ ID NO: 187705 - DNA, 77 bp, Homo sapiens
tcgctgccgagggatgtgagtgggagctgagcccacactggagggcccccgagggcccagcctggaggtcgttcaga

SEQ ID NO: 187706 - DNA, 75 bp, Homo sapiens
agggatgtgagtgggagctgagcccacactggagggcccccgagggcccagcctggaggtcgttcagagccgtgc

SEQ ID NO: 187707 - DNA, 70 bp, Homo sapiens
acactggagggcccccgagggcccagcctggaggtcgttcagagccgtgcccgtcccggggcttcgcaga

SEQ ID NO: 187708 - DNA, 69 bp, Homo sapiens
agggcccccgagggcccagcctggaggtcgttcagagccgtgcccgtcccggggcttcgcagaccttga

SEQ ID NO: 187709 - DNA, 69 bp, Homo sapiens
cctggaggtcgttcagagccgtgcccgtcccggggcttcgcagaccttgacccgccgggtaggagccgc

SEQ ID NO: 187710 - DNA, 68 bp, Homo sapiens
cgttcagagccgtgcccgtcccggggcttcgcagaccttgacccgccgggtaggagccgcccctgcgg

SEQ ID NO: 187711 - DNA, 69 bp, Homo sapiens
ccgtcccggggcttcgcagaccttgacccgccgggtaggagccgcccctgcgggctcgagggcgcgctc

SEQ ID NO: 187712 - DNA, 74 bp, Homo sapiens
gcttcgcagaccttgacccgccgggtaggagccgcccctgcgggctcgagggcgcgctctggtcgcccgatctg

SEQ ID NO: 187713 - DNA, 73 bp, Homo sapiens
agaccttgacccgccgggtaggagccgcccctgcgggctcgagggcgcgctctggtcgcccgatctgtgtagc

SEQ ID NO: 187714 - DNA, 77 bp, Homo sapiens
cctgcgggctcgagggcgcgctctggtcgcccgatctgtgtagccggtgggtgttatctctgcctggcttctgggtg

SEQ ID NO: 187715 - DNA, 69 bp, Homo sapiens
aaaagcatttgtttcccctggatttatgtggtagtagttaactgctgcttctgtttttaggtttcagaa

SEQ ID NO: 187716 - DNA, 73 bp, Homo sapiens
ccctggatttatgtggtagtagttaactgctgcttctgtttttaggtttcagaagcaggcaacaggaacaaga

SEQ ID NO: 187717 - DNA, 74 bp, Homo sapiens
atttatgtggtagtagttaactgctgcttctgtttttaggtttcagaagcaggcaacaggaacaagatgtgaac

SEQ ID NO: 187718 - DNA, 75 bp, Homo sapiens
tagtagttaactgctgcttctgtttttaggtttcagaagcaggcaacaggaacaagatgtgaactgtttctcttc

SEQ ID NO: 187719 - DNA, 75 bp, Homo sapiens
ctgcttctgtttttaggtttcagaagcaggcaacaggaacaagatgtgaactgtttctcttctgcagaaaaagag

SEQ ID NO: 187720 - DNA, 75 bp, Homo sapiens
tgtttttaggtttcagaagcaggcaacaggaacaagatgtgaactgtttctcttctgcagaaaaagaggctcttc

SEQ ID NO: 187721 - DNA, 75 bp, Homo sapiens
tgcgcccagcccatttgtaactttattgttttctcttacaggcaaatgttctgaaaaagactctgcatgggaatg

SEQ ID NO: 187722 - DNA, 73 bp, Homo sapiens
ccatttgtaactttattgttttctcttacaggcaaatgttctgaaaaagactctgcatgggaatggcctgcct

SEQ ID NO: 187723 - DNA, 76 bp, Homo sapiens
ctttattgttttctcttacaggcaaatgttctgaaaaagactctgcatgggaatggcctgccttacgatgacagaa

SEQ ID NO: 187724 - DNA, 77 bp, Homo sapiens
ttgttttctcttacaggcaaatgttctgaaaaagactctgcatgggaatggcctgccttacgatgacagaaatggag

SEQ ID NO: 187725 - DNA, 78 bp, Homo sapiens
ttacaggcaaatgttctgaaaaagactctgcatgggaatggcctgccttacgatgacagaaatggagggaacatccac

SEQ ID NO: 187726 - DNA, 80 bp, Homo sapiens
ttctgaaaaagactctgcatgggaatggcctgccttacgatgacagaaatggagggaacatccacctcttctatatatca

SEQ ID NO: 187727 - DNA, 81 bp, Homo sapiens
actctgcatgggaatggcctgccttacgatgacagaaatggagggaacatccacctcttctatatatcagaatggtgatat

SEQ ID NO: 187728 - DNA, 78 bp, Homo sapiens
ccttacgatgacagaaatggagggaacatccacctcttctatatatcagaatggtgatatttctggaaatgccaattc

SEQ ID NO: 187729 - DNA, 79 bp, Homo sapiens
acagaaatggagggaacatccacctcttctatatatcagaatggtgatatttctggaaatgccaattctatgaagcaaa

SEQ ID NO: 187730 - DNA, 80 bp, Homo sapiens
aatggagggaacatccacctcttctatatatcagaatggtgatatttctggaaatgccaattctatgaagcaaatagatc

SEQ ID NO: 187731 - DNA, 81 bp, Homo sapiens
acatccacctcttctatatatcagaatggtgatatttctggaaatgccaattctatgaagcaaatagatccagttcttcag

SEQ ID NO: 187732 - DNA, 80 bp, Homo sapiens
atatatcagaatggtgatatttctggaaatgccaattctatgaagcaaatagatccagttcttcaggtgtatctttacca

SEQ ID NO: 187733 - DNA, 76 bp, Homo sapiens
atggtgatatttctggaaatgccaattctatgaagcaaatagatccagttcttcaggtgtatctttaccattccct

SEQ ID NO: 187734 - DNA, 74 bp, Homo sapiens
tttctggaaatgccaattctatgaagcaaatagatccagttcttcaggtgtatctttaccattcccttgggaaa

SEQ ID NO: 187735 - DNA, 76 bp, Homo sapiens
aaatgccaattctatgaagcaaatagatccagttcttcaggtgtatctttaccattcccttgggaaatctgaggca

SEQ ID NO: 187736 - DNA, 77 bp, Homo sapiens
tatgaagcaaatagatccagttcttcaggtgtatctttaccattcccttgggaaatctgaggcagattatctgacct

SEQ ID NO: 187737 - DNA, 74 bp, Homo sapiens
aaatagatccagttcttcaggtgtatctttaccattcccttgggaaatctgaggcagattatctgacctttcca

SEQ ID NO: 187738 - DNA, 75 bp, Homo sapiens
tcttcaggtgtatctttaccattcccttgggaaatctgaggcagattatctgacctttccatctggggagtatgt

SEQ ID NO: 187739 - DNA, 76 bp, Homo sapiens
tatctttaccattcccttgggaaatctgaggcagattatctgacctttccatctggggagtatgttgcagaagaaa

SEQ ID NO: 187740 - DNA, 77 bp, Homo sapiens
taccattcccttgggaaatctgaggcagattatctgacctttccatctggggagtatgttgcagaagaaatctgtat

SEQ ID NO: 187741 - DNA, 80 bp, Homo sapiens
aaatctgaggcagattatctgacctttccatctggggagtatgttgcagaagaaatctgtattgctgcttctaaagcttg

SEQ ID NO: 187742 - DNA, 79 bp, Homo sapiens
cagattatctgacctttccatctggggagtatgttgcagaagaaatctgtattgctgcttctaaagcttgtggtaagta

SEQ ID NO: 187743 - DNA, 76 bp, Homo sapiens
tgacctttccatctggggagtatgttgcagaagaaatctgtattgctgcttctaaagcttgtggtaagtattaaaa

SEQ ID NO: 187744 - DNA, 75 bp, Homo sapiens
atctggggagtatgttgcagaagaaatctgtattgctgcttctaaagcttgtggtaagtattaaaaaacagcatt

SEQ ID NO: 187745 - DNA, 74 bp, Homo sapiens
ggagtatgttgcagaagaaatctgtattgctgcttctaaagcttgtggtaagtattaaaaaacagcattttcct

SEQ ID NO: 187746 - DNA, 74 bp, Homo sapiens
attctgttgtgtacctttaataattcctttctctgcttcttttctaggtatcacacctgtgtatcataatatgt

SEQ ID NO: 187747 - DNA, 74 bp, Homo sapiens
ttgtgtacctttaataattcctttctctgcttcttttctaggtatcacacctgtgtatcataatatgtttgctt

SEQ ID NO: 187748 - DNA, 76 bp, Homo sapiens
aattcctttctctgcttcttttctaggtatcacacctgtgtatcataatatgtttgctttaatgagtgaaacagaa

SEQ ID NO: 187749 - DNA, 79 bp, Homo sapiens
tctgcttcttttctaggtatcacacctgtgtatcataatatgtttgctttaatgagtgaaacagaaaggatctggtatc

SEQ ID NO: 187750 - DNA, 77 bp, Homo sapiens
ttcttttctaggtatcacacctgtgtatcataatatgtttgctttaatgagtgaaacagaaaggatctggtatccac

SEQ ID NO: 187751 - DNA, 79 bp, Homo sapiens
tatcacacctgtgtatcataatatgtttgctttaatgagtgaaacagaaaggatctggtatccacccaaccatgtcttc

SEQ ID NO: 187752 - DNA, 81 bp, Homo sapiens
tatcataatatgtttgctttaatgagtgaaacagaaaggatctggtatccacccaaccatgtcttccatatagatgagtca

SEQ ID NO: 187753 - DNA, 77 bp, Homo sapiens
aatatgtttgctttaatgagtgaaacagaaaggatctggtatccacccaaccatgtcttccatatagatgagtcaac

SEQ ID NO: 187754 - DNA, 79 bp, Homo sapiens
tttaatgagtgaaacagaaaggatctggtatccacccaaccatgtcttccatatagatgagtcaaccaggcataatgta

SEQ ID NO: 187755 - DNA, 79 bp, Homo sapiens
acagaaaggatctggtatccacccaaccatgtcttccatatagatgagtcaaccaggcataatgtactctacagaataa

SEQ ID NO: 187756 - DNA, 77 bp, Homo sapiens
atctggtatccacccaaccatgtcttccatatagatgagtcaaccaggcataatgtactctacagaataaggtactt

SEQ ID NO: 187757 - DNA, 76 bp, Homo sapiens
acccaaccatgtcttccatatagatgagtcaaccaggcataatgtactctacagaataaggtactttcttcagtaa

SEQ ID NO: 187758 - DNA, 76 bp, Homo sapiens
accatgtcttccatatagatgagtcaaccaggcataatgtactctacagaataaggtactttcttcagtaaagtaa

SEQ ID NO: 187759 - DNA, 75 bp, Homo sapiens
ccatatagatgagtcaaccaggcataatgtactctacagaataaggtactttcttcagtaaagtaactcacttaa

SEQ ID NO: 187760 - DNA, 69 bp, Homo sapiens
gtatttgaactatttggaagctgaccaaatgtttttattatcttgtagattttactttcctcgttggta

SEQ ID NO: 187761 - DNA, 74 bp, Homo sapiens
tatttggaagctgaccaaatgtttttattatcttgtagattttactttcctcgttggtattgcagtggcagcaa

SEQ ID NO: 187762 - DNA, 75 bp, Homo sapiens
tgaccaaatgtttttattatcttgtagattttactttcctcgttggtattgcagtggcagcaacagagcctatcg

SEQ ID NO: 187763 - DNA, 77 bp, Homo sapiens
tttttattatcttgtagattttactttcctcgttggtattgcagtggcagcaacagagcctatcggcatggaatatc

SEQ ID NO: 187764 - DNA, 81 bp, Homo sapiens
tcttgtagattttactttcctcgttggtattgcagtggcagcaacagagcctatcggcatggaatatctcgaggtgctgaa

SEQ ID NO: 187765 - DNA, 80 bp, Homo sapiens
attttactttcctcgttggtattgcagtggcagcaacagagcctatcggcatggaatatctcgaggtgctgaagctcctc

SEQ ID NO: 187766 - DNA, 84 bp, Homo sapiens
tcctcgttggtattgcagtggcagcaacagagcctatcggcatggaatatctcgaggtgctgaagctcctcttcttgatgactt

SEQ ID NO: 187767 - DNA, 87 bp, Homo sapiens
tattgcagtggcagcaacagagcctatcggcatggaatatctcgaggtgctgaagctcctcttcttgatgactttgtcatgtcttac

SEQ ID NO: 187768 - DNA, 83 bp, Homo sapiens
aacagagcctatcggcatggaatatctcgaggtgctgaagctcctcttcttgatgactttgtcatgtcttacctctttgctca

SEQ ID NO: 187769 - DNA, 84 bp, Homo sapiens
tatcggcatggaatatctcgaggtgctgaagctcctcttcttgatgactttgtcatgtcttacctctttgctcaggtatgatta

SEQ ID NO: 187770 - DNA, 82 bp, Homo sapiens
atggaatatctcgaggtgctgaagctcctcttcttgatgactttgtcatgtcttacctctttgctcaggtatgattatatta

SEQ ID NO: 187771 - DNA, 80 bp, Homo sapiens
aggtgctgaagctcctcttcttgatgactttgtcatgtcttacctctttgctcaggtatgattatattatcttacttgta

SEQ ID NO: 187772 - DNA, 79 bp, Homo sapiens
ctcctcttcttgatgactttgtcatgtcttacctctttgctcaggtatgattatattatcttacttgtacatgagttaa

SEQ ID NO: 187773 - DNA, 74 bp, Homo sapiens
atgataatgaaacttacgatgagatatttccttcaaatttttggttttagtggcggcatgattttgtgcacgga

SEQ ID NO: 187774 - DNA, 73 bp, Homo sapiens
ttacgatgagatatttccttcaaatttttggttttagtggcggcatgattttgtgcacggatggataaaagta

SEQ ID NO: 187775 - DNA, 71 bp, Homo sapiens
atatttccttcaaatttttggttttagtggcggcatgattttgtgcacggatggataaaagtacctgtgac

SEQ ID NO: 187776 - DNA, 73 bp, Homo sapiens
aaatttttggttttagtggcggcatgattttgtgcacggatggataaaagtacctgtgactcatgaaacacag

SEQ ID NO: 187777 - DNA, 76 bp, Homo sapiens
tttggttttagtggcggcatgattttgtgcacggatggataaaagtacctgtgactcatgaaacacaggaagaatg

SEQ ID NO: 187778 - DNA, 80 bp, Homo sapiens
ggcatgattttgtgcacggatggataaaagtacctgtgactcatgaaacacaggaagaatgtcttgggatggcagtgtta

SEQ ID NO: 187779 - DNA, 78 bp, Homo sapiens
attttgtgcacggatggataaaagtacctgtgactcatgaaacacaggaagaatgtcttgggatggcagtgttagata

SEQ ID NO: 187780 - DNA, 80 bp, Homo sapiens
acggatggataaaagtacctgtgactcatgaaacacaggaagaatgtcttgggatggcagtgttagatatgatgagaata

SEQ ID NO: 187781 - DNA, 79 bp, Homo sapiens
aaaagtacctgtgactcatgaaacacaggaagaatgtcttgggatggcagtgttagatatgatgagaatagccaaagaa

SEQ ID NO: 187782 - DNA, 78 bp, Homo sapiens
actcatgaaacacaggaagaatgtcttgggatggcagtgttagatatgatgagaatagccaaagaaaacgatcaaacc

SEQ ID NO: 187783 - DNA, 75 bp, Homo sapiens
aaacacaggaagaatgtcttgggatggcagtgttagatatgatgagaatagccaaagaaaacgatcaaaccccac

SEQ ID NO: 187784 - DNA, 78 bp, Homo sapiens
agaatgtcttgggatggcagtgttagatatgatgagaatagccaaagaaaacgatcaaaccccactggccatctataa

SEQ ID NO: 187785 - DNA, 78 bp, Homo sapiens
atggcagtgttagatatgatgagaatagccaaagaaaacgatcaaaccccactggccatctataactctatcaggtaa

SEQ ID NO: 187786 - DNA, 75 bp, Homo sapiens
ttagatatgatgagaatagccaaagaaaacgatcaaaccccactggccatctataactctatcaggtaattttct

SEQ ID NO: 187787 - DNA, 73 bp, Homo sapiens
atgagaatagccaaagaaaacgatcaaaccccactggccatctataactctatcaggtaattttcttttgcaa

SEQ ID NO: 187788 - DNA, 70 bp, Homo sapiens
aaagaaaacgatcaaaccccactggccatctataactctatcaggtaattttcttttgcaaatccttaca

SEQ ID NO: 187789 - DNA, 72 bp, Homo sapiens
tgttttgtttttctgtatgtgcttttttatccctagctacaagacattcttaccaaaatgtattcgagcaaa

SEQ ID NO: 187790 - DNA, 75 bp, Homo sapiens
tttctgtatgtgcttttttatccctagctacaagacattcttaccaaaatgtattcgagcaaagatccaagacta

SEQ ID NO: 187791 - DNA, 74 bp, Homo sapiens
gtgcttttttatccctagctacaagacattcttaccaaaatgtattcgagcaaagatccaagactatcatattt

SEQ ID NO: 187792 - DNA, 76 bp, Homo sapiens
tttatccctagctacaagacattcttaccaaaatgtattcgagcaaagatccaagactatcatattttgacaagga

SEQ ID NO: 187793 - DNA, 75 bp, Homo sapiens
caagacattcttaccaaaatgtattcgagcaaagatccaagactatcatattttgacaaggaagcgaataaggta

SEQ ID NO: 187794 - DNA, 75 bp, Homo sapiens
tcttaccaaaatgtattcgagcaaagatccaagactatcatattttgacaaggaagcgaataaggtacagatttc

SEQ ID NO: 187795 - DNA, 76 bp, Homo sapiens
aaatgtattcgagcaaagatccaagactatcatattttgacaaggaagcgaataaggtacagatttcgcagattta

SEQ ID NO: 187796 - DNA, 78 bp, Homo sapiens
aaagatccaagactatcatattttgacaaggaagcgaataaggtacagatttcgcagatttattcagcaattcagcca

SEQ ID NO: 187797 - DNA, 79 bp, Homo sapiens
ccaagactatcatattttgacaaggaagcgaataaggtacagatttcgcagatttattcagcaattcagccaatgcaaa

SEQ ID NO: 187798 - DNA, 79 bp, Homo sapiens
attttgacaaggaagcgaataaggtacagatttcgcagatttattcagcaattcagccaatgcaaagccactgccagaa

SEQ ID NO: 187799 - DNA, 77 bp, Homo sapiens
aagcgaataaggtacagatttcgcagatttattcagcaattcagccaatgcaaagccactgccagaaacttgaaact

SEQ ID NO: 187800 - DNA, 77 bp, Homo sapiens
ataaggtacagatttcgcagatttattcagcaattcagccaatgcaaagccactgccagaaacttgaaacttaagta

SEQ ID NO: 187801 - DNA, 77 bp, Homo sapiens
agatttcgcagatttattcagcaattcagccaatgcaaagccactgccagaaacttgaaacttaagtatcttataaa

SEQ ID NO: 187802 - DNA, 75 bp, Homo sapiens
atttattcagcaattcagccaatgcaaagccactgccagaaacttgaaacttaagtatcttataaatctggaaac

SEQ ID NO: 187803 - DNA, 77 bp, Homo sapiens
attcagccaatgcaaagccactgccagaaacttgaaacttaagtatcttataaatctggaaactctgcagtctgcct

SEQ ID NO: 187804 - DNA, 77 bp, Homo sapiens
aatgcaaagccactgccagaaacttgaaacttaagtatcttataaatctggaaactctgcagtctgccttctacaca

SEQ ID NO: 187805 - DNA, 74 bp, Homo sapiens
actgccagaaacttgaaacttaagtatcttataaatctggaaactctgcagtctgccttctacacagagaaatt

SEQ ID NO: 187806 - DNA, 73 bp, Homo sapiens
aacttgaaacttaagtatcttataaatctggaaactctgcagtctgccttctacacagagaaatttgaagtaa

SEQ ID NO: 187807 - DNA, 74 bp, Homo sapiens
taagtatcttataaatctggaaactctgcagtctgccttctacacagagaaatttgaagtaaaagaacctggaa

SEQ ID NO: 187808 - DNA, 73 bp, Homo sapiens
tataaatctggaaactctgcagtctgccttctacacagagaaatttgaagtaaaagaacctggaagtggtcct

SEQ ID NO: 187809 - DNA, 73 bp, Homo sapiens
aaactctgcagtctgccttctacacagagaaatttgaagtaaaagaacctggaagtggtccttcaggtgagga

SEQ ID NO: 187810 - DNA, 70 bp, Homo sapiens
agtctgccttctacacagagaaatttgaagtaaaagaacctggaagtggtccttcaggtgaggagatttt

SEQ ID NO: 187811 - DNA, 70 bp, Homo sapiens
acagagaaatttgaagtaaaagaacctggaagtggtccttcaggtgaggagatttttgcaaccattataa

SEQ ID NO: 187812 - DNA, 69 bp, Homo sapiens
aatttgaagtaaaagaacctggaagtggtccttcaggtgaggagatttttgcaaccattataataactg

SEQ ID NO: 187813 - DNA, 69 bp, Homo sapiens
taaaagaacctggaagtggtccttcaggtgaggagatttttgcaaccattataataactggaaacggtg

SEQ ID NO: 187814 - DNA, 71 bp, Homo sapiens
aagtggtccttcaggtgaggagatttttgcaaccattataataactggaaacggtggaattcagtggtcaa

SEQ ID NO: 187815 - DNA, 73 bp, Homo sapiens
tcaggtgaggagatttttgcaaccattataataactggaaacggtggaattcagtggtcaagagggaaacata

SEQ ID NO: 187816 - DNA, 70 bp, Homo sapiens
gagatttttgcaaccattataataactggaaacggtggaattcagtggtcaagagggaaacataaagaaa

SEQ ID NO: 187817 - DNA, 71 bp, Homo sapiens
aaccattataataactggaaacggtggaattcagtggtcaagagggaaacataaagaaagtgagacactga

SEQ ID NO: 187818 - DNA, 73 bp, Homo sapiens
tataataactggaaacggtggaattcagtggtcaagagggaaacataaagaaagtgagacactgacagaacag

SEQ ID NO: 187819 - DNA, 71 bp, Homo sapiens
aaacggtggaattcagtggtcaagagggaaacataaagaaagtgagacactgacagaacaggtaatcctta

SEQ ID NO: 187820 - DNA, 74 bp, Homo sapiens
aattcagtggtcaagagggaaacataaagaaagtgagacactgacagaacaggtaatccttaatgatatgttct

SEQ ID NO: 187821 - DNA, 74 bp, Homo sapiens
tcaagagggaaacataaagaaagtgagacactgacagaacaggtaatccttaatgatatgttcttgttctttgt

SEQ ID NO: 187822 - DNA, 69 bp, Homo sapiens
ggctctgtaaattctacccgtttttaattttacatgcttttaattataggatttacagttatattgcga

SEQ ID NO: 187823 - DNA, 68 bp, Homo sapiens
tctacccgtttttaattttacatgcttttaattataggatttacagttatattgcgattttcctaata

SEQ ID NO: 187824 - DNA, 73 bp, Homo sapiens
ttaattttacatgcttttaattataggatttacagttatattgcgattttcctaatattattgatgtcagtat

SEQ ID NO: 187825 - DNA, 76 bp, Homo sapiens
catgcttttaattataggatttacagttatattgcgattttcctaatattattgatgtcagtattaagcaagcaaa

SEQ ID NO: 187826 - DNA, 74 bp, Homo sapiens
ttataggatttacagttatattgcgattttcctaatattattgatgtcagtattaagcaagcaaaccaagaggg

SEQ ID NO: 187827 - DNA, 74 bp, Homo sapiens
ggatttacagttatattgcgattttcctaatattattgatgtcagtattaagcaagcaaaccaagagggttcaa

SEQ ID NO: 187828 - DNA, 75 bp, Homo sapiens
tatattgcgattttcctaatattattgatgtcagtattaagcaagcaaaccaagagggttcaaatgaaagccgag

SEQ ID NO: 187829 - DNA, 74 bp, Homo sapiens
ttcctaatattattgatgtcagtattaagcaagcaaaccaagagggttcaaatgaaagccgagttgtaactatc

SEQ ID NO: 187830 - DNA, 76 bp, Homo sapiens
tattattgatgtcagtattaagcaagcaaaccaagagggttcaaatgaaagccgagttgtaactatccataagcaa

SEQ ID NO: 187831 - DNA, 72 bp, Homo sapiens
tattaagcaagcaaaccaagagggttcaaatgaaagccgagttgtaactatccataagcaagatggtaaaaa

SEQ ID NO: 187832 - DNA, 71 bp, Homo sapiens
aagcaaaccaagagggttcaaatgaaagccgagttgtaactatccataagcaagatggtaaaaatctggta

SEQ ID NO: 187833 - DNA, 70 bp, Homo sapiens
agggttcaaatgaaagccgagttgtaactatccataagcaagatggtaaaaatctggtaagtttgcttta

SEQ ID NO: 187834 - DNA, 74 bp, Homo sapiens
caaatgaaagccgagttgtaactatccataagcaagatggtaaaaatctggtaagtttgctttatgattgaata

SEQ ID NO: 187835 - DNA, 74 bp, Homo sapiens
gccgagttgtaactatccataagcaagatggtaaaaatctggtaagtttgctttatgattgaataatggtttca

SEQ ID NO: 187836 - DNA, 70 bp, Homo sapiens
ctttttcttttctctgcttaggaaattgaacttagctcattaagggaagctttgtctttcgtgtcattaa

SEQ ID NO: 187837 - DNA, 77 bp, Homo sapiens
tctctgcttaggaaattgaacttagctcattaagggaagctttgtctttcgtgtcattaattgatggatattataga

SEQ ID NO: 187838 - DNA, 76 bp, Homo sapiens
ggaaattgaacttagctcattaagggaagctttgtctttcgtgtcattaattgatggatattatagattaactgca

SEQ ID NO: 187839 - DNA, 81 bp, Homo sapiens
acttagctcattaagggaagctttgtctttcgtgtcattaattgatggatattatagattaactgcagatgcacatcatta

SEQ ID NO: 187840 - DNA, 80 bp, Homo sapiens
attaagggaagctttgtctttcgtgtcattaattgatggatattatagattaactgcagatgcacatcattacctctgta

SEQ ID NO: 187841 - DNA, 81 bp, Homo sapiens
gaagctttgtctttcgtgtcattaattgatggatattatagattaactgcagatgcacatcattacctctgtaaagaagta

SEQ ID NO: 187842 - DNA, 82 bp, Homo sapiens
ctttcgtgtcattaattgatggatattatagattaactgcagatgcacatcattacctctgtaaagaagtagcacctccagc

SEQ ID NO: 187843 - DNA, 83 bp, Homo sapiens
ttgatggatattatagattaactgcagatgcacatcattacctctgtaaagaagtagcacctccagccgtgcttgaaaatata

SEQ ID NO: 187844 - DNA, 80 bp, Homo sapiens
atattatagattaactgcagatgcacatcattacctctgtaaagaagtagcacctccagccgtgcttgaaaatatacaaa

SEQ ID NO: 187845 - DNA, 81 bp, Homo sapiens
attaactgcagatgcacatcattacctctgtaaagaagtagcacctccagccgtgcttgaaaatatacaaagcaactgtca

SEQ ID NO: 187846 - DNA, 77 bp, Homo sapiens
cacatcattacctctgtaaagaagtagcacctccagccgtgcttgaaaatatacaaagcaactgtcatggcccaatt

SEQ ID NO: 187847 - DNA, 76 bp, Homo sapiens
cctctgtaaagaagtagcacctccagccgtgcttgaaaatatacaaagcaactgtcatggcccaatttcgtgagta

SEQ ID NO: 187848 - DNA, 77 bp, Homo sapiens
taaagaagtagcacctccagccgtgcttgaaaatatacaaagcaactgtcatggcccaatttcgtgagtaatacaga

SEQ ID NO: 187849 - DNA, 74 bp, Homo sapiens
ctccagccgtgcttgaaaatatacaaagcaactgtcatggcccaatttcgtgagtaatacagacttaaaagtaa

SEQ ID NO: 187850 - DNA, 71 bp, Homo sapiens
ccgtgcttgaaaatatacaaagcaactgtcatggcccaatttcgtgagtaatacagacttaaaagtaaatt

SEQ ID NO: 187851 - DNA, 75 bp, Homo sapiens
tatggtgcttgatatattattcaaattgcttcttctttacctttaggatggattttgccattagtaaactgaaga

SEQ ID NO: 187852 - DNA, 72 bp, Homo sapiens
gatatattattcaaattgcttcttctttacctttaggatggattttgccattagtaaactgaagaaagcagg

SEQ ID NO: 187853 - DNA, 73 bp, Homo sapiens
tcaaattgcttcttctttacctttaggatggattttgccattagtaaactgaagaaagcaggtaatcagactg

SEQ ID NO: 187854 - DNA, 74 bp, Homo sapiens
tcttctttacctttaggatggattttgccattagtaaactgaagaaagcaggtaatcagactggactgtatgta

SEQ ID NO: 187855 - DNA, 73 bp, Homo sapiens
tttacctttaggatggattttgccattagtaaactgaagaaagcaggtaatcagactggactgtatgtacttc

SEQ ID NO: 187856 - DNA, 76 bp, Homo sapiens
gattttgccattagtaaactgaagaaagcaggtaatcagactggactgtatgtacttcgatgcagtcctaaggact

SEQ ID NO: 187857 - DNA, 74 bp, Homo sapiens
attagtaaactgaagaaagcaggtaatcagactggactgtatgtacttcgatgcagtcctaaggactttaataa

SEQ ID NO: 187858 - DNA, 73 bp, Homo sapiens
aaactgaagaaagcaggtaatcagactggactgtatgtacttcgatgcagtcctaaggactttaataaatatt

SEQ ID NO: 187859 - DNA, 72 bp, Homo sapiens
aagcaggtaatcagactggactgtatgtacttcgatgcagtcctaaggactttaataaatattttttgactt

SEQ ID NO: 187860 - DNA, 75 bp, Homo sapiens
tgatgtccattgtgactatccctccctttctttataattaaacttatacagcgagaaaatgtcattgaatataaa

SEQ ID NO: 187861 - DNA, 71 bp, Homo sapiens
gtgactatccctccctttctttataattaaacttatacagcgagaaaatgtcattgaatataaacactgtt

SEQ ID NO: 187862 - DNA, 71 bp, Homo sapiens
cctccctttctttataattaaacttatacagcgagaaaatgtcattgaatataaacactgtttgattacaa

SEQ ID NO: 187863 - DNA, 74 bp, Homo sapiens
taattaaacttatacagcgagaaaatgtcattgaatataaacactgtttgattacaaaaaatgagaatgaagag

SEQ ID NO: 187864 - DNA, 77 bp, Homo sapiens
tatacagcgagaaaatgtcattgaatataaacactgtttgattacaaaaaatgagaatgaagagtacaacctcagtg

SEQ ID NO: 187865 - DNA, 76 bp, Homo sapiens
gcgagaaaatgtcattgaatataaacactgtttgattacaaaaaatgagaatgaagagtacaacctcagtgggaca

SEQ ID NO: 187866 - DNA, 73 bp, Homo sapiens
cattgaatataaacactgtttgattacaaaaaatgagaatgaagagtacaacctcagtgggacaaagaagaac

SEQ ID NO: 187867 - DNA, 73 bp, Homo sapiens
ataaacactgtttgattacaaaaaatgagaatgaagagtacaacctcagtgggacaaagaagaacttcagcag

SEQ ID NO: 187868 - DNA, 72 bp, Homo sapiens
ttacaaaaaatgagaatgaagagtacaacctcagtgggacaaagaagaacttcagcagtcttaaagatcttt

SEQ ID NO: 187869 - DNA, 74 bp, Homo sapiens
aatgagaatgaagagtacaacctcagtgggacaaagaagaacttcagcagtcttaaagatcttttgaattgtta

SEQ ID NO: 187870 - DNA, 74 bp, Homo sapiens
atgaagagtacaacctcagtgggacaaagaagaacttcagcagtcttaaagatcttttgaattgttaccagatg

SEQ ID NO: 187871 - DNA, 71 bp, Homo sapiens
aacctcagtgggacaaagaagaacttcagcagtcttaaagatcttttgaattgttaccagatggaaactgt

SEQ ID NO: 187872 - DNA, 75 bp, Homo sapiens
caaagaagaacttcagcagtcttaaagatcttttgaattgttaccagatggaaactgttcgctcagacaatataa

SEQ ID NO: 187873 - DNA, 75 bp, Homo sapiens
gaacttcagcagtcttaaagatcttttgaattgttaccagatggaaactgttcgctcagacaatataattttcca

SEQ ID NO: 187874 - DNA, 72 bp, Homo sapiens
cagtcttaaagatcttttgaattgttaccagatggaaactgttcgctcagacaatataattttccagtttac

SEQ ID NO: 187875 - DNA, 73 bp, Homo sapiens
tcttttgaattgttaccagatggaaactgttcgctcagacaatataattttccagtttactaaatgctgtccc

SEQ ID NO: 187876 - DNA, 72 bp, Homo sapiens
attgttaccagatggaaactgttcgctcagacaatataattttccagtttactaaatgctgtcccccaaagc

SEQ ID NO: 187877 - DNA, 69 bp, Homo sapiens
aaactgttcgctcagacaatataattttccagtttactaaatgctgtcccccaaagccaaaaggtaaga

SEQ ID NO: 187878 - DNA, 69 bp, Homo sapiens
gttcgctcagacaatataattttccagtttactaaatgctgtcccccaaagccaaaaggtaagataatt

SEQ ID NO: 187879 - DNA, 66 bp, Homo sapiens
acaatataattttccagtttactaaatgctgtcccccaaagccaaaaggtaagataattttctagt

SEQ ID NO: 187880 - DNA, 65 bp, Homo sapiens
tttccagtttactaaatgctgtcccccaaagccaaaaggtaagataattttctagttatttttaa

SEQ ID NO: 187881 - DNA, 72 bp, Homo sapiens
atatgtattttattttttcagataaatcaaaccttctagtcttcagaacgaatggtgtttctgatgtaccaa

SEQ ID NO: 187882 - DNA, 73 bp, Homo sapiens
tattttttcagataaatcaaaccttctagtcttcagaacgaatggtgtttctgatgtaccaacctcaccaaca

SEQ ID NO: 187883 - DNA, 75 bp, Homo sapiens
tttcagataaatcaaaccttctagtcttcagaacgaatggtgtttctgatgtaccaacctcaccaacattacaga

SEQ ID NO: 187884 - DNA, 74 bp, Homo sapiens
aaaccttctagtcttcagaacgaatggtgtttctgatgtaccaacctcaccaacattacagaggcctactcata

SEQ ID NO: 187885 - DNA, 77 bp, Homo sapiens
tagtcttcagaacgaatggtgtttctgatgtaccaacctcaccaacattacagaggcctactcatatgaaccaaatg

SEQ ID NO: 187886 - DNA, 75 bp, Homo sapiens
aatggtgtttctgatgtaccaacctcaccaacattacagaggcctactcatatgaaccaaatggtgtttcacaaa

SEQ ID NO: 187887 - DNA, 76 bp, Homo sapiens
tttctgatgtaccaacctcaccaacattacagaggcctactcatatgaaccaaatggtgtttcacaaaatcagaaa

SEQ ID NO: 187888 - DNA, 76 bp, Homo sapiens
aacctcaccaacattacagaggcctactcatatgaaccaaatggtgtttcacaaaatcagaaatgaagatttgata

SEQ ID NO: 187889 - DNA, 77 bp, Homo sapiens
caccaacattacagaggcctactcatatgaaccaaatggtgtttcacaaaatcagaaatgaagatttgatatttgta

SEQ ID NO: 187890 - DNA, 77 bp, Homo sapiens
acagaggcctactcatatgaaccaaatggtgtttcacaaaatcagaaatgaagatttgatatttgtaagtcattaga

SEQ ID NO: 187891 - DNA, 78 bp, Homo sapiens
catatgaaccaaatggtgtttcacaaaatcagaaatgaagatttgatatttgtaagtcattagatactcattactgtc

SEQ ID NO: 187892 - DNA, 74 bp, Homo sapiens
accaaatggtgtttcacaaaatcagaaatgaagatttgatatttgtaagtcattagatactcattactgtcttt

SEQ ID NO: 187893 - DNA, 69 bp, Homo sapiens
cttcgttctccatctttactcattcttttcttttacctttttctcttgaagaatgaaagccttggccaa

SEQ ID NO: 187894 - DNA, 69 bp, Homo sapiens
tctttactcattcttttcttttacctttttctcttgaagaatgaaagccttggccaaggcacttttaca

SEQ ID NO: 187895 - DNA, 67 bp, Homo sapiens
cattcttttcttttacctttttctcttgaagaatgaaagccttggccaaggcacttttacaaagatt

SEQ ID NO: 187896 - DNA, 67 bp, Homo sapiens
tacctttttctcttgaagaatgaaagccttggccaaggcacttttacaaagatttttaaaggcgtac

SEQ ID NO: 187897 - DNA, 69 bp, Homo sapiens
ttgaagaatgaaagccttggccaaggcacttttacaaagatttttaaaggcgtacgaagagaagtagga

SEQ ID NO: 187898 - DNA, 68 bp, Homo sapiens
aatgaaagccttggccaaggcacttttacaaagatttttaaaggcgtacgaagagaagtaggagacta

SEQ ID NO: 187899 - DNA, 70 bp, Homo sapiens
ccaaggcacttttacaaagatttttaaaggcgtacgaagagaagtaggagactacggtcaactgcatgaa

SEQ ID NO: 187900 - DNA, 69 bp, Homo sapiens
ttttacaaagatttttaaaggcgtacgaagagaagtaggagactacggtcaactgcatgaaacagaagt

SEQ ID NO: 187901 - DNA, 68 bp, Homo sapiens
atttttaaaggcgtacgaagagaagtaggagactacggtcaactgcatgaaacagaagttcttttaaa

SEQ ID NO: 187902 - DNA, 70 bp, Homo sapiens
cgtacgaagagaagtaggagactacggtcaactgcatgaaacagaagttcttttaaaagttctggataaa

SEQ ID NO: 187903 - DNA, 72 bp, Homo sapiens
agaagtaggagactacggtcaactgcatgaaacagaagttcttttaaaagttctggataaagcacacagaaa

SEQ ID NO: 187904 - DNA, 73 bp, Homo sapiens
aggagactacggtcaactgcatgaaacagaagttcttttaaaagttctggataaagcacacagaaactattca

SEQ ID NO: 187905 - DNA, 74 bp, Homo sapiens
actgcatgaaacagaagttcttttaaaagttctggataaagcacacagaaactattcagaggtgtgtatgttct

SEQ ID NO: 187906 - DNA, 72 bp, Homo sapiens
atgaaacagaagttcttttaaaagttctggataaagcacacagaaactattcagaggtgtgtatgttcttta

SEQ ID NO: 187907 - DNA, 73 bp, Homo sapiens
cttttaaaagttctggataaagcacacagaaactattcagaggtgtgtatgttctttatattgttcatgtagt

SEQ ID NO: 187908 - DNA, 72 bp, Homo sapiens
cttttttttttccttagtctttctttgaagcagcaagtatgatgagcaagctttctcacaagcatttggttt

SEQ ID NO: 187909 - DNA, 76 bp, Homo sapiens
ttttccttagtctttctttgaagcagcaagtatgatgagcaagctttctcacaagcatttggttttaaattatgga

SEQ ID NO: 187910 - DNA, 79 bp, Homo sapiens
agtctttctttgaagcagcaagtatgatgagcaagctttctcacaagcatttggttttaaattatggagtatgtgtctg

SEQ ID NO: 187911 - DNA, 81 bp, Homo sapiens
agcagcaagtatgatgagcaagctttctcacaagcatttggttttaaattatggagtatgtgtctgtggagacgagagtaa

SEQ ID NO: 187912 - DNA, 78 bp, Homo sapiens
tatgatgagcaagctttctcacaagcatttggttttaaattatggagtatgtgtctgtggagacgagagtaagtaaaa

SEQ ID NO: 187913 - DNA, 73 bp, Homo sapiens
aagctttctcacaagcatttggttttaaattatggagtatgtgtctgtggagacgagagtaagtaaaactaca

SEQ ID NO: 187914 - DNA, 71 bp, Homo sapiens
aagcatttggttttaaattatggagtatgtgtctgtggagacgagagtaagtaaaactacaggctttctaa

SEQ ID NO: 187915 - DNA, 71 bp, Homo sapiens
ttggttttaaattatggagtatgtgtctgtggagacgagagtaagtaaaactacaggctttctaatgcctt

SEQ ID NO: 187916 - DNA, 71 bp, Homo sapiens
atatttatacttaagccttattattattacttatattttaatgcagatattctggttcaggagtttgtaaa

SEQ ID NO: 187917 - DNA, 72 bp, Homo sapiens
cttaagccttattattattacttatattttaatgcagatattctggttcaggagtttgtaaaatttggatca

SEQ ID NO: 187918 - DNA, 77 bp, Homo sapiens
ttattattacttatattttaatgcagatattctggttcaggagtttgtaaaatttggatcactagatacatatctga

SEQ ID NO: 187919 - DNA, 75 bp, Homo sapiens
acttatattttaatgcagatattctggttcaggagtttgtaaaatttggatcactagatacatatctgaaaaaga

SEQ ID NO: 187920 - DNA, 74 bp, Homo sapiens
ttttaatgcagatattctggttcaggagtttgtaaaatttggatcactagatacatatctgaaaaagaataaaa

SEQ ID NO: 187921 - DNA, 73 bp, Homo sapiens
gatattctggttcaggagtttgtaaaatttggatcactagatacatatctgaaaaagaataaaaattgtataa

SEQ ID NO: 187922 - DNA, 74 bp, Homo sapiens
tcaggagtttgtaaaatttggatcactagatacatatctgaaaaagaataaaaattgtataaatatattatgga

SEQ ID NO: 187923 - DNA, 73 bp, Homo sapiens
aatttggatcactagatacatatctgaaaaagaataaaaattgtataaatatattatggaaacttgaagttgc

SEQ ID NO: 187924 - DNA, 74 bp, Homo sapiens
ggatcactagatacatatctgaaaaagaataaaaattgtataaatatattatggaaacttgaagttgctaaaca

SEQ ID NO: 187925 - DNA, 73 bp, Homo sapiens
tatctgaaaaagaataaaaattgtataaatatattatggaaacttgaagttgctaaacagttggcatgggcca

SEQ ID NO: 187926 - DNA, 74 bp, Homo sapiens
agaataaaaattgtataaatatattatggaaacttgaagttgctaaacagttggcatgggccatgcattttcta

SEQ ID NO: 187927 - DNA, 76 bp, Homo sapiens
ttgtataaatatattatggaaacttgaagttgctaaacagttggcatgggccatgcattttctagtaagtagtaca

SEQ ID NO: 187928 - DNA, 73 bp, Homo sapiens
tatattatggaaacttgaagttgctaaacagttggcatgggccatgcattttctagtaagtagtacaaccttt

SEQ ID NO: 187929 - DNA, 71 bp, Homo sapiens
aaacttgaagttgctaaacagttggcatgggccatgcattttctagtaagtagtacaacctttttatcaaa

SEQ ID NO: 187930 - DNA, 72 bp, Homo sapiens
aagttgctaaacagttggcatgggccatgcattttctagtaagtagtacaacctttttatcaaaagatacta

SEQ ID NO: 187931 - DNA, 74 bp, Homo sapiens
tccagtacttgtggactgatatttgaatatatgtgcgtttaactctaataggaagaaaacacccttattcatgg

SEQ ID NO: 187932 - DNA, 76 bp, Homo sapiens
gactgatatttgaatatatgtgcgtttaactctaataggaagaaaacacccttattcatgggaatgtatgtgccaa

SEQ ID NO: 187933 - DNA, 73 bp, Homo sapiens
gaatatatgtgcgtttaactctaataggaagaaaacacccttattcatgggaatgtatgtgccaaaaatattc

SEQ ID NO: 187934 - DNA, 75 bp, Homo sapiens
tgtgcgtttaactctaataggaagaaaacacccttattcatgggaatgtatgtgccaaaaatattctgcttatca

SEQ ID NO: 187935 - DNA, 75 bp, Homo sapiens
actctaataggaagaaaacacccttattcatgggaatgtatgtgccaaaaatattctgcttatcagagaagaaga

SEQ ID NO: 187936 - DNA, 76 bp, Homo sapiens
ggaagaaaacacccttattcatgggaatgtatgtgccaaaaatattctgcttatcagagaagaagacaggaagaca

SEQ ID NO: 187937 - DNA, 77 bp, Homo sapiens
aaatattctgcttatcagagaagaagacaggaagacaggaaatcctcctttcatcaaacttagtgatcctggcatta

SEQ ID NO: 187938 - DNA, 76 bp, Homo sapiens
ttatcagagaagaagacaggaagacaggaaatcctcctttcatcaaacttagtgatcctggcattagtattacagt

SEQ ID NO: 187939 - DNA, 74 bp, Homo sapiens
agaagacaggaagacaggaaatcctcctttcatcaaacttagtgatcctggcattagtattacagttttgccaa

SEQ ID NO: 187940 - DNA, 73 bp, Homo sapiens
aagacaggaaatcctcctttcatcaaacttagtgatcctggcattagtattacagttttgccaaaggacagta

SEQ ID NO: 187941 - DNA, 72 bp, Homo sapiens
aaatcctcctttcatcaaacttagtgatcctggcattagtattacagttttgccaaaggacagtaagttcta

SEQ ID NO: 187942 - DNA, 73 bp, Homo sapiens
ctttcatcaaacttagtgatcctggcattagtattacagttttgccaaaggacagtaagttctagaaggatta

SEQ ID NO: 187943 - DNA, 73 bp, Homo sapiens
aacttagtgatcctggcattagtattacagttttgccaaaggacagtaagttctagaaggattatatataatg

SEQ ID NO: 187944 - DNA, 70 bp, Homo sapiens
ttacttgtgaattatttaaccctactctgttcgtatcatttaaaagttcttcaggagagaataccatggg

SEQ ID NO: 187945 - DNA, 68 bp, Homo sapiens
aattatttaaccctactctgttcgtatcatttaaaagttcttcaggagagaataccatgggtaccacc

SEQ ID NO: 187946 - DNA, 74 bp, Homo sapiens
ttaaccctactctgttcgtatcatttaaaagttcttcaggagagaataccatgggtaccacctgaatgcattga

SEQ ID NO: 187947 - DNA, 73 bp, Homo sapiens
tgttcgtatcatttaaaagttcttcaggagagaataccatgggtaccacctgaatgcattgaaaatcctaaaa

SEQ ID NO: 187948 - DNA, 70 bp, Homo sapiens
catttaaaagttcttcaggagagaataccatgggtaccacctgaatgcattgaaaatcctaaaaatttaa

SEQ ID NO: 187949 - DNA, 73 bp, Homo sapiens
tcaggagagaataccatgggtaccacctgaatgcattgaaaatcctaaaaatttaaatttggcaacagacaaa

SEQ ID NO: 187950 - DNA, 72 bp, Homo sapiens
agagaataccatgggtaccacctgaatgcattgaaaatcctaaaaatttaaatttggcaacagacaaatgga

SEQ ID NO: 187951 - DNA, 69 bp, Homo sapiens
atgggtaccacctgaatgcattgaaaatcctaaaaatttaaatttggcaacagacaaatggagttttgg

SEQ ID NO: 187952 - DNA, 69 bp, Homo sapiens
atgcattgaaaatcctaaaaatttaaatttggcaacagacaaatggagttttggtaccactttgtggga

SEQ ID NO: 187953 - DNA, 68 bp, Homo sapiens
aatcctaaaaatttaaatttggcaacagacaaatggagttttggtaccactttgtgggaaatctgcag

SEQ ID NO: 187954 - DNA, 71 bp, Homo sapiens
atttaaatttggcaacagacaaatggagttttggtaccactttgtgggaaatctgcagtggaggagataaa

SEQ ID NO: 187955 - DNA, 72 bp, Homo sapiens
atttggcaacagacaaatggagttttggtaccactttgtgggaaatctgcagtggaggagataaacctctaa

SEQ ID NO: 187956 - DNA, 74 bp, Homo sapiens
aaatggagttttggtaccactttgtgggaaatctgcagtggaggagataaacctctaagtgctctggattctca

SEQ ID NO: 187957 - DNA, 74 bp, Homo sapiens
ttttggtaccactttgtgggaaatctgcagtggaggagataaacctctaagtgctctggattctcaaagagtaa

SEQ ID NO: 187958 - DNA, 76 bp, Homo sapiens
tttgtgggaaatctgcagtggaggagataaacctctaagtgctctggattctcaaagagtaagtttatatagacta

SEQ ID NO: 187959 - DNA, 75 bp, Homo sapiens
atctgcagtggaggagataaacctctaagtgctctggattctcaaagagtaagtttatatagactaagttagaat

SEQ ID NO: 187960 - DNA, 73 bp, Homo sapiens
ggaggagataaacctctaagtgctctggattctcaaagagtaagtttatatagactaagttagaattactcta

SEQ ID NO: 187961 - DNA, 77 bp, Homo sapiens
gtggcattacacaatttattctcagtttgtggttctttaattatagaagctacaattttatgaagataggcatcagc

SEQ ID NO: 187962 - DNA, 77 bp, Homo sapiens
cacaatttattctcagtttgtggttctttaattatagaagctacaattttatgaagataggcatcagcttcctgcac

SEQ ID NO: 187963 - DNA, 76 bp, Homo sapiens
ttattctcagtttgtggttctttaattatagaagctacaattttatgaagataggcatcagcttcctgcaccaaag

SEQ ID NO: 187964 - DNA, 77 bp, Homo sapiens
ttgtggttctttaattatagaagctacaattttatgaagataggcatcagcttcctgcaccaaagtgggcagaatta

SEQ ID NO: 187965 - DNA, 78 bp, Homo sapiens
taattatagaagctacaattttatgaagataggcatcagcttcctgcaccaaagtgggcagaattagcaaaccttata

SEQ ID NO: 187966 - DNA, 75 bp, Homo sapiens
aagctacaattttatgaagataggcatcagcttcctgcaccaaagtgggcagaattagcaaaccttataaataat

SEQ ID NO: 187967 - DNA, 77 bp, Homo sapiens
ttttatgaagataggcatcagcttcctgcaccaaagtgggcagaattagcaaaccttataaataattgtatggatta

SEQ ID NO: 187968 - DNA, 77 bp, Homo sapiens
ataggcatcagcttcctgcaccaaagtgggcagaattagcaaaccttataaataattgtatggattatgaaccagat

SEQ ID NO: 187969 - DNA, 74 bp, Homo sapiens
ctgcaccaaagtgggcagaattagcaaaccttataaataattgtatggattatgaaccagatttcaggccttct

SEQ ID NO: 187970 - DNA, 74 bp, Homo sapiens
caaagtgggcagaattagcaaaccttataaataattgtatggattatgaaccagatttcaggccttctttcaga

SEQ ID NO: 187971 - DNA, 76 bp, Homo sapiens
aattagcaaaccttataaataattgtatggattatgaaccagatttcaggccttctttcagagccatcatacgaga

SEQ ID NO: 187972 - DNA, 76 bp, Homo sapiens
cttataaataattgtatggattatgaaccagatttcaggccttctttcagagccatcatacgagatcttaacagtt

SEQ ID NO: 187973 - DNA, 76 bp, Homo sapiens
aataattgtatggattatgaaccagatttcaggccttctttcagagccatcatacgagatcttaacagtttgttta

SEQ ID NO: 187974 - DNA, 76 bp, Homo sapiens
tatgaaccagatttcaggccttctttcagagccatcatacgagatcttaacagtttgtttactccaggtatgtatt

SEQ ID NO: 187975 - DNA, 76 bp, Homo sapiens
atttcaggccttctttcagagccatcatacgagatcttaacagtttgtttactccaggtatgtatttgaatgatct

SEQ ID NO: 187976 - DNA, 76 bp, Homo sapiens
ccttctttcagagccatcatacgagatcttaacagtttgtttactccaggtatgtatttgaatgatcttattgatt

SEQ ID NO: 187977 - DNA, 76 bp, Homo sapiens
agagccatcatacgagatcttaacagtttgtttactccaggtatgtatttgaatgatcttattgattttccagctt

SEQ ID NO: 187978 - DNA, 73 bp, Homo sapiens
cagagaatgttatttgctaatttaaggtgataatattctttatttctccagattatgaactattaacagaaaa

SEQ ID NO: 187979 - DNA, 74 bp, Homo sapiens
ttgctaatttaaggtgataatattctttatttctccagattatgaactattaacagaaaatgacatgttaccaa

SEQ ID NO: 187980 - DNA, 75 bp, Homo sapiens
ggtgataatattctttatttctccagattatgaactattaacagaaaatgacatgttaccaaatatgaggatagg

SEQ ID NO: 187981 - DNA, 74 bp, Homo sapiens
ttctttatttctccagattatgaactattaacagaaaatgacatgttaccaaatatgaggataggtgccctggg

SEQ ID NO: 187982 - DNA, 73 bp, Homo sapiens
tatttctccagattatgaactattaacagaaaatgacatgttaccaaatatgaggataggtgccctggggttt

SEQ ID NO: 187983 - DNA, 72 bp, Homo sapiens
attatgaactattaacagaaaatgacatgttaccaaatatgaggataggtgccctggggttttctggtgcct

SEQ ID NO: 187984 - DNA, 72 bp, Homo sapiens
tattaacagaaaatgacatgttaccaaatatgaggataggtgccctggggttttctggtgcctttgaagacc

SEQ ID NO: 187985 - DNA, 71 bp, Homo sapiens
aaatgacatgttaccaaatatgaggataggtgccctggggttttctggtgcctttgaagaccgggatccta

SEQ ID NO: 187986 - DNA, 71 bp, Homo sapiens
taccaaatatgaggataggtgccctggggttttctggtgcctttgaagaccgggatcctacacagtttgaa

SEQ ID NO: 187987 - DNA, 71 bp, Homo sapiens
ataggtgccctggggttttctggtgcctttgaagaccgggatcctacacagtttgaagagagacatttgaa

SEQ ID NO: 187988 - DNA, 71 bp, Homo sapiens
ctggggttttctggtgcctttgaagaccgggatcctacacagtttgaagagagacatttgaaatttctaca

SEQ ID NO: 187989 - DNA, 73 bp, Homo sapiens
ttttctggtgcctttgaagaccgggatcctacacagtttgaagagagacatttgaaatttctacagcaacttg

SEQ ID NO: 187990 - DNA, 72 bp, Homo sapiens
tttgaagaccgggatcctacacagtttgaagagagacatttgaaatttctacagcaacttggcaaggtaaat

SEQ ID NO: 187991 - DNA, 73 bp, Homo sapiens
ggatcctacacagtttgaagagagacatttgaaatttctacagcaacttggcaaggtaaattgtcagaatttt

SEQ ID NO: 187992 - DNA, 72 bp, Homo sapiens
acacagtttgaagagagacatttgaaatttctacagcaacttggcaaggtaaattgtcagaattttttcaaa

SEQ ID NO: 187993 - DNA, 71 bp, Homo sapiens
aatttgccttgaaaacttggtatttccatcctaatgtgatgtgtcatttagggtaattttgggagtgtgga

SEQ ID NO: 187994 - DNA, 72 bp, Homo sapiens
aaaacttggtatttccatcctaatgtgatgtgtcatttagggtaattttgggagtgtggagatgtgccggta

SEQ ID NO: 187995 - DNA, 76 bp, Homo sapiens
tatttccatcctaatgtgatgtgtcatttagggtaattttgggagtgtggagatgtgccggtatgaccctctacag

SEQ ID NO: 187996 - DNA, 75 bp, Homo sapiens
aatgtgatgtgtcatttagggtaattttgggagtgtggagatgtgccggtatgaccctctacaggacaacactgg

SEQ ID NO: 187997 - DNA, 70 bp, Homo sapiens
atttagggtaattttgggagtgtggagatgtgccggtatgaccctctacaggacaacactggggaggtgg

SEQ ID NO: 187998 - DNA, 72 bp, Homo sapiens
attttgggagtgtggagatgtgccggtatgaccctctacaggacaacactggggaggtggtcgctgtaaaaa

SEQ ID NO: 187999 - DNA, 77 bp, Homo sapiens
tgtggagatgtgccggtatgaccctctacaggacaacactggggaggtggtcgctgtaaaaaagcttcagcatagta

SEQ ID NO: 188000 - DNA, 75 bp, Homo sapiens
atgtgccggtatgaccctctacaggacaacactggggaggtggtcgctgtaaaaaagcttcagcatagtactgaa

SEQ ID NO: 188001 - DNA, 76 bp, Homo sapiens
tatgaccctctacaggacaacactggggaggtggtcgctgtaaaaaagcttcagcatagtactgaagagcacctaa

SEQ ID NO: 188002 - DNA, 74 bp, Homo sapiens
aggacaacactggggaggtggtcgctgtaaaaaagcttcagcatagtactgaagagcacctaagagactttgaa

SEQ ID NO: 188003 - DNA, 72 bp, Homo sapiens
tggggaggtggtcgctgtaaaaaagcttcagcatagtactgaagagcacctaagagactttgaaagggaaat

SEQ ID NO: 188004 - DNA, 74 bp, Homo sapiens
tcgctgtaaaaaagcttcagcatagtactgaagagcacctaagagactttgaaagggaaattgaaatcctgaaa

SEQ ID NO: 188005 - DNA, 72 bp, Homo sapiens
aaaaagcttcagcatagtactgaagagcacctaagagactttgaaagggaaattgaaatcctgaaatcccta

SEQ ID NO: 188006 - DNA, 76 bp, Homo sapiens
catagtactgaagagcacctaagagactttgaaagggaaattgaaatcctgaaatccctacagcatgacaacattg

SEQ ID NO: 188007 - DNA, 73 bp, Homo sapiens
aagagcacctaagagactttgaaagggaaattgaaatcctgaaatccctacagcatgacaacattgtaaagta

SEQ ID NO: 188008 - DNA, 71 bp, Homo sapiens
acctaagagactttgaaagggaaattgaaatcctgaaatccctacagcatgacaacattgtaaagtacaag

SEQ ID NO: 188009 - DNA, 73 bp, Homo sapiens
actttgaaagggaaattgaaatcctgaaatccctacagcatgacaacattgtaaagtacaagggagtgtgcta

SEQ ID NO: 188010 - DNA, 79 bp, Homo sapiens
ttgaaatcctgaaatccctacagcatgacaacattgtaaagtacaagggagtgtgctacagtgctggtaagctgcccat

SEQ ID NO: 188011 - DNA, 79 bp, Homo sapiens
atcctgaaatccctacagcatgacaacattgtaaagtacaagggagtgtgctacagtgctggtaagctgcccattgaaa

SEQ ID NO: 188012 - DNA, 77 bp, Homo sapiens
tacagcatgacaacattgtaaagtacaagggagtgtgctacagtgctggtaagctgcccattgaaacctattttaaa

SEQ ID NO: 188013 - DNA, 73 bp, Homo sapiens
acaacattgtaaagtacaagggagtgtgctacagtgctggtaagctgcccattgaaacctattttaaattcaa

SEQ ID NO: 188014 - DNA, 69 bp, Homo sapiens
cagtataatatggcagagtaaaacattatttccacctttatgttaaaaggtcggcgtaatctaaaatta

SEQ ID NO: 188015 - DNA, 69 bp, Homo sapiens
tatggcagagtaaaacattatttccacctttatgttaaaaggtcggcgtaatctaaaattaattatgga

SEQ ID NO: 188016 - DNA, 68 bp, Homo sapiens
cattatttccacctttatgttaaaaggtcggcgtaatctaaaattaattatggaatatttaccatatg

SEQ ID NO: 188017 - DNA, 67 bp, Homo sapiens
tccacctttatgttaaaaggtcggcgtaatctaaaattaattatggaatatttaccatatggaagtt

SEQ ID NO: 188018 - DNA, 69 bp, Homo sapiens
tgttaaaaggtcggcgtaatctaaaattaattatggaatatttaccatatggaagtttacgagactatc

SEQ ID NO: 188019 - DNA, 69 bp, Homo sapiens
ggtcggcgtaatctaaaattaattatggaatatttaccatatggaagtttacgagactatcttcaaaaa

SEQ ID NO: 188020 - DNA, 69 bp, Homo sapiens
aaattaattatggaatatttaccatatggaagtttacgagactatcttcaaaaacataaagaacggata

SEQ ID NO: 188021 - DNA, 72 bp, Homo sapiens
tggaatatttaccatatggaagtttacgagactatcttcaaaaacataaagaacggatagatcacataaaac

SEQ ID NO: 188022 - DNA, 75 bp, Homo sapiens
taccatatggaagtttacgagactatcttcaaaaacataaagaacggatagatcacataaaacttctgcagtaca

SEQ ID NO: 188023 - DNA, 76 bp, Homo sapiens
atggaagtttacgagactatcttcaaaaacataaagaacggatagatcacataaaacttctgcagtacacatctca

SEQ ID NO: 188024 - DNA, 78 bp, Homo sapiens
actatcttcaaaaacataaagaacggatagatcacataaaacttctgcagtacacatctcagatatgcaaggtaacta

SEQ ID NO: 188025 - DNA, 78 bp, Homo sapiens
aaaacataaagaacggatagatcacataaaacttctgcagtacacatctcagatatgcaaggtaactaatatcctgat

SEQ ID NO: 188026 - DNA, 80 bp, Homo sapiens
ataaagaacggatagatcacataaaacttctgcagtacacatctcagatatgcaaggtaactaatatcctgattatttgc

SEQ ID NO: 188027 - DNA, 84 bp, Homo sapiens
atagatcacataaaacttctgcagtacacatctcagatatgcaaggtaactaatatcctgattatttgctgtagatgaagcaac

SEQ ID NO: 188028 - DNA, 69 bp, Homo sapiens
gtttatatttataaaactagctgaaagaaaaatgttttatccatagggtatggagtatcttggtacaaa

SEQ ID NO: 188029 - DNA, 69 bp, Homo sapiens
ataaaactagctgaaagaaaaatgttttatccatagggtatggagtatcttggtacaaaaaggtatatc

SEQ ID NO: 188030 - DNA, 70 bp, Homo sapiens
actagctgaaagaaaaatgttttatccatagggtatggagtatcttggtacaaaaaggtatatccacagg

SEQ ID NO: 188031 - DNA, 72 bp, Homo sapiens
aatgttttatccatagggtatggagtatcttggtacaaaaaggtatatccacagggatctggcaacgagaaa

SEQ ID NO: 188032 - DNA, 74 bp, Homo sapiens
tttatccatagggtatggagtatcttggtacaaaaaggtatatccacagggatctggcaacgagaaatatattg

SEQ ID NO: 188033 - DNA, 75 bp, Homo sapiens
tatggagtatcttggtacaaaaaggtatatccacagggatctggcaacgagaaatatattggtggagaacgagaa

SEQ ID NO: 188034 - DNA, 73 bp, Homo sapiens
ttggtacaaaaaggtatatccacagggatctggcaacgagaaatatattggtggagaacgagaacagagttaa

SEQ ID NO: 188035 - DNA, 71 bp, Homo sapiens
aaaaaggtatatccacagggatctggcaacgagaaatatattggtggagaacgagaacagagttaaaattg

SEQ ID NO: 188036 - DNA, 71 bp, Homo sapiens
acagggatctggcaacgagaaatatattggtggagaacgagaacagagttaaaattggagattttgggtta

SEQ ID NO: 188037 - DNA, 70 bp, Homo sapiens
atctggcaacgagaaatatattggtggagaacgagaacagagttaaaattggagattttgggttaaccaa

SEQ ID NO: 188038 - DNA, 69 bp, Homo sapiens
aatatattggtggagaacgagaacagagttaaaattggagattttgggttaaccaaagtcttgccacaa

SEQ ID NO: 188039 - DNA, 69 bp, Homo sapiens
attggtggagaacgagaacagagttaaaattggagattttgggttaaccaaagtcttgccacaagacaa

SEQ ID NO: 188040 - DNA, 68 bp, Homo sapiens
aacgagaacagagttaaaattggagattttgggttaaccaaagtcttgccacaagacaaagaatacta

SEQ ID NO: 188041 - DNA, 67 bp, Homo sapiens
gagttaaaattggagattttgggttaaccaaagtcttgccacaagacaaagaatactataaagtaaa

SEQ ID NO: 188042 - DNA, 69 bp, Homo sapiens
tggagattttgggttaaccaaagtcttgccacaagacaaagaatactataaagtaaaagaacctggtga

SEQ ID NO: 188043 - DNA, 70 bp, Homo sapiens
taaccaaagtcttgccacaagacaaagaatactataaagtaaaagaacctggtgaaagtcccatattctg

SEQ ID NO: 188044 - DNA, 71 bp, Homo sapiens
cttgccacaagacaaagaatactataaagtaaaagaacctggtgaaagtcccatattctggtgagtatatt

SEQ ID NO: 188045 - DNA, 73 bp, Homo sapiens
caagacaaagaatactataaagtaaaagaacctggtgaaagtcccatattctggtgagtatatttcagtatga

SEQ ID NO: 188046 - DNA, 73 bp, Homo sapiens
gaatactataaagtaaaagaacctggtgaaagtcccatattctggtgagtatatttcagtatgataaatgaaa

SEQ ID NO: 188047 - DNA, 80 bp, Homo sapiens
agtccacatatcaagtaactgtcttttaaatgttattcatatatttacaggtatgctccagaatcactgacagagagcaa

SEQ ID NO: 188048 - DNA, 78 bp, Homo sapiens
tcaagtaactgtcttttaaatgttattcatatatttacaggtatgctccagaatcactgacagagagcaagttttctg

SEQ ID NO: 188049 - DNA, 79 bp, Homo sapiens
ttttaaatgttattcatatatttacaggtatgctccagaatcactgacagagagcaagttttctgtggcctcagatgtt

SEQ ID NO: 188050 - DNA, 81 bp, Homo sapiens
atgttattcatatatttacaggtatgctccagaatcactgacagagagcaagttttctgtggcctcagatgtttggagctt

SEQ ID NO: 188051 - DNA, 80 bp, Homo sapiens
tatatttacaggtatgctccagaatcactgacagagagcaagttttctgtggcctcagatgtttggagctttggagtggt

SEQ ID NO: 188052 - DNA, 81 bp, Homo sapiens
tatgctccagaatcactgacagagagcaagttttctgtggcctcagatgtttggagctttggagtggttctgtatgaactt

SEQ ID NO: 188053 - DNA, 79 bp, Homo sapiens
aatcactgacagagagcaagttttctgtggcctcagatgtttggagctttggagtggttctgtatgaacttttcacata

SEQ ID NO: 188054 - DNA, 78 bp, Homo sapiens
agagcaagttttctgtggcctcagatgtttggagctttggagtggttctgtatgaacttttcacatacattgagaaga

SEQ ID NO: 188055 - DNA, 76 bp, Homo sapiens
ttttctgtggcctcagatgtttggagctttggagtggttctgtatgaacttttcacatacattgagaagagtaaaa

SEQ ID NO: 188056 - DNA, 76 bp, Homo sapiens
tcagatgtttggagctttggagtggttctgtatgaacttttcacatacattgagaagagtaaaagtccaccagcgg

SEQ ID NO: 188057 - DNA, 75 bp, Homo sapiens
tttggagctttggagtggttctgtatgaacttttcacatacattgagaagagtaaaagtccaccagcggtcagtg

SEQ ID NO: 188058 - DNA, 73 bp, Homo sapiens
agtggttctgtatgaacttttcacatacattgagaagagtaaaagtccaccagcggtcagtgtgctttttatt

SEQ ID NO: 188059 - DNA, 73 bp, Homo sapiens
tatgaacttttcacatacattgagaagagtaaaagtccaccagcggtcagtgtgctttttatttactttcagt

SEQ ID NO: 188060 - DNA, 70 bp, Homo sapiens
cttttcacatacattgagaagagtaaaagtccaccagcggtcagtgtgctttttatttactttcagtttt

SEQ ID NO: 188061 - DNA, 71 bp, Homo sapiens
tgctacaaattaaatgtacaaaaaatattgaaagtgggtttgttttaggaatttatgcgtatgattggcaa

SEQ ID NO: 188062 - DNA, 70 bp, Homo sapiens
aatgtacaaaaaatattgaaagtgggtttgttttaggaatttatgcgtatgattggcaatgacaaacaag

SEQ ID NO: 188063 - DNA, 74 bp, Homo sapiens
aaatattgaaagtgggtttgttttaggaatttatgcgtatgattggcaatgacaaacaaggacagatgatcgtg

SEQ ID NO: 188064 - DNA, 76 bp, Homo sapiens
agtgggtttgttttaggaatttatgcgtatgattggcaatgacaaacaaggacagatgatcgtgttccatttgata

SEQ ID NO: 188065 - DNA, 77 bp, Homo sapiens
ttttaggaatttatgcgtatgattggcaatgacaaacaaggacagatgatcgtgttccatttgatagaacttttgaa

SEQ ID NO: 188066 - DNA, 78 bp, Homo sapiens
ggaatttatgcgtatgattggcaatgacaaacaaggacagatgatcgtgttccatttgatagaacttttgaagaataa

SEQ ID NO: 188067 - DNA, 79 bp, Homo sapiens
tatgattggcaatgacaaacaaggacagatgatcgtgttccatttgatagaacttttgaagaataatggaagattacca

SEQ ID NO: 188068 - DNA, 75 bp, Homo sapiens
aatgacaaacaaggacagatgatcgtgttccatttgatagaacttttgaagaataatggaagattaccaagacca

SEQ ID NO: 188069 - DNA, 77 bp, Homo sapiens
aaggacagatgatcgtgttccatttgatagaacttttgaagaataatggaagattaccaagaccagatggatgccca

SEQ ID NO: 188070 - DNA, 76 bp, Homo sapiens
atcgtgttccatttgatagaacttttgaagaataatggaagattaccaagaccagatggatgcccagatgaggtaa

SEQ ID NO: 188071 - DNA, 74 bp, Homo sapiens
catttgatagaacttttgaagaataatggaagattaccaagaccagatggatgcccagatgaggtaacaatttt

SEQ ID NO: 188072 - DNA, 70 bp, Homo sapiens
agaacttttgaagaataatggaagattaccaagaccagatggatgcccagatgaggtaacaatttttttt

SEQ ID NO: 188073 - DNA, 71 bp, Homo sapiens
agaataatggaagattaccaagaccagatggatgcccagatgaggtaacaatttttttttaatccagggta

SEQ ID NO: 188074 - DNA, 77 bp, Homo sapiens
agatggcccttagtgttcatttaattttggtttattttctcctttacagatctatatgatcatgacagaatgctgga

SEQ ID NO: 188075 - DNA, 78 bp, Homo sapiens
tagtgttcatttaattttggtttattttctcctttacagatctatatgatcatgacagaatgctggaacaataatgta

SEQ ID NO: 188076 - DNA, 76 bp, Homo sapiens
attttggtttattttctcctttacagatctatatgatcatgacagaatgctggaacaataatgtaaatcaacgccc

SEQ ID NO: 188077 - DNA, 76 bp, Homo sapiens
attttctcctttacagatctatatgatcatgacagaatgctggaacaataatgtaaatcaacgcccctcctttagg

SEQ ID NO: 188078 - DNA, 80 bp, Homo sapiens
tttacagatctatatgatcatgacagaatgctggaacaataatgtaaatcaacgcccctcctttagggatctagctcttc

SEQ ID NO: 188079 - DNA, 81 bp, Homo sapiens
tatatgatcatgacagaatgctggaacaataatgtaaatcaacgcccctcctttagggatctagctcttcgagtggatcaa

SEQ ID NO: 188080 - DNA, 76 bp, Homo sapiens
atgacagaatgctggaacaataatgtaaatcaacgcccctcctttagggatctagctcttcgagtggatcaaataa

SEQ ID NO: 188081 - DNA, 73 bp, Homo sapiens
tggaacaataatgtaaatcaacgcccctcctttagggatctagctcttcgagtggatcaaataagggataaca

SEQ ID NO: 188082 - DNA, 74 bp, Homo sapiens
ataatgtaaatcaacgcccctcctttagggatctagctcttcgagtggatcaaataagggataacatggctgga

SEQ ID NO: 188083 - DNA, 74 bp, Homo sapiens
aatcaacgcccctcctttagggatctagctcttcgagtggatcaaataagggataacatggctggatgaaagaa

SEQ ID NO: 188084 - DNA, 78 bp, Homo sapiens
tcctttagggatctagctcttcgagtggatcaaataagggataacatggctggatgaaagaaatgaccttcattctga

SEQ ID NO: 188085 - DNA, 78 bp, Homo sapiens
atctagctcttcgagtggatcaaataagggataacatggctggatgaaagaaatgaccttcattctgagaccaaagta

SEQ ID NO: 188086 - DNA, 76 bp, Homo sapiens
agtggatcaaataagggataacatggctggatgaaagaaatgaccttcattctgagaccaaagtagatttacagaa

SEQ ID NO: 188087 - DNA, 75 bp, Homo sapiens
atcaaataagggataacatggctggatgaaagaaatgaccttcattctgagaccaaagtagatttacagaacaaa

SEQ ID NO: 188088 - DNA, 74 bp, Homo sapiens
agaaatgaccttcattctgagaccaaagtagatttacagaacaaagttttatatttcacattgctgtggactat

SEQ ID NO: 188089 - DNA, 78 bp, Homo sapiens
ttcattctgagaccaaagtagatttacagaacaaagttttatatttcacattgctgtggactattattacatatatca

SEQ ID NO: 188090 - DNA, 76 bp, Homo sapiens
gaccaaagtagatttacagaacaaagttttatatttcacattgctgtggactattattacatatatcattattata

SEQ ID NO: 188091 - DNA, 84 bp, Homo sapiens
tacagaacaaagttttatatttcacattgctgtggactattattacatatatcattattatataaatcatgatgctagccagca

SEQ ID NO: 188092 - DNA, 84 bp, Homo sapiens
agttttatatttcacattgctgtggactattattacatatatcattattatataaatcatgatgctagccagcaaagatgtgaa

SEQ ID NO: 188093 - DNA, 88 bp, Homo sapiens
atttcacattgctgtggactattattacatatatcattattatataaatcatgatgctagccagcaaagatgtgaaaatatctgctca

SEQ ID NO: 188094 - DNA, 84 bp, Homo sapiens
gctgtggactattattacatatatcattattatataaatcatgatgctagccagcaaagatgtgaaaatatctgctcaaaactt

SEQ ID NO: 188095 - DNA, 82 bp, Homo sapiens
ctattattacatatatcattattatataaatcatgatgctagccagcaaagatgtgaaaatatctgctcaaaactttcaaag

SEQ ID NO: 188096 - DNA, 78 bp, Homo sapiens
tcattattatataaatcatgatgctagccagcaaagatgtgaaaatatctgctcaaaactttcaaagtttagtaagtt

SEQ ID NO: 188097 - DNA, 76 bp, Homo sapiens
ataaatcatgatgctagccagcaaagatgtgaaaatatctgctcaaaactttcaaagtttagtaagtttttcttca

SEQ ID NO: 188098 - DNA, 77 bp, Homo sapiens
atgatgctagccagcaaagatgtgaaaatatctgctcaaaactttcaaagtttagtaagtttttcttcatgaggcca

SEQ ID NO: 188099 - DNA, 73 bp, Homo sapiens
cagcaaagatgtgaaaatatctgctcaaaactttcaaagtttagtaagtttttcttcatgaggccaccagtaa

SEQ ID NO: 188100 - DNA, 72 bp, Homo sapiens
gatgtgaaaatatctgctcaaaactttcaaagtttagtaagtttttcttcatgaggccaccagtaaaagaca

SEQ ID NO: 188101 - DNA, 70 bp, Homo sapiens
gctcaaaactttcaaagtttagtaagtttttcttcatgaggccaccagtaaaagacattaatgagaattc

SEQ ID NO: 188102 - DNA, 71 bp, Homo sapiens
ttcaaagtttagtaagtttttcttcatgaggccaccagtaaaagacattaatgagaattccttagcaagga

SEQ ID NO: 188103 - DNA, 70 bp, Homo sapiens
gtttagtaagtttttcttcatgaggccaccagtaaaagacattaatgagaattccttagcaaggattttg

SEQ ID NO: 188104 - DNA, 70 bp, Homo sapiens
gaggccaccagtaaaagacattaatgagaattccttagcaaggattttgtaagaagtttcttaaacattg

SEQ ID NO: 188105 - DNA, 72 bp, Homo sapiens
attccttagcaaggattttgtaagaagtttcttaaacattgtcagttaacatcactcttgtctggcaaaaga

SEQ ID NO: 188106 - DNA, 69 bp, Homo sapiens
caaggattttgtaagaagtttcttaaacattgtcagttaacatcactcttgtctggcaaaagaaaaaaa

SEQ ID NO: 188107 - DNA, 67 bp, Homo sapiens
agaaaaaaaatagactttttcaactcagctttttgagacctgaaaaaattattatgtaaattttgca

SEQ ID NO: 188108 - DNA, 73 bp, Homo sapiens
tagactttttcaactcagctttttgagacctgaaaaaattattatgtaaattttgcaatgttaaagatgcaca

SEQ ID NO: 188109 - DNA, 77 bp, Homo sapiens
tcaactcagctttttgagacctgaaaaaattattatgtaaattttgcaatgttaaagatgcacagaatatgtatgta

SEQ ID NO: 188110 - DNA, 75 bp, Homo sapiens
cagctttttgagacctgaaaaaattattatgtaaattttgcaatgttaaagatgcacagaatatgtatgtatagt

SEQ ID NO: 188111 - DNA, 79 bp, Homo sapiens
ttttgcaatgttaaagatgcacagaatatgtatgtatagtttttaccacagtggatgtataataccttggcatcttgtg

SEQ ID NO: 188112 - DNA, 78 bp, Homo sapiens
gttaaagatgcacagaatatgtatgtatagtttttaccacagtggatgtataataccttggcatcttgtgtgatgttt

SEQ ID NO: 188113 - DNA, 79 bp, Homo sapiens
acagaatatgtatgtatagtttttaccacagtggatgtataataccttggcatcttgtgtgatgttttacacacatgag

SEQ ID NO: 188114 - DNA, 78 bp, Homo sapiens
tatgtatagtttttaccacagtggatgtataataccttggcatcttgtgtgatgttttacacacatgagggctggtgt

SEQ ID NO: 188115 - DNA, 78 bp, Homo sapiens
tttttaccacagtggatgtataataccttggcatcttgtgtgatgttttacacacatgagggctggtgttcattaata

SEQ ID NO: 188116 - DNA, 78 bp, Homo sapiens
agtggatgtataataccttggcatcttgtgtgatgttttacacacatgagggctggtgttcattaatactgttttcta

SEQ ID NO: 188117 - DNA, 76 bp, Homo sapiens
tgtataataccttggcatcttgtgtgatgttttacacacatgagggctggtgttcattaatactgttttctaattt

SEQ ID NO: 188118 - DNA, 76 bp, Homo sapiens
ttggcatcttgtgtgatgttttacacacatgagggctggtgttcattaatactgttttctaatttttccatagtta

SEQ ID NO: 188119 - DNA, 75 bp, Homo sapiens
tgtgtgatgttttacacacatgagggctggtgttcattaatactgttttctaatttttccatagttaatctataa

SEQ ID NO: 188120 - DNA, 73 bp, Homo sapiens
cacacatgagggctggtgttcattaatactgttttctaatttttccatagttaatctataattaattacttca

SEQ ID NO: 188121 - DNA, 72 bp, Homo sapiens
tgagggctggtgttcattaatactgttttctaatttttccatagttaatctataattaattacttcactata

SEQ ID NO: 188122 - DNA, 70 bp, Homo sapiens
tgttcattaatactgttttctaatttttccatagttaatctataattaattacttcactatacaaacaaa

SEQ ID NO: 188123 - DNA, 69 bp, Homo sapiens
tactgttttctaatttttccatagttaatctataattaattacttcactatacaaacaaattaagatgt

SEQ ID NO: 188124 - DNA, 70 bp, Homo sapiens
gttttctaatttttccatagttaatctataattaattacttcactatacaaacaaattaagatgttcaga

SEQ ID NO: 188125 - DNA, 72 bp, Homo sapiens
ctaatttttccatagttaatctataattaattacttcactatacaaacaaattaagatgttcagataattga

SEQ ID NO: 188126 - DNA, 73 bp, Homo sapiens
tccatagttaatctataattaattacttcactatacaaacaaattaagatgttcagataattgaataagtacc

SEQ ID NO: 188127 - DNA, 72 bp, Homo sapiens
attaattacttcactatacaaacaaattaagatgttcagataattgaataagtacctttgtgtccttgttca

SEQ ID NO: 188128 - DNA, 76 bp, Homo sapiens
tacaaacaaattaagatgttcagataattgaataagtacctttgtgtccttgttcatttatatcgctggccagcat

SEQ ID NO: 188129 - DNA, 77 bp, Homo sapiens
tcagataattgaataagtacctttgtgtccttgttcatttatatcgctggccagcattataagcaggtgtatacttt

SEQ ID NO: 188130 - DNA, 75 bp, Homo sapiens
aattgaataagtacctttgtgtccttgttcatttatatcgctggccagcattataagcaggtgtatacttttagc

SEQ ID NO: 188131 - DNA, 78 bp, Homo sapiens
tttgtgtccttgttcatttatatcgctggccagcattataagcaggtgtatacttttagcttgtagttccatgtactg

SEQ ID NO: 188132 - DNA, 77 bp, Homo sapiens
ttgttcatttatatcgctggccagcattataagcaggtgtatacttttagcttgtagttccatgtactgtaaatatt

SEQ ID NO: 188133 - DNA, 76 bp, Homo sapiens
atttatatcgctggccagcattataagcaggtgtatacttttagcttgtagttccatgtactgtaaatatttttca

SEQ ID NO: 188134 - DNA, 75 bp, Homo sapiens
tggccagcattataagcaggtgtatacttttagcttgtagttccatgtactgtaaatatttttcacataaaggga

SEQ ID NO: 188135 - DNA, 72 bp, Homo sapiens
taagcaggtgtatacttttagcttgtagttccatgtactgtaaatatttttcacataaagggaacaaatgtc

SEQ ID NO: 188136 - DNA, 71 bp, Homo sapiens
gcttgtagttccatgtactgtaaatatttttcacataaagggaacaaatgtctagttttatttgtatagga

SEQ ID NO: 188137 - DNA, 67 bp, Homo sapiens
cacataaagggaacaaatgtctagttttatttgtataggaaatttccctgaccctaaataatacatt

SEQ ID NO: 188138 - DNA, 66 bp, Homo sapiens
aagggaacaaatgtctagttttatttgtataggaaatttccctgaccctaaataatacattttgaa

SEQ ID NO: 188139 - DNA, 68 bp, Homo sapiens
ctagttttatttgtataggaaatttccctgaccctaaataatacattttgaaatgaaacaagcttaca

SEQ ID NO: 188140 - DNA, 70 bp, Homo sapiens
tttgtataggaaatttccctgaccctaaataatacattttgaaatgaaacaagcttacaaagatataatc

SEQ ID NO: 188141 - DNA, 68 bp, Homo sapiens
aggaaatttccctgaccctaaataatacattttgaaatgaaacaagcttacaaagatataatctattt

SEQ ID NO: 188142 - DNA, 70 bp, Homo sapiens
cctgaccctaaataatacattttgaaatgaaacaagcttacaaagatataatctattttattatggtttc

SEQ ID NO: 188143 - DNA, 72 bp, Homo sapiens
tacattttgaaatgaaacaagcttacaaagatataatctattttattatggtttcccttgtatctatttgtg

SEQ ID NO: 188144 - DNA, 70 bp, Homo sapiens
aacaagcttacaaagatataatctattttattatggtttcccttgtatctatttgtggtgaatgtgtttt

SEQ ID NO: 188145 - DNA, 71 bp, Homo sapiens
gatataatctattttattatggtttcccttgtatctatttgtggtgaatgtgttttttaaatggaactatc

SEQ ID NO: 188146 - DNA, 69 bp, Homo sapiens
ctattttattatggtttcccttgtatctatttgtggtgaatgtgttttttaaatggaactatctccaaa

SEQ ID NO: 188147 - DNA, 71 bp, Homo sapiens
ccttgtatctatttgtggtgaatgtgttttttaaatggaactatctccaaatttttctaagactactatga

SEQ ID NO: 188148 - DNA, 69 bp, Homo sapiens
tttgtggtgaatgtgttttttaaatggaactatctccaaatttttctaagactactatgaacagttttc

SEQ ID NO: 188149 - DNA, 65 bp, Homo sapiens
gtgttttttaaatggaactatctccaaatttttctaagactactatgaacagttttcttttaaaa

SEQ ID NO: 188150 - DNA, 68 bp, Homo sapiens
atggaactatctccaaatttttctaagactactatgaacagttttcttttaaaattttgagattaaga

SEQ ID NO: 188151 - DNA, 69 bp, Homo sapiens
tctccaaatttttctaagactactatgaacagttttcttttaaaattttgagattaagaatgccaggaa

SEQ ID NO: 188152 - DNA, 76 bp, Homo sapiens
ttttcttttaaaattttgagattaagaatgccaggaatattgtcatcctttgagctgctgactgccaataacattc

SEQ ID NO: 188153 - DNA, 84 bp, Homo sapiens
attaagaatgccaggaatattgtcatcctttgagctgctgactgccaataacattcttcgatctctgggatttatgctcatgaa

SEQ ID NO: 188154 - DNA, 81 bp, Homo sapiens
ccaggaatattgtcatcctttgagctgctgactgccaataacattcttcgatctctgggatttatgctcatgaactaaatt

SEQ ID NO: 188155 - DNA, 82 bp, Homo sapiens
tattgtcatcctttgagctgctgactgccaataacattcttcgatctctgggatttatgctcatgaactaaatttaagctta

SEQ ID NO: 188156 - DNA, 80 bp, Homo sapiens
tttgagctgctgactgccaataacattcttcgatctctgggatttatgctcatgaactaaatttaagcttaagccataaa

SEQ ID NO: 188157 - DNA, 77 bp, Homo sapiens
ctgactgccaataacattcttcgatctctgggatttatgctcatgaactaaatttaagcttaagccataaaatagat

SEQ ID NO: 188158 - DNA, 76 bp, Homo sapiens
caataacattcttcgatctctgggatttatgctcatgaactaaatttaagcttaagccataaaatagattagattg

SEQ ID NO: 188159 - DNA, 73 bp, Homo sapiens
cttcgatctctgggatttatgctcatgaactaaatttaagcttaagccataaaatagattagattgtttttta

SEQ ID NO: 188160 - DNA, 70 bp, Homo sapiens
gggatttatgctcatgaactaaatttaagcttaagccataaaatagattagattgttttttaaaaatgga

SEQ ID NO: 188161 - DNA, 73 bp, Homo sapiens
ttaagcttaagccataaaatagattagattgttttttaaaaatggatagctcattaagaagtgcagcaggtta

SEQ ID NO: 188162 - DNA, 72 bp, Homo sapiens
cttaagccataaaatagattagattgttttttaaaaatggatagctcattaagaagtgcagcaggttaagaa

SEQ ID NO: 188163 - DNA, 69 bp, Homo sapiens
aaatagattagattgttttttaaaaatggatagctcattaagaagtgcagcaggttaagaattttttcc

SEQ ID NO: 188164 - DNA, 69 bp, Homo sapiens
gttttttaaaaatggatagctcattaagaagtgcagcaggttaagaattttttcctaaagactgtatat

SEQ ID NO: 188165 - DNA, 71 bp, Homo sapiens
ttaaaaatggatagctcattaagaagtgcagcaggttaagaattttttcctaaagactgtatatttgaggg

SEQ ID NO: 188166 - DNA, 74 bp, Homo sapiens
agtgcagcaggttaagaattttttcctaaagactgtatatttgaggggtttcagaattttgcattgcagtcata

SEQ ID NO: 188167 - DNA, 73 bp, Homo sapiens
gcaggttaagaattttttcctaaagactgtatatttgaggggtttcagaattttgcattgcagtcatagaaga

SEQ ID NO: 188168 - DNA, 72 bp, Homo sapiens
tttttcctaaagactgtatatttgaggggtttcagaattttgcattgcagtcatagaagagatttatttcct

SEQ ID NO: 188169 - DNA, 72 bp, Homo sapiens
agactgtatatttgaggggtttcagaattttgcattgcagtcatagaagagatttatttcctttttagaggg

SEQ ID NO: 188170 - DNA, 71 bp, Homo sapiens
atttgaggggtttcagaattttgcattgcagtcatagaagagatttatttcctttttagaggggaaatgag

SEQ ID NO: 188171 - DNA, 71 bp, Homo sapiens
gtttcagaattttgcattgcagtcatagaagagatttatttcctttttagaggggaaatgaggtaaataag

SEQ ID NO: 188172 - DNA, 72 bp, Homo sapiens
tgcattgcagtcatagaagagatttatttcctttttagaggggaaatgaggtaaataagtaaaaaagtatgc

SEQ ID NO: 188173 - DNA, 68 bp, Homo sapiens
cagtcatagaagagatttatttcctttttagaggggaaatgaggtaaataagtaaaaaagtatgcttg

SEQ ID NO: 188174 - DNA, 64 bp, Homo sapiens
agagatttatttcctttttagaggggaaatgaggtaaataagtaaaaaagtatgcttgttaatt

SEQ ID NO: 188175 - DNA, 67 bp, Homo sapiens
tcctttttagaggggaaatgaggtaaataagtaaaaaagtatgcttgttaattttattcaagaatgc

SEQ ID NO: 188176 - DNA, 69 bp, Homo sapiens
gggaaatgaggtaaataagtaaaaaagtatgcttgttaattttattcaagaatgccagtagaaaattca

SEQ ID NO: 188177 - DNA, 69 bp, Homo sapiens
gaggtaaataagtaaaaaagtatgcttgttaattttattcaagaatgccagtagaaaattcataacgtg

SEQ ID NO: 188178 - DNA, 69 bp, Homo sapiens
aaaaagtatgcttgttaattttattcaagaatgccagtagaaaattcataacgtgtatctttaagaaaa

SEQ ID NO: 188179 - DNA, 74 bp, Homo sapiens
gcttgttaattttattcaagaatgccagtagaaaattcataacgtgtatctttaagaaaaatgagcatacatct

SEQ ID NO: 188180 - DNA, 75 bp, Homo sapiens
ttattcaagaatgccagtagaaaattcataacgtgtatctttaagaaaaatgagcatacatcttaaatcttttca

SEQ ID NO: 188181 - DNA, 73 bp, Homo sapiens
gaatgccagtagaaaattcataacgtgtatctttaagaaaaatgagcatacatcttaaatcttttcaattaag

SEQ ID NO: 188182 - DNA, 70 bp, Homo sapiens
gaaaattcataacgtgtatctttaagaaaaatgagcatacatcttaaatcttttcaattaagtataaggg

SEQ ID NO: 188183 - DNA, 69 bp, Homo sapiens
cgtgtatctttaagaaaaatgagcatacatcttaaatcttttcaattaagtataaggggttgttcgttg

SEQ ID NO: 188184 - DNA, 70 bp, Homo sapiens
ttaagaaaaatgagcatacatcttaaatcttttcaattaagtataaggggttgttcgttgttgtcatttg

SEQ ID NO: 188185 - DNA, 73 bp, Homo sapiens
gagcatacatcttaaatcttttcaattaagtataaggggttgttcgttgttgtcatttgttatagtgctactc

SEQ ID NO: 188186 - DNA, 70 bp, Homo sapiens
catcttaaatcttttcaattaagtataaggggttgttcgttgttgtcatttgttatagtgctactccact

SEQ ID NO: 188187 - DNA, 73 bp, Homo sapiens
ttcaattaagtataaggggttgttcgttgttgtcatttgttatagtgctactccactttagacaccatagcta

SEQ ID NO: 188188 - DNA, 71 bp, Homo sapiens
ttaagtataaggggttgttcgttgttgtcatttgttatagtgctactccactttagacaccatagctaaaa

SEQ ID NO: 188189 - DNA, 72 bp, Homo sapiens
ttgttcgttgttgtcatttgttatagtgctactccactttagacaccatagctaaaataaaatatggtgggt

SEQ ID NO: 188190 - DNA, 74 bp, Homo sapiens
tgttgtcatttgttatagtgctactccactttagacaccatagctaaaataaaatatggtgggttttgtgtgtg

SEQ ID NO: 188191 - DNA, 67 bp, Homo sapiens
tgtgtgtgttatttatacaaaacttaaaatacttgctgttttgattaaaaagaaaatagtttcttac

SEQ ID NO: 188192 - DNA, 63 bp, Homo sapiens
aacttaaaatacttgctgttttgattaaaaagaaaatagtttcttactttatttttactggta

SEQ ID NO: 188193 - DNA, 65 bp, Homo sapiens
tacttgctgttttgattaaaaagaaaatagtttcttactttatttttactggtatgttctacttt

SEQ ID NO: 188194 - DNA, 64 bp, Homo sapiens
ctgttttgattaaaaagaaaatagtttcttactttatttttactggtatgttctacttttttga

SEQ ID NO: 188195 - DNA, 78 bp, Homo sapiens
acctgaactgcgcaggcgcggcgcgagatcgcgggagcgagcgcgcggtaacagttcgcggcagttcgcgcgggagcg

SEQ ID NO: 188196 - DNA, 77 bp, Homo sapiens
aactgcgcaggcgcggcgcgagatcgcgggagcgagcgcgcggtaacagttcgcggcagttcgcgcgggagcggggc

SEQ ID NO: 188197 - DNA, 76 bp, Homo sapiens
ggcgcgagatcgcgggagcgagcgcgcggtaacagttcgcggcagttcgcgcgggagcggggcgcctgggtggatg

SEQ ID NO: 188198 - DNA, 74 bp, Homo sapiens
atcgcgggagcgagcgcgcggtaacagttcgcggcagttcgcgcgggagcggggcgcctgggtggatgggcgct

SEQ ID NO: 188199 - DNA, 73 bp, Homo sapiens
agcgcgcggtaacagttcgcggcagttcgcgcgggagcggggcgcctgggtggatgggcgcttgggcgcctgg

SEQ ID NO: 188200 - DNA, 74 bp, Homo sapiens
gtaacagttcgcggcagttcgcgcgggagcggggcgcctgggtggatgggcgcttgggcgcctgggctgccgga

SEQ ID NO: 188201 - DNA, 72 bp, Homo sapiens
cggcagttcgcgcgggagcggggcgcctgggtggatgggcgcttgggcgcctgggctgccggacggtgggaa

SEQ ID NO: 188202 - DNA, 70 bp, Homo sapiens
cgggagcggggcgcctgggtggatgggcgcttgggcgcctgggctgccggacggtgggaacggaagtcgc

SEQ ID NO: 188203 - DNA, 74 bp, Homo sapiens
ggcgcctgggtggatgggcgcttgggcgcctgggctgccggacggtgggaacggaagtcgctgtgggacgctga

SEQ ID NO: 188204 - DNA, 74 bp, Homo sapiens
tgggtggatgggcgcttgggcgcctgggctgccggacggtgggaacggaagtcgctgtgggacgctgaggaagc

SEQ ID NO: 188205 - DNA, 74 bp, Homo sapiens
ttgggcgcctgggctgccggacggtgggaacggaagtcgctgtgggacgctgaggaagccaggatggcgactcc

SEQ ID NO: 188206 - DNA, 76 bp, Homo sapiens
tgggctgccggacggtgggaacggaagtcgctgtgggacgctgaggaagccaggatggcgactccgagcaagaaga

SEQ ID NO: 188207 - DNA, 74 bp, Homo sapiens
acggtgggaacggaagtcgctgtgggacgctgaggaagccaggatggcgactccgagcaagaagacgtcaactc

SEQ ID NO: 188208 - DNA, 75 bp, Homo sapiens
gggaacggaagtcgctgtgggacgctgaggaagccaggatggcgactccgagcaagaagacgtcaactccaagcc

SEQ ID NO: 188209 - DNA, 77 bp, Homo sapiens
tgaggaagccaggatggcgactccgagcaagaagacgtcaactccaagcccccagccttccaagagagctctcccga

SEQ ID NO: 188210 - DNA, 76 bp, Homo sapiens
aagccaggatggcgactccgagcaagaagacgtcaactccaagcccccagccttccaagagagctctcccgagaga

SEQ ID NO: 188211 - DNA, 72 bp, Homo sapiens
actccgagcaagaagacgtcaactccaagcccccagccttccaagagagctctcccgagagacccttcgtcg

SEQ ID NO: 188212 - DNA, 72 bp, Homo sapiens
agcaagaagacgtcaactccaagcccccagccttccaagagagctctcccgagagacccttcgtcggaggtc

SEQ ID NO: 188213 - DNA, 71 bp, Homo sapiens
actccaagcccccagccttccaagagagctctcccgagagacccttcgtcggaggtcccgagcaagaggaa

SEQ ID NO: 188214 - DNA, 71 bp, Homo sapiens
cccagccttccaagagagctctcccgagagacccttcgtcggaggtcccgagcaagaggaagaattcggcc

SEQ ID NO: 188215 - DNA, 72 bp, Homo sapiens
cttccaagagagctctcccgagagacccttcgtcggaggtcccgagcaagaggaagaattcggccccgcagc

SEQ ID NO: 188216 - DNA, 73 bp, Homo sapiens
agagacccttcgtcggaggtcccgagcaagaggaagaattcggccccgcagctgccgctgttgcagtcgtccg

SEQ ID NO: 188217 - DNA, 73 bp, Homo sapiens
ggaggtcccgagcaagaggaagaattcggccccgcagctgccgctgttgcagtcgtccgggcctttcgtggaa

SEQ ID NO: 188218 - DNA, 75 bp, Homo sapiens
agcaagaggaagaattcggccccgcagctgccgctgttgcagtcgtccgggcctttcgtggaaggctctatcgtc

SEQ ID NO: 188219 - DNA, 76 bp, Homo sapiens
aagaattcggccccgcagctgccgctgttgcagtcgtccgggcctttcgtggaaggctctatcgtccgcatctcga

SEQ ID NO: 188220 - DNA, 77 bp, Homo sapiens
cccgcagctgccgctgttgcagtcgtccgggcctttcgtggaaggctctatcgtccgcatctcgatggagaacttcc

SEQ ID NO: 188221 - DNA, 74 bp, Homo sapiens
ccgctgttgcagtcgtccgggcctttcgtggaaggctctatcgtccgcatctcgatggagaacttcctgtaagt

SEQ ID NO: 188222 - DNA, 72 bp, Homo sapiens
agtcgtccgggcctttcgtggaaggctctatcgtccgcatctcgatggagaacttcctgtaagttgcccgga

SEQ ID NO: 188223 - DNA, 73 bp, Homo sapiens
tccgggcctttcgtggaaggctctatcgtccgcatctcgatggagaacttcctgtaagttgcccggaggccgc

SEQ ID NO: 188224 - DNA, 75 bp, Homo sapiens
tggaaggctctatcgtccgcatctcgatggagaacttcctgtaagttgcccggaggccgcgccgcgggtgtggag

SEQ ID NO: 188225 - DNA, 77 bp, Homo sapiens
gtggttttgtatctctccttaataatttcatctctttataattcagaacatatgatatttgtgaagtatctcctgga

SEQ ID NO: 188226 - DNA, 76 bp, Homo sapiens
gtatctctccttaataatttcatctctttataattcagaacatatgatatttgtgaagtatctcctggaccccact

SEQ ID NO: 188227 - DNA, 77 bp, Homo sapiens
aataatttcatctctttataattcagaacatatgatatttgtgaagtatctcctggaccccacttgaatatgatcgt

SEQ ID NO: 188228 - DNA, 79 bp, Homo sapiens
atctctttataattcagaacatatgatatttgtgaagtatctcctggaccccacttgaatatgatcgttggagccaatg

SEQ ID NO: 188229 - DNA, 79 bp, Homo sapiens
ttataattcagaacatatgatatttgtgaagtatctcctggaccccacttgaatatgatcgttggagccaatggaacag

SEQ ID NO: 188230 - DNA, 78 bp, Homo sapiens
atatgatatttgtgaagtatctcctggaccccacttgaatatgatcgttggagccaatggaacagggaagtcgagcat

SEQ ID NO: 188231 - DNA, 78 bp, Homo sapiens
tatttgtgaagtatctcctggaccccacttgaatatgatcgttggagccaatggaacagggaagtcgagcattgtgtg

SEQ ID NO: 188232 - DNA, 79 bp, Homo sapiens
tatctcctggaccccacttgaatatgatcgttggagccaatggaacagggaagtcgagcattgtgtgtgccatttgcct

SEQ ID NO: 188233 - DNA, 79 bp, Homo sapiens
cacttgaatatgatcgttggagccaatggaacagggaagtcgagcattgtgtgtgccatttgccttggtttagctggaa

SEQ ID NO: 188234 - DNA, 76 bp, Homo sapiens
aatatgatcgttggagccaatggaacagggaagtcgagcattgtgtgtgccatttgccttggtttagctggaaaac

SEQ ID NO: 188235 - DNA, 77 bp, Homo sapiens
ttggagccaatggaacagggaagtcgagcattgtgtgtgccatttgccttggtttagctggaaaacctgctttcatg

SEQ ID NO: 188236 - DNA, 77 bp, Homo sapiens
aacagggaagtcgagcattgtgtgtgccatttgccttggtttagctggaaaacctgctttcatgggacgagcagata

SEQ ID NO: 188237 - DNA, 78 bp, Homo sapiens
tcgagcattgtgtgtgccatttgccttggtttagctggaaaacctgctttcatgggacgagcagataaggtgagttaa

SEQ ID NO: 188238 - DNA, 76 bp, Homo sapiens
tgtgtgccatttgccttggtttagctggaaaacctgctttcatgggacgagcagataaggtgagttaatataatta

SEQ ID NO: 188239 - DNA, 71 bp, Homo sapiens
atttgccttggtttagctggaaaacctgctttcatgggacgagcagataaggtgagttaatataattactt

SEQ ID NO: 188240 - DNA, 70 bp, Homo sapiens
ggtttagctggaaaacctgctttcatgggacgagcagataaggtgagttaatataattactttttaagaa

SEQ ID NO: 188241 - DNA, 75 bp, Homo sapiens
taatgactgctaaatctctgattgttaacctgggaatgtcactacacagctcactttttcttttttatgtcttag

SEQ ID NO: 188242 - DNA, 71 bp, Homo sapiens
taaatctctgattgttaacctgggaatgtcactacacagctcactttttcttttttatgtcttaggttggg

SEQ ID NO: 188243 - DNA, 66 bp, Homo sapiens
attgttaacctgggaatgtcactacacagctcactttttcttttttatgtcttaggttgggttttt

SEQ ID NO: 188244 - DNA, 70 bp, Homo sapiens
aatgtcactacacagctcactttttcttttttatgtcttaggttgggttttttgtgaagagaggatgttc

SEQ ID NO: 188245 - DNA, 69 bp, Homo sapiens
actacacagctcactttttcttttttatgtcttaggttgggttttttgtgaagagaggatgttctagag

SEQ ID NO: 188246 - DNA, 70 bp, Homo sapiens
ttttcttttttatgtcttaggttgggttttttgtgaagagaggatgttctagaggcatggttgaaattga

SEQ ID NO: 188247 - DNA, 71 bp, Homo sapiens
ttttatgtcttaggttgggttttttgtgaagagaggatgttctagaggcatggttgaaattgaattgtaag

SEQ ID NO: 188248 - DNA, 70 bp, Homo sapiens
cttaggttgggttttttgtgaagagaggatgttctagaggcatggttgaaattgaattgtaagtgttaaa

SEQ ID NO: 188249 - DNA, 72 bp, Homo sapiens
ttgtgaagagaggatgttctagaggcatggttgaaattgaattgtaagtgttaaaagtgctaaaactccttt

SEQ ID NO: 188250 - DNA, 70 bp, Homo sapiens
agagaggatgttctagaggcatggttgaaattgaattgtaagtgttaaaagtgctaaaactcctttttcc

SEQ ID NO: 188251 - DNA, 68 bp, Homo sapiens
gttctagaggcatggttgaaattgaattgtaagtgttaaaagtgctaaaactcctttttcctataaaa

SEQ ID NO: 188252 - DNA, 66 bp, Homo sapiens
catggttgaaattgaattgtaagtgttaaaagtgctaaaactcctttttcctataaaattcttagt

SEQ ID NO: 188253 - DNA, 68 bp, Homo sapiens
ttgaatataaagattcttaaattattttttaattaggttcagggcttctggaaatcttgtaatcaccc

SEQ ID NO: 188254 - DNA, 70 bp, Homo sapiens
agattcttaaattattttttaattaggttcagggcttctggaaatcttgtaatcacccgtgagattgatg

SEQ ID NO: 188255 - DNA, 70 bp, Homo sapiens
aattattttttaattaggttcagggcttctggaaatcttgtaatcacccgtgagattgatgtggcaaaaa

SEQ ID NO: 188256 - DNA, 72 bp, Homo sapiens
ttttaattaggttcagggcttctggaaatcttgtaatcacccgtgagattgatgtggcaaaaaatcagtcct

SEQ ID NO: 188257 - DNA, 74 bp, Homo sapiens
agggcttctggaaatcttgtaatcacccgtgagattgatgtggcaaaaaatcagtccttttggttcatcaacaa

SEQ ID NO: 188258 - DNA, 73 bp, Homo sapiens
ttctggaaatcttgtaatcacccgtgagattgatgtggcaaaaaatcagtccttttggttcatcaacaaaaaa

SEQ ID NO: 188259 - DNA, 73 bp, Homo sapiens
ttgtaatcacccgtgagattgatgtggcaaaaaatcagtccttttggttcatcaacaaaaaatctacaaccca

SEQ ID NO: 188260 - DNA, 73 bp, Homo sapiens
gtgagattgatgtggcaaaaaatcagtccttttggttcatcaacaaaaaatctacaacccagaaaatagtgga

SEQ ID NO: 188261 - DNA, 71 bp, Homo sapiens
gatgtggcaaaaaatcagtccttttggttcatcaacaaaaaatctacaacccagaaaatagtggaagagaa

SEQ ID NO: 188262 - DNA, 70 bp, Homo sapiens
aaaatcagtccttttggttcatcaacaaaaaatctacaacccagaaaatagtggaagagaaagttgcagc

SEQ ID NO: 188263 - DNA, 72 bp, Homo sapiens
tggttcatcaacaaaaaatctacaacccagaaaatagtggaagagaaagttgcagccttaaatattcaagtg

SEQ ID NO: 188264 - DNA, 69 bp, Homo sapiens
acaaaaaatctacaacccagaaaatagtggaagagaaagttgcagccttaaatattcaagtggggaatc

SEQ ID NO: 188265 - DNA, 71 bp, Homo sapiens
aaatctacaacccagaaaatagtggaagagaaagttgcagccttaaatattcaagtggggaatctttgcca

SEQ ID NO: 188266 - DNA, 70 bp, Homo sapiens
aaaatagtggaagagaaagttgcagccttaaatattcaagtggggaatctttgccagtttctccctcagg

SEQ ID NO: 188267 - DNA, 73 bp, Homo sapiens
aagagaaagttgcagccttaaatattcaagtggggaatctttgccagtttctccctcaggtatgagagaaata

SEQ ID NO: 188268 - DNA, 72 bp, Homo sapiens
aaagttgcagccttaaatattcaagtggggaatctttgccagtttctccctcaggtatgagagaaataaatg

SEQ ID NO: 188269 - DNA, 72 bp, Homo sapiens
ttaaatattcaagtggggaatctttgccagtttctccctcaggtatgagagaaataaatgtaaagatgggaa

SEQ ID NO: 188270 - DNA, 78 bp, Homo sapiens
tatgtaaatgaatgatagttgctgatatttaatttttgtgctctaggacaaagttggagaatttgctaaactcagcaa

SEQ ID NO: 188271 - DNA, 77 bp, Homo sapiens
atgaatgatagttgctgatatttaatttttgtgctctaggacaaagttggagaatttgctaaactcagcaaaattga

SEQ ID NO: 188272 - DNA, 75 bp, Homo sapiens
tgctgatatttaatttttgtgctctaggacaaagttggagaatttgctaaactcagcaaaattgaactcctcgaa

SEQ ID NO: 188273 - DNA, 72 bp, Homo sapiens
atttaatttttgtgctctaggacaaagttggagaatttgctaaactcagcaaaattgaactcctcgaagcca

SEQ ID NO: 188274 - DNA, 73 bp, Homo sapiens
ctctaggacaaagttggagaatttgctaaactcagcaaaattgaactcctcgaagccactgaaaagtcaattg

SEQ ID NO: 188275 - DNA, 71 bp, Homo sapiens
acaaagttggagaatttgctaaactcagcaaaattgaactcctcgaagccactgaaaagtcaattggtccc

SEQ ID NO: 188276 - DNA, 73 bp, Homo sapiens
aatttgctaaactcagcaaaattgaactcctcgaagccactgaaaagtcaattggtcccccagaaatgcacaa

SEQ ID NO: 188277 - DNA, 75 bp, Homo sapiens
taaactcagcaaaattgaactcctcgaagccactgaaaagtcaattggtcccccagaaatgcacaaatatcactg

SEQ ID NO: 188278 - DNA, 74 bp, Homo sapiens
aaaattgaactcctcgaagccactgaaaagtcaattggtcccccagaaatgcacaaatatcactgtgaactcaa

SEQ ID NO: 188279 - DNA, 73 bp, Homo sapiens
ctcctcgaagccactgaaaagtcaattggtcccccagaaatgcacaaatatcactgtgaactcaaaaacttaa

SEQ ID NO: 188280 - DNA, 71 bp, Homo sapiens
tgaaaagtcaattggtcccccagaaatgcacaaatatcactgtgaactcaaaaacttaagggagaaagaaa

SEQ ID NO: 188281 - DNA, 70 bp, Homo sapiens
aattggtcccccagaaatgcacaaatatcactgtgaactcaaaaacttaagggagaaagaaaaacagctc

SEQ ID NO: 188282 - DNA, 71 bp, Homo sapiens
cagaaatgcacaaatatcactgtgaactcaaaaacttaagggagaaagaaaaacagctcgaggtactttaa

SEQ ID NO: 188283 - DNA, 71 bp, Homo sapiens
gcacaaatatcactgtgaactcaaaaacttaagggagaaagaaaaacagctcgaggtactttaaatagaca

SEQ ID NO: 188284 - DNA, 69 bp, Homo sapiens
tcactgtgaactcaaaaacttaagggagaaagaaaaacagctcgaggtactttaaatagacaactcatt

SEQ ID NO: 188285 - DNA, 67 bp, Homo sapiens
ctcaaaaacttaagggagaaagaaaaacagctcgaggtactttaaatagacaactcatttgtattgt

SEQ ID NO: 188286 - DNA, 77 bp, Homo sapiens
gttgtcattttttctgtcaaactgattgttcaacatatatttattgtagacctcatgcaaagagaaaactgagtatc

SEQ ID NO: 188287 - DNA, 77 bp, Homo sapiens
ctgtcaaactgattgttcaacatatatttattgtagacctcatgcaaagagaaaactgagtatctacagaaaatggt

SEQ ID NO: 188288 - DNA, 78 bp, Homo sapiens
ctgattgttcaacatatatttattgtagacctcatgcaaagagaaaactgagtatctacagaaaatggttcagaggaa

SEQ ID NO: 188289 - DNA, 78 bp, Homo sapiens
catatatttattgtagacctcatgcaaagagaaaactgagtatctacagaaaatggttcagaggaatgaaagatataa

SEQ ID NO: 188290 - DNA, 78 bp, Homo sapiens
tattgtagacctcatgcaaagagaaaactgagtatctacagaaaatggttcagaggaatgaaagatataaacaagatg

SEQ ID NO: 188291 - DNA, 78 bp, Homo sapiens
tcatgcaaagagaaaactgagtatctacagaaaatggttcagaggaatgaaagatataaacaagatgtggagaggttc

SEQ ID NO: 188292 - DNA, 76 bp, Homo sapiens
agagaaaactgagtatctacagaaaatggttcagaggaatgaaagatataaacaagatgtggagaggttctatgaa

SEQ ID NO: 188293 - DNA, 76 bp, Homo sapiens
tatctacagaaaatggttcagaggaatgaaagatataaacaagatgtggagaggttctatgaacggaagcgacatt

SEQ ID NO: 188294 - DNA, 74 bp, Homo sapiens
aaatggttcagaggaatgaaagatataaacaagatgtggagaggttctatgaacggaagcgacatttagattta

SEQ ID NO: 188295 - DNA, 76 bp, Homo sapiens
agaggaatgaaagatataaacaagatgtggagaggttctatgaacggaagcgacatttagatttaattgagatgct

SEQ ID NO: 188296 - DNA, 76 bp, Homo sapiens
agatataaacaagatgtggagaggttctatgaacggaagcgacatttagatttaattgagatgcttgaagcaaaaa

SEQ ID NO: 188297 - DNA, 76 bp, Homo sapiens
taaacaagatgtggagaggttctatgaacggaagcgacatttagatttaattgagatgcttgaagcaaaaaggcca

SEQ ID NO: 188298 - DNA, 73 bp, Homo sapiens
agaggttctatgaacggaagcgacatttagatttaattgagatgcttgaagcaaaaaggccatgggtggtaag

SEQ ID NO: 188299 - DNA, 74 bp, Homo sapiens
tatgaacggaagcgacatttagatttaattgagatgcttgaagcaaaaaggccatgggtggtaagtcataattt

SEQ ID NO: 188300 - DNA, 73 bp, Homo sapiens
cgacatttagatttaattgagatgcttgaagcaaaaaggccatgggtggtaagtcataatttttagaggcaaa

SEQ ID NO: 188301 - DNA, 71 bp, Homo sapiens
tttaattgagatgcttgaagcaaaaaggccatgggtggtaagtcataatttttagaggcaaagtacgtgtt

SEQ ID NO: 188302 - DNA, 70 bp, Homo sapiens
agtttaaggtagggcattaacttctgtttgttgaattatttgcaaggaatatgaaaatgttcgtcaggaa

SEQ ID NO: 188303 - DNA, 73 bp, Homo sapiens
ggtagggcattaacttctgtttgttgaattatttgcaaggaatatgaaaatgttcgtcaggaatatgaagaag

SEQ ID NO: 188304 - DNA, 72 bp, Homo sapiens
cttctgtttgttgaattatttgcaaggaatatgaaaatgttcgtcaggaatatgaagaagtaaaactagttc

SEQ ID NO: 188305 - DNA, 72 bp, Homo sapiens
gttgaattatttgcaaggaatatgaaaatgttcgtcaggaatatgaagaagtaaaactagttcgtgaccgag

SEQ ID NO: 188306 - DNA, 73 bp, Homo sapiens
tatttgcaaggaatatgaaaatgttcgtcaggaatatgaagaagtaaaactagttcgtgaccgagtgaaggaa

SEQ ID NO: 188307 - DNA, 72 bp, Homo sapiens
atatgaaaatgttcgtcaggaatatgaagaagtaaaactagttcgtgaccgagtgaaggaagaggtcagaaa

SEQ ID NO: 188308 - DNA, 70 bp, Homo sapiens
aatgttcgtcaggaatatgaagaagtaaaactagttcgtgaccgagtgaaggaagaggtcagaaaactta

SEQ ID NO: 188309 - DNA, 67 bp, Homo sapiens
aggaatatgaagaagtaaaactagttcgtgaccgagtgaaggaagaggtcagaaaacttaaagaagg

SEQ ID NO: 188310 - DNA, 68 bp, Homo sapiens
aagtaaaactagttcgtgaccgagtgaaggaagaggtcagaaaacttaaagaagggcagattcctgta

SEQ ID NO: 188311 - DNA, 73 bp, Homo sapiens
tagttcgtgaccgagtgaaggaagaggtcagaaaacttaaagaagggcagattcctgtaacatgtcgaattga

SEQ ID NO: 188312 - DNA, 71 bp, Homo sapiens
agtgaaggaagaggtcagaaaacttaaagaagggcagattcctgtaacatgtcgaattgaagaaatggaaa

SEQ ID NO: 188313 - DNA, 72 bp, Homo sapiens
aggtcagaaaacttaaagaagggcagattcctgtaacatgtcgaattgaagaaatggaaaacgagcgtcaca

SEQ ID NO: 188314 - DNA, 70 bp, Homo sapiens
aaaacttaaagaagggcagattcctgtaacatgtcgaattgaagaaatggaaaacgagcgtcacaatttg

SEQ ID NO: 188315 - DNA, 74 bp, Homo sapiens
aagggcagattcctgtaacatgtcgaattgaagaaatggaaaacgagcgtcacaatttggaggctcgaatcaaa

SEQ ID NO: 188316 - DNA, 72 bp, Homo sapiens
attcctgtaacatgtcgaattgaagaaatggaaaacgagcgtcacaatttggaggctcgaatcaaagaaaag

SEQ ID NO: 188317 - DNA, 69 bp, Homo sapiens
atgtcgaattgaagaaatggaaaacgagcgtcacaatttggaggctcgaatcaaagaaaaggtactttt

SEQ ID NO: 188318 - DNA, 67 bp, Homo sapiens
aagaaatggaaaacgagcgtcacaatttggaggctcgaatcaaagaaaaggtactttttggtttcaa

SEQ ID NO: 188319 - DNA, 67 bp, Homo sapiens
gaaaacgagcgtcacaatttggaggctcgaatcaaagaaaaggtactttttggtttcaattttggat

SEQ ID NO: 188320 - DNA, 68 bp, Homo sapiens
atataatttgcttgcatgagtttttaactagctgtccccccctctccccggtttaattttacaggcaa

SEQ ID NO: 188321 - DNA, 68 bp, Homo sapiens
ttgcatgagtttttaactagctgtccccccctctccccggtttaattttacaggcaacagatattaag

SEQ ID NO: 188322 - DNA, 67 bp, Homo sapiens
tttttaactagctgtccccccctctccccggtttaattttacaggcaacagatattaaggaggcatc

SEQ ID NO: 188323 - DNA, 69 bp, Homo sapiens
ctgtccccccctctccccggtttaattttacaggcaacagatattaaggaggcatctcaaaaatgcaaa

SEQ ID NO: 188324 - DNA, 74 bp, Homo sapiens
tccccggtttaattttacaggcaacagatattaaggaggcatctcaaaaatgcaaacagaagcaagatgttata

SEQ ID NO: 188325 - DNA, 74 bp, Homo sapiens
ggtttaattttacaggcaacagatattaaggaggcatctcaaaaatgcaaacagaagcaagatgttatagaaag

SEQ ID NO: 188326 - DNA, 77 bp, Homo sapiens
aggcaacagatattaaggaggcatctcaaaaatgcaaacagaagcaagatgttatagaaaggaaagataaacatgta

SEQ ID NO: 188327 - DNA, 74 bp, Homo sapiens
agatattaaggaggcatctcaaaaatgcaaacagaagcaagatgttatagaaaggaaagataaacatgtaaggt

SEQ ID NO: 188328 - DNA, 75 bp, Homo sapiens
gaggcatctcaaaaatgcaaacagaagcaagatgttatagaaaggaaagataaacatgtaaggtttcatactaaa

SEQ ID NO: 188329 - DNA, 69 bp, Homo sapiens
aaaatgcaaacagaagcaagatgttatagaaaggaaagataaacatgtaaggtttcatactaaaatttt

SEQ ID NO: 188330 - DNA, 70 bp, Homo sapiens
acagaagcaagatgttatagaaaggaaagataaacatgtaaggtttcatactaaaatttttattacatta

SEQ ID NO: 188331 - DNA, 68 bp, Homo sapiens
tgttatagaaaggaaagataaacatgtaaggtttcatactaaaatttttattacattaaagtttgctc

SEQ ID NO: 188332 - DNA, 70 bp, Homo sapiens
caagaggaaaacagtctcaagtactaacctacttttgttttattagattgaggaacttcagcaggcttta

SEQ ID NO: 188333 - DNA, 69 bp, Homo sapiens
ggaaaacagtctcaagtactaacctacttttgttttattagattgaggaacttcagcaggctttaatag

SEQ ID NO: 188334 - DNA, 72 bp, Homo sapiens
acttttgttttattagattgaggaacttcagcaggctttaatagtaaagcaaaatgaagagcttgaccgaca

SEQ ID NO: 188335 - DNA, 75 bp, Homo sapiens
ttttattagattgaggaacttcagcaggctttaatagtaaagcaaaatgaagagcttgaccgacagaggagaata

SEQ ID NO: 188336 - DNA, 74 bp, Homo sapiens
attgaggaacttcagcaggctttaatagtaaagcaaaatgaagagcttgaccgacagaggagaataggtaatac

SEQ ID NO: 188337 - DNA, 74 bp, Homo sapiens
agcaggctttaatagtaaagcaaaatgaagagcttgaccgacagaggagaataggtaatacccgcaaaatgata

SEQ ID NO: 188338 - DNA, 73 bp, Homo sapiens
ttaatagtaaagcaaaatgaagagcttgaccgacagaggagaataggtaatacccgcaaaatgatagaggatt

SEQ ID NO: 188339 - DNA, 74 bp, Homo sapiens
aaaatgaagagcttgaccgacagaggagaataggtaatacccgcaaaatgatagaggatttgcaaaatgaacta

SEQ ID NO: 188340 - DNA, 73 bp, Homo sapiens
aagagcttgaccgacagaggagaataggtaatacccgcaaaatgatagaggatttgcaaaatgaactaaagac

SEQ ID NO: 188341 - DNA, 70 bp, Homo sapiens
acagaggagaataggtaatacccgcaaaatgatagaggatttgcaaaatgaactaaagaccacggaaaac

SEQ ID NO: 188342 - DNA, 71 bp, Homo sapiens
ataggtaatacccgcaaaatgatagaggatttgcaaaatgaactaaagaccacggaaaactgcgagaatct

SEQ ID NO: 188343 - DNA, 72 bp, Homo sapiens
aatacccgcaaaatgatagaggatttgcaaaatgaactaaagaccacggaaaactgcgagaatcttcagccc

SEQ ID NO: 188344 - DNA, 77 bp, Homo sapiens
aatgatagaggatttgcaaaatgaactaaagaccacggaaaactgcgagaatcttcagccccagattgatgccatta

SEQ ID NO: 188345 - DNA, 78 bp, Homo sapiens
atttgcaaaatgaactaaagaccacggaaaactgcgagaatcttcagccccagattgatgccattacaaatgatctga

SEQ ID NO: 188346 - DNA, 77 bp, Homo sapiens
aatgaactaaagaccacggaaaactgcgagaatcttcagccccagattgatgccattacaaatgatctgagacggat

SEQ ID NO: 188347 - DNA, 79 bp, Homo sapiens
agaccacggaaaactgcgagaatcttcagccccagattgatgccattacaaatgatctgagacggattcaggatgaaaa

SEQ ID NO: 188348 - DNA, 82 bp, Homo sapiens
aaactgcgagaatcttcagccccagattgatgccattacaaatgatctgagacggattcaggatgaaaaggcattatgtgaa

SEQ ID NO: 188349 - DNA, 83 bp, Homo sapiens
tcagccccagattgatgccattacaaatgatctgagacggattcaggatgaaaaggcattatgtgaaggcgaaataattgata

SEQ ID NO: 188350 - DNA, 81 bp, Homo sapiens
attgatgccattacaaatgatctgagacggattcaggatgaaaaggcattatgtgaaggcgaaataattgataagcgaaga

SEQ ID NO: 188351 - DNA, 78 bp, Homo sapiens
attacaaatgatctgagacggattcaggatgaaaaggcattatgtgaaggcgaaataattgataagcgaagagagagg

SEQ ID NO: 188352 - DNA, 77 bp, Homo sapiens
aatgatctgagacggattcaggatgaaaaggcattatgtgaaggcgaaataattgataagcgaagagagagggaaac

SEQ ID NO: 188353 - DNA, 75 bp, Homo sapiens
acggattcaggatgaaaaggcattatgtgaaggcgaaataattgataagcgaagagagagggaaactctagagaa

SEQ ID NO: 188354 - DNA, 74 bp, Homo sapiens
ggatgaaaaggcattatgtgaaggcgaaataattgataagcgaagagagagggaaactctagagaaggagaaaa

SEQ ID NO: 188355 - DNA, 71 bp, Homo sapiens
attatgtgaaggcgaaataattgataagcgaagagagagggaaactctagagaaggagaaaaagagtaagt

SEQ ID NO: 188356 - DNA, 71 bp, Homo sapiens
gataagcgaagagagagggaaactctagagaaggagaaaaagagtaagtttcataaagttagaatgaaatg

SEQ ID NO: 188357 - DNA, 69 bp, Homo sapiens
cgaagagagagggaaactctagagaaggagaaaaagagtaagtttcataaagttagaatgaaatgttta

SEQ ID NO: 188358 - DNA, 68 bp, Homo sapiens
taaaattttcagagaaacaagactttgttttgttttacaattttaggtgtggacgatcatattgtacg

SEQ ID NO: 188359 - DNA, 70 bp, Homo sapiens
cagagaaacaagactttgttttgttttacaattttaggtgtggacgatcatattgtacgttttgacaatc

SEQ ID NO: 188360 - DNA, 72 bp, Homo sapiens
gactttgttttgttttacaattttaggtgtggacgatcatattgtacgttttgacaatcttatgaatcagaa

SEQ ID NO: 188361 - DNA, 75 bp, Homo sapiens
tgttttacaattttaggtgtggacgatcatattgtacgttttgacaatcttatgaatcagaaggaagataagcta

SEQ ID NO: 188362 - DNA, 76 bp, Homo sapiens
acaattttaggtgtggacgatcatattgtacgttttgacaatcttatgaatcagaaggaagataagctaagacaga

SEQ ID NO: 188363 - DNA, 79 bp, Homo sapiens
tggacgatcatattgtacgttttgacaatcttatgaatcagaaggaagataagctaagacagagattccgtgacacgta

SEQ ID NO: 188364 - DNA, 79 bp, Homo sapiens
tattgtacgttttgacaatcttatgaatcagaaggaagataagctaagacagagattccgtgacacgtatgatgctgtt

SEQ ID NO: 188365 - DNA, 78 bp, Homo sapiens
acgttttgacaatcttatgaatcagaaggaagataagctaagacagagattccgtgacacgtatgatgctgttttatg

SEQ ID NO: 188366 - DNA, 79 bp, Homo sapiens
atcttatgaatcagaaggaagataagctaagacagagattccgtgacacgtatgatgctgttttatggctaagaaataa

SEQ ID NO: 188367 - DNA, 76 bp, Homo sapiens
aaggaagataagctaagacagagattccgtgacacgtatgatgctgttttatggctaagaaataacagagacaaat

SEQ ID NO: 188368 - DNA, 76 bp, Homo sapiens
agataagctaagacagagattccgtgacacgtatgatgctgttttatggctaagaaataacagagacaaatttaaa

SEQ ID NO: 188369 - DNA, 75 bp, Homo sapiens
agacagagattccgtgacacgtatgatgctgttttatggctaagaaataacagagacaaatttaaacaaagagtc

SEQ ID NO: 188370 - DNA, 76 bp, Homo sapiens
cgtgacacgtatgatgctgttttatggctaagaaataacagagacaaatttaaacaaagagtctgtgagcccataa

SEQ ID NO: 188371 - DNA, 75 bp, Homo sapiens
atgctgttttatggctaagaaataacagagacaaatttaaacaaagagtctgtgagcccataatgctcacggtaa

SEQ ID NO: 188372 - DNA, 73 bp, Homo sapiens
tatggctaagaaataacagagacaaatttaaacaaagagtctgtgagcccataatgctcacggtaagaaactt

SEQ ID NO: 188373 - DNA, 72 bp, Homo sapiens
aaataacagagacaaatttaaacaaagagtctgtgagcccataatgctcacggtaagaaactttgttcatct

SEQ ID NO: 188374 - DNA, 72 bp, Homo sapiens
acaaatttaaacaaagagtctgtgagcccataatgctcacggtaagaaactttgttcatcttggtagtattg

SEQ ID NO: 188375 - DNA, 77 bp, Homo sapiens
ttgcttgtttgtttagatcaatatgaaagataataaaaatgccaaatatattgaaaatcatattccatcaaatgact

SEQ ID NO: 188376 - DNA, 76 bp, Homo sapiens
gtttagatcaatatgaaagataataaaaatgccaaatatattgaaaatcatattccatcaaatgacttaagagcct

SEQ ID NO: 188377 - DNA, 77 bp, Homo sapiens
gatcaatatgaaagataataaaaatgccaaatatattgaaaatcatattccatcaaatgacttaagagcctttgtat

SEQ ID NO: 188378 - DNA, 75 bp, Homo sapiens
taataaaaatgccaaatatattgaaaatcatattccatcaaatgacttaagagcctttgtatttgaaagtcaaga

SEQ ID NO: 188379 - DNA, 77 bp, Homo sapiens
tgccaaatatattgaaaatcatattccatcaaatgacttaagagcctttgtatttgaaagtcaagaagatatggagg

SEQ ID NO: 188380 - DNA, 75 bp, Homo sapiens
ttgaaaatcatattccatcaaatgacttaagagcctttgtatttgaaagtcaagaagatatggaggttttcctca

SEQ ID NO: 188381 - DNA, 74 bp, Homo sapiens
tattccatcaaatgacttaagagcctttgtatttgaaagtcaagaagatatggaggttttcctcaaagaggcaa

SEQ ID NO: 188382 - DNA, 71 bp, Homo sapiens
aatgacttaagagcctttgtatttgaaagtcaagaagatatggaggttttcctcaaagaggcaagtactaa

SEQ ID NO: 188383 - DNA, 71 bp, Homo sapiens
ttaagagcctttgtatttgaaagtcaagaagatatggaggttttcctcaaagaggcaagtactaaccaaca

SEQ ID NO: 188384 - DNA, 73 bp, Homo sapiens
tatttgaaagtcaagaagatatggaggttttcctcaaagaggcaagtactaaccaacacaacactttgattca

SEQ ID NO: 188385 - DNA, 70 bp, Homo sapiens
tcagtagagaatatatggtaattaaaataatattttcttttccctatattcaggttcgtgacaataaaaa

SEQ ID NO: 188386 - DNA, 67 bp, Homo sapiens
aaataatattttcttttccctatattcaggttcgtgacaataaaaaattaagagtaaatgctgttat

SEQ ID NO: 188387 - DNA, 70 bp, Homo sapiens
ttcttttccctatattcaggttcgtgacaataaaaaattaagagtaaatgctgttattgctcccaagagt

SEQ ID NO: 188388 - DNA, 76 bp, Homo sapiens
cctatattcaggttcgtgacaataaaaaattaagagtaaatgctgttattgctcccaagagttcatatgcagacaa

SEQ ID NO: 188389 - DNA, 77 bp, Homo sapiens
ttcgtgacaataaaaaattaagagtaaatgctgttattgctcccaagagttcatatgcagacaaagcaccttcaaga

SEQ ID NO: 188390 - DNA, 78 bp, Homo sapiens
taaaaaattaagagtaaatgctgttattgctcccaagagttcatatgcagacaaagcaccttcaagatctttgaatga

SEQ ID NO: 188391 - DNA, 78 bp, Homo sapiens
attaagagtaaatgctgttattgctcccaagagttcatatgcagacaaagcaccttcaagatctttgaatgaacttaa

SEQ ID NO: 188392 - DNA, 77 bp, Homo sapiens
aaatgctgttattgctcccaagagttcatatgcagacaaagcaccttcaagatctttgaatgaacttaagtaagtct

SEQ ID NO: 188393 - DNA, 75 bp, Homo sapiens
ctcccaagagttcatatgcagacaaagcaccttcaagatctttgaatgaacttaagtaagtcttgaaaatactaa

SEQ ID NO: 188394 - DNA, 75 bp, Homo sapiens
agagttcatatgcagacaaagcaccttcaagatctttgaatgaacttaagtaagtcttgaaaatactaagattta

SEQ ID NO: 188395 - DNA, 72 bp, Homo sapiens
gcagacaaagcaccttcaagatctttgaatgaacttaagtaagtcttgaaaatactaagatttatttaaata

SEQ ID NO: 188396 - DNA, 69 bp, Homo sapiens
taatgatattttaagaagaaaaatctaatcaatacttttcctttcagacaatacggatttttctcttat

SEQ ID NO: 188397 - DNA, 70 bp, Homo sapiens
taagaagaaaaatctaatcaatacttttcctttcagacaatacggatttttctcttatttgagagaatta

SEQ ID NO: 188398 - DNA, 74 bp, Homo sapiens
aatctaatcaatacttttcctttcagacaatacggatttttctcttatttgagagaattatttgatgcacctga

SEQ ID NO: 188399 - DNA, 75 bp, Homo sapiens
atacttttcctttcagacaatacggatttttctcttatttgagagaattatttgatgcacctgatcctgtaatga

SEQ ID NO: 188400 - DNA, 76 bp, Homo sapiens
tttcagacaatacggatttttctcttatttgagagaattatttgatgcacctgatcctgtaatgagttacctttgc

SEQ ID NO: 188401 - DNA, 76 bp, Homo sapiens
aatacggatttttctcttatttgagagaattatttgatgcacctgatcctgtaatgagttacctttgctgtcagta

SEQ ID NO: 188402 - DNA, 81 bp, Homo sapiens
tttctcttatttgagagaattatttgatgcacctgatcctgtaatgagttacctttgctgtcagtatcatattcatgaagt

SEQ ID NO: 188403 - DNA, 82 bp, Homo sapiens
tatttgagagaattatttgatgcacctgatcctgtaatgagttacctttgctgtcagtatcatattcatgaagttcctgtag

SEQ ID NO: 188404 - DNA, 80 bp, Homo sapiens
aattatttgatgcacctgatcctgtaatgagttacctttgctgtcagtatcatattcatgaagttcctgtaggaactgaa

SEQ ID NO: 188405 - DNA, 78 bp, Homo sapiens
ctgatcctgtaatgagttacctttgctgtcagtatcatattcatgaagttcctgtaggaactgaaaagaccagagaaa

SEQ ID NO: 188406 - DNA, 77 bp, Homo sapiens
taatgagttacctttgctgtcagtatcatattcatgaagttcctgtaggaactgaaaagaccagagaaagaattgaa

SEQ ID NO: 188407 - DNA, 75 bp, Homo sapiens
tacctttgctgtcagtatcatattcatgaagttcctgtaggaactgaaaagaccagagaaagaattgaacgggta

SEQ ID NO: 188408 - DNA, 71 bp, Homo sapiens
agtatcatattcatgaagttcctgtaggaactgaaaagaccagagaaagaattgaacgggtaggaaagtag

SEQ ID NO: 188409 - DNA, 72 bp, Homo sapiens
atattcatgaagttcctgtaggaactgaaaagaccagagaaagaattgaacgggtaggaaagtagtgaatca

SEQ ID NO: 188410 - DNA, 71 bp, Homo sapiens
aagttcctgtaggaactgaaaagaccagagaaagaattgaacgggtaggaaagtagtgaatcatgtactga

SEQ ID NO: 188411 - DNA, 70 bp, Homo sapiens
catataatttatattagatgtgcactaatagttgttttacgttataggtaatacaagaaacccgattaaa

SEQ ID NO: 188412 - DNA, 69 bp, Homo sapiens
ttatattagatgtgcactaatagttgttttacgttataggtaatacaagaaacccgattaaaacagatt

SEQ ID NO: 188413 - DNA, 72 bp, Homo sapiens
gatgtgcactaatagttgttttacgttataggtaatacaagaaacccgattaaaacagatttatacagcaga

SEQ ID NO: 188414 - DNA, 67 bp, Homo sapiens
aatagttgttttacgttataggtaatacaagaaacccgattaaaacagatttatacagcagaagaaa

SEQ ID NO: 188415 - DNA, 69 bp, Homo sapiens
acgttataggtaatacaagaaacccgattaaaacagatttatacagcagaagaaaagtatgtggtgaaa

SEQ ID NO: 188416 - DNA, 68 bp, Homo sapiens
ggtaatacaagaaacccgattaaaacagatttatacagcagaagaaaagtatgtggtgaaaacttctt

SEQ ID NO: 188417 - DNA, 68 bp, Homo sapiens
gaaacccgattaaaacagatttatacagcagaagaaaagtatgtggtgaaaacttctttttattcaaa

SEQ ID NO: 188418 - DNA, 69 bp, Homo sapiens
acagatttatacagcagaagaaaagtatgtggtgaaaacttctttttattcaaacaaagttatttctag

SEQ ID NO: 188419 - DNA, 71 bp, Homo sapiens
cagcagaagaaaagtatgtggtgaaaacttctttttattcaaacaaagttatttctagtaacacatctcta

SEQ ID NO: 188420 - DNA, 67 bp, Homo sapiens
gaaaagtatgtggtgaaaacttctttttattcaaacaaagttatttctagtaacacatctctaaaag

SEQ ID NO: 188421 - DNA, 70 bp, Homo sapiens
gtgaaaacttctttttattcaaacaaagttatttctagtaacacatctctaaaagtagcgcagtttctca

SEQ ID NO: 188422 - DNA, 73 bp, Homo sapiens
ctttttattcaaacaaagttatttctagtaacacatctctaaaagtagcgcagtttctcactgtcactgtgga

SEQ ID NO: 188423 - DNA, 77 bp, Homo sapiens
tattcaaacaaagttatttctagtaacacatctctaaaagtagcgcagtttctcactgtcactgtggacctagagca

SEQ ID NO: 188424 - DNA, 79 bp, Homo sapiens
tatttctagtaacacatctctaaaagtagcgcagtttctcactgtcactgtggacctagagcagagaagacacttagaa

SEQ ID NO: 188425 - DNA, 79 bp, Homo sapiens
acacatctctaaaagtagcgcagtttctcactgtcactgtggacctagagcagagaagacacttagaagaacagctaaa

SEQ ID NO: 188426 - DNA, 76 bp, Homo sapiens
ctaaaagtagcgcagtttctcactgtcactgtggacctagagcagagaagacacttagaagaacagctaaaggttg

SEQ ID NO: 188427 - DNA, 76 bp, Homo sapiens
cagtttctcactgtcactgtggacctagagcagagaagacacttagaagaacagctaaaggttggttaatttgatc

SEQ ID NO: 188428 - DNA, 76 bp, Homo sapiens
actgtcactgtggacctagagcagagaagacacttagaagaacagctaaaggttggttaatttgatctgaatgtta

SEQ ID NO: 188429 - DNA, 74 bp, Homo sapiens
tggacctagagcagagaagacacttagaagaacagctaaaggttggttaatttgatctgaatgttagaaaagaa

SEQ ID NO: 188430 - DNA, 72 bp, Homo sapiens
ttttaaatattttataggaaattcatagaaaattgcaagcagtggattcagggttgattgccttacgtgaaa

SEQ ID NO: 188431 - DNA, 74 bp, Homo sapiens
attttataggaaattcatagaaaattgcaagcagtggattcagggttgattgccttacgtgaaacaagcaaaca

SEQ ID NO: 188432 - DNA, 77 bp, Homo sapiens
aaattcatagaaaattgcaagcagtggattcagggttgattgccttacgtgaaacaagcaaacatctggagcacaaa

SEQ ID NO: 188433 - DNA, 78 bp, Homo sapiens
agaaaattgcaagcagtggattcagggttgattgccttacgtgaaacaagcaaacatctggagcacaaagacaatgaa

SEQ ID NO: 188434 - DNA, 75 bp, Homo sapiens
agtggattcagggttgattgccttacgtgaaacaagcaaacatctggagcacaaagacaatgaacttagacaaaa

SEQ ID NO: 188435 - DNA, 75 bp, Homo sapiens
ttcagggttgattgccttacgtgaaacaagcaaacatctggagcacaaagacaatgaacttagacaaaagaagaa

SEQ ID NO: 188436 - DNA, 74 bp, Homo sapiens
attgccttacgtgaaacaagcaaacatctggagcacaaagacaatgaacttagacaaaagaagaaggagcttct

SEQ ID NO: 188437 - DNA, 73 bp, Homo sapiens
aaacaagcaaacatctggagcacaaagacaatgaacttagacaaaagaagaaggagcttcttgagagaaaaac

SEQ ID NO: 188438 - DNA, 72 bp, Homo sapiens
aaacatctggagcacaaagacaatgaacttagacaaaagaagaaggagcttcttgagagaaaaaccaagaaa

SEQ ID NO: 188439 - DNA, 70 bp, Homo sapiens
acaaagacaatgaacttagacaaaagaagaaggagcttcttgagagaaaaaccaagaaaagacaactgga

SEQ ID NO: 188440 - DNA, 69 bp, Homo sapiens
acaatgaacttagacaaaagaagaaggagcttcttgagagaaaaaccaagaaaagacaactggaacaaa

SEQ ID NO: 188441 - DNA, 69 bp, Homo sapiens
gacaaaagaagaaggagcttcttgagagaaaaaccaagaaaagacaactggaacaaaaaatcagttcca

SEQ ID NO: 188442 - DNA, 68 bp, Homo sapiens
gaaggagcttcttgagagaaaaaccaagaaaagacaactggaacaaaaaatcagttccaaactaggaa

SEQ ID NO: 188443 - DNA, 66 bp, Homo sapiens
cttgagagaaaaaccaagaaaagacaactggaacaaaaaatcagttccaaactaggaaggtatctt

SEQ ID NO: 188444 - DNA, 67 bp, Homo sapiens
ccaagaaaagacaactggaacaaaaaatcagttccaaactaggaaggtatcttttagcctattcagg

SEQ ID NO: 188445 - DNA, 65 bp, Homo sapiens
aaaagacaactggaacaaaaaatcagttccaaactaggaaggtatcttttagcctattcaggggg

SEQ ID NO: 188446 - DNA, 79 bp, Homo sapiens
tcttatgtttaacactgatttcttcattattatatgtgtcatacagtttaaagctgatggaacaggatacttgcaatct

SEQ ID NO: 188447 - DNA, 80 bp, Homo sapiens
ttaacactgatttcttcattattatatgtgtcatacagtttaaagctgatggaacaggatacttgcaatcttgaagagga

SEQ ID NO: 188448 - DNA, 79 bp, Homo sapiens
ttcttcattattatatgtgtcatacagtttaaagctgatggaacaggatacttgcaatcttgaagaggaagagcgaaaa

SEQ ID NO: 188449 - DNA, 79 bp, Homo sapiens
ttattatatgtgtcatacagtttaaagctgatggaacaggatacttgcaatcttgaagaggaagagcgaaaagcaagta

SEQ ID NO: 188450 - DNA, 75 bp, Homo sapiens
atacagtttaaagctgatggaacaggatacttgcaatcttgaagaggaagagcgaaaagcaagtaccaaaatcaa

SEQ ID NO: 188451 - DNA, 74 bp, Homo sapiens
tttaaagctgatggaacaggatacttgcaatcttgaagaggaagagcgaaaagcaagtaccaaaatcaaagaaa

SEQ ID NO: 188452 - DNA, 74 bp, Homo sapiens
atggaacaggatacttgcaatcttgaagaggaagagcgaaaagcaagtaccaaaatcaaagaaataaatgttca

SEQ ID NO: 188453 - DNA, 73 bp, Homo sapiens
gatacttgcaatcttgaagaggaagagcgaaaagcaagtaccaaaatcaaagaaataaatgttcaaaaagcga

SEQ ID NO: 188454 - DNA, 69 bp, Homo sapiens
tgaagaggaagagcgaaaagcaagtaccaaaatcaaagaaataaatgttcaaaaagcgaaacttgttac

SEQ ID NO: 188455 - DNA, 67 bp, Homo sapiens
ggaagagcgaaaagcaagtaccaaaatcaaagaaataaatgttcaaaaagcgaaacttgttaccgaa

SEQ ID NO: 188456 - DNA, 65 bp, Homo sapiens
agcaagtaccaaaatcaaagaaataaatgttcaaaaagcgaaacttgttaccgaattaacaaacc

SEQ ID NO: 188457 - DNA, 64 bp, Homo sapiens
atcaaagaaataaatgttcaaaaagcgaaacttgttaccgaattaacaaacctaataaaggtaa

SEQ ID NO: 188458 - DNA, 63 bp, Homo sapiens
taaatgttcaaaaagcgaaacttgttaccgaattaacaaacctaataaaggtaaggtattgtt

SEQ ID NO: 188459 - DNA, 62 bp, Homo sapiens
gttcaaaaagcgaaacttgttaccgaattaacaaacctaataaaggtaaggtattgttttaa

SEQ ID NO: 188460 - DNA, 62 bp, Homo sapiens
cgaaacttgttaccgaattaacaaacctaataaaggtaaggtattgttttaattttagtcat

SEQ ID NO: 188461 - DNA, 65 bp, Homo sapiens
aaaacataggtaacataaaaattaactcttaggggtttttgttcctagatttgtacttctttgca

SEQ ID NO: 188462 - DNA, 66 bp, Homo sapiens
aggtaacataaaaattaactcttaggggtttttgttcctagatttgtacttctttgcatatacaaa

SEQ ID NO: 188463 - DNA, 65 bp, Homo sapiens
aaaattaactcttaggggtttttgttcctagatttgtacttctttgcatatacaaaaagtagatt

SEQ ID NO: 188464 - DNA, 68 bp, Homo sapiens
gggtttttgttcctagatttgtacttctttgcatatacaaaaagtagatttaattctccaaaatacta

SEQ ID NO: 188465 - DNA, 75 bp, Homo sapiens
gttcctagatttgtacttctttgcatatacaaaaagtagatttaattctccaaaatactacagtgatctctgaga

SEQ ID NO: 188466 - DNA, 75 bp, Homo sapiens
gatttgtacttctttgcatatacaaaaagtagatttaattctccaaaatactacagtgatctctgagaagaacaa

SEQ ID NO: 188467 - DNA, 76 bp, Homo sapiens
ctttgcatatacaaaaagtagatttaattctccaaaatactacagtgatctctgagaagaacaaattagaatcaga

SEQ ID NO: 188468 - DNA, 77 bp, Homo sapiens
aaagtagatttaattctccaaaatactacagtgatctctgagaagaacaaattagaatcagattatatggccgcatc

SEQ ID NO: 188469 - DNA, 79 bp, Homo sapiens
tttaattctccaaaatactacagtgatctctgagaagaacaaattagaatcagattatatggccgcatcttcacaactc

SEQ ID NO: 188470 - DNA, 79 bp, Homo sapiens
aaaatactacagtgatctctgagaagaacaaattagaatcagattatatggccgcatcttcacaactccgtcttacaga

SEQ ID NO: 188471 - DNA, 77 bp, Homo sapiens
gtgatctctgagaagaacaaattagaatcagattatatggccgcatcttcacaactccgtcttacagaggtaaaatt

SEQ ID NO: 188472 - DNA, 74 bp, Homo sapiens
ctctgagaagaacaaattagaatcagattatatggccgcatcttcacaactccgtcttacagaggtaaaatttt

SEQ ID NO: 188473 - DNA, 72 bp, Homo sapiens
aacaaattagaatcagattatatggccgcatcttcacaactccgtcttacagaggtaaaatttttgccttta

SEQ ID NO: 188474 - DNA, 70 bp, Homo sapiens
atcagattatatggccgcatcttcacaactccgtcttacagaggtaaaatttttgcctttactttttatt

SEQ ID NO: 188475 - DNA, 68 bp, Homo sapiens
tatggccgcatcttcacaactccgtcttacagaggtaaaatttttgcctttactttttattttgaggt

SEQ ID NO: 188476 - DNA, 73 bp, Homo sapiens
attttcaaaataaatttttttaatagcaacatttcattgaattggatgaaaatagacagagattattgcagaa

SEQ ID NO: 188477 - DNA, 75 bp, Homo sapiens
taaatttttttaatagcaacatttcattgaattggatgaaaatagacagagattattgcagaaatgcaaggaact

SEQ ID NO: 188478 - DNA, 80 bp, Homo sapiens
taatagcaacatttcattgaattggatgaaaatagacagagattattgcagaaatgcaaggaacttatgaaaagagctag

SEQ ID NO: 188479 - DNA, 79 bp, Homo sapiens
atttcattgaattggatgaaaatagacagagattattgcagaaatgcaaggaacttatgaaaagagctaggcaagtatg

SEQ ID NO: 188480 - DNA, 78 bp, Homo sapiens
attgaattggatgaaaatagacagagattattgcagaaatgcaaggaacttatgaaaagagctaggcaagtatgtaac

SEQ ID NO: 188481 - DNA, 79 bp, Homo sapiens
atgaaaatagacagagattattgcagaaatgcaaggaacttatgaaaagagctaggcaagtatgtaacctgggtgcaga

SEQ ID NO: 188482 - DNA, 80 bp, Homo sapiens
gattattgcagaaatgcaaggaacttatgaaaagagctaggcaagtatgtaacctgggtgcagagcagactcttcctcaa

SEQ ID NO: 188483 - DNA, 77 bp, Homo sapiens
agaaatgcaaggaacttatgaaaagagctaggcaagtatgtaacctgggtgcagagcagactcttcctcaagaatac

SEQ ID NO: 188484 - DNA, 77 bp, Homo sapiens
aggaacttatgaaaagagctaggcaagtatgtaacctgggtgcagagcagactcttcctcaagaataccagacagta

SEQ ID NO: 188485 - DNA, 75 bp, Homo sapiens
aaaagagctaggcaagtatgtaacctgggtgcagagcagactcttcctcaagaataccagacagtaagtataaaa

SEQ ID NO: 188486 - DNA, 76 bp, Homo sapiens
taggcaagtatgtaacctgggtgcagagcagactcttcctcaagaataccagacagtaagtataaaaagtatataa

SEQ ID NO: 188487 - DNA, 77 bp, Homo sapiens
tatgtaacctgggtgcagagcagactcttcctcaagaataccagacagtaagtataaaaagtatataatgctacaat

SEQ ID NO: 188488 - DNA, 74 bp, Homo sapiens
tttttagttcttcataagtgcagtataaagttctaacttcttgctctctttcaatgccccacatattctggacc

SEQ ID NO: 188489 - DNA, 76 bp, Homo sapiens
ttcataagtgcagtataaagttctaacttcttgctctctttcaatgccccacatattctggacccattctaccaat

SEQ ID NO: 188490 - DNA, 75 bp, Homo sapiens
agtataaagttctaacttcttgctctctttcaatgccccacatattctggacccattctaccaattcagcaagta

SEQ ID NO: 188491 - DNA, 76 bp, Homo sapiens
taacttcttgctctctttcaatgccccacatattctggacccattctaccaattcagcaagtacccaccattccaa

SEQ ID NO: 188492 - DNA, 76 bp, Homo sapiens
ctctctttcaatgccccacatattctggacccattctaccaattcagcaagtacccaccattccaaatggacacaa

SEQ ID NO: 188493 - DNA, 75 bp, Homo sapiens
tttcaatgccccacatattctggacccattctaccaattcagcaagtacccaccattccaaatggacacaactcc

SEQ ID NO: 188494 - DNA, 75 bp, Homo sapiens
acatattctggacccattctaccaattcagcaagtacccaccattccaaatggacacaactcctcactccccatg

SEQ ID NO: 188495 - DNA, 77 bp, Homo sapiens
ccattctaccaattcagcaagtacccaccattccaaatggacacaactcctcactccccatggtatgcagtactcat

SEQ ID NO: 188496 - DNA, 74 bp, Homo sapiens
aattcagcaagtacccaccattccaaatggacacaactcctcactccccatggtatgcagtactcattcttttt

SEQ ID NO: 188497 - DNA, 72 bp, Homo sapiens
aagtacccaccattccaaatggacacaactcctcactccccatggtatgcagtactcattcttttttcccaa

SEQ ID NO: 188498 - DNA, 73 bp, Homo sapiens
attccaaatggacacaactcctcactccccatggtatgcagtactcattcttttttcccaagctcctgttttc

SEQ ID NO: 188499 - DNA, 74 bp, Homo sapiens
aatggacacaactcctcactccccatggtatgcagtactcattcttttttcccaagctcctgttttccctctgc

SEQ ID NO: 188500 - DNA, 69 bp, Homo sapiens
gaatggaactgttttcattgtatctataatgacgggcaatttttttcttaggttttccaagaccttcca

SEQ ID NO: 188501 - DNA, 71 bp, Homo sapiens
ttcattgtatctataatgacgggcaatttttttcttaggttttccaagaccttccaaacacattggatgaa

SEQ ID NO: 188502 - DNA, 71 bp, Homo sapiens
atctataatgacgggcaatttttttcttaggttttccaagaccttccaaacacattggatgaaattgatgc

SEQ ID NO: 188503 - DNA, 69 bp, Homo sapiens
atgacgggcaatttttttcttaggttttccaagaccttccaaacacattggatgaaattgatgctttat

SEQ ID NO: 188504 - DNA, 72 bp, Homo sapiens
tttcttaggttttccaagaccttccaaacacattggatgaaattgatgctttattaactgaagaaagatcaa

SEQ ID NO: 188505 - DNA, 74 bp, Homo sapiens
taggttttccaagaccttccaaacacattggatgaaattgatgctttattaactgaagaaagatcaagagcttc

SEQ ID NO: 188506 - DNA, 75 bp, Homo sapiens
aagaccttccaaacacattggatgaaattgatgctttattaactgaagaaagatcaagagcttcctgcttcacgg

SEQ ID NO: 188507 - DNA, 77 bp, Homo sapiens
aaacacattggatgaaattgatgctttattaactgaagaaagatcaagagcttcctgcttcacgggactgaatccta

SEQ ID NO: 188508 - DNA, 76 bp, Homo sapiens
aaattgatgctttattaactgaagaaagatcaagagcttcctgcttcacgggactgaatcctacagtatgcctgtt

SEQ ID NO: 188509 - DNA, 77 bp, Homo sapiens
atgctttattaactgaagaaagatcaagagcttcctgcttcacgggactgaatcctacagtatgcctgtttctctat

SEQ ID NO: 188510 - DNA, 79 bp, Homo sapiens
aagaaagatcaagagcttcctgcttcacgggactgaatcctacagtatgcctgtttctctattcccattctgcatccaa

SEQ ID NO: 188511 - DNA, 80 bp, Homo sapiens
agatcaagagcttcctgcttcacgggactgaatcctacagtatgcctgtttctctattcccattctgcatccaaccacca

SEQ ID NO: 188512 - DNA, 67 bp, Homo sapiens
atcctttggtagatttatcttaaagaagtttttttttcccctgccagattgttcaggaatatacaaa

SEQ ID NO: 188513 - DNA, 67 bp, Homo sapiens
ggtagatttatcttaaagaagtttttttttcccctgccagattgttcaggaatatacaaaaagagaa

SEQ ID NO: 188514 - DNA, 67 bp, Homo sapiens
cttaaagaagtttttttttcccctgccagattgttcaggaatatacaaaaagagaagaagaaataga

SEQ ID NO: 188515 - DNA, 70 bp, Homo sapiens
ttttttcccctgccagattgttcaggaatatacaaaaagagaagaagaaatagaacagttaactgaggaa

SEQ ID NO: 188516 - DNA, 71 bp, Homo sapiens
ctgccagattgttcaggaatatacaaaaagagaagaagaaatagaacagttaactgaggaactaaagggaa

SEQ ID NO: 188517 - DNA, 69 bp, Homo sapiens
gattgttcaggaatatacaaaaagagaagaagaaatagaacagttaactgaggaactaaagggaaagaa

SEQ ID NO: 188518 - DNA, 69 bp, Homo sapiens
tacaaaaagagaagaagaaatagaacagttaactgaggaactaaagggaaagaaagttgaactagatca

SEQ ID NO: 188519 - DNA, 70 bp, Homo sapiens
gagaagaagaaatagaacagttaactgaggaactaaagggaaagaaagttgaactagatcaatacaggga

SEQ ID NO: 188520 - DNA, 70 bp, Homo sapiens
tagaacagttaactgaggaactaaagggaaagaaagttgaactagatcaatacagggaaaacatttcaca

SEQ ID NO: 188521 - DNA, 69 bp, Homo sapiens
cagttaactgaggaactaaagggaaagaaagttgaactagatcaatacagggaaaacatttcacaggta

SEQ ID NO: 188522 - DNA, 65 bp, Homo sapiens
aggaactaaagggaaagaaagttgaactagatcaatacagggaaaacatttcacaggtaattttt

SEQ ID NO: 188523 - DNA, 65 bp, Homo sapiens
gggaaagaaagttgaactagatcaatacagggaaaacatttcacaggtaattttttagtttttaa

SEQ ID NO: 188524 - DNA, 70 bp, Homo sapiens
ttgaactagatcaatacagggaaaacatttcacaggtaattttttagtttttaatctttttatcatgtga

SEQ ID NO: 188525 - DNA, 67 bp, Homo sapiens
atatagtaatactgcttttaaattgtgtttttatattgcctttatttgtaggtaaaagaaaggtggc

SEQ ID NO: 188526 - DNA, 65 bp, Homo sapiens
ctgcttttaaattgtgtttttatattgcctttatttgtaggtaaaagaaaggtggcttaatcctt

SEQ ID NO: 188527 - DNA, 66 bp, Homo sapiens
gtgtttttatattgcctttatttgtaggtaaaagaaaggtggcttaatcctttaaaagagctggta

SEQ ID NO: 188528 - DNA, 66 bp, Homo sapiens
ttatattgcctttatttgtaggtaaaagaaaggtggcttaatcctttaaaagagctggtagaaaaa

SEQ ID NO: 188529 - DNA, 65 bp, Homo sapiens
tttatttgtaggtaaaagaaaggtggcttaatcctttaaaagagctggtagaaaaaattaatgaa

SEQ ID NO: 188530 - DNA, 66 bp, Homo sapiens
ggtaaaagaaaggtggcttaatcctttaaaagagctggtagaaaaaattaatgaaaaattcagcaa

SEQ ID NO: 188531 - DNA, 69 bp, Homo sapiens
gcttaatcctttaaaagagctggtagaaaaaattaatgaaaaattcagcaatttttttagttccatgca

SEQ ID NO: 188532 - DNA, 71 bp, Homo sapiens
tcctttaaaagagctggtagaaaaaattaatgaaaaattcagcaatttttttagttccatgcagtgtgctg

SEQ ID NO: 188533 - DNA, 75 bp, Homo sapiens
gctggtagaaaaaattaatgaaaaattcagcaatttttttagttccatgcagtgtgctggtgaagttgatctcca

SEQ ID NO: 188534 - DNA, 76 bp, Homo sapiens
aattaatgaaaaattcagcaatttttttagttccatgcagtgtgctggtgaagttgatctccatacagaaaatgag

SEQ ID NO: 188535 - DNA, 76 bp, Homo sapiens
atgaaaaattcagcaatttttttagttccatgcagtgtgctggtgaagttgatctccatacagaaaatgaggtaaa

SEQ ID NO: 188536 - DNA, 76 bp, Homo sapiens
caatttttttagttccatgcagtgtgctggtgaagttgatctccatacagaaaatgaggtaaaattgcatttgaaa

SEQ ID NO: 188537 - DNA, 78 bp, Homo sapiens
tttagttccatgcagtgtgctggtgaagttgatctccatacagaaaatgaggtaaaattgcatttgaaataaataata

SEQ ID NO: 188538 - DNA, 78 bp, Homo sapiens
gcagtgtgctggtgaagttgatctccatacagaaaatgaggtaaaattgcatttgaaataaataatatttctggcaaa

SEQ ID NO: 188539 - DNA, 72 bp, Homo sapiens
gacattaccagaggaaactcatttttcatcactttttaaatgttttataggaagattatgataaatatggaa

SEQ ID NO: 188540 - DNA, 71 bp, Homo sapiens
gaaactcatttttcatcactttttaaatgttttataggaagattatgataaatatggaattcgaattagag

SEQ ID NO: 188541 - DNA, 72 bp, Homo sapiens
ttcatcactttttaaatgttttataggaagattatgataaatatggaattcgaattagagtcaaatttcgaa

SEQ ID NO: 188542 - DNA, 72 bp, Homo sapiens
tttaaatgttttataggaagattatgataaatatggaattcgaattagagtcaaatttcgaagtagtactca

SEQ ID NO: 188543 - DNA, 75 bp, Homo sapiens
gttttataggaagattatgataaatatggaattcgaattagagtcaaatttcgaagtagtactcaactgcatgaa

SEQ ID NO: 188544 - DNA, 80 bp, Homo sapiens
gattatgataaatatggaattcgaattagagtcaaatttcgaagtagtactcaactgcatgaattaactcctcatcatca

SEQ ID NO: 188545 - DNA, 77 bp, Homo sapiens
aatatggaattcgaattagagtcaaatttcgaagtagtactcaactgcatgaattaactcctcatcatcaaagtgga

SEQ ID NO: 188546 - DNA, 76 bp, Homo sapiens
aattcgaattagagtcaaatttcgaagtagtactcaactgcatgaattaactcctcatcatcaaagtggaggtgaa

SEQ ID NO: 188547 - DNA, 76 bp, Homo sapiens
tagagtcaaatttcgaagtagtactcaactgcatgaattaactcctcatcatcaaagtggaggtgaaagaagtgtt

SEQ ID NO: 188548 - DNA, 76 bp, Homo sapiens
aagtagtactcaactgcatgaattaactcctcatcatcaaagtggaggtgaaagaagtgtttctaccatgttatac

SEQ ID NO: 188549 - DNA, 81 bp, Homo sapiens
tcaactgcatgaattaactcctcatcatcaaagtggaggtgaaagaagtgtttctaccatgttatacttgatggcacttca

SEQ ID NO: 188550 - DNA, 77 bp, Homo sapiens
aattaactcctcatcatcaaagtggaggtgaaagaagtgtttctaccatgttatacttgatggcacttcaggagcta

SEQ ID NO: 188551 - DNA, 80 bp, Homo sapiens
tcatcatcaaagtggaggtgaaagaagtgtttctaccatgttatacttgatggcacttcaggagctaaatagatgtccat

SEQ ID NO: 188552 - DNA, 78 bp, Homo sapiens
atcaaagtggaggtgaaagaagtgtttctaccatgttatacttgatggcacttcaggagctaaatagatgtccattca

SEQ ID NO: 188553 - DNA, 78 bp, Homo sapiens
aaagaagtgtttctaccatgttatacttgatggcacttcaggagctaaatagatgtccattcagagtagttgatgaaa

SEQ ID NO: 188554 - DNA, 82 bp, Homo sapiens
tttctaccatgttatacttgatggcacttcaggagctaaatagatgtccattcagagtagttgatgaaatcaatcaggtatg

SEQ ID NO: 188555 - DNA, 82 bp, Homo sapiens
atgttatacttgatggcacttcaggagctaaatagatgtccattcagagtagttgatgaaatcaatcaggtatggtgattgt

SEQ ID NO: 188556 - DNA, 82 bp, Homo sapiens
ttgatggcacttcaggagctaaatagatgtccattcagagtagttgatgaaatcaatcaggtatggtgattgttctgttact

SEQ ID NO: 188557 - DNA, 81 bp, Homo sapiens
ttcaggagctaaatagatgtccattcagagtagttgatgaaatcaatcaggtatggtgattgttctgttacttggatcttc

SEQ ID NO: 188558 - DNA, 80 bp, Homo sapiens
taaatagatgtccattcagagtagttgatgaaatcaatcaggtatggtgattgttctgttacttggatcttcttatatcc

SEQ ID NO: 188559 - DNA, 77 bp, Homo sapiens
atcaatcaggtatggtgattgttctgttacttggatcttcttatatcctgtaacaggaataaatgtaatcattattg

SEQ ID NO: 188560 - DNA, 75 bp, Homo sapiens
tatatcctgtaacaggaataaatgtaatcattattgttgccattgtttagggaatggacccaatcaatgaacgga

SEQ ID NO: 188561 - DNA, 73 bp, Homo sapiens
taacaggaataaatgtaatcattattgttgccattgtttagggaatggacccaatcaatgaacggagagtgtt

SEQ ID NO: 188562 - DNA, 73 bp, Homo sapiens
taaatgtaatcattattgttgccattgtttagggaatggacccaatcaatgaacggagagtgtttgaaatggt

SEQ ID NO: 188563 - DNA, 71 bp, Homo sapiens
attattgttgccattgtttagggaatggacccaatcaatgaacggagagtgtttgaaatggttgtaaatac

SEQ ID NO: 188564 - DNA, 71 bp, Homo sapiens
ttgtttagggaatggacccaatcaatgaacggagagtgtttgaaatggttgtaaatactgcctgtaaagaa

SEQ ID NO: 188565 - DNA, 72 bp, Homo sapiens
tagggaatggacccaatcaatgaacggagagtgtttgaaatggttgtaaatactgcctgtaaagaaaataca

SEQ ID NO: 188566 - DNA, 72 bp, Homo sapiens
cccaatcaatgaacggagagtgtttgaaatggttgtaaatactgcctgtaaagaaaatacatctcaatactt

SEQ ID NO: 188567 - DNA, 72 bp, Homo sapiens
cggagagtgtttgaaatggttgtaaatactgcctgtaaagaaaatacatctcaatactttttcataacacca

SEQ ID NO: 188568 - DNA, 71 bp, Homo sapiens
tgaaatggttgtaaatactgcctgtaaagaaaatacatctcaatactttttcataacaccaaaggtaggta

SEQ ID NO: 188569 - DNA, 69 bp, Homo sapiens
tggttgtaaatactgcctgtaaagaaaatacatctcaatactttttcataacaccaaaggtaggtaaaa

SEQ ID NO: 188570 - DNA, 67 bp, Homo sapiens
ctgcctgtaaagaaaatacatctcaatactttttcataacaccaaaggtaggtaaaaagtaacctaa

SEQ ID NO: 188571 - DNA, 67 bp, Homo sapiens
gaaaatacatctcaatactttttcataacaccaaaggtaggtaaaaagtaacctaaaagtggtcata

SEQ ID NO: 188572 - DNA, 77 bp, Homo sapiens
cagtatatagcttatatgacaatttgttttaatacttacagctcctgcaaaatcttccttattctgaaaagatgaca

SEQ ID NO: 188573 - DNA, 73 bp, Homo sapiens
cttatatgacaatttgttttaatacttacagctcctgcaaaatcttccttattctgaaaagatgacagttttg

SEQ ID NO: 188574 - DNA, 73 bp, Homo sapiens
gttttaatacttacagctcctgcaaaatcttccttattctgaaaagatgacagttttgtttgtctacaatggc

SEQ ID NO: 188575 - DNA, 75 bp, Homo sapiens
aatacttacagctcctgcaaaatcttccttattctgaaaagatgacagttttgtttgtctacaatggccctcata

SEQ ID NO: 188576 - DNA, 77 bp, Homo sapiens
tgcaaaatcttccttattctgaaaagatgacagttttgtttgtctacaatggccctcatatgctggaaccaaacaca

SEQ ID NO: 188577 - DNA, 76 bp, Homo sapiens
tccttattctgaaaagatgacagttttgtttgtctacaatggccctcatatgctggaaccaaacacatggaattta

SEQ ID NO: 188578 - DNA, 74 bp, Homo sapiens
attctgaaaagatgacagttttgtttgtctacaatggccctcatatgctggaaccaaacacatggaatttaaag

SEQ ID NO: 188579 - DNA, 71 bp, Homo sapiens
acagttttgtttgtctacaatggccctcatatgctggaaccaaacacatggaatttaaaggctttccaaag

SEQ ID NO: 188580 - DNA, 73 bp, Homo sapiens
ttgtttgtctacaatggccctcatatgctggaaccaaacacatggaatttaaaggctttccaaaggcggcggc

SEQ ID NO: 188581 - DNA, 72 bp, Homo sapiens
atggccctcatatgctggaaccaaacacatggaatttaaaggctttccaaaggcggcggcgccgtattacat

SEQ ID NO: 188582 - DNA, 72 bp, Homo sapiens
atatgctggaaccaaacacatggaatttaaaggctttccaaaggcggcggcgccgtattacattcactcaac

SEQ ID NO: 188583 - DNA, 69 bp, Homo sapiens
aaacacatggaatttaaaggctttccaaaggcggcggcgccgtattacattcactcaaccttcttaata

SEQ ID NO: 188584 - DNA, 67 bp, Homo sapiens
aaaggctttccaaaggcggcggcgccgtattacattcactcaaccttcttaataaaagtaaagagag

SEQ ID NO: 188585 - DNA, 67 bp, Homo sapiens
gcggcggcgccgtattacattcactcaaccttcttaataaaagtaaagagagggaacttgggaattt

SEQ ID NO: 188586 - DNA, 65 bp, Homo sapiens
ggcgccgtattacattcactcaaccttcttaataaaagtaaagagagggaacttgggaatttttt

SEQ ID NO: 188587 - DNA, 64 bp, Homo sapiens
cattcactcaaccttcttaataaaagtaaagagagggaacttgggaattttttttgttaaattc

SEQ ID NO: 188588 - DNA, 62 bp, Homo sapiens
caaccttcttaataaaagtaaagagagggaacttgggaattttttttgttaaattctgttta

SEQ ID NO: 188589 - DNA, 66 bp, Homo sapiens
aagtaaagagagggaacttgggaattttttttgttaaattctgtttataagtatggctcaactgaa

SEQ ID NO: 188590 - DNA, 67 bp, Homo sapiens
gagagggaacttgggaattttttttgttaaattctgtttataagtatggctcaactgaataaaagga

SEQ ID NO: 188591 - DNA, 67 bp, Homo sapiens
ggaattttttttgttaaattctgtttataagtatggctcaactgaataaaaggagattcactaaaac

SEQ ID NO: 188592 - DNA, 70 bp, Homo sapiens
ttgttaaattctgtttataagtatggctcaactgaataaaaggagattcactaaaacgaaaagcagttat

SEQ ID NO: 188593 - DNA, 70 bp, Homo sapiens
attctgtttataagtatggctcaactgaataaaaggagattcactaaaacgaaaagcagttatttttgga

SEQ ID NO: 188594 - DNA, 69 bp, Homo sapiens
ataagtatggctcaactgaataaaaggagattcactaaaacgaaaagcagttatttttggaaacctgct

SEQ ID NO: 188595 - DNA, 68 bp, Homo sapiens
gctcaactgaataaaaggagattcactaaaacgaaaagcagttatttttggaaacctgcttttaaata

SEQ ID NO: 188596 - DNA, 67 bp, Homo sapiens
attcactaaaacgaaaagcagttatttttggaaacctgcttttaaatacaaataggttgataatgga

SEQ ID NO: 188597 - DNA, 69 bp, Homo sapiens
ttttggaaacctgcttttaaatacaaataggttgataatggaaactataatgacctttccaaaatagca

SEQ ID NO: 188598 - DNA, 71 bp, Homo sapiens
cctgcttttaaatacaaataggttgataatggaaactataatgacctttccaaaatagcagctggtagtaa

SEQ ID NO: 188599 - DNA, 70 bp, Homo sapiens
atacaaataggttgataatggaaactataatgacctttccaaaatagcagctggtagtaaaagttaagtc

SEQ ID NO: 188600 - DNA, 70 bp, Homo sapiens
gaaactataatgacctttccaaaatagcagctggtagtaaaagttaagtcttcttcagtcttggttgaac

SEQ ID NO: 188601 - DNA, 70 bp, Homo sapiens
ataatgacctttccaaaatagcagctggtagtaaaagttaagtcttcttcagtcttggttgaacttgagt

SEQ ID NO: 188602 - DNA, 72 bp, Homo sapiens
tttccaaaatagcagctggtagtaaaagttaagtcttcttcagtcttggttgaacttgagttcttggcactc

SEQ ID NO: 188603 - DNA, 76 bp, Homo sapiens
agctggtagtaaaagttaagtcttcttcagtcttggttgaacttgagttcttggcactctgaccatgagtcattca

SEQ ID NO: 188604 - DNA, 77 bp, Homo sapiens
aagttaagtcttcttcagtcttggttgaacttgagttcttggcactctgaccatgagtcattcagttctcatgttaa

SEQ ID NO: 188605 - DNA, 78 bp, Homo sapiens
ttcttcagtcttggttgaacttgagttcttggcactctgaccatgagtcattcagttctcatgttaaaatgtacttaa

SEQ ID NO: 188606 - DNA, 77 bp, Homo sapiens
ttggttgaacttgagttcttggcactctgaccatgagtcattcagttctcatgttaaaatgtacttaatattacaaa

SEQ ID NO: 188607 - DNA, 76 bp, Homo sapiens
acttgagttcttggcactctgaccatgagtcattcagttctcatgttaaaatgtacttaatattacaaatcaaagg

SEQ ID NO: 188608 - DNA, 78 bp, Homo sapiens
ttcttggcactctgaccatgagtcattcagttctcatgttaaaatgtacttaatattacaaatcaaaggtacagtgga

SEQ ID NO: 188609 - DNA, 75 bp, Homo sapiens
tctgaccatgagtcattcagttctcatgttaaaatgtacttaatattacaaatcaaaggtacagtggaagaaggg

SEQ ID NO: 188610 - DNA, 73 bp, Homo sapiens
gtcattcagttctcatgttaaaatgtacttaatattacaaatcaaaggtacagtggaagaagggttaatcaca

SEQ ID NO: 188611 - DNA, 69 bp, Homo sapiens
catgttaaaatgtacttaatattacaaatcaaaggtacagtggaagaagggttaatcacaagaagttac

SEQ ID NO: 188612 - DNA, 70 bp, Homo sapiens
gtacttaatattacaaatcaaaggtacagtggaagaagggttaatcacaagaagttacttatatggtagc

SEQ ID NO: 188613 - DNA, 71 bp, Homo sapiens
ttacaaatcaaaggtacagtggaagaagggttaatcacaagaagttacttatatggtagccctgagcttta

SEQ ID NO: 188614 - DNA, 70 bp, Homo sapiens
ggaagaagggttaatcacaagaagttacttatatggtagccctgagctttaattgcagagtaactttaat

SEQ ID NO: 188615 - DNA, 69 bp, Homo sapiens
aagggttaatcacaagaagttacttatatggtagccctgagctttaattgcagagtaactttaattact

SEQ ID NO: 188616 - DNA, 71 bp, Homo sapiens
cacaagaagttacttatatggtagccctgagctttaattgcagagtaactttaattacttttagagcctaa

SEQ ID NO: 188617 - DNA, 73 bp, Homo sapiens
acttatatggtagccctgagctttaattgcagagtaactttaattacttttagagcctaaagatgactctaga

SEQ ID NO: 188618 - DNA, 72 bp, Homo sapiens
cctgagctttaattgcagagtaactttaattacttttagagcctaaagatgactctagagcctaagtcctag

SEQ ID NO: 188619 - DNA, 71 bp, Homo sapiens
gctttaattgcagagtaactttaattacttttagagcctaaagatgactctagagcctaagtcctagtttc

SEQ ID NO: 188620 - DNA, 69 bp, Homo sapiens
agagtaactttaattacttttagagcctaaagatgactctagagcctaagtcctagtttctcccaatgt

SEQ ID NO: 188621 - DNA, 70 bp, Homo sapiens
ttaattacttttagagcctaaagatgactctagagcctaagtcctagtttctcccaatgttatatttaat

SEQ ID NO: 188622 - DNA, 73 bp, Homo sapiens
ttaattttaaaaaattgatatgaaaatgtctaatgtatagtaataatttatgacagatctagtcatttcttcc

SEQ ID NO: 188623 - DNA, 73 bp, Homo sapiens
aaaaattgatatgaaaatgtctaatgtatagtaataatttatgacagatctagtcatttcttcctattaaaaa

SEQ ID NO: 188624 - DNA, 74 bp, Homo sapiens
gatatgaaaatgtctaatgtatagtaataatttatgacagatctagtcatttcttcctattaaaaaagattacc

SEQ ID NO: 188625 - DNA, 74 bp, Homo sapiens
tgtctaatgtatagtaataatttatgacagatctagtcatttcttcctattaaaaaagattaccttatctccag

SEQ ID NO: 188626 - DNA, 72 bp, Homo sapiens
gtaataatttatgacagatctagtcatttcttcctattaaaaaagattaccttatctccagtaggaaatgga

SEQ ID NO: 188627 - DNA, 72 bp, Homo sapiens
tgacagatctagtcatttcttcctattaaaaaagattaccttatctccagtaggaaatggaattttatgggc

SEQ ID NO: 188628 - DNA, 69 bp, Homo sapiens
gatctagtcatttcttcctattaaaaaagattaccttatctccagtaggaaatggaattttatgggcct

SEQ ID NO: 188629 - DNA, 65 bp, Homo sapiens
tcctattaaaaaagattaccttatctccagtaggaaatggaattttatgggcctttaaaagaaag

SEQ ID NO: 188630 - DNA, 65 bp, Homo sapiens
aaaaagattaccttatctccagtaggaaatggaattttatgggcctttaaaagaaagttttatga

SEQ ID NO: 188631 - DNA, 67 bp, Homo sapiens
ccagtaggaaatggaattttatgggcctttaaaagaaagttttatgaaacttgatgctataatttta

SEQ ID NO: 188632 - DNA, 68 bp, Homo sapiens
atggaattttatgggcctttaaaagaaagttttatgaaacttgatgctataattttattggtatttca

SEQ ID NO: 188633 - DNA, 67 bp, Homo sapiens
tatgggcctttaaaagaaagttttatgaaacttgatgctataattttattggtatttcaaggggaaa

SEQ ID NO: 188634 - DNA, 70 bp, Homo sapiens
tgaaacttgatgctataattttattggtatttcaaggggaaaaaagcactggggttcaaaaatggtagca

SEQ ID NO: 188635 - DNA, 69 bp, Homo sapiens
tgctataattttattggtatttcaaggggaaaaaagcactggggttcaaaaatggtagcagaactgctt

SEQ ID NO: 188636 - DNA, 67 bp, Homo sapiens
attttattggtatttcaaggggaaaaaagcactggggttcaaaaatggtagcagaactgctttgaaa

SEQ ID NO: 188637 - DNA, 71 bp, Homo sapiens
ggtatttcaaggggaaaaaagcactggggttcaaaaatggtagcagaactgctttgaaatgctgcaaggtg

SEQ ID NO: 188638 - DNA, 77 bp, Homo sapiens
aaaaagcactggggttcaaaaatggtagcagaactgctttgaaatgctgcaaggtggccactagatgatgcaaaata

SEQ ID NO: 188639 - DNA, 77 bp, Homo sapiens
tggggttcaaaaatggtagcagaactgctttgaaatgctgcaaggtggccactagatgatgcaaaatacaaccaaaa

SEQ ID NO: 188640 - DNA, 79 bp, Homo sapiens
aaaaatggtagcagaactgctttgaaatgctgcaaggtggccactagatgatgcaaaatacaaccaaaagattgactga

SEQ ID NO: 188641 - DNA, 78 bp, Homo sapiens
agaactgctttgaaatgctgcaaggtggccactagatgatgcaaaatacaaccaaaagattgactgagaataaaatta

SEQ ID NO: 188642 - DNA, 78 bp, Homo sapiens
tttgaaatgctgcaaggtggccactagatgatgcaaaatacaaccaaaagattgactgagaataaaattaggtgacaa

SEQ ID NO: 188643 - DNA, 71 bp, Homo sapiens
aaggtggccactagatgatgcaaaatacaaccaaaagattgactgagaataaaattaggtgacaagggttt

SEQ ID NO: 188644 - DNA, 71 bp, Homo sapiens
ggccactagatgatgcaaaatacaaccaaaagattgactgagaataaaattaggtgacaagggtttttaaa

SEQ ID NO: 188645 - DNA, 68 bp, Homo sapiens
gatgcaaaatacaaccaaaagattgactgagaataaaattaggtgacaagggtttttaaagaataacc

SEQ ID NO: 188646 - DNA, 64 bp, Homo sapiens
agattgactgagaataaaattaggtgacaagggtttttaaagaataaccttttaaagtgtgggg

SEQ ID NO: 188647 - DNA, 62 bp, Homo sapiens
ataaaattaggtgacaagggtttttaaagaataaccttttaaagtgtgggggcaggggttgc

SEQ ID NO: 188648 - DNA, 66 bp, Homo sapiens
tttattttatttaaagtcaattatattttacatcttacatttctaaaagcattttataattatttt

SEQ ID NO: 188649 - DNA, 68 bp, Homo sapiens
gtcaattatattttacatcttacatttctaaaagcattttataattatttttagtaagatttttctta

SEQ ID NO: 188650 - DNA, 67 bp, Homo sapiens
gcattttataattatttttagtaagatttttcttaaaatttcatatactggtttctacaatttatat

SEQ ID NO: 188651 - DNA, 70 bp, Homo sapiens
gtaagatttttcttaaaatttcatatactggtttctacaatttatatttgaaatttctcagtgttatgta

SEQ ID NO: 188652 - DNA, 75 bp, Homo sapiens
catatactggtttctacaatttatatttgaaatttctcagtgttatgtaaagagtgatggaaaagcattgatttc

SEQ ID NO: 188653 - DNA, 73 bp, Homo sapiens
ctggtttctacaatttatatttgaaatttctcagtgttatgtaaagagtgatggaaaagcattgatttcttta

SEQ ID NO: 188654 - DNA, 71 bp, Homo sapiens
tatatttgaaatttctcagtgttatgtaaagagtgatggaaaagcattgatttctttaaaaccgtaatgtt

SEQ ID NO: 188655 - DNA, 69 bp, Homo sapiens
atttctcagtgttatgtaaagagtgatggaaaagcattgatttctttaaaaccgtaatgtttttagaac

SEQ ID NO: 188656 - DNA, 69 bp, Homo sapiens
cagtgttatgtaaagagtgatggaaaagcattgatttctttaaaaccgtaatgtttttagaacttaagc

SEQ ID NO: 188657 - DNA, 67 bp, Homo sapiens
gagtgatggaaaagcattgatttctttaaaaccgtaatgtttttagaacttaagcctatagggcctt

SEQ ID NO: 188658 - DNA, 66 bp, Homo sapiens
gaaaagcattgatttctttaaaaccgtaatgtttttagaacttaagcctatagggcctttcttaca

SEQ ID NO: 188659 - DNA, 66 bp, Homo sapiens
tttctttaaaaccgtaatgtttttagaacttaagcctatagggcctttcttacaatgttgatgtac

SEQ ID NO: 188660 - DNA, 69 bp, Homo sapiens
accgtaatgtttttagaacttaagcctatagggcctttcttacaatgttgatgtacccattatcttaga

SEQ ID NO: 188661 - DNA, 69 bp, Homo sapiens
gtttttagaacttaagcctatagggcctttcttacaatgttgatgtacccattatcttagaaaatctag

SEQ ID NO: 188662 - DNA, 68 bp, Homo sapiens
gggcctttcttacaatgttgatgtacccattatcttagaaaatctagtttaaactgttttctttcacc

SEQ ID NO: 188663 - DNA, 69 bp, Homo sapiens
tgatgtacccattatcttagaaaatctagtttaaactgttttctttcaccgcaaaagaattaaatggga

SEQ ID NO: 188664 - DNA, 65 bp, Homo sapiens
cccattatcttagaaaatctagtttaaactgttttctttcaccgcaaaagaattaaatgggaaaa

SEQ ID NO: 188665 - DNA, 67 bp, Homo sapiens
tctagtttaaactgttttctttcaccgcaaaagaattaaatgggaaaatcatttgtttatctctaag

SEQ ID NO: 188666 - DNA, 67 bp, Homo sapiens
gttttctttcaccgcaaaagaattaaatgggaaaatcatttgtttatctctaagttatactaattag

SEQ ID NO: 188667 - DNA, 69 bp, Homo sapiens
tttcaccgcaaaagaattaaatgggaaaatcatttgtttatctctaagttatactaattagtagaacca

SEQ ID NO: 188668 - DNA, 68 bp, Homo sapiens
ccgcaaaagaattaaatgggaaaatcatttgtttatctctaagttatactaattagtagaaccaaaca

SEQ ID NO: 188669 - DNA, 67 bp, Homo sapiens
aaatgggaaaatcatttgtttatctctaagttatactaattagtagaaccaaacaaattatcttctt

SEQ ID NO: 188670 - DNA, 67 bp, Homo sapiens
aatgggaaaatcatttgtttatctctaagttatactaattagtagaaccaaacaaattatcttcttt

SEQ ID NO: 188671 - DNA, 67 bp, Homo sapiens
gaaaatcatttgtttatctctaagttatactaattagtagaaccaaacaaattatcttcttttaaaa

SEQ ID NO: 188672 - DNA, 67 bp, Homo sapiens
tcatttgtttatctctaagttatactaattagtagaaccaaacaaattatcttcttttaaaaaataa

SEQ ID NO: 188673 - DNA, 74 bp, Homo sapiens
tttaaaaaataaatcttataggaaaatagacagtccaaagtcatgtctttgaacagtggattggatctgtgcca

SEQ ID NO: 188674 - DNA, 76 bp, Homo sapiens
aaaataaatcttataggaaaatagacagtccaaagtcatgtctttgaacagtggattggatctgtgccagtaatga

SEQ ID NO: 188675 - DNA, 76 bp, Homo sapiens
ttataggaaaatagacagtccaaagtcatgtctttgaacagtggattggatctgtgccagtaatgacaaaattatt

SEQ ID NO: 188676 - DNA, 75 bp, Homo sapiens
atagacagtccaaagtcatgtctttgaacagtggattggatctgtgccagtaatgacaaaattatttttttgact

SEQ ID NO: 188677 - DNA, 75 bp, Homo sapiens
ctttgaacagtggattggatctgtgccagtaatgacaaaattatttttttgacttgcttgcctgaataaattgaa

SEQ ID NO: 188678 - DNA, 75 bp, Homo sapiens
gtggattggatctgtgccagtaatgacaaaattatttttttgacttgcttgcctgaataaattgaagaattgctt

SEQ ID NO: 188679 - DNA, 73 bp, Homo sapiens
ctgtgccagtaatgacaaaattatttttttgacttgcttgcctgaataaattgaagaattgctttcagtttgg

SEQ ID NO: 188680 - DNA, 70 bp, Homo sapiens
gacaaaattatttttttgacttgcttgcctgaataaattgaagaattgctttcagtttgggttttgtata

SEQ ID NO: 188681 - DNA, 71 bp, Homo sapiens
ttttttgacttgcttgcctgaataaattgaagaattgctttcagtttgggttttgtatattcttaagtagc

SEQ ID NO: 188682 - DNA, 73 bp, Homo sapiens
gacttgcttgcctgaataaattgaagaattgctttcagtttgggttttgtatattcttaagtagccattgaaa

SEQ ID NO: 188683 - DNA, 71 bp, Homo sapiens
gcctgaataaattgaagaattgctttcagtttgggttttgtatattcttaagtagccattgaaatttatat

SEQ ID NO: 188684 - DNA, 70 bp, Homo sapiens
agaattgctttcagtttgggttttgtatattcttaagtagccattgaaatttatattcttaactaggtca

SEQ ID NO: 188685 - DNA, 68 bp, Homo sapiens
gctttcagtttgggttttgtatattcttaagtagccattgaaatttatattcttaactaggtcaaaaa

SEQ ID NO: 188686 - DNA, 70 bp, Homo sapiens
ttgggttttgtatattcttaagtagccattgaaatttatattcttaactaggtcaaaaaataatgagcca

SEQ ID NO: 188687 - DNA, 73 bp, Homo sapiens
gccattgaaatttatattcttaactaggtcaaaaaataatgagccataagtttatgtcctctcacttagacat

SEQ ID NO: 188688 - DNA, 71 bp, Homo sapiens
atttatattcttaactaggtcaaaaaataatgagccataagtttatgtcctctcacttagacattttctct

SEQ ID NO: 188689 - DNA, 70 bp, Homo sapiens
ttcttaactaggtcaaaaaataatgagccataagtttatgtcctctcacttagacattttctctttaaaa

SEQ ID NO: 188690 - DNA, 68 bp, Homo sapiens
aaaaataatgagccataagtttatgtcctctcacttagacattttctctttaaaaaggtattttcttc

SEQ ID NO: 188691 - DNA, 69 bp, Homo sapiens
gagccataagtttatgtcctctcacttagacattttctctttaaaaaggtattttcttctttataaaca

SEQ ID NO: 188692 - DNA, 65 bp, Homo sapiens
aagtttatgtcctctcacttagacattttctctttaaaaaggtattttcttctttataaacattt

SEQ ID NO: 188693 - DNA, 63 bp, Homo sapiens
tctctttaaaaaggtattttcttctttataaacattttaaaagagccttcccttcttaaacta

SEQ ID NO: 188694 - DNA, 69 bp, Homo sapiens
cttctttataaacattttaaaagagccttcccttcttaaactaactccagtgcatgaagtgtgaaaata

SEQ ID NO: 188695 - DNA, 67 bp, Homo sapiens
aaacattttaaaagagccttcccttcttaaactaactccagtgcatgaagtgtgaaaatattttaaa

SEQ ID NO: 188696 - DNA, 73 bp, Homo sapiens
atattttaaaatgacatttttactaatatgagcaagtcatgtaaacattgaagaacttggtaacatattagta

SEQ ID NO: 188697 - DNA, 75 bp, Homo sapiens
atgacatttttactaatatgagcaagtcatgtaaacattgaagaacttggtaacatattagtaaatggatattac

SEQ ID NO: 188698 - DNA, 74 bp, Homo sapiens
ttttactaatatgagcaagtcatgtaaacattgaagaacttggtaacatattagtaaatggatattaccaaatg

SEQ ID NO: 188699 - DNA, 74 bp, Homo sapiens
gagcaagtcatgtaaacattgaagaacttggtaacatattagtaaatggatattaccaaatgttttcatcgtta

SEQ ID NO: 188700 - DNA, 71 bp, Homo sapiens
tgaagaacttggtaacatattagtaaatggatattaccaaatgttttcatcgttaattactttgcgttcca

SEQ ID NO: 188701 - DNA, 69 bp, Homo sapiens
cttggtaacatattagtaaatggatattaccaaatgttttcatcgttaattactttgcgttccaccaaa

SEQ ID NO: 188702 - DNA, 68 bp, Homo sapiens
attagtaaatggatattaccaaatgttttcatcgttaattactttgcgttccaccaaaatatctttac

SEQ ID NO: 188703 - DNA, 68 bp, Homo sapiens
attaccaaatgttttcatcgttaattactttgcgttccaccaaaatatctttactaaaatgtgcttgg

SEQ ID NO: 188704 - DNA, 69 bp, Homo sapiens
caaatgttttcatcgttaattactttgcgttccaccaaaatatctttactaaaatgtgcttggtgtagt

SEQ ID NO: 188705 - DNA, 69 bp, Homo sapiens
catcgttaattactttgcgttccaccaaaatatctttactaaaatgtgcttggtgtagtttgtttattg

SEQ ID NO: 188706 - DNA, 70 bp, Homo sapiens
tgcgttccaccaaaatatctttactaaaatgtgcttggtgtagtttgtttattgtctaaattagtaccag

SEQ ID NO: 188707 - DNA, 71 bp, Homo sapiens
tccaccaaaatatctttactaaaatgtgcttggtgtagtttgtttattgtctaaattagtaccagtcatct

SEQ ID NO: 188708 - DNA, 71 bp, Homo sapiens
ctttactaaaatgtgcttggtgtagtttgtttattgtctaaattagtaccagtcatcttatttctgcaaaa

SEQ ID NO: 188709 - DNA, 77 bp, Homo sapiens
atgtgcttggtgtagtttgtttattgtctaaattagtaccagtcatcttatttctgcaaaatgagtatcaatgtgaa

SEQ ID NO: 188710 - DNA, 74 bp, Homo sapiens
ggtgtagtttgtttattgtctaaattagtaccagtcatcttatttctgcaaaatgagtatcaatgtgaaaaaga

SEQ ID NO: 188711 - DNA, 77 bp, Homo sapiens
attgtctaaattagtaccagtcatcttatttctgcaaaatgagtatcaatgtgaaaaagacacgtgaagattaagca

SEQ ID NO: 188712 - DNA, 76 bp, Homo sapiens
accagtcatcttatttctgcaaaatgagtatcaatgtgaaaaagacacgtgaagattaagcatgtttgaaaataaa

SEQ ID NO: 188713 - DNA, 76 bp, Homo sapiens
tctgcaaaatgagtatcaatgtgaaaaagacacgtgaagattaagcatgtttgaaaataaaatggtcaattacatt

SEQ ID NO: 188714 - DNA, 74 bp, Homo sapiens
aaaatgagtatcaatgtgaaaaagacacgtgaagattaagcatgtttgaaaataaaatggtcaattacatttca

SEQ ID NO: 188715 - DNA, 74 bp, Homo sapiens
tgtgaaaaagacacgtgaagattaagcatgtttgaaaataaaatggtcaattacatttcaatttacataggcca

SEQ ID NO: 188716 - DNA, 73 bp, Homo sapiens
agacacgtgaagattaagcatgtttgaaaataaaatggtcaattacatttcaatttacataggccaacaactg

SEQ ID NO: 188717 - DNA, 73 bp, Homo sapiens
gaagattaagcatgtttgaaaataaaatggtcaattacatttcaatttacataggccaacaactgttccatac

SEQ ID NO: 188718 - DNA, 70 bp, Homo sapiens
ttgaaaataaaatggtcaattacatttcaatttacataggccaacaactgttccatactttgtttgtaaa

SEQ ID NO: 188719 - DNA, 69 bp, Homo sapiens
aataaaatggtcaattacatttcaatttacataggccaacaactgttccatactttgtttgtaaacatt

SEQ ID NO: 188720 - DNA, 72 bp, Homo sapiens
tacatttcaatttacataggccaacaactgttccatactttgtttgtaaacatttaatttctctactggaca

SEQ ID NO: 188721 - DNA, 69 bp, Homo sapiens
caatttacataggccaacaactgttccatactttgtttgtaaacatttaatttctctactggacaaaat

SEQ ID NO: 188722 - DNA, 69 bp, Homo sapiens
ggccaacaactgttccatactttgtttgtaaacatttaatttctctactggacaaaattaatatttggc

SEQ ID NO: 188723 - DNA, 70 bp, Homo sapiens
ctgttccatactttgtttgtaaacatttaatttctctactggacaaaattaatatttggctttacattga

SEQ ID NO: 188724 - DNA, 72 bp, Homo sapiens
tgtttgtaaacatttaatttctctactggacaaaattaatatttggctttacattgaattttgagctgtgaa

SEQ ID NO: 188725 - DNA, 72 bp, Homo sapiens
gtaaacatttaatttctctactggacaaaattaatatttggctttacattgaattttgagctgtgaagaata

SEQ ID NO: 188726 - DNA, 75 bp, Homo sapiens
tatttggctttacattgaattttgagctgtgaagaataaattatgtatcattttagcatattaaacagtagtaag

SEQ ID NO: 188727 - DNA, 78 bp, Homo sapiens
acattgaattttgagctgtgaagaataaattatgtatcattttagcatattaaacagtagtaagtctagcacatagtc

SEQ ID NO: 188728 - DNA, 79 bp, Homo sapiens
attttgagctgtgaagaataaattatgtatcattttagcatattaaacagtagtaagtctagcacatagtctcagccac

SEQ ID NO: 188729 - DNA, 77 bp, Homo sapiens
gtgaagaataaattatgtatcattttagcatattaaacagtagtaagtctagcacatagtctcagccacttaaaaca

SEQ ID NO: 188730 - DNA, 73 bp, Homo sapiens
aaattatgtatcattttagcatattaaacagtagtaagtctagcacatagtctcagccacttaaaacaaaagt

SEQ ID NO: 188731 - DNA, 71 bp, Homo sapiens
atcattttagcatattaaacagtagtaagtctagcacatagtctcagccacttaaaacaaaagtttttttg

SEQ ID NO: 188732 - DNA, 67 bp, Homo sapiens
taggcgtgagcccctgcacccggccaaaagttgatttttaattacataaaaatcgtaaaaacttcta

SEQ ID NO: 188733 - DNA, 65 bp, Homo sapiens
gagcccctgcacccggccaaaagttgatttttaattacataaaaatcgtaaaaacttctagtaaa

SEQ ID NO: 188734 - DNA, 64 bp, Homo sapiens
gcacccggccaaaagttgatttttaattacataaaaatcgtaaaaacttctagtaaaaacttga

SEQ ID NO: 188735 - DNA, 65 bp, Homo sapiens
gttgatttttaattacataaaaatcgtaaaaacttctagtaaaaacttgatttggtgaatacagt

SEQ ID NO: 188736 - DNA, 65 bp, Homo sapiens
aattacataaaaatcgtaaaaacttctagtaaaaacttgatttggtgaatacagttatatttaaa

SEQ ID NO: 188737 - DNA, 64 bp, Homo sapiens
cataaaaatcgtaaaaacttctagtaaaaacttgatttggtgaatacagttatatttaaaaacc

SEQ ID NO: 188738 - DNA, 63 bp, Homo sapiens
ataaaaatcgtaaaaacttctagtaaaaacttgatttggtgaatacagttatatttaaaaacc

SEQ ID NO: 188739 - DNA, 65 bp, Homo sapiens
tcgtaaaaacttctagtaaaaacttgatttggtgaatacagttatatttaaaaaccttaaggtga

SEQ ID NO: 188740 - DNA, 66 bp, Homo sapiens
acttctagtaaaaacttgatttggtgaatacagttatatttaaaaaccttaaggtgacaagcattt

SEQ ID NO: 188741 - DNA, 69 bp, Homo sapiens
ctagtaaaaacttgatttggtgaatacagttatatttaaaaaccttaaggtgacaagcattttctatgc

SEQ ID NO: 188742 - DNA, 69 bp, Homo sapiens
tagtaaaaacttgatttggtgaatacagttatatttaaaaaccttaaggtgacaagcattttctatgcc

SEQ ID NO: 188743 - DNA, 71 bp, Homo sapiens
cttgatttggtgaatacagttatatttaaaaaccttaaggtgacaagcattttctatgcctaaatcttcat

SEQ ID NO: 188744 - DNA, 71 bp, Homo sapiens
gatttggtgaatacagttatatttaaaaaccttaaggtgacaagcattttctatgcctaaatcttcattgg

SEQ ID NO: 188745 - DNA, 72 bp, Homo sapiens
tgaatacagttatatttaaaaaccttaaggtgacaagcattttctatgcctaaatcttcattggtttgcctg

SEQ ID NO: 188746 - DNA, 71 bp, Homo sapiens
gaatacagttatatttaaaaaccttaaggtgacaagcattttctatgcctaaatcttcattggtttgcctg

SEQ ID NO: 188747 - DNA, 70 bp, Homo sapiens
atatttaaaaaccttaaggtgacaagcattttctatgcctaaatcttcattggtttgcctggaaagagtc

SEQ ID NO: 188748 - DNA, 72 bp, Homo sapiens
taaaaaccttaaggtgacaagcattttctatgcctaaatcttcattggtttgcctggaaagagtctctgtta

SEQ ID NO: 188749 - DNA, 76 bp, Homo sapiens
tgacaagcattttctatgcctaaatcttcattggtttgcctggaaagagtctctgttaaaagattttccatattca

SEQ ID NO: 188750 - DNA, 70 bp, Homo sapiens
gcctaaatcttcattggtttgcctggaaagagtctctgttaaaagattttccatattcaaagtaaaagga

SEQ ID NO: 188751 - DNA, 69 bp, Homo sapiens
tggtttgcctggaaagagtctctgttaaaagattttccatattcaaagtaaaaggaaagatttcttgct

SEQ ID NO: 188752 - DNA, 69 bp, Homo sapiens
gcctggaaagagtctctgttaaaagattttccatattcaaagtaaaaggaaagatttcttgctttctaa

SEQ ID NO: 188753 - DNA, 69 bp, Homo sapiens
tctgttaaaagattttccatattcaaagtaaaaggaaagatttcttgctttctaattgtcttttggaca

SEQ ID NO: 188754 - DNA, 70 bp, Homo sapiens
gattttccatattcaaagtaaaaggaaagatttcttgctttctaattgtcttttggacacatgcctattt

SEQ ID NO: 188755 - DNA, 69 bp, Homo sapiens
attcaaagtaaaaggaaagatttcttgctttctaattgtcttttggacacatgcctattttctttgagg

SEQ ID NO: 188756 - DNA, 68 bp, Homo sapiens
aaaggaaagatttcttgctttctaattgtcttttggacacatgcctattttctttgaggtataaacct

SEQ ID NO: 188757 - DNA, 72 bp, Homo sapiens
gatttcttgctttctaattgtcttttggacacatgcctattttctttgaggtataaacctttagatgtgaaa

SEQ ID NO: 188758 - DNA, 73 bp, Homo sapiens
ttgtcttttggacacatgcctattttctttgaggtataaacctttagatgtgaaaaatgtaatttcattctgc

SEQ ID NO: 188759 - DNA, 76 bp, Homo sapiens
cacatgcctattttctttgaggtataaacctttagatgtgaaaaatgtaatttcattctgctattgtgtgtgcttg

SEQ ID NO: 188760 - DNA, 75 bp, Homo sapiens
attttctttgaggtataaacctttagatgtgaaaaatgtaatttcattctgctattgtgtgtgcttgtgtgtgtg

SEQ ID NO: 188761 - DNA, 72 bp, Homo sapiens
gtgtgcttgtgtgtgtgtaattgaaaaaactgggaaatcctgctttgttggtaataaatcaatatttttata

SEQ ID NO: 188762 - DNA, 70 bp, Homo sapiens
tgggaaatcctgctttgttggtaataaatcaatatttttatattcttttggtgtatgttattttaagtga

SEQ ID NO: 188763 - DNA, 70 bp, Homo sapiens
atcctgctttgttggtaataaatcaatatttttatattcttttggtgtatgttattttaagtgagaacta

SEQ ID NO: 188764 - DNA, 72 bp, Homo sapiens
ccctgccagctttcacttataaatgctagaaaaacacttcacacaaaaaaatacataagattactatatttc

SEQ ID NO: 188765 - DNA, 70 bp, Homo sapiens
tcacttataaatgctagaaaaacacttcacacaaaaaaatacataagattactatatttccttttaagag

SEQ ID NO: 188766 - DNA, 69 bp, Homo sapiens
tgctagaaaaacacttcacacaaaaaaatacataagattactatatttccttttaagaggaacgtttca

SEQ ID NO: 188767 - DNA, 66 bp, Homo sapiens
cacttcacacaaaaaaatacataagattactatatttccttttaagaggaacgtttcaacaaattt

SEQ ID NO: 188768 - DNA, 67 bp, Homo sapiens
taagattactatatttccttttaagaggaacgtttcaacaaattttacaggtgtcaatcaacccttg

SEQ ID NO: 188769 - DNA, 66 bp, Homo sapiens
atatttccttttaagaggaacgtttcaacaaattttacaggtgtcaatcaacccttgttcaaatcg

SEQ ID NO: 188770 - DNA, 70 bp, Homo sapiens
tttaagaggaacgtttcaacaaattttacaggtgtcaatcaacccttgttcaaatcgggcacacatcaaa

SEQ ID NO: 188771 - DNA, 74 bp, Homo sapiens
aggaacgtttcaacaaattttacaggtgtcaatcaacccttgttcaaatcgggcacacatcaaatctagcatca

SEQ ID NO: 188772 - DNA, 73 bp, Homo sapiens
aaattttacaggtgtcaatcaacccttgttcaaatcgggcacacatcaaatctagcatcatgggtgttttatt

SEQ ID NO: 188773 - DNA, 76 bp, Homo sapiens
tacaggtgtcaatcaacccttgttcaaatcgggcacacatcaaatctagcatcatgggtgttttatttatttggaa

SEQ ID NO: 188774 - DNA, 73 bp, Homo sapiens
aatcaacccttgttcaaatcgggcacacatcaaatctagcatcatgggtgttttatttatttggaagtgaatt

SEQ ID NO: 188775 - DNA, 75 bp, Homo sapiens
gttcaaatcgggcacacatcaaatctagcatcatgggtgttttatttatttggaagtgaattttaactatcaata

SEQ ID NO: 188776 - DNA, 76 bp, Homo sapiens
gggcacacatcaaatctagcatcatgggtgttttatttatttggaagtgaattttaactatcaatacaaatgccaa

SEQ ID NO: 188777 - DNA, 75 bp, Homo sapiens
caaatctagcatcatgggtgttttatttatttggaagtgaattttaactatcaatacaaatgccaagatactaca

SEQ ID NO: 188778 - DNA, 71 bp, Homo sapiens
gggtgttttatttatttggaagtgaattttaactatcaatacaaatgccaagatactacacaaaacatcca

SEQ ID NO: 188779 - DNA, 71 bp, Homo sapiens
tttatttggaagtgaattttaactatcaatacaaatgccaagatactacacaaaacatccacaggaacttt

SEQ ID NO: 188780 - DNA, 73 bp, Homo sapiens
ttggaagtgaattttaactatcaatacaaatgccaagatactacacaaaacatccacaggaacttttttcatc

SEQ ID NO: 188781 - DNA, 69 bp, Homo sapiens
attttaactatcaatacaaatgccaagatactacacaaaacatccacaggaacttttttcatctttttt

SEQ ID NO: 188782 - DNA, 70 bp, Homo sapiens
ttttttttttgaattgtacacaaacatttcctacataatccaacatacaacagagaaatggtacatcttt

SEQ ID NO: 188783 - DNA, 76 bp, Homo sapiens
cacaaacatttcctacataatccaacatacaacagagaaatggtacatctttttctttcaatttgcatacaatgga

SEQ ID NO: 188784 - DNA, 73 bp, Homo sapiens
cctacataatccaacatacaacagagaaatggtacatctttttctttcaatttgcatacaatggaaaaacaag

SEQ ID NO: 188785 - DNA, 74 bp, Homo sapiens
aatccaacatacaacagagaaatggtacatctttttctttcaatttgcatacaatggaaaaacaagtatatata

SEQ ID NO: 188786 - DNA, 71 bp, Homo sapiens
tttacaaagtttaactaataagacactagagcaaattgacagtttaagtctataggtgagaaattatctaa

SEQ ID NO: 188787 - DNA, 70 bp, Homo sapiens
agtttaactaataagacactagagcaaattgacagtttaagtctataggtgagaaattatctaataaaaa

SEQ ID NO: 188788 - DNA, 71 bp, Homo sapiens
ataagacactagagcaaattgacagtttaagtctataggtgagaaattatctaataaaaataatcaatttt

SEQ ID NO: 188789 - DNA, 74 bp, Homo sapiens
gagcaaattgacagtttaagtctataggtgagaaattatctaataaaaataatcaattttttcagcattagtca

SEQ ID NO: 188790 - DNA, 73 bp, Homo sapiens
gacagtttaagtctataggtgagaaattatctaataaaaataatcaattttttcagcattagtcacttccata

SEQ ID NO: 188791 - DNA, 72 bp, Homo sapiens
agtctataggtgagaaattatctaataaaaataatcaattttttcagcattagtcacttccataaccaagtg

SEQ ID NO: 188792 - DNA, 72 bp, Homo sapiens
gtctataggtgagaaattatctaataaaaataatcaattttttcagcattagtcacttccataaccaagtgt

SEQ ID NO: 188793 - DNA, 73 bp, Homo sapiens
ggtgagaaattatctaataaaaataatcaattttttcagcattagtcacttccataaccaagtgttattctga

SEQ ID NO: 188794 - DNA, 73 bp, Homo sapiens
gagaaattatctaataaaaataatcaattttttcagcattagtcacttccataaccaagtgttattctgatta

SEQ ID NO: 188795 - DNA, 70 bp, Homo sapiens
ctaataaaaataatcaattttttcagcattagtcacttccataaccaagtgttattctgattaataaaac

SEQ ID NO: 188796 - DNA, 76 bp, Homo sapiens
taatcaattttttcagcattagtcacttccataaccaagtgttattctgattaataaaacttgctgccaatcagaa

SEQ ID NO: 188797 - DNA, 75 bp, Homo sapiens
caattttttcagcattagtcacttccataaccaagtgttattctgattaataaaacttgctgccaatcagaattc

SEQ ID NO: 188798 - DNA, 76 bp, Homo sapiens
tttttcagcattagtcacttccataaccaagtgttattctgattaataaaacttgctgccaatcagaattctggta

SEQ ID NO: 188799 - DNA, 78 bp, Homo sapiens
ttcagcattagtcacttccataaccaagtgttattctgattaataaaacttgctgccaatcagaattctggtatatac

SEQ ID NO: 188800 - DNA, 78 bp, Homo sapiens
tagtcacttccataaccaagtgttattctgattaataaaacttgctgccaatcagaattctggtatatactcatacca

SEQ ID NO: 188801 - DNA, 78 bp, Homo sapiens
gttattctgattaataaaacttgctgccaatcagaattctggtatatactcataccattactcaacttgtagtactgc

SEQ ID NO: 188802 - DNA, 76 bp, Homo sapiens
attaataaaacttgctgccaatcagaattctggtatatactcataccattactcaacttgtagtactgctccccac

SEQ ID NO: 188803 - DNA, 75 bp, Homo sapiens
aaacttgctgccaatcagaattctggtatatactcataccattactcaacttgtagtactgctccccaccttagt

SEQ ID NO: 188804 - DNA, 75 bp, Homo sapiens
atcagaattctggtatatactcataccattactcaacttgtagtactgctccccaccttagttcttcacaactaa

SEQ ID NO: 188805 - DNA, 74 bp, Homo sapiens
tggtatatactcataccattactcaacttgtagtactgctccccaccttagttcttcacaactaacatagaaaa

SEQ ID NO: 188806 - DNA, 72 bp, Homo sapiens
atactcataccattactcaacttgtagtactgctccccaccttagttcttcacaactaacatagaaaattgt

SEQ ID NO: 188807 - DNA, 70 bp, Homo sapiens
ttactcaacttgtagtactgctccccaccttagttcttcacaactaacatagaaaattgttgaaaagtag

SEQ ID NO: 188808 - DNA, 71 bp, Homo sapiens
tgtagtactgctccccaccttagttcttcacaactaacatagaaaattgttgaaaagtaggggcaagcatt

SEQ ID NO: 188809 - DNA, 69 bp, Homo sapiens
cccaccttagttcttcacaactaacatagaaaattgttgaaaagtaggggcaagcatttgcaaaaacaa

SEQ ID NO: 188810 - DNA, 69 bp, Homo sapiens
cttagttcttcacaactaacatagaaaattgttgaaaagtaggggcaagcatttgcaaaaacaaacaaa

SEQ ID NO: 188811 - DNA, 75 bp, Homo sapiens
acaaacaaaaaatccccagcttattataagcatgaatatgtatgatggaatttcttcccagcaatagacttccaa

SEQ ID NO: 188812 - DNA, 76 bp, Homo sapiens
aaaaatccccagcttattataagcatgaatatgtatgatggaatttcttcccagcaatagacttccaaaccatcaa

SEQ ID NO: 188813 - DNA, 79 bp, Homo sapiens
ttattataagcatgaatatgtatgatggaatttcttcccagcaatagacttccaaaccatcaagaaatcaccagaacta

SEQ ID NO: 188814 - DNA, 77 bp, Homo sapiens
ataagcatgaatatgtatgatggaatttcttcccagcaatagacttccaaaccatcaagaaatcaccagaactaagt

SEQ ID NO: 188815 - DNA, 74 bp, Homo sapiens
tatgatggaatttcttcccagcaatagacttccaaaccatcaagaaatcaccagaactaagtttgccaagttat

SEQ ID NO: 188816 - DNA, 73 bp, Homo sapiens
agcaatagacttccaaaccatcaagaaatcaccagaactaagtttgccaagttattttgcctatgtccaacaa

SEQ ID NO: 188817 - DNA, 77 bp, Homo sapiens
atcaagaaatcaccagaactaagtttgccaagttattttgcctatgtccaacaagagatgcacttatatgtccaaca

SEQ ID NO: 188818 - DNA, 77 bp, Homo sapiens
aatcaccagaactaagtttgccaagttattttgcctatgtccaacaagagatgcacttatatgtccaacagaggagc

SEQ ID NO: 188819 - DNA, 75 bp, Homo sapiens
agtttgccaagttattttgcctatgtccaacaagagatgcacttatatgtccaacagaggagctgaaaattaaac

SEQ ID NO: 188820 - DNA, 74 bp, Homo sapiens
agttattttgcctatgtccaacaagagatgcacttatatgtccaacagaggagctgaaaattaaacttagtgtt

SEQ ID NO: 188821 - DNA, 75 bp, Homo sapiens
ttgcctatgtccaacaagagatgcacttatatgtccaacagaggagctgaaaattaaacttagtgtttagtttgg

SEQ ID NO: 188822 - DNA, 70 bp, Homo sapiens
aacaagagatgcacttatatgtccaacagaggagctgaaaattaaacttagtgtttagtttgggggtggg

SEQ ID NO: 188823 - DNA, 66 bp, Homo sapiens
acttatatgtccaacagaggagctgaaaattaaacttagtgtttagtttgggggtgggttgggaaa

SEQ ID NO: 188824 - DNA, 68 bp, Homo sapiens
atgtccaacagaggagctgaaaattaaacttagtgtttagtttgggggtgggttgggaaattcagcca

SEQ ID NO: 188825 - DNA, 64 bp, Homo sapiens
gctgaaaattaaacttagtgtttagtttgggggtgggttgggaaattcagccaccattttaaaa

SEQ ID NO: 188826 - DNA, 64 bp, Homo sapiens
aattaaacttagtgtttagtttgggggtgggttgggaaattcagccaccattttaaaatgactg

SEQ ID NO: 188827 - DNA, 64 bp, Homo sapiens
agtgtttagtttgggggtgggttgggaaattcagccaccattttaaaatgactgtcttaaaaaa

SEQ ID NO: 188828 - DNA, 75 bp, Homo sapiens
tttattttaaaaatcataaaacgtttcttacaaaagagcattacattctgcacactgctctgaacagatgccagg

SEQ ID NO: 188829 - DNA, 79 bp, Homo sapiens
aaaatcataaaacgtttcttacaaaagagcattacattctgcacactgctctgaacagatgccagggacatgtggacta

SEQ ID NO: 188830 - DNA, 79 bp, Homo sapiens
ataaaacgtttcttacaaaagagcattacattctgcacactgctctgaacagatgccagggacatgtggactattgtta

SEQ ID NO: 188831 - DNA, 80 bp, Homo sapiens
tcttacaaaagagcattacattctgcacactgctctgaacagatgccagggacatgtggactattgttacttttcctccc

SEQ ID NO: 188832 - DNA, 79 bp, Homo sapiens
agcattacattctgcacactgctctgaacagatgccagggacatgtggactattgttacttttcctccctgtcccaccc

SEQ ID NO: 188833 - DNA, 74 bp, Homo sapiens
cacactgctctgaacagatgccagggacatgtggactattgttacttttcctccctgtcccaccccccaaatgt

SEQ ID NO: 188834 - DNA, 74 bp, Homo sapiens
tctgaacagatgccagggacatgtggactattgttacttttcctccctgtcccaccccccaaatgttacagtga

SEQ ID NO: 188835 - DNA, 69 bp, Homo sapiens
ccagggacatgtggactattgttacttttcctccctgtcccaccccccaaatgttacagtgaccacaaa

SEQ ID NO: 188836 - DNA, 69 bp, Homo sapiens
acatgtggactattgttacttttcctccctgtcccaccccccaaatgttacagtgaccacaaagcaagg

SEQ ID NO: 188837 - DNA, 69 bp, Homo sapiens
tgttacttttcctccctgtcccaccccccaaatgttacagtgaccacaaagcaaggtgttcacaataat

SEQ ID NO: 188838 - DNA, 70 bp, Homo sapiens
ttttcctccctgtcccaccccccaaatgttacagtgaccacaaagcaaggtgttcacaataattacatgg

SEQ ID NO: 188839 - DNA, 67 bp, Homo sapiens
ccaccccccaaatgttacagtgaccacaaagcaaggtgttcacaataattacatggggggaattttt

SEQ ID NO: 188840 - DNA, 68 bp, Homo sapiens
cccaaatgttacagtgaccacaaagcaaggtgttcacaataattacatggggggaattttttaaacca

SEQ ID NO: 188841 - DNA, 68 bp, Homo sapiens
aaatgttacagtgaccacaaagcaaggtgttcacaataattacatggggggaattttttaaaccacca

SEQ ID NO: 188842 - DNA, 69 bp, Homo sapiens
ttacagtgaccacaaagcaaggtgttcacaataattacatggggggaattttttaaaccaccaacaata

SEQ ID NO: 188843 - DNA, 68 bp, Homo sapiens
tgaccacaaagcaaggtgttcacaataattacatggggggaattttttaaaccaccaacaataacgaa

SEQ ID NO: 188844 - DNA, 67 bp, Homo sapiens
gaccacaaagcaaggtgttcacaataattacatggggggaattttttaaaccaccaacaataacgaa

SEQ ID NO: 188845 - DNA, 65 bp, Homo sapiens
gcaaggtgttcacaataattacatggggggaattttttaaaccaccaacaataacgaaaaataaa

SEQ ID NO: 188846 - DNA, 64 bp, Homo sapiens
caaggtgttcacaataattacatggggggaattttttaaaccaccaacaataacgaaaaataaa

SEQ ID NO: 188847 - DNA, 67 bp, Homo sapiens
aattacatggggggaattttttaaaccaccaacaataacgaaaaataaaatccactcactctgctgc

SEQ ID NO: 188848 - DNA, 68 bp, Homo sapiens
attacatggggggaattttttaaaccaccaacaataacgaaaaataaaatccactcactctgctgctg

SEQ ID NO: 188849 - DNA, 70 bp, Homo sapiens
tttaaaccaccaacaataacgaaaaataaaatccactcactctgctgctgtttcaaaatttcaatgttag

SEQ ID NO: 188850 - DNA, 71 bp, Homo sapiens
taacgaaaaataaaatccactcactctgctgctgtttcaaaatttcaatgttagtttttgcacgcccttcc

SEQ ID NO: 188851 - DNA, 67 bp, Homo sapiens
ctgctgctgtttcaaaatttcaatgttagtttttgcacgcccttcccccccccaaccctgtttgtaa

SEQ ID NO: 188852 - DNA, 64 bp, Homo sapiens
ttcaaaatttcaatgttagtttttgcacgcccttcccccccccaaccctgtttgtaaggaacta

SEQ ID NO: 188853 - DNA, 62 bp, Homo sapiens
aatttcaatgttagtttttgcacgcccttcccccccccaaccctgtttgtaaggaactaaaa

SEQ ID NO: 188854 - DNA, 64 bp, Homo sapiens
ttagtttttgcacgcccttcccccccccaaccctgtttgtaaggaactaaaacattacatctgg

SEQ ID NO: 188855 - DNA, 65 bp, Homo sapiens
cccttcccccccccaaccctgtttgtaaggaactaaaacattacatctggtgaacagcaaagatt

SEQ ID NO: 188856 - DNA, 73 bp, Homo sapiens
cccaaccctgtttgtaaggaactaaaacattacatctggtgaacagcaaagatttcactacacctcaaatgca

SEQ ID NO: 188857 - DNA, 76 bp, Homo sapiens
tttgtaaggaactaaaacattacatctggtgaacagcaaagatttcactacacctcaaatgcagaacacctatgaa

SEQ ID NO: 188858 - DNA, 78 bp, Homo sapiens
actaaaacattacatctggtgaacagcaaagatttcactacacctcaaatgcagaacacctatgaagcagaggaatgt

SEQ ID NO: 188859 - DNA, 78 bp, Homo sapiens
attacatctggtgaacagcaaagatttcactacacctcaaatgcagaacacctatgaagcagaggaatgttggctttt

SEQ ID NO: 188860 - DNA, 76 bp, Homo sapiens
aaagatttcactacacctcaaatgcagaacacctatgaagcagaggaatgttggctttttaaacagaagcagataa

SEQ ID NO: 188861 - DNA, 73 bp, Homo sapiens
actacacctcaaatgcagaacacctatgaagcagaggaatgttggctttttaaacagaagcagataaaaaaaa

SEQ ID NO: 188862 - DNA, 72 bp, Homo sapiens
aaaaaaagatgcaggactccttcagttcttcactagtcttagaaaaactttccagaatactgcttcacacta

SEQ ID NO: 188863 - DNA, 73 bp, Homo sapiens
aagatgcaggactccttcagttcttcactagtcttagaaaaactttccagaatactgcttcacactataaaaa

SEQ ID NO: 188864 - DNA, 69 bp, Homo sapiens
actccttcagttcttcactagtcttagaaaaactttccagaatactgcttcacactataaaaaagaaaa

SEQ ID NO: 188865 - DNA, 73 bp, Homo sapiens
aaaaagaaaaaatatcttgcattagaatccttcaacatctgcatactgcttcacactataaaagaaaagaaaa

SEQ ID NO: 188866 - DNA, 73 bp, Homo sapiens
aaaggttttagtatgtataagctaacacaaagctaaacttaaactgacctgttctgcagcaaatactgtgcat

SEQ ID NO: 188867 - DNA, 79 bp, Homo sapiens
ttagtatgtataagctaacacaaagctaaacttaaactgacctgttctgcagcaaatactgtgcattctgtatctggtc

SEQ ID NO: 188868 - DNA, 78 bp, Homo sapiens
taagctaacacaaagctaaacttaaactgacctgttctgcagcaaatactgtgcattctgtatctggtcctgtgttcc

SEQ ID NO: 188869 - DNA, 77 bp, Homo sapiens
aagctaaacttaaactgacctgttctgcagcaaatactgtgcattctgtatctggtcctgtgttcctgtaatggtaa

SEQ ID NO: 188870 - DNA, 81 bp, Homo sapiens
ttaaactgacctgttctgcagcaaatactgtgcattctgtatctggtcctgtgttcctgtaatggtaatgatccgatcttc

SEQ ID NO: 188871 - DNA, 81 bp, Homo sapiens
ttctgcagcaaatactgtgcattctgtatctggtcctgtgttcctgtaatggtaatgatccgatcttcggatccttctaaa

SEQ ID NO: 188872 - DNA, 78 bp, Homo sapiens
aaatactgtgcattctgtatctggtcctgtgttcctgtaatggtaatgatccgatcttcggatccttctaaaggctca

SEQ ID NO: 188873 - DNA, 77 bp, Homo sapiens
attctgtatctggtcctgtgttcctgtaatggtaatgatccgatcttcggatccttctaaaggctcatcaattttga

SEQ ID NO: 188874 - DNA, 78 bp, Homo sapiens
tatctggtcctgtgttcctgtaatggtaatgatccgatcttcggatccttctaaaggctcatcaattttgatcgaagc

SEQ ID NO: 188875 - DNA, 79 bp, Homo sapiens
tgttcctgtaatggtaatgatccgatcttcggatccttctaaaggctcatcaattttgatcgaagctcccgactcatga

SEQ ID NO: 188876 - DNA, 77 bp, Homo sapiens
taatggtaatgatccgatcttcggatccttctaaaggctcatcaattttgatcgaagctcccgactcatgacggatt

SEQ ID NO: 188877 - DNA, 75 bp, Homo sapiens
atccgatcttcggatccttctaaaggctcatcaattttgatcgaagctcccgactcatgacggatttgtttaatc

SEQ ID NO: 188878 - DNA, 74 bp, Homo sapiens
tccttctaaaggctcatcaattttgatcgaagctcccgactcatgacggatttgtttaatccgctgaccacctt

SEQ ID NO: 188879 - DNA, 76 bp, Homo sapiens
taaaggctcatcaattttgatcgaagctcccgactcatgacggatttgtttaatccgctgaccacctttgccaata

SEQ ID NO: 188880 - DNA, 76 bp, Homo sapiens
atcaattttgatcgaagctcccgactcatgacggatttgtttaatccgctgaccacctttgccaataatagatcca

SEQ ID NO: 188881 - DNA, 74 bp, Homo sapiens
aagctcccgactcatgacggatttgtttaatccgctgaccacctttgccaataatagatccagccaactgaaaa

SEQ ID NO: 188882 - DNA, 72 bp, Homo sapiens
actcatgacggatttgtttaatccgctgaccacctttgccaataatagatccagccaactgaaaagattttt

SEQ ID NO: 188883 - DNA, 70 bp, Homo sapiens
tttgtttaatccgctgaccacctttgccaataatagatccagccaactgaaaagattttttaaaagtatg

SEQ ID NO: 188884 - DNA, 70 bp, Homo sapiens
aatccgctgaccacctttgccaataatagatccagccaactgaaaagattttttaaaagtatgtgtttac

SEQ ID NO: 188885 - DNA, 70 bp, Homo sapiens
aggaggaataatcataaaagtgataaaatgttcctggtagtattaaagatacttacatctttgggaatag

SEQ ID NO: 188886 - DNA, 71 bp, Homo sapiens
tcataaaagtgataaaatgttcctggtagtattaaagatacttacatctttgggaatagttacttgtgtag

SEQ ID NO: 188887 - DNA, 70 bp, Homo sapiens
gataaaatgttcctggtagtattaaagatacttacatctttgggaatagttacttgtgtagtaataatag

SEQ ID NO: 188888 - DNA, 70 bp, Homo sapiens
atgttcctggtagtattaaagatacttacatctttgggaatagttacttgtgtagtaataataggtccac

SEQ ID NO: 188889 - DNA, 74 bp, Homo sapiens
attaaagatacttacatctttgggaatagttacttgtgtagtaataataggtccaccaagatcaccatatgagc

SEQ ID NO: 188890 - DNA, 74 bp, Homo sapiens
atacttacatctttgggaatagttacttgtgtagtaataataggtccaccaagatcaccatatgagccacgacc

SEQ ID NO: 188891 - DNA, 75 bp, Homo sapiens
atctttgggaatagttacttgtgtagtaataataggtccaccaagatcaccatatgagccacgaccccctgcata

SEQ ID NO: 188892 - DNA, 77 bp, Homo sapiens
ttacttgtgtagtaataataggtccaccaagatcaccatatgagccacgaccccctgcataggaataatctgattta

SEQ ID NO: 188893 - DNA, 78 bp, Homo sapiens
tgtagtaataataggtccaccaagatcaccatatgagccacgaccccctgcataggaataatctgatttaaataatga

SEQ ID NO: 188894 - DNA, 78 bp, Homo sapiens
gtccaccaagatcaccatatgagccacgaccccctgcataggaataatctgatttaaataatgagcagtaagttcatt

SEQ ID NO: 188895 - DNA, 76 bp, Homo sapiens
agatcaccatatgagccacgaccccctgcataggaataatctgatttaaataatgagcagtaagttcatttaaaaa

SEQ ID NO: 188896 - DNA, 76 bp, Homo sapiens
catatgagccacgaccccctgcataggaataatctgatttaaataatgagcagtaagttcatttaaaaagtatgaa

SEQ ID NO: 188897 - DNA, 73 bp, Homo sapiens
cccctgcataggaataatctgatttaaataatgagcagtaagttcatttaaaaagtatgaaattaatgtttga

SEQ ID NO: 188898 - DNA, 76 bp, Homo sapiens
tgcataggaataatctgatttaaataatgagcagtaagttcatttaaaaagtatgaaattaatgtttgacttcaca

SEQ ID NO: 188899 - DNA, 75 bp, Homo sapiens
gcataggaataatctgatttaaataatgagcagtaagttcatttaaaaagtatgaaattaatgtttgacttcaca

SEQ ID NO: 188900 - DNA, 73 bp, Homo sapiens
tctgatttaaataatgagcagtaagttcatttaaaaagtatgaaattaatgtttgacttcacaaaggagagaa

SEQ ID NO: 188901 - DNA, 71 bp, Homo sapiens
gatttaaataatgagcagtaagttcatttaaaaagtatgaaattaatgtttgacttcacaaaggagagaac

SEQ ID NO: 188902 - DNA, 71 bp, Homo sapiens
aataatgagcagtaagttcatttaaaaagtatgaaattaatgtttgacttcacaaaggagagaacttacca

SEQ ID NO: 188903 - DNA, 72 bp, Homo sapiens
ataatgagcagtaagttcatttaaaaagtatgaaattaatgtttgacttcacaaaggagagaacttaccata

SEQ ID NO: 188904 - DNA, 70 bp, Homo sapiens
gtaagttcatttaaaaagtatgaaattaatgtttgacttcacaaaggagagaacttaccatatccggagc

SEQ ID NO: 188905 - DNA, 69 bp, Homo sapiens
ttaaaaagtatgaaattaatgtttgacttcacaaaggagagaacttaccatatccggagccaccctaaa

SEQ ID NO: 188906 - DNA, 70 bp, Homo sapiens
agtatgaaattaatgtttgacttcacaaaggagagaacttaccatatccggagccaccctaaaaacagaa

SEQ ID NO: 188907 - DNA, 68 bp, Homo sapiens
ttaatgtttgacttcacaaaggagagaacttaccatatccggagccaccctaaaaacagaaagaaaaa

SEQ ID NO: 188908 - DNA, 80 bp, Homo sapiens
aggtaagcatcttaaattatcactgatatacacacgaacaactatgatactcaacctgtggttcataagccatctgccat

SEQ ID NO: 188909 - DNA, 82 bp, Homo sapiens
atcttaaattatcactgatatacacacgaacaactatgatactcaacctgtggttcataagccatctgccattctgatgggc

SEQ ID NO: 188910 - DNA, 86 bp, Homo sapiens
ttatcactgatatacacacgaacaactatgatactcaacctgtggttcataagccatctgccattctgatgggctccatgtatcta

SEQ ID NO: 188911 - DNA, 86 bp, Homo sapiens
tatacacacgaacaactatgatactcaacctgtggttcataagccatctgccattctgatgggctccatgtatctattgcagagtc

SEQ ID NO: 188912 - DNA, 82 bp, Homo sapiens
aacaactatgatactcaacctgtggttcataagccatctgccattctgatgggctccatgtatctattgcagagtcccaagt

SEQ ID NO: 188913 - DNA, 86 bp, Homo sapiens
atactcaacctgtggttcataagccatctgccattctgatgggctccatgtatctattgcagagtcccaagtttcatcagcactga

SEQ ID NO: 188914 - DNA, 84 bp, Homo sapiens
ttcataagccatctgccattctgatgggctccatgtatctattgcagagtcccaagtttcatcagcactgaaaccaacctgtta

SEQ ID NO: 188915 - DNA, 82 bp, Homo sapiens
atctgccattctgatgggctccatgtatctattgcagagtcccaagtttcatcagcactgaaaccaacctgttagagataaa

SEQ ID NO: 188916 - DNA, 79 bp, Homo sapiens
attctgatgggctccatgtatctattgcagagtcccaagtttcatcagcactgaaaccaacctgttagagataaaaaca

SEQ ID NO: 188917 - DNA, 78 bp, Homo sapiens
tccatgtatctattgcagagtcccaagtttcatcagcactgaaaccaacctgttagagataaaaacattaacatgaac

SEQ ID NO: 188918 - DNA, 76 bp, Homo sapiens
tattgcagagtcccaagtttcatcagcactgaaaccaacctgttagagataaaaacattaacatgaacccgcattg

SEQ ID NO: 188919 - DNA, 73 bp, Homo sapiens
tcccaagtttcatcagcactgaaaccaacctgttagagataaaaacattaacatgaacccgcattgtattttg

SEQ ID NO: 188920 - DNA, 70 bp, Homo sapiens
ttcaacaaaacgtgaactacattgtgacaaccctcacatacccaacacactggtaataaaccaaagttct

SEQ ID NO: 188921 - DNA, 71 bp, Homo sapiens
aactacattgtgacaaccctcacatacccaacacactggtaataaaccaaagttcttaccatgccgtcgta

SEQ ID NO: 188922 - DNA, 69 bp, Homo sapiens
attgtgacaaccctcacatacccaacacactggtaataaaccaaagttcttaccatgccgtcgtaacgg

SEQ ID NO: 188923 - DNA, 68 bp, Homo sapiens
accctcacatacccaacacactggtaataaaccaaagttcttaccatgccgtcgtaacggtctccagg

SEQ ID NO: 188924 - DNA, 67 bp, Homo sapiens
acccaacacactggtaataaaccaaagttcttaccatgccgtcgtaacggtctccaggtctccctct

SEQ ID NO: 188925 - DNA, 73 bp, Homo sapiens
tggtaataaaccaaagttcttaccatgccgtcgtaacggtctccaggtctccctcttctgtcataggccatga

SEQ ID NO: 188926 - DNA, 77 bp, Homo sapiens
aaagttcttaccatgccgtcgtaacggtctccaggtctccctcttctgtcataggccatgaggtctctgcaagcata

SEQ ID NO: 188927 - DNA, 78 bp, Homo sapiens
atgccgtcgtaacggtctccaggtctccctcttctgtcataggccatgaggtctctgcaagcatagtacttgttgtaa

SEQ ID NO: 188928 - DNA, 78 bp, Homo sapiens
tcgtaacggtctccaggtctccctcttctgtcataggccatgaggtctctgcaagcatagtacttgttgtaatctaaa

SEQ ID NO: 188929 - DNA, 81 bp, Homo sapiens
aggtctccctcttctgtcataggccatgaggtctctgcaagcatagtacttgttgtaatctaaacgtgcttacatgccaca

SEQ ID NO: 188930 - DNA, 85 bp, Homo sapiens
tcttctgtcataggccatgaggtctctgcaagcatagtacttgttgtaatctaaacgtgcttacatgccacacatatcaaatcaa

SEQ ID NO: 188931 - DNA, 65 bp, Homo sapiens
aacaaaaaaaacaacttacccccctctaggtggtggtggtggaggaagaggaagattccgagctc

SEQ ID NO: 188932 - DNA, 71 bp, Homo sapiens
ctctaggtggtggtggtggaggaagaggaagattccgagctctgctaccaccccggccgcctcgtccggga

SEQ ID NO: 188933 - DNA, 69 bp, Homo sapiens
ggtggtggtggaggaagaggaagattccgagctctgctaccaccccggccgcctcgtccgggaggaggg

SEQ ID NO: 188934 - DNA, 68 bp, Homo sapiens
aggaagaggaagattccgagctctgctaccaccccggccgcctcgtccgggaggagggggaggtggtc

SEQ ID NO: 188935 - DNA, 68 bp, Homo sapiens
aagattccgagctctgctaccaccccggccgcctcgtccgggaggagggggaggtggtcctcgacgag

SEQ ID NO: 188936 - DNA, 73 bp, Homo sapiens
tctgctaccaccccggccgcctcgtccgggaggagggggaggtggtcctcgacgagggctcatatcatcataa

SEQ ID NO: 188937 - DNA, 72 bp, Homo sapiens
ccccggccgcctcgtccgggaggagggggaggtggtcctcgacgagggctcatatcatcataatctcttcta

SEQ ID NO: 188938 - DNA, 77 bp, Homo sapiens
ctcgtccgggaggagggggaggtggtcctcgacgagggctcatatcatcataatctcttctagatggaggcatggga

SEQ ID NO: 188939 - DNA, 76 bp, Homo sapiens
aggagggggaggtggtcctcgacgagggctcatatcatcataatctcttctagatggaggcatgggacgcccaccc

SEQ ID NO: 188940 - DNA, 77 bp, Homo sapiens
aggtggtcctcgacgagggctcatatcatcataatctcttctagatggaggcatgggacgcccaccccgaccaggag

SEQ ID NO: 188941 - DNA, 80 bp, Homo sapiens
gacgagggctcatatcatcataatctcttctagatggaggcatgggacgcccaccccgaccaggaggcattctgtcaaaa

SEQ ID NO: 188942 - DNA, 79 bp, Homo sapiens
tcatatcatcataatctcttctagatggaggcatgggacgcccaccccgaccaggaggcattctgtcaaaaccacctct

SEQ ID NO: 188943 - DNA, 75 bp, Homo sapiens
atcataatctcttctagatggaggcatgggacgcccaccccgaccaggaggcattctgtcaaaaccacctcttcc

SEQ ID NO: 188944 - DNA, 73 bp, Homo sapiens
tagatggaggcatgggacgcccaccccgaccaggaggcattctgtcaaaaccacctcttccccgcatgggaaa

SEQ ID NO: 188945 - DNA, 71 bp, Homo sapiens
aggcatgggacgcccaccccgaccaggaggcattctgtcaaaaccacctcttccccgcatgggaaatccca

SEQ ID NO: 188946 - DNA, 69 bp, Homo sapiens
cccaccccgaccaggaggcattctgtcaaaaccacctcttccccgcatgggaaatcccactgggcgtcc

SEQ ID NO: 188947 - DNA, 73 bp, Homo sapiens
caggaggcattctgtcaaaaccacctcttccccgcatgggaaatcccactgggcgtccgcgacggtcatcaaa

SEQ ID NO: 188948 - DNA, 74 bp, Homo sapiens
tctgtcaaaaccacctcttccccgcatgggaaatcccactgggcgtccgcgacggtcatcaaacatcattgtaa

SEQ ID NO: 188949 - DNA, 70 bp, Homo sapiens
aaaaccacctcttccccgcatgggaaatcccactgggcgtccgcgacggtcatcaaacatcattgtaaaa

SEQ ID NO: 188950 - DNA, 73 bp, Homo sapiens
cccgcatgggaaatcccactgggcgtccgcgacggtcatcaaacatcattgtaaaaccaccataatcataggt

SEQ ID NO: 188951 - DNA, 73 bp, Homo sapiens
aaatcccactgggcgtccgcgacggtcatcaaacatcattgtaaaaccaccataatcataggtttcatcgtaa

SEQ ID NO: 188952 - DNA, 72 bp, Homo sapiens
actgggcgtccgcgacggtcatcaaacatcattgtaaaaccaccataatcataggtttcatcgtaaaaattg

SEQ ID NO: 188953 - DNA, 74 bp, Homo sapiens
tccgcgacggtcatcaaacatcattgtaaaaccaccataatcataggtttcatcgtaaaaattgggatcataag

SEQ ID NO: 188954 - DNA, 73 bp, Homo sapiens
aaacatcattgtaaaaccaccataatcataggtttcatcgtaaaaattgggatcataaggctgtgcacgtcct

SEQ ID NO: 188955 - DNA, 73 bp, Homo sapiens
attgtaaaaccaccataatcataggtttcatcgtaaaaattgggatcataaggctgtgcacgtcctttgatgg

SEQ ID NO: 188956 - DNA, 73 bp, Homo sapiens
accataatcataggtttcatcgtaaaaattgggatcataaggctgtgcacgtcctttgatgggagactaaaaa

SEQ ID NO: 188957 - DNA, 74 bp, Homo sapiens
ataggtttcatcgtaaaaattgggatcataaggctgtgcacgtcctttgatgggagactaaaaacagagatgga

SEQ ID NO: 188958 - DNA, 74 bp, Homo sapiens
taaaaattgggatcataaggctgtgcacgtcctttgatgggagactaaaaacagagatggaacaaacttacaga

SEQ ID NO: 188959 - DNA, 74 bp, Homo sapiens
cactttgtttcataaaatcaaatgtaaacaaaaagtgttctgaagtacctcagatataagatcaaggatgatct

SEQ ID NO: 188960 - DNA, 77 bp, Homo sapiens
tttcataaaatcaaatgtaaacaaaaagtgttctgaagtacctcagatataagatcaaggatgatctttatgcactc

SEQ ID NO: 188961 - DNA, 76 bp, Homo sapiens
aatgtaaacaaaaagtgttctgaagtacctcagatataagatcaaggatgatctttatgcactctacaaccctatc

SEQ ID NO: 188962 - DNA, 73 bp, Homo sapiens
aaaaagtgttctgaagtacctcagatataagatcaaggatgatctttatgcactctacaaccctatcgggttt

SEQ ID NO: 188963 - DNA, 74 bp, Homo sapiens
aagtacctcagatataagatcaaggatgatctttatgcactctacaaccctatcgggttttcctccaataagaa

SEQ ID NO: 188964 - DNA, 76 bp, Homo sapiens
agatataagatcaaggatgatctttatgcactctacaaccctatcgggttttcctccaataagaacaactctgtca

SEQ ID NO: 188965 - DNA, 76 bp, Homo sapiens
atcaaggatgatctttatgcactctacaaccctatcgggttttcctccaataagaacaactctgtcagtggaatga

SEQ ID NO: 188966 - DNA, 75 bp, Homo sapiens
atctttatgcactctacaaccctatcgggttttcctccaataagaacaactctgtcagtggaatgaggacagcat

SEQ ID NO: 188967 - DNA, 73 bp, Homo sapiens
tctacaaccctatcgggttttcctccaataagaacaactctgtcagtggaatgaggacagcattcctggaaaa

SEQ ID NO: 188968 - DNA, 71 bp, Homo sapiens
aaccctatcgggttttcctccaataagaacaactctgtcagtggaatgaggacagcattcctggaaaagct

SEQ ID NO: 188969 - DNA, 76 bp, Homo sapiens
tttcctccaataagaacaactctgtcagtggaatgaggacagcattcctggaaaagcttgatggtggtttgagtgt

SEQ ID NO: 188970 - DNA, 77 bp, Homo sapiens
ataagaacaactctgtcagtggaatgaggacagcattcctggaaaagcttgatggtggtttgagtgttctgtagtaa

SEQ ID NO: 188971 - DNA, 78 bp, Homo sapiens
aactctgtcagtggaatgaggacagcattcctggaaaagcttgatggtggtttgagtgttctgtagtaagatcataaa

SEQ ID NO: 188972 - DNA, 74 bp, Homo sapiens
gaatgaggacagcattcctggaaaagcttgatggtggtttgagtgttctgtagtaagatcataaaaaaaaataa

SEQ ID NO: 188973 - DNA, 67 bp, Homo sapiens
tttttttttacctctcgaagttctttgattttagcacctttgaccccaataattcctcctgctagac

SEQ ID NO: 188974 - DNA, 74 bp, Homo sapiens
ttttacctctcgaagttctttgattttagcacctttgaccccaataattcctcctgctagactctgatgaatca

SEQ ID NO: 188975 - DNA, 75 bp, Homo sapiens
aagttctttgattttagcacctttgaccccaataattcctcctgctagactctgatgaatcaacagcctcaactc

SEQ ID NO: 188976 - DNA, 78 bp, Homo sapiens
attttagcacctttgaccccaataattcctcctgctagactctgatgaatcaacagcctcaactcgcagtcaaagtca

SEQ ID NO: 188977 - DNA, 78 bp, Homo sapiens
tttgaccccaataattcctcctgctagactctgatgaatcaacagcctcaactcgcagtcaaagtcacttcctttata

SEQ ID NO: 188978 - DNA, 78 bp, Homo sapiens
aattcctcctgctagactctgatgaatcaacagcctcaactcgcagtcaaagtcacttcctttatagtgttggtactg

SEQ ID NO: 188979 - DNA, 80 bp, Homo sapiens
tgctagactctgatgaatcaacagcctcaactcgcagtcaaagtcacttcctttatagtgttggtactgtggagggagaa

SEQ ID NO: 188980 - DNA, 77 bp, Homo sapiens
tgatgaatcaacagcctcaactcgcagtcaaagtcacttcctttatagtgttggtactgtggagggagaattataaa

SEQ ID NO: 188981 - DNA, 71 bp, Homo sapiens
aacagcctcaactcgcagtcaaagtcacttcctttatagtgttggtactgtggagggagaattataaaatt

SEQ ID NO: 188982 - DNA, 79 bp, Homo sapiens
aaatataatcgatcctatgggccaggctccatacttcagtggggttcaatggcactatgacatacatttaagcattcca

SEQ ID NO: 188983 - DNA, 83 bp, Homo sapiens
atcctatgggccaggctccatacttcagtggggttcaatggcactatgacatacatttaagcattccacagcatcagattcga

SEQ ID NO: 188984 - DNA, 83 bp, Homo sapiens
ccaggctccatacttcagtggggttcaatggcactatgacatacatttaagcattccacagcatcagattcgagcgggagctg

SEQ ID NO: 188985 - DNA, 84 bp, Homo sapiens
atacttcagtggggttcaatggcactatgacatacatttaagcattccacagcatcagattcgagcgggagctggctggttgca

SEQ ID NO: 188986 - DNA, 89 bp, Homo sapiens
ttcaatggcactatgacatacatttaagcattccacagcatcagattcgagcgggagctggctggttgcagtgggtgatggcaactgca

SEQ ID NO: 188987 - DNA, 87 bp, Homo sapiens
tatgacatacatttaagcattccacagcatcagattcgagcgggagctggctggttgcagtgggtgatggcaactgcaggccctgaa

SEQ ID NO: 188988 - DNA, 84 bp, Homo sapiens
tacatttaagcattccacagcatcagattcgagcgggagctggctggttgcagtgggtgatggcaactgcaggccctgaaagta

SEQ ID NO: 188989 - DNA, 81 bp, Homo sapiens
attccacagcatcagattcgagcgggagctggctggttgcagtgggtgatggcaactgcaggccctgaaagtagaaaaata

SEQ ID NO: 188990 - DNA, 78 bp, Homo sapiens
atcagattcgagcgggagctggctggttgcagtgggtgatggcaactgcaggccctgaaagtagaaaaataagagtaa

SEQ ID NO: 188991 - DNA, 74 bp, Homo sapiens
cgggagctggctggttgcagtgggtgatggcaactgcaggccctgaaagtagaaaaataagagtaataggttaa

SEQ ID NO: 188992 - DNA, 74 bp, Homo sapiens
ctggttgcagtgggtgatggcaactgcaggccctgaaagtagaaaaataagagtaataggttaagtgtctagcg

SEQ ID NO: 188993 - DNA, 67 bp, Homo sapiens
tttaaaaaaaaatgagcctacctcttccaaggtagggatgattttcttcagaatttctccaattgtt

SEQ ID NO: 188994 - DNA, 73 bp, Homo sapiens
aaaaatgagcctacctcttccaaggtagggatgattttcttcagaatttctccaattgtttcaatatcagcac

SEQ ID NO: 188995 - DNA, 76 bp, Homo sapiens
cctacctcttccaaggtagggatgattttcttcagaatttctccaattgtttcaatatcagcactgatactcaata

SEQ ID NO: 188996 - DNA, 80 bp, Homo sapiens
ggtagggatgattttcttcagaatttctccaattgtttcaatatcagcactgatactcaatatgctgtcaaacaccacaa

SEQ ID NO: 188997 - DNA, 82 bp, Homo sapiens
tgattttcttcagaatttctccaattgtttcaatatcagcactgatactcaatatgctgtcaaacaccacaaataccagata

SEQ ID NO: 188998 - DNA, 79 bp, Homo sapiens
agaatttctccaattgtttcaatatcagcactgatactcaatatgctgtcaaacaccacaaataccagatagtacaaaa

SEQ ID NO: 188999 - DNA, 77 bp, Homo sapiens
aattgtttcaatatcagcactgatactcaatatgctgtcaaacaccacaaataccagatagtacaaaaaaggtggaa

SEQ ID NO: 189000 - DNA, 77 bp, Homo sapiens
tttcaatatcagcactgatactcaatatgctgtcaaacaccacaaataccagatagtacaaaaaaggtggaaaagaa

SEQ ID NO: 189001 - DNA, 74 bp, Homo sapiens
agcactgatactcaatatgctgtcaaacaccacaaataccagatagtacaaaaaaggtggaaaagaaaaatgag

SEQ ID NO: 189002 - DNA, 71 bp, Homo sapiens
ctcaatatgctgtcaaacaccacaaataccagatagtacaaaaaaggtggaaaagaaaaatgagttttgtg

SEQ ID NO: 189003 - DNA, 69 bp, Homo sapiens
tgtcaaacaccacaaataccagatagtacaaaaaaggtggaaaagaaaaatgagttttgtgtttgtcac

SEQ ID NO: 189004 - DNA, 70 bp, Homo sapiens
cacaaataccagatagtacaaaaaaggtggaaaagaaaaatgagttttgtgtttgtcaccaaatcataca

SEQ ID NO: 189005 - DNA, 69 bp, Homo sapiens
gtacaaaaaaggtggaaaagaaaaatgagttttgtgtttgtcaccaaatcatacaaactttcacagaga

SEQ ID NO: 189006 - DNA, 74 bp, Homo sapiens
ggtggaaaagaaaaatgagttttgtgtttgtcaccaaatcatacaaactttcacagagatgtaacacatgatta

SEQ ID NO: 189007 - DNA, 75 bp, Homo sapiens
gaaaaatgagttttgtgtttgtcaccaaatcatacaaactttcacagagatgtaacacatgattatttaatattc

SEQ ID NO: 189008 - DNA, 74 bp, Homo sapiens
gagttttgtgtttgtcaccaaatcatacaaactttcacagagatgtaacacatgattatttaatattccccatt

SEQ ID NO: 189009 - DNA, 75 bp, Homo sapiens
ttgtcaccaaatcatacaaactttcacagagatgtaacacatgattatttaatattccccatttaaagtagccta

SEQ ID NO: 189010 - DNA, 74 bp, Homo sapiens
atcatacaaactttcacagagatgtaacacatgattatttaatattccccatttaaagtagcctatttatagat

SEQ ID NO: 189011 - DNA, 74 bp, Homo sapiens
aactttcacagagatgtaacacatgattatttaatattccccatttaaagtagcctatttatagatttctcaca

SEQ ID NO: 189012 - DNA, 77 bp, Homo sapiens
actttcacagagatgtaacacatgattatttaatattccccatttaaagtagcctatttatagatttctcacatgca

SEQ ID NO: 189013 - DNA, 77 bp, Homo sapiens
cacagagatgtaacacatgattatttaatattccccatttaaagtagcctatttatagatttctcacatgcattttg

SEQ ID NO: 189014 - DNA, 75 bp, Homo sapiens
gagatgtaacacatgattatttaatattccccatttaaagtagcctatttatagatttctcacatgcattttgtt

SEQ ID NO: 189015 - DNA, 73 bp, Homo sapiens
cacatgattatttaatattccccatttaaagtagcctatttatagatttctcacatgcattttgttttatacc

SEQ ID NO: 189016 - DNA, 73 bp, Homo sapiens
catgattatttaatattccccatttaaagtagcctatttatagatttctcacatgcattttgttttataccca

SEQ ID NO: 189017 - DNA, 73 bp, Homo sapiens
ttaatattccccatttaaagtagcctatttatagatttctcacatgcattttgttttatacccaatacagaca

SEQ ID NO: 189018 - DNA, 74 bp, Homo sapiens
attccccatttaaagtagcctatttatagatttctcacatgcattttgttttatacccaatacagacatgataa

SEQ ID NO: 189019 - DNA, 75 bp, Homo sapiens
cccatttaaagtagcctatttatagatttctcacatgcattttgttttatacccaatacagacatgataacaata

SEQ ID NO: 189020 - DNA, 75 bp, Homo sapiens
ccatttaaagtagcctatttatagatttctcacatgcattttgttttatacccaatacagacatgataacaatat

SEQ ID NO: 189021 - DNA, 79 bp, Homo sapiens
gtagcctatttatagatttctcacatgcattttgttttatacccaatacagacatgataacaatattaggagacttgca

SEQ ID NO: 189022 - DNA, 81 bp, Homo sapiens
tttatagatttctcacatgcattttgttttatacccaatacagacatgataacaatattaggagacttgcagagagacaga

SEQ ID NO: 189023 - DNA, 74 bp, Homo sapiens
agaatgggcttttggaagggctcagattaagtgggcaataaactgaccagaactgaagcagagttgaatattta

SEQ ID NO: 189024 - DNA, 73 bp, Homo sapiens
cttttggaagggctcagattaagtgggcaataaactgaccagaactgaagcagagttgaatatttatgttccc

SEQ ID NO: 189025 - DNA, 76 bp, Homo sapiens
tcagattaagtgggcaataaactgaccagaactgaagcagagttgaatatttatgttccccgccaccactgagtta

SEQ ID NO: 189026 - DNA, 73 bp, Homo sapiens
ttaagtgggcaataaactgaccagaactgaagcagagttgaatatttatgttccccgccaccactgagttaag

SEQ ID NO: 189027 - DNA, 71 bp, Homo sapiens
aataaactgaccagaactgaagcagagttgaatatttatgttccccgccaccactgagttaaggataccct

SEQ ID NO: 189028 - DNA, 73 bp, Homo sapiens
actgaagcagagttgaatatttatgttccccgccaccactgagttaaggatacccttgctgttacattggtaa

SEQ ID NO: 189029 - DNA, 70 bp, Homo sapiens
agagttgaatatttatgttccccgccaccactgagttaaggatacccttgctgttacattggtaaaactg

SEQ ID NO: 189030 - DNA, 70 bp, Homo sapiens
atatttatgttccccgccaccactgagttaaggatacccttgctgttacattggtaaaactggcacacct

SEQ ID NO: 189031 - DNA, 72 bp, Homo sapiens
cgccaccactgagttaaggatacccttgctgttacattggtaaaactggcacaccttctcttaggcaaagtg

SEQ ID NO: 189032 - DNA, 71 bp, Homo sapiens
aaggatacccttgctgttacattggtaaaactggcacaccttctcttaggcaaagtgggggaatatgcaag

SEQ ID NO: 189033 - DNA, 74 bp, Homo sapiens
gttacattggtaaaactggcacaccttctcttaggcaaagtgggggaatatgcaagtggtgaacattgtatctg

SEQ ID NO: 189034 - DNA, 74 bp, Homo sapiens
acaccttctcttaggcaaagtgggggaatatgcaagtggtgaacattgtatctggagtaaggttatgaatacca

SEQ ID NO: 189035 - DNA, 74 bp, Homo sapiens
aaagtgggggaatatgcaagtggtgaacattgtatctggagtaaggttatgaataccagttagaaattagatca

SEQ ID NO: 189036 - DNA, 79 bp, Homo sapiens
atatgcaagtggtgaacattgtatctggagtaaggttatgaataccagttagaaattagatcactaatgggctctgcaa

SEQ ID NO: 189037 - DNA, 76 bp, Homo sapiens
tgaacattgtatctggagtaaggttatgaataccagttagaaattagatcactaatgggctctgcaagaaaacaaa

SEQ ID NO: 189038 - DNA, 75 bp, Homo sapiens
agtaaggttatgaataccagttagaaattagatcactaatgggctctgcaagaaaacaaatacaaatgcaagaca

SEQ ID NO: 189039 - DNA, 75 bp, Homo sapiens
gaataccagttagaaattagatcactaatgggctctgcaagaaaacaaatacaaatgcaagacaaaacaaagaca

SEQ ID NO: 189040 - DNA, 75 bp, Homo sapiens
aattagatcactaatgggctctgcaagaaaacaaatacaaatgcaagacaaaacaaagacaacacaaatgagaag

SEQ ID NO: 189041 - DNA, 74 bp, Homo sapiens
actaatgggctctgcaagaaaacaaatacaaatgcaagacaaaacaaagacaacacaaatgagaagtgaaggaa

SEQ ID NO: 189042 - DNA, 75 bp, Homo sapiens
tctgcaagaaaacaaatacaaatgcaagacaaaacaaagacaacacaaatgagaagtgaaggaaagtgaaccaga

SEQ ID NO: 189043 - DNA, 73 bp, Homo sapiens
acaaatacaaatgcaagacaaaacaaagacaacacaaatgagaagtgaaggaaagtgaaccagagttagcatt

SEQ ID NO: 189044 - DNA, 74 bp, Homo sapiens
caaaacaaagacaacacaaatgagaagtgaaggaaagtgaaccagagttagcatttcatcagaaaaaattatga

SEQ ID NO: 189045 - DNA, 75 bp, Homo sapiens
aacacaaatgagaagtgaaggaaagtgaaccagagttagcatttcatcagaaaaaattatgaacaggcaatgttg

SEQ ID NO: 189046 - DNA, 74 bp, Homo sapiens
aaatgagaagtgaaggaaagtgaaccagagttagcatttcatcagaaaaaattatgaacaggcaatgttgggaa

SEQ ID NO: 189047 - DNA, 73 bp, Homo sapiens
aaggaaagtgaaccagagttagcatttcatcagaaaaaattatgaacaggcaatgttgggaagcaaggtgggc

SEQ ID NO: 189048 - DNA, 75 bp, Homo sapiens
aaccagagttagcatttcatcagaaaaaattatgaacaggcaatgttgggaagcaaggtgggccacaaagacaga

SEQ ID NO: 189049 - DNA, 75 bp, Homo sapiens
atttcatcagaaaaaattatgaacaggcaatgttgggaagcaaggtgggccacaaagacagagcgagagactatt

SEQ ID NO: 189050 - DNA, 72 bp, Homo sapiens
aaaaaattatgaacaggcaatgttgggaagcaaggtgggccacaaagacagagcgagagactattttggtaa

SEQ ID NO: 189051 - DNA, 75 bp, Homo sapiens
tatgaacaggcaatgttgggaagcaaggtgggccacaaagacagagcgagagactattttggtaacaatttgatt

SEQ ID NO: 189052 - DNA, 73 bp, Homo sapiens
aatgttgggaagcaaggtgggccacaaagacagagcgagagactattttggtaacaatttgatttacaatgcg

SEQ ID NO: 189053 - DNA, 80 bp, Homo sapiens
cacaaagacagagcgagagactattttggtaacaatttgatttacaatgcggcaaatatgcaacacttgaagctgtgctc

SEQ ID NO: 189054 - DNA, 77 bp, Homo sapiens
tttgatttacaatgcggcaaatatgcaacacttgaagctgtgctccttccatcgaaataaaattagtggatcgtttg

SEQ ID NO: 189055 - DNA, 72 bp, Homo sapiens
caacacttgaagctgtgctccttccatcgaaataaaattagtggatcgtttgggtgggcaactcacggtaaa

SEQ ID NO: 189056 - DNA, 72 bp, Homo sapiens
ttgaagctgtgctccttccatcgaaataaaattagtggatcgtttgggtgggcaactcacggtaaaagttca

SEQ ID NO: 189057 - DNA, 68 bp, Homo sapiens
cttccatcgaaataaaattagtggatcgtttgggtgggcaactcacggtaaaagttcagtgacaaaaa

SEQ ID NO: 189058 - DNA, 67 bp, Homo sapiens
aataaaattagtggatcgtttgggtgggcaactcacggtaaaagttcagtgacaaaaagacttaatg

SEQ ID NO: 189059 - DNA, 67 bp, Homo sapiens
aattagtggatcgtttgggtgggcaactcacggtaaaagttcagtgacaaaaagacttaatggggaa

SEQ ID NO: 189060 - DNA, 67 bp, Homo sapiens
tttgggtgggcaactcacggtaaaagttcagtgacaaaaagacttaatggggaaaataagacagaaa

SEQ ID NO: 189061 - DNA, 67 bp, Homo sapiens
gggcaactcacggtaaaagttcagtgacaaaaagacttaatggggaaaataagacagaaacttgaaa

SEQ ID NO: 189062 - DNA, 66 bp, Homo sapiens
aaagttcagtgacaaaaagacttaatggggaaaataagacagaaacttgaaaaacaatacaccgtc

SEQ ID NO: 189063 - DNA, 66 bp, Homo sapiens
gggaaaataagacagaaacttgaaaaacaatacaccgtctaaaggggatactatttaattatataa

SEQ ID NO: 189064 - DNA, 67 bp, Homo sapiens
gacagaaacttgaaaaacaatacaccgtctaaaggggatactatttaattatataaaaggcaggtaa

SEQ ID NO: 189065 - DNA, 66 bp, Homo sapiens
cttgaaaaacaatacaccgtctaaaggggatactatttaattatataaaaggcaggtaataaaata

SEQ ID NO: 189066 - DNA, 73 bp, Homo sapiens
tttaattatataaaaggcaggtaataaaatacatttctctctttctaatcaggcagtgaggcataaactgttg

SEQ ID NO: 189067 - DNA, 75 bp, Homo sapiens
tatataaaaggcaggtaataaaatacatttctctctttctaatcaggcagtgaggcataaactgttgggacatac

SEQ ID NO: 189068 - DNA, 74 bp, Homo sapiens
ggcaggtaataaaatacatttctctctttctaatcaggcagtgaggcataaactgttgggacataccgctcggg

SEQ ID NO: 189069 - DNA, 77 bp, Homo sapiens
aatacatttctctctttctaatcaggcagtgaggcataaactgttgggacataccgctcggggccactgctgtctgg

SEQ ID NO: 189070 - DNA, 79 bp, Homo sapiens
tctctctttctaatcaggcagtgaggcataaactgttgggacataccgctcggggccactgctgtctgggactgaaaca

SEQ ID NO: 189071 - DNA, 80 bp, Homo sapiens
taatcaggcagtgaggcataaactgttgggacataccgctcggggccactgctgtctgggactgaaacactggcattgta

SEQ ID NO: 189072 - DNA, 80 bp, Homo sapiens
gcataaactgttgggacataccgctcggggccactgctgtctgggactgaaacactggcattgtactgcattggtcattg

SEQ ID NO: 189073 - DNA, 78 bp, Homo sapiens
actgttgggacataccgctcggggccactgctgtctgggactgaaacactggcattgtactgcattggtcattggcgt

SEQ ID NO: 189074 - DNA, 79 bp, Homo sapiens
acataccgctcggggccactgctgtctgggactgaaacactggcattgtactgcattggtcattggcgttcgtggatgt

SEQ ID NO: 189075 - DNA, 83 bp, Homo sapiens
ccactgctgtctgggactgaaacactggcattgtactgcattggtcattggcgttcgtggatgttggcattgggcatgggcat

SEQ ID NO: 189076 - DNA, 84 bp, Homo sapiens
tctgggactgaaacactggcattgtactgcattggtcattggcgttcgtggatgttggcattgggcatgggcattcaatcagaa

SEQ ID NO: 189077 - DNA, 82 bp, Homo sapiens
aaacactggcattgtactgcattggtcattggcgttcgtggatgttggcattgggcatgggcattcaatcagaagttgtcaa

SEQ ID NO: 189078 - DNA, 81 bp, Homo sapiens
attgtactgcattggtcattggcgttcgtggatgttggcattgggcatgggcattcaatcagaagttgtcaagtatggtac

SEQ ID NO: 189079 - DNA, 76 bp, Homo sapiens
attggtcattggcgttcgtggatgttggcattgggcatgggcattcaatcagaagttgtcaagtatggtacccgtt

SEQ ID NO: 189080 - DNA, 76 bp, Homo sapiens
attggcgttcgtggatgttggcattgggcatgggcattcaatcagaagttgtcaagtatggtacccgtttggcaac

SEQ ID NO: 189081 - DNA, 76 bp, Homo sapiens
atgttggcattgggcatgggcattcaatcagaagttgtcaagtatggtacccgtttggcaacgagcacatttttgg

SEQ ID NO: 189082 - DNA, 77 bp, Homo sapiens
ttgggcatgggcattcaatcagaagttgtcaagtatggtacccgtttggcaacgagcacatttttgggcatagccaa

SEQ ID NO: 189083 - DNA, 73 bp, Homo sapiens
cattcaatcagaagttgtcaagtatggtacccgtttggcaacgagcacatttttgggcatagccaaccagggt

SEQ ID NO: 189084 - DNA, 71 bp, Homo sapiens
aagtatggtacccgtttggcaacgagcacatttttgggcatagccaaccagggttttcacatgggcgttca

SEQ ID NO: 189085 - DNA, 71 bp, Homo sapiens
tacccgtttggcaacgagcacatttttgggcatagccaaccagggttttcacatgggcgttcaggggcgga

SEQ ID NO: 189086 - DNA, 72 bp, Homo sapiens
aacgagcacatttttgggcatagccaaccagggttttcacatgggcgttcaggggcggatgggccaacgtca

SEQ ID NO: 189087 - DNA, 72 bp, Homo sapiens
atttttgggcatagccaaccagggttttcacatgggcgttcaggggcggatgggccaacgtcatggtgggca

SEQ ID NO: 189088 - DNA, 73 bp, Homo sapiens
ggcatagccaaccagggttttcacatgggcgttcaggggcggatgggccaacgtcatggtgggcaacgcaggg

SEQ ID NO: 189089 - DNA, 71 bp, Homo sapiens
agggttttcacatgggcgttcaggggcggatgggccaacgtcatggtgggcaacgcaggggtaagtcgatc

SEQ ID NO: 189090 - DNA, 74 bp, Homo sapiens
atgggcgttcaggggcggatgggccaacgtcatggtgggcaacgcaggggtaagtcgatccagtacatgggcaa

SEQ ID NO: 189091 - DNA, 75 bp, Homo sapiens
atgggccaacgtcatggtgggcaacgcaggggtaagtcgatccagtacatgggcaacggagatatatggccaaaa

SEQ ID NO: 189092 - DNA, 73 bp, Homo sapiens
acgtcatggtgggcaacgcaggggtaagtcgatccagtacatgggcaacggagatatatggccaaaaaaacaa

SEQ ID NO: 189093 - DNA, 70 bp, Homo sapiens
aacgcaggggtaagtcgatccagtacatgggcaacggagatatatggccaaaaaaacaaggagagggaaa

SEQ ID NO: 189094 - DNA, 68 bp, Homo sapiens
ggggtaagtcgatccagtacatgggcaacggagatatatggccaaaaaaacaaggagagggaaaaggg

SEQ ID NO: 189095 - DNA, 65 bp, Homo sapiens
gcaacggagatatatggccaaaaaaacaaggagagggaaaagggggaaaagcaataaattttaat

SEQ ID NO: 189096 - DNA, 65 bp, Homo sapiens
gagatatatggccaaaaaaacaaggagagggaaaagggggaaaagcaataaattttaatttaata

SEQ ID NO: 189097 - DNA, 63 bp, Homo sapiens
aaaaacaaggagagggaaaagggggaaaagcaataaattttaatttaatacaaactatactca

SEQ ID NO: 189098 - DNA, 72 bp, Homo sapiens
agcaataaattttaatttaatacaaactatactcatactctcaatgaaacaagcttaagttgttctgaagac

SEQ ID NO: 189099 - DNA, 75 bp, Homo sapiens
taatttaatacaaactatactcatactctcaatgaaacaagcttaagttgttctgaagactaacacaataatgga

SEQ ID NO: 189100 - DNA, 71 bp, Homo sapiens
atctttaaatttctatagacatataaactgaagctgctcgtgtagtagtttaaactcttaatacttacgtc

SEQ ID NO: 189101 - DNA, 73 bp, Homo sapiens
atttctatagacatataaactgaagctgctcgtgtagtagtttaaactcttaatacttacgtctgtacggaga

SEQ ID NO: 189102 - DNA, 71 bp, Homo sapiens
atataaactgaagctgctcgtgtagtagtttaaactcttaatacttacgtctgtacggagagccttaatat

SEQ ID NO: 189103 - DNA, 72 bp, Homo sapiens
aactgaagctgctcgtgtagtagtttaaactcttaatacttacgtctgtacggagagccttaatattcttgc

SEQ ID NO: 189104 - DNA, 68 bp, Homo sapiens
ctcgtgtagtagtttaaactcttaatacttacgtctgtacggagagccttaatattcttgcctccttt

SEQ ID NO: 189105 - DNA, 71 bp, Homo sapiens
tagtttaaactcttaatacttacgtctgtacggagagccttaatattcttgcctccttttccaatcactgc

SEQ ID NO: 189106 - DNA, 75 bp, Homo sapiens
tcttaatacttacgtctgtacggagagccttaatattcttgcctccttttccaatcactgccccagcattctgga

SEQ ID NO: 189107 - DNA, 76 bp, Homo sapiens
tacgtctgtacggagagccttaatattcttgcctccttttccaatcactgccccagcattctggagaagatacaaa

SEQ ID NO: 189108 - DNA, 74 bp, Homo sapiens
cggagagccttaatattcttgcctccttttccaatcactgccccagcattctggagaagatacaaagacaaaaa

SEQ ID NO: 189109 - DNA, 72 bp, Homo sapiens
ttcttgcctccttttccaatcactgccccagcattctggagaagatacaaagacaaaaaattattttgcctt

SEQ ID NO: 189110 - DNA, 70 bp, Homo sapiens
cttttccaatcactgccccagcattctggagaagatacaaagacaaaaaattattttgcctttccctaaa

SEQ ID NO: 189111 - DNA, 70 bp, Homo sapiens
ccaatcactgccccagcattctggagaagatacaaagacaaaaaattattttgcctttccctaaaattaa

SEQ ID NO: 189112 - DNA, 75 bp, Homo sapiens
tacctgagtatgaaccaccttcaaattttcaagaataaaatttataccttgctctgaagcagaatgcgtaattca

SEQ ID NO: 189113 - DNA, 74 bp, Homo sapiens
gagtatgaaccaccttcaaattttcaagaataaaatttataccttgctctgaagcagaatgcgtaattcaacca

SEQ ID NO: 189114 - DNA, 76 bp, Homo sapiens
caccttcaaattttcaagaataaaatttataccttgctctgaagcagaatgcgtaattcaaccatctcatcagtgt

SEQ ID NO: 189115 - DNA, 77 bp, Homo sapiens
caagaataaaatttataccttgctctgaagcagaatgcgtaattcaaccatctcatcagtgtttctagatcttttaa

SEQ ID NO: 189116 - DNA, 77 bp, Homo sapiens
aaaatttataccttgctctgaagcagaatgcgtaattcaaccatctcatcagtgtttctagatcttttaaatgcttg

SEQ ID NO: 189117 - DNA, 80 bp, Homo sapiens
aagcagaatgcgtaattcaaccatctcatcagtgtttctagatcttttaaatgcttgttcctcttccatatcttctgcag

SEQ ID NO: 189118 - DNA, 76 bp, Homo sapiens
attcaaccatctcatcagtgtttctagatcttttaaatgcttgttcctcttccatatcttctgcagggcgtttacc

SEQ ID NO: 189119 - DNA, 74 bp, Homo sapiens
tctcatcagtgtttctagatcttttaaatgcttgttcctcttccatatcttctgcagggcgtttacctaaaaat

SEQ ID NO: 189120 - DNA, 70 bp, Homo sapiens
gtttctagatcttttaaatgcttgttcctcttccatatcttctgcagggcgtttacctaaaaattaacag

SEQ ID NO: 189121 - DNA, 71 bp, Homo sapiens
ttttaaatgcttgttcctcttccatatcttctgcagggcgtttacctaaaaattaacagttcacatttcaa

SEQ ID NO: 189122 - DNA, 66 bp, Homo sapiens
ggcaatttattaacaggataaaaaaatactgttaaaactaaaatttcttctcaccaaattcaccat

SEQ ID NO: 189123 - DNA, 67 bp, Homo sapiens
taacaggataaaaaaatactgttaaaactaaaatttcttctcaccaaattcaccattggtttcagtg

SEQ ID NO: 189124 - DNA, 65 bp, Homo sapiens
aaaaaatactgttaaaactaaaatttcttctcaccaaattcaccattggtttcagtgttagggaa

SEQ ID NO: 189125 - DNA, 66 bp, Homo sapiens
atactgttaaaactaaaatttcttctcaccaaattcaccattggtttcagtgttagggaaggtttc

SEQ ID NO: 189126 - DNA, 68 bp, Homo sapiens
aaaatttcttctcaccaaattcaccattggtttcagtgttagggaaggtttcttctggctgttcagtt

SEQ ID NO: 189127 - DNA, 71 bp, Homo sapiens
tcaccaaattcaccattggtttcagtgttagggaaggtttcttctggctgttcagtttccatattctttta

SEQ ID NO: 189128 - DNA, 69 bp, Homo sapiens
ttcaccattggtttcagtgttagggaaggtttcttctggctgttcagtttccatattcttttattaaac

SEQ ID NO: 189129 - DNA, 69 bp, Homo sapiens
tttcagtgttagggaaggtttcttctggctgttcagtttccatattcttttattaaacgggcacaccaa

SEQ ID NO: 189130 - DNA, 70 bp, Homo sapiens
tagggaaggtttcttctggctgttcagtttccatattcttttattaaacgggcacaccaatctgtggaaa

SEQ ID NO: 189131 - DNA, 69 bp, Homo sapiens
ggtttcttctggctgttcagtttccatattcttttattaaacgggcacaccaatctgtggaaaaataaa

SEQ ID NO: 189132 - DNA, 72 bp, Homo sapiens
ttcagtttccatattcttttattaaacgggcacaccaatctgtggaaaaataaagcagctagtacatttggc

SEQ ID NO: 189133 - DNA, 72 bp, Homo sapiens
catattcttttattaaacgggcacaccaatctgtggaaaaataaagcagctagtacatttggcttattggaa

SEQ ID NO: 189134 - DNA, 75 bp, Homo sapiens
cagaactgaagcgttctgggtcggaccaacaactgacaccccagtgctgcagtagcctataagaaccaacacaaa

SEQ ID NO: 189135 - DNA, 73 bp, Homo sapiens
aagcgttctgggtcggaccaacaactgacaccccagtgctgcagtagcctataagaaccaacacaaatcagtt

SEQ ID NO: 189136 - DNA, 73 bp, Homo sapiens
ctgggtcggaccaacaactgacaccccagtgctgcagtagcctataagaaccaacacaaatcagttttgcttt

SEQ ID NO: 189137 - DNA, 72 bp, Homo sapiens
tgggctccgaccctcacctccacgagccgctcccccaacccggctcctcaccgcgcgagactgccgtccctc

SEQ ID NO: 189138 - DNA, 73 bp, Homo sapiens
ccctcacctccacgagccgctcccccaacccggctcctcaccgcgcgagactgccgtccctccgctgccgcgc

SEQ ID NO: 189139 - DNA, 73 bp, Homo sapiens
agccgctcccccaacccggctcctcaccgcgcgagactgccgtccctccgctgccgcgccgcctcagccggtc

SEQ ID NO: 189140 - DNA, 76 bp, Homo sapiens
caacccggctcctcaccgcgcgagactgccgtccctccgctgccgcgccgcctcagccggtcggagctagacagaa

SEQ ID NO: 189141 - DNA, 78 bp, Homo sapiens
ctcctcaccgcgcgagactgccgtccctccgctgccgcgccgcctcagccggtcggagctagacagaaaacgagcgca

SEQ ID NO: 189142 - DNA, 77 bp, Homo sapiens
ccgcgcgagactgccgtccctccgctgccgcgccgcctcagccggtcggagctagacagaaaacgagcgcaggctcc

SEQ ID NO: 189143 - DNA, 74 bp, Homo sapiens
ctgccgtccctccgctgccgcgccgcctcagccggtcggagctagacagaaaacgagcgcaggctcccctcccc

SEQ ID NO: 189144 - DNA, 74 bp, Homo sapiens
tgccgcgccgcctcagccggtcggagctagacagaaaacgagcgcaggctcccctcccccgccttctcgcgtcc

SEQ ID NO: 189145 - DNA, 71 bp, Homo sapiens
ccgcctcagccggtcggagctagacagaaaacgagcgcaggctcccctcccccgccttctcgcgtcctccc

SEQ ID NO: 189146 - DNA, 69 bp, Homo sapiens
ccggtcggagctagacagaaaacgagcgcaggctcccctcccccgccttctcgcgtcctccccgccgtc

SEQ ID NO: 189147 - DNA, 70 bp, Homo sapiens
ctagacagaaaacgagcgcaggctcccctcccccgccttctcgcgtcctccccgccgtcgcgccctattg

SEQ ID NO: 189148 - DNA, 70 bp, Homo sapiens
aaacgagcgcaggctcccctcccccgccttctcgcgtcctccccgccgtcgcgccctattggctgccagg

SEQ ID NO: 189149 - DNA, 73 bp, Homo sapiens
cccctcccccgccttctcgcgtcctccccgccgtcgcgccctattggctgccagggcttcagcgatggtgcga

SEQ ID NO: 189150 - DNA, 69 bp, Homo sapiens
aacccttacccgaatcagcaatacccaagctccaataactccaattacctataggccgcgaacaagtgg

SEQ ID NO: 189151 - DNA, 73 bp, Homo sapiens
acccgaatcagcaatacccaagctccaataactccaattacctataggccgcgaacaagtgggacacaggcaa

SEQ ID NO: 189152 - DNA, 71 bp, Homo sapiens
aatacccaagctccaataactccaattacctataggccgcgaacaagtgggacacaggcaagacgtcgagg

SEQ ID NO: 189153 - DNA, 75 bp, Homo sapiens
caataactccaattacctataggccgcgaacaagtgggacacaggcaagacgtcgaggtcggtgcagcagagaaa

SEQ ID NO: 189154 - DNA, 75 bp, Homo sapiens
actccaattacctataggccgcgaacaagtgggacacaggcaagacgtcgaggtcggtgcagcagagaaacagag

SEQ ID NO: 189155 - DNA, 80 bp, Homo sapiens
ctataggccgcgaacaagtgggacacaggcaagacgtcgaggtcggtgcagcagagaaacagaggataatggcgtctgca

SEQ ID NO: 189156 - DNA, 81 bp, Homo sapiens
aacaagtgggacacaggcaagacgtcgaggtcggtgcagcagagaaacagaggataatggcgtctgcagtgctgtcgcctg

SEQ ID NO: 189157 - DNA, 82 bp, Homo sapiens
acacaggcaagacgtcgaggtcggtgcagcagagaaacagaggataatggcgtctgcagtgctgtcgcctggagcgccctcc

SEQ ID NO: 189158 - DNA, 79 bp, Homo sapiens
aagacgtcgaggtcggtgcagcagagaaacagaggataatggcgtctgcagtgctgtcgcctggagcgccctcctcctt

SEQ ID NO: 189159 - DNA, 84 bp, Homo sapiens
tcggtgcagcagagaaacagaggataatggcgtctgcagtgctgtcgcctggagcgccctcctcctttctcgttcgcgcactca

SEQ ID NO: 189160 - DNA, 80 bp, Homo sapiens
agaaacagaggataatggcgtctgcagtgctgtcgcctggagcgccctcctcctttctcgttcgcgcactcactagctgg

SEQ ID NO: 189161 - DNA, 79 bp, Homo sapiens
agaggataatggcgtctgcagtgctgtcgcctggagcgccctcctcctttctcgttcgcgcactcactagctgggggga

SEQ ID NO: 189162 - DNA, 77 bp, Homo sapiens
tctgcagtgctgtcgcctggagcgccctcctcctttctcgttcgcgcactcactagctggggggaggggcggctagg

SEQ ID NO: 189163 - DNA, 73 bp, Homo sapiens
agtgctgtcgcctggagcgccctcctcctttctcgttcgcgcactcactagctggggggaggggcggctaggg

SEQ ID NO: 189164 - DNA, 70 bp, Homo sapiens
agcgccctcctcctttctcgttcgcgcactcactagctggggggaggggcggctagggggcgaacctctc

SEQ ID NO: 189165 - DNA, 73 bp, Homo sapiens
tcctttctcgttcgcgcactcactagctggggggaggggcggctagggggcgaacctctcgcgagatctaaca

SEQ ID NO: 189166 - DNA, 73 bp, Homo sapiens
ttcgcgcactcactagctggggggaggggcggctagggggcgaacctctcgcgagatctaacaactgcctagt

SEQ ID NO: 189167 - DNA, 72 bp, Homo sapiens
cgcccccctccccaccctgaaagaggcgcaccctgacggggcagacacagcgctctcgacacggagcaccct

SEQ ID NO: 189168 - DNA, 75 bp, Homo sapiens
cccaccctgaaagaggcgcaccctgacggggcagacacagcgctctcgacacggagcacccttctagcttcttcg

SEQ ID NO: 189169 - DNA, 78 bp, Homo sapiens
ctgaaagaggcgcaccctgacggggcagacacagcgctctcgacacggagcacccttctagcttcttcgtctccagga

SEQ ID NO: 189170 - DNA, 78 bp, Homo sapiens
accctgacggggcagacacagcgctctcgacacggagcacccttctagcttcttcgtctccaggactgacgctcaggc

SEQ ID NO: 189171 - DNA, 82 bp, Homo sapiens
gcagacacagcgctctcgacacggagcacccttctagcttcttcgtctccaggactgacgctcaggctcctctctcgcctta

SEQ ID NO: 189172 - DNA, 78 bp, Homo sapiens
cgctctcgacacggagcacccttctagcttcttcgtctccaggactgacgctcaggctcctctctcgccttagcccaa

SEQ ID NO: 189173 - DNA, 75 bp, Homo sapiens
acggagcacccttctagcttcttcgtctccaggactgacgctcaggctcctctctcgccttagcccaacttgctt

SEQ ID NO: 189174 - DNA, 74 bp, Homo sapiens
acccttctagcttcttcgtctccaggactgacgctcaggctcctctctcgccttagcccaacttgctttcccgc

SEQ ID NO: 189175 - DNA, 75 bp, Homo sapiens
ttcttcgtctccaggactgacgctcaggctcctctctcgccttagcccaacttgctttcccgcctcgcaaactcc

SEQ ID NO: 189176 - DNA, 74 bp, Homo sapiens
tctccaggactgacgctcaggctcctctctcgccttagcccaacttgctttcccgcctcgcaaactccggtttc

SEQ ID NO: 189177 - DNA, 71 bp, Homo sapiens
acgctcaggctcctctctcgccttagcccaacttgctttcccgcctcgcaaactccggtttccctccactc

SEQ ID NO: 189178 - DNA, 68 bp, Homo sapiens
tctctcgccttagcccaacttgctttcccgcctcgcaaactccggtttccctccactcccaactcttt

SEQ ID NO: 189179 - DNA, 68 bp, Homo sapiens
cttagcccaacttgctttcccgcctcgcaaactccggtttccctccactcccaactcttttcactaca

SEQ ID NO: 189180 - DNA, 66 bp, Homo sapiens
aacttgctttcccgcctcgcaaactccggtttccctccactcccaactcttttcactacacgtttc

SEQ ID NO: 189181 - DNA, 67 bp, Homo sapiens
tcccgcctcgcaaactccggtttccctccactcccaactcttttcactacacgtttcccctcctcta

SEQ ID NO: 189182 - DNA, 66 bp, Homo sapiens
aaactccggtttccctccactcccaactcttttcactacacgtttcccctcctctatctcccacgc

SEQ ID NO: 189183 - DNA, 68 bp, Homo sapiens
ctccactcccaactcttttcactacacgtttcccctcctctatctcccacgccacgaaccccgatccc

SEQ ID NO: 189184 - DNA, 68 bp, Homo sapiens
aactcttttcactacacgtttcccctcctctatctcccacgccacgaaccccgatccccagactcctc

SEQ ID NO: 189185 - DNA, 69 bp, Homo sapiens
tttcccctcctctatctcccacgccacgaaccccgatccccagactcctctctcccgccctcctccttc

SEQ ID NO: 189186 - DNA, 72 bp, Homo sapiens
tcctctatctcccacgccacgaaccccgatccccagactcctctctcccgccctcctccttcctctctcctc

SEQ ID NO: 189187 - DNA, 71 bp, Homo sapiens
gccacgaaccccgatccccagactcctctctcccgccctcctccttcctctctcctcccttcaactcttca

SEQ ID NO: 189188 - DNA, 72 bp, Homo sapiens
cccgatccccagactcctctctcccgccctcctccttcctctctcctcccttcaactcttcatccgcttcca

SEQ ID NO: 189189 - DNA, 75 bp, Homo sapiens
agactcctctctcccgccctcctccttcctctctcctcccttcaactcttcatccgcttccacctcagactctgc

SEQ ID NO: 189190 - DNA, 75 bp, Homo sapiens
tcccgccctcctccttcctctctcctcccttcaactcttcatccgcttccacctcagactctgcgcgcacccaat

SEQ ID NO: 189191 - DNA, 77 bp, Homo sapiens
ctccttcctctctcctcccttcaactcttcatccgcttccacctcagactctgcgcgcacccaattcagtcgcccgc

SEQ ID NO: 189192 - DNA, 79 bp, Homo sapiens
tcttcatccgcttccacctcagactctgcgcgcacccaattcagtcgcccgctcccgttcggctcctcgaagccatggc

SEQ ID NO: 189193 - DNA, 74 bp, Homo sapiens
acctcagactctgcgcgcacccaattcagtcgcccgctcccgttcggctcctcgaagccatggcgggacctggg

SEQ ID NO: 189194 - DNA, 74 bp, Homo sapiens
agactctgcgcgcacccaattcagtcgcccgctcccgttcggctcctcgaagccatggcgggacctgggggctg

SEQ ID NO: 189195 - DNA, 70 bp, Homo sapiens
acccaattcagtcgcccgctcccgttcggctcctcgaagccatggcgggacctgggggctggagggacag

SEQ ID NO: 189196 - DNA, 72 bp, Homo sapiens
tcagtcgcccgctcccgttcggctcctcgaagccatggcgggacctgggggctggagggacagggaggtcac

SEQ ID NO: 189197 - DNA, 72 bp, Homo sapiens
tcccgttcggctcctcgaagccatggcgggacctgggggctggagggacagggaggtcacggatctgggcca

SEQ ID NO: 189198 - DNA, 73 bp, Homo sapiens
ctcgaagccatggcgggacctgggggctggagggacagggaggtcacggatctgggccacctgccggtgagta

SEQ ID NO: 189199 - DNA, 73 bp, Homo sapiens
agccatggcgggacctgggggctggagggacagggaggtcacggatctgggccacctgccggtgagtagagga

SEQ ID NO: 189200 - DNA, 71 bp, Homo sapiens
acctgggggctggagggacagggaggtcacggatctgggccacctgccggtgagtagaggacgcccgtcgc

SEQ ID NO: 189201 - DNA, 70 bp, Homo sapiens
agggacagggaggtcacggatctgggccacctgccggtgagtagaggacgcccgtcgccccccgaaatgc

SEQ ID NO: 189202 - DNA, 73 bp, Homo sapiens
tattttacttttttgcaggatccaactggaatattctcactagataaaaccattggccttggtacttatggca

SEQ ID NO: 189203 - DNA, 75 bp, Homo sapiens
tttttgcaggatccaactggaatattctcactagataaaaccattggccttggtacttatggcagaatctatttg

SEQ ID NO: 189204 - DNA, 74 bp, Homo sapiens
atccaactggaatattctcactagataaaaccattggccttggtacttatggcagaatctatttggtaagttga

SEQ ID NO: 189205 - DNA, 74 bp, Homo sapiens
tggaatattctcactagataaaaccattggccttggtacttatggcagaatctatttggtaagttgacttacat

SEQ ID NO: 189206 - DNA, 72 bp, Homo sapiens
ctcactagataaaaccattggccttggtacttatggcagaatctatttggtaagttgacttacattatttat

SEQ ID NO: 189207 - DNA, 72 bp, Homo sapiens
aaaaccattggccttggtacttatggcagaatctatttggtaagttgacttacattatttattcattcttca

SEQ ID NO: 189208 - DNA, 75 bp, Homo sapiens
gccttggtacttatggcagaatctatttggtaagttgacttacattatttattcattcttcattttctaatgaca

SEQ ID NO: 189209 - DNA, 79 bp, Homo sapiens
tactttaattgcttcttgatagctggattacctagccagcatttgatatttatcactatcctgtatttcagggacttca

SEQ ID NO: 189210 - DNA, 82 bp, Homo sapiens
ttgcttcttgatagctggattacctagccagcatttgatatttatcactatcctgtatttcagggacttcatgagaagactg

SEQ ID NO: 189211 - DNA, 81 bp, Homo sapiens
atagctggattacctagccagcatttgatatttatcactatcctgtatttcagggacttcatgagaagactggtgcattta

SEQ ID NO: 189212 - DNA, 82 bp, Homo sapiens
tagccagcatttgatatttatcactatcctgtatttcagggacttcatgagaagactggtgcatttacagctgttaaagtga

SEQ ID NO: 189213 - DNA, 79 bp, Homo sapiens
atttgatatttatcactatcctgtatttcagggacttcatgagaagactggtgcatttacagctgttaaagtgatgaac

SEQ ID NO: 189214 - DNA, 79 bp, Homo sapiens
tttatcactatcctgtatttcagggacttcatgagaagactggtgcatttacagctgttaaagtgatgaacgctcgtaa

SEQ ID NO: 189215 - DNA, 77 bp, Homo sapiens
tatttcagggacttcatgagaagactggtgcatttacagctgttaaagtgatgaacgctcgtaaggtaatattataa

SEQ ID NO: 189216 - DNA, 77 bp, Homo sapiens
acttcatgagaagactggtgcatttacagctgttaaagtgatgaacgctcgtaaggtaatattataaattgcctgta

SEQ ID NO: 189217 - DNA, 75 bp, Homo sapiens
agaagactggtgcatttacagctgttaaagtgatgaacgctcgtaaggtaatattataaattgcctgtattctct

SEQ ID NO: 189218 - DNA, 73 bp, Homo sapiens
catttacagctgttaaagtgatgaacgctcgtaaggtaatattataaattgcctgtattctcttcccttagtg

SEQ ID NO: 189219 - DNA, 73 bp, Homo sapiens
tgttaaagtgatgaacgctcgtaaggtaatattataaattgcctgtattctcttcccttagtggactgtgttc

SEQ ID NO: 189220 - DNA, 72 bp, Homo sapiens
aagtgatgaacgctcgtaaggtaatattataaattgcctgtattctcttcccttagtggactgtgttcctgg

SEQ ID NO: 189221 - DNA, 70 bp, Homo sapiens
agcataaatcatttttagagtgtaccagtacatctaataacattttattcttggttacagacccctttac

SEQ ID NO: 189222 - DNA, 69 bp, Homo sapiens
atcatttttagagtgtaccagtacatctaataacattttattcttggttacagacccctttacctgaaa

SEQ ID NO: 189223 - DNA, 70 bp, Homo sapiens
tagagtgtaccagtacatctaataacattttattcttggttacagacccctttacctgaaataggaaggc

SEQ ID NO: 189224 - DNA, 72 bp, Homo sapiens
tacatctaataacattttattcttggttacagacccctttacctgaaataggaaggcgagtgagagtgaata

SEQ ID NO: 189225 - DNA, 70 bp, Homo sapiens
aacattttattcttggttacagacccctttacctgaaataggaaggcgagtgagagtgaataaatatcaa

SEQ ID NO: 189226 - DNA, 71 bp, Homo sapiens
tattcttggttacagacccctttacctgaaataggaaggcgagtgagagtgaataaatatcaaaaatctgt

SEQ ID NO: 189227 - DNA, 73 bp, Homo sapiens
tacagacccctttacctgaaataggaaggcgagtgagagtgaataaatatcaaaaatctgttgggtggagata

SEQ ID NO: 189228 - DNA, 75 bp, Homo sapiens
ctgaaataggaaggcgagtgagagtgaataaatatcaaaaatctgttgggtggagatacagtgtgagtactaaaa

SEQ ID NO: 189229 - DNA, 75 bp, Homo sapiens
aaggcgagtgagagtgaataaatatcaaaaatctgttgggtggagatacagtgtgagtactaaaagttctcatta

SEQ ID NO: 189230 - DNA, 75 bp, Homo sapiens
gtgagagtgaataaatatcaaaaatctgttgggtggagatacagtgtgagtactaaaagttctcattaataccca

SEQ ID NO: 189231 - DNA, 71 bp, Homo sapiens
aatatcaaaaatctgttgggtggagatacagtgtgagtactaaaagttctcattaatacccaagtagtctt

SEQ ID NO: 189232 - DNA, 69 bp, Homo sapiens
aaaatctgttgggtggagatacagtgtgagtactaaaagttctcattaatacccaagtagtctttcctt

SEQ ID NO: 189233 - DNA, 80 bp, Homo sapiens
attgattgcacagtttaggagctttgctgtctattcttattccataggatgaggaagaggatctcaggactgaactcaac

SEQ ID NO: 189234 - DNA, 78 bp, Homo sapiens
acagtttaggagctttgctgtctattcttattccataggatgaggaagaggatctcaggactgaactcaaccttctga

SEQ ID NO: 189235 - DNA, 77 bp, Homo sapiens
ctttgctgtctattcttattccataggatgaggaagaggatctcaggactgaactcaaccttctgaggaagtactct

SEQ ID NO: 189236 - DNA, 76 bp, Homo sapiens
tattcttattccataggatgaggaagaggatctcaggactgaactcaaccttctgaggaagtactctttccacaaa

SEQ ID NO: 189237 - DNA, 75 bp, Homo sapiens
ttattccataggatgaggaagaggatctcaggactgaactcaaccttctgaggaagtactctttccacaaaaaca

SEQ ID NO: 189238 - DNA, 73 bp, Homo sapiens
aggaagaggatctcaggactgaactcaaccttctgaggaagtactctttccacaaaaacattgtgtccttcta

SEQ ID NO: 189239 - DNA, 74 bp, Homo sapiens
atctcaggactgaactcaaccttctgaggaagtactctttccacaaaaacattgtgtccttctatggagcattt

SEQ ID NO: 189240 - DNA, 73 bp, Homo sapiens
ggactgaactcaaccttctgaggaagtactctttccacaaaaacattgtgtccttctatggagcatttttcaa

SEQ ID NO: 189241 - DNA, 72 bp, Homo sapiens
aaccttctgaggaagtactctttccacaaaaacattgtgtccttctatggagcatttttcaagctgagtccc

SEQ ID NO: 189242 - DNA, 73 bp, Homo sapiens
aggaagtactctttccacaaaaacattgtgtccttctatggagcatttttcaagctgagtccccctggtcagc

SEQ ID NO: 189243 - DNA, 73 bp, Homo sapiens
tttccacaaaaacattgtgtccttctatggagcatttttcaagctgagtccccctggtcagcggcaccaactt

SEQ ID NO: 189244 - DNA, 72 bp, Homo sapiens
attgtgtccttctatggagcatttttcaagctgagtccccctggtcagcggcaccaactttgggtatgtttt

SEQ ID NO: 189245 - DNA, 72 bp, Homo sapiens
tccttctatggagcatttttcaagctgagtccccctggtcagcggcaccaactttgggtatgtttttaatta

SEQ ID NO: 189246 - DNA, 69 bp, Homo sapiens
tttttcaagctgagtccccctggtcagcggcaccaactttgggtatgtttttaattacactgttcttat

SEQ ID NO: 189247 - DNA, 77 bp, Homo sapiens
tttcagaaaattggacactaattttttatactttgctggctttcctgcagatggtgatggagttatgtgcagcaggt

SEQ ID NO: 189248 - DNA, 79 bp, Homo sapiens
acactaattttttatactttgctggctttcctgcagatggtgatggagttatgtgcagcaggttcggtcactgatgtag

SEQ ID NO: 189249 - DNA, 83 bp, Homo sapiens
tttttatactttgctggctttcctgcagatggtgatggagttatgtgcagcaggttcggtcactgatgtagtgagaatgacca

SEQ ID NO: 189250 - DNA, 86 bp, Homo sapiens
tgctggctttcctgcagatggtgatggagttatgtgcagcaggttcggtcactgatgtagtgagaatgaccagtaatcagagttta

SEQ ID NO: 189251 - DNA, 82 bp, Homo sapiens
tttcctgcagatggtgatggagttatgtgcagcaggttcggtcactgatgtagtgagaatgaccagtaatcagagtttaaaa

SEQ ID NO: 189252 - DNA, 80 bp, Homo sapiens
atggtgatggagttatgtgcagcaggttcggtcactgatgtagtgagaatgaccagtaatcagagtttaaaagaagattg

SEQ ID NO: 189253 - DNA, 81 bp, Homo sapiens
ttatgtgcagcaggttcggtcactgatgtagtgagaatgaccagtaatcagagtttaaaagaagattggattgcttatatc

SEQ ID NO: 189254 - DNA, 78 bp, Homo sapiens
aggttcggtcactgatgtagtgagaatgaccagtaatcagagtttaaaagaagattggattgcttatatctgccgaga

SEQ ID NO: 189255 - DNA, 78 bp, Homo sapiens
actgatgtagtgagaatgaccagtaatcagagtttaaaagaagattggattgcttatatctgccgagaaatccttcag

SEQ ID NO: 189256 - DNA, 79 bp, Homo sapiens
tgagaatgaccagtaatcagagtttaaaagaagattggattgcttatatctgccgagaaatccttcaggtgagtcttca

SEQ ID NO: 189257 - DNA, 77 bp, Homo sapiens
agtaatcagagtttaaaagaagattggattgcttatatctgccgagaaatccttcaggtgagtcttcatacagtcat

SEQ ID NO: 189258 - DNA, 78 bp, Homo sapiens
agtttaaaagaagattggattgcttatatctgccgagaaatccttcaggtgagtcttcatacagtcattctcttctga

SEQ ID NO: 189259 - DNA, 79 bp, Homo sapiens
aaagaagattggattgcttatatctgccgagaaatccttcaggtgagtcttcatacagtcattctcttctgatctttta

SEQ ID NO: 189260 - DNA, 74 bp, Homo sapiens
taaaaaatatatacagggcttagctcaccttcacgcacaccgagtaattcaccgggacatcaaaggtcagaatg

SEQ ID NO: 189261 - DNA, 79 bp, Homo sapiens
aatatatacagggcttagctcaccttcacgcacaccgagtaattcaccgggacatcaaaggtcagaatgtgctgctgac

SEQ ID NO: 189262 - DNA, 82 bp, Homo sapiens
ttagctcaccttcacgcacaccgagtaattcaccgggacatcaaaggtcagaatgtgctgctgactcataatgctgaagtaa

SEQ ID NO: 189263 - DNA, 78 bp, Homo sapiens
accttcacgcacaccgagtaattcaccgggacatcaaaggtcagaatgtgctgctgactcataatgctgaagtaaaac

SEQ ID NO: 189264 - DNA, 76 bp, Homo sapiens
cgagtaattcaccgggacatcaaaggtcagaatgtgctgctgactcataatgctgaagtaaaactgggtaagttta

SEQ ID NO: 189265 - DNA, 75 bp, Homo sapiens
aattcaccgggacatcaaaggtcagaatgtgctgctgactcataatgctgaagtaaaactgggtaagtttattct

SEQ ID NO: 189266 - DNA, 77 bp, Homo sapiens
gacatcaaaggtcagaatgtgctgctgactcataatgctgaagtaaaactgggtaagtttattcttatagtatttta

SEQ ID NO: 189267 - DNA, 75 bp, Homo sapiens
gtcagaatgtgctgctgactcataatgctgaagtaaaactgggtaagtttattcttatagtattttaagtccaaa

SEQ ID NO: 189268 - DNA, 73 bp, Homo sapiens
gctgctgactcataatgctgaagtaaaactgggtaagtttattcttatagtattttaagtccaaaacatctta

SEQ ID NO: 189269 - DNA, 75 bp, Homo sapiens
taagcttttttctcctgattgattattttgacatataatgatttttggcagttgattttggagtgagtgcccagg

SEQ ID NO: 189270 - DNA, 80 bp, Homo sapiens
tgattgattattttgacatataatgatttttggcagttgattttggagtgagtgcccaggtgagcagaactaatggaaga

SEQ ID NO: 189271 - DNA, 77 bp, Homo sapiens
ttttgacatataatgatttttggcagttgattttggagtgagtgcccaggtgagcagaactaatggaagaaggaata

SEQ ID NO: 189272 - DNA, 76 bp, Homo sapiens
tataatgatttttggcagttgattttggagtgagtgcccaggtgagcagaactaatggaagaaggaatagtttcat

SEQ ID NO: 189273 - DNA, 74 bp, Homo sapiens
atttttggcagttgattttggagtgagtgcccaggtgagcagaactaatggaagaaggaatagtttcattggga

SEQ ID NO: 189274 - DNA, 77 bp, Homo sapiens
ttgattttggagtgagtgcccaggtgagcagaactaatggaagaaggaatagtttcattgggacaccatactggatg

SEQ ID NO: 189275 - DNA, 77 bp, Homo sapiens
agtgcccaggtgagcagaactaatggaagaaggaatagtttcattgggacaccatactggatggcacctgaggtgat

SEQ ID NO: 189276 - DNA, 79 bp, Homo sapiens
aggtgagcagaactaatggaagaaggaatagtttcattgggacaccatactggatggcacctgaggtgattgactgtga

SEQ ID NO: 189277 - DNA, 77 bp, Homo sapiens
aactaatggaagaaggaatagtttcattgggacaccatactggatggcacctgaggtgattgactgtgatgaggacc

SEQ ID NO: 189278 - DNA, 78 bp, Homo sapiens
aaggaatagtttcattgggacaccatactggatggcacctgaggtgattgactgtgatgaggacccaagacgctccta

SEQ ID NO: 189279 - DNA, 82 bp, Homo sapiens
tagtttcattgggacaccatactggatggcacctgaggtgattgactgtgatgaggacccaagacgctcctatgattacaga

SEQ ID NO: 189280 - DNA, 84 bp, Homo sapiens
accatactggatggcacctgaggtgattgactgtgatgaggacccaagacgctcctatgattacagagtgagtgtgagaattca

SEQ ID NO: 189281 - DNA, 84 bp, Homo sapiens
atggcacctgaggtgattgactgtgatgaggacccaagacgctcctatgattacagagtgagtgtgagaattcagccagtggaa

SEQ ID NO: 189282 - DNA, 81 bp, Homo sapiens
aggtgattgactgtgatgaggacccaagacgctcctatgattacagagtgagtgtgagaattcagccagtggaaattacaa

SEQ ID NO: 189283 - DNA, 80 bp, Homo sapiens
attgactgtgatgaggacccaagacgctcctatgattacagagtgagtgtgagaattcagccagtggaaattacaatttg

SEQ ID NO: 189284 - DNA, 71 bp, Homo sapiens
tgttttgagattctaaatactaccaatttcctatttttaagtgacttttttgtcatctttgtctttgcaga

SEQ ID NO: 189285 - DNA, 73 bp, Homo sapiens
tctaaatactaccaatttcctatttttaagtgacttttttgtcatctttgtctttgcagagtgatgtgtggtc

SEQ ID NO: 189286 - DNA, 73 bp, Homo sapiens
atactaccaatttcctatttttaagtgacttttttgtcatctttgtctttgcagagtgatgtgtggtctgtgg

SEQ ID NO: 189287 - DNA, 76 bp, Homo sapiens
tatttttaagtgacttttttgtcatctttgtctttgcagagtgatgtgtggtctgtgggaattactgccattgaaa

SEQ ID NO: 189288 - DNA, 79 bp, Homo sapiens
ttaagtgacttttttgtcatctttgtctttgcagagtgatgtgtggtctgtgggaattactgccattgaaatggctgaa

SEQ ID NO: 189289 - DNA, 79 bp, Homo sapiens
tttttgtcatctttgtctttgcagagtgatgtgtggtctgtgggaattactgccattgaaatggctgaaggagcccctc

SEQ ID NO: 189290 - DNA, 78 bp, Homo sapiens
ttgtctttgcagagtgatgtgtggtctgtgggaattactgccattgaaatggctgaaggagcccctcgtgagtaaaaa

SEQ ID NO: 189291 - DNA, 76 bp, Homo sapiens
agtgatgtgtggtctgtgggaattactgccattgaaatggctgaaggagcccctcgtgagtaaaaaatgtttgata

SEQ ID NO: 189292 - DNA, 73 bp, Homo sapiens
gtctgtgggaattactgccattgaaatggctgaaggagcccctcgtgagtaaaaaatgtttgatatttgttaa

SEQ ID NO: 189293 - DNA, 71 bp, Homo sapiens
aattactgccattgaaatggctgaaggagcccctcgtgagtaaaaaatgtttgatatttgttaaagattag

SEQ ID NO: 189294 - DNA, 70 bp, Homo sapiens
ttgaaatggctgaaggagcccctcgtgagtaaaaaatgtttgatatttgttaaagattagggaaatgtac

SEQ ID NO: 189295 - DNA, 70 bp, Homo sapiens
gctgaaggagcccctcgtgagtaaaaaatgtttgatatttgttaaagattagggaaatgtactgtacaaa

SEQ ID NO: 189296 - DNA, 70 bp, Homo sapiens
gtgtgttctttagttacccttctcattctttctaaatttatctatttccctttgcagctctgtgtaacct

SEQ ID NO: 189297 - DNA, 70 bp, Homo sapiens
tctttagttacccttctcattctttctaaatttatctatttccctttgcagctctgtgtaaccttcaacc

SEQ ID NO: 189298 - DNA, 73 bp, Homo sapiens
ttctcattctttctaaatttatctatttccctttgcagctctgtgtaaccttcaacccttggaagctctcttc

SEQ ID NO: 189299 - DNA, 70 bp, Homo sapiens
ttctaaatttatctatttccctttgcagctctgtgtaaccttcaacccttggaagctctcttcgttattt

SEQ ID NO: 189300 - DNA, 71 bp, Homo sapiens
tttatctatttccctttgcagctctgtgtaaccttcaacccttggaagctctcttcgttattttgcgggaa

SEQ ID NO: 189301 - DNA, 75 bp, Homo sapiens
tttgcagctctgtgtaaccttcaacccttggaagctctcttcgttattttgcgggaatctgctcccacagtcaaa

SEQ ID NO: 189302 - DNA, 74 bp, Homo sapiens
agctctgtgtaaccttcaacccttggaagctctcttcgttattttgcgggaatctgctcccacagtcaaatcca

SEQ ID NO: 189303 - DNA, 74 bp, Homo sapiens
ttcaacccttggaagctctcttcgttattttgcgggaatctgctcccacagtcaaatccagcggatggtaaaga

SEQ ID NO: 189304 - DNA, 77 bp, Homo sapiens
tggaagctctcttcgttattttgcgggaatctgctcccacagtcaaatccagcggatggtaaagatgaatgtcttaa

SEQ ID NO: 189305 - DNA, 76 bp, Homo sapiens
tcgttattttgcgggaatctgctcccacagtcaaatccagcggatggtaaagatgaatgtcttaatctcctaatta

SEQ ID NO: 189306 - DNA, 77 bp, Homo sapiens
attttgcgggaatctgctcccacagtcaaatccagcggatggtaaagatgaatgtcttaatctcctaattacattga

SEQ ID NO: 189307 - DNA, 77 bp, Homo sapiens
aatctgctcccacagtcaaatccagcggatggtaaagatgaatgtcttaatctcctaattacattgacttgacattt

SEQ ID NO: 189308 - DNA, 66 bp, Homo sapiens
caggactgagaacacttttttttcctctctttgactcattttttaggtcccgtaagttccacaatt

SEQ ID NO: 189309 - DNA, 68 bp, Homo sapiens
ctgagaacacttttttttcctctctttgactcattttttaggtcccgtaagttccacaatttcatgga

SEQ ID NO: 189310 - DNA, 68 bp, Homo sapiens
tttcctctctttgactcattttttaggtcccgtaagttccacaatttcatggaaaagtgtacgataaa

SEQ ID NO: 189311 - DNA, 66 bp, Homo sapiens
ttgactcattttttaggtcccgtaagttccacaatttcatggaaaagtgtacgataaaaaatttcc

SEQ ID NO: 189312 - DNA, 65 bp, Homo sapiens
ttttaggtcccgtaagttccacaatttcatggaaaagtgtacgataaaaaatttcctgtttcgtc

SEQ ID NO: 189313 - DNA, 68 bp, Homo sapiens
ccgtaagttccacaatttcatggaaaagtgtacgataaaaaatttcctgtttcgtcctacttctgcaa

SEQ ID NO: 189314 - DNA, 71 bp, Homo sapiens
acaatttcatggaaaagtgtacgataaaaaatttcctgtttcgtcctacttctgcaaacatgcttcaacac

SEQ ID NO: 189315 - DNA, 71 bp, Homo sapiens
ttcatggaaaagtgtacgataaaaaatttcctgtttcgtcctacttctgcaaacatgcttcaacacccatt

SEQ ID NO: 189316 - DNA, 71 bp, Homo sapiens
tacgataaaaaatttcctgtttcgtcctacttctgcaaacatgcttcaacacccatttgttcgggatataa

SEQ ID NO: 189317 - DNA, 70 bp, Homo sapiens
aaaatttcctgtttcgtcctacttctgcaaacatgcttcaacacccatttgttcgggatataaaaaatga

SEQ ID NO: 189318 - DNA, 74 bp, Homo sapiens
tttcgtcctacttctgcaaacatgcttcaacacccatttgttcgggatataaaaaatgaacgacatgttgttga

SEQ ID NO: 189319 - DNA, 76 bp, Homo sapiens
tacttctgcaaacatgcttcaacacccatttgttcgggatataaaaaatgaacgacatgttgttgagtcattaaca

SEQ ID NO: 189320 - DNA, 74 bp, Homo sapiens
aacatgcttcaacacccatttgttcgggatataaaaaatgaacgacatgttgttgagtcattaacaaggcatct

SEQ ID NO: 189321 - DNA, 73 bp, Homo sapiens
acccatttgttcgggatataaaaaatgaacgacatgttgttgagtcattaacaaggcatcttactggaatcat

SEQ ID NO: 189322 - DNA, 73 bp, Homo sapiens
ttgttcgggatataaaaaatgaacgacatgttgttgagtcattaacaaggcatcttactggaatcattaaaaa

SEQ ID NO: 189323 - DNA, 71 bp, Homo sapiens
aaaaatgaacgacatgttgttgagtcattaacaaggcatcttactggaatcattaaaaaaagacagaaaaa

SEQ ID NO: 189324 - DNA, 72 bp, Homo sapiens
gaacgacatgttgttgagtcattaacaaggcatcttactggaatcattaaaaaaagacagaaaaaaggtaga

SEQ ID NO: 189325 - DNA, 71 bp, Homo sapiens
tgttgagtcattaacaaggcatcttactggaatcattaaaaaaagacagaaaaaaggtagaatctgttaag

SEQ ID NO: 189326 - DNA, 67 bp, Homo sapiens
attaacaaggcatcttactggaatcattaaaaaaagacagaaaaaaggtagaatctgttaagtttta

SEQ ID NO: 189327 - DNA, 67 bp, Homo sapiens
catcttactggaatcattaaaaaaagacagaaaaaaggtagaatctgttaagttttattttactgaa

SEQ ID NO: 189328 - DNA, 65 bp, Homo sapiens
aaaaataaaagtaccaggatggattttcaccaagtccagaagaagcccctgggaagtcctaactt

SEQ ID NO: 189329 - DNA, 69 bp, Homo sapiens
taaaagtaccaggatggattttcaccaagtccagaagaagcccctgggaagtcctaactttatatatta

SEQ ID NO: 189330 - DNA, 72 bp, Homo sapiens
atggattttcaccaagtccagaagaagcccctgggaagtcctaactttatatattatattacatattccaca

SEQ ID NO: 189331 - DNA, 71 bp, Homo sapiens
caccaagtccagaagaagcccctgggaagtcctaactttatatattatattacatattccacatttgattt

SEQ ID NO: 189332 - DNA, 71 bp, Homo sapiens
aagaagcccctgggaagtcctaactttatatattatattacatattccacatttgattttgcggaccatag

SEQ ID NO: 189333 - DNA, 76 bp, Homo sapiens
tgggaagtcctaactttatatattatattacatattccacatttgattttgcggaccataggcagagttgagagta

SEQ ID NO: 189334 - DNA, 76 bp, Homo sapiens
cctaactttatatattatattacatattccacatttgattttgcggaccataggcagagttgagagtaacaatgga

SEQ ID NO: 189335 - DNA, 75 bp, Homo sapiens
attatattacatattccacatttgattttgcggaccataggcagagttgagagtaacaatggaatgtaaaaggga

SEQ ID NO: 189336 - DNA, 73 bp, Homo sapiens
attacatattccacatttgattttgcggaccataggcagagttgagagtaacaatggaatgtaaaagggaaaa

SEQ ID NO: 189337 - DNA, 70 bp, Homo sapiens
acatttgattttgcggaccataggcagagttgagagtaacaatggaatgtaaaagggaaaacttgaaaaa

SEQ ID NO: 189338 - DNA, 72 bp, Homo sapiens
ttttgcggaccataggcagagttgagagtaacaatggaatgtaaaagggaaaacttgaaaaagcaggcatcc

SEQ ID NO: 189339 - DNA, 76 bp, Homo sapiens
ataggcagagttgagagtaacaatggaatgtaaaagggaaaacttgaaaaagcaggcatcctcagatcagctgtgg

SEQ ID NO: 189340 - DNA, 77 bp, Homo sapiens
ttgagagtaacaatggaatgtaaaagggaaaacttgaaaaagcaggcatcctcagatcagctgtgggattgattgta

SEQ ID NO: 189341 - DNA, 74 bp, Homo sapiens
aatggaatgtaaaagggaaaacttgaaaaagcaggcatcctcagatcagctgtgggattgattgtagtggggct

SEQ ID NO: 189342 - DNA, 81 bp, Homo sapiens
acttgaaaaagcaggcatcctcagatcagctgtgggattgattgtagtggggcttgttgtatctatacatgtatcatgttt

SEQ ID NO: 189343 - DNA, 84 bp, Homo sapiens
aagcaggcatcctcagatcagctgtgggattgattgtagtggggcttgttgtatctatacatgtatcatgttttgaggcaagga

SEQ ID NO: 189344 - DNA, 83 bp, Homo sapiens
agatcagctgtgggattgattgtagtggggcttgttgtatctatacatgtatcatgttttgaggcaaggagcagcaagaatta

SEQ ID NO: 189345 - DNA, 79 bp, Homo sapiens
tgggattgattgtagtggggcttgttgtatctatacatgtatcatgttttgaggcaaggagcagcaagaattaatttat

SEQ ID NO: 189346 - DNA, 76 bp, Homo sapiens
attgtagtggggcttgttgtatctatacatgtatcatgttttgaggcaaggagcagcaagaattaatttatttacc

SEQ ID NO: 189347 - DNA, 78 bp, Homo sapiens
ctatacatgtatcatgttttgaggcaaggagcagcaagaattaatttatttacctatggtaatgaagttattcagcca

SEQ ID NO: 189348 - DNA, 75 bp, Homo sapiens
tcatgttttgaggcaaggagcagcaagaattaatttatttacctatggtaatgaagttattcagccaactttaca

SEQ ID NO: 189349 - DNA, 73 bp, Homo sapiens
ttttgaggcaaggagcagcaagaattaatttatttacctatggtaatgaagttattcagccaactttacagag

SEQ ID NO: 189350 - DNA, 73 bp, Homo sapiens
cagcaagaattaatttatttacctatggtaatgaagttattcagccaactttacagaggccagccagtttcaa

SEQ ID NO: 189351 - DNA, 70 bp, Homo sapiens
ttaatttatttacctatggtaatgaagttattcagccaactttacagaggccagccagtttcaaatgggt

SEQ ID NO: 189352 - DNA, 72 bp, Homo sapiens
tatttacctatggtaatgaagttattcagccaactttacagaggccagccagtttcaaatgggttcaggaaa

SEQ ID NO: 189353 - DNA, 75 bp, Homo sapiens
taatgaagttattcagccaactttacagaggccagccagtttcaaatgggttcaggaaaaccacacatctatatg

SEQ ID NO: 189354 - DNA, 73 bp, Homo sapiens
ttattcagccaactttacagaggccagccagtttcaaatgggttcaggaaaaccacacatctatatggtaatt

SEQ ID NO: 189355 - DNA, 71 bp, Homo sapiens
aactttacagaggccagccagtttcaaatgggttcaggaaaaccacacatctatatggtaatttgctaatt

SEQ ID NO: 189356 - DNA, 73 bp, Homo sapiens
cagccagtttcaaatgggttcaggaaaaccacacatctatatggtaatttgctaatttccagaattgcaaaat

SEQ ID NO: 189357 - DNA, 72 bp, Homo sapiens
gtttcaaatgggttcaggaaaaccacacatctatatggtaatttgctaatttccagaattgcaaaatttcca

SEQ ID NO: 189358 - DNA, 71 bp, Homo sapiens
gggttcaggaaaaccacacatctatatggtaatttgctaatttccagaattgcaaaatttccaaaatgtta

SEQ ID NO: 189359 - DNA, 71 bp, Homo sapiens
ccacacatctatatggtaatttgctaatttccagaattgcaaaatttccaaaatgttacctgtaggaaaag

SEQ ID NO: 189360 - DNA, 69 bp, Homo sapiens
ctatatggtaatttgctaatttccagaattgcaaaatttccaaaatgttacctgtaggaaaagttccat

SEQ ID NO: 189361 - DNA, 69 bp, Homo sapiens
cagaattgcaaaatttccaaaatgttacctgtaggaaaagttccatttatatggaagttacactaaaga

SEQ ID NO: 189362 - DNA, 68 bp, Homo sapiens
gcaaaatttccaaaatgttacctgtaggaaaagttccatttatatggaagttacactaaagatataaa

SEQ ID NO: 189363 - DNA, 71 bp, Homo sapiens
atgttacctgtaggaaaagttccatttatatggaagttacactaaagatataaatatagttgccctgaaca

SEQ ID NO: 189364 - DNA, 69 bp, Homo sapiens
acctgtaggaaaagttccatttatatggaagttacactaaagatataaatatagttgccctgaacattt

SEQ ID NO: 189365 - DNA, 69 bp, Homo sapiens
gttacactaaagatataaatatagttgccctgaacattttaatataggaaattcaaaataaaactcttg

SEQ ID NO: 189366 - DNA, 70 bp, Homo sapiens
gatataaatatagttgccctgaacattttaatataggaaattcaaaataaaactcttgtttgtaatcttc

SEQ ID NO: 189367 - DNA, 72 bp, Homo sapiens
tgccctgaacattttaatataggaaattcaaaataaaactcttgtttgtaatcttctatatttcagtagtca

SEQ ID NO: 189368 - DNA, 72 bp, Homo sapiens
cattttaatataggaaattcaaaataaaactcttgtttgtaatcttctatatttcagtagtcacagtacagc

SEQ ID NO: 189369 - DNA, 74 bp, Homo sapiens
aggaaattcaaaataaaactcttgtttgtaatcttctatatttcagtagtcacagtacagctgatgataggaaa

SEQ ID NO: 189370 - DNA, 77 bp, Homo sapiens
caaaataaaactcttgtttgtaatcttctatatttcagtagtcacagtacagctgatgataggaaagaagctgaatg

SEQ ID NO: 189371 - DNA, 78 bp, Homo sapiens
aactcttgtttgtaatcttctatatttcagtagtcacagtacagctgatgataggaaagaagctgaatgttttcaatg

SEQ ID NO: 189372 - DNA, 79 bp, Homo sapiens
gtaatcttctatatttcagtagtcacagtacagctgatgataggaaagaagctgaatgttttcaatgtgtttagtgtaa

SEQ ID NO: 189373 - DNA, 78 bp, Homo sapiens
atatttcagtagtcacagtacagctgatgataggaaagaagctgaatgttttcaatgtgtttagtgtaaaacacagaa

SEQ ID NO: 189374 - DNA, 77 bp, Homo sapiens
gtagtcacagtacagctgatgataggaaagaagctgaatgttttcaatgtgtttagtgtaaaacacagaattaagaa

SEQ ID NO: 189375 - DNA, 77 bp, Homo sapiens
cagctgatgataggaaagaagctgaatgttttcaatgtgtttagtgtaaaacacagaattaagaatttgccttctca

SEQ ID NO: 189376 - DNA, 74 bp, Homo sapiens
gataggaaagaagctgaatgttttcaatgtgtttagtgtaaaacacagaattaagaatttgccttctcattgaa

SEQ ID NO: 189377 - DNA, 72 bp, Homo sapiens
aagctgaatgttttcaatgtgtttagtgtaaaacacagaattaagaatttgccttctcattgaaaagaccaa

SEQ ID NO: 189378 - DNA, 72 bp, Homo sapiens
gtgtaaaacacagaattaagaatttgccttctcattgaaaagaccaaatatcaacctcaagccataaagtcc

SEQ ID NO: 189379 - DNA, 80 bp, Homo sapiens
ttctcattgaaaagaccaaatatcaacctcaagccataaagtccttacatctagagcccacagctgtaagccatgctcac

SEQ ID NO: 189380 - DNA, 78 bp, Homo sapiens
aagaccaaatatcaacctcaagccataaagtccttacatctagagcccacagctgtaagccatgctcaccactattta

SEQ ID NO: 189381 - DNA, 77 bp, Homo sapiens
aaatatcaacctcaagccataaagtccttacatctagagcccacagctgtaagccatgctcaccactatttagagtt

SEQ ID NO: 189382 - DNA, 80 bp, Homo sapiens
ctcaagccataaagtccttacatctagagcccacagctgtaagccatgctcaccactatttagagtttctcttgtctcat

SEQ ID NO: 189383 - DNA, 77 bp, Homo sapiens
aaagtccttacatctagagcccacagctgtaagccatgctcaccactatttagagtttctcttgtctcattctccct

SEQ ID NO: 189384 - DNA, 79 bp, Homo sapiens
atctagagcccacagctgtaagccatgctcaccactatttagagtttctcttgtctcattctccctttgtcccattctc

SEQ ID NO: 189385 - DNA, 77 bp, Homo sapiens
acagctgtaagccatgctcaccactatttagagtttctcttgtctcattctccctttgtcccattctctcttcttcc

SEQ ID NO: 189386 - DNA, 74 bp, Homo sapiens
atgctcaccactatttagagtttctcttgtctcattctccctttgtcccattctctcttcttcctctttagaat

SEQ ID NO: 189387 - DNA, 73 bp, Homo sapiens
actatttagagtttctcttgtctcattctccctttgtcccattctctcttcttcctctttagaattgcagaaa

SEQ ID NO: 189388 - DNA, 75 bp, Homo sapiens
tttctcttgtctcattctccctttgtcccattctctcttcttcctctttagaattgcagaaatcaagttgctaaa

SEQ ID NO: 189389 - DNA, 74 bp, Homo sapiens
ttgtctcattctccctttgtcccattctctcttcttcctctttagaattgcagaaatcaagttgctaaattttc

SEQ ID NO: 189390 - DNA, 74 bp, Homo sapiens
ctttgtcccattctctcttcttcctctttagaattgcagaaatcaagttgctaaattttctctgttcagagaaa

SEQ ID NO: 189391 - DNA, 79 bp, Homo sapiens
ttctctcttcttcctctttagaattgcagaaatcaagttgctaaattttctctgttcagagaaattaatctgcatgcaa

SEQ ID NO: 189392 - DNA, 79 bp, Homo sapiens
cttcttcctctttagaattgcagaaatcaagttgctaaattttctctgttcagagaaattaatctgcatgcaatagcta

SEQ ID NO: 189393 - DNA, 83 bp, Homo sapiens
tagaattgcagaaatcaagttgctaaattttctctgttcagagaaattaatctgcatgcaatagctatattgtgctgcaaaag

SEQ ID NO: 189394 - DNA, 80 bp, Homo sapiens
aaatcaagttgctaaattttctctgttcagagaaattaatctgcatgcaatagctatattgtgctgcaaaagtgggccta

SEQ ID NO: 189395 - DNA, 79 bp, Homo sapiens
ctaaattttctctgttcagagaaattaatctgcatgcaatagctatattgtgctgcaaaagtgggcctagaaactagaa

SEQ ID NO: 189396 - DNA, 81 bp, Homo sapiens
gaaattaatctgcatgcaatagctatattgtgctgcaaaagtgggcctagaaactagaatatggtctacatcacaaaccaa

SEQ ID NO: 189397 - DNA, 81 bp, Homo sapiens
tgcatgcaatagctatattgtgctgcaaaagtgggcctagaaactagaatatggtctacatcacaaaccaagtacttttga

SEQ ID NO: 189398 - DNA, 75 bp, Homo sapiens
aatagctatattgtgctgcaaaagtgggcctagaaactagaatatggtctacatcacaaaccaagtacttttgaa

SEQ ID NO: 189399 - DNA, 73 bp, Homo sapiens
agaatatggtctacatcacaaaccaagtacttttgaagggctaccttcttgcccttgtaattcactccacatc

SEQ ID NO: 189400 - DNA, 73 bp, Homo sapiens
ctacatcacaaaccaagtacttttgaagggctaccttcttgcccttgtaattcactccacatcctaagaagca

SEQ ID NO: 189401 - DNA, 70 bp, Homo sapiens
aaccaagtacttttgaagggctaccttcttgcccttgtaattcactccacatcctaagaagcagagggaa

SEQ ID NO: 189402 - DNA, 72 bp, Homo sapiens
ttttgaagggctaccttcttgcccttgtaattcactccacatcctaagaagcagagggaacaaggtgattaa

SEQ ID NO: 189403 - DNA, 76 bp, Homo sapiens
cttcttgcccttgtaattcactccacatcctaagaagcagagggaacaaggtgattaagtggataacatgcttatc

SEQ ID NO: 189404 - DNA, 79 bp, Homo sapiens
ttgtaattcactccacatcctaagaagcagagggaacaaggtgattaagtggataacatgcttatctgctgactgttta

SEQ ID NO: 189405 - DNA, 80 bp, Homo sapiens
tccacatcctaagaagcagagggaacaaggtgattaagtggataacatgcttatctgctgactgtttatgcattatgttt

SEQ ID NO: 189406 - DNA, 76 bp, Homo sapiens
agagggaacaaggtgattaagtggataacatgcttatctgctgactgtttatgcattatgtttttctcttttgtaa

SEQ ID NO: 189407 - DNA, 74 bp, Homo sapiens
caaggtgattaagtggataacatgcttatctgctgactgtttatgcattatgtttttctcttttgtaaaaaaag

SEQ ID NO: 189408 - DNA, 75 bp, Homo sapiens
tggataacatgcttatctgctgactgtttatgcattatgtttttctcttttgtaaaaaaaggaatacctttgatc

SEQ ID NO: 189409 - DNA, 74 bp, Homo sapiens
catgcttatctgctgactgtttatgcattatgtttttctcttttgtaaaaaaaggaatacctttgatctttgaa

SEQ ID NO: 189410 - DNA, 71 bp, Homo sapiens
gctgactgtttatgcattatgtttttctcttttgtaaaaaaaggaatacctttgatctttgaaagagaaga

SEQ ID NO: 189411 - DNA, 69 bp, Homo sapiens
tgcattatgtttttctcttttgtaaaaaaaggaatacctttgatctttgaaagagaagaagctattaag

SEQ ID NO: 189412 - DNA, 69 bp, Homo sapiens
gtaaaaaaaggaatacctttgatctttgaaagagaagaagctattaaggaacagtacaccgtgagaaga

SEQ ID NO: 189413 - DNA, 75 bp, Homo sapiens
actaaaaattctaattgtatgccaatcatttgtgtgtttattttagaggaccctcttgcactcacgagcttctga

SEQ ID NO: 189414 - DNA, 78 bp, Homo sapiens
aattctaattgtatgccaatcatttgtgtgtttattttagaggaccctcttgcactcacgagcttctgagattgccaa

SEQ ID NO: 189415 - DNA, 86 bp, Homo sapiens
tgtatgccaatcatttgtgtgtttattttagaggaccctcttgcactcacgagcttctgagattgccaaccagcagcagatgcaga

SEQ ID NO: 189416 - DNA, 83 bp, Homo sapiens
tgtgtgtttattttagaggaccctcttgcactcacgagcttctgagattgccaaccagcagcagatgcagaccacttagagtc

SEQ ID NO: 189417 - DNA, 84 bp, Homo sapiens
tttattttagaggaccctcttgcactcacgagcttctgagattgccaaccagcagcagatgcagaccacttagagtcctgcatg

SEQ ID NO: 189418 - DNA, 84 bp, Homo sapiens
accctcttgcactcacgagcttctgagattgccaaccagcagcagatgcagaccacttagagtcctgcatggggaaccctctca

SEQ ID NO: 189419 - DNA, 85 bp, Homo sapiens
ttgcactcacgagcttctgagattgccaaccagcagcagatgcagaccacttagagtcctgcatggggaaccctctcagccaagg

SEQ ID NO: 189420 - DNA, 84 bp, Homo sapiens
ttctgagattgccaaccagcagcagatgcagaccacttagagtcctgcatggggaaccctctcagccaaggtggctacctgatc

SEQ ID NO: 189421 - DNA, 82 bp, Homo sapiens
attgccaaccagcagcagatgcagaccacttagagtcctgcatggggaaccctctcagccaaggtggctacctgatcgagaa

SEQ ID NO: 189422 - DNA, 81 bp, Homo sapiens
agcagatgcagaccacttagagtcctgcatggggaaccctctcagccaaggtggctacctgatcgagaagagccacaggtc

SEQ ID NO: 189423 - DNA, 78 bp, Homo sapiens
agaccacttagagtcctgcatggggaaccctctcagccaaggtggctacctgatcgagaagagccacaggtccaggca

SEQ ID NO: 189424 - DNA, 82 bp, Homo sapiens
tagagtcctgcatggggaaccctctcagccaaggtggctacctgatcgagaagagccacaggtccaggcacttcagcagcta

SEQ ID NO: 189425 - DNA, 81 bp, Homo sapiens
gggaaccctctcagccaaggtggctacctgatcgagaagagccacaggtccaggcacttcagcagctacagggagcagcca

SEQ ID NO: 189426 - DNA, 85 bp, Homo sapiens
tcagccaaggtggctacctgatcgagaagagccacaggtccaggcacttcagcagctacagggagcagccagggtattcatgcca

SEQ ID NO: 189427 - DNA, 84 bp, Homo sapiens
aaggtggctacctgatcgagaagagccacaggtccaggcacttcagcagctacagggagcagccagggtattcatgccactgca

SEQ ID NO: 189428 - DNA, 86 bp, Homo sapiens
acctgatcgagaagagccacaggtccaggcacttcagcagctacagggagcagccagggtattcatgccactgcaggctctggaca

SEQ ID NO: 189429 - DNA, 85 bp, Homo sapiens
aagagccacaggtccaggcacttcagcagctacagggagcagccagggtattcatgccactgcaggctctggacagtgcacctaa

SEQ ID NO: 189430 - DNA, 84 bp, Homo sapiens
ggtccaggcacttcagcagctacagggagcagccagggtattcatgccactgcaggctctggacagtgcacctaagcctctaaa

SEQ ID NO: 189431 - DNA, 82 bp, Homo sapiens
acttcagcagctacagggagcagccagggtattcatgccactgcaggctctggacagtgcacctaagcctctaaaggggcag

SEQ ID NO: 189432 - DNA, 82 bp, Homo sapiens
gggagcagccagggtattcatgccactgcaggctctggacagtgcacctaagcctctaaaggggcaggctcaggcacctcaa

SEQ ID NO: 189433 - DNA, 80 bp, Homo sapiens
agggtattcatgccactgcaggctctggacagtgcacctaagcctctaaaggggcaggctcaggcacctcaacgactaca

SEQ ID NO: 189434 - DNA, 79 bp, Homo sapiens
attcatgccactgcaggctctggacagtgcacctaagcctctaaaggggcaggctcaggcacctcaacgactacaaggg

SEQ ID NO: 189435 - DNA, 75 bp, Homo sapiens
aggctctggacagtgcacctaagcctctaaaggggcaggctcaggcacctcaacgactacaaggggcagctcggg

SEQ ID NO: 189436 - DNA, 77 bp, Homo sapiens
acagtgcacctaagcctctaaaggggcaggctcaggcacctcaacgactacaaggggcagctcgggtgttcatgcca

SEQ ID NO: 189437 - DNA, 75 bp, Homo sapiens
acctaagcctctaaaggggcaggctcaggcacctcaacgactacaaggggcagctcgggtgttcatgccactaca

SEQ ID NO: 189438 - DNA, 77 bp, Homo sapiens
ctaaaggggcaggctcaggcacctcaacgactacaaggggcagctcgggtgttcatgccactacaggctcaggtgaa

SEQ ID NO: 189439 - DNA, 78 bp, Homo sapiens
tcaggcacctcaacgactacaaggggcagctcgggtgttcatgccactacaggctcaggtgaaggctaaagcctctaa

SEQ ID NO: 189440 - DNA, 74 bp, Homo sapiens
aacgactacaaggggcagctcgggtgttcatgccactacaggctcaggtgaaggctaaagcctctaaacctcta

SEQ ID NO: 189441 - DNA, 76 bp, Homo sapiens
aaggggcagctcgggtgttcatgccactacaggctcaggtgaaggctaaagcctctaaacctctacaaatgcagat

SEQ ID NO: 189442 - DNA, 78 bp, Homo sapiens
ttcatgccactacaggctcaggtgaaggctaaagcctctaaacctctacaaatgcagattaaggcacctccacgacta

SEQ ID NO: 189443 - DNA, 77 bp, Homo sapiens
aagcctctaaacctctacaaatgcagattaaggcacctccacgactacggagggcagccagggtgctcatgccacta

SEQ ID NO: 189444 - DNA, 78 bp, Homo sapiens
aaacctctacaaatgcagattaaggcacctccacgactacggagggcagccagggtgctcatgccactacaggcacag

SEQ ID NO: 189445 - DNA, 77 bp, Homo sapiens
taaggcacctccacgactacggagggcagccagggtgctcatgccactacaggcacaggttagggcacctaggcttc

SEQ ID NO: 189446 - DNA, 78 bp, Homo sapiens
acgactacggagggcagccagggtgctcatgccactacaggcacaggttagggcacctaggcttctgcaggtacagtc

SEQ ID NO: 189447 - DNA, 79 bp, Homo sapiens
gcagccagggtgctcatgccactacaggcacaggttagggcacctaggcttctgcaggtacagtcccaggtatccaaaa

SEQ ID NO: 189448 - DNA, 77 bp, Homo sapiens
agggtgctcatgccactacaggcacaggttagggcacctaggcttctgcaggtacagtcccaggtatccaaaaagca

SEQ ID NO: 189449 - DNA, 77 bp, Homo sapiens
atgccactacaggcacaggttagggcacctaggcttctgcaggtacagtcccaggtatccaaaaagcagcaggccca

SEQ ID NO: 189450 - DNA, 76 bp, Homo sapiens
acaggttagggcacctaggcttctgcaggtacagtcccaggtatccaaaaagcagcaggcccagacccagacatca

SEQ ID NO: 189451 - DNA, 77 bp, Homo sapiens
cacctaggcttctgcaggtacagtcccaggtatccaaaaagcagcaggcccagacccagacatcagaaccacaagat

SEQ ID NO: 189452 - DNA, 77 bp, Homo sapiens
ttctgcaggtacagtcccaggtatccaaaaagcagcaggcccagacccagacatcagaaccacaagatttggaccag

SEQ ID NO: 189453 - DNA, 74 bp, Homo sapiens
aggtacagtcccaggtatccaaaaagcagcaggcccagacccagacatcagaaccacaagatttggaccaggta

SEQ ID NO: 189454 - DNA, 73 bp, Homo sapiens
aggtatccaaaaagcagcaggcccagacccagacatcagaaccacaagatttggaccaggtaccagaggaatt

SEQ ID NO: 189455 - DNA, 74 bp, Homo sapiens
aaaagcagcaggcccagacccagacatcagaaccacaagatttggaccaggtaccagaggaatttcagggtcaa

SEQ ID NO: 189456 - DNA, 74 bp, Homo sapiens
cagacccagacatcagaaccacaagatttggaccaggtaccagaggaatttcagggtcaagatcaggtacccga

SEQ ID NO: 189457 - DNA, 70 bp, Homo sapiens
aaccacaagatttggaccaggtaccagaggaatttcagggtcaagatcaggtacccgaacaacaaaggca

SEQ ID NO: 189458 - DNA, 70 bp, Homo sapiens
atttggaccaggtaccagaggaatttcagggtcaagatcaggtacccgaacaacaaaggcagggccaggc

SEQ ID NO: 189459 - DNA, 71 bp, Homo sapiens
gtaccagaggaatttcagggtcaagatcaggtacccgaacaacaaaggcagggccaggcccctgaacaaca

SEQ ID NO: 189460 - DNA, 74 bp, Homo sapiens
aagatcaggtacccgaacaacaaaggcagggccaggcccctgaacaacagcagaggcacaaccaggtgcctgaa

SEQ ID NO: 189461 - DNA, 76 bp, Homo sapiens
tacccgaacaacaaaggcagggccaggcccctgaacaacagcagaggcacaaccaggtgcctgaacaagagctgga

SEQ ID NO: 189462 - DNA, 77 bp, Homo sapiens
aacaaaggcagggccaggcccctgaacaacagcagaggcacaaccaggtgcctgaacaagagctggagcagaaccag

SEQ ID NO: 189463 - DNA, 81 bp, Homo sapiens
ccaggcccctgaacaacagcagaggcacaaccaggtgcctgaacaagagctggagcagaaccaggcacctgaacagccaga

SEQ ID NO: 189464 - DNA, 80 bp, Homo sapiens
aacaacagcagaggcacaaccaggtgcctgaacaagagctggagcagaaccaggcacctgaacagccagaggtacaggaa

SEQ ID NO: 189465 - DNA, 80 bp, Homo sapiens
agaggcacaaccaggtgcctgaacaagagctggagcagaaccaggcacctgaacagccagaggtacaggaacaggctgcc

SEQ ID NO: 189466 - DNA, 83 bp, Homo sapiens
aacaagagctggagcagaaccaggcacctgaacagccagaggtacaggaacaggctgccgagcctgcacaggcagagactgag

SEQ ID NO: 189467 - DNA, 84 bp, Homo sapiens
ctggagcagaaccaggcacctgaacagccagaggtacaggaacaggctgccgagcctgcacaggcagagactgaggcagaggaa

SEQ ID NO: 189468 - DNA, 84 bp, Homo sapiens
caggcacctgaacagccagaggtacaggaacaggctgccgagcctgcacaggcagagactgaggcagaggaacctgagtcatta

SEQ ID NO: 189469 - DNA, 81 bp, Homo sapiens
aacagccagaggtacaggaacaggctgccgagcctgcacaggcagagactgaggcagaggaacctgagtcattacgagtaa

SEQ ID NO: 189470 - DNA, 81 bp, Homo sapiens
agaggtacaggaacaggctgccgagcctgcacaggcagagactgaggcagaggaacctgagtcattacgagtaaatgccca

SEQ ID NO: 189471 - DNA, 79 bp, Homo sapiens
aggaacaggctgccgagcctgcacaggcagagactgaggcagaggaacctgagtcattacgagtaaatgcccaggtatt

SEQ ID NO: 189472 - DNA, 82 bp, Homo sapiens
agcctgcacaggcagagactgaggcagaggaacctgagtcattacgagtaaatgcccaggtatttctgcccctgctatcaca

SEQ ID NO: 189473 - DNA, 81 bp, Homo sapiens
acaggcagagactgaggcagaggaacctgagtcattacgagtaaatgcccaggtatttctgcccctgctatcacaagatca

SEQ ID NO: 189474 - DNA, 81 bp, Homo sapiens
ctgaggcagaggaacctgagtcattacgagtaaatgcccaggtatttctgcccctgctatcacaagatcaccatgtgctgt

SEQ ID NO: 189475 - DNA, 80 bp, Homo sapiens
aacctgagtcattacgagtaaatgcccaggtatttctgcccctgctatcacaagatcaccatgtgctgttgccactacat

SEQ ID NO: 189476 - DNA, 81 bp, Homo sapiens
agtcattacgagtaaatgcccaggtatttctgcccctgctatcacaagatcaccatgtgctgttgccactacatttggata

SEQ ID NO: 189477 - DNA, 84 bp, Homo sapiens
taaatgcccaggtatttctgcccctgctatcacaagatcaccatgtgctgttgccactacatttggatactcaggtgctcattc

SEQ ID NO: 189478 - DNA, 80 bp, Homo sapiens
ctgttgccactacatttggatactcaggtgctcattccagtagaggggcaaactgaaggatcacctcaggcacaggcttg

SEQ ID NO: 189479 - DNA, 80 bp, Homo sapiens
tacatttggatactcaggtgctcattccagtagaggggcaaactgaaggatcacctcaggcacaggcttggacactagaa

SEQ ID NO: 189480 - DNA, 78 bp, Homo sapiens
tactcaggtgctcattccagtagaggggcaaactgaaggatcacctcaggcacaggcttggacactagaacccccaca

SEQ ID NO: 189481 - DNA, 76 bp, Homo sapiens
ctcattccagtagaggggcaaactgaaggatcacctcaggcacaggcttggacactagaacccccacaggcaattg

SEQ ID NO: 189482 - DNA, 79 bp, Homo sapiens
gggcaaactgaaggatcacctcaggcacaggcttggacactagaacccccacaggcaattggctcagttcaagcactga

SEQ ID NO: 189483 - DNA, 79 bp, Homo sapiens
aactgaaggatcacctcaggcacaggcttggacactagaacccccacaggcaattggctcagttcaagcactgatagag

SEQ ID NO: 189484 - DNA, 80 bp, Homo sapiens
tcaggcacaggcttggacactagaacccccacaggcaattggctcagttcaagcactgatagagggactatcaagagact

SEQ ID NO: 189485 - DNA, 78 bp, Homo sapiens
acaggcttggacactagaacccccacaggcaattggctcagttcaagcactgatagagggactatcaagagacttgct

SEQ ID NO: 189486 - DNA, 77 bp, Homo sapiens
tagaacccccacaggcaattggctcagttcaagcactgatagagggactatcaagagacttgcttcgggcaccaaac

SEQ ID NO: 189487 - DNA, 78 bp, Homo sapiens
cccacaggcaattggctcagttcaagcactgatagagggactatcaagagacttgcttcgggcaccaaactcaaataa

SEQ ID NO: 189488 - DNA, 75 bp, Homo sapiens
agttcaagcactgatagagggactatcaagagacttgcttcgggcaccaaactcaaataactcaaagccacttgg

SEQ ID NO: 189489 - DNA, 73 bp, Homo sapiens
atagagggactatcaagagacttgcttcgggcaccaaactcaaataactcaaagccacttggtccgttgcaaa

SEQ ID NO: 189490 - DNA, 74 bp, Homo sapiens
tatcaagagacttgcttcgggcaccaaactcaaataactcaaagccacttggtccgttgcaaaccctgatggaa

SEQ ID NO: 189491 - DNA, 71 bp, Homo sapiens
agacttgcttcgggcaccaaactcaaataactcaaagccacttggtccgttgcaaaccctgatggaaaatc

SEQ ID NO: 189492 - DNA, 72 bp, Homo sapiens
aataactcaaagccacttggtccgttgcaaaccctgatggaaaatctgtcatcaaataggttttactcacaa

SEQ ID NO: 189493 - DNA, 72 bp, Homo sapiens
aaagccacttggtccgttgcaaaccctgatggaaaatctgtcatcaaataggttttactcacaaccagaaca

SEQ ID NO: 189494 - DNA, 73 bp, Homo sapiens
tccgttgcaaaccctgatggaaaatctgtcatcaaataggttttactcacaaccagaacaggcacgggagaaa

SEQ ID NO: 189495 - DNA, 71 bp, Homo sapiens
aaaccctgatggaaaatctgtcatcaaataggttttactcacaaccagaacaggcacgggagaaaaaatca

SEQ ID NO: 189496 - DNA, 69 bp, Homo sapiens
atggaaaatctgtcatcaaataggttttactcacaaccagaacaggcacgggagaaaaaatcaaaagtt

SEQ ID NO: 189497 - DNA, 70 bp, Homo sapiens
atcaaataggttttactcacaaccagaacaggcacgggagaaaaaatcaaaagtttctactctgaggcaa

SEQ ID NO: 189498 - DNA, 72 bp, Homo sapiens
ttttactcacaaccagaacaggcacgggagaaaaaatcaaaagtttctactctgaggcaagcactggcaaaa

SEQ ID NO: 189499 - DNA, 73 bp, Homo sapiens
acaaccagaacaggcacgggagaaaaaatcaaaagtttctactctgaggcaagcactggcaaaaagactatca

SEQ ID NO: 189500 - DNA, 72 bp, Homo sapiens
aacaggcacgggagaaaaaatcaaaagtttctactctgaggcaagcactggcaaaaagactatcaccaaaga

SEQ ID NO: 189501 - DNA, 71 bp, Homo sapiens
aaaaaatcaaaagtttctactctgaggcaagcactggcaaaaagactatcaccaaagaggttcagggcaaa

SEQ ID NO: 189502 - DNA, 79 bp, Homo sapiens
tctgaggcaagcactggcaaaaagactatcaccaaagaggttcagggcaaagtcatcatggagacctgaaaagcttgaa

SEQ ID NO: 189503 - DNA, 76 bp, Homo sapiens
aagcactggcaaaaagactatcaccaaagaggttcagggcaaagtcatcatggagacctgaaaagcttgaactctc

SEQ ID NO: 189504 - DNA, 73 bp, Homo sapiens
aaaaagactatcaccaaagaggttcagggcaaagtcatcatggagacctgaaaagcttgaactctcggattta

SEQ ID NO: 189505 - DNA, 76 bp, Homo sapiens
tatcaccaaagaggttcagggcaaagtcatcatggagacctgaaaagcttgaactctcggatttagaagcccgcag

SEQ ID NO: 189506 - DNA, 75 bp, Homo sapiens
agaggttcagggcaaagtcatcatggagacctgaaaagcttgaactctcggatttagaagcccgcaggcaaaggc

SEQ ID NO: 189507 - DNA, 76 bp, Homo sapiens
aaagtcatcatggagacctgaaaagcttgaactctcggatttagaagcccgcaggcaaaggcgccaacgcagatgg

SEQ ID NO: 189508 - DNA, 76 bp, Homo sapiens
ctgaaaagcttgaactctcggatttagaagcccgcaggcaaaggcgccaacgcagatgggaagatatctttaatca

SEQ ID NO: 189509 - DNA, 77 bp, Homo sapiens
aactctcggatttagaagcccgcaggcaaaggcgccaacgcagatgggaagatatctttaatcagcatgaggaagaa

SEQ ID NO: 189510 - DNA, 78 bp, Homo sapiens
atttagaagcccgcaggcaaaggcgccaacgcagatgggaagatatctttaatcagcatgaggaagaattgagacaag

SEQ ID NO: 189511 - DNA, 78 bp, Homo sapiens
aggcaaaggcgccaacgcagatgggaagatatctttaatcagcatgaggaagaattgagacaagttgataaagtaaga

SEQ ID NO: 189512 - DNA, 78 bp, Homo sapiens
gccaacgcagatgggaagatatctttaatcagcatgaggaagaattgagacaagttgataaagtaagaatttttgata

SEQ ID NO: 189513 - DNA, 76 bp, Homo sapiens
cgcagatgggaagatatctttaatcagcatgaggaagaattgagacaagttgataaagtaagaatttttgatattt

SEQ ID NO: 189514 - DNA, 77 bp, Homo sapiens
gatatctttaatcagcatgaggaagaattgagacaagttgataaagtaagaatttttgatatttttactctgagtca

SEQ ID NO: 189515 - DNA, 70 bp, Homo sapiens
gcattttaacaacaattaaaacaattactttcctttttgtttcaaaggacaaagaagatgaatcatcaga

SEQ ID NO: 189516 - DNA, 72 bp, Homo sapiens
caacaattaaaacaattactttcctttttgtttcaaaggacaaagaagatgaatcatcagacaatgatgaag

SEQ ID NO: 189517 - DNA, 76 bp, Homo sapiens
caattactttcctttttgtttcaaaggacaaagaagatgaatcatcagacaatgatgaagtatttcattcgattca

SEQ ID NO: 189518 - DNA, 78 bp, Homo sapiens
ttcctttttgtttcaaaggacaaagaagatgaatcatcagacaatgatgaagtatttcattcgattcaggctgaagtc

SEQ ID NO: 189519 - DNA, 84 bp, Homo sapiens
ttcaaaggacaaagaagatgaatcatcagacaatgatgaagtatttcattcgattcaggctgaagtccagatagagccattgaa

SEQ ID NO: 189520 - DNA, 84 bp, Homo sapiens
aaagaagatgaatcatcagacaatgatgaagtatttcattcgattcaggctgaagtccagatagagccattgaagccatacatt

SEQ ID NO: 189521 - DNA, 84 bp, Homo sapiens
aatcatcagacaatgatgaagtatttcattcgattcaggctgaagtccagatagagccattgaagccatacatttcaaatccta

SEQ ID NO: 189522 - DNA, 79 bp, Homo sapiens
acaatgatgaagtatttcattcgattcaggctgaagtccagatagagccattgaagccatacatttcaaatcctaaaaa

SEQ ID NO: 189523 - DNA, 76 bp, Homo sapiens
aagtatttcattcgattcaggctgaagtccagatagagccattgaagccatacatttcaaatcctaaaaaaattga

SEQ ID NO: 189524 - DNA, 74 bp, Homo sapiens
attcgattcaggctgaagtccagatagagccattgaagccatacatttcaaatcctaaaaaaattgaggtaaat

SEQ ID NO: 189525 - DNA, 72 bp, Homo sapiens
aggctgaagtccagatagagccattgaagccatacatttcaaatcctaaaaaaattgaggtaaatttttcaa

SEQ ID NO: 189526 - DNA, 72 bp, Homo sapiens
ccagatagagccattgaagccatacatttcaaatcctaaaaaaattgaggtaaatttttcaatatgagttgt

SEQ ID NO: 189527 - DNA, 72 bp, Homo sapiens
ccattgaagccatacatttcaaatcctaaaaaaattgaggtaaatttttcaatatgagttgttgtgacatta

SEQ ID NO: 189528 - DNA, 79 bp, Homo sapiens
attaagagctcagtacaatttatgatcaagaattctactgaagtattgcattgtgtctttaaggttcaagagagatctc

SEQ ID NO: 189529 - DNA, 79 bp, Homo sapiens
agctcagtacaatttatgatcaagaattctactgaagtattgcattgtgtctttaaggttcaagagagatctccttctg

SEQ ID NO: 189530 - DNA, 78 bp, Homo sapiens
atttatgatcaagaattctactgaagtattgcattgtgtctttaaggttcaagagagatctccttctgtgcctaacaa

SEQ ID NO: 189531 - DNA, 77 bp, Homo sapiens
aagaattctactgaagtattgcattgtgtctttaaggttcaagagagatctccttctgtgcctaacaaccaggatca

SEQ ID NO: 189532 - DNA, 81 bp, Homo sapiens
aagtattgcattgtgtctttaaggttcaagagagatctccttctgtgcctaacaaccaggatcatgcacatcatgtcaagt

SEQ ID NO: 189533 - DNA, 81 bp, Homo sapiens
attgtgtctttaaggttcaagagagatctccttctgtgcctaacaaccaggatcatgcacatcatgtcaagttctcttcaa

SEQ ID NO: 189534 - DNA, 81 bp, Homo sapiens
tttaaggttcaagagagatctccttctgtgcctaacaaccaggatcatgcacatcatgtcaagttctcttcaaggtatgtg

SEQ ID NO: 189535 - DNA, 83 bp, Homo sapiens
agagatctccttctgtgcctaacaaccaggatcatgcacatcatgtcaagttctcttcaaggtatgtgtctttgatttctata

SEQ ID NO: 189536 - DNA, 80 bp, Homo sapiens
ttctgtgcctaacaaccaggatcatgcacatcatgtcaagttctcttcaaggtatgtgtctttgatttctatattaaaat

SEQ ID NO: 189537 - DNA, 80 bp, Homo sapiens
gcctaacaaccaggatcatgcacatcatgtcaagttctcttcaaggtatgtgtctttgatttctatattaaaattattca

SEQ ID NO: 189538 - DNA, 81 bp, Homo sapiens
caggatcatgcacatcatgtcaagttctcttcaaggtatgtgtctttgatttctatattaaaattattcataattatcaaa

SEQ ID NO: 189539 - DNA, 77 bp, Homo sapiens
cacatcatgtcaagttctcttcaaggtatgtgtctttgatttctatattaaaattattcataattatcaaatggaaa

SEQ ID NO: 189540 - DNA, 75 bp, Homo sapiens
attccctttatgaatgttaggacatggcacatgcttttctgtcttttcattagcgttcctcagcggtctcttttg

SEQ ID NO: 189541 - DNA, 77 bp, Homo sapiens
aatgttaggacatggcacatgcttttctgtcttttcattagcgttcctcagcggtctcttttggaacaagctcagaa

SEQ ID NO: 189542 - DNA, 80 bp, Homo sapiens
atggcacatgcttttctgtcttttcattagcgttcctcagcggtctcttttggaacaagctcagaagcccattgacatca

SEQ ID NO: 189543 - DNA, 76 bp, Homo sapiens
ttttctgtcttttcattagcgttcctcagcggtctcttttggaacaagctcagaagcccattgacatcagacaaag

SEQ ID NO: 189544 - DNA, 77 bp, Homo sapiens
tttcattagcgttcctcagcggtctcttttggaacaagctcagaagcccattgacatcagacaaaggagttcgcaaa

SEQ ID NO: 189545 - DNA, 76 bp, Homo sapiens
gttcctcagcggtctcttttggaacaagctcagaagcccattgacatcagacaaaggagttcgcaaaatcgtcaaa

SEQ ID NO: 189546 - DNA, 75 bp, Homo sapiens
cggtctcttttggaacaagctcagaagcccattgacatcagacaaaggagttcgcaaaatcgtcaaaattggctg

SEQ ID NO: 189547 - DNA, 79 bp, Homo sapiens
cttttggaacaagctcagaagcccattgacatcagacaaaggagttcgcaaaatcgtcaaaattggctggcagcatcag

SEQ ID NO: 189548 - DNA, 82 bp, Homo sapiens
tcagaagcccattgacatcagacaaaggagttcgcaaaatcgtcaaaattggctggcagcatcaggtgattcaaagcacaaa

SEQ ID NO: 189549 - DNA, 78 bp, Homo sapiens
attgacatcagacaaaggagttcgcaaaatcgtcaaaattggctggcagcatcaggtgattcaaagcacaaaatttta

SEQ ID NO: 189550 - DNA, 76 bp, Homo sapiens
acaaaggagttcgcaaaatcgtcaaaattggctggcagcatcaggtgattcaaagcacaaaattttagcaggcaaa

SEQ ID NO: 189551 - DNA, 78 bp, Homo sapiens
ggagttcgcaaaatcgtcaaaattggctggcagcatcaggtgattcaaagcacaaaattttagcaggcaaaacacaga

SEQ ID NO: 189552 - DNA, 75 bp, Homo sapiens
aatggctgtaatcaccattgttactaatgtgtttttggcattccatagaatcttcttctgaggaagaaagtcctg

SEQ ID NO: 189553 - DNA, 76 bp, Homo sapiens
taatcaccattgttactaatgtgtttttggcattccatagaatcttcttctgaggaagaaagtcctgtgactggaa

SEQ ID NO: 189554 - DNA, 73 bp, Homo sapiens
attgttactaatgtgtttttggcattccatagaatcttcttctgaggaagaaagtcctgtgactggaaggagg

SEQ ID NO: 189555 - DNA, 78 bp, Homo sapiens
atgtgtttttggcattccatagaatcttcttctgaggaagaaagtcctgtgactggaaggaggtctcagtcatcacca

SEQ ID NO: 189556 - DNA, 77 bp, Homo sapiens
tccatagaatcttcttctgaggaagaaagtcctgtgactggaaggaggtctcagtcatcaccaccttattctactat

SEQ ID NO: 189557 - DNA, 78 bp, Homo sapiens
aatcttcttctgaggaagaaagtcctgtgactggaaggaggtctcagtcatcaccaccttattctactattgatcaga

SEQ ID NO: 189558 - DNA, 76 bp, Homo sapiens
aggaagaaagtcctgtgactggaaggaggtctcagtcatcaccaccttattctactattgatcagaagttgctggt

SEQ ID NO: 189559 - DNA, 79 bp, Homo sapiens
aaagtcctgtgactggaaggaggtctcagtcatcaccaccttattctactattgatcagaagttgctggttgacatcca

SEQ ID NO: 189560 - DNA, 79 bp, Homo sapiens
gaaggaggtctcagtcatcaccaccttattctactattgatcagaagttgctggttgacatccatgtaagtttccatct

SEQ ID NO: 189561 - DNA, 80 bp, Homo sapiens
tcagtcatcaccaccttattctactattgatcagaagttgctggttgacatccatgtaagtttccatcttaacacattaa

SEQ ID NO: 189562 - DNA, 77 bp, Homo sapiens
accaccttattctactattgatcagaagttgctggttgacatccatgtaagtttccatcttaacacattaatgtcta

SEQ ID NO: 189563 - DNA, 77 bp, Homo sapiens
ttattctactattgatcagaagttgctggttgacatccatgtaagtttccatcttaacacattaatgtctattattt

SEQ ID NO: 189564 - DNA, 72 bp, Homo sapiens
aaaatgaaagctactagaggctacattaacctttcttgtgcacacaggttccagatggatttaaagtaggaa

SEQ ID NO: 189565 - DNA, 71 bp, Homo sapiens
aaagctactagaggctacattaacctttcttgtgcacacaggttccagatggatttaaagtaggaaaaata

SEQ ID NO: 189566 - DNA, 71 bp, Homo sapiens
tacattaacctttcttgtgcacacaggttccagatggatttaaagtaggaaaaatatcaccccctgtatac

SEQ ID NO: 189567 - DNA, 72 bp, Homo sapiens
tttcttgtgcacacaggttccagatggatttaaagtaggaaaaatatcaccccctgtatacttgacaaacga

SEQ ID NO: 189568 - DNA, 69 bp, Homo sapiens
acacaggttccagatggatttaaagtaggaaaaatatcaccccctgtatacttgacaaacgaatgggta

SEQ ID NO: 189569 - DNA, 70 bp, Homo sapiens
ttccagatggatttaaagtaggaaaaatatcaccccctgtatacttgacaaacgaatgggtaggctataa

SEQ ID NO: 189570 - DNA, 72 bp, Homo sapiens
ttaaagtaggaaaaatatcaccccctgtatacttgacaaacgaatgggtaggctataatgcactctctgaaa

SEQ ID NO: 189571 - DNA, 72 bp, Homo sapiens
aaaaatatcaccccctgtatacttgacaaacgaatgggtaggctataatgcactctctgaaatcttccggaa

SEQ ID NO: 189572 - DNA, 73 bp, Homo sapiens
cccctgtatacttgacaaacgaatgggtaggctataatgcactctctgaaatcttccggaatgattggttaac

SEQ ID NO: 189573 - DNA, 75 bp, Homo sapiens
tatacttgacaaacgaatgggtaggctataatgcactctctgaaatcttccggaatgattggttaactccggcac

SEQ ID NO: 189574 - DNA, 75 bp, Homo sapiens
aaacgaatgggtaggctataatgcactctctgaaatcttccggaatgattggttaactccggcacctgtcattca

SEQ ID NO: 189575 - DNA, 78 bp, Homo sapiens
ggtaggctataatgcactctctgaaatcttccggaatgattggttaactccggcacctgtcattcagccacctgaaga

SEQ ID NO: 189576 - DNA, 77 bp, Homo sapiens
actctctgaaatcttccggaatgattggttaactccggcacctgtcattcagccacctgaagaggatggtgattatg

SEQ ID NO: 189577 - DNA, 75 bp, Homo sapiens
aaatcttccggaatgattggttaactccggcacctgtcattcagccacctgaagaggatggtgattatgttgaac

SEQ ID NO: 189578 - DNA, 84 bp, Homo sapiens
atgattggttaactccggcacctgtcattcagccacctgaagaggatggtgattatgttgaactctatgatgccagtgctgata

SEQ ID NO: 189579 - DNA, 85 bp, Homo sapiens
tggttaactccggcacctgtcattcagccacctgaagaggatggtgattatgttgaactctatgatgccagtgctgatactgatg

SEQ ID NO: 189580 - DNA, 89 bp, Homo sapiens
tgatgatgatgagtctaatgatacttttgaagatacctatgatcatgccaatggcaatgatgacttggataaccaggttgatcaggcta

SEQ ID NO: 189581 - DNA, 85 bp, Homo sapiens
atgagtctaatgatacttttgaagatacctatgatcatgccaatggcaatgatgacttggataaccaggttgatcaggctaatga

SEQ ID NO: 189582 - DNA, 82 bp, Homo sapiens
atacttttgaagatacctatgatcatgccaatggcaatgatgacttggataaccaggttgatcaggctaatgatgtttgtaa

SEQ ID NO: 189583 - DNA, 85 bp, Homo sapiens
ttgaagatacctatgatcatgccaatggcaatgatgacttggataaccaggttgatcaggctaatgatgtttgtaaagaccatga

SEQ ID NO: 189584 - DNA, 85 bp, Homo sapiens
atcatgccaatggcaatgatgacttggataaccaggttgatcaggctaatgatgtttgtaaagaccatgatgatgacaacaataa

SEQ ID NO: 189585 - DNA, 80 bp, Homo sapiens
aatggcaatgatgacttggataaccaggttgatcaggctaatgatgtttgtaaagaccatgatgatgacaacaataagtt

SEQ ID NO: 189586 - DNA, 82 bp, Homo sapiens
atgatgacttggataaccaggttgatcaggctaatgatgtttgtaaagaccatgatgatgacaacaataagtttgttgatga

SEQ ID NO: 189587 - DNA, 80 bp, Homo sapiens
ggataaccaggttgatcaggctaatgatgtttgtaaagaccatgatgatgacaacaataagtttgttgatgatgtaaata

SEQ ID NO: 189588 - DNA, 80 bp, Homo sapiens
gttgatcaggctaatgatgtttgtaaagaccatgatgatgacaacaataagtttgttgatgatgtaaataataattatta

SEQ ID NO: 189589 - DNA, 79 bp, Homo sapiens
tgatgtttgtaaagaccatgatgatgacaacaataagtttgttgatgatgtaaataataattattatgaggcgcctagt

SEQ ID NO: 189590 - DNA, 77 bp, Homo sapiens
aagaccatgatgatgacaacaataagtttgttgatgatgtaaataataattattatgaggcgcctagttgtccaagg

SEQ ID NO: 189591 - DNA, 70 bp, Homo sapiens
acaacaataagtttgttgatgatgtaaataataattattatgaggcgcctagttgtccaaggttggtttt

SEQ ID NO: 189592 - DNA, 70 bp, Homo sapiens
gtttgttgatgatgtaaataataattattatgaggcgcctagttgtccaaggttggtttttttgaattac

SEQ ID NO: 189593 - DNA, 69 bp, Homo sapiens
aaataataattattatgaggcgcctagttgtccaaggttggtttttttgaattacttatactctccatg

SEQ ID NO: 189594 - DNA, 80 bp, Homo sapiens
atgtgtttttattgcgtgactttctttcattaattggagcttgttgtcagggcaagctatggcagagatggaagctgcaa

SEQ ID NO: 189595 - DNA, 83 bp, Homo sapiens
tattgcgtgactttctttcattaattggagcttgttgtcagggcaagctatggcagagatggaagctgcaagcaagatggtta

SEQ ID NO: 189596 - DNA, 83 bp, Homo sapiens
ttctttcattaattggagcttgttgtcagggcaagctatggcagagatggaagctgcaagcaagatggttatgatggaagtcg

SEQ ID NO: 189597 - DNA, 82 bp, Homo sapiens
ttaattggagcttgttgtcagggcaagctatggcagagatggaagctgcaagcaagatggttatgatggaagtcgtggaaaa

SEQ ID NO: 189598 - DNA, 82 bp, Homo sapiens
ttgttgtcagggcaagctatggcagagatggaagctgcaagcaagatggttatgatggaagtcgtggaaaagaggaagccta

SEQ ID NO: 189599 - DNA, 82 bp, Homo sapiens
agctatggcagagatggaagctgcaagcaagatggttatgatggaagtcgtggaaaagaggaagcctacagaggctatggaa

SEQ ID NO: 189600 - DNA, 81 bp, Homo sapiens
agagatggaagctgcaagcaagatggttatgatggaagtcgtggaaaagaggaagcctacagaggctatggaagccataca

SEQ ID NO: 189601 - DNA, 80 bp, Homo sapiens
ctgcaagcaagatggttatgatggaagtcgtggaaaagaggaagcctacagaggctatggaagccatacagccaatagaa

SEQ ID NO: 189602 - DNA, 78 bp, Homo sapiens
aagatggttatgatggaagtcgtggaaaagaggaagcctacagaggctatggaagccatacagccaatagaagccatg

SEQ ID NO: 189603 - DNA, 78 bp, Homo sapiens
ttatgatggaagtcgtggaaaagaggaagcctacagaggctatggaagccatacagccaatagaagccatggaggaag

SEQ ID NO: 189604 - DNA, 81 bp, Homo sapiens
tggaaaagaggaagcctacagaggctatggaagccatacagccaatagaagccatggaggaagtgcagccagtgaggacaa

SEQ ID NO: 189605 - DNA, 84 bp, Homo sapiens
aggaagcctacagaggctatggaagccatacagccaatagaagccatggaggaagtgcagccagtgaggacaatgcagccattg

SEQ ID NO: 189606 - DNA, 87 bp, Homo sapiens
tacagaggctatggaagccatacagccaatagaagccatggaggaagtgcagccagtgaggacaatgcagccattggagatcaggaa

SEQ ID NO: 189607 - DNA, 87 bp, Homo sapiens
aagccatacagccaatagaagccatggaggaagtgcagccagtgaggacaatgcagccattggagatcaggaagaacatgcagccaa

SEQ ID NO: 189608 - DNA, 87 bp, Homo sapiens
atacagccaatagaagccatggaggaagtgcagccagtgaggacaatgcagccattggagatcaggaagaacatgcagccaatatag

SEQ ID NO: 189609 - DNA, 86 bp, Homo sapiens
aagccatggaggaagtgcagccagtgaggacaatgcagccattggagatcaggaagaacatgcagccaatataggcagtgaaagaa

SEQ ID NO: 189610 - DNA, 87 bp, Homo sapiens
aggaagtgcagccagtgaggacaatgcagccattggagatcaggaagaacatgcagccaatataggcagtgaaagaagaggcagtga

SEQ ID NO: 189611 - DNA, 85 bp, Homo sapiens
agtgaggacaatgcagccattggagatcaggaagaacatgcagccaatataggcagtgaaagaagaggcagtgagggtgatggag

SEQ ID NO: 189612 - DNA, 83 bp, Homo sapiens
acaatgcagccattggagatcaggaagaacatgcagccaatataggcagtgaaagaagaggcagtgagggtgatggaggtaag

SEQ ID NO: 189613 - DNA, 79 bp, Homo sapiens
ttggagatcaggaagaacatgcagccaatataggcagtgaaagaagaggcagtgagggtgatggaggtaagggagtcgt

SEQ ID NO: 189614 - DNA, 78 bp, Homo sapiens
atcaggaagaacatgcagccaatataggcagtgaaagaagaggcagtgagggtgatggaggtaagggagtcgttcgaa

SEQ ID NO: 189615 - DNA, 78 bp, Homo sapiens
atgcagccaatataggcagtgaaagaagaggcagtgagggtgatggaggtaagggagtcgttcgaaccagtgaagaga

SEQ ID NO: 189616 - DNA, 75 bp, Homo sapiens
aatataggcagtgaaagaagaggcagtgagggtgatggaggtaagggagtcgttcgaaccagtgaagagagtgga

SEQ ID NO: 189617 - DNA, 74 bp, Homo sapiens
agaagaggcagtgagggtgatggaggtaagggagtcgttcgaaccagtgaagagagtggagcccttggactcaa

SEQ ID NO: 189618 - DNA, 74 bp, Homo sapiens
agtgagggtgatggaggtaagggagtcgttcgaaccagtgaagagagtggagcccttggactcaatggagaaga

SEQ ID NO: 189619 - DNA, 72 bp, Homo sapiens
ggtgatggaggtaagggagtcgttcgaaccagtgaagagagtggagcccttggactcaatggagaagaaaat

SEQ ID NO: 189620 - DNA, 77 bp, Homo sapiens
taagggagtcgttcgaaccagtgaagagagtggagcccttggactcaatggagaagaaaattgctcagagacagatg

SEQ ID NO: 189621 - DNA, 79 bp, Homo sapiens
ttcgaaccagtgaagagagtggagcccttggactcaatggagaagaaaattgctcagagacagatggtccaggattgaa

SEQ ID NO: 189622 - DNA, 79 bp, Homo sapiens
aagagagtggagcccttggactcaatggagaagaaaattgctcagagacagatggtccaggattgaagagacctgcgtc

SEQ ID NO: 189623 - DNA, 78 bp, Homo sapiens
agcccttggactcaatggagaagaaaattgctcagagacagatggtccaggattgaagagacctgcgtctcaggactt

SEQ ID NO: 189624 - DNA, 78 bp, Homo sapiens
aagaaaattgctcagagacagatggtccaggattgaagagacctgcgtctcaggactttgaatatctacaggaggtaa

SEQ ID NO: 189625 - DNA, 81 bp, Homo sapiens
tcagagacagatggtccaggattgaagagacctgcgtctcaggactttgaatatctacaggaggtaatgcaccatttgaaa

SEQ ID NO: 189626 - DNA, 79 bp, Homo sapiens
acagatggtccaggattgaagagacctgcgtctcaggactttgaatatctacaggaggtaatgcaccatttgaaaagca

SEQ ID NO: 189627 - DNA, 78 bp, Homo sapiens
attgaagagacctgcgtctcaggactttgaatatctacaggaggtaatgcaccatttgaaaagcagattgaactcctc

SEQ ID NO: 189628 - DNA, 66 bp, Homo sapiens
ccactgttaacctactaatgaaataaaaattggtttttggacttcttttaggagccaggtggtgga

SEQ ID NO: 189629 - DNA, 68 bp, Homo sapiens
tactaatgaaataaaaattggtttttggacttcttttaggagccaggtggtggaaatgaggcctcaaa

SEQ ID NO: 189630 - DNA, 69 bp, Homo sapiens
aaataaaaattggtttttggacttcttttaggagccaggtggtggaaatgaggcctcaaatgccattga

SEQ ID NO: 189631 - DNA, 76 bp, Homo sapiens
gtttttggacttcttttaggagccaggtggtggaaatgaggcctcaaatgccattgactcaggtgctgcaccgtca

SEQ ID NO: 189632 - DNA, 82 bp, Homo sapiens
acttcttttaggagccaggtggtggaaatgaggcctcaaatgccattgactcaggtgctgcaccgtcagcacctgatcatga

SEQ ID NO: 189633 - DNA, 86 bp, Homo sapiens
caggtggtggaaatgaggcctcaaatgccattgactcaggtgctgcaccgtcagcacctgatcatgagagtgacaataaggacata

SEQ ID NO: 189634 - DNA, 89 bp, Homo sapiens
aaatgaggcctcaaatgccattgactcaggtgctgcaccgtcagcacctgatcatgagagtgacaataaggacatatcagaatcatcaa

SEQ ID NO: 189635 - DNA, 91 bp, Homo sapiens
tcaaatgccattgactcaggtgctgcaccgtcagcacctgatcatgagagtgacaataaggacatatcagaatcatcaacacaatcagatt

SEQ ID NO: 189636 - DNA, 88 bp, Homo sapiens
ccattgactcaggtgctgcaccgtcagcacctgatcatgagagtgacaataaggacatatcagaatcatcaacacaatcagatttttc

SEQ ID NO: 189637 - DNA, 92 bp, Homo sapiens
tgctgcaccgtcagcacctgatcatgagagtgacaataaggacatatcagaatcatcaacacaatcagatttttctgccaatcactcatctc

SEQ ID NO: 189638 - DNA, 89 bp, Homo sapiens
tcagcacctgatcatgagagtgacaataaggacatatcagaatcatcaacacaatcagatttttctgccaatcactcatctccttccaa

SEQ ID NO: 189639 - DNA, 83 bp, Homo sapiens
atcatgagagtgacaataaggacatatcagaatcatcaacacaatcagatttttctgccaatcactcatctccttccaaaggt

SEQ ID NO: 189640 - DNA, 81 bp, Homo sapiens
agagtgacaataaggacatatcagaatcatcaacacaatcagatttttctgccaatcactcatctccttccaaaggttctg

SEQ ID NO: 189641 - DNA, 82 bp, Homo sapiens
ataaggacatatcagaatcatcaacacaatcagatttttctgccaatcactcatctccttccaaaggttctgggatgtctgc

SEQ ID NO: 189642 - DNA, 81 bp, Homo sapiens
agaatcatcaacacaatcagatttttctgccaatcactcatctccttccaaaggttctgggatgtctgctgatgctaactt

SEQ ID NO: 189643 - DNA, 81 bp, Homo sapiens
aacacaatcagatttttctgccaatcactcatctccttccaaaggttctgggatgtctgctgatgctaactttgccagtgc

SEQ ID NO: 189644 - DNA, 82 bp, Homo sapiens
atttttctgccaatcactcatctccttccaaaggttctgggatgtctgctgatgctaactttgccagtgccatctgtgagtg

SEQ ID NO: 189645 - DNA, 83 bp, Homo sapiens
aatcactcatctccttccaaaggttctgggatgtctgctgatgctaactttgccagtgccatctgtgagtgtgttcaatgtaa

SEQ ID NO: 189646 - DNA, 82 bp, Homo sapiens
atctccttccaaaggttctgggatgtctgctgatgctaactttgccagtgccatctgtgagtgtgttcaatgtaatctctaa

SEQ ID NO: 189647 - DNA, 83 bp, Homo sapiens
aaaggttctgggatgtctgctgatgctaactttgccagtgccatctgtgagtgtgttcaatgtaatctctaaatgctactatc

SEQ ID NO: 189648 - DNA, 71 bp, Homo sapiens
acagaactagtaatttcccttattatcttccccttacatctttgcagtatacgctggattcgtagaagtac

SEQ ID NO: 189649 - DNA, 72 bp, Homo sapiens
tagtaatttcccttattatcttccccttacatctttgcagtatacgctggattcgtagaagtacctgaggaa

SEQ ID NO: 189650 - DNA, 74 bp, Homo sapiens
ttattatcttccccttacatctttgcagtatacgctggattcgtagaagtacctgaggaatcacctaagcaacc

SEQ ID NO: 189651 - DNA, 76 bp, Homo sapiens
ccttacatctttgcagtatacgctggattcgtagaagtacctgaggaatcacctaagcaaccctctgaagtcaatg

SEQ ID NO: 189652 - DNA, 75 bp, Homo sapiens
atctttgcagtatacgctggattcgtagaagtacctgaggaatcacctaagcaaccctctgaagtcaatgttaac

SEQ ID NO: 189653 - DNA, 75 bp, Homo sapiens
tatacgctggattcgtagaagtacctgaggaatcacctaagcaaccctctgaagtcaatgttaacccactctatg

SEQ ID NO: 189654 - DNA, 76 bp, Homo sapiens
attcgtagaagtacctgaggaatcacctaagcaaccctctgaagtcaatgttaacccactctatgtctctcctgca

SEQ ID NO: 189655 - DNA, 75 bp, Homo sapiens
agtacctgaggaatcacctaagcaaccctctgaagtcaatgttaacccactctatgtctctcctgcatgtaaaaa

SEQ ID NO: 189656 - DNA, 74 bp, Homo sapiens
aatcacctaagcaaccctctgaagtcaatgttaacccactctatgtctctcctgcatgtaaaaaaccactaatc

SEQ ID NO: 189657 - DNA, 75 bp, Homo sapiens
aaccctctgaagtcaatgttaacccactctatgtctctcctgcatgtaaaaaaccactaatccacatgtatgaaa

SEQ ID NO: 189658 - DNA, 75 bp, Homo sapiens
aagtcaatgttaacccactctatgtctctcctgcatgtaaaaaaccactaatccacatgtatgaaaaggagttca

SEQ ID NO: 189659 - DNA, 77 bp, Homo sapiens
ttaacccactctatgtctctcctgcatgtaaaaaaccactaatccacatgtatgaaaaggagttcacttctgagatc

SEQ ID NO: 189660 - DNA, 79 bp, Homo sapiens
tatgtctctcctgcatgtaaaaaaccactaatccacatgtatgaaaaggagttcacttctgagatctgctgtggttctt

SEQ ID NO: 189661 - DNA, 77 bp, Homo sapiens
tcctgcatgtaaaaaaccactaatccacatgtatgaaaaggagttcacttctgagatctgctgtggttctttgtggg

SEQ ID NO: 189662 - DNA, 73 bp, Homo sapiens
aaaaaccactaatccacatgtatgaaaaggagttcacttctgagatctgctgtggttctttgtggggtgagtt

SEQ ID NO: 189663 - DNA, 74 bp, Homo sapiens
taatccacatgtatgaaaaggagttcacttctgagatctgctgtggttctttgtggggtgagtttgttttgttt

SEQ ID NO: 189664 - DNA, 76 bp, Homo sapiens
atgaaaaataatctgagctaatatagcactttttatatatgaacaggagtcaatttgctgttgggaacccgatcta

SEQ ID NO: 189665 - DNA, 78 bp, Homo sapiens
ataatctgagctaatatagcactttttatatatgaacaggagtcaatttgctgttgggaacccgatctaatctatatc

SEQ ID NO: 189666 - DNA, 79 bp, Homo sapiens
taatatagcactttttatatatgaacaggagtcaatttgctgttgggaacccgatctaatctatatctgatggacagaa

SEQ ID NO: 189667 - DNA, 76 bp, Homo sapiens
tttttatatatgaacaggagtcaatttgctgttgggaacccgatctaatctatatctgatggacagaagtggaaag

SEQ ID NO: 189668 - DNA, 80 bp, Homo sapiens
tatatgaacaggagtcaatttgctgttgggaacccgatctaatctatatctgatggacagaagtggaaaggctgacatta

SEQ ID NO: 189669 - DNA, 77 bp, Homo sapiens
tcaatttgctgttgggaacccgatctaatctatatctgatggacagaagtggaaaggctgacattactaaacttata

SEQ ID NO: 189670 - DNA, 75 bp, Homo sapiens
ttgggaacccgatctaatctatatctgatggacagaagtggaaaggctgacattactaaacttataaggcgaaga

SEQ ID NO: 189671 - DNA, 74 bp, Homo sapiens
aacccgatctaatctatatctgatggacagaagtggaaaggctgacattactaaacttataaggcgaagaccat

SEQ ID NO: 189672 - DNA, 77 bp, Homo sapiens
atctatatctgatggacagaagtggaaaggctgacattactaaacttataaggcgaagaccattccgccagattcaa

SEQ ID NO: 189673 - DNA, 74 bp, Homo sapiens
atggacagaagtggaaaggctgacattactaaacttataaggcgaagaccattccgccagattcaagtcttaga

SEQ ID NO: 189674 - DNA, 74 bp, Homo sapiens
tggaaaggctgacattactaaacttataaggcgaagaccattccgccagattcaagtcttagagccactcaatt

SEQ ID NO: 189675 - DNA, 75 bp, Homo sapiens
acattactaaacttataaggcgaagaccattccgccagattcaagtcttagagccactcaatttgctgattacca

SEQ ID NO: 189676 - DNA, 76 bp, Homo sapiens
taaacttataaggcgaagaccattccgccagattcaagtcttagagccactcaatttgctgattaccatctcaggt

SEQ ID NO: 189677 - DNA, 76 bp, Homo sapiens
gaagaccattccgccagattcaagtcttagagccactcaatttgctgattaccatctcaggtttgtttaagaacta

SEQ ID NO: 189678 - DNA, 73 bp, Homo sapiens
attccgccagattcaagtcttagagccactcaatttgctgattaccatctcaggtttgtttaagaactaaaat

SEQ ID NO: 189679 - DNA, 75 bp, Homo sapiens
agattcaagtcttagagccactcaatttgctgattaccatctcaggtttgtttaagaactaaaattagctgagta

SEQ ID NO: 189680 - DNA, 72 bp, Homo sapiens
gaaaagaaagactgattttaaatactgtatattttcttatctatcaggtcataagaacagacttcgggtgta

SEQ ID NO: 189681 - DNA, 76 bp, Homo sapiens
agactgattttaaatactgtatattttcttatctatcaggtcataagaacagacttcgggtgtatcatctgacctg

SEQ ID NO: 189682 - DNA, 76 bp, Homo sapiens
aatactgtatattttcttatctatcaggtcataagaacagacttcgggtgtatcatctgacctggttgaggaacaa

SEQ ID NO: 189683 - DNA, 76 bp, Homo sapiens
ttttcttatctatcaggtcataagaacagacttcgggtgtatcatctgacctggttgaggaacaagattttgaata

SEQ ID NO: 189684 - DNA, 79 bp, Homo sapiens
ttatctatcaggtcataagaacagacttcgggtgtatcatctgacctggttgaggaacaagattttgaataatgatcca

SEQ ID NO: 189685 - DNA, 74 bp, Homo sapiens
ataagaacagacttcgggtgtatcatctgacctggttgaggaacaagattttgaataatgatccagaaagtaaa

SEQ ID NO: 189686 - DNA, 73 bp, Homo sapiens
acagacttcgggtgtatcatctgacctggttgaggaacaagattttgaataatgatccagaaagtaaaagaag

SEQ ID NO: 189687 - DNA, 74 bp, Homo sapiens
ggtgtatcatctgacctggttgaggaacaagattttgaataatgatccagaaagtaaaagaaggcaagaagaaa

SEQ ID NO: 189688 - DNA, 74 bp, Homo sapiens
acctggttgaggaacaagattttgaataatgatccagaaagtaaaagaaggcaagaagaaatgctgaagacaga

SEQ ID NO: 189689 - DNA, 75 bp, Homo sapiens
aacaagattttgaataatgatccagaaagtaaaagaaggcaagaagaaatgctgaagacagaggaagcctgcaaa

SEQ ID NO: 189690 - DNA, 78 bp, Homo sapiens
ttttgaataatgatccagaaagtaaaagaaggcaagaagaaatgctgaagacagaggaagcctgcaaagctattgata

SEQ ID NO: 189691 - DNA, 76 bp, Homo sapiens
aatgatccagaaagtaaaagaaggcaagaagaaatgctgaagacagaggaagcctgcaaagctattgataagttaa

SEQ ID NO: 189692 - DNA, 76 bp, Homo sapiens
aagtaaaagaaggcaagaagaaatgctgaagacagaggaagcctgcaaagctattgataagttaacaggctgtgaa

SEQ ID NO: 189693 - DNA, 78 bp, Homo sapiens
aagaagaaatgctgaagacagaggaagcctgcaaagctattgataagttaacaggctgtgaacacttcagtgtccgta

SEQ ID NO: 189694 - DNA, 79 bp, Homo sapiens
atgctgaagacagaggaagcctgcaaagctattgataagttaacaggctgtgaacacttcagtgtccgtaagccacatt

SEQ ID NO: 189695 - DNA, 77 bp, Homo sapiens
agaggaagcctgcaaagctattgataagttaacaggctgtgaacacttcagtgtccgtaagccacatttcatgttta

SEQ ID NO: 189696 - DNA, 80 bp, Homo sapiens
tgcaaagctattgataagttaacaggctgtgaacacttcagtgtccgtaagccacatttcatgtttactacagctatata

SEQ ID NO: 189697 - DNA, 76 bp, Homo sapiens
tattgataagttaacaggctgtgaacacttcagtgtccgtaagccacatttcatgtttactacagctatataaatt

SEQ ID NO: 189698 - DNA, 73 bp, Homo sapiens
gtgttcttgttaactgtggcatcgttacttttttgtgttttatcattatagtccaacatgaagaaacaacata

SEQ ID NO: 189699 - DNA, 77 bp, Homo sapiens
ctgtggcatcgttacttttttgtgttttatcattatagtccaacatgaagaaacaacatatattgcaattgctttga

SEQ ID NO: 189700 - DNA, 77 bp, Homo sapiens
tcgttacttttttgtgttttatcattatagtccaacatgaagaaacaacatatattgcaattgctttgaaatcatca

SEQ ID NO: 189701 - DNA, 81 bp, Homo sapiens
tgttttatcattatagtccaacatgaagaaacaacatatattgcaattgctttgaaatcatcaattcacctttatgcatgg

SEQ ID NO: 189702 - DNA, 83 bp, Homo sapiens
tatcattatagtccaacatgaagaaacaacatatattgcaattgctttgaaatcatcaattcacctttatgcatgggcaccaa

SEQ ID NO: 189703 - DNA, 79 bp, Homo sapiens
aacatgaagaaacaacatatattgcaattgctttgaaatcatcaattcacctttatgcatgggcaccaaagtcctttga

SEQ ID NO: 189704 - DNA, 78 bp, Homo sapiens
aagaaacaacatatattgcaattgctttgaaatcatcaattcacctttatgcatgggcaccaaagtcctttgatgaaa

SEQ ID NO: 189705 - DNA, 79 bp, Homo sapiens
attgcaattgctttgaaatcatcaattcacctttatgcatgggcaccaaagtcctttgatgaaagcactgctattaaag

SEQ ID NO: 189706 - DNA, 80 bp, Homo sapiens
attgctttgaaatcatcaattcacctttatgcatgggcaccaaagtcctttgatgaaagcactgctattaaagtgagtga

SEQ ID NO: 189707 - DNA, 78 bp, Homo sapiens
atcatcaattcacctttatgcatgggcaccaaagtcctttgatgaaagcactgctattaaagtgagtgagctcctttt

SEQ ID NO: 189708 - DNA, 77 bp, Homo sapiens
tttatgcatgggcaccaaagtcctttgatgaaagcactgctattaaagtgagtgagctcctttttctttggattata

SEQ ID NO: 189709 - DNA, 74 bp, Homo sapiens
ggcaccaaagtcctttgatgaaagcactgctattaaagtgagtgagctcctttttctttggattatatgatttt

SEQ ID NO: 189710 - DNA, 79 bp, Homo sapiens
agtatatggtaggttaacatgtctggcccttttcattccctaccaagtatgcattgatcaatcagcagactctgaagga

SEQ ID NO: 189711 - DNA, 83 bp, Homo sapiens
ttaacatgtctggcccttttcattccctaccaagtatgcattgatcaatcagcagactctgaaggagactacatgtcctatca

SEQ ID NO: 189712 - DNA, 83 bp, Homo sapiens
tggcccttttcattccctaccaagtatgcattgatcaatcagcagactctgaaggagactacatgtcctatcaagcctatata

SEQ ID NO: 189713 - DNA, 83 bp, Homo sapiens
ttttcattccctaccaagtatgcattgatcaatcagcagactctgaaggagactacatgtcctatcaagcctatatacgaata

SEQ ID NO: 189714 - DNA, 84 bp, Homo sapiens
taccaagtatgcattgatcaatcagcagactctgaaggagactacatgtcctatcaagcctatatacgaatactggcaaaaata

SEQ ID NO: 189715 - DNA, 85 bp, Homo sapiens
attgatcaatcagcagactctgaaggagactacatgtcctatcaagcctatatacgaatactggcaaaaatacaggcagctgatc

SEQ ID NO: 189716 - DNA, 84 bp, Homo sapiens
atcagcagactctgaaggagactacatgtcctatcaagcctatatacgaatactggcaaaaatacaggcagctgatccagtgaa

SEQ ID NO: 189717 - DNA, 78 bp, Homo sapiens
tgaaggagactacatgtcctatcaagcctatatacgaatactggcaaaaatacaggcagctgatccagtgaaccggtt

SEQ ID NO: 189718 - DNA, 77 bp, Homo sapiens
actacatgtcctatcaagcctatatacgaatactggcaaaaatacaggcagctgatccagtgaaccggtttaagaga

SEQ ID NO: 189719 - DNA, 79 bp, Homo sapiens
tcctatcaagcctatatacgaatactggcaaaaatacaggcagctgatccagtgaaccggtttaagagaccagatgagc

SEQ ID NO: 189720 - DNA, 77 bp, Homo sapiens
ctatatacgaatactggcaaaaatacaggcagctgatccagtgaaccggtttaagagaccagatgagctccttcatt

SEQ ID NO: 189721 - DNA, 80 bp, Homo sapiens
atactggcaaaaatacaggcagctgatccagtgaaccggtttaagagaccagatgagctccttcatttgctgaagctcaa

SEQ ID NO: 189722 - DNA, 79 bp, Homo sapiens
aaatacaggcagctgatccagtgaaccggtttaagagaccagatgagctccttcatttgctgaagctcaaggcaaggaa

SEQ ID NO: 189723 - DNA, 79 bp, Homo sapiens
agctgatccagtgaaccggtttaagagaccagatgagctccttcatttgctgaagctcaaggcaaggaacttgaagaca

SEQ ID NO: 189724 - DNA, 76 bp, Homo sapiens
aaccggtttaagagaccagatgagctccttcatttgctgaagctcaaggcaaggaacttgaagacagcaaacagaa

SEQ ID NO: 189725 - DNA, 82 bp, Homo sapiens
tttaagagaccagatgagctccttcatttgctgaagctcaaggcaaggaacttgaagacagcaaacagaatgcagggtcata

SEQ ID NO: 189726 - DNA, 74 bp, Homo sapiens
gaatgtcatttttggccttttggccatatttggttttatattcacaggtatttccaacacttgatcataagcca

SEQ ID NO: 189727 - DNA, 73 bp, Homo sapiens
atttttggccttttggccatatttggttttatattcacaggtatttccaacacttgatcataagccagtgaca

SEQ ID NO: 189728 - DNA, 76 bp, Homo sapiens
tttggccatatttggttttatattcacaggtatttccaacacttgatcataagccagtgacagttgacctggctat

SEQ ID NO: 189729 - DNA, 76 bp, Homo sapiens
tggttttatattcacaggtatttccaacacttgatcataagccagtgacagttgacctggctattggttctgaaaa

SEQ ID NO: 189730 - DNA, 76 bp, Homo sapiens
tattcacaggtatttccaacacttgatcataagccagtgacagttgacctggctattggttctgaaaaaagactaa

SEQ ID NO: 189731 - DNA, 74 bp, Homo sapiens
tatttccaacacttgatcataagccagtgacagttgacctggctattggttctgaaaaaagactaaagattttc

SEQ ID NO: 189732 - DNA, 78 bp, Homo sapiens
acacttgatcataagccagtgacagttgacctggctattggttctgaaaaaagactaaagattttcttcagctcagca

SEQ ID NO: 189733 - DNA, 79 bp, Homo sapiens
ataagccagtgacagttgacctggctattggttctgaaaaaagactaaagattttcttcagctcagcagatggatatca

SEQ ID NO: 189734 - DNA, 82 bp, Homo sapiens
ttgacctggctattggttctgaaaaaagactaaagattttcttcagctcagcagatggatatcacctcatcgatgcagaatc

SEQ ID NO: 189735 - DNA, 82 bp, Homo sapiens
tattggttctgaaaaaagactaaagattttcttcagctcagcagatggatatcacctcatcgatgcagaatctgaggttatg

SEQ ID NO: 189736 - DNA, 86 bp, Homo sapiens
ttctgaaaaaagactaaagattttcttcagctcagcagatggatatcacctcatcgatgcagaatctgaggttatgtctgatgtga

SEQ ID NO: 189737 - DNA, 86 bp, Homo sapiens
aagactaaagattttcttcagctcagcagatggatatcacctcatcgatgcagaatctgaggttatgtctgatgtgaccctgccaa

SEQ ID NO: 189738 - DNA, 88 bp, Homo sapiens
tttcttcagctcagcagatggatatcacctcatcgatgcagaatctgaggttatgtctgatgtgaccctgccaaagaatgtaagataa

SEQ ID NO: 189739 - DNA, 86 bp, Homo sapiens
agcagatggatatcacctcatcgatgcagaatctgaggttatgtctgatgtgaccctgccaaagaatgtaagataacaccttcaga

SEQ ID NO: 189740 - DNA, 83 bp, Homo sapiens
atatcacctcatcgatgcagaatctgaggttatgtctgatgtgaccctgccaaagaatgtaagataacaccttcagattccta

SEQ ID NO: 189741 - DNA, 80 bp, Homo sapiens
atcgatgcagaatctgaggttatgtctgatgtgaccctgccaaagaatgtaagataacaccttcagattcctagaaatta

SEQ ID NO: 189742 - DNA, 74 bp, Homo sapiens
tctgagaaagaatataataaaaatactatttttccaagagtgctagattacaaaagctgtaatgatacaaggga

SEQ ID NO: 189743 - DNA, 73 bp, Homo sapiens
gaatataataaaaatactatttttccaagagtgctagattacaaaagctgtaatgatacaagggaaccatgtg

SEQ ID NO: 189744 - DNA, 74 bp, Homo sapiens
aaatactatttttccaagagtgctagattacaaaagctgtaatgatacaagggaaccatgtgtgctaaagaata

SEQ ID NO: 189745 - DNA, 75 bp, Homo sapiens
ttttccaagagtgctagattacaaaagctgtaatgatacaagggaaccatgtgtgctaaagaatatctagttact

SEQ ID NO: 189746 - DNA, 76 bp, Homo sapiens
aagagtgctagattacaaaagctgtaatgatacaagggaaccatgtgtgctaaagaatatctagttacttcaggaa

SEQ ID NO: 189747 - DNA, 79 bp, Homo sapiens
attacaaaagctgtaatgatacaagggaaccatgtgtgctaaagaatatctagttacttcaggaatcatctgagaagca

SEQ ID NO: 189748 - DNA, 83 bp, Homo sapiens
taatgatacaagggaaccatgtgtgctaaagaatatctagttacttcaggaatcatctgagaagcatctgaggctgtatggat

SEQ ID NO: 189749 - DNA, 85 bp, Homo sapiens
tacaagggaaccatgtgtgctaaagaatatctagttacttcaggaatcatctgagaagcatctgaggctgtatggatttgcagca

SEQ ID NO: 189750 - DNA, 83 bp, Homo sapiens
atgtgtgctaaagaatatctagttacttcaggaatcatctgagaagcatctgaggctgtatggatttgcagcagtccagtttt

SEQ ID NO: 189751 - DNA, 81 bp, Homo sapiens
taaagaatatctagttacttcaggaatcatctgagaagcatctgaggctgtatggatttgcagcagtccagtttttttcta

SEQ ID NO: 189752 - DNA, 79 bp, Homo sapiens
ttacttcaggaatcatctgagaagcatctgaggctgtatggatttgcagcagtccagtttttttctaaacagattttat

SEQ ID NO: 189753 - DNA, 78 bp, Homo sapiens
aatcatctgagaagcatctgaggctgtatggatttgcagcagtccagtttttttctaaacagattttattaagacaac

SEQ ID NO: 189754 - DNA, 73 bp, Homo sapiens
aagcatctgaggctgtatggatttgcagcagtccagtttttttctaaacagattttattaagacaaccttctt

SEQ ID NO: 189755 - DNA, 72 bp, Homo sapiens
aggctgtatggatttgcagcagtccagtttttttctaaacagattttattaagacaaccttctttcctgcaa

SEQ ID NO: 189756 - DNA, 69 bp, Homo sapiens
ggatttgcagcagtccagtttttttctaaacagattttattaagacaaccttctttcctgcaatttctt

SEQ ID NO: 189757 - DNA, 68 bp, Homo sapiens
cagcagtccagtttttttctaaacagattttattaagacaaccttctttcctgcaatttcttttactc

SEQ ID NO: 189758 - DNA, 67 bp, Homo sapiens
tttttctaaacagattttattaagacaaccttctttcctgcaatttcttttactctcttcctttatc

SEQ ID NO: 189759 - DNA, 65 bp, Homo sapiens
aaacagattttattaagacaaccttctttcctgcaatttcttttactctcttcctttatcttttt

SEQ ID NO: 189760 - DNA, 73 bp, Homo sapiens
agacaaccttctttcctgcaatttcttttactctcttcctttatcttttttttctgattcaattgctcatgca

SEQ ID NO: 189761 - DNA, 74 bp, Homo sapiens
ttctttcctgcaatttcttttactctcttcctttatcttttttttctgattcaattgctcatgcaagtgcccag

SEQ ID NO: 189762 - DNA, 73 bp, Homo sapiens
atttcttttactctcttcctttatcttttttttctgattcaattgctcatgcaagtgcccagggaacgcatta

SEQ ID NO: 189763 - DNA, 72 bp, Homo sapiens
ttttactctcttcctttatcttttttttctgattcaattgctcatgcaagtgcccagggaacgcattaaaat

SEQ ID NO: 189764 - DNA, 76 bp, Homo sapiens
ttatcttttttttctgattcaattgctcatgcaagtgcccagggaacgcattaaaattgcttttcgtctctggatc

SEQ ID NO: 189765 - DNA, 76 bp, Homo sapiens
ttttctgattcaattgctcatgcaagtgcccagggaacgcattaaaattgcttttcgtctctggatccccatttta

SEQ ID NO: 189766 - DNA, 75 bp, Homo sapiens
attcaattgctcatgcaagtgcccagggaacgcattaaaattgcttttcgtctctggatccccattttagttata

SEQ ID NO: 189767 - DNA, 70 bp, Homo sapiens
agggaacgcattaaaattgcttttcgtctctggatccccattttagttataaggattgttgttgctggga

SEQ ID NO: 189768 - DNA, 72 bp, Homo sapiens
attaaaattgcttttcgtctctggatccccattttagttataaggattgttgttgctgggacatggcctcaa

SEQ ID NO: 189769 - DNA, 75 bp, Homo sapiens
attgcttttcgtctctggatccccattttagttataaggattgttgttgctgggacatggcctcaagcacctggc

SEQ ID NO: 189770 - DNA, 75 bp, Homo sapiens
tggatccccattttagttataaggattgttgttgctgggacatggcctcaagcacctggcctgagtacgctgggt

SEQ ID NO: 189771 - DNA, 75 bp, Homo sapiens
ttttagttataaggattgttgttgctgggacatggcctcaagcacctggcctgagtacgctgggtttggcaagta

SEQ ID NO: 189772 - DNA, 75 bp, Homo sapiens
ttgttgttgctgggacatggcctcaagcacctggcctgagtacgctgggtttggcaagtatagtttctgactttt

SEQ ID NO: 189773 - DNA, 71 bp, Homo sapiens
tgggacatggcctcaagcacctggcctgagtacgctgggtttggcaagtatagtttctgactttttttttt

SEQ ID NO: 189774 - DNA, 77 bp, Homo sapiens
gtgataaaatattggacatataaatctttatgaaacataattccagcccctggaaatcattataccacagaatatca

SEQ ID NO: 189775 - DNA, 77 bp, Homo sapiens
tattggacatataaatctttatgaaacataattccagcccctggaaatcattataccacagaatatcatcattttac

SEQ ID NO: 189776 - DNA, 77 bp, Homo sapiens
taaatctttatgaaacataattccagcccctggaaatcattataccacagaatatcatcattttacctgattgcttg

SEQ ID NO: 189777 - DNA, 76 bp, Homo sapiens
tttatgaaacataattccagcccctggaaatcattataccacagaatatcatcattttacctgattgcttgggaat

SEQ ID NO: 189778 - DNA, 81 bp, Homo sapiens
ataattccagcccctggaaatcattataccacagaatatcatcattttacctgattgcttgggaattggcatgatgctcac

SEQ ID NO: 189779 - DNA, 83 bp, Homo sapiens
ccctggaaatcattataccacagaatatcatcattttacctgattgcttgggaattggcatgatgctcaccttcaatgctgaa

SEQ ID NO: 189780 - DNA, 85 bp, Homo sapiens
atcattataccacagaatatcatcattttacctgattgcttgggaattggcatgatgctcaccttcaatgctgaagccctctctg

SEQ ID NO: 189781 - DNA, 84 bp, Homo sapiens
aatatcatcattttacctgattgcttgggaattggcatgatgctcaccttcaatgctgaagccctctctgtggaagcaaatgaa

SEQ ID NO: 189782 - DNA, 82 bp, Homo sapiens
atcattttacctgattgcttgggaattggcatgatgctcaccttcaatgctgaagccctctctgtggaagcaaatgaacaac

SEQ ID NO: 189783 - DNA, 83 bp, Homo sapiens
attgcttgggaattggcatgatgctcaccttcaatgctgaagccctctctgtggaagcaaatgaacaactcttcaagaagatc

SEQ ID NO: 189784 - DNA, 82 bp, Homo sapiens
aattggcatgatgctcaccttcaatgctgaagccctctctgtggaagcaaatgaacaactcttcaagaagatccttgaaatg

SEQ ID NO: 189785 - DNA, 81 bp, Homo sapiens
atgatgctcaccttcaatgctgaagccctctctgtggaagcaaatgaacaactcttcaagaagatccttgaaatgtggaaa

SEQ ID NO: 189786 - DNA, 78 bp, Homo sapiens
accttcaatgctgaagccctctctgtggaagcaaatgaacaactcttcaagaagatccttgaaatgtggaaagacata

SEQ ID NO: 189787 - DNA, 77 bp, Homo sapiens
aagccctctctgtggaagcaaatgaacaactcttcaagaagatccttgaaatgtggaaagacataccatcttctata

SEQ ID NO: 189788 - DNA, 78 bp, Homo sapiens
tggaagcaaatgaacaactcttcaagaagatccttgaaatgtggaaagacataccatcttctataggtatgtatacaa

SEQ ID NO: 189789 - DNA, 77 bp, Homo sapiens
gcaaatgaacaactcttcaagaagatccttgaaatgtggaaagacataccatcttctataggtatgtatacaattta

SEQ ID NO: 189790 - DNA, 74 bp, Homo sapiens
aactcttcaagaagatccttgaaatgtggaaagacataccatcttctataggtatgtatacaatttatttcttc

SEQ ID NO: 189791 - DNA, 74 bp, Homo sapiens
gaagatccttgaaatgtggaaagacataccatcttctataggtatgtatacaatttatttcttcttcaggaccc

SEQ ID NO: 189792 - DNA, 71 bp, Homo sapiens
tttttctgattttttttcatttgtattgtagcttttgaatgtacacagcgaaccacaggatggggccaaaa

SEQ ID NO: 189793 - DNA, 72 bp, Homo sapiens
tttttttcatttgtattgtagcttttgaatgtacacagcgaaccacaggatggggccaaaaggccattgaag

SEQ ID NO: 189794 - DNA, 77 bp, Homo sapiens
tttgtattgtagcttttgaatgtacacagcgaaccacaggatggggccaaaaggccattgaagtgcgctctttgcaa

SEQ ID NO: 189795 - DNA, 75 bp, Homo sapiens
agcttttgaatgtacacagcgaaccacaggatggggccaaaaggccattgaagtgcgctctttgcaatccagggt

SEQ ID NO: 189796 - DNA, 75 bp, Homo sapiens
aatgtacacagcgaaccacaggatggggccaaaaggccattgaagtgcgctctttgcaatccagggttctggaaa

SEQ ID NO: 189797 - DNA, 76 bp, Homo sapiens
agcgaaccacaggatggggccaaaaggccattgaagtgcgctctttgcaatccagggttctggaaagtgagctgaa

SEQ ID NO: 189798 - DNA, 77 bp, Homo sapiens
tggggccaaaaggccattgaagtgcgctctttgcaatccagggttctggaaagtgagctgaagcgcaggtcaattaa

SEQ ID NO: 189799 - DNA, 78 bp, Homo sapiens
aaaaggccattgaagtgcgctctttgcaatccagggttctggaaagtgagctgaagcgcaggtcaattaagaagctga

SEQ ID NO: 189800 - DNA, 82 bp, Homo sapiens
attgaagtgcgctctttgcaatccagggttctggaaagtgagctgaagcgcaggtcaattaagaagctgagattcctgtgca

SEQ ID NO: 189801 - DNA, 77 bp, Homo sapiens
ctctttgcaatccagggttctggaaagtgagctgaagcgcaggtcaattaagaagctgagattcctgtgcacccggg

SEQ ID NO: 189802 - DNA, 76 bp, Homo sapiens
gggttctggaaagtgagctgaagcgcaggtcaattaagaagctgagattcctgtgcacccggggtgacaaggtata

SEQ ID NO: 189803 - DNA, 76 bp, Homo sapiens
aaagtgagctgaagcgcaggtcaattaagaagctgagattcctgtgcacccggggtgacaaggtatagcttacacc

SEQ ID NO: 189804 - DNA, 74 bp, Homo sapiens
aagcgcaggtcaattaagaagctgagattcctgtgcacccggggtgacaaggtatagcttacaccctccagtta

SEQ ID NO: 189805 - DNA, 74 bp, Homo sapiens
tcaattaagaagctgagattcctgtgcacccggggtgacaaggtatagcttacaccctccagttacagcaaaaa

SEQ ID NO: 189806 - DNA, 75 bp, Homo sapiens
caatgtattaaatatctgttgacagtgtatttctttctttttcaagctgttctttacctctaccctgcgcaatca

SEQ ID NO: 189807 - DNA, 75 bp, Homo sapiens
tattaaatatctgttgacagtgtatttctttctttttcaagctgttctttacctctaccctgcgcaatcaccaca

SEQ ID NO: 189808 - DNA, 72 bp, Homo sapiens
ttgacagtgtatttctttctttttcaagctgttctttacctctaccctgcgcaatcaccacagccgggttta

SEQ ID NO: 189809 - DNA, 72 bp, Homo sapiens
ttctttctttttcaagctgttctttacctctaccctgcgcaatcaccacagccgggtttacttcatgacact

SEQ ID NO: 189810 - DNA, 72 bp, Homo sapiens
tttttcaagctgttctttacctctaccctgcgcaatcaccacagccgggtttacttcatgacacttggaaaa

SEQ ID NO: 189811 - DNA, 74 bp, Homo sapiens
tctttacctctaccctgcgcaatcaccacagccgggtttacttcatgacacttggaaaacttgaagagctccaa

SEQ ID NO: 189812 - DNA, 77 bp, Homo sapiens
tctaccctgcgcaatcaccacagccgggtttacttcatgacacttggaaaacttgaagagctccaaagcaattatga

SEQ ID NO: 189813 - DNA, 74 bp, Homo sapiens
aatcaccacagccgggtttacttcatgacacttggaaaacttgaagagctccaaagcaattatgatgtctaaaa

SEQ ID NO: 189814 - DNA, 72 bp, Homo sapiens
acagccgggtttacttcatgacacttggaaaacttgaagagctccaaagcaattatgatgtctaaaagtttc

SEQ ID NO: 189815 - DNA, 75 bp, Homo sapiens
cttcatgacacttggaaaacttgaagagctccaaagcaattatgatgtctaaaagtttccagtgatttattacca

SEQ ID NO: 189816 - DNA, 75 bp, Homo sapiens
tgacacttggaaaacttgaagagctccaaagcaattatgatgtctaaaagtttccagtgatttattaccacatta

SEQ ID NO: 189817 - DNA, 79 bp, Homo sapiens
ttgaagagctccaaagcaattatgatgtctaaaagtttccagtgatttattaccacattataaacatcatgtataggca

SEQ ID NO: 189818 - DNA, 79 bp, Homo sapiens
ccaaagcaattatgatgtctaaaagtttccagtgatttattaccacattataaacatcatgtataggcagtctgcatct

SEQ ID NO: 189819 - DNA, 81 bp, Homo sapiens
gcaattatgatgtctaaaagtttccagtgatttattaccacattataaacatcatgtataggcagtctgcatcttcagatt

SEQ ID NO: 189820 - DNA, 80 bp, Homo sapiens
gtctaaaagtttccagtgatttattaccacattataaacatcatgtataggcagtctgcatcttcagatttcagagatta

SEQ ID NO: 189821 - DNA, 83 bp, Homo sapiens
tccagtgatttattaccacattataaacatcatgtataggcagtctgcatcttcagatttcagagattaaatgagtattcagt

SEQ ID NO: 189822 - DNA, 80 bp, Homo sapiens
tttattaccacattataaacatcatgtataggcagtctgcatcttcagatttcagagattaaatgagtattcagttttat

SEQ ID NO: 189823 - DNA, 79 bp, Homo sapiens
cattataaacatcatgtataggcagtctgcatcttcagatttcagagattaaatgagtattcagttttatttttagtaa

SEQ ID NO: 189824 - DNA, 70 bp, Homo sapiens
ttttagtaaagattaaatccaaaactttacttttaatgtagcacagaatagttttaatgagaaatgcagc

SEQ ID NO: 189825 - DNA, 71 bp, Homo sapiens
gtaaagattaaatccaaaactttacttttaatgtagcacagaatagttttaatgagaaatgcagctttatg

SEQ ID NO: 189826 - DNA, 70 bp, Homo sapiens
ccaaaactttacttttaatgtagcacagaatagttttaatgagaaatgcagctttatgtataaaattaac

SEQ ID NO: 189827 - DNA, 75 bp, Homo sapiens
cttttaatgtagcacagaatagttttaatgagaaatgcagctttatgtataaaattaactatagcaagctctagg

SEQ ID NO: 189828 - DNA, 77 bp, Homo sapiens
gcacagaatagttttaatgagaaatgcagctttatgtataaaattaactatagcaagctctaggtactccaatggtg

SEQ ID NO: 189829 - DNA, 76 bp, Homo sapiens
gttttaatgagaaatgcagctttatgtataaaattaactatagcaagctctaggtactccaatggtgtacaatgtc

SEQ ID NO: 189830 - DNA, 77 bp, Homo sapiens
gaaatgcagctttatgtataaaattaactatagcaagctctaggtactccaatggtgtacaatgtcttttgcacaaa

SEQ ID NO: 189831 - DNA, 71 bp, Homo sapiens
aaattaactatagcaagctctaggtactccaatggtgtacaatgtcttttgcacaaactttgtaacttttg

SEQ ID NO: 189832 - DNA, 72 bp, Homo sapiens
aactatagcaagctctaggtactccaatggtgtacaatgtcttttgcacaaactttgtaacttttgttactg

SEQ ID NO: 189833 - DNA, 71 bp, Homo sapiens
actccaatggtgtacaatgtcttttgcacaaactttgtaacttttgttactgtgaattcaaacattactct

SEQ ID NO: 189834 - DNA, 71 bp, Homo sapiens
caatgtcttttgcacaaactttgtaacttttgttactgtgaattcaaacattactctttggacagtttgga

SEQ ID NO: 189835 - DNA, 73 bp, Homo sapiens
tgcacaaactttgtaacttttgttactgtgaattcaaacattactctttggacagtttggacagtatctgtat

SEQ ID NO: 189836 - DNA, 72 bp, Homo sapiens
ctttgtaacttttgttactgtgaattcaaacattactctttggacagtttggacagtatctgtattcagatt

SEQ ID NO: 189837 - DNA, 75 bp, Homo sapiens
gttactgtgaattcaaacattactctttggacagtttggacagtatctgtattcagattttacaacatggagtaa

SEQ ID NO: 189838 - DNA, 72 bp, Homo sapiens
attcaaacattactctttggacagtttggacagtatctgtattcagattttacaacatggagtaaagaaacc

SEQ ID NO: 189839 - DNA, 72 bp, Homo sapiens
caaacattactctttggacagtttggacagtatctgtattcagattttacaacatggagtaaagaaacctgt

SEQ ID NO: 189840 - DNA, 74 bp, Homo sapiens
cattactctttggacagtttggacagtatctgtattcagattttacaacatggagtaaagaaacctgttatgaa

SEQ ID NO: 189841 - DNA, 74 bp, Homo sapiens
ctctttggacagtttggacagtatctgtattcagattttacaacatggagtaaagaaacctgttatgaattaga

SEQ ID NO: 189842 - DNA, 76 bp, Homo sapiens
gacagtttggacagtatctgtattcagattttacaacatggagtaaagaaacctgttatgaattagattacaagca

SEQ ID NO: 189843 - DNA, 76 bp, Homo sapiens
ggacagtatctgtattcagattttacaacatggagtaaagaaacctgttatgaattagattacaagcagccttcaa

SEQ ID NO: 189844 - DNA, 75 bp, Homo sapiens
cagtatctgtattcagattttacaacatggagtaaagaaacctgttatgaattagattacaagcagccttcaaaa

SEQ ID NO: 189845 - DNA, 75 bp, Homo sapiens
tcagattttacaacatggagtaaagaaacctgttatgaattagattacaagcagccttcaaaagaattggcactg

SEQ ID NO: 189846 - DNA, 73 bp, Homo sapiens
catggagtaaagaaacctgttatgaattagattacaagcagccttcaaaagaattggcactgggataagattt

SEQ ID NO: 189847 - DNA, 73 bp, Homo sapiens
gtaaagaaacctgttatgaattagattacaagcagccttcaaaagaattggcactgggataagatttttcaga

SEQ ID NO: 189848 - DNA, 72 bp, Homo sapiens
cctgttatgaattagattacaagcagccttcaaaagaattggcactgggataagatttttcagaaaaagaaa

SEQ ID NO: 189849 - DNA, 70 bp, Homo sapiens
attacaagcagccttcaaaagaattggcactgggataagatttttcagaaaaagaaaaacatcggcaaac

SEQ ID NO: 189850 - DNA, 71 bp, Homo sapiens
agccttcaaaagaattggcactgggataagatttttcagaaaaagaaaaacatcggcaaactgtgtgtgat

SEQ ID NO: 189851 - DNA, 71 bp, Homo sapiens
gaattggcactgggataagatttttcagaaaaagaaaaacatcggcaaactgtgtgtgatttttccaaagc

SEQ ID NO: 189852 - DNA, 72 bp, Homo sapiens
ggcactgggataagatttttcagaaaaagaaaaacatcggcaaactgtgtgtgatttttccaaagctatata

SEQ ID NO: 189853 - DNA, 68 bp, Homo sapiens
tttttcagaaaaagaaaaacatcggcaaactgtgtgtgatttttccaaagctatataaagaaccaaag

SEQ ID NO: 189854 - DNA, 68 bp, Homo sapiens
aaagaaaaacatcggcaaactgtgtgtgatttttccaaagctatataaagaaccaaaggtttagtcaa

SEQ ID NO: 189855 - DNA, 68 bp, Homo sapiens
caaactgtgtgtgatttttccaaagctatataaagaaccaaaggtttagtcaagaaacaaaaatctta

SEQ ID NO: 189856 - DNA, 67 bp, Homo sapiens
gctatataaagaaccaaaggtttagtcaagaaacaaaaatcttaaagattattataacccagactaa

SEQ ID NO: 189857 - DNA, 66 bp, Homo sapiens
gaaccaaaggtttagtcaagaaacaaaaatcttaaagattattataacccagactaaggttgaaca

SEQ ID NO: 189858 - DNA, 70 bp, Homo sapiens
aacaaaaatcttaaagattattataacccagactaaggttgaacaacctgcatgcccagagaaaactatg

SEQ ID NO: 189859 - DNA, 72 bp, Homo sapiens
aatcttaaagattattataacccagactaaggttgaacaacctgcatgcccagagaaaactatggcgacaaa

SEQ ID NO: 189860 - DNA, 70 bp, Homo sapiens
gactaaggttgaacaacctgcatgcccagagaaaactatggcgacaaaggggaaaaggccaccactcgtt

SEQ ID NO: 189861 - DNA, 73 bp, Homo sapiens
ttgaacaacctgcatgcccagagaaaactatggcgacaaaggggaaaaggccaccactcgttttctcactgat

SEQ ID NO: 189862 - DNA, 72 bp, Homo sapiens
agaaaactatggcgacaaaggggaaaaggccaccactcgttttctcactgattcatgccaattaagcctaca

SEQ ID NO: 189863 - DNA, 73 bp, Homo sapiens
tatggcgacaaaggggaaaaggccaccactcgttttctcactgattcatgccaattaagcctacagttaaaga

SEQ ID NO: 189864 - DNA, 71 bp, Homo sapiens
ggaaaaggccaccactcgttttctcactgattcatgccaattaagcctacagttaaagaccagttttgttc

SEQ ID NO: 189865 - DNA, 70 bp, Homo sapiens
tcgttttctcactgattcatgccaattaagcctacagttaaagaccagttttgttcttttcacccatttt

SEQ ID NO: 189866 - DNA, 69 bp, Homo sapiens
actgattcatgccaattaagcctacagttaaagaccagttttgttcttttcacccatttttaagctggt

SEQ ID NO: 189867 - DNA, 65 bp, Homo sapiens
ccaattaagcctacagttaaagaccagttttgttcttttcacccatttttaagctggttttctcc

SEQ ID NO: 189868 - DNA, 71 bp, Homo sapiens
gaaaggaagaaagccccagacgcttggtttttctcagaacccccaaaagatgtgcaatagctgttgttaca

SEQ ID NO: 189869 - DNA, 70 bp, Homo sapiens
aagaaagccccagacgcttggtttttctcagaacccccaaaagatgtgcaatagctgttgttacaaacca

SEQ ID NO: 189870 - DNA, 71 bp, Homo sapiens
agacgcttggtttttctcagaacccccaaaagatgtgcaatagctgttgttacaaaccaccaaataataca

SEQ ID NO: 189871 - DNA, 75 bp, Homo sapiens
tttctcagaacccccaaaagatgtgcaatagctgttgttacaaaccaccaaataatacagttgtgagcctgaata

SEQ ID NO: 189872 - DNA, 75 bp, Homo sapiens
ccccaaaagatgtgcaatagctgttgttacaaaccaccaaataatacagttgtgagcctgaatacaggactgaac

SEQ ID NO: 189873 - DNA, 77 bp, Homo sapiens
aaagatgtgcaatagctgttgttacaaaccaccaaataatacagttgtgagcctgaatacaggactgaactcctata

SEQ ID NO: 189874 - DNA, 75 bp, Homo sapiens
aatagctgttgttacaaaccaccaaataatacagttgtgagcctgaatacaggactgaactcctatacacgtgta

SEQ ID NO: 189875 - DNA, 75 bp, Homo sapiens
aaaccaccaaataatacagttgtgagcctgaatacaggactgaactcctatacacgtgtactgtagaatgagtat

SEQ ID NO: 189876 - DNA, 74 bp, Homo sapiens
accaaataatacagttgtgagcctgaatacaggactgaactcctatacacgtgtactgtagaatgagtattttt

SEQ ID NO: 189877 - DNA, 70 bp, Homo sapiens
ctgaactcctatacacgtgtactgtagaatgagtattttttaataccttaaggtaggcgtcaaattctac

SEQ ID NO: 189878 - DNA, 69 bp, Homo sapiens
ctatacacgtgtactgtagaatgagtattttttaataccttaaggtaggcgtcaaattctactccccaa

SEQ ID NO: 189879 - DNA, 70 bp, Homo sapiens
actgtagaatgagtattttttaataccttaaggtaggcgtcaaattctactccccaaagcagagatagat

SEQ ID NO: 189880 - DNA, 81 bp, Homo sapiens
aaattctactccccaaagcagagatagattgatttatcaaaattattatctggccaacagtgtgactatcagacagcatca

SEQ ID NO: 189881 - DNA, 81 bp, Homo sapiens
tactccccaaagcagagatagattgatttatcaaaattattatctggccaacagtgtgactatcagacagcatcaaatatt

SEQ ID NO: 189882 - DNA, 82 bp, Homo sapiens
agagatagattgatttatcaaaattattatctggccaacagtgtgactatcagacagcatcaaatatttgcccaatccaaga

SEQ ID NO: 189883 - DNA, 78 bp, Homo sapiens
aaaattattatctggccaacagtgtgactatcagacagcatcaaatatttgcccaatccaagattagactacacaaaa

SEQ ID NO: 189884 - DNA, 80 bp, Homo sapiens
ttatctggccaacagtgtgactatcagacagcatcaaatatttgcccaatccaagattagactacacaaaagcttccttc

SEQ ID NO: 189885 - DNA, 78 bp, Homo sapiens
tgtgactatcagacagcatcaaatatttgcccaatccaagattagactacacaaaagcttccttccagtattaaacaa

SEQ ID NO: 189886 - DNA, 75 bp, Homo sapiens
ctatcagacagcatcaaatatttgcccaatccaagattagactacacaaaagcttccttccagtattaaacaaaa

SEQ ID NO: 189887 - DNA, 68 bp, Homo sapiens
ccaagattagactacacaaaagcttccttccagtattaaacaaaaagaattaaacataactatgaaaa

SEQ ID NO: 189888 - DNA, 67 bp, Homo sapiens
ctacacaaaagcttccttccagtattaaacaaaaagaattaaacataactatgaaaaaactttgcta

SEQ ID NO: 189889 - DNA, 68 bp, Homo sapiens
cagtattaaacaaaaagaattaaacataactatgaaaaaactttgctaatatctgtgtttttcagatt

SEQ ID NO: 189890 - DNA, 68 bp, Homo sapiens
caaaaagaattaaacataactatgaaaaaactttgctaatatctgtgtttttcagatttcattttttg

SEQ ID NO: 189891 - DNA, 70 bp, Homo sapiens
taaacataactatgaaaaaactttgctaatatctgtgtttttcagatttcattttttgtaaaatcagaaa

SEQ ID NO: 189892 - DNA, 74 bp, Homo sapiens
ctttgctaatatctgtgtttttcagatttcattttttgtaaaatcagaaattaatctaaacatattcagtgata

SEQ ID NO: 189893 - DNA, 74 bp, Homo sapiens
ctgtgtttttcagatttcattttttgtaaaatcagaaattaatctaaacatattcagtgataagttcatgtgta

SEQ ID NO: 189894 - DNA, 73 bp, Homo sapiens
gatttcattttttgtaaaatcagaaattaatctaaacatattcagtgataagttcatgtgtaacgacttaatg

SEQ ID NO: 189895 - DNA, 72 bp, Homo sapiens
ttgtaaaatcagaaattaatctaaacatattcagtgataagttcatgtgtaacgacttaatgttaaaggtta

SEQ ID NO: 189896 - DNA, 70 bp, Homo sapiens
aatcagaaattaatctaaacatattcagtgataagttcatgtgtaacgacttaatgttaaaggttaaaaa

SEQ ID NO: 189897 - DNA, 70 bp, Homo sapiens
atctaaacatattcagtgataagttcatgtgtaacgacttaatgttaaaggttaaaaaaaagatttcaca

SEQ ID NO: 189898 - DNA, 69 bp, Homo sapiens
tcagtgataagttcatgtgtaacgacttaatgttaaaggttaaaaaaaagatttcacaaaatatacaac

SEQ ID NO: 189899 - DNA, 67 bp, Homo sapiens
gttcatgtgtaacgacttaatgttaaaggttaaaaaaaagatttcacaaaatatacaactttcacca

SEQ ID NO: 189900 - DNA, 68 bp, Homo sapiens
tgtgtaacgacttaatgttaaaggttaaaaaaaagatttcacaaaatatacaactttcaccatatata

SEQ ID NO: 189901 - DNA, 69 bp, Homo sapiens
cttaatgttaaaggttaaaaaaaagatttcacaaaatatacaactttcaccatatatataagcctgcaa

SEQ ID NO: 189902 - DNA, 79 bp, Homo sapiens
gatttcacaaaatatacaactttcaccatatatataagcctgcaaaattagagtagtgaaagtcatgctagtccatcac

SEQ ID NO: 189903 - DNA, 77 bp, Homo sapiens
caaaatatacaactttcaccatatatataagcctgcaaaattagagtagtgaaagtcatgctagtccatcacccaaa

SEQ ID NO: 189904 - DNA, 78 bp, Homo sapiens
aactttcaccatatatataagcctgcaaaattagagtagtgaaagtcatgctagtccatcacccaaatatgttataga

SEQ ID NO: 189905 - DNA, 80 bp, Homo sapiens
atatatataagcctgcaaaattagagtagtgaaagtcatgctagtccatcacccaaatatgttatagacgccatagacag

SEQ ID NO: 189906 - DNA, 79 bp, Homo sapiens
agcctgcaaaattagagtagtgaaagtcatgctagtccatcacccaaatatgttatagacgccatagacaggtgatgtt

SEQ ID NO: 189907 - DNA, 79 bp, Homo sapiens
aaagtcatgctagtccatcacccaaatatgttatagacgccatagacaggtgatgtttggtcacctatggtaactgcta

SEQ ID NO: 189908 - DNA, 80 bp, Homo sapiens
tagtccatcacccaaatatgttatagacgccatagacaggtgatgtttggtcacctatggtaactgctacctgatgaaga

SEQ ID NO: 189909 - DNA, 79 bp, Homo sapiens
ccaaatatgttatagacgccatagacaggtgatgtttggtcacctatggtaactgctacctgatgaagagcataatttc

SEQ ID NO: 189910 - DNA, 84 bp, Homo sapiens
tgttatagacgccatagacaggtgatgtttggtcacctatggtaactgctacctgatgaagagcataatttctgcatatccatc

SEQ ID NO: 189911 - DNA, 80 bp, Homo sapiens
atgtttggtcacctatggtaactgctacctgatgaagagcataatttctgcatatccatcctcaataccatggtaaattc

SEQ ID NO: 189912 - DNA, 80 bp, Homo sapiens
acctatggtaactgctacctgatgaagagcataatttctgcatatccatcctcaataccatggtaaattctggggcaata

SEQ ID NO: 189913 - DNA, 82 bp, Homo sapiens
atgaagagcataatttctgcatatccatcctcaataccatggtaaattctggggcaatagagaagcaacagaactgccacaa

SEQ ID NO: 189914 - DNA, 79 bp, Homo sapiens
ataatttctgcatatccatcctcaataccatggtaaattctggggcaatagagaagcaacagaactgccacaaagtata

SEQ ID NO: 189915 - DNA, 78 bp, Homo sapiens
atatccatcctcaataccatggtaaattctggggcaatagagaagcaacagaactgccacaaagtatacctcaatata

SEQ ID NO: 189916 - DNA, 76 bp, Homo sapiens
atcctcaataccatggtaaattctggggcaatagagaagcaacagaactgccacaaagtatacctcaatataattc

SEQ ID NO: 189917 - DNA, 74 bp, Homo sapiens
accatggtaaattctggggcaatagagaagcaacagaactgccacaaagtatacctcaatataattcctctagt

SEQ ID NO: 189918 - DNA, 76 bp, Homo sapiens
attctggggcaatagagaagcaacagaactgccacaaagtatacctcaatataattcctctagttctgcttctaaa

SEQ ID NO: 189919 - DNA, 76 bp, Homo sapiens
gaactgccacaaagtatacctcaatataattcctctagttctgcttctaaaatctgaggacagtgctagtgggaaa

SEQ ID NO: 189920 - DNA, 74 bp, Homo sapiens
cacaaagtatacctcaatataattcctctagttctgcttctaaaatctgaggacagtgctagtgggaaaataat

SEQ ID NO: 189921 - DNA, 72 bp, Homo sapiens
acctcaatataattcctctagttctgcttctaaaatctgaggacagtgctagtgggaaaataattttcaaac

SEQ ID NO: 189922 - DNA, 71 bp, Homo sapiens
attcctctagttctgcttctaaaatctgaggacagtgctagtgggaaaataattttcaaactacctggtta

SEQ ID NO: 189923 - DNA, 70 bp, Homo sapiens
ctgcttctaaaatctgaggacagtgctagtgggaaaataattttcaaactacctggttaaccaaaataca

SEQ ID NO: 189924 - DNA, 72 bp, Homo sapiens
cagtgctagtgggaaaataattttcaaactacctggttaaccaaaatacaaaagcagctgactatgtgtgat

SEQ ID NO: 189925 - DNA, 71 bp, Homo sapiens
ctagtgggaaaataattttcaaactacctggttaaccaaaatacaaaagcagctgactatgtgtgatttca

SEQ ID NO: 189926 - DNA, 76 bp, Homo sapiens
ttttcaaactacctggttaaccaaaatacaaaagcagctgactatgtgtgatttcataatagcacatttcttgaca

SEQ ID NO: 189927 - DNA, 75 bp, Homo sapiens
aactacctggttaaccaaaatacaaaagcagctgactatgtgtgatttcataatagcacatttcttgacacttag

SEQ ID NO: 189928 - DNA, 79 bp, Homo sapiens
accaaaatacaaaagcagctgactatgtgtgatttcataatagcacatttcttgacacttagtgctagaaatgaagatt

SEQ ID NO: 189929 - DNA, 78 bp, Homo sapiens
ctgactatgtgtgatttcataatagcacatttcttgacacttagtgctagaaatgaagatttggattttcctaacaac

SEQ ID NO: 189930 - DNA, 78 bp, Homo sapiens
gtgtgatttcataatagcacatttcttgacacttagtgctagaaatgaagatttggattttcctaacaacttacatca

SEQ ID NO: 189931 - DNA, 76 bp, Homo sapiens
agcacatttcttgacacttagtgctagaaatgaagatttggattttcctaacaacttacatcaagaatgtagtgta

SEQ ID NO: 189932 - DNA, 76 bp, Homo sapiens
cttgacacttagtgctagaaatgaagatttggattttcctaacaacttacatcaagaatgtagtgtagctcattat

SEQ ID NO: 189933 - DNA, 76 bp, Homo sapiens
acttagtgctagaaatgaagatttggattttcctaacaacttacatcaagaatgtagtgtagctcattattgagaa

SEQ ID NO: 189934 - DNA, 76 bp, Homo sapiens
tgaagatttggattttcctaacaacttacatcaagaatgtagtgtagctcattattgagaatttaggaaagcctga

SEQ ID NO: 189935 - DNA, 75 bp, Homo sapiens
ggattttcctaacaacttacatcaagaatgtagtgtagctcattattgagaatttaggaaagcctgaatccatta

SEQ ID NO: 189936 - DNA, 74 bp, Homo sapiens
cctaacaacttacatcaagaatgtagtgtagctcattattgagaatttaggaaagcctgaatccattaattaag

SEQ ID NO: 189937 - DNA, 76 bp, Homo sapiens
catcaagaatgtagtgtagctcattattgagaatttaggaaagcctgaatccattaattaaggaaataaatgtgac

SEQ ID NO: 189938 - DNA, 75 bp, Homo sapiens
gtagtgtagctcattattgagaatttaggaaagcctgaatccattaattaaggaaataaatgtgactcacatttc

SEQ ID NO: 189939 - DNA, 73 bp, Homo sapiens
gctcattattgagaatttaggaaagcctgaatccattaattaaggaaataaatgtgactcacatttcttttac

SEQ ID NO: 189940 - DNA, 73 bp, Homo sapiens
gagaatttaggaaagcctgaatccattaattaaggaaataaatgtgactcacatttcttttactgtgacacaa

SEQ ID NO: 189941 - DNA, 75 bp, Homo sapiens
ggaaagcctgaatccattaattaaggaaataaatgtgactcacatttcttttactgtgacacaataatgtgatcc

SEQ ID NO: 189942 - DNA, 73 bp, Homo sapiens
ccattaattaaggaaataaatgtgactcacatttcttttactgtgacacaataatgtgatcctaaaactggct

SEQ ID NO: 189943 - DNA, 75 bp, Homo sapiens
ggaaataaatgtgactcacatttcttttactgtgacacaataatgtgatcctaaaactggcttatccttgagtgt

SEQ ID NO: 189944 - DNA, 76 bp, Homo sapiens
tactgtgacacaataatgtgatcctaaaactggcttatccttgagtgtttacaactcaaacaactttttgaatgca

SEQ ID NO: 189945 - DNA, 72 bp, Homo sapiens
acaataatgtgatcctaaaactggcttatccttgagtgtttacaactcaaacaactttttgaatgcagtagt

SEQ ID NO: 189946 - DNA, 68 bp, Homo sapiens
gatcctaaaactggcttatccttgagtgtttacaactcaaacaactttttgaatgcagtagttttttt

SEQ ID NO: 189947 - DNA, 64 bp, Homo sapiens
tttaaaaacaaacttttatgtcaaattttttttcttagaagtagtcttcattattataaatttg

SEQ ID NO: 189948 - DNA, 66 bp, Homo sapiens
aacaaacttttatgtcaaattttttttcttagaagtagtcttcattattataaatttgtacaccaa

SEQ ID NO: 189949 - DNA, 68 bp, Homo sapiens
ttatgtcaaattttttttcttagaagtagtcttcattattataaatttgtacaccaaaaggccatggg

SEQ ID NO: 189950 - DNA, 70 bp, Homo sapiens
tttcttagaagtagtcttcattattataaatttgtacaccaaaaggccatggggaactttgtgcaagtac

SEQ ID NO: 189951 - DNA, 74 bp, Homo sapiens
attattataaatttgtacaccaaaaggccatggggaactttgtgcaagtacctcatcgctgagcaaatggagct

SEQ ID NO: 189952 - DNA, 76 bp, Homo sapiens
tttgtacaccaaaaggccatggggaactttgtgcaagtacctcatcgctgagcaaatggagcttgctatgttttaa

SEQ ID NO: 189953 - DNA, 76 bp, Homo sapiens
acaccaaaaggccatggggaactttgtgcaagtacctcatcgctgagcaaatggagcttgctatgttttaatttca

SEQ ID NO: 189954 - DNA, 77 bp, Homo sapiens
tggggaactttgtgcaagtacctcatcgctgagcaaatggagcttgctatgttttaatttcagaaaatttcctcata

SEQ ID NO: 189955 - DNA, 79 bp, Homo sapiens
tacctcatcgctgagcaaatggagcttgctatgttttaatttcagaaaatttcctcatatacgtagtgtgtagaatcaa

SEQ ID NO: 189956 - DNA, 73 bp, Homo sapiens
atggagcttgctatgttttaatttcagaaaatttcctcatatacgtagtgtgtagaatcaagtcttttaataa

SEQ ID NO: 189957 - DNA, 71 bp, Homo sapiens
atttcagaaaatttcctcatatacgtagtgtgtagaatcaagtcttttaataattcattttttcttcataa

SEQ ID NO: 189958 - DNA, 72 bp, Homo sapiens
ttcctcatatacgtagtgtgtagaatcaagtcttttaataattcattttttcttcataatatttactcaaag

SEQ ID NO: 189959 - DNA, 70 bp, Homo sapiens
atacgtagtgtgtagaatcaagtcttttaataattcattttttcttcataatatttactcaaagttaagc

SEQ ID NO: 189960 - DNA, 69 bp, Homo sapiens
tgtagaatcaagtcttttaataattcattttttcttcataatatttactcaaagttaagcttaaaaata

SEQ ID NO: 189961 - DNA, 66 bp, Homo sapiens
aatcaagtcttttaataattcattttttcttcataatatttactcaaagttaagcttaaaaataag

SEQ ID NO: 189962 - DNA, 64 bp, Homo sapiens
agtcttttaataattcattttttcttcataatatttactcaaagttaagcttaaaaataagttt

SEQ ID NO: 189963 - DNA, 70 bp, Homo sapiens
tcataatatttactcaaagttaagcttaaaaataagttttatcttaaaatcatatttgaagacagtaaga

SEQ ID NO: 189964 - DNA, 68 bp, Homo sapiens
atatttactcaaagttaagcttaaaaataagttttatcttaaaatcatatttgaagacagtaagacag

SEQ ID NO: 189965 - DNA, 68 bp, Homo sapiens
tactcaaagttaagcttaaaaataagttttatcttaaaatcatatttgaagacagtaagacagtaaac

SEQ ID NO: 189966 - DNA, 67 bp, Homo sapiens
gttaagcttaaaaataagttttatcttaaaatcatatttgaagacagtaagacagtaaactatttta

SEQ ID NO: 189967 - DNA, 67 bp, Homo sapiens
gcttaaaaataagttttatcttaaaatcatatttgaagacagtaagacagtaaactattttaggaag

SEQ ID NO: 189968 - DNA, 67 bp, Homo sapiens
aataagttttatcttaaaatcatatttgaagacagtaagacagtaaactattttaggaagtcaaccc

SEQ ID NO: 189969 - DNA, 72 bp, Homo sapiens
atcttaaaatcatatttgaagacagtaagacagtaaactattttaggaagtcaacccccattgcactctgtg

SEQ ID NO: 189970 - DNA, 73 bp, Homo sapiens
tttaggaagtcaacccccattgcactctgtggcagttattctggtaaaaataggcaaaagtgacctgaatcta

SEQ ID NO: 189971 - DNA, 75 bp, Homo sapiens
ccccattgcactctgtggcagttattctggtaaaaataggcaaaagtgacctgaatctacaatgatgtcccaaag

SEQ ID NO: 189972 - DNA, 73 bp, Homo sapiens
actctgtggcagttattctggtaaaaataggcaaaagtgacctgaatctacaatgatgtcccaaagtaaccaa

SEQ ID NO: 189973 - DNA, 71 bp, Homo sapiens
agttattctggtaaaaataggcaaaagtgacctgaatctacaatgatgtcccaaagtaaccaagtaagaga

SEQ ID NO: 189974 - DNA, 71 bp, Homo sapiens
ggtaaaaataggcaaaagtgacctgaatctacaatgatgtcccaaagtaaccaagtaagagagattgtaaa

SEQ ID NO: 189975 - DNA, 73 bp, Homo sapiens
ataggcaaaagtgacctgaatctacaatgatgtcccaaagtaaccaagtaagagagattgtaaatgataaacc

SEQ ID NO: 189976 - DNA, 71 bp, Homo sapiens
acctgaatctacaatgatgtcccaaagtaaccaagtaagagagattgtaaatgataaaccgagctttaaag

SEQ ID NO: 189977 - DNA, 69 bp, Homo sapiens
tgtcccaaagtaaccaagtaagagagattgtaaatgataaaccgagctttaaaggataaagtgttaata

SEQ ID NO: 189978 - DNA, 68 bp, Homo sapiens
ccaagtaagagagattgtaaatgataaaccgagctttaaaggataaagtgttaataaagaaaggaagc

SEQ ID NO: 189979 - DNA, 71 bp, Homo sapiens
agagagattgtaaatgataaaccgagctttaaaggataaagtgttaataaagaaaggaagctgggcacatg

SEQ ID NO: 189980 - DNA, 69 bp, Homo sapiens
atgataaaccgagctttaaaggataaagtgttaataaagaaaggaagctgggcacatgtcaaaaaggga

SEQ ID NO: 189981 - DNA, 70 bp, Homo sapiens
gctttaaaggataaagtgttaataaagaaaggaagctgggcacatgtcaaaaagggagatcgaaatgtta

SEQ ID NO: 189982 - DNA, 71 bp, Homo sapiens
gataaagtgttaataaagaaaggaagctgggcacatgtcaaaaagggagatcgaaatgttaggtaatcatt

SEQ ID NO: 189983 - DNA, 70 bp, Homo sapiens
gttaataaagaaaggaagctgggcacatgtcaaaaagggagatcgaaatgttaggtaatcatttagaaag

SEQ ID NO: 189984 - DNA, 71 bp, Homo sapiens
aaaggaagctgggcacatgtcaaaaagggagatcgaaatgttaggtaatcatttagaaaggacagaaaata

SEQ ID NO: 189985 - DNA, 70 bp, Homo sapiens
ctgggcacatgtcaaaaagggagatcgaaatgttaggtaatcatttagaaaggacagaaaatatttaaag

SEQ ID NO: 189986 - DNA, 69 bp, Homo sapiens
caaaaagggagatcgaaatgttaggtaatcatttagaaaggacagaaaatatttaaagtggctcatagg

SEQ ID NO: 189987 - DNA, 72 bp, Homo sapiens
gagatcgaaatgttaggtaatcatttagaaaggacagaaaatatttaaagtggctcataggtaatgaatatt

SEQ ID NO: 189988 - DNA, 73 bp, Homo sapiens
ggtaatcatttagaaaggacagaaaatatttaaagtggctcataggtaatgaatatttctgacttagatgtaa

SEQ ID NO: 189989 - DNA, 75 bp, Homo sapiens
tagaaaggacagaaaatatttaaagtggctcataggtaatgaatatttctgacttagatgtaaatccatctggaa

SEQ ID NO: 189990 - DNA, 77 bp, Homo sapiens
tttaaagtggctcataggtaatgaatatttctgacttagatgtaaatccatctggaatctttacatcctttgccagc

SEQ ID NO: 189991 - DNA, 76 bp, Homo sapiens
aatgaatatttctgacttagatgtaaatccatctggaatctttacatcctttgccagctgaaacaagaaagtgaag

SEQ ID NO: 189992 - DNA, 77 bp, Homo sapiens
tgacttagatgtaaatccatctggaatctttacatcctttgccagctgaaacaagaaagtgaagggacaatgatatt

SEQ ID NO: 189993 - DNA, 77 bp, Homo sapiens
taaatccatctggaatctttacatcctttgccagctgaaacaagaaagtgaagggacaatgatatttcatggtcagt

SEQ ID NO: 189994 - DNA, 75 bp, Homo sapiens
atctggaatctttacatcctttgccagctgaaacaagaaagtgaagggacaatgatatttcatggtcagtttatt

SEQ ID NO: 189995 - DNA, 75 bp, Homo sapiens
tctttacatcctttgccagctgaaacaagaaagtgaagggacaatgatatttcatggtcagtttattttgtaaga

SEQ ID NO: 189996 - DNA, 75 bp, Homo sapiens
tttgccagctgaaacaagaaagtgaagggacaatgatatttcatggtcagtttattttgtaagagacagaagaaa

SEQ ID NO: 189997 - DNA, 75 bp, Homo sapiens
acaagaaagtgaagggacaatgatatttcatggtcagtttattttgtaagagacagaagaaattatatctataca

SEQ ID NO: 189998 - DNA, 75 bp, Homo sapiens
gtgaagggacaatgatatttcatggtcagtttattttgtaagagacagaagaaattatatctatacattaccttg

SEQ ID NO: 189999 - DNA, 77 bp, Homo sapiens
gatatttcatggtcagtttattttgtaagagacagaagaaattatatctatacattaccttgtagcagcagtacctg

SEQ ID NO: 190000 - DNA, 77 bp, Homo sapiens
ttcatggtcagtttattttgtaagagacagaagaaattatatctatacattaccttgtagcagcagtacctggaagc

SEQ ID NO: 190001 - DNA, 74 bp, Homo sapiens
tttattttgtaagagacagaagaaattatatctatacattaccttgtagcagcagtacctggaagccccagccc

SEQ ID NO: 190002 - DNA, 77 bp, Homo sapiens
agacagaagaaattatatctatacattaccttgtagcagcagtacctggaagccccagcccgtcacagaagtgtgga

SEQ ID NO: 190003 - DNA, 74 bp, Homo sapiens
aagaaattatatctatacattaccttgtagcagcagtacctggaagccccagcccgtcacagaagtgtggaggg

SEQ ID NO: 190004 - DNA, 76 bp, Homo sapiens
tatacattaccttgtagcagcagtacctggaagccccagcccgtcacagaagtgtggaggggggctcctgactaga

SEQ ID NO: 190005 - DNA, 70 bp, Homo sapiens
gtacctggaagccccagcccgtcacagaagtgtggaggggggctcctgactagacaatttccctagccct

SEQ ID NO: 190006 - DNA, 72 bp, Homo sapiens
aagccccagcccgtcacagaagtgtggaggggggctcctgactagacaatttccctagcccttgtgatttga

SEQ ID NO: 190007 - DNA, 75 bp, Homo sapiens
gtcacagaagtgtggaggggggctcctgactagacaatttccctagcccttgtgatttgaagcatgaaagttctg

SEQ ID NO: 190008 - DNA, 78 bp, Homo sapiens
tagacaatttccctagcccttgtgatttgaagcatgaaagttctggcaggttatgagcagcactagggataaagtatg

SEQ ID NO: 190009 - DNA, 75 bp, Homo sapiens
atttccctagcccttgtgatttgaagcatgaaagttctggcaggttatgagcagcactagggataaagtatggtt

SEQ ID NO: 190010 - DNA, 76 bp, Homo sapiens
ttgtgatttgaagcatgaaagttctggcaggttatgagcagcactagggataaagtatggttttattttggtgtaa

SEQ ID NO: 190011 - DNA, 74 bp, Homo sapiens
tttgaagcatgaaagttctggcaggttatgagcagcactagggataaagtatggttttattttggtgtaattta

SEQ ID NO: 190012 - DNA, 70 bp, Homo sapiens
gcaggttatgagcagcactagggataaagtatggttttattttggtgtaatttaggtttttcaacaaagc

SEQ ID NO: 190013 - DNA, 67 bp, Homo sapiens
agcagcactagggataaagtatggttttattttggtgtaatttaggtttttcaacaaagcccttgtc

SEQ ID NO: 190014 - DNA, 64 bp, Homo sapiens
gggataaagtatggttttattttggtgtaatttaggtttttcaacaaagcccttgtctaaaata

SEQ ID NO: 190015 - DNA, 65 bp, Homo sapiens
tttattttggtgtaatttaggtttttcaacaaagcccttgtctaaaataaaaggcattattggaa

SEQ ID NO: 190016 - DNA, 67 bp, Homo sapiens
ttggtgtaatttaggtttttcaacaaagcccttgtctaaaataaaaggcattattggaaatatttga

SEQ ID NO: 190017 - DNA, 66 bp, Homo sapiens
tttaggtttttcaacaaagcccttgtctaaaataaaaggcattattggaaatatttgaaaactaga

SEQ ID NO: 190018 - DNA, 70 bp, Homo sapiens
ccttgtctaaaataaaaggcattattggaaatatttgaaaactagaaaatgatggataaaagggctgata

SEQ ID NO: 190019 - DNA, 71 bp, Homo sapiens
aaggcattattggaaatatttgaaaactagaaaatgatggataaaagggctgataagaaaatttctgactg

SEQ ID NO: 190020 - DNA, 74 bp, Homo sapiens
tggaaatatttgaaaactagaaaatgatggataaaagggctgataagaaaatttctgactgtcagtagaagtga

SEQ ID NO: 190021 - DNA, 77 bp, Homo sapiens
tgaaaactagaaaatgatggataaaagggctgataagaaaatttctgactgtcagtagaagtgagataagatcctca

SEQ ID NO: 190022 - DNA, 77 bp, Homo sapiens
tagaaaatgatggataaaagggctgataagaaaatttctgactgtcagtagaagtgagataagatcctcagaggaaa

SEQ ID NO: 190023 - DNA, 77 bp, Homo sapiens
tgataagaaaatttctgactgtcagtagaagtgagataagatcctcagaggaaacagtaagaagggataatcattaa

SEQ ID NO: 190024 - DNA, 76 bp, Homo sapiens
aaatttctgactgtcagtagaagtgagataagatcctcagaggaaacagtaagaagggataatcattaagatagta

SEQ ID NO: 190025 - DNA, 76 bp, Homo sapiens
tagaagtgagataagatcctcagaggaaacagtaagaagggataatcattaagatagtaaaacaggcaaagcagaa

SEQ ID NO: 190026 - DNA, 77 bp, Homo sapiens
cacacatacacatgtaaacattggaatgcataagttttaatattttagcgctatcagtttctaaatgcattaattac

SEQ ID NO: 190027 - DNA, 76 bp, Homo sapiens
acacatacacatgtaaacattggaatgcataagttttaatattttagcgctatcagtttctaaatgcattaattac

SEQ ID NO: 190028 - DNA, 76 bp, Homo sapiens
cacatgtaaacattggaatgcataagttttaatattttagcgctatcagtttctaaatgcattaattactaactgc

SEQ ID NO: 190029 - DNA, 75 bp, Homo sapiens
cattggaatgcataagttttaatattttagcgctatcagtttctaaatgcattaattactaactgccctctccca

SEQ ID NO: 190030 - DNA, 74 bp, Homo sapiens
gcataagttttaatattttagcgctatcagtttctaaatgcattaattactaactgccctctcccaagattcat

SEQ ID NO: 190031 - DNA, 73 bp, Homo sapiens
attttagcgctatcagtttctaaatgcattaattactaactgccctctcccaagattcatttagttcaaacag

SEQ ID NO: 190032 - DNA, 74 bp, Homo sapiens
gctatcagtttctaaatgcattaattactaactgccctctcccaagattcatttagttcaaacagtatccgtaa

SEQ ID NO: 190033 - DNA, 71 bp, Homo sapiens
ctaaatgcattaattactaactgccctctcccaagattcatttagttcaaacagtatccgtaaactaggaa

SEQ ID NO: 190034 - DNA, 71 bp, Homo sapiens
attaattactaactgccctctcccaagattcatttagttcaaacagtatccgtaaactaggaataatgcca

SEQ ID NO: 190035 - DNA, 76 bp, Homo sapiens
ctaactgccctctcccaagattcatttagttcaaacagtatccgtaaactaggaataatgccacatgcattcaatg

SEQ ID NO: 190036 - DNA, 75 bp, Homo sapiens
tcccaagattcatttagttcaaacagtatccgtaaactaggaataatgccacatgcattcaatgggatcttttaa

SEQ ID NO: 190037 - DNA, 75 bp, Homo sapiens
catttagttcaaacagtatccgtaaactaggaataatgccacatgcattcaatgggatcttttaagtactcttca

SEQ ID NO: 190038 - DNA, 73 bp, Homo sapiens
aaacagtatccgtaaactaggaataatgccacatgcattcaatgggatcttttaagtactcttcagtttgttc

SEQ ID NO: 190039 - DNA, 74 bp, Homo sapiens
tccgtaaactaggaataatgccacatgcattcaatgggatcttttaagtactcttcagtttgttccaagaaatg

SEQ ID NO: 190040 - DNA, 77 bp, Homo sapiens
taatgccacatgcattcaatgggatcttttaagtactcttcagtttgttccaagaaatgtgcctactgaaatcaaat

SEQ ID NO: 190041 - DNA, 75 bp, Homo sapiens
ccacatgcattcaatgggatcttttaagtactcttcagtttgttccaagaaatgtgcctactgaaatcaaattaa

SEQ ID NO: 190042 - DNA, 71 bp, Homo sapiens
caatgggatcttttaagtactcttcagtttgttccaagaaatgtgcctactgaaatcaaattaatttgtat

SEQ ID NO: 190043 - DNA, 74 bp, Homo sapiens
ttaagtactcttcagtttgttccaagaaatgtgcctactgaaatcaaattaatttgtattcaatgtgtacttca

SEQ ID NO: 190044 - DNA, 76 bp, Homo sapiens
ctcttcagtttgttccaagaaatgtgcctactgaaatcaaattaatttgtattcaatgtgtacttcaagactgcta

SEQ ID NO: 190045 - DNA, 76 bp, Homo sapiens
gttccaagaaatgtgcctactgaaatcaaattaatttgtattcaatgtgtacttcaagactgctaattgtttcatc

SEQ ID NO: 190046 - DNA, 77 bp, Homo sapiens
gtgcctactgaaatcaaattaatttgtattcaatgtgtacttcaagactgctaattgtttcatctgaaagcctacaa

SEQ ID NO: 190047 - DNA, 79 bp, Homo sapiens
atcaaattaatttgtattcaatgtgtacttcaagactgctaattgtttcatctgaaagcctacaatgaatcattgttca

SEQ ID NO: 190048 - DNA, 78 bp, Homo sapiens
tttgtattcaatgtgtacttcaagactgctaattgtttcatctgaaagcctacaatgaatcattgttcaaccttgaaa

SEQ ID NO: 190049 - DNA, 77 bp, Homo sapiens
attcaatgtgtacttcaagactgctaattgtttcatctgaaagcctacaatgaatcattgttcaaccttgaaaaata

SEQ ID NO: 190050 - DNA, 73 bp, Homo sapiens
tacttcaagactgctaattgtttcatctgaaagcctacaatgaatcattgttcaaccttgaaaaataaaattt

SEQ ID NO: 190051 - DNA, 72 bp, Homo sapiens
ctgctaattgtttcatctgaaagcctacaatgaatcattgttcaaccttgaaaaataaaattttgtaaaaca

SEQ ID NO: 190052 - DNA, 74 bp, Homo sapiens
tcatctgaaagcctacaatgaatcattgttcaaccttgaaaaataaaattttgtaaaacatcggttgatgtcat

SEQ ID NO: 190053 - DNA, 72 bp, Homo sapiens
aagcctacaatgaatcattgttcaaccttgaaaaataaaattttgtaaaacatcggttgatgtcattattga

SEQ ID NO: 190054 - DNA, 71 bp, Homo sapiens
gaatcattgttcaaccttgaaaaataaaattttgtaaaacatcggttgatgtcattattgaaatatactta

SEQ ID NO: 190055 - DNA, 70 bp, Homo sapiens
aagctcgggcccttccggaccaccccggcctgcgctcggaagaggagggcgcctttggcttcagcgcttc

SEQ ID NO: 190056 - DNA, 73 bp, Homo sapiens
ttccggaccaccccggcctgcgctcggaagaggagggcgcctttggcttcagcgcttcgcccccgcgctgtgc

SEQ ID NO: 190057 - DNA, 74 bp, Homo sapiens
cccggcctgcgctcggaagaggagggcgcctttggcttcagcgcttcgcccccgcgctgtgccctctgtcggcg

SEQ ID NO: 190058 - DNA, 75 bp, Homo sapiens
ctgcgctcggaagaggagggcgcctttggcttcagcgcttcgcccccgcgctgtgccctctgtcggcggcgtggg

SEQ ID NO: 190059 - DNA, 77 bp, Homo sapiens
aagaggagggcgcctttggcttcagcgcttcgcccccgcgctgtgccctctgtcggcggcgtggggcagctgtagca

SEQ ID NO: 190060 - DNA, 79 bp, Homo sapiens
ctttggcttcagcgcttcgcccccgcgctgtgccctctgtcggcggcgtggggcagctgtagcagcgttggcggcagga

SEQ ID NO: 190061 - DNA, 79 bp, Homo sapiens
ttcagcgcttcgcccccgcgctgtgccctctgtcggcggcgtggggcagctgtagcagcgttggcggcaggaggcggcg

SEQ ID NO: 190062 - DNA, 78 bp, Homo sapiens
ccgcgctgtgccctctgtcggcggcgtggggcagctgtagcagcgttggcggcaggaggcggcggccgcgtcgacgtc

SEQ ID NO: 190063 - DNA, 78 bp, Homo sapiens
tgccctctgtcggcggcgtggggcagctgtagcagcgttggcggcaggaggcggcggccgcgtcgacgtcgacccaga

SEQ ID NO: 190064 - DNA, 78 bp, Homo sapiens
tgtcggcggcgtggggcagctgtagcagcgttggcggcaggaggcggcggccgcgtcgacgtcgacccagactggagc

SEQ ID NO: 190065 - DNA, 76 bp, Homo sapiens
gcagctgtagcagcgttggcggcaggaggcggcggccgcgtcgacgtcgacccagactggagcgacgtttaaagaa

SEQ ID NO: 190066 - DNA, 73 bp, Homo sapiens
tgtagcagcgttggcggcaggaggcggcggccgcgtcgacgtcgacccagactggagcgacgtttaaagaagg

SEQ ID NO: 190067 - DNA, 72 bp, Homo sapiens
ttggcggcaggaggcggcggccgcgtcgacgtcgacccagactggagcgacgtttaaagaaggggcagaatc

SEQ ID NO: 190068 - DNA, 70 bp, Homo sapiens
aggcggcggccgcgtcgacgtcgacccagactggagcgacgtttaaagaaggggcagaatcgctggggag

SEQ ID NO: 190069 - DNA, 72 bp, Homo sapiens
tcgacgtcgacccagactggagcgacgtttaaagaaggggcagaatcgctggggagtgcggcttcttcttgt

SEQ ID NO: 190070 - DNA, 71 bp, Homo sapiens
gtcgacccagactggagcgacgtttaaagaaggggcagaatcgctggggagtgcggcttcttcttgttggg

SEQ ID NO: 190071 - DNA, 70 bp, Homo sapiens
actggagcgacgtttaaagaaggggcagaatcgctggggagtgcggcttcttcttgttgggggactccca

SEQ ID NO: 190072 - DNA, 69 bp, Homo sapiens
cgtttaaagaaggggcagaatcgctggggagtgcggcttcttcttgttgggggactcccagccttccgc

SEQ ID NO: 190073 - DNA, 72 bp, Homo sapiens
cagaatcgctggggagtgcggcttcttcttgttgggggactcccagccttccgcgcgtccggaggaggagaa

SEQ ID NO: 190074 - DNA, 72 bp, Homo sapiens
tcgctggggagtgcggcttcttcttgttgggggactcccagccttccgcgcgtccggaggaggagaagcggc

SEQ ID NO: 190075 - DNA, 71 bp, Homo sapiens
gcttcttcttgttgggggactcccagccttccgcgcgtccggaggaggagaagcggcggcgccgggaagca

SEQ ID NO: 190076 - DNA, 71 bp, Homo sapiens
ttcttgttgggggactcccagccttccgcgcgtccggaggaggagaagcggcggcgccgggaagcaggtga

SEQ ID NO: 190077 - DNA, 69 bp, Homo sapiens
actcccagccttccgcgcgtccggaggaggagaagcggcggcgccgggaagcaggtgaggacccggccc

SEQ ID NO: 190078 - DNA, 70 bp, Homo sapiens
cttccgcgcgtccggaggaggagaagcggcggcgccgggaagcaggtgaggacccggccccaatcaggga

SEQ ID NO: 190079 - DNA, 69 bp, Homo sapiens
tccggaggaggagaagcggcggcgccgggaagcaggtgaggacccggccccaatcagggagggggcgaa

SEQ ID NO: 190080 - DNA, 72 bp, Homo sapiens
gaaatggtaaactttccttttcctttgtcatattttttcatgatagtgtctgttgacttcacttggcactgt

SEQ ID NO: 190081 - DNA, 73 bp, Homo sapiens
actttccttttcctttgtcatattttttcatgatagtgtctgttgacttcacttggcactgtttaacattcca

SEQ ID NO: 190082 - DNA, 75 bp, Homo sapiens
ttcctttgtcatattttttcatgatagtgtctgttgacttcacttggcactgtttaacattccacctctggaaat

SEQ ID NO: 190083 - DNA, 75 bp, Homo sapiens
atattttttcatgatagtgtctgttgacttcacttggcactgtttaacattccacctctggaaattgtaaagatg

SEQ ID NO: 190084 - DNA, 79 bp, Homo sapiens
tttcatgatagtgtctgttgacttcacttggcactgtttaacattccacctctggaaattgtaaagatggagagatgag

SEQ ID NO: 190085 - DNA, 75 bp, Homo sapiens
gtgtctgttgacttcacttggcactgtttaacattccacctctggaaattgtaaagatggagagatgaggggaag

SEQ ID NO: 190086 - DNA, 72 bp, Homo sapiens
acttcacttggcactgtttaacattccacctctggaaattgtaaagatggagagatgaggggaagggacaag

SEQ ID NO: 190087 - DNA, 71 bp, Homo sapiens
actgtttaacattccacctctggaaattgtaaagatggagagatgaggggaagggacaaggggatgaagaa

SEQ ID NO: 190088 - DNA, 71 bp, Homo sapiens
acattccacctctggaaattgtaaagatggagagatgaggggaagggacaaggggatgaagaaagaggaaa

SEQ ID NO: 190089 - DNA, 68 bp, Homo sapiens
aaattgtaaagatggagagatgaggggaagggacaaggggatgaagaaagaggaaagggtaagaaaga

SEQ ID NO: 190090 - DNA, 69 bp, Homo sapiens
taaagatggagagatgaggggaagggacaaggggatgaagaaagaggaaagggtaagaaagatgtttaa

SEQ ID NO: 190091 - DNA, 67 bp, Homo sapiens
atgaggggaagggacaaggggatgaagaaagaggaaagggtaagaaagatgtttaatagtttatcaa

SEQ ID NO: 190092 - DNA, 72 bp, Homo sapiens
tttttctctctaatcctctcccatcccctcctctctttctcttaaaggcatggagagtagaaaactgatttc

SEQ ID NO: 190093 - DNA, 77 bp, Homo sapiens
taatcctctcccatcccctcctctctttctcttaaaggcatggagagtagaaaactgatttctgctacagacattca

SEQ ID NO: 190094 - DNA, 77 bp, Homo sapiens
tcccatcccctcctctctttctcttaaaggcatggagagtagaaaactgatttctgctacagacattcagtactctg

SEQ ID NO: 190095 - DNA, 81 bp, Homo sapiens
tctctttctcttaaaggcatggagagtagaaaactgatttctgctacagacattcagtactctggcagtctgctgaactcc

SEQ ID NO: 190096 - DNA, 81 bp, Homo sapiens
ttctcttaaaggcatggagagtagaaaactgatttctgctacagacattcagtactctggcagtctgctgaactccttgaa

SEQ ID NO: 190097 - DNA, 83 bp, Homo sapiens
atggagagtagaaaactgatttctgctacagacattcagtactctggcagtctgctgaactccttgaatgagcaacgtggcca

SEQ ID NO: 190098 - DNA, 82 bp, Homo sapiens
aaaactgatttctgctacagacattcagtactctggcagtctgctgaactccttgaatgagcaacgtggccatggactcttc

SEQ ID NO: 190099 - DNA, 81 bp, Homo sapiens
acattcagtactctggcagtctgctgaactccttgaatgagcaacgtggccatggactcttctgtgatgttaccgttattg

SEQ ID NO: 190100 - DNA, 80 bp, Homo sapiens
agtactctggcagtctgctgaactccttgaatgagcaacgtggccatggactcttctgtgatgttaccgttattgtggaa

SEQ ID NO: 190101 - DNA, 77 bp, Homo sapiens
tgctgaactccttgaatgagcaacgtggccatggactcttctgtgatgttaccgttattgtggaagaccgaaaattc

SEQ ID NO: 190102 - DNA, 73 bp, Homo sapiens
aactccttgaatgagcaacgtggccatggactcttctgtgatgttaccgttattgtggaagaccgaaaattcc

SEQ ID NO: 190103 - DNA, 73 bp, Homo sapiens
caacgtggccatggactcttctgtgatgttaccgttattgtggaagaccgaaaattccgggctcacaagaata

SEQ ID NO: 190104 - DNA, 73 bp, Homo sapiens
tggccatggactcttctgtgatgttaccgttattgtggaagaccgaaaattccgggctcacaagaatattctt

SEQ ID NO: 190105 - DNA, 73 bp, Homo sapiens
ttctgtgatgttaccgttattgtggaagaccgaaaattccgggctcacaagaatattctttcagcttctagta

SEQ ID NO: 190106 - DNA, 70 bp, Homo sapiens
atgttaccgttattgtggaagaccgaaaattccgggctcacaagaatattctttcagcttctagtaccta

SEQ ID NO: 190107 - DNA, 74 bp, Homo sapiens
tattgtggaagaccgaaaattccgggctcacaagaatattctttcagcttctagtacctacttccatcagctct

SEQ ID NO: 190108 - DNA, 75 bp, Homo sapiens
accgaaaattccgggctcacaagaatattctttcagcttctagtacctacttccatcagctcttctctgttgctg

SEQ ID NO: 190109 - DNA, 80 bp, Homo sapiens
ggctcacaagaatattctttcagcttctagtacctacttccatcagctcttctctgttgctgggcaagttgttgaactga

SEQ ID NO: 190110 - DNA, 78 bp, Homo sapiens
atattctttcagcttctagtacctacttccatcagctcttctctgttgctgggcaagttgttgaactgagctttataa

SEQ ID NO: 190111 - DNA, 81 bp, Homo sapiens
tttcagcttctagtacctacttccatcagctcttctctgttgctgggcaagttgttgaactgagctttataagagcagaga

SEQ ID NO: 190112 - DNA, 81 bp, Homo sapiens
tacctacttccatcagctcttctctgttgctgggcaagttgttgaactgagctttataagagcagagatctttgcagaaat

SEQ ID NO: 190113 - DNA, 83 bp, Homo sapiens
atcagctcttctctgttgctgggcaagttgttgaactgagctttataagagcagagatctttgcagaaattctcaattatatc

SEQ ID NO: 190114 - DNA, 81 bp, Homo sapiens
ttctctgttgctgggcaagttgttgaactgagctttataagagcagagatctttgcagaaattctcaattatatctatagt

SEQ ID NO: 190115 - DNA, 80 bp, Homo sapiens
ttgctgggcaagttgttgaactgagctttataagagcagagatctttgcagaaattctcaattatatctatagttctaaa

SEQ ID NO: 190116 - DNA, 77 bp, Homo sapiens
gttgaactgagctttataagagcagagatctttgcagaaattctcaattatatctatagttctaaaattgttcgtgt

SEQ ID NO: 190117 - DNA, 80 bp, Homo sapiens
ctgagctttataagagcagagatctttgcagaaattctcaattatatctatagttctaaaattgttcgtgttagatcaga

SEQ ID NO: 190118 - DNA, 81 bp, Homo sapiens
gagcagagatctttgcagaaattctcaattatatctatagttctaaaattgttcgtgttagatcagatttgcttgatgagt

SEQ ID NO: 190119 - DNA, 78 bp, Homo sapiens
gatctttgcagaaattctcaattatatctatagttctaaaattgttcgtgttagatcagatttgcttgatgagttaat

SEQ ID NO: 190120 - DNA, 75 bp, Homo sapiens
atctatagttctaaaattgttcgtgttagatcagatttgcttgatgagttaattaaatcagggcagttattagga

SEQ ID NO: 190121 - DNA, 74 bp, Homo sapiens
gttctaaaattgttcgtgttagatcagatttgcttgatgagttaattaaatcagggcagttattaggagtgaaa

SEQ ID NO: 190122 - DNA, 78 bp, Homo sapiens
ttgttcgtgttagatcagatttgcttgatgagttaattaaatcagggcagttattaggagtgaaatttatagcagagc

SEQ ID NO: 190123 - DNA, 78 bp, Homo sapiens
ttagatcagatttgcttgatgagttaattaaatcagggcagttattaggagtgaaatttatagcagagcttggtgtcc

SEQ ID NO: 190124 - DNA, 78 bp, Homo sapiens
tttgcttgatgagttaattaaatcagggcagttattaggagtgaaatttatagcagagcttggtgtcccattgtcaca

SEQ ID NO: 190125 - DNA, 73 bp, Homo sapiens
ttaattaaatcagggcagttattaggagtgaaatttatagcagagcttggtgtcccattgtcacaggttaaaa

SEQ ID NO: 190126 - DNA, 79 bp, Homo sapiens
ttattaggagtgaaatttatagcagagcttggtgtcccattgtcacaggttaaaagcatctcaggtacagcgcaggatg

SEQ ID NO: 190127 - DNA, 79 bp, Homo sapiens
aaatttatagcagagcttggtgtcccattgtcacaggttaaaagcatctcaggtacagcgcaggatggtaatactgagc

SEQ ID NO: 190128 - DNA, 77 bp, Homo sapiens
agagcttggtgtcccattgtcacaggttaaaagcatctcaggtacagcgcaggatggtaatactgagcctttacctc

SEQ ID NO: 190129 - DNA, 79 bp, Homo sapiens
tcccattgtcacaggttaaaagcatctcaggtacagcgcaggatggtaatactgagcctttacctcctgattctggtga

SEQ ID NO: 190130 - DNA, 76 bp, Homo sapiens
acaggttaaaagcatctcaggtacagcgcaggatggtaatactgagcctttacctcctgattctggtgacaagaac

SEQ ID NO: 190131 - DNA, 77 bp, Homo sapiens
aaagcatctcaggtacagcgcaggatggtaatactgagcctttacctcctgattctggtgacaagaaccttgtaata

SEQ ID NO: 190132 - DNA, 76 bp, Homo sapiens
aggtacagcgcaggatggtaatactgagcctttacctcctgattctggtgacaagaaccttgtaatacagaaatca

SEQ ID NO: 190133 - DNA, 74 bp, Homo sapiens
aggatggtaatactgagcctttacctcctgattctggtgacaagaaccttgtaatacagaaatcaaaagatgaa

SEQ ID NO: 190134 - DNA, 75 bp, Homo sapiens
taatactgagcctttacctcctgattctggtgacaagaaccttgtaatacagaaatcaaaagatgaagcccaaga

SEQ ID NO: 190135 - DNA, 72 bp, Homo sapiens
cctttacctcctgattctggtgacaagaaccttgtaatacagaaatcaaaagatgaagcccaagataatggg

SEQ ID NO: 190136 - DNA, 76 bp, Homo sapiens
tgacaagaaccttgtaatacagaaatcaaaagatgaagcccaagataatggggctactataatgcctattataaca

SEQ ID NO: 190137 - DNA, 74 bp, Homo sapiens
ccttgtaatacagaaatcaaaagatgaagcccaagataatggggctactataatgcctattataacagagtctt

SEQ ID NO: 190138 - DNA, 77 bp, Homo sapiens
tgaagcccaagataatggggctactataatgcctattataacagagtctttttcattatctgccgaagattatgaaa

SEQ ID NO: 190139 - DNA, 76 bp, Homo sapiens
ccaagataatggggctactataatgcctattataacagagtctttttcattatctgccgaagattatgaaatgaaa

SEQ ID NO: 190140 - DNA, 79 bp, Homo sapiens
tgcctattataacagagtctttttcattatctgccgaagattatgaaatgaaaaagatcattgttaccgattctgatga

SEQ ID NO: 190141 - DNA, 80 bp, Homo sapiens
atgatgatgatgtcattttttgctccgagattctgcccacaaaggagactttgccgagtaataacacagtggcacaggtc

SEQ ID NO: 190142 - DNA, 77 bp, Homo sapiens
tgtcattttttgctccgagattctgcccacaaaggagactttgccgagtaataacacagtggcacaggtccaatcta

SEQ ID NO: 190143 - DNA, 74 bp, Homo sapiens
tttttgctccgagattctgcccacaaaggagactttgccgagtaataacacagtggcacaggtccaatctaacc

SEQ ID NO: 190144 - DNA, 73 bp, Homo sapiens
agattctgcccacaaaggagactttgccgagtaataacacagtggcacaggtccaatctaacccaggccctgt

SEQ ID NO: 190145 - DNA, 74 bp, Homo sapiens
aaggagactttgccgagtaataacacagtggcacaggtccaatctaacccaggccctgttgctatttcagatgt

SEQ ID NO: 190146 - DNA, 76 bp, Homo sapiens
actttgccgagtaataacacagtggcacaggtccaatctaacccaggccctgttgctatttcagatgttgcaccta

SEQ ID NO: 190147 - DNA, 79 bp, Homo sapiens
taataacacagtggcacaggtccaatctaacccaggccctgttgctatttcagatgttgcacctagtgctagcaataac

SEQ ID NO: 190148 - DNA, 73 bp, Homo sapiens
aatctaacccaggccctgttgctatttcagatgttgcacctagtgctagcaataactcgccccctttaacaaa

SEQ ID NO: 190149 - DNA, 75 bp, Homo sapiens
ttcagatgttgcacctagtgctagcaataactcgccccctttaacaaatatcacacctactcagaaacttcctac

SEQ ID NO: 190150 - DNA, 72 bp, Homo sapiens
acctagtgctagcaataactcgccccctttaacaaatatcacacctactcagaaacttcctactcctgtgaa

SEQ ID NO: 190151 - DNA, 70 bp, Homo sapiens
aataactcgccccctttaacaaatatcacacctactcagaaacttcctactcctgtgaatcaggcaactt

SEQ ID NO: 190152 - DNA, 73 bp, Homo sapiens
cccctttaacaaatatcacacctactcagaaacttcctactcctgtgaatcaggcaactttgagccaaacaca

SEQ ID NO: 190153 - DNA, 71 bp, Homo sapiens
acctactcagaaacttcctactcctgtgaatcaggcaactttgagccaaacacaaggaagtgaaaaattgt

SEQ ID NO: 190154 - DNA, 72 bp, Homo sapiens
aaacttcctactcctgtgaatcaggcaactttgagccaaacacaaggaagtgaaaaattgttggtatcttca

SEQ ID NO: 190155 - DNA, 77 bp, Homo sapiens
tactcctgtgaatcaggcaactttgagccaaacacaaggaagtgaaaaattgttggtatcttcagctccaacacatc

SEQ ID NO: 190156 - DNA, 77 bp, Homo sapiens
tcaggcaactttgagccaaacacaaggaagtgaaaaattgttggtatcttcagctccaacacatctgactcccaata

SEQ ID NO: 190157 - DNA, 74 bp, Homo sapiens
tttgagccaaacacaaggaagtgaaaaattgttggtatcttcagctccaacacatctgactcccaatattattt

SEQ ID NO: 190158 - DNA, 73 bp, Homo sapiens
caaacacaaggaagtgaaaaattgttggtatcttcagctccaacacatctgactcccaatattattttgttaa

SEQ ID NO: 190159 - DNA, 75 bp, Homo sapiens
tgaaaaattgttggtatcttcagctccaacacatctgactcccaatattattttgttaaatcagacaccactttc

SEQ ID NO: 190160 - DNA, 74 bp, Homo sapiens
aacacatctgactcccaatattattttgttaaatcagacaccactttctacaccaccaaatgtcagttcttcac

SEQ ID NO: 190161 - DNA, 75 bp, Homo sapiens
ccaatattattttgttaaatcagacaccactttctacaccaccaaatgtcagttcttcacttccaaatcatatgc

SEQ ID NO: 190162 - DNA, 76 bp, Homo sapiens
aaatcagacaccactttctacaccaccaaatgtcagttcttcacttccaaatcatatgccctcttcaatcaattta

SEQ ID NO: 190163 - DNA, 78 bp, Homo sapiens
actttctacaccaccaaatgtcagttcttcacttccaaatcatatgccctcttcaatcaatttacttgtgcagaatca

SEQ ID NO: 190164 - DNA, 79 bp, Homo sapiens
agttcttcacttccaaatcatatgccctcttcaatcaatttacttgtgcagaatcagcagacaccaaacagtgctattt

SEQ ID NO: 190165 - DNA, 79 bp, Homo sapiens
ttccaaatcatatgccctcttcaatcaatttacttgtgcagaatcagcagacaccaaacagtgctattttaacaggaaa

SEQ ID NO: 190166 - DNA, 78 bp, Homo sapiens
aatcatatgccctcttcaatcaatttacttgtgcagaatcagcagacaccaaacagtgctattttaacaggaaacaag

SEQ ID NO: 190167 - DNA, 78 bp, Homo sapiens
ttcaatcaatttacttgtgcagaatcagcagacaccaaacagtgctattttaacaggaaacaaggccaatgaagagga

SEQ ID NO: 190168 - DNA, 75 bp, Homo sapiens
aatttacttgtgcagaatcagcagacaccaaacagtgctattttaacaggaaacaaggccaatgaagaggaggag

SEQ ID NO: 190169 - DNA, 81 bp, Homo sapiens
gaggaggaggaaataatagatgatgatgatgacactattagctccagtcctgactcggccgtcagtaatacatctttggtc

SEQ ID NO: 190170 - DNA, 80 bp, Homo sapiens
aggaaataatagatgatgatgatgacactattagctccagtcctgactcggccgtcagtaatacatctttggtcccacag

SEQ ID NO: 190171 - DNA, 75 bp, Homo sapiens
tattagctccagtcctgactcggccgtcagtaatacatctttggtcccacaggctgatacctcccaaaataccag

SEQ ID NO: 190172 - DNA, 76 bp, Homo sapiens
gtcagtaatacatctttggtcccacaggctgatacctcccaaaataccagttttgatggatcattaatacagaaga

SEQ ID NO: 190173 - DNA, 78 bp, Homo sapiens
taatacatctttggtcccacaggctgatacctcccaaaataccagttttgatggatcattaatacagaagatgcagat

SEQ ID NO: 190174 - DNA, 79 bp, Homo sapiens
tcccacaggctgatacctcccaaaataccagttttgatggatcattaatacagaagatgcagattcctacacttcttca

SEQ ID NO: 190175 - DNA, 77 bp, Homo sapiens
aggctgatacctcccaaaataccagttttgatggatcattaatacagaagatgcagattcctacacttcttcaagaa

SEQ ID NO: 190176 - DNA, 75 bp, Homo sapiens
caaaataccagttttgatggatcattaatacagaagatgcagattcctacacttcttcaagaaccactttccaat

SEQ ID NO: 190177 - DNA, 75 bp, Homo sapiens
cagttttgatggatcattaatacagaagatgcagattcctacacttcttcaagaaccactttccaattccttaaa

SEQ ID NO: 190178 - DNA, 75 bp, Homo sapiens
tggatcattaatacagaagatgcagattcctacacttcttcaagaaccactttccaattccttaaaaatttcaga

SEQ ID NO: 190179 - DNA, 72 bp, Homo sapiens
acagaagatgcagattcctacacttcttcaagaaccactttccaattccttaaaaatttcagatataattac

SEQ ID NO: 190180 - DNA, 71 bp, Homo sapiens
cacttcttcaagaaccactttccaattccttaaaaatttcagatataattactagaaatactaatgatcca

SEQ ID NO: 190181 - DNA, 72 bp, Homo sapiens
gaaccactttccaattccttaaaaatttcagatataattactagaaatactaatgatccaggcgtaggatca

SEQ ID NO: 190182 - DNA, 71 bp, Homo sapiens
ccactttccaattccttaaaaatttcagatataattactagaaatactaatgatccaggcgtaggatcaaa

SEQ ID NO: 190183 - DNA, 72 bp, Homo sapiens
ccaattccttaaaaatttcagatataattactagaaatactaatgatccaggcgtaggatcaaaacatctaa

SEQ ID NO: 190184 - DNA, 72 bp, Homo sapiens
ccttaaaaatttcagatataattactagaaatactaatgatccaggcgtaggatcaaaacatctaatggagg

SEQ ID NO: 190185 - DNA, 74 bp, Homo sapiens
aaaatttcagatataattactagaaatactaatgatccaggcgtaggatcaaaacatctaatggagggtcagaa

SEQ ID NO: 190186 - DNA, 78 bp, Homo sapiens
tttcagatataattactagaaatactaatgatccaggcgtaggatcaaaacatctaatggagggtcagaagatcatta

SEQ ID NO: 190187 - DNA, 76 bp, Homo sapiens
agatataattactagaaatactaatgatccaggcgtaggatcaaaacatctaatggagggtcagaagatcattact

SEQ ID NO: 190188 - DNA, 76 bp, Homo sapiens
attactagaaatactaatgatccaggcgtaggatcaaaacatctaatggagggtcagaagatcattactttagata

SEQ ID NO: 190189 - DNA, 78 bp, Homo sapiens
atactaatgatccaggcgtaggatcaaaacatctaatggagggtcagaagatcattactttagatacagctactgaaa

SEQ ID NO: 190190 - DNA, 78 bp, Homo sapiens
aatgatccaggcgtaggatcaaaacatctaatggagggtcagaagatcattactttagatacagctactgaaattgaa

SEQ ID NO: 190191 - DNA, 78 bp, Homo sapiens
taggatcaaaacatctaatggagggtcagaagatcattactttagatacagctactgaaattgaaggcttatcgactg

SEQ ID NO: 190192 - DNA, 76 bp, Homo sapiens
agggtcagaagatcattactttagatacagctactgaaattgaaggcttatcgactggttgcaaggtttatgcaaa

SEQ ID NO: 190193 - DNA, 77 bp, Homo sapiens
atcattactttagatacagctactgaaattgaaggcttatcgactggttgcaaggtttatgcaaatatcggtgaaga

SEQ ID NO: 190194 - DNA, 80 bp, Homo sapiens
tagatacagctactgaaattgaaggcttatcgactggttgcaaggtttatgcaaatatcggtgaagatacttatgatata

SEQ ID NO: 190195 - DNA, 78 bp, Homo sapiens
aattgaaggcttatcgactggttgcaaggtttatgcaaatatcggtgaagatacttatgatatagtgatccctgtcaa

SEQ ID NO: 190196 - DNA, 78 bp, Homo sapiens
ggttgcaaggtttatgcaaatatcggtgaagatacttatgatatagtgatccctgtcaaagatgaccctgatgaaggg

SEQ ID NO: 190197 - DNA, 77 bp, Homo sapiens
atacttatgatatagtgatccctgtcaaagatgaccctgatgaaggggaggccagacttgagaatgaaataccaaaa

SEQ ID NO: 190198 - DNA, 75 bp, Homo sapiens
atatagtgatccctgtcaaagatgaccctgatgaaggggaggccagacttgagaatgaaataccaaaaacgtctg

SEQ ID NO: 190199 - DNA, 75 bp, Homo sapiens
atgaccctgatgaaggggaggccagacttgagaatgaaataccaaaaacgtctggcagcgagatggcaaacaaac

SEQ ID NO: 190200 - DNA, 73 bp, Homo sapiens
ggggaggccagacttgagaatgaaataccaaaaacgtctggcagcgagatggcaaacaaacgtatgaaagtaa

SEQ ID NO: 190201 - DNA, 77 bp, Homo sapiens
agacttgagaatgaaataccaaaaacgtctggcagcgagatggcaaacaaacgtatgaaagtaaaacatgatgatca

SEQ ID NO: 190202 - DNA, 77 bp, Homo sapiens
tgaaataccaaaaacgtctggcagcgagatggcaaacaaacgtatgaaagtaaaacatgatgatcactatgagttaa

SEQ ID NO: 190203 - DNA, 77 bp, Homo sapiens
taccaaaaacgtctggcagcgagatggcaaacaaacgtatgaaagtaaaacatgatgatcactatgagttaatagta

SEQ ID NO: 190204 - DNA, 79 bp, Homo sapiens
gcagcgagatggcaaacaaacgtatgaaagtaaaacatgatgatcactatgagttaatagtagatggaagggtctatta

SEQ ID NO: 190205 - DNA, 80 bp, Homo sapiens
caaacgtatgaaagtaaaacatgatgatcactatgagttaatagtagatggaagggtctattatatctgtattgtatgca

SEQ ID NO: 190206 - DNA, 81 bp, Homo sapiens
gtaaaacatgatgatcactatgagttaatagtagatggaagggtctattatatctgtattgtatgcaaaaggtcatatgtc

SEQ ID NO: 190207 - DNA, 81 bp, Homo sapiens
actatgagttaatagtagatggaagggtctattatatctgtattgtatgcaaaaggtcatatgtctgtctgacaagcttgc

SEQ ID NO: 190208 - DNA, 81 bp, Homo sapiens
tagtagatggaagggtctattatatctgtattgtatgcaaaaggtcatatgtctgtctgacaagcttgcggagacatttta

SEQ ID NO: 190209 - DNA, 79 bp, Homo sapiens
aagggtctattatatctgtattgtatgcaaaaggtcatatgtctgtctgacaagcttgcggagacattttaacattcat

SEQ ID NO: 190210 - DNA, 81 bp, Homo sapiens
attatatctgtattgtatgcaaaaggtcatatgtctgtctgacaagcttgcggagacattttaacattcattcttgggaga

SEQ ID NO: 190211 - DNA, 80 bp, Homo sapiens
tattgtatgcaaaaggtcatatgtctgtctgacaagcttgcggagacattttaacattcattcttgggagaagaagtatc

SEQ ID NO: 190212 - DNA, 76 bp, Homo sapiens
aaaaggtcatatgtctgtctgacaagcttgcggagacattttaacattcattcttgggagaagaagtatccgtgcc

SEQ ID NO: 190213 - DNA, 78 bp, Homo sapiens
tgtctgtctgacaagcttgcggagacattttaacattcattcttgggagaagaagtatccgtgccgttactgtgagaa

SEQ ID NO: 190214 - DNA, 72 bp, Homo sapiens
aagcttgcggagacattttaacattcattcttgggagaagaagtatccgtgccgttactgtgagaaggtatt

SEQ ID NO: 190215 - DNA, 73 bp, Homo sapiens
acattttaacattcattcttgggagaagaagtatccgtgccgttactgtgagaaggtatttcctcttgcagaa

SEQ ID NO: 190216 - DNA, 77 bp, Homo sapiens
taacattcattcttgggagaagaagtatccgtgccgttactgtgagaaggtatttcctcttgcagaatatcgcacaa

SEQ ID NO: 190217 - DNA, 76 bp, Homo sapiens
cttgggagaagaagtatccgtgccgttactgtgagaaggtatttcctcttgcagaatatcgcacaaagcatgaaat

SEQ ID NO: 190218 - DNA, 79 bp, Homo sapiens
aagaagtatccgtgccgttactgtgagaaggtatttcctcttgcagaatatcgcacaaagcatgaaattcatcacacag

SEQ ID NO: 190219 - DNA, 80 bp, Homo sapiens
cgttactgtgagaaggtatttcctcttgcagaatatcgcacaaagcatgaaattcatcacacaggggagcgaaggtatca

SEQ ID NO: 190220 - DNA, 80 bp, Homo sapiens
gtgagaaggtatttcctcttgcagaatatcgcacaaagcatgaaattcatcacacaggggagcgaaggtatcagtgtttg

SEQ ID NO: 190221 - DNA, 82 bp, Homo sapiens
tatttcctcttgcagaatatcgcacaaagcatgaaattcatcacacaggggagcgaaggtatcagtgtttggcctgtggcaa

SEQ ID NO: 190222 - DNA, 81 bp, Homo sapiens
agaatatcgcacaaagcatgaaattcatcacacaggggagcgaaggtatcagtgtttggcctgtggcaaatctttcatcaa

SEQ ID NO: 190223 - DNA, 79 bp, Homo sapiens
caaagcatgaaattcatcacacaggggagcgaaggtatcagtgtttggcctgtggcaaatctttcatcaactatcagtt

SEQ ID NO: 190224 - DNA, 77 bp, Homo sapiens
aaattcatcacacaggggagcgaaggtatcagtgtttggcctgtggcaaatctttcatcaactatcagtttatgtct

SEQ ID NO: 190225 - DNA, 79 bp, Homo sapiens
cgaaggtatcagtgtttggcctgtggcaaatctttcatcaactatcagtttatgtcttcacatataaagtcagttcata

SEQ ID NO: 190226 - DNA, 77 bp, Homo sapiens
aaatctttcatcaactatcagtttatgtcttcacatataaagtcagttcatagtcaagatccttctggggactcaaa

SEQ ID NO: 190227 - DNA, 76 bp, Homo sapiens
ctatcagtttatgtcttcacatataaagtcagttcatagtcaagatccttctggggactcaaagctttatcgttta

SEQ ID NO: 190228 - DNA, 75 bp, Homo sapiens
agtttatgtcttcacatataaagtcagttcatagtcaagatccttctggggactcaaagctttatcgtttacatc

SEQ ID NO: 190229 - DNA, 76 bp, Homo sapiens
atataaagtcagttcatagtcaagatccttctggggactcaaagctttatcgtttacatccatgcaggtctttaca

SEQ ID NO: 190230 - DNA, 76 bp, Homo sapiens
aagtcagttcatagtcaagatccttctggggactcaaagctttatcgtttacatccatgcaggtctttacaaatca

SEQ ID NO: 190231 - DNA, 79 bp, Homo sapiens
atagtcaagatccttctggggactcaaagctttatcgtttacatccatgcaggtctttacaaatcagacaatatgcata

SEQ ID NO: 190232 - DNA, 79 bp, Homo sapiens
ttctggggactcaaagctttatcgtttacatccatgcaggtctttacaaatcagacaatatgcatatctttccgataga

SEQ ID NO: 190233 - DNA, 84 bp, Homo sapiens
tttatcgtttacatccatgcaggtctttacaaatcagacaatatgcatatctttccgatagatcaagcactattcctgcaatga

SEQ ID NO: 190234 - DNA, 85 bp, Homo sapiens
atccatgcaggtctttacaaatcagacaatatgcatatctttccgatagatcaagcactattcctgcaatgaaggatgatggtat

SEQ ID NO: 190235 - DNA, 82 bp, Homo sapiens
tttacaaatcagacaatatgcatatctttccgatagatcaagcactattcctgcaatgaaggatgatggtattgggtataag

SEQ ID NO: 190236 - DNA, 82 bp, Homo sapiens
aaatcagacaatatgcatatctttccgatagatcaagcactattcctgcaatgaaggatgatggtattgggtataaggttga

SEQ ID NO: 190237 - DNA, 81 bp, Homo sapiens
tatgcatatctttccgatagatcaagcactattcctgcaatgaaggatgatggtattgggtataaggttgacactggaaaa

SEQ ID NO: 190238 - DNA, 76 bp, Homo sapiens
ctttccgatagatcaagcactattcctgcaatgaaggatgatggtattgggtataaggttgacactggaaaagaac

SEQ ID NO: 190239 - DNA, 75 bp, Homo sapiens
atcaagcactattcctgcaatgaaggatgatggtattgggtataaggttgacactggaaaagaacctccagtagg

SEQ ID NO: 190240 - DNA, 74 bp, Homo sapiens
tattcctgcaatgaaggatgatggtattgggtataaggttgacactggaaaagaacctccagtagggaccacta

SEQ ID NO: 190241 - DNA, 74 bp, Homo sapiens
tattgggtataaggttgacactggaaaagaacctccagtagggaccactacatctactcagaacaagccaatga

SEQ ID NO: 190242 - DNA, 74 bp, Homo sapiens
tataaggttgacactggaaaagaacctccagtagggaccactacatctactcagaacaagccaatgacctggga

SEQ ID NO: 190243 - DNA, 71 bp, Homo sapiens
actggaaaagaacctccagtagggaccactacatctactcagaacaagccaatgacctgggaagatatttt

SEQ ID NO: 190244 - DNA, 75 bp, Homo sapiens
ggaccactacatctactcagaacaagccaatgacctgggaagatatttttattcagcaggaaaatgattcaattt

SEQ ID NO: 190245 - DNA, 74 bp, Homo sapiens
actacatctactcagaacaagccaatgacctgggaagatatttttattcagcaggaaaatgattcaatttttaa

SEQ ID NO: 190246 - DNA, 74 bp, Homo sapiens
gccaatgacctgggaagatatttttattcagcaggaaaatgattcaatttttaaacaaaatgtaacagatggca

SEQ ID NO: 190247 - DNA, 72 bp, Homo sapiens
gggaagatatttttattcagcaggaaaatgattcaatttttaaacaaaatgtaacagatggcagtactgagt

SEQ ID NO: 190248 - DNA, 74 bp, Homo sapiens
tattcagcaggaaaatgattcaatttttaaacaaaatgtaacagatggcagtactgagtttgaatttataatac

SEQ ID NO: 190249 - DNA, 73 bp, Homo sapiens
gcaggaaaatgattcaatttttaaacaaaatgtaacagatggcagtactgagtttgaatttataataccagag

SEQ ID NO: 190250 - DNA, 70 bp, Homo sapiens
caatttttaaacaaaatgtaacagatggcagtactgagtttgaatttataataccagagtcttactaaac

SEQ ID NO: 190251 - DNA, 72 bp, Homo sapiens
caaaatgtaacagatggcagtactgagtttgaatttataataccagagtcttactaaactcctttgaaatac

SEQ ID NO: 190252 - DNA, 72 bp, Homo sapiens
gtaacagatggcagtactgagtttgaatttataataccagagtcttactaaactcctttgaaatactagaaa

SEQ ID NO: 190253 - DNA, 69 bp, Homo sapiens
ggcagtactgagtttgaatttataataccagagtcttactaaactcctttgaaatactagaaagttttg

SEQ ID NO: 190254 - DNA, 69 bp, Homo sapiens
tgaatttataataccagagtcttactaaactcctttgaaatactagaaagttttgttttggatgatggg

SEQ ID NO: 190255 - DNA, 67 bp, Homo sapiens
agtcttactaaactcctttgaaatactagaaagttttgttttggatgatggggcaggggtttcagaa

SEQ ID NO: 190256 - DNA, 68 bp, Homo sapiens
aactcctttgaaatactagaaagttttgttttggatgatggggcaggggtttcagaagatctgtaaaa

SEQ ID NO: 190257 - DNA, 67 bp, Homo sapiens
aatactagaaagttttgttttggatgatggggcaggggtttcagaagatctgtaaaacaaattaagg

SEQ ID NO: 190258 - DNA, 69 bp, Homo sapiens
tttgttttggatgatggggcaggggtttcagaagatctgtaaaacaaattaaggtgcgaacaagttaat

SEQ ID NO: 190259 - DNA, 73 bp, Homo sapiens
atgatggggcaggggtttcagaagatctgtaaaacaaattaaggtgcgaacaagttaatttgatctgccacat

SEQ ID NO: 190260 - DNA, 75 bp, Homo sapiens
ttcagaagatctgtaaaacaaattaaggtgcgaacaagttaatttgatctgccacattatctgaaggaagtgtag

SEQ ID NO: 190261 - DNA, 71 bp, Homo sapiens
gtaaaacaaattaaggtgcgaacaagttaatttgatctgccacattatctgaaggaagtgtagtgggattt

SEQ ID NO: 190262 - DNA, 73 bp, Homo sapiens
gcgaacaagttaatttgatctgccacattatctgaaggaagtgtagtgggatttttgttgataatttttagaa

SEQ ID NO: 190263 - DNA, 74 bp, Homo sapiens
tttgatctgccacattatctgaaggaagtgtagtgggatttttgttgataatttttagaagcaaattttcctga

SEQ ID NO: 190264 - DNA, 70 bp, Homo sapiens
gccacattatctgaaggaagtgtagtgggatttttgttgataatttttagaagcaaattttcctgaaagt

SEQ ID NO: 190265 - DNA, 67 bp, Homo sapiens
agtgggatttttgttgataatttttagaagcaaattttcctgaaagttttgagtagaggtgagaccc

SEQ ID NO: 190266 - DNA, 68 bp, Homo sapiens
ttttagaagcaaattttcctgaaagttttgagtagaggtgagaccccctccccaagtatctgtttata

SEQ ID NO: 190267 - DNA, 66 bp, Homo sapiens
aaattttcctgaaagttttgagtagaggtgagaccccctccccaagtatctgtttatatagttagt

SEQ ID NO: 190268 - DNA, 71 bp, Homo sapiens
tgaaagttttgagtagaggtgagaccccctccccaagtatctgtttatatagttagttttcagctcattta

SEQ ID NO: 190269 - DNA, 70 bp, Homo sapiens
ttttgagtagaggtgagaccccctccccaagtatctgtttatatagttagttttcagctcatttaaaaga

SEQ ID NO: 190270 - DNA, 69 bp, Homo sapiens
gtgagaccccctccccaagtatctgtttatatagttagttttcagctcatttaaaagaggcaaaaatta

SEQ ID NO: 190271 - DNA, 71 bp, Homo sapiens
tgtttatatagttagttttcagctcatttaaaagaggcaaaaattaaaagcttggagagatagtttcctga

SEQ ID NO: 190272 - DNA, 71 bp, Homo sapiens
tatagttagttttcagctcatttaaaagaggcaaaaattaaaagcttggagagatagtttcctgaatagaa

SEQ ID NO: 190273 - DNA, 74 bp, Homo sapiens
cagctcatttaaaagaggcaaaaattaaaagcttggagagatagtttcctgaatagaatttgaagcagtctgaa

SEQ ID NO: 190274 - DNA, 73 bp, Homo sapiens
ggcaaaaattaaaagcttggagagatagtttcctgaatagaatttgaagcagtctgaatgttctttgaaaata

SEQ ID NO: 190275 - DNA, 76 bp, Homo sapiens
agcttggagagatagtttcctgaatagaatttgaagcagtctgaatgttctttgaaaataactggagttattagca

SEQ ID NO: 190276 - DNA, 76 bp, Homo sapiens
gaatagaatttgaagcagtctgaatgttctttgaaaataactggagttattagcataccctagtacatcttacagc

SEQ ID NO: 190277 - DNA, 74 bp, Homo sapiens
atttgaagcagtctgaatgttctttgaaaataactggagttattagcataccctagtacatcttacagctttcc

SEQ ID NO: 190278 - DNA, 72 bp, Homo sapiens
tttgaaaataactggagttattagcataccctagtacatcttacagctttccccttccatgttagcacttta

SEQ ID NO: 190279 - DNA, 74 bp, Homo sapiens
ataactggagttattagcataccctagtacatcttacagctttccccttccatgttagcactttactgctgaat

SEQ ID NO: 190280 - DNA, 75 bp, Homo sapiens
ttattagcataccctagtacatcttacagctttccccttccatgttagcactttactgctgaattctcaattttc

SEQ ID NO: 190281 - DNA, 76 bp, Homo sapiens
tagtacatcttacagctttccccttccatgttagcactttactgctgaattctcaattttcttaacattgagacaa

SEQ ID NO: 190282 - DNA, 75 bp, Homo sapiens
tcttacagctttccccttccatgttagcactttactgctgaattctcaattttcttaacattgagacaataaatg

SEQ ID NO: 190283 - DNA, 79 bp, Homo sapiens
catgttagcactttactgctgaattctcaattttcttaacattgagacaataaatgtgtgttttgtcttgtatatggca

SEQ ID NO: 190284 - DNA, 76 bp, Homo sapiens
actgctgaattctcaattttcttaacattgagacaataaatgtgtgttttgtcttgtatatggcataaagagtaaa

SEQ ID NO: 190285 - DNA, 72 bp, Homo sapiens
cttaacattgagacaataaatgtgtgttttgtcttgtatatggcataaagagtaaataagttttagagttgt

SEQ ID NO: 190286 - DNA, 72 bp, Homo sapiens
gacaataaatgtgtgttttgtcttgtatatggcataaagagtaaataagttttagagttgttctggaaaatg

SEQ ID NO: 190287 - DNA, 72 bp, Homo sapiens
gtgtgttttgtcttgtatatggcataaagagtaaataagttttagagttgttctggaaaatgtcagaataag

SEQ ID NO: 190288 - DNA, 73 bp, Homo sapiens
tcttgtatatggcataaagagtaaataagttttagagttgttctggaaaatgtcagaataagtcagtacttgg

SEQ ID NO: 190289 - DNA, 71 bp, Homo sapiens
ggcataaagagtaaataagttttagagttgttctggaaaatgtcagaataagtcagtacttgggttgtgta

SEQ ID NO: 190290 - DNA, 72 bp, Homo sapiens
gtaaataagttttagagttgttctggaaaatgtcagaataagtcagtacttgggttgtgtaatctgctagtc

SEQ ID NO: 190291 - DNA, 73 bp, Homo sapiens
agttttagagttgttctggaaaatgtcagaataagtcagtacttgggttgtgtaatctgctagtccaagcgaa

SEQ ID NO: 190292 - DNA, 75 bp, Homo sapiens
agttgttctggaaaatgtcagaataagtcagtacttgggttgtgtaatctgctagtccaagcgaacagcaacctc

SEQ ID NO: 190293 - DNA, 75 bp, Homo sapiens
aaaatgtcagaataagtcagtacttgggttgtgtaatctgctagtccaagcgaacagcaacctcctgctaccctc

SEQ ID NO: 190294 - DNA, 79 bp, Homo sapiens
tacttgggttgtgtaatctgctagtccaagcgaacagcaacctcctgctaccctccctctatgaaaatagccatgcaga

SEQ ID NO: 190295 - DNA, 83 bp, Homo sapiens
taatctgctagtccaagcgaacagcaacctcctgctaccctccctctatgaaaatagccatgcagacaagtctctcatctgaa

SEQ ID NO: 190296 - DNA, 81 bp, Homo sapiens
tagtccaagcgaacagcaacctcctgctaccctccctctatgaaaatagccatgcagacaagtctctcatctgaagaacaa

SEQ ID NO: 190297 - DNA, 79 bp, Homo sapiens
acagcaacctcctgctaccctccctctatgaaaatagccatgcagacaagtctctcatctgaagaacaaattagattta

SEQ ID NO: 190298 - DNA, 79 bp, Homo sapiens
ctgctaccctccctctatgaaaatagccatgcagacaagtctctcatctgaagaacaaattagatttagctaattagaa

SEQ ID NO: 190299 - DNA, 79 bp, Homo sapiens
tccctctatgaaaatagccatgcagacaagtctctcatctgaagaacaaattagatttagctaattagaattaatcctg

SEQ ID NO: 190300 - DNA, 78 bp, Homo sapiens
gaaaatagccatgcagacaagtctctcatctgaagaacaaattagatttagctaattagaattaatcctggctttcat

SEQ ID NO: 190301 - DNA, 81 bp, Homo sapiens
tgcagacaagtctctcatctgaagaacaaattagatttagctaattagaattaatcctggctttcattgccatagtctgta

SEQ ID NO: 190302 - DNA, 76 bp, Homo sapiens
ctctcatctgaagaacaaattagatttagctaattagaattaatcctggctttcattgccatagtctgtaaaagac

SEQ ID NO: 190303 - DNA, 74 bp, Homo sapiens
attagatttagctaattagaattaatcctggctttcattgccatagtctgtaaaagactttggtggctagacca

SEQ ID NO: 190304 - DNA, 72 bp, Homo sapiens
taattagaattaatcctggctttcattgccatagtctgtaaaagactttggtggctagaccactttatacct

SEQ ID NO: 190305 - DNA, 70 bp, Homo sapiens
taaaagactttggtggctagaccactttataccttcgcagtgtggtctctgggggcaaaaaactaatgaa

SEQ ID NO: 190306 - DNA, 71 bp, Homo sapiens
tttggtggctagaccactttataccttcgcagtgtggtctctgggggcaaaaaactaatgaaaacaatctc

SEQ ID NO: 190307 - DNA, 75 bp, Homo sapiens
cttcgcagtgtggtctctgggggcaaaaaactaatgaaaacaatctctgtaatggcagataggaggagatgaaaa

SEQ ID NO: 190308 - DNA, 74 bp, Homo sapiens
tgtggtctctgggggcaaaaaactaatgaaaacaatctctgtaatggcagataggaggagatgaaaagttctgt

SEQ ID NO: 190309 - DNA, 74 bp, Homo sapiens
gggcaaaaaactaatgaaaacaatctctgtaatggcagataggaggagatgaaaagttctgttgcatggatttt

SEQ ID NO: 190310 - DNA, 76 bp, Homo sapiens
aactaatgaaaacaatctctgtaatggcagataggaggagatgaaaagttctgttgcatggatttttaattctctg

SEQ ID NO: 190311 - DNA, 79 bp, Homo sapiens
taatggcagataggaggagatgaaaagttctgttgcatggatttttaattctctggctaccacatagtagagaatggaa

SEQ ID NO: 190312 - DNA, 77 bp, Homo sapiens
taggaggagatgaaaagttctgttgcatggatttttaattctctggctaccacatagtagagaatggaatgaagatt

SEQ ID NO: 190313 - DNA, 75 bp, Homo sapiens
gatgaaaagttctgttgcatggatttttaattctctggctaccacatagtagagaatggaatgaagatttccttt

SEQ ID NO: 190314 - DNA, 76 bp, Homo sapiens
tctgttgcatggatttttaattctctggctaccacatagtagagaatggaatgaagatttccttttggcttcttaa

SEQ ID NO: 190315 - DNA, 71 bp, Homo sapiens
ggatttttaattctctggctaccacatagtagagaatggaatgaagatttccttttggcttcttaaggtta

SEQ ID NO: 190316 - DNA, 71 bp, Homo sapiens
ttctctggctaccacatagtagagaatggaatgaagatttccttttggcttcttaaggttaaaaatattcc

SEQ ID NO: 190317 - DNA, 71 bp, Homo sapiens
ctaccacatagtagagaatggaatgaagatttccttttggcttcttaaggttaaaaatattcccatgaaca

SEQ ID NO: 190318 - DNA, 69 bp, Homo sapiens
gtagagaatggaatgaagatttccttttggcttcttaaggttaaaaatattcccatgaacatgaaaatt

SEQ ID NO: 190319 - DNA, 69 bp, Homo sapiens
tttggcttcttaaggttaaaaatattcccatgaacatgaaaattttcaaattttgaatctgaaagccac

SEQ ID NO: 190320 - DNA, 70 bp, Homo sapiens
taaggttaaaaatattcccatgaacatgaaaattttcaaattttgaatctgaaagccaccaaatgtatct

SEQ ID NO: 190321 - DNA, 73 bp, Homo sapiens
aatattcccatgaacatgaaaattttcaaattttgaatctgaaagccaccaaatgtatctttatgtataaatc

SEQ ID NO: 190322 - DNA, 73 bp, Homo sapiens
cccatgaacatgaaaattttcaaattttgaatctgaaagccaccaaatgtatctttatgtataaatccttgta

SEQ ID NO: 190323 - DNA, 75 bp, Homo sapiens
ttttgaatctgaaagccaccaaatgtatctttatgtataaatccttgtaaatgatagattccatgggtgagactt

SEQ ID NO: 190324 - DNA, 75 bp, Homo sapiens
ctgaaagccaccaaatgtatctttatgtataaatccttgtaaatgatagattccatgggtgagactttacatatt

SEQ ID NO: 190325 - DNA, 73 bp, Homo sapiens
ctttatgtataaatccttgtaaatgatagattccatgggtgagactttacatattttgggtgggaggctactg

SEQ ID NO: 190326 - DNA, 74 bp, Homo sapiens
ataaatccttgtaaatgatagattccatgggtgagactttacatattttgggtgggaggctactggcatatatt

SEQ ID NO: 190327 - DNA, 74 bp, Homo sapiens
tgtaaatgatagattccatgggtgagactttacatattttgggtgggaggctactggcatatatttttaaatgt

SEQ ID NO: 190328 - DNA, 74 bp, Homo sapiens
attccatgggtgagactttacatattttgggtgggaggctactggcatatatttttaaatgttcatattgcgta

SEQ ID NO: 190329 - DNA, 74 bp, Homo sapiens
agactttacatattttgggtgggaggctactggcatatatttttaaatgttcatattgcgtagaatctccacta

SEQ ID NO: 190330 - DNA, 73 bp, Homo sapiens
tattttgggtgggaggctactggcatatatttttaaatgttcatattgcgtagaatctccactaggaagtctt

SEQ ID NO: 190331 - DNA, 74 bp, Homo sapiens
gtgggaggctactggcatatatttttaaatgttcatattgcgtagaatctccactaggaagtctttatttgaaa

SEQ ID NO: 190332 - DNA, 76 bp, Homo sapiens
ggcatatatttttaaatgttcatattgcgtagaatctccactaggaagtctttatttgaaatagttgaatcagtga

SEQ ID NO: 190333 - DNA, 75 bp, Homo sapiens
tttaaatgttcatattgcgtagaatctccactaggaagtctttatttgaaatagttgaatcagtgatctagtatt

SEQ ID NO: 190334 - DNA, 75 bp, Homo sapiens
tcatattgcgtagaatctccactaggaagtctttatttgaaatagttgaatcagtgatctagtattttcctttcg

SEQ ID NO: 190335 - DNA, 73 bp, Homo sapiens
gtagaatctccactaggaagtctttatttgaaatagttgaatcagtgatctagtattttcctttcggcaagat

SEQ ID NO: 190336 - DNA, 68 bp, Homo sapiens
tttatttgaaatagttgaatcagtgatctagtattttcctttcggcaagatttgttaggtttttaccc

SEQ ID NO: 190337 - DNA, 68 bp, Homo sapiens
gaaatagttgaatcagtgatctagtattttcctttcggcaagatttgttaggtttttaccccttctaa

SEQ ID NO: 190338 - DNA, 65 bp, Homo sapiens
ttcctttcggcaagatttgttaggtttttaccccttctaaaataagttttattccatctgcaaat

SEQ ID NO: 190339 - DNA, 70 bp, Homo sapiens
ggtttttaccccttctaaaataagttttattccatctgcaaattgctgcaatattatagtaatcagaaac

SEQ ID NO: 190340 - DNA, 74 bp, Homo sapiens
cccttctaaaataagttttattccatctgcaaattgctgcaatattatagtaatcagaaactacataaggaatg

SEQ ID NO: 190341 - DNA, 78 bp, Homo sapiens
aagttttattccatctgcaaattgctgcaatattatagtaatcagaaactacataaggaatgttatataggcttgtca

SEQ ID NO: 190342 - DNA, 78 bp, Homo sapiens
ccatctgcaaattgctgcaatattatagtaatcagaaactacataaggaatgttatataggcttgtcagttcccattt

SEQ ID NO: 190343 - DNA, 78 bp, Homo sapiens
tgctgcaatattatagtaatcagaaactacataaggaatgttatataggcttgtcagttcccatttttcttgacaaca

SEQ ID NO: 190344 - DNA, 74 bp, Homo sapiens
caatattatagtaatcagaaactacataaggaatgttatataggcttgtcagttcccatttttcttgacaacaa

SEQ ID NO: 190345 - DNA, 71 bp, Homo sapiens
cagaaactacataaggaatgttatataggcttgtcagttcccatttttcttgacaacaataaataccactt

SEQ ID NO: 190346 - DNA, 70 bp, Homo sapiens
actacataaggaatgttatataggcttgtcagttcccatttttcttgacaacaataaataccacttttaa

SEQ ID NO: 190347 - DNA, 72 bp, Homo sapiens
gaatgttatataggcttgtcagttcccatttttcttgacaacaataaataccacttttaaaaatgacacata

SEQ ID NO: 190348 - DNA, 69 bp, Homo sapiens
ggcttgtcagttcccatttttcttgacaacaataaataccacttttaaaaatgacacatatttaaacac

SEQ ID NO: 190349 - DNA, 67 bp, Homo sapiens
agttcccatttttcttgacaacaataaataccacttttaaaaatgacacatatttaaacacttagaa

SEQ ID NO: 190350 - DNA, 68 bp, Homo sapiens
tcttgacaacaataaataccacttttaaaaatgacacatatttaaacacttagaaaataaagttaaca

SEQ ID NO: 190351 - DNA, 66 bp, Homo sapiens
taaataccacttttaaaaatgacacatatttaaacacttagaaaataaagttaacacttactgaag

SEQ ID NO: 190352 - DNA, 68 bp, Homo sapiens
cacttttaaaaatgacacatatttaaacacttagaaaataaagttaacacttactgaagtgctagtac

SEQ ID NO: 190353 - DNA, 71 bp, Homo sapiens
gacacatatttaaacacttagaaaataaagttaacacttactgaagtgctagtactaaactgtgctagtac

SEQ ID NO: 190354 - DNA, 68 bp, Homo sapiens
aaacacttagaaaataaagttaacacttactgaagtgctagtactaaactgtgctagtactaaaagaa

SEQ ID NO: 190355 - DNA, 68 bp, Homo sapiens
gaaaataaagttaacacttactgaagtgctagtactaaactgtgctagtactaaaagaaaacaggttg

SEQ ID NO: 190356 - DNA, 73 bp, Homo sapiens
taacacttactgaagtgctagtactaaactgtgctagtactaaaagaaaacaggttggaacatacatatagcc

SEQ ID NO: 190357 - DNA, 75 bp, Homo sapiens
tactgaagtgctagtactaaactgtgctagtactaaaagaaaacaggttggaacatacatatagcctagcattta

SEQ ID NO: 190358 - DNA, 75 bp, Homo sapiens
tgctagtactaaactgtgctagtactaaaagaaaacaggttggaacatacatatagcctagcatttataacagaa

SEQ ID NO: 190359 - DNA, 75 bp, Homo sapiens
tgtgctagtactaaaagaaaacaggttggaacatacatatagcctagcatttataacagaattgttgaacgtctg

SEQ ID NO: 190360 - DNA, 73 bp, Homo sapiens
ctaaaagaaaacaggttggaacatacatatagcctagcatttataacagaattgttgaacgtctgtaaatgat

SEQ ID NO: 190361 - DNA, 69 bp, Homo sapiens
ttttttttttgcaaaggaaaaaattgatactggaaaagattgttgtgcatagttattagtcatttgtaa

SEQ ID NO: 190362 - DNA, 72 bp, Homo sapiens
gcaaaggaaaaaattgatactggaaaagattgttgtgcatagttattagtcatttgtaaccttgcttaagta

SEQ ID NO: 190363 - DNA, 71 bp, Homo sapiens
aaaattgatactggaaaagattgttgtgcatagttattagtcatttgtaaccttgcttaagtatttcttag

SEQ ID NO: 190364 - DNA, 73 bp, Homo sapiens
actggaaaagattgttgtgcatagttattagtcatttgtaaccttgcttaagtatttcttagtccaacataga

SEQ ID NO: 190365 - DNA, 73 bp, Homo sapiens
aagattgttgtgcatagttattagtcatttgtaaccttgcttaagtatttcttagtccaacatagatattttc

SEQ ID NO: 190366 - DNA, 71 bp, Homo sapiens
agtcatttgtaaccttgcttaagtatttcttagtccaacatagatattttctttctcctgaccatgtattt

SEQ ID NO: 190367 - DNA, 70 bp, Homo sapiens
gtaaccttgcttaagtatttcttagtccaacatagatattttctttctcctgaccatgtattttaaaata

SEQ ID NO: 190368 - DNA, 72 bp, Homo sapiens
gtatttcttagtccaacatagatattttctttctcctgaccatgtattttaaaatatagtctatttcttgac

SEQ ID NO: 190369 - DNA, 71 bp, Homo sapiens
catagatattttctttctcctgaccatgtattttaaaatatagtctatttcttgactttgaacttaaagct

SEQ ID NO: 190370 - DNA, 73 bp, Homo sapiens
tctcctgaccatgtattttaaaatatagtctatttcttgactttgaacttaaagctttaatcataatttctca

SEQ ID NO: 190371 - DNA, 74 bp, Homo sapiens
catgtattttaaaatatagtctatttcttgactttgaacttaaagctttaatcataatttctcatgtatacatc

SEQ ID NO: 190372 - DNA, 75 bp, Homo sapiens
aaatatagtctatttcttgactttgaacttaaagctttaatcataatttctcatgtatacatcgttcttctgatg

SEQ ID NO: 190373 - DNA, 76 bp, Homo sapiens
ctatttcttgactttgaacttaaagctttaatcataatttctcatgtatacatcgttcttctgatggtaagctgga

SEQ ID NO: 190374 - DNA, 75 bp, Homo sapiens
gactttgaacttaaagctttaatcataatttctcatgtatacatcgttcttctgatggtaagctggatttgaagg

SEQ ID NO: 190375 - DNA, 76 bp, Homo sapiens
taaagctttaatcataatttctcatgtatacatcgttcttctgatggtaagctggatttgaaggtagtggtttcag

SEQ ID NO: 190376 - DNA, 76 bp, Homo sapiens
ttaatcataatttctcatgtatacatcgttcttctgatggtaagctggatttgaaggtagtggtttcagtgtttct

SEQ ID NO: 190377 - DNA, 74 bp, Homo sapiens
taatttctcatgtatacatcgttcttctgatggtaagctggatttgaaggtagtggtttcagtgtttcttaagt

SEQ ID NO: 190378 - DNA, 74 bp, Homo sapiens
atttctcatgtatacatcgttcttctgatggtaagctggatttgaaggtagtggtttcagtgtttcttaagttg

SEQ ID NO: 190379 - DNA, 75 bp, Homo sapiens
atgtatacatcgttcttctgatggtaagctggatttgaaggtagtggtttcagtgtttcttaagttggtagctga

SEQ ID NO: 190380 - DNA, 72 bp, Homo sapiens
atcgttcttctgatggtaagctggatttgaaggtagtggtttcagtgtttcttaagttggtagctgagggta

SEQ ID NO: 190381 - DNA, 77 bp, Homo sapiens
tcttctgatggtaagctggatttgaaggtagtggtttcagtgtttcttaagttggtagctgagggtatcaggcatca

SEQ ID NO: 190382 - DNA, 75 bp, Homo sapiens
atggtaagctggatttgaaggtagtggtttcagtgtttcttaagttggtagctgagggtatcaggcatcagttca

SEQ ID NO: 190383 - DNA, 76 bp, Homo sapiens
atttgaaggtagtggtttcagtgtttcttaagttggtagctgagggtatcaggcatcagttcatgcaataatacaa

SEQ ID NO: 190384 - DNA, 75 bp, Homo sapiens
aggtagtggtttcagtgtttcttaagttggtagctgagggtatcaggcatcagttcatgcaataatacaagaaaa

SEQ ID NO: 190385 - DNA, 74 bp, Homo sapiens
ttcagtgtttcttaagttggtagctgagggtatcaggcatcagttcatgcaataatacaagaaaaaaaatcctt

SEQ ID NO: 190386 - DNA, 80 bp, Homo sapiens
tgagggtatcaggcatcagttcatgcaataatacaagaaaaaaaatcctttgcttgccaagaggtagagtgatgtgcatt

SEQ ID NO: 190387 - DNA, 78 bp, Homo sapiens
aggcatcagttcatgcaataatacaagaaaaaaaatcctttgcttgccaagaggtagagtgatgtgcatttatctgtt

SEQ ID NO: 190388 - DNA, 76 bp, Homo sapiens
agttcatgcaataatacaagaaaaaaaatcctttgcttgccaagaggtagagtgatgtgcatttatctgttttctg

SEQ ID NO: 190389 - DNA, 75 bp, Homo sapiens
tacaagaaaaaaaatcctttgcttgccaagaggtagagtgatgtgcatttatctgttttctgttctgtaagtcta

SEQ ID NO: 190390 - DNA, 75 bp, Homo sapiens
aaaatcctttgcttgccaagaggtagagtgatgtgcatttatctgttttctgttctgtaagtctagaccttcaaa

SEQ ID NO: 190391 - DNA, 77 bp, Homo sapiens
tttgcttgccaagaggtagagtgatgtgcatttatctgttttctgttctgtaagtctagaccttcaaaccatttgta

SEQ ID NO: 190392 - DNA, 74 bp, Homo sapiens
caagaggtagagtgatgtgcatttatctgttttctgttctgtaagtctagaccttcaaaccatttgtaaactaa

SEQ ID NO: 190393 - DNA, 70 bp, Homo sapiens
atgtgcatttatctgttttctgttctgtaagtctagaccttcaaaccatttgtaaactaacccctgggaa

SEQ ID NO: 190394 - DNA, 68 bp, Homo sapiens
tctgttctgtaagtctagaccttcaaaccatttgtaaactaacccctgggaaatttgaaattacctga

SEQ ID NO: 190395 - DNA, 65 bp, Homo sapiens
gtaagtctagaccttcaaaccatttgtaaactaacccctgggaaatttgaaattacctgataact

SEQ ID NO: 190396 - DNA, 66 bp, Homo sapiens
gaccttcaaaccatttgtaaactaacccctgggaaatttgaaattacctgataacttaagactctg

SEQ ID NO: 190397 - DNA, 70 bp, Homo sapiens
atttgtaaactaacccctgggaaatttgaaattacctgataacttaagactctgtgatctctggaatcac

SEQ ID NO: 190398 - DNA, 72 bp, Homo sapiens
taacccctgggaaatttgaaattacctgataacttaagactctgtgatctctggaatcaccatatgtttctt

SEQ ID NO: 190399 - DNA, 73 bp, Homo sapiens
gggaaatttgaaattacctgataacttaagactctgtgatctctggaatcaccatatgtttcttttttgtgta

SEQ ID NO: 190400 - DNA, 75 bp, Homo sapiens
acctgataacttaagactctgtgatctctggaatcaccatatgtttcttttttgtgtagatattaataacattac

SEQ ID NO: 190401 - DNA, 81 bp, Homo sapiens
tgtgatctctggaatcaccatatgtttcttttttgtgtagatattaataacattactctttgactatagtgtgcactctga

SEQ ID NO: 190402 - DNA, 77 bp, Homo sapiens
ctctggaatcaccatatgtttcttttttgtgtagatattaataacattactctttgactatagtgtgcactctgaaa

SEQ ID NO: 190403 - DNA, 78 bp, Homo sapiens
ccatatgtttcttttttgtgtagatattaataacattactctttgactatagtgtgcactctgaaatgtactcagtga

SEQ ID NO: 190404 - DNA, 75 bp, Homo sapiens
gtagatattaataacattactctttgactatagtgtgcactctgaaatgtactcagtgaaaatttgttttgagtt

SEQ ID NO: 190405 - DNA, 78 bp, Homo sapiens
gactatagtgtgcactctgaaatgtactcagtgaaaatttgttttgagtttcattaatgctatttcaccagttagaca

SEQ ID NO: 190406 - DNA, 77 bp, Homo sapiens
tagtgtgcactctgaaatgtactcagtgaaaatttgttttgagtttcattaatgctatttcaccagttagacataat

SEQ ID NO: 190407 - DNA, 72 bp, Homo sapiens
aatgtactcagtgaaaatttgttttgagtttcattaatgctatttcaccagttagacataattacttctacc

SEQ ID NO: 190408 - DNA, 75 bp, Homo sapiens
cagtgaaaatttgttttgagtttcattaatgctatttcaccagttagacataattacttctaccgatgtgaatga

SEQ ID NO: 190409 - DNA, 78 bp, Homo sapiens
agtttcattaatgctatttcaccagttagacataattacttctaccgatgtgaatgatacggatgccggcagagcttc

SEQ ID NO: 190410 - DNA, 80 bp, Homo sapiens
aatgctatttcaccagttagacataattacttctaccgatgtgaatgatacggatgccggcagagcttccagatctttca

SEQ ID NO: 190411 - DNA, 80 bp, Homo sapiens
agttagacataattacttctaccgatgtgaatgatacggatgccggcagagcttccagatctttcagactcaactgctag

SEQ ID NO: 190412 - DNA, 80 bp, Homo sapiens
acataattacttctaccgatgtgaatgatacggatgccggcagagcttccagatctttcagactcaactgctaggtcaat

SEQ ID NO: 190413 - DNA, 82 bp, Homo sapiens
taccgatgtgaatgatacggatgccggcagagcttccagatctttcagactcaactgctaggtcaattagtttgtcataata

SEQ ID NO: 190414 - DNA, 77 bp, Homo sapiens
aatgatacggatgccggcagagcttccagatctttcagactcaactgctaggtcaattagtttgtcataataaaact

SEQ ID NO: 190415 - DNA, 79 bp, Homo sapiens
atgccggcagagcttccagatctttcagactcaactgctaggtcaattagtttgtcataataaaacttggcagattcta

SEQ ID NO: 190416 - DNA, 76 bp, Homo sapiens
cttccagatctttcagactcaactgctaggtcaattagtttgtcataataaaacttggcagattctacaagtctat

SEQ ID NO: 190417 - DNA, 78 bp, Homo sapiens
gatctttcagactcaactgctaggtcaattagtttgtcataataaaacttggcagattctacaagtctattatgacaa

SEQ ID NO: 190418 - DNA, 72 bp, Homo sapiens
ctaggtcaattagtttgtcataataaaacttggcagattctacaagtctattatgacaaaccaggaactaat

SEQ ID NO: 190419 - DNA, 74 bp, Homo sapiens
tagtttgtcataataaaacttggcagattctacaagtctattatgacaaaccaggaactaattctataatggaa

SEQ ID NO: 190420 - DNA, 74 bp, Homo sapiens
aaacttggcagattctacaagtctattatgacaaaccaggaactaattctataatggaaaactatccattctga

SEQ ID NO: 190421 - DNA, 75 bp, Homo sapiens
gcagattctacaagtctattatgacaaaccaggaactaattctataatggaaaactatccattctgaataatagg

SEQ ID NO: 190422 - DNA, 73 bp, Homo sapiens
acaagtctattatgacaaaccaggaactaattctataatggaaaactatccattctgaataataggtatgtaa

SEQ ID NO: 190423 - DNA, 78 bp, Homo sapiens
tgacaaaccaggaactaattctataatggaaaactatccattctgaataataggtatgtaattatttgctgctgctgc

SEQ ID NO: 190424 - DNA, 82 bp, Homo sapiens
ggaaaactatccattctgaataataggtatgtaattatttgctgctgctgctgtgctctgtaaattctgaatatgacattta

SEQ ID NO: 190425 - DNA, 83 bp, Homo sapiens
attctgaataataggtatgtaattatttgctgctgctgctgtgctctgtaaattctgaatatgacatttaaactctgtgccta

SEQ ID NO: 190426 - DNA, 81 bp, Homo sapiens
taataggtatgtaattatttgctgctgctgctgtgctctgtaaattctgaatatgacatttaaactctgtgcctactaaag

SEQ ID NO: 190427 - DNA, 82 bp, Homo sapiens
taattatttgctgctgctgctgtgctctgtaaattctgaatatgacatttaaactctgtgcctactaaaggtatcttctgga

SEQ ID NO: 190428 - DNA, 78 bp, Homo sapiens
tgctgctgtgctctgtaaattctgaatatgacatttaaactctgtgcctactaaaggtatcttctggagtttttggga

SEQ ID NO: 190429 - DNA, 73 bp, Homo sapiens
ctctgtaaattctgaatatgacatttaaactctgtgcctactaaaggtatcttctggagtttttgggaggaga

SEQ ID NO: 190430 - DNA, 71 bp, Homo sapiens
aaattctgaatatgacatttaaactctgtgcctactaaaggtatcttctggagtttttgggaggagagaaa

SEQ ID NO: 190431 - DNA, 68 bp, Homo sapiens
acatttaaactctgtgcctactaaaggtatcttctggagtttttgggaggagagaaactggaaaatta

SEQ ID NO: 190432 - DNA, 68 bp, Homo sapiens
taaactctgtgcctactaaaggtatcttctggagtttttgggaggagagaaactggaaaattaaattg

SEQ ID NO: 190433 - DNA, 67 bp, Homo sapiens
gcctactaaaggtatcttctggagtttttgggaggagagaaactggaaaattaaattgtatttttgc

SEQ ID NO: 190434 - DNA, 68 bp, Homo sapiens
ggtatcttctggagtttttgggaggagagaaactggaaaattaaattgtatttttgccagaagactct

SEQ ID NO: 190435 - DNA, 70 bp, Homo sapiens
agtttttgggaggagagaaactggaaaattaaattgtatttttgccagaagactcttacttgcatgtgtc

SEQ ID NO: 190436 - DNA, 72 bp, Homo sapiens
agagaaactggaaaattaaattgtatttttgccagaagactcttacttgcatgtgtctcagggtcttcagtt

SEQ ID NO: 190437 - DNA, 71 bp, Homo sapiens
aactggaaaattaaattgtatttttgccagaagactcttacttgcatgtgtctcagggtcttcagtttttc

SEQ ID NO: 190438 - DNA, 74 bp, Homo sapiens
aattgtatttttgccagaagactcttacttgcatgtgtctcagggtcttcagtttttctataagtttccatatc

SEQ ID NO: 190439 - DNA, 73 bp, Homo sapiens
tttttgccagaagactcttacttgcatgtgtctcagggtcttcagtttttctataagtttccatatccaaagt

SEQ ID NO: 190440 - DNA, 76 bp, Homo sapiens
ttgcatgtgtctcagggtcttcagtttttctataagtttccatatccaaagttcagaattcatgtgaaatacttct

SEQ ID NO: 190441 - DNA, 72 bp, Homo sapiens
ctataagtttccatatccaaagttcagaattcatgtgaaatacttctttggggcaaaagtccttcattcctg

SEQ ID NO: 190442 - DNA, 71 bp, Homo sapiens
agttcagaattcatgtgaaatacttctttggggcaaaagtccttcattcctggtatttattggattggaaa

SEQ ID NO: 190443 - DNA, 74 bp, Homo sapiens
tgaaatacttctttggggcaaaagtccttcattcctggtatttattggattggaaatctgtagcaagatgctgt

SEQ ID NO: 190444 - DNA, 72 bp, Homo sapiens
ttctttggggcaaaagtccttcattcctggtatttattggattggaaatctgtagcaagatgctgtttaaaa

SEQ ID NO: 190445 - DNA, 73 bp, Homo sapiens
gggcaaaagtccttcattcctggtatttattggattggaaatctgtagcaagatgctgtttaaaattaccata

SEQ ID NO: 190446 - DNA, 71 bp, Homo sapiens
ccttcattcctggtatttattggattggaaatctgtagcaagatgctgtttaaaattaccatattgttttt

SEQ ID NO: 190447 - DNA, 72 bp, Homo sapiens
tggtatttattggattggaaatctgtagcaagatgctgtttaaaattaccatattgtttttttatcttatac

SEQ ID NO: 190448 - DNA, 74 bp, Homo sapiens
ggattggaaatctgtagcaagatgctgtttaaaattaccatattgtttttttatcttatacttagctctctggc

SEQ ID NO: 190449 - DNA, 73 bp, Homo sapiens
gtagcaagatgctgtttaaaattaccatattgtttttttatcttatacttagctctctggctattgaacttcc

SEQ ID NO: 190450 - DNA, 71 bp, Homo sapiens
gatgctgtttaaaattaccatattgtttttttatcttatacttagctctctggctattgaacttccttttc

SEQ ID NO: 190451 - DNA, 69 bp, Homo sapiens
gtttttttatcttatacttagctctctggctattgaacttccttttcttgtttgaagttagcttcaaat

SEQ ID NO: 190452 - DNA, 76 bp, Homo sapiens
tatcttatacttagctctctggctattgaacttccttttcttgtttgaagttagcttcaaatttgctcctatgcta

SEQ ID NO: 190453 - DNA, 73 bp, Homo sapiens
acttagctctctggctattgaacttccttttcttgtttgaagttagcttcaaatttgctcctatgctaaatta

SEQ ID NO: 190454 - DNA, 71 bp, Homo sapiens
ctggctattgaacttccttttcttgtttgaagttagcttcaaatttgctcctatgctaaattacctgtaaa

SEQ ID NO: 190455 - DNA, 71 bp, Homo sapiens
ccttttcttgtttgaagttagcttcaaatttgctcctatgctaaattacctgtaaatattctggataggaa

SEQ ID NO: 190456 - DNA, 72 bp, Homo sapiens
agttagcttcaaatttgctcctatgctaaattacctgtaaatattctggataggaactacttgaaatagtaa

SEQ ID NO: 190457 - DNA, 70 bp, Homo sapiens
aaatttgctcctatgctaaattacctgtaaatattctggataggaactacttgaaatagtaatttgttaa

SEQ ID NO: 190458 - DNA, 71 bp, Homo sapiens
atgctaaattacctgtaaatattctggataggaactacttgaaatagtaatttgttaaaagatatgacaaa

SEQ ID NO: 190459 - DNA, 72 bp, Homo sapiens
tacctgtaaatattctggataggaactacttgaaatagtaatttgttaaaagatatgacaaaatgaaaatgc

SEQ ID NO: 190460 - DNA, 72 bp, Homo sapiens
ttctggataggaactacttgaaatagtaatttgttaaaagatatgacaaaatgaaaatgcttaaactacaga

SEQ ID NO: 190461 - DNA, 69 bp, Homo sapiens
taggaactacttgaaatagtaatttgttaaaagatatgacaaaatgaaaatgcttaaactacagaaatt

SEQ ID NO: 190462 - DNA, 70 bp, Homo sapiens
ttgaaatagtaatttgttaaaagatatgacaaaatgaaaatgcttaaactacagaaatttaaaaatgcca

SEQ ID NO: 190463 - DNA, 72 bp, Homo sapiens
gttaaaagatatgacaaaatgaaaatgcttaaactacagaaatttaaaaatgccataacaatcttgcgagac

SEQ ID NO: 190464 - DNA, 72 bp, Homo sapiens
agatatgacaaaatgaaaatgcttaaactacagaaatttaaaaatgccataacaatcttgcgagactaactt

SEQ ID NO: 190465 - DNA, 70 bp, Homo sapiens
atgaaaatgcttaaactacagaaatttaaaaatgccataacaatcttgcgagactaactttaaaatatac

SEQ ID NO: 190466 - DNA, 69 bp, Homo sapiens
tgcttaaactacagaaatttaaaaatgccataacaatcttgcgagactaactttaaaatatactttaaa

SEQ ID NO: 190467 - DNA, 71 bp, Homo sapiens
acagaaatttaaaaatgccataacaatcttgcgagactaactttaaaatatactttaaatgattattatga

SEQ ID NO: 190468 - DNA, 73 bp, Homo sapiens
tgccataacaatcttgcgagactaactttaaaatatactttaaatgattattatgattttggtggtaacgatc

SEQ ID NO: 190469 - DNA, 69 bp, Homo sapiens
aacaatcttgcgagactaactttaaaatatactttaaatgattattatgattttggtggtaacgatccc

SEQ ID NO: 190470 - DNA, 70 bp, Homo sapiens
gcgagactaactttaaaatatactttaaatgattattatgattttggtggtaacgatcccccacacacaa

SEQ ID NO: 190471 - DNA, 71 bp, Homo sapiens
aaatatactttaaatgattattatgattttggtggtaacgatcccccacacacaaccactatgaagaaata

SEQ ID NO: 190472 - DNA, 74 bp, Homo sapiens
tactttaaatgattattatgattttggtggtaacgatcccccacacacaaccactatgaagaaataatgccgca

SEQ ID NO: 190473 - DNA, 68 bp, Homo sapiens
gaaataatgccgcatttttcccccattgtaccaaaaagataaaaaaatggtaaacactgatcaaggta

SEQ ID NO: 190474 - DNA, 67 bp, Homo sapiens
atgccgcatttttcccccattgtaccaaaaagataaaaaaatggtaaacactgatcaaggtattttg

SEQ ID NO: 190475 - DNA, 72 bp, Homo sapiens
ccccattgtaccaaaaagataaaaaaatggtaaacactgatcaaggtattttgtattgtcaaggcatgcata

SEQ ID NO: 190476 - DNA, 73 bp, Homo sapiens
ttgtaccaaaaagataaaaaaatggtaaacactgatcaaggtattttgtattgtcaaggcatgcatattctaa

SEQ ID NO: 190477 - DNA, 74 bp, Homo sapiens
agataaaaaaatggtaaacactgatcaaggtattttgtattgtcaaggcatgcatattctaaagaattaaatgc

SEQ ID NO: 190478 - DNA, 78 bp, Homo sapiens
taaacactgatcaaggtattttgtattgtcaaggcatgcatattctaaagaattaaatgctaacttaacagcactggc

SEQ ID NO: 190479 - DNA, 78 bp, Homo sapiens
tcaaggtattttgtattgtcaaggcatgcatattctaaagaattaaatgctaacttaacagcactggctttctggctg

SEQ ID NO: 190480 - DNA, 79 bp, Homo sapiens
tttgtattgtcaaggcatgcatattctaaagaattaaatgctaacttaacagcactggctttctggctggtcaactata

SEQ ID NO: 190481 - DNA, 76 bp, Homo sapiens
aaggcatgcatattctaaagaattaaatgctaacttaacagcactggctttctggctggtcaactatatgaaacct

SEQ ID NO: 190482 - DNA, 75 bp, Homo sapiens
tattctaaagaattaaatgctaacttaacagcactggctttctggctggtcaactatatgaaaccttgttcattc

SEQ ID NO: 190483 - DNA, 73 bp, Homo sapiens
aaagaattaaatgctaacttaacagcactggctttctggctggtcaactatatgaaaccttgttcattcctcc

SEQ ID NO: 190484 - DNA, 76 bp, Homo sapiens
taacttaacagcactggctttctggctggtcaactatatgaaaccttgttcattcctccgagtactgtaatgttca

SEQ ID NO: 190485 - DNA, 77 bp, Homo sapiens
gcactggctttctggctggtcaactatatgaaaccttgttcattcctccgagtactgtaatgttcacacttgtacaa

SEQ ID NO: 190486 - DNA, 75 bp, Homo sapiens
tttctggctggtcaactatatgaaaccttgttcattcctccgagtactgtaatgttcacacttgtacaatcttcc

SEQ ID NO: 190487 - DNA, 76 bp, Homo sapiens
tcaactatatgaaaccttgttcattcctccgagtactgtaatgttcacacttgtacaatcttccctgtcatgactt

SEQ ID NO: 190488 - DNA, 73 bp, Homo sapiens
ttgttcattcctccgagtactgtaatgttcacacttgtacaatcttccctgtcatgactttaagttctacttt

SEQ ID NO: 190489 - DNA, 73 bp, Homo sapiens
ctccgagtactgtaatgttcacacttgtacaatcttccctgtcatgactttaagttctacttttcattaacca

SEQ ID NO: 190490 - DNA, 76 bp, Homo sapiens
tgtaatgttcacacttgtacaatcttccctgtcatgactttaagttctacttttcattaaccatggcctgatatta

SEQ ID NO: 190491 - DNA, 74 bp, Homo sapiens
cacttgtacaatcttccctgtcatgactttaagttctacttttcattaaccatggcctgatattagttcttaga

SEQ ID NO: 190492 - DNA, 73 bp, Homo sapiens
aatcttccctgtcatgactttaagttctacttttcattaaccatggcctgatattagttcttagagcttcttg

SEQ ID NO: 190493 - DNA, 75 bp, Homo sapiens
cattaaccatggcctgatattagttcttagagcttcttgtggcaaaaataaaatgatttaattctgatgtttgag

SEQ ID NO: 190494 - DNA, 76 bp, Homo sapiens
catggcctgatattagttcttagagcttcttgtggcaaaaataaaatgatttaattctgatgtttgagtgcgtgtt

SEQ ID NO: 190495 - DNA, 73 bp, Homo sapiens
agttcttagagcttcttgtggcaaaaataaaatgatttaattctgatgtttgagtgcgtgttttacaagattg

SEQ ID NO: 190496 - DNA, 61 bp, Homo sapiens
aaaaagaaaaaaaaccccgccggatccgaccgccactttcaaaaccccccaccgctctaga

SEQ ID NO: 190497 - DNA, 63 bp, Homo sapiens
aaaaaccccgccggatccgaccgccactttcaaaaccccccaccgctctagaaccgcgggagc

SEQ ID NO: 190498 - DNA, 67 bp, Homo sapiens
cggatccgaccgccactttcaaaaccccccaccgctctagaaccgcgggagcttccgtccctgagta

SEQ ID NO: 190499 - DNA, 67 bp, Homo sapiens
accgccactttcaaaaccccccaccgctctagaaccgcgggagcttccgtccctgagtagaattcga

SEQ ID NO: 190500 - DNA, 67 bp, Homo sapiens
ttcaaaaccccccaccgctctagaaccgcgggagcttccgtccctgagtagaattcgagggtgtaaa

SEQ ID NO: 190501 - DNA, 68 bp, Homo sapiens
cccaccgctctagaaccgcgggagcttccgtccctgagtagaattcgagggtgtaaagaagaggaagg

SEQ ID NO: 190502 - DNA, 67 bp, Homo sapiens
tagaaccgcgggagcttccgtccctgagtagaattcgagggtgtaaagaagaggaaggggaaaaata

SEQ ID NO: 190503 - DNA, 68 bp, Homo sapiens
gggagcttccgtccctgagtagaattcgagggtgtaaagaagaggaaggggaaaaatatcttgtacca

SEQ ID NO: 190504 - DNA, 67 bp, Homo sapiens
cgtccctgagtagaattcgagggtgtaaagaagaggaaggggaaaaatatcttgtaccagcccaggg

SEQ ID NO: 190505 - DNA, 68 bp, Homo sapiens
tagaattcgagggtgtaaagaagaggaaggggaaaaatatcttgtaccagcccaggggtgaagaagcc

SEQ ID NO: 190506 - DNA, 67 bp, Homo sapiens
taaagaagaggaaggggaaaaatatcttgtaccagcccaggggtgaagaagcccccggcctgagaaa

SEQ ID NO: 190507 - DNA, 66 bp, Homo sapiens
aagaggaaggggaaaaatatcttgtaccagcccaggggtgaagaagcccccggcctgagaaagaag

SEQ ID NO: 190508 - DNA, 67 bp, Homo sapiens
ggaaaaatatcttgtaccagcccaggggtgaagaagcccccggcctgagaaagaaggaggagtgggg

SEQ ID NO: 190509 - DNA, 69 bp, Homo sapiens
ttgtaccagcccaggggtgaagaagcccccggcctgagaaagaaggaggagtgggggaggcgaacagtc

SEQ ID NO: 190510 - DNA, 72 bp, Homo sapiens
gggtgaagaagcccccggcctgagaaagaaggaggagtgggggaggcgaacagtctcgttgctgcctctgtg

SEQ ID NO: 190511 - DNA, 74 bp, Homo sapiens
agaagcccccggcctgagaaagaaggaggagtgggggaggcgaacagtctcgttgctgcctctgtgtacgctga

SEQ ID NO: 190512 - DNA, 73 bp, Homo sapiens
tgagaaagaaggaggagtgggggaggcgaacagtctcgttgctgcctctgtgtacgctgaggggggaggtaag

SEQ ID NO: 190513 - DNA, 71 bp, Homo sapiens
ggaggagtgggggaggcgaacagtctcgttgctgcctctgtgtacgctgaggggggaggtaagttataaaa

SEQ ID NO: 190514 - DNA, 73 bp, Homo sapiens
gggaggcgaacagtctcgttgctgcctctgtgtacgctgaggggggaggtaagttataaaatggcggaggcga

SEQ ID NO: 190515 - DNA, 73 bp, Homo sapiens
aacagtctcgttgctgcctctgtgtacgctgaggggggaggtaagttataaaatggcggaggcgaagcttcta

SEQ ID NO: 190516 - DNA, 66 bp, Homo sapiens
tcgcccaactctccctcggggcctctacggagaccccccccccccatgggtggcccaaaatggaga

SEQ ID NO: 190517 - DNA, 64 bp, Homo sapiens
aactctccctcggggcctctacggagaccccccccccccatgggtggcccaaaatggagaacgc

SEQ ID NO: 190518 - DNA, 70 bp, Homo sapiens
ggcctctacggagaccccccccccccatgggtggcccaaaatggagaacgcggagcagcgcaagatggag

SEQ ID NO: 190519 - DNA, 72 bp, Homo sapiens
gaccccccccccccatgggtggcccaaaatggagaacgcggagcagcgcaagatggaggctccgcttctctg

SEQ ID NO: 190520 - DNA, 78 bp, Homo sapiens
ccccatgggtggcccaaaatggagaacgcggagcagcgcaagatggaggctccgcttctctgtgtagcagtagattta

SEQ ID NO: 190521 - DNA, 77 bp, Homo sapiens
tggcccaaaatggagaacgcggagcagcgcaagatggaggctccgcttctctgtgtagcagtagatttaggttcctt

SEQ ID NO: 190522 - DNA, 76 bp, Homo sapiens
aaaatggagaacgcggagcagcgcaagatggaggctccgcttctctgtgtagcagtagatttaggttccttttctc

SEQ ID NO: 190523 - DNA, 77 bp, Homo sapiens
cggagcagcgcaagatggaggctccgcttctctgtgtagcagtagatttaggttccttttctccggcaggctcctaa

SEQ ID NO: 190524 - DNA, 74 bp, Homo sapiens
aagatggaggctccgcttctctgtgtagcagtagatttaggttccttttctccggcaggctcctaagcctagga

SEQ ID NO: 190525 - DNA, 73 bp, Homo sapiens
tccgcttctctgtgtagcagtagatttaggttccttttctccggcaggctcctaagcctaggagagcccgaac

SEQ ID NO: 190526 - DNA, 73 bp, Homo sapiens
ttctctgtgtagcagtagatttaggttccttttctccggcaggctcctaagcctaggagagcccgaactggag

SEQ ID NO: 190527 - DNA, 69 bp, Homo sapiens
agcagtagatttaggttccttttctccggcaggctcctaagcctaggagagcccgaactggaggtgggg

SEQ ID NO: 190528 - DNA, 69 bp, Homo sapiens
ttaggttccttttctccggcaggctcctaagcctaggagagcccgaactggaggtggggtggggtgcga

SEQ ID NO: 190529 - DNA, 70 bp, Homo sapiens
tttctccggcaggctcctaagcctaggagagcccgaactggaggtggggtggggtgcgagccgtagtcgg

SEQ ID NO: 190530 - DNA, 70 bp, Homo sapiens
ccctccctctcttcctcccttcctagagagggaacaacattcatgtgacgggcccctctgcttctccccc

SEQ ID NO: 190531 - DNA, 73 bp, Homo sapiens
cttcctcccttcctagagagggaacaacattcatgtgacgggcccctctgcttctcccccgccccatcatctc

SEQ ID NO: 190532 - DNA, 76 bp, Homo sapiens
ttcctagagagggaacaacattcatgtgacgggcccctctgcttctcccccgccccatcatctccagcgcgtggtg

SEQ ID NO: 190533 - DNA, 73 bp, Homo sapiens
agggaacaacattcatgtgacgggcccctctgcttctcccccgccccatcatctccagcgcgtggtgggggaa

SEQ ID NO: 190534 - DNA, 74 bp, Homo sapiens
aacattcatgtgacgggcccctctgcttctcccccgccccatcatctccagcgcgtggtgggggaactgctggg

SEQ ID NO: 190535 - DNA, 75 bp, Homo sapiens
ggcccctctgcttctcccccgccccatcatctccagcgcgtggtgggggaactgctggggaaggcgattggcatc

SEQ ID NO: 190536 - DNA, 77 bp, Homo sapiens
cttctcccccgccccatcatctccagcgcgtggtgggggaactgctggggaaggcgattggcatcgatctctccatc

SEQ ID NO: 190537 - DNA, 77 bp, Homo sapiens
cgccccatcatctccagcgcgtggtgggggaactgctggggaaggcgattggcatcgatctctccatcccttccgag

SEQ ID NO: 190538 - DNA, 77 bp, Homo sapiens
atcatctccagcgcgtggtgggggaactgctggggaaggcgattggcatcgatctctccatcccttccgaggcccga

SEQ ID NO: 190539 - DNA, 73 bp, Homo sapiens
tggtgggggaactgctggggaaggcgattggcatcgatctctccatcccttccgaggcccgacttcggtcagt

SEQ ID NO: 190540 - DNA, 72 bp, Homo sapiens
aactgctggggaaggcgattggcatcgatctctccatcccttccgaggcccgacttcggtcagttttcttcg

SEQ ID NO: 190541 - DNA, 71 bp, Homo sapiens
aaggcgattggcatcgatctctccatcccttccgaggcccgacttcggtcagttttcttcgggcaacaatt

SEQ ID NO: 190542 - DNA, 71 bp, Homo sapiens
attggcatcgatctctccatcccttccgaggcccgacttcggtcagttttcttcgggcaacaattttctaa

SEQ ID NO: 190543 - DNA, 72 bp, Homo sapiens
gtatgttatatttgagcatttaatattaattggatatgtttaatcttacctgctttttctttaggtggccac

SEQ ID NO: 190544 - DNA, 71 bp, Homo sapiens
tttgagcatttaatattaattggatatgtttaatcttacctgctttttctttaggtggccaccgagtacta

SEQ ID NO: 190545 - DNA, 69 bp, Homo sapiens
taatattaattggatatgtttaatcttacctgctttttctttaggtggccaccgagtactaaattcact

SEQ ID NO: 190546 - DNA, 69 bp, Homo sapiens
ttaattggatatgtttaatcttacctgctttttctttaggtggccaccgagtactaaattcacttggga

SEQ ID NO: 190547 - DNA, 67 bp, Homo sapiens
atgtttaatcttacctgctttttctttaggtggccaccgagtactaaattcacttgggaataaaaga

SEQ ID NO: 190548 - DNA, 66 bp, Homo sapiens
acctgctttttctttaggtggccaccgagtactaaattcacttgggaataaaagaaaaacataaga

SEQ ID NO: 190549 - DNA, 66 bp, Homo sapiens
ctttaggtggccaccgagtactaaattcacttgggaataaaagaaaaacataagaaaattataaga

SEQ ID NO: 190550 - DNA, 66 bp, Homo sapiens
ggccaccgagtactaaattcacttgggaataaaagaaaaacataagaaaattataagagaaaggta

SEQ ID NO: 190551 - DNA, 67 bp, Homo sapiens
gtactaaattcacttgggaataaaagaaaaacataagaaaattataagagaaaggtacacataagac

SEQ ID NO: 190552 - DNA, 67 bp, Homo sapiens
gggaataaaagaaaaacataagaaaattataagagaaaggtacacataagactaagagctttagact

SEQ ID NO: 190553 - DNA, 71 bp, Homo sapiens
gaaaaacataagaaaattataagagaaaggtacacataagactaagagctttagactttagcttcagcctg

SEQ ID NO: 190554 - DNA, 70 bp, Homo sapiens
agaaaattataagagaaaggtacacataagactaagagctttagactttagcttcagcctgttttctcct

SEQ ID NO: 190555 - DNA, 68 bp, Homo sapiens
ccgaatatttttggtgcatttgtaataaatgtcattttctcctttttaaaggaattgtcttagaagaa

SEQ ID NO: 190556 - DNA, 70 bp, Homo sapiens
ggtgcatttgtaataaatgtcattttctcctttttaaaggaattgtcttagaagaaagaaggcaagccac

SEQ ID NO: 190557 - DNA, 68 bp, Homo sapiens
taaatgtcattttctcctttttaaaggaattgtcttagaagaaagaaggcaagccaccattttaccca

SEQ ID NO: 190558 - DNA, 66 bp, Homo sapiens
tttctcctttttaaaggaattgtcttagaagaaagaaggcaagccaccattttacccacgtaaata

SEQ ID NO: 190559 - DNA, 67 bp, Homo sapiens
cctttttaaaggaattgtcttagaagaaagaaggcaagccaccattttacccacgtaaatatatgaa

SEQ ID NO: 190560 - DNA, 74 bp, Homo sapiens
tgtcttagaagaaagaaggcaagccaccattttacccacgtaaatatatgaatatatttctgacattgaggtgt

SEQ ID NO: 190561 - DNA, 73 bp, Homo sapiens
aagaaagaaggcaagccaccattttacccacgtaaatatatgaatatatttctgacattgaggtgttccagaa

SEQ ID NO: 190562 - DNA, 75 bp, Homo sapiens
aaggcaagccaccattttacccacgtaaatatatgaatatatttctgacattgaggtgttccagaagatgataaa

SEQ ID NO: 190563 - DNA, 78 bp, Homo sapiens
ccattttacccacgtaaatatatgaatatatttctgacattgaggtgttccagaagatgataaagaaatgatagcagc

SEQ ID NO: 190564 - DNA, 81 bp, Homo sapiens
cacgtaaatatatgaatatatttctgacattgaggtgttccagaagatgataaagaaatgatagcagctccagaaatacca

SEQ ID NO: 190565 - DNA, 79 bp, Homo sapiens
gaatatatttctgacattgaggtgttccagaagatgataaagaaatgatagcagctccagaaataccaactgattttaa

SEQ ID NO: 190566 - DNA, 79 bp, Homo sapiens
tttctgacattgaggtgttccagaagatgataaagaaatgatagcagctccagaaataccaactgattttaatctacta

SEQ ID NO: 190567 - DNA, 76 bp, Homo sapiens
ggtgttccagaagatgataaagaaatgatagcagctccagaaataccaactgattttaatctactacagtaagtaa

SEQ ID NO: 190568 - DNA, 76 bp, Homo sapiens
ccagaagatgataaagaaatgatagcagctccagaaataccaactgattttaatctactacagtaagtaaattata

SEQ ID NO: 190569 - DNA, 74 bp, Homo sapiens
aaagaaatgatagcagctccagaaataccaactgattttaatctactacagtaagtaaattatattctgataat

SEQ ID NO: 190570 - DNA, 73 bp, Homo sapiens
gatagcagctccagaaataccaactgattttaatctactacagtaagtaaattatattctgataatttttaaa

SEQ ID NO: 190571 - DNA, 70 bp, Homo sapiens
tagaaactcaatataaatttctaaggaagggttttaattcttatctttctgtcacagggagtcagaaaca

SEQ ID NO: 190572 - DNA, 69 bp, Homo sapiens
ctcaatataaatttctaaggaagggttttaattcttatctttctgtcacagggagtcagaaacacattt

SEQ ID NO: 190573 - DNA, 71 bp, Homo sapiens
tttctaaggaagggttttaattcttatctttctgtcacagggagtcagaaacacatttttcttctgacaca

SEQ ID NO: 190574 - DNA, 72 bp, Homo sapiens
gaagggttttaattcttatctttctgtcacagggagtcagaaacacatttttcttctgacacagattttgaa

SEQ ID NO: 190575 - DNA, 75 bp, Homo sapiens
tcttatctttctgtcacagggagtcagaaacacatttttcttctgacacagattttgaagatatcgaaggaaaaa

SEQ ID NO: 190576 - DNA, 73 bp, Homo sapiens
tttctgtcacagggagtcagaaacacatttttcttctgacacagattttgaagatatcgaaggaaaaaaccaa

SEQ ID NO: 190577 - DNA, 70 bp, Homo sapiens
agggagtcagaaacacatttttcttctgacacagattttgaagatatcgaaggaaaaaaccaaaagcaag

SEQ ID NO: 190578 - DNA, 71 bp, Homo sapiens
catttttcttctgacacagattttgaagatatcgaaggaaaaaaccaaaagcaaggcaaaggcaaagtatg

SEQ ID NO: 190579 - DNA, 73 bp, Homo sapiens
ttcttctgacacagattttgaagatatcgaaggaaaaaaccaaaagcaaggcaaaggcaaagtatgtatcaaa

SEQ ID NO: 190580 - DNA, 71 bp, Homo sapiens
cagattttgaagatatcgaaggaaaaaaccaaaagcaaggcaaaggcaaagtatgtatcaaatatttgact

SEQ ID NO: 190581 - DNA, 69 bp, Homo sapiens
agatatcgaaggaaaaaaccaaaagcaaggcaaaggcaaagtatgtatcaaatatttgactttattttg

SEQ ID NO: 190582 - DNA, 70 bp, Homo sapiens
aaaaccaaaagcaaggcaaaggcaaagtatgtatcaaatatttgactttattttgtttcctaagatctca

SEQ ID NO: 190583 - DNA, 70 bp, Homo sapiens
gaactctcaaggatagtgatataacttaaccacctcgtattttttatgcagacttgtaaaaaaggcaaaa

SEQ ID NO: 190584 - DNA, 68 bp, Homo sapiens
ggatagtgatataacttaaccacctcgtattttttatgcagacttgtaaaaaaggcaaaaagggccca

SEQ ID NO: 190585 - DNA, 66 bp, Homo sapiens
ataacttaaccacctcgtattttttatgcagacttgtaaaaaaggcaaaaagggcccagcagaaaa

SEQ ID NO: 190586 - DNA, 67 bp, Homo sapiens
tcgtattttttatgcagacttgtaaaaaaggcaaaaagggcccagcagaaaagggcaaaggtggaaa

SEQ ID NO: 190587 - DNA, 68 bp, Homo sapiens
tttttatgcagacttgtaaaaaaggcaaaaagggcccagcagaaaagggcaaaggtggaaatggagga

SEQ ID NO: 190588 - DNA, 64 bp, Homo sapiens
acttgtaaaaaaggcaaaaagggcccagcagaaaagggcaaaggtggaaatggaggaggaaaac

SEQ ID NO: 190589 - DNA, 66 bp, Homo sapiens
caaaaagggcccagcagaaaagggcaaaggtggaaatggaggaggaaaacctccttctggtccaaa

SEQ ID NO: 190590 - DNA, 68 bp, Homo sapiens
ccagcagaaaagggcaaaggtggaaatggaggaggaaaacctccttctggtccaaaccgaatgaatgg

SEQ ID NO: 190591 - DNA, 69 bp, Homo sapiens
agaaaagggcaaaggtggaaatggaggaggaaaacctccttctggtccaaaccgaatgaatggtcatca

SEQ ID NO: 190592 - DNA, 70 bp, Homo sapiens
aaaggtggaaatggaggaggaaaacctccttctggtccaaaccgaatgaatggtcatcaccaacagaatg

SEQ ID NO: 190593 - DNA, 73 bp, Homo sapiens
aggaggaaaacctccttctggtccaaaccgaatgaatggtcatcaccaacagaatggagtggaaaacatgatg

SEQ ID NO: 190594 - DNA, 72 bp, Homo sapiens
aaaacctccttctggtccaaaccgaatgaatggtcatcaccaacagaatggagtggaaaacatgatgttgtt

SEQ ID NO: 190595 - DNA, 74 bp, Homo sapiens
tggtccaaaccgaatgaatggtcatcaccaacagaatggagtggaaaacatgatgttgtttgaagttgttaaaa

SEQ ID NO: 190596 - DNA, 77 bp, Homo sapiens
aatgaatggtcatcaccaacagaatggagtggaaaacatgatgttgtttgaagttgttaaaatgggcaagagtgcta

SEQ ID NO: 190597 - DNA, 77 bp, Homo sapiens
atcaccaacagaatggagtggaaaacatgatgttgtttgaagttgttaaaatgggcaagagtgctatgcaggtaaga

SEQ ID NO: 190598 - DNA, 75 bp, Homo sapiens
agaatggagtggaaaacatgatgttgtttgaagttgttaaaatgggcaagagtgctatgcaggtaagatttatgt

SEQ ID NO: 190599 - DNA, 74 bp, Homo sapiens
agtggaaaacatgatgttgtttgaagttgttaaaatgggcaagagtgctatgcaggtaagatttatgttgttct

SEQ ID NO: 190600 - DNA, 73 bp, Homo sapiens
atgttgtttgaagttgttaaaatgggcaagagtgctatgcaggtaagatttatgttgttcttcccagttcatt

SEQ ID NO: 190601 - DNA, 73 bp, Homo sapiens
gagaaaattagaagaagctaatgattttatttttttccctctgctgtagtcggtggtagatgattggatagaa

SEQ ID NO: 190602 - DNA, 77 bp, Homo sapiens
ttagaagaagctaatgattttatttttttccctctgctgtagtcggtggtagatgattggatagaatcatacaagca

SEQ ID NO: 190603 - DNA, 78 bp, Homo sapiens
aatgattttatttttttccctctgctgtagtcggtggtagatgattggatagaatcatacaagcatgaccgagatata

SEQ ID NO: 190604 - DNA, 80 bp, Homo sapiens
tttttccctctgctgtagtcggtggtagatgattggatagaatcatacaagcatgaccgagatatagcacttcttgacct

SEQ ID NO: 190605 - DNA, 81 bp, Homo sapiens
tgctgtagtcggtggtagatgattggatagaatcatacaagcatgaccgagatatagcacttcttgaccttatcaactttt

SEQ ID NO: 190606 - DNA, 79 bp, Homo sapiens
tagtcggtggtagatgattggatagaatcatacaagcatgaccgagatatagcacttcttgaccttatcaactttttta

SEQ ID NO: 190607 - DNA, 81 bp, Homo sapiens
tagatgattggatagaatcatacaagcatgaccgagatatagcacttcttgaccttatcaacttttttattcagtgttcag

SEQ ID NO: 190608 - DNA, 78 bp, Homo sapiens
atagaatcatacaagcatgaccgagatatagcacttcttgaccttatcaacttttttattcagtgttcaggctgtaaa

SEQ ID NO: 190609 - DNA, 76 bp, Homo sapiens
agcatgaccgagatatagcacttcttgaccttatcaacttttttattcagtgttcaggctgtaaaggtaagatata

SEQ ID NO: 190610 - DNA, 72 bp, Homo sapiens
accgagatatagcacttcttgaccttatcaacttttttattcagtgttcaggctgtaaaggtaagatatatt

SEQ ID NO: 190611 - DNA, 71 bp, Homo sapiens
agcacttcttgaccttatcaacttttttattcagtgttcaggctgtaaaggtaagatatatttattttgaa

SEQ ID NO: 190612 - DNA, 75 bp, Homo sapiens
gaccttatcaacttttttattcagtgttcaggctgtaaaggtaagatatatttattttgaaatcagcagctctca

SEQ ID NO: 190613 - DNA, 75 bp, Homo sapiens
tctttatttttttatcacaccatatattaacttctgacatttgcaaatttcaggagttgtcacagcagaaatgtt

SEQ ID NO: 190614 - DNA, 81 bp, Homo sapiens
tttttatcacaccatatattaacttctgacatttgcaaatttcaggagttgtcacagcagaaatgtttagacatatgcaga

SEQ ID NO: 190615 - DNA, 82 bp, Homo sapiens
catatattaacttctgacatttgcaaatttcaggagttgtcacagcagaaatgtttagacatatgcagaactctgagataat

SEQ ID NO: 190616 - DNA, 80 bp, Homo sapiens
cttctgacatttgcaaatttcaggagttgtcacagcagaaatgtttagacatatgcagaactctgagataattcgaaaaa

SEQ ID NO: 190617 - DNA, 80 bp, Homo sapiens
atttgcaaatttcaggagttgtcacagcagaaatgtttagacatatgcagaactctgagataattcgaaaaatgactgaa

SEQ ID NO: 190618 - DNA, 79 bp, Homo sapiens
aatttcaggagttgtcacagcagaaatgtttagacatatgcagaactctgagataattcgaaaaatgactgaagaattc

SEQ ID NO: 190619 - DNA, 80 bp, Homo sapiens
tcacagcagaaatgtttagacatatgcagaactctgagataattcgaaaaatgactgaagaattcgatgaggtaacttac

SEQ ID NO: 190620 - DNA, 76 bp, Homo sapiens
gaaatgtttagacatatgcagaactctgagataattcgaaaaatgactgaagaattcgatgaggtaacttactacc

SEQ ID NO: 190621 - DNA, 75 bp, Homo sapiens
gacatatgcagaactctgagataattcgaaaaatgactgaagaattcgatgaggtaacttactaccttaagtgtt

SEQ ID NO: 190622 - DNA, 73 bp, Homo sapiens
cagaactctgagataattcgaaaaatgactgaagaattcgatgaggtaacttactaccttaagtgttttgata

SEQ ID NO: 190623 - DNA, 73 bp, Homo sapiens
gataattcgaaaaatgactgaagaattcgatgaggtaacttactaccttaagtgttttgataacttatgcatg

SEQ ID NO: 190624 - DNA, 73 bp, Homo sapiens
agtcatgcattctaaatgaaattgctgttttaaatttttgttttaggatagtggagattatccacttaccatg

SEQ ID NO: 190625 - DNA, 71 bp, Homo sapiens
tctaaatgaaattgctgttttaaatttttgttttaggatagtggagattatccacttaccatggctggtcc

SEQ ID NO: 190626 - DNA, 71 bp, Homo sapiens
aattgctgttttaaatttttgttttaggatagtggagattatccacttaccatggctggtcctcagtggaa

SEQ ID NO: 190627 - DNA, 72 bp, Homo sapiens
taaatttttgttttaggatagtggagattatccacttaccatggctggtcctcagtggaagaagttcaaatc

SEQ ID NO: 190628 - DNA, 72 bp, Homo sapiens
tttgttttaggatagtggagattatccacttaccatggctggtcctcagtggaagaagttcaaatccagttt

SEQ ID NO: 190629 - DNA, 75 bp, Homo sapiens
atagtggagattatccacttaccatggctggtcctcagtggaagaagttcaaatccagtttttgtgaattcattg

SEQ ID NO: 190630 - DNA, 74 bp, Homo sapiens
attatccacttaccatggctggtcctcagtggaagaagttcaaatccagtttttgtgaattcattggcgtgtta

SEQ ID NO: 190631 - DNA, 75 bp, Homo sapiens
atggctggtcctcagtggaagaagttcaaatccagtttttgtgaattcattggcgtgttagtacggcaatgtcaa

SEQ ID NO: 190632 - DNA, 77 bp, Homo sapiens
ctcagtggaagaagttcaaatccagtttttgtgaattcattggcgtgttagtacggcaatgtcaatatagtatcata

SEQ ID NO: 190633 - DNA, 78 bp, Homo sapiens
aagaagttcaaatccagtttttgtgaattcattggcgtgttagtacggcaatgtcaatatagtatcatatatgatgag

SEQ ID NO: 190634 - DNA, 83 bp, Homo sapiens
aatccagtttttgtgaattcattggcgtgttagtacggcaatgtcaatatagtatcatatatgatgagtatatgatggataca

SEQ ID NO: 190635 - DNA, 85 bp, Homo sapiens
tttgtgaattcattggcgtgttagtacggcaatgtcaatatagtatcatatatgatgagtatatgatggatacagtcatttcact

SEQ ID NO: 190636 - DNA, 85 bp, Homo sapiens
ttcattggcgtgttagtacggcaatgtcaatatagtatcatatatgatgagtatatgatggatacagtcatttcacttcttacag

SEQ ID NO: 190637 - DNA, 86 bp, Homo sapiens
tgttagtacggcaatgtcaatatagtatcatatatgatgagtatatgatggatacagtcatttcacttcttacaggattgtctgac

SEQ ID NO: 190638 - DNA, 89 bp, Homo sapiens
tgtcaatatagtatcatatatgatgagtatatgatggatacagtcatttcacttcttacaggattgtctgactcacaagtcagagcatt

SEQ ID NO: 190639 - DNA, 89 bp, Homo sapiens
tatcatatatgatgagtatatgatggatacagtcatttcacttcttacaggattgtctgactcacaagtcagagcatttcgacatacaa

SEQ ID NO: 190640 - DNA, 88 bp, Homo sapiens
tatatgatgagtatatgatggatacagtcatttcacttcttacaggattgtctgactcacaagtcagagcatttcgacatacaagcac

SEQ ID NO: 190641 - DNA, 85 bp, Homo sapiens
tatatgatggatacagtcatttcacttcttacaggattgtctgactcacaagtcagagcatttcgacatacaagcaccctggcag

SEQ ID NO: 190642 - DNA, 78 bp, Homo sapiens
cttcttacaggattgtctgactcacaagtcagagcatttcgacatacaagcaccctggcaggtcggtatttagaaata

SEQ ID NO: 190643 - DNA, 78 bp, Homo sapiens
tacaggattgtctgactcacaagtcagagcatttcgacatacaagcaccctggcaggtcggtatttagaaatattttc

SEQ ID NO: 190644 - DNA, 78 bp, Homo sapiens
actcacaagtcagagcatttcgacatacaagcaccctggcaggtcggtatttagaaatattttctgcatattgtctta

SEQ ID NO: 190645 - DNA, 74 bp, Homo sapiens
gtgtctgttagattagtttcaccatacttttactctttaaaaatagctatgaagttgatgacagctttggtgaa

SEQ ID NO: 190646 - DNA, 75 bp, Homo sapiens
agattagtttcaccatacttttactctttaaaaatagctatgaagttgatgacagctttggtgaatgtggcacta

SEQ ID NO: 190647 - DNA, 76 bp, Homo sapiens
caccatacttttactctttaaaaatagctatgaagttgatgacagctttggtgaatgtggcactaaatcttagcat

SEQ ID NO: 190648 - DNA, 79 bp, Homo sapiens
tactctttaaaaatagctatgaagttgatgacagctttggtgaatgtggcactaaatcttagcattaatatggataata

SEQ ID NO: 190649 - DNA, 80 bp, Homo sapiens
aaaatagctatgaagttgatgacagctttggtgaatgtggcactaaatcttagcattaatatggataatacacaaagaca

SEQ ID NO: 190650 - DNA, 84 bp, Homo sapiens
tatgaagttgatgacagctttggtgaatgtggcactaaatcttagcattaatatggataatacacaaagacaatatgaagcaga

SEQ ID NO: 190651 - DNA, 79 bp, Homo sapiens
acagctttggtgaatgtggcactaaatcttagcattaatatggataatacacaaagacaatatgaagcagaacggaata

SEQ ID NO: 190652 - DNA, 79 bp, Homo sapiens
tggtgaatgtggcactaaatcttagcattaatatggataatacacaaagacaatatgaagcagaacggaataaaatgat

SEQ ID NO: 190653 - DNA, 77 bp, Homo sapiens
gtggcactaaatcttagcattaatatggataatacacaaagacaatatgaagcagaacggaataaaatgattggaaa

SEQ ID NO: 190654 - DNA, 78 bp, Homo sapiens
tagcattaatatggataatacacaaagacaatatgaagcagaacggaataaaatgattggaaaacgagccaatgagag

SEQ ID NO: 190655 - DNA, 78 bp, Homo sapiens
taatatggataatacacaaagacaatatgaagcagaacggaataaaatgattggaaaacgagccaatgagaggctaga

SEQ ID NO: 190656 - DNA, 76 bp, Homo sapiens
acaaagacaatatgaagcagaacggaataaaatgattggaaaacgagccaatgagaggctagaactcctgctacaa

SEQ ID NO: 190657 - DNA, 75 bp, Homo sapiens
tatgaagcagaacggaataaaatgattggaaaacgagccaatgagaggctagaactcctgctacaaaagcggaaa

SEQ ID NO: 190658 - DNA, 71 bp, Homo sapiens
aacggaataaaatgattggaaaacgagccaatgagaggctagaactcctgctacaaaagcggaaagaggta

SEQ ID NO: 190659 - DNA, 71 bp, Homo sapiens
aatgattggaaaacgagccaatgagaggctagaactcctgctacaaaagcggaaagaggtaaacttttata

SEQ ID NO: 190660 - DNA, 70 bp, Homo sapiens
aaaacgagccaatgagaggctagaactcctgctacaaaagcggaaagaggtaaacttttatattgaatat

SEQ ID NO: 190661 - DNA, 71 bp, Homo sapiens
aatgagaggctagaactcctgctacaaaagcggaaagaggtaaacttttatattgaatatttaggctattg

SEQ ID NO: 190662 - DNA, 70 bp, Homo sapiens
cttacaggtgttcatttggttgtcttcctttacaattgaaaagaaatgatgtgtttttttacagcttcag

SEQ ID NO: 190663 - DNA, 72 bp, Homo sapiens
catttggttgtcttcctttacaattgaaaagaaatgatgtgtttttttacagcttcaggaaaatcaagatga

SEQ ID NO: 190664 - DNA, 72 bp, Homo sapiens
tgtcttcctttacaattgaaaagaaatgatgtgtttttttacagcttcaggaaaatcaagatgaaatagaaa

SEQ ID NO: 190665 - DNA, 77 bp, Homo sapiens
caattgaaaagaaatgatgtgtttttttacagcttcaggaaaatcaagatgaaatagaaaatatgatgaatgcaata

SEQ ID NO: 190666 - DNA, 76 bp, Homo sapiens
atgatgtgtttttttacagcttcaggaaaatcaagatgaaatagaaaatatgatgaatgcaatatttaaaggagtg

SEQ ID NO: 190667 - DNA, 76 bp, Homo sapiens
tttttacagcttcaggaaaatcaagatgaaatagaaaatatgatgaatgcaatatttaaaggagtgtttgtacata

SEQ ID NO: 190668 - DNA, 77 bp, Homo sapiens
cagcttcaggaaaatcaagatgaaatagaaaatatgatgaatgcaatatttaaaggagtgtttgtacatagataccg

SEQ ID NO: 190669 - DNA, 77 bp, Homo sapiens
tcaagatgaaatagaaaatatgatgaatgcaatatttaaaggagtgtttgtacatagataccggtaagttgtgacag

SEQ ID NO: 190670 - DNA, 72 bp, Homo sapiens
atagaaaatatgatgaatgcaatatttaaaggagtgtttgtacatagataccggtaagttgtgacagttttt

SEQ ID NO: 190671 - DNA, 73 bp, Homo sapiens
aaatatgatgaatgcaatatttaaaggagtgtttgtacatagataccggtaagttgtgacagtttttttcata

SEQ ID NO: 190672 - DNA, 72 bp, Homo sapiens
gcaatatttaaaggagtgtttgtacatagataccggtaagttgtgacagtttttttcataaatagcattatg

SEQ ID NO: 190673 - DNA, 78 bp, Homo sapiens
ttgtggtatattggcactaattatgcatcgtttttccttcccccattcagtgatgcgatagctgaaattcgagctatt

SEQ ID NO: 190674 - DNA, 80 bp, Homo sapiens
attggcactaattatgcatcgtttttccttcccccattcagtgatgcgatagctgaaattcgagctatttgcattgaaga

SEQ ID NO: 190675 - DNA, 80 bp, Homo sapiens
attatgcatcgtttttccttcccccattcagtgatgcgatagctgaaattcgagctatttgcattgaagagattggcatt

SEQ ID NO: 190676 - DNA, 83 bp, Homo sapiens
tttccttcccccattcagtgatgcgatagctgaaattcgagctatttgcattgaagagattggcatttggatgaagatgtata

SEQ ID NO: 190677 - DNA, 86 bp, Homo sapiens
attcagtgatgcgatagctgaaattcgagctatttgcattgaagagattggcatttggatgaagatgtatagtgatgcctttctta

SEQ ID NO: 190678 - DNA, 85 bp, Homo sapiens
atgcgatagctgaaattcgagctatttgcattgaagagattggcatttggatgaagatgtatagtgatgcctttcttaatgacag

SEQ ID NO: 190679 - DNA, 82 bp, Homo sapiens
tgaaattcgagctatttgcattgaagagattggcatttggatgaagatgtatagtgatgcctttcttaatgacagttattta

SEQ ID NO: 190680 - DNA, 80 bp, Homo sapiens
cgagctatttgcattgaagagattggcatttggatgaagatgtatagtgatgcctttcttaatgacagttatttaaaata

SEQ ID NO: 190681 - DNA, 78 bp, Homo sapiens
tgaagagattggcatttggatgaagatgtatagtgatgcctttcttaatgacagttatttaaaatatgttggttggac

SEQ ID NO: 190682 - DNA, 81 bp, Homo sapiens
gattggcatttggatgaagatgtatagtgatgcctttcttaatgacagttatttaaaatatgttggttggactatgcatga

SEQ ID NO: 190683 - DNA, 79 bp, Homo sapiens
tgaagatgtatagtgatgcctttcttaatgacagttatttaaaatatgttggttggactatgcatgataaggtaagatg

SEQ ID NO: 190684 - DNA, 76 bp, Homo sapiens
atagtgatgcctttcttaatgacagttatttaaaatatgttggttggactatgcatgataaggtaagatgtgccct

SEQ ID NO: 190685 - DNA, 77 bp, Homo sapiens
ttcttaatgacagttatttaaaatatgttggttggactatgcatgataaggtaagatgtgcccttcagactgcttct

SEQ ID NO: 190686 - DNA, 77 bp, Homo sapiens
aatgacagttatttaaaatatgttggttggactatgcatgataaggtaagatgtgcccttcagactgcttctttcta

SEQ ID NO: 190687 - DNA, 70 bp, Homo sapiens
tttttttttagcaaggtgaagtaagactcaaatgtcttactgctctacaagggctttattataacaaaga

SEQ ID NO: 190688 - DNA, 74 bp, Homo sapiens
tagcaaggtgaagtaagactcaaatgtcttactgctctacaagggctttattataacaaagagcttaattccaa

SEQ ID NO: 190689 - DNA, 71 bp, Homo sapiens
agtaagactcaaatgtcttactgctctacaagggctttattataacaaagagcttaattccaaactggaac

SEQ ID NO: 190690 - DNA, 69 bp, Homo sapiens
actcaaatgtcttactgctctacaagggctttattataacaaagagcttaattccaaactggaactttt

SEQ ID NO: 190691 - DNA, 69 bp, Homo sapiens
tgctctacaagggctttattataacaaagagcttaattccaaactggaactttttaccagtcggttcaa

SEQ ID NO: 190692 - DNA, 65 bp, Homo sapiens
gggctttattataacaaagagcttaattccaaactggaactttttaccagtcggttcaaggttag

SEQ ID NO: 190693 - DNA, 65 bp, Homo sapiens
ataacaaagagcttaattccaaactggaactttttaccagtcggttcaaggttagtattacttaa

SEQ ID NO: 190694 - DNA, 66 bp, Homo sapiens
gagcttaattccaaactggaactttttaccagtcggttcaaggttagtattacttaagaatttaca

SEQ ID NO: 190695 - DNA, 64 bp, Homo sapiens
ttccaaactggaactttttaccagtcggttcaaggttagtattacttaagaatttacaaataac

SEQ ID NO: 190696 - DNA, 75 bp, Homo sapiens
ttttaatttttttgtccttaggatagaattgtgtctatgacccttgacaaagaatatgatgttgcagtacaagca

SEQ ID NO: 190697 - DNA, 78 bp, Homo sapiens
tttgtccttaggatagaattgtgtctatgacccttgacaaagaatatgatgttgcagtacaagcaataaaattactca

SEQ ID NO: 190698 - DNA, 78 bp, Homo sapiens
ttaggatagaattgtgtctatgacccttgacaaagaatatgatgttgcagtacaagcaataaaattactcactcttgt

SEQ ID NO: 190699 - DNA, 77 bp, Homo sapiens
gaattgtgtctatgacccttgacaaagaatatgatgttgcagtacaagcaataaaattactcactcttgttttacag

SEQ ID NO: 190700 - DNA, 75 bp, Homo sapiens
gacccttgacaaagaatatgatgttgcagtacaagcaataaaattactcactcttgttttacagtaagtatgtat

SEQ ID NO: 190701 - DNA, 78 bp, Homo sapiens
gacaaagaatatgatgttgcagtacaagcaataaaattactcactcttgttttacagtaagtatgtatttgttgcata

SEQ ID NO: 190702 - DNA, 79 bp, Homo sapiens
tgatgttgcagtacaagcaataaaattactcactcttgttttacagtaagtatgtatttgttgcatatttgcactaatg

SEQ ID NO: 190703 - DNA, 78 bp, Homo sapiens
caagcaataaaattactcactcttgttttacagtaagtatgtatttgttgcatatttgcactaatgttcagatatcta

SEQ ID NO: 190704 - DNA, 70 bp, Homo sapiens
cttagaattaggacgttactaaaagcacctgttactgcttatttcttaggagtagtgaagaagttctcac

SEQ ID NO: 190705 - DNA, 74 bp, Homo sapiens
acgttactaaaagcacctgttactgcttatttcttaggagtagtgaagaagttctcactgcagaagattgtgaa

SEQ ID NO: 190706 - DNA, 78 bp, Homo sapiens
taaaagcacctgttactgcttatttcttaggagtagtgaagaagttctcactgcagaagattgtgaaaatgtctatca

SEQ ID NO: 190707 - DNA, 79 bp, Homo sapiens
ttactgcttatttcttaggagtagtgaagaagttctcactgcagaagattgtgaaaatgtctatcatctggtttattca

SEQ ID NO: 190708 - DNA, 79 bp, Homo sapiens
ttatttcttaggagtagtgaagaagttctcactgcagaagattgtgaaaatgtctatcatctggtttattcagctcacc

SEQ ID NO: 190709 - DNA, 81 bp, Homo sapiens
agtagtgaagaagttctcactgcagaagattgtgaaaatgtctatcatctggtttattcagctcaccggccagtagcagta

SEQ ID NO: 190710 - DNA, 84 bp, Homo sapiens
ttctcactgcagaagattgtgaaaatgtctatcatctggtttattcagctcaccggccagtagcagtagcagctggagaatttc

SEQ ID NO: 190711 - DNA, 81 bp, Homo sapiens
agaagattgtgaaaatgtctatcatctggtttattcagctcaccggccagtagcagtagcagctggagaatttctctacaa

SEQ ID NO: 190712 - DNA, 79 bp, Homo sapiens
attgtgaaaatgtctatcatctggtttattcagctcaccggccagtagcagtagcagctggagaatttctctacaaaaa

SEQ ID NO: 190713 - DNA, 80 bp, Homo sapiens
tctatcatctggtttattcagctcaccggccagtagcagtagcagctggagaatttctctacaaaaagtaaatctatata

SEQ ID NO: 190714 - DNA, 79 bp, Homo sapiens
tttattcagctcaccggccagtagcagtagcagctggagaatttctctacaaaaagtaaatctatatatctgttactca

SEQ ID NO: 190715 - DNA, 77 bp, Homo sapiens
tcaccggccagtagcagtagcagctggagaatttctctacaaaaagtaaatctatatatctgttactcattttctaa

SEQ ID NO: 190716 - DNA, 71 bp, Homo sapiens
gttgttgttgtcgtaaaataaatattttacttttttcacaggctcttcagtcgtagagatccagaggagga

SEQ ID NO: 190717 - DNA, 74 bp, Homo sapiens
tcgtaaaataaatattttacttttttcacaggctcttcagtcgtagagatccagaggaggatggaatgatgaaa

SEQ ID NO: 190718 - DNA, 74 bp, Homo sapiens
aatattttacttttttcacaggctcttcagtcgtagagatccagaggaggatggaatgatgaaaagaagaggaa

SEQ ID NO: 190719 - DNA, 75 bp, Homo sapiens
tttacttttttcacaggctcttcagtcgtagagatccagaggaggatggaatgatgaaaagaagaggaagacaag

SEQ ID NO: 190720 - DNA, 77 bp, Homo sapiens
acaggctcttcagtcgtagagatccagaggaggatggaatgatgaaaagaagaggaagacaaggtccaaatgccaac

SEQ ID NO: 190721 - DNA, 74 bp, Homo sapiens
agtcgtagagatccagaggaggatggaatgatgaaaagaagaggaagacaaggtccaaatgccaaccttgttaa

SEQ ID NO: 190722 - DNA, 73 bp, Homo sapiens
tccagaggaggatggaatgatgaaaagaagaggaagacaaggtccaaatgccaaccttgttaagacattggtt

SEQ ID NO: 190723 - DNA, 70 bp, Homo sapiens
ggaggatggaatgatgaaaagaagaggaagacaaggtccaaatgccaaccttgttaagacattggttttt

SEQ ID NO: 190724 - DNA, 70 bp, Homo sapiens
tgatgaaaagaagaggaagacaaggtccaaatgccaaccttgttaagacattggtttttttctttctaga

SEQ ID NO: 190725 - DNA, 67 bp, Homo sapiens
ggaagacaaggtccaaatgccaaccttgttaagacattggtttttttctttctagaaagtgaggtta

SEQ ID NO: 190726 - DNA, 67 bp, Homo sapiens
aggtccaaatgccaaccttgttaagacattggtttttttctttctagaaagtgaggttagttgatag

SEQ ID NO: 190727 - DNA, 67 bp, Homo sapiens
aatgccaaccttgttaagacattggtttttttctttctagaaagtgaggttagttgatagtatttat

SEQ ID NO: 190728 - DNA, 66 bp, Homo sapiens
gttaagacattggtttttttctttctagaaagtgaggttagttgatagtatttattttatacttag

SEQ ID NO: 190729 - DNA, 78 bp, Homo sapiens
aaggctagtatgataattgtctaagaccacattgctctttttaaattttagttacatgagcatgcagcataccttgtg

SEQ ID NO: 190730 - DNA, 80 bp, Homo sapiens
ataattgtctaagaccacattgctctttttaaattttagttacatgagcatgcagcataccttgtggatagcatgtggga

SEQ ID NO: 190731 - DNA, 83 bp, Homo sapiens
taagaccacattgctctttttaaattttagttacatgagcatgcagcataccttgtggatagcatgtgggactgtgctactga

SEQ ID NO: 190732 - DNA, 84 bp, Homo sapiens
tctttttaaattttagttacatgagcatgcagcataccttgtggatagcatgtgggactgtgctactgagctgctgaaagactg

SEQ ID NO: 190733 - DNA, 88 bp, Homo sapiens
ttttagttacatgagcatgcagcataccttgtggatagcatgtgggactgtgctactgagctgctgaaagactgggaatgtatgaata

SEQ ID NO: 190734 - DNA, 90 bp, Homo sapiens
ttacatgagcatgcagcataccttgtggatagcatgtgggactgtgctactgagctgctgaaagactgggaatgtatgaatagcttgtta

SEQ ID NO: 190735 - DNA, 84 bp, Homo sapiens
agcataccttgtggatagcatgtgggactgtgctactgagctgctgaaagactgggaatgtatgaatagcttgttactggaaga

SEQ ID NO: 190736 - DNA, 84 bp, Homo sapiens
ttgtggatagcatgtgggactgtgctactgagctgctgaaagactgggaatgtatgaatagcttgttactggaagagccactta

SEQ ID NO: 190737 - DNA, 81 bp, Homo sapiens
atgtgggactgtgctactgagctgctgaaagactgggaatgtatgaatagcttgttactggaagagccacttagtggagag

SEQ ID NO: 190738 - DNA, 80 bp, Homo sapiens
tgtgctactgagctgctgaaagactgggaatgtatgaatagcttgttactggaagagccacttagtggagaggaaggtaa

SEQ ID NO: 190739 - DNA, 75 bp, Homo sapiens
ctgctgaaagactgggaatgtatgaatagcttgttactggaagagccacttagtggagaggaaggtaaggatgtt

SEQ ID NO: 190740 - DNA, 74 bp, Homo sapiens
actgggaatgtatgaatagcttgttactggaagagccacttagtggagaggaaggtaaggatgtttaattatga

SEQ ID NO: 190741 - DNA, 74 bp, Homo sapiens
gaatgtatgaatagcttgttactggaagagccacttagtggagaggaaggtaaggatgtttaattatgatattt

SEQ ID NO: 190742 - DNA, 71 bp, Homo sapiens
agcttgttactggaagagccacttagtggagaggaaggtaaggatgtttaattatgatatttttgtttaga

SEQ ID NO: 190743 - DNA, 78 bp, Homo sapiens
tttttttttagcactaacagataggcaagagagtgctctgattgaaataatgctttgtaccattagacaagcggctga

SEQ ID NO: 190744 - DNA, 82 bp, Homo sapiens
ttttagcactaacagataggcaagagagtgctctgattgaaataatgctttgtaccattagacaagcggctgaatgtcatcc

SEQ ID NO: 190745 - DNA, 80 bp, Homo sapiens
ataggcaagagagtgctctgattgaaataatgctttgtaccattagacaagcggctgaatgtcatcctcccgtgggaaga

SEQ ID NO: 190746 - DNA, 78 bp, Homo sapiens
aagagagtgctctgattgaaataatgctttgtaccattagacaagcggctgaatgtcatcctcccgtgggaagaggga

SEQ ID NO: 190747 - DNA, 73 bp, Homo sapiens
attgaaataatgctttgtaccattagacaagcggctgaatgtcatcctcccgtgggaagagggacaggaaaaa

SEQ ID NO: 190748 - DNA, 72 bp, Homo sapiens
ataatgctttgtaccattagacaagcggctgaatgtcatcctcccgtgggaagagggacaggaaaaagggta

SEQ ID NO: 190749 - DNA, 74 bp, Homo sapiens
cattagacaagcggctgaatgtcatcctcccgtgggaagagggacaggaaaaagggtatgccaatcaatgtctt

SEQ ID NO: 190750 - DNA, 73 bp, Homo sapiens
aagcggctgaatgtcatcctcccgtgggaagagggacaggaaaaagggtatgccaatcaatgtcttttcaata

SEQ ID NO: 190751 - DNA, 71 bp, Homo sapiens
aatgtcatcctcccgtgggaagagggacaggaaaaagggtatgccaatcaatgtcttttcaatattctaaa

SEQ ID NO: 190752 - DNA, 72 bp, Homo sapiens
acacttaacagtgctaatgggcttaataaatacagaagtctttctgttcctttaggtgcttacagcaaagga

SEQ ID NO: 190753 - DNA, 72 bp, Homo sapiens
taatgggcttaataaatacagaagtctttctgttcctttaggtgcttacagcaaaggagaagaagacacagt

SEQ ID NO: 190754 - DNA, 74 bp, Homo sapiens
ttaataaatacagaagtctttctgttcctttaggtgcttacagcaaaggagaagaagacacagttggatgatag

SEQ ID NO: 190755 - DNA, 74 bp, Homo sapiens
tacagaagtctttctgttcctttaggtgcttacagcaaaggagaagaagacacagttggatgataggacaaaaa

SEQ ID NO: 190756 - DNA, 75 bp, Homo sapiens
ttctgttcctttaggtgcttacagcaaaggagaagaagacacagttggatgataggacaaaaatcactgagcttt

SEQ ID NO: 190757 - DNA, 76 bp, Homo sapiens
tttaggtgcttacagcaaaggagaagaagacacagttggatgataggacaaaaatcactgagctttttgccgtggc

SEQ ID NO: 190758 - DNA, 74 bp, Homo sapiens
caaaggagaagaagacacagttggatgataggacaaaaatcactgagctttttgccgtggcccttcctcagtta

SEQ ID NO: 190759 - DNA, 74 bp, Homo sapiens
agaagacacagttggatgataggacaaaaatcactgagctttttgccgtggcccttcctcagttattagcaaaa

SEQ ID NO: 190760 - DNA, 71 bp, Homo sapiens
agttggatgataggacaaaaatcactgagctttttgccgtggcccttcctcagttattagcaaaagtaagt

SEQ ID NO: 190761 - DNA, 72 bp, Homo sapiens
taggacaaaaatcactgagctttttgccgtggcccttcctcagttattagcaaaagtaagtttgtgtcaata

SEQ ID NO: 190762 - DNA, 74 bp, Homo sapiens
aatcactgagctttttgccgtggcccttcctcagttattagcaaaagtaagtttgtgtcaatatcatagtgtta

SEQ ID NO: 190763 - DNA, 71 bp, Homo sapiens
tttttgccgtggcccttcctcagttattagcaaaagtaagtttgtgtcaatatcatagtgttactaagaaa

SEQ ID NO: 190764 - DNA, 76 bp, Homo sapiens
aatattataatgctttcttattgtgatatttttaacgtgatctttatatttcacagtactctgtagatgcagaaaa

SEQ ID NO: 190765 - DNA, 77 bp, Homo sapiens
gatgcagaaaaggtgactaacttgttgcagttgcctcagtactttgatttggaaatatataccactggacgattaga

SEQ ID NO: 190766 - DNA, 72 bp, Homo sapiens
aaaggtgactaacttgttgcagttgcctcagtactttgatttggaaatatataccactggacgattagaaaa

SEQ ID NO: 190767 - DNA, 72 bp, Homo sapiens
aacttgttgcagttgcctcagtactttgatttggaaatatataccactggacgattagaaaaggtaagatta

SEQ ID NO: 190768 - DNA, 73 bp, Homo sapiens
gcagttgcctcagtactttgatttggaaatatataccactggacgattagaaaaggtaagattattttgtgta

SEQ ID NO: 190769 - DNA, 69 bp, Homo sapiens
tcagtactttgatttggaaatatataccactggacgattagaaaaggtaagattattttgtgtaaaaaa

SEQ ID NO: 190770 - DNA, 65 bp, Homo sapiens
gatttggaaatatataccactggacgattagaaaaggtaagattattttgtgtaaaaaaaacctt

SEQ ID NO: 190771 - DNA, 78 bp, Homo sapiens
acctatcatatatgccttagttttgatgaaaaatattattattttgcagcatttggatgccttattgcgacagatccg

SEQ ID NO: 190772 - DNA, 78 bp, Homo sapiens
tgccttagttttgatgaaaaatattattattttgcagcatttggatgccttattgcgacagatccggaatattgtaga

SEQ ID NO: 190773 - DNA, 80 bp, Homo sapiens
ttttgatgaaaaatattattattttgcagcatttggatgccttattgcgacagatccggaatattgtagagaagcacaca

SEQ ID NO: 190774 - DNA, 81 bp, Homo sapiens
atattattattttgcagcatttggatgccttattgcgacagatccggaatattgtagagaagcacacagatacagatgttt

SEQ ID NO: 190775 - DNA, 83 bp, Homo sapiens
ttattttgcagcatttggatgccttattgcgacagatccggaatattgtagagaagcacacagatacagatgttttggaagca

SEQ ID NO: 190776 - DNA, 80 bp, Homo sapiens
tttggatgccttattgcgacagatccggaatattgtagagaagcacacagatacagatgttttggaagcatgttctaaaa

SEQ ID NO: 190777 - DNA, 78 bp, Homo sapiens
cttattgcgacagatccggaatattgtagagaagcacacagatacagatgttttggaagcatgttctaaaacttacca

SEQ ID NO: 190778 - DNA, 80 bp, Homo sapiens
atccggaatattgtagagaagcacacagatacagatgttttggaagcatgttctaaaacttaccatgcactctgtaatga

SEQ ID NO: 190779 - DNA, 79 bp, Homo sapiens
aatattgtagagaagcacacagatacagatgttttggaagcatgttctaaaacttaccatgcactctgtaatgaagagt

SEQ ID NO: 190780 - DNA, 80 bp, Homo sapiens
aagcacacagatacagatgttttggaagcatgttctaaaacttaccatgcactctgtaatgaagagttcacaatcttcaa

SEQ ID NO: 190781 - DNA, 80 bp, Homo sapiens
tacagatgttttggaagcatgttctaaaacttaccatgcactctgtaatgaagagttcacaatcttcaacagagtagata

SEQ ID NO: 190782 - DNA, 78 bp, Homo sapiens
ttttggaagcatgttctaaaacttaccatgcactctgtaatgaagagttcacaatcttcaacagagtagatatttcaa

SEQ ID NO: 190783 - DNA, 79 bp, Homo sapiens
ttctaaaacttaccatgcactctgtaatgaagagttcacaatcttcaacagagtagatatttcaagaagtcaactgata

SEQ ID NO: 190784 - DNA, 80 bp, Homo sapiens
aaacttaccatgcactctgtaatgaagagttcacaatcttcaacagagtagatatttcaagaagtcaactgatagatgaa

SEQ ID NO: 190785 - DNA, 81 bp, Homo sapiens
cactctgtaatgaagagttcacaatcttcaacagagtagatatttcaagaagtcaactgatagatgaattggcagataaat

SEQ ID NO: 190786 - DNA, 77 bp, Homo sapiens
gaagagttcacaatcttcaacagagtagatatttcaagaagtcaactgatagatgaattggcagataaatttaaccg

SEQ ID NO: 190787 - DNA, 77 bp, Homo sapiens
atcttcaacagagtagatatttcaagaagtcaactgatagatgaattggcagataaatttaaccggcttcttgaaga

SEQ ID NO: 190788 - DNA, 75 bp, Homo sapiens
caacagagtagatatttcaagaagtcaactgatagatgaattggcagataaatttaaccggcttcttgaagattt

SEQ ID NO: 190789 - DNA, 76 bp, Homo sapiens
tttcaagaagtcaactgatagatgaattggcagataaatttaaccggcttcttgaagattttctgcaagaggtata

SEQ ID NO: 190790 - DNA, 77 bp, Homo sapiens
gaagtcaactgatagatgaattggcagataaatttaaccggcttcttgaagattttctgcaagaggtatatattata

SEQ ID NO: 190791 - DNA, 76 bp, Homo sapiens
gatagatgaattggcagataaatttaaccggcttcttgaagattttctgcaagaggtatatattataactattaca

SEQ ID NO: 190792 - DNA, 71 bp, Homo sapiens
ggcagataaatttaaccggcttcttgaagattttctgcaagaggtatatattataactattacaagtattt

SEQ ID NO: 190793 - DNA, 73 bp, Homo sapiens
gtgacattttgatagcctaggagttttcactttgatggttcttaatgtataattaatatttatagggtgaaga

SEQ ID NO: 190794 - DNA, 74 bp, Homo sapiens
gcctaggagttttcactttgatggttcttaatgtataattaatatttatagggtgaagaacctgatgaagatga

SEQ ID NO: 190795 - DNA, 77 bp, Homo sapiens
gttttcactttgatggttcttaatgtataattaatatttatagggtgaagaacctgatgaagatgatgcatatcagg

SEQ ID NO: 190796 - DNA, 82 bp, Homo sapiens
tgatggttcttaatgtataattaatatttatagggtgaagaacctgatgaagatgatgcatatcaggtattgtcaacattga

SEQ ID NO: 190797 - DNA, 83 bp, Homo sapiens
atgtataattaatatttatagggtgaagaacctgatgaagatgatgcatatcaggtattgtcaacattgaagaggatcactgc

SEQ ID NO: 190798 - DNA, 80 bp, Homo sapiens
aattaatatttatagggtgaagaacctgatgaagatgatgcatatcaggtattgtcaacattgaagaggatcactgcttt

SEQ ID NO: 190799 - DNA, 82 bp, Homo sapiens
ttatagggtgaagaacctgatgaagatgatgcatatcaggtattgtcaacattgaagaggatcactgcttttcataagtaag

SEQ ID NO: 190800 - DNA, 80 bp, Homo sapiens
aagaacctgatgaagatgatgcatatcaggtattgtcaacattgaagaggatcactgcttttcataagtaagttgaattt

SEQ ID NO: 190801 - DNA, 78 bp, Homo sapiens
atgatgcatatcaggtattgtcaacattgaagaggatcactgcttttcataagtaagttgaattttgaagttcctgtt

SEQ ID NO: 190802 - DNA, 76 bp, Homo sapiens
gcatatcaggtattgtcaacattgaagaggatcactgcttttcataagtaagttgaattttgaagttcctgttttc

SEQ ID NO: 190803 - DNA, 73 bp, Homo sapiens
ttgtcaacattgaagaggatcactgcttttcataagtaagttgaattttgaagttcctgttttcttaaatctg

SEQ ID NO: 190804 - DNA, 71 bp, Homo sapiens
attgaagaggatcactgcttttcataagtaagttgaattttgaagttcctgttttcttaaatctgtagaaa

SEQ ID NO: 190805 - DNA, 68 bp, Homo sapiens
ttttttttacagtgcccatgacctttcaaagtgggatttatttgcttgtaattacaaactcttgaaaa

SEQ ID NO: 190806 - DNA, 70 bp, Homo sapiens
agtgcccatgacctttcaaagtgggatttatttgcttgtaattacaaactcttgaaaactggaatcgaaa

SEQ ID NO: 190807 - DNA, 70 bp, Homo sapiens
gacctttcaaagtgggatttatttgcttgtaattacaaactcttgaaaactggaatcgaaaatggagaca

SEQ ID NO: 190808 - DNA, 73 bp, Homo sapiens
gtgggatttatttgcttgtaattacaaactcttgaaaactggaatcgaaaatggagacatgcctgagcaggtt

SEQ ID NO: 190809 - DNA, 72 bp, Homo sapiens
ttatttgcttgtaattacaaactcttgaaaactggaatcgaaaatggagacatgcctgagcaggtttttatt

SEQ ID NO: 190810 - DNA, 72 bp, Homo sapiens
gtaattacaaactcttgaaaactggaatcgaaaatggagacatgcctgagcaggtttttatttatttgctag

SEQ ID NO: 190811 - DNA, 74 bp, Homo sapiens
ctcttgaaaactggaatcgaaaatggagacatgcctgagcaggtttttatttatttgctagttacacatttatc

SEQ ID NO: 190812 - DNA, 73 bp, Homo sapiens
ctggaatcgaaaatggagacatgcctgagcaggtttttatttatttgctagttacacatttatctttgaaaag

SEQ ID NO: 190813 - DNA, 70 bp, Homo sapiens
tgaaaagtgaagtcttgtgacttttaaattttaactgtatcctttgattctttttacagattgttattca

SEQ ID NO: 190814 - DNA, 72 bp, Homo sapiens
cttgtgacttttaaattttaactgtatcctttgattctttttacagattgttattcacgcactgcagtgtac

SEQ ID NO: 190815 - DNA, 75 bp, Homo sapiens
ttaaattttaactgtatcctttgattctttttacagattgttattcacgcactgcagtgtactcactatgtaatc

SEQ ID NO: 190816 - DNA, 75 bp, Homo sapiens
ttttaactgtatcctttgattctttttacagattgttattcacgcactgcagtgtactcactatgtaatcctttg

SEQ ID NO: 190817 - DNA, 78 bp, Homo sapiens
tttgattctttttacagattgttattcacgcactgcagtgtactcactatgtaatcctttggcaacttgctaagataa

SEQ ID NO: 190818 - DNA, 78 bp, Homo sapiens
tctttttacagattgttattcacgcactgcagtgtactcactatgtaatcctttggcaacttgctaagataactgaaa

SEQ ID NO: 190819 - DNA, 80 bp, Homo sapiens
attgttattcacgcactgcagtgtactcactatgtaatcctttggcaacttgctaagataactgaaagcagctctacaaa

SEQ ID NO: 190820 - DNA, 77 bp, Homo sapiens
actgcagtgtactcactatgtaatcctttggcaacttgctaagataactgaaagcagctctacaaaggtttgtggtg

SEQ ID NO: 190821 - DNA, 76 bp, Homo sapiens
tactcactatgtaatcctttggcaacttgctaagataactgaaagcagctctacaaaggtttgtggtggttcagta

SEQ ID NO: 190822 - DNA, 72 bp, Homo sapiens
taatcctttggcaacttgctaagataactgaaagcagctctacaaaggtttgtggtggttcagtagtgtttt

SEQ ID NO: 190823 - DNA, 72 bp, Homo sapiens
ctttggcaacttgctaagataactgaaagcagctctacaaaggtttgtggtggttcagtagtgtttttatta

SEQ ID NO: 190824 - DNA, 73 bp, Homo sapiens
gctaagataactgaaagcagctctacaaaggtttgtggtggttcagtagtgtttttattagactaaatatcat

SEQ ID NO: 190825 - DNA, 63 bp, Homo sapiens
atattttttaaaagttaatgttaaattttttcaaggaggacttgctgcgtttaaagaaacaaa

SEQ ID NO: 190826 - DNA, 66 bp, Homo sapiens
aaagttaatgttaaattttttcaaggaggacttgctgcgtttaaagaaacaaatgagagtattttg

SEQ ID NO: 190827 - DNA, 72 bp, Homo sapiens
gttaaattttttcaaggaggacttgctgcgtttaaagaaacaaatgagagtattttgtcagatatgtcaaca

SEQ ID NO: 190828 - DNA, 74 bp, Homo sapiens
tttttcaaggaggacttgctgcgtttaaagaaacaaatgagagtattttgtcagatatgtcaacattacctgac

SEQ ID NO: 190829 - DNA, 75 bp, Homo sapiens
acttgctgcgtttaaagaaacaaatgagagtattttgtcagatatgtcaacattacctgaccaacgtgaatacta

SEQ ID NO: 190830 - DNA, 74 bp, Homo sapiens
ttaaagaaacaaatgagagtattttgtcagatatgtcaacattacctgaccaacgtgaatactactgttaagga

SEQ ID NO: 190831 - DNA, 73 bp, Homo sapiens
aaatgagagtattttgtcagatatgtcaacattacctgaccaacgtgaatactactgttaaggaacaggttag

SEQ ID NO: 190832 - DNA, 72 bp, Homo sapiens
gtattttgtcagatatgtcaacattacctgaccaacgtgaatactactgttaaggaacaggttagtaattac

SEQ ID NO: 190833 - DNA, 75 bp, Homo sapiens
tcagatatgtcaacattacctgaccaacgtgaatactactgttaaggaacaggttagtaattactatagatggta

SEQ ID NO: 190834 - DNA, 70 bp, Homo sapiens
caacattacctgaccaacgtgaatactactgttaaggaacaggttagtaattactatagatggtaatctt

SEQ ID NO: 190835 - DNA, 71 bp, Homo sapiens
ctgaccaacgtgaatactactgttaaggaacaggttagtaattactatagatggtaatctttttgtaagca

SEQ ID NO: 190836 - DNA, 81 bp, Homo sapiens
tttttaaataggccttcactattctgtgtgatattttgatgatcttcagccatcagattatgtcaggagggcgtgacatgt

SEQ ID NO: 190837 - DNA, 85 bp, Homo sapiens
ataggccttcactattctgtgtgatattttgatgatcttcagccatcagattatgtcaggagggcgtgacatgttagagccatta

SEQ ID NO: 190838 - DNA, 84 bp, Homo sapiens
actattctgtgtgatattttgatgatcttcagccatcagattatgtcaggagggcgtgacatgttagagccattagtgtatacc

SEQ ID NO: 190839 - DNA, 83 bp, Homo sapiens
atattttgatgatcttcagccatcagattatgtcaggagggcgtgacatgttagagccattagtgtatacccctgattcttca

SEQ ID NO: 190840 - DNA, 86 bp, Homo sapiens
ttgatgatcttcagccatcagattatgtcaggagggcgtgacatgttagagccattagtgtatacccctgattcttcattgcagtc

SEQ ID NO: 190841 - DNA, 85 bp, Homo sapiens
agccatcagattatgtcaggagggcgtgacatgttagagccattagtgtatacccctgattcttcattgcagtctgagttgctca

SEQ ID NO: 190842 - DNA, 82 bp, Homo sapiens
attatgtcaggagggcgtgacatgttagagccattagtgtatacccctgattcttcattgcagtctgagttgctcagcttta

SEQ ID NO: 190843 - DNA, 81 bp, Homo sapiens
agggcgtgacatgttagagccattagtgtatacccctgattcttcattgcagtctgagttgctcagctttattttggatca

SEQ ID NO: 190844 - DNA, 83 bp, Homo sapiens
atgttagagccattagtgtatacccctgattcttcattgcagtctgagttgctcagctttattttggatcatgtcttcattga

SEQ ID NO: 190845 - DNA, 85 bp, Homo sapiens
ttagtgtatacccctgattcttcattgcagtctgagttgctcagctttattttggatcatgtcttcattgaacaggatgatgata

SEQ ID NO: 190846 - DNA, 86 bp, Homo sapiens
ccctgattcttcattgcagtctgagttgctcagctttattttggatcatgtcttcattgaacaggatgatgataataatagtgcag

SEQ ID NO: 190847 - DNA, 85 bp, Homo sapiens
tcattgcagtctgagttgctcagctttattttggatcatgtcttcattgaacaggatgatgataataatagtgcaggtaatttta

SEQ ID NO: 190848 - DNA, 82 bp, Homo sapiens
agtctgagttgctcagctttattttggatcatgtcttcattgaacaggatgatgataataatagtgcaggtaattttattgc

SEQ ID NO: 190849 - DNA, 81 bp, Homo sapiens
ttgctcagctttattttggatcatgtcttcattgaacaggatgatgataataatagtgcaggtaattttattgccatcttt

SEQ ID NO: 190850 - DNA, 80 bp, Homo sapiens
ttggatcatgtcttcattgaacaggatgatgataataatagtgcaggtaattttattgccatctttttattaaatctgtg

SEQ ID NO: 190851 - DNA, 75 bp, Homo sapiens
ttgaaataaaatacaagatgcttaatgtttgggactttttctccagatggtcagcaagaggatgaagccagtaaa

SEQ ID NO: 190852 - DNA, 74 bp, Homo sapiens
aaaatacaagatgcttaatgtttgggactttttctccagatggtcagcaagaggatgaagccagtaaaattgaa

SEQ ID NO: 190853 - DNA, 77 bp, Homo sapiens
cttaatgtttgggactttttctccagatggtcagcaagaggatgaagccagtaaaattgaagctctgcacaagagaa

SEQ ID NO: 190854 - DNA, 76 bp, Homo sapiens
tttgggactttttctccagatggtcagcaagaggatgaagccagtaaaattgaagctctgcacaagagaagaaatt

SEQ ID NO: 190855 - DNA, 80 bp, Homo sapiens
tttctccagatggtcagcaagaggatgaagccagtaaaattgaagctctgcacaagagaagaaatttacttgcagcattt

SEQ ID NO: 190856 - DNA, 80 bp, Homo sapiens
tcagcaagaggatgaagccagtaaaattgaagctctgcacaagagaagaaatttacttgcagcattttgtaagctaattg

SEQ ID NO: 190857 - DNA, 78 bp, Homo sapiens
aggatgaagccagtaaaattgaagctctgcacaagagaagaaatttacttgcagcattttgtaagctaattgtatata

SEQ ID NO: 190858 - DNA, 77 bp, Homo sapiens
agtaaaattgaagctctgcacaagagaagaaatttacttgcagcattttgtaagctaattgtatatactgtggtgga

SEQ ID NO: 190859 - DNA, 81 bp, Homo sapiens
attgaagctctgcacaagagaagaaatttacttgcagcattttgtaagctaattgtatatactgtggtggagatgaataca

SEQ ID NO: 190860 - DNA, 82 bp, Homo sapiens
aagagaagaaatttacttgcagcattttgtaagctaattgtatatactgtggtggagatgaatacagctgcagatatcttca

SEQ ID NO: 190861 - DNA, 82 bp, Homo sapiens
aatttacttgcagcattttgtaagctaattgtatatactgtggtggagatgaatacagctgcagatatcttcaaacagtata

SEQ ID NO: 190862 - DNA, 81 bp, Homo sapiens
agcattttgtaagctaattgtatatactgtggtggagatgaatacagctgcagatatcttcaaacagtatatgaaggtaaa

SEQ ID NO: 190863 - DNA, 81 bp, Homo sapiens
tttgtaagctaattgtatatactgtggtggagatgaatacagctgcagatatcttcaaacagtatatgaaggtaaagttga

SEQ ID NO: 190864 - DNA, 79 bp, Homo sapiens
aattgtatatactgtggtggagatgaatacagctgcagatatcttcaaacagtatatgaaggtaaagttgaaaaatgga

SEQ ID NO: 190865 - DNA, 79 bp, Homo sapiens
tggtggagatgaatacagctgcagatatcttcaaacagtatatgaaggtaaagttgaaaaatggatagcaagatagttt

SEQ ID NO: 190866 - DNA, 77 bp, Homo sapiens
agatgaatacagctgcagatatcttcaaacagtatatgaaggtaaagttgaaaaatggatagcaagatagttttaaa

SEQ ID NO: 190867 - DNA, 75 bp, Homo sapiens
gtagttttaagagataaagctctaatttgtacaaatttctttatagtattataatgactatggagatatcatcaa

SEQ ID NO: 190868 - DNA, 77 bp, Homo sapiens
gagataaagctctaatttgtacaaatttctttatagtattataatgactatggagatatcatcaaagaaacaatgag

SEQ ID NO: 190869 - DNA, 76 bp, Homo sapiens
gctctaatttgtacaaatttctttatagtattataatgactatggagatatcatcaaagaaacaatgagtaaaaca

SEQ ID NO: 190870 - DNA, 77 bp, Homo sapiens
acaaatttctttatagtattataatgactatggagatatcatcaaagaaacaatgagtaaaacaaggcagatagaca

SEQ ID NO: 190871 - DNA, 80 bp, Homo sapiens
ttatagtattataatgactatggagatatcatcaaagaaacaatgagtaaaacaaggcagatagacaaaattcagtgtgc

SEQ ID NO: 190872 - DNA, 79 bp, Homo sapiens
ttataatgactatggagatatcatcaaagaaacaatgagtaaaacaaggcagatagacaaaattcagtgtgctaagacc

SEQ ID NO: 190873 - DNA, 76 bp, Homo sapiens
actatggagatatcatcaaagaaacaatgagtaaaacaaggcagatagacaaaattcagtgtgctaagacccttat

SEQ ID NO: 190874 - DNA, 77 bp, Homo sapiens
atcaaagaaacaatgagtaaaacaaggcagatagacaaaattcagtgtgctaagacccttattctcagtctgcaaca

SEQ ID NO: 190875 - DNA, 75 bp, Homo sapiens
aaacaatgagtaaaacaaggcagatagacaaaattcagtgtgctaagacccttattctcagtctgcaacaggtaa

SEQ ID NO: 190876 - DNA, 77 bp, Homo sapiens
taaaacaaggcagatagacaaaattcagtgtgctaagacccttattctcagtctgcaacaggtaagcattaagagta

SEQ ID NO: 190877 - DNA, 75 bp, Homo sapiens
agatagacaaaattcagtgtgctaagacccttattctcagtctgcaacaggtaagcattaagagtaccaacttta

SEQ ID NO: 190878 - DNA, 74 bp, Homo sapiens
aaaattcagtgtgctaagacccttattctcagtctgcaacaggtaagcattaagagtaccaactttagctaaca

SEQ ID NO: 190879 - DNA, 71 bp, Homo sapiens
atctccaggtattaagaactttaacatgctttctttctttccaaacagctttttaatgaaatgatacaaga

SEQ ID NO: 190880 - DNA, 70 bp, Homo sapiens
gtattaagaactttaacatgctttctttctttccaaacagctttttaatgaaatgatacaagaaaatggc

SEQ ID NO: 190881 - DNA, 74 bp, Homo sapiens
aacatgctttctttctttccaaacagctttttaatgaaatgatacaagaaaatggctataattttgatagatca

SEQ ID NO: 190882 - DNA, 74 bp, Homo sapiens
ctttctttccaaacagctttttaatgaaatgatacaagaaaatggctataattttgatagatcatcctctacat

SEQ ID NO: 190883 - DNA, 77 bp, Homo sapiens
ccaaacagctttttaatgaaatgatacaagaaaatggctataattttgatagatcatcctctacatttagtggcata

SEQ ID NO: 190884 - DNA, 78 bp, Homo sapiens
ttaatgaaatgatacaagaaaatggctataattttgatagatcatcctctacatttagtggcataaaagaacttgctc

SEQ ID NO: 190885 - DNA, 75 bp, Homo sapiens
gatacaagaaaatggctataattttgatagatcatcctctacatttagtggcataaaagaacttgctcgacgttt

SEQ ID NO: 190886 - DNA, 74 bp, Homo sapiens
aatggctataattttgatagatcatcctctacatttagtggcataaaagaacttgctcgacgttttgctttaac

SEQ ID NO: 190887 - DNA, 72 bp, Homo sapiens
attttgatagatcatcctctacatttagtggcataaaagaacttgctcgacgttttgctttaacttttggac

SEQ ID NO: 190888 - DNA, 74 bp, Homo sapiens
atcatcctctacatttagtggcataaaagaacttgctcgacgttttgctttaacttttggacttgatcagttga

SEQ ID NO: 190889 - DNA, 71 bp, Homo sapiens
ctacatttagtggcataaaagaacttgctcgacgttttgctttaacttttggacttgatcagttgaaaaca

SEQ ID NO: 190890 - DNA, 72 bp, Homo sapiens
tagtggcataaaagaacttgctcgacgttttgctttaacttttggacttgatcagttgaaaacaagagaagc

SEQ ID NO: 190891 - DNA, 74 bp, Homo sapiens
aagaacttgctcgacgttttgctttaacttttggacttgatcagttgaaaacaagagaagccattgccatgcta

SEQ ID NO: 190892 - DNA, 74 bp, Homo sapiens
acgttttgctttaacttttggacttgatcagttgaaaacaagagaagccattgccatgctacacaagtaatctc

SEQ ID NO: 190893 - DNA, 76 bp, Homo sapiens
ttaacttttggacttgatcagttgaaaacaagagaagccattgccatgctacacaagtaatctccagatattttat

SEQ ID NO: 190894 - DNA, 80 bp, Homo sapiens
acttgatcagttgaaaacaagagaagccattgccatgctacacaagtaatctccagatattttattcagctctcatattt

SEQ ID NO: 190895 - DNA, 72 bp, Homo sapiens
tatttcaattattttttgttttcctttgcagagatggcatagaatttgcttttaaagagcctaatccgcaag

SEQ ID NO: 190896 - DNA, 70 bp, Homo sapiens
aattattttttgttttcctttgcagagatggcatagaatttgcttttaaagagcctaatccgcaagggga

SEQ ID NO: 190897 - DNA, 74 bp, Homo sapiens
ttcctttgcagagatggcatagaatttgcttttaaagagcctaatccgcaaggggagagccatccacctttaaa

SEQ ID NO: 190898 - DNA, 73 bp, Homo sapiens
agagatggcatagaatttgcttttaaagagcctaatccgcaaggggagagccatccacctttaaatttggcat

SEQ ID NO: 190899 - DNA, 72 bp, Homo sapiens
tagaatttgcttttaaagagcctaatccgcaaggggagagccatccacctttaaatttggcatttcttgata

SEQ ID NO: 190900 - DNA, 73 bp, Homo sapiens
tttaaagagcctaatccgcaaggggagagccatccacctttaaatttggcatttcttgatattctgagtgaat

SEQ ID NO: 190901 - DNA, 73 bp, Homo sapiens
ctaatccgcaaggggagagccatccacctttaaatttggcatttcttgatattctgagtgaattttcttctaa

SEQ ID NO: 190902 - DNA, 70 bp, Homo sapiens
aaggggagagccatccacctttaaatttggcatttcttgatattctgagtgaattttcttctaaactact

SEQ ID NO: 190903 - DNA, 74 bp, Homo sapiens
gagccatccacctttaaatttggcatttcttgatattctgagtgaattttcttctaaactacttcgacaagaca

SEQ ID NO: 190904 - DNA, 73 bp, Homo sapiens
taaatttggcatttcttgatattctgagtgaattttcttctaaactacttcgacaagacaaaagaacagtgta

SEQ ID NO: 190905 - DNA, 75 bp, Homo sapiens
ggcatttcttgatattctgagtgaattttcttctaaactacttcgacaagacaaaagaacagtgtatgtatttgc

SEQ ID NO: 190906 - DNA, 73 bp, Homo sapiens
attctgagtgaattttcttctaaactacttcgacaagacaaaagaacagtgtatgtatttgctggaaatgtcc

SEQ ID NO: 190907 - DNA, 72 bp, Homo sapiens
gagtgaattttcttctaaactacttcgacaagacaaaagaacagtgtatgtatttgctggaaatgtcctatt

SEQ ID NO: 190908 - DNA, 70 bp, Homo sapiens
cccacagatttctgtatcaaagctaacagtttcgatttcttttcaaggtatgtttacttggaaaagttca

SEQ ID NO: 190909 - DNA, 71 bp, Homo sapiens
ctgtatcaaagctaacagtttcgatttcttttcaaggtatgtttacttggaaaagttcatgacctttcaga

SEQ ID NO: 190910 - DNA, 71 bp, Homo sapiens
aagctaacagtttcgatttcttttcaaggtatgtttacttggaaaagttcatgacctttcagatgtcactc

SEQ ID NO: 190911 - DNA, 71 bp, Homo sapiens
agtttcgatttcttttcaaggtatgtttacttggaaaagttcatgacctttcagatgtcactccgaagaga

SEQ ID NO: 190912 - DNA, 74 bp, Homo sapiens
ttcttttcaaggtatgtttacttggaaaagttcatgacctttcagatgtcactccgaagagaggatgtgtggct

SEQ ID NO: 190913 - DNA, 78 bp, Homo sapiens
gtatgtttacttggaaaagttcatgacctttcagatgtcactccgaagagaggatgtgtggcttccactgatgtctta

SEQ ID NO: 190914 - DNA, 75 bp, Homo sapiens
aaaagttcatgacctttcagatgtcactccgaagagaggatgtgtggcttccactgatgtcttaccgaaattctt

SEQ ID NO: 190915 - DNA, 79 bp, Homo sapiens
atgacctttcagatgtcactccgaagagaggatgtgtggcttccactgatgtcttaccgaaattctttgctagctggtg

SEQ ID NO: 190916 - DNA, 84 bp, Homo sapiens
ttcagatgtcactccgaagagaggatgtgtggcttccactgatgtcttaccgaaattctttgctagctggtggtgatgatgaca

SEQ ID NO: 190917 - DNA, 84 bp, Homo sapiens
gaagagaggatgtgtggcttccactgatgtcttaccgaaattctttgctagctggtggtgatgatgacaccatgtcagtcatta

SEQ ID NO: 190918 - DNA, 84 bp, Homo sapiens
atgtgtggcttccactgatgtcttaccgaaattctttgctagctggtggtgatgatgacaccatgtcagtcattagtggaatca

SEQ ID NO: 190919 - DNA, 83 bp, Homo sapiens
ttccactgatgtcttaccgaaattctttgctagctggtggtgatgatgacaccatgtcagtcattagtggaatcagcagccgg

SEQ ID NO: 190920 - DNA, 81 bp, Homo sapiens
atgtcttaccgaaattctttgctagctggtggtgatgatgacaccatgtcagtcattagtggaatcagcagccgggggtca

SEQ ID NO: 190921 - DNA, 80 bp, Homo sapiens
aaattctttgctagctggtggtgatgatgacaccatgtcagtcattagtggaatcagcagccgggggtcaacagtacgga

SEQ ID NO: 190922 - DNA, 80 bp, Homo sapiens
tagctggtggtgatgatgacaccatgtcagtcattagtggaatcagcagccgggggtcaacagtacggagtaaaaaatca

SEQ ID NO: 190923 - DNA, 77 bp, Homo sapiens
tggtgatgatgacaccatgtcagtcattagtggaatcagcagccgggggtcaacagtacggagtaaaaaatcaaaac

SEQ ID NO: 190924 - DNA, 74 bp, Homo sapiens
catgtcagtcattagtggaatcagcagccgggggtcaacagtacggagtaaaaaatcaaaaccatctacaggaa

SEQ ID NO: 190925 - DNA, 70 bp, Homo sapiens
agtcattagtggaatcagcagccgggggtcaacagtacggagtaaaaaatcaaaaccatctacaggaaaa

SEQ ID NO: 190926 - DNA, 67 bp, Homo sapiens
aatcagcagccgggggtcaacagtacggagtaaaaaatcaaaaccatctacaggaaaacggaaagtg

SEQ ID NO: 190927 - DNA, 69 bp, Homo sapiens
ggggtcaacagtacggagtaaaaaatcaaaaccatctacaggaaaacggaaagtggttgagggcatgca

SEQ ID NO: 190928 - DNA, 70 bp, Homo sapiens
aacagtacggagtaaaaaatcaaaaccatctacaggaaaacggaaagtggttgagggcatgcagctttca

SEQ ID NO: 190929 - DNA, 72 bp, Homo sapiens
aaaaatcaaaaccatctacaggaaaacggaaagtggttgagggcatgcagctttcactcagtaaggatataa

SEQ ID NO: 190930 - DNA, 72 bp, Homo sapiens
aaaaccatctacaggaaaacggaaagtggttgagggcatgcagctttcactcagtaaggatataatttattc

SEQ ID NO: 190931 - DNA, 73 bp, Homo sapiens
tacaggaaaacggaaagtggttgagggcatgcagctttcactcagtaaggatataatttattctctttatatt

SEQ ID NO: 190932 - DNA, 70 bp, Homo sapiens
tagtcaaaattagtgactaaacctcgtcgttaattttcttttccagctgaagaaagtagtagtagtgaca

SEQ ID NO: 190933 - DNA, 70 bp, Homo sapiens
aattagtgactaaacctcgtcgttaattttcttttccagctgaagaaagtagtagtagtgacagtatgtg

SEQ ID NO: 190934 - DNA, 70 bp, Homo sapiens
actaaacctcgtcgttaattttcttttccagctgaagaaagtagtagtagtgacagtatgtggttaagca

SEQ ID NO: 190935 - DNA, 72 bp, Homo sapiens
gtcgttaattttcttttccagctgaagaaagtagtagtagtgacagtatgtggttaagcagagaacaaacac

SEQ ID NO: 190936 - DNA, 77 bp, Homo sapiens
ttttccagctgaagaaagtagtagtagtgacagtatgtggttaagcagagaacaaacactgcacacccctgttatga

SEQ ID NO: 190937 - DNA, 79 bp, Homo sapiens
aagaaagtagtagtagtgacagtatgtggttaagcagagaacaaacactgcacacccctgttatgatgcagacaccaca

SEQ ID NO: 190938 - DNA, 81 bp, Homo sapiens
tagtagtagtgacagtatgtggttaagcagagaacaaacactgcacacccctgttatgatgcagacaccacaactcacctc

SEQ ID NO: 190939 - DNA, 81 bp, Homo sapiens
acagtatgtggttaagcagagaacaaacactgcacacccctgttatgatgcagacaccacaactcacctccactattatga

SEQ ID NO: 190940 - DNA, 81 bp, Homo sapiens
taagcagagaacaaacactgcacacccctgttatgatgcagacaccacaactcacctccactattatgagagagcccaaaa

SEQ ID NO: 190941 - DNA, 78 bp, Homo sapiens
aacaaacactgcacacccctgttatgatgcagacaccacaactcacctccactattatgagagagcccaaaagattac

SEQ ID NO: 190942 - DNA, 78 bp, Homo sapiens
acacccctgttatgatgcagacaccacaactcacctccactattatgagagagcccaaaagattacggcctgaggata

SEQ ID NO: 190943 - DNA, 82 bp, Homo sapiens
ttatgatgcagacaccacaactcacctccactattatgagagagcccaaaagattacggcctgaggatagcttcatgagtgt

SEQ ID NO: 190944 - DNA, 80 bp, Homo sapiens
acaactcacctccactattatgagagagcccaaaagattacggcctgaggatagcttcatgagtgtttatccaatgcaga

SEQ ID NO: 190945 - DNA, 82 bp, Homo sapiens
actattatgagagagcccaaaagattacggcctgaggatagcttcatgagtgtttatccaatgcagactgaacatcatcaaa

SEQ ID NO: 190946 - DNA, 81 bp, Homo sapiens
gagcccaaaagattacggcctgaggatagcttcatgagtgtttatccaatgcagactgaacatcatcaaacacctcttgat

SEQ ID NO: 190947 - DNA, 80 bp, Homo sapiens
aaaagattacggcctgaggatagcttcatgagtgtttatccaatgcagactgaacatcatcaaacacctcttgattataa

SEQ ID NO: 190948 - DNA, 84 bp, Homo sapiens
tgaggatagcttcatgagtgtttatccaatgcagactgaacatcatcaaacacctcttgattataagtaagtacatttgatcat

SEQ ID NO: 190949 - DNA, 81 bp, Homo sapiens
atagcttcatgagtgtttatccaatgcagactgaacatcatcaaacacctcttgattataagtaagtacatttgatcattt

SEQ ID NO: 190950 - DNA, 80 bp, Homo sapiens
gagtgtttatccaatgcagactgaacatcatcaaacacctcttgattataagtaagtacatttgatcattttctgtacta

SEQ ID NO: 190951 - DNA, 70 bp, Homo sapiens
acatagaaaaagttaagttaaaagaggaataaaattctccttgaagcacgcaggtaacatggatgttagc

SEQ ID NO: 190952 - DNA, 71 bp, Homo sapiens
aagttaagttaaaagaggaataaaattctccttgaagcacgcaggtaacatggatgttagctcaaagacaa

SEQ ID NO: 190953 - DNA, 73 bp, Homo sapiens
gttaaaagaggaataaaattctccttgaagcacgcaggtaacatggatgttagctcaaagacaacaagaggaa

SEQ ID NO: 190954 - DNA, 77 bp, Homo sapiens
aataaaattctccttgaagcacgcaggtaacatggatgttagctcaaagacaacaagaggaagcaaggcaacagcag

SEQ ID NO: 190955 - DNA, 85 bp, Homo sapiens
tctccttgaagcacgcaggtaacatggatgttagctcaaagacaacaagaggaagcaaggcaacagcaggagagagcagcaatga

SEQ ID NO: 190956 - DNA, 82 bp, Homo sapiens
caggtaacatggatgttagctcaaagacaacaagaggaagcaaggcaacagcaggagagagcagcaatgagctatgttaaac

SEQ ID NO: 190957 - DNA, 83 bp, Homo sapiens
tggatgttagctcaaagacaacaagaggaagcaaggcaacagcaggagagagcagcaatgagctatgttaaactgcgaactaa

SEQ ID NO: 190958 - DNA, 83 bp, Homo sapiens
ttagctcaaagacaacaagaggaagcaaggcaacagcaggagagagcagcaatgagctatgttaaactgcgaactaatcttca

SEQ ID NO: 190959 - DNA, 85 bp, Homo sapiens
acaacaagaggaagcaaggcaacagcaggagagagcagcaatgagctatgttaaactgcgaactaatcttcagcatgccatgtaa

SEQ ID NO: 190960 - DNA, 86 bp, Homo sapiens
caaggcaacagcaggagagagcagcaatgagctatgttaaactgcgaactaatcttcagcatgccatgtaagtgagagtgccttat

SEQ ID NO: 190961 - DNA, 88 bp, Homo sapiens
gcaggagagagcagcaatgagctatgttaaactgcgaactaatcttcagcatgccatgtaagtgagagtgccttattgtctgagtcta

SEQ ID NO: 190962 - DNA, 85 bp, Homo sapiens
agagcagcaatgagctatgttaaactgcgaactaatcttcagcatgccatgtaagtgagagtgccttattgtctgagtctaggaa

SEQ ID NO: 190963 - DNA, 76 bp, Homo sapiens
taatagtcacgacattagttcagatcttgactttgttttatatttctctagtcggcgtggcacaagcctaatggaa

SEQ ID NO: 190964 - DNA, 78 bp, Homo sapiens
acattagttcagatcttgactttgttttatatttctctagtcggcgtggcacaagcctaatggaagatgatgaagagc

SEQ ID NO: 190965 - DNA, 77 bp, Homo sapiens
atcttgactttgttttatatttctctagtcggcgtggcacaagcctaatggaagatgatgaagagccaattgtggaa

SEQ ID NO: 190966 - DNA, 80 bp, Homo sapiens
ttttatatttctctagtcggcgtggcacaagcctaatggaagatgatgaagagccaattgtggaagatgttatgatgtcc

SEQ ID NO: 190967 - DNA, 82 bp, Homo sapiens
tatttctctagtcggcgtggcacaagcctaatggaagatgatgaagagccaattgtggaagatgttatgatgtcctcagaag

SEQ ID NO: 190968 - DNA, 82 bp, Homo sapiens
cgtggcacaagcctaatggaagatgatgaagagccaattgtggaagatgttatgatgtcctcagaagggaggattgaggatc

SEQ ID NO: 190969 - DNA, 81 bp, Homo sapiens
aagcctaatggaagatgatgaagagccaattgtggaagatgttatgatgtcctcagaagggaggattgaggatcttaatga

SEQ ID NO: 190970 - DNA, 80 bp, Homo sapiens
agatgatgaagagccaattgtggaagatgttatgatgtcctcagaagggaggattgaggatcttaatgagggaatggatt

SEQ ID NO: 190971 - DNA, 79 bp, Homo sapiens
atgaagagccaattgtggaagatgttatgatgtcctcagaagggaggattgaggatcttaatgagggaatggattttga

SEQ ID NO: 190972 - DNA, 80 bp, Homo sapiens
tggaagatgttatgatgtcctcagaagggaggattgaggatcttaatgagggaatggattttgacaccatggatatagat

SEQ ID NO: 190973 - DNA, 78 bp, Homo sapiens
ttatgatgtcctcagaagggaggattgaggatcttaatgagggaatggattttgacaccatggatatagatttggtaa

SEQ ID NO: 190974 - DNA, 75 bp, Homo sapiens
tcagaagggaggattgaggatcttaatgagggaatggattttgacaccatggatatagatttggtaagaaactta

SEQ ID NO: 190975 - DNA, 74 bp, Homo sapiens
ggaggattgaggatcttaatgagggaatggattttgacaccatggatatagatttggtaagaaacttaatgatt

SEQ ID NO: 190976 - DNA, 75 bp, Homo sapiens
gaggatcttaatgagggaatggattttgacaccatggatatagatttggtaagaaacttaatgatttctgtaaga

SEQ ID NO: 190977 - DNA, 72 bp, Homo sapiens
gagggaatggattttgacaccatggatatagatttggtaagaaacttaatgatttctgtaagattttcagtt

SEQ ID NO: 190978 - DNA, 71 bp, Homo sapiens
ctatctggtttgtagatatagctaaactaatgtcaacttatttccttttttcctttagccaccatcaaaga

SEQ ID NO: 190979 - DNA, 72 bp, Homo sapiens
gtagatatagctaaactaatgtcaacttatttccttttttcctttagccaccatcaaagaacagacgagaga

SEQ ID NO: 190980 - DNA, 70 bp, Homo sapiens
ctaaactaatgtcaacttatttccttttttcctttagccaccatcaaagaacagacgagagagaacagaa

SEQ ID NO: 190981 - DNA, 72 bp, Homo sapiens
ctaatgtcaacttatttccttttttcctttagccaccatcaaagaacagacgagagagaacagaactgaagc

SEQ ID NO: 190982 - DNA, 74 bp, Homo sapiens
ttccttttttcctttagccaccatcaaagaacagacgagagagaacagaactgaagcctgatttctttgatcca

SEQ ID NO: 190983 - DNA, 77 bp, Homo sapiens
tttcctttagccaccatcaaagaacagacgagagagaacagaactgaagcctgatttctttgatccagcttcaatta

SEQ ID NO: 190984 - DNA, 80 bp, Homo sapiens
accatcaaagaacagacgagagagaacagaactgaagcctgatttctttgatccagcttcaattatggatgaatcagtag

SEQ ID NO: 190985 - DNA, 77 bp, Homo sapiens
aacagacgagagagaacagaactgaagcctgatttctttgatccagcttcaattatggatgaatcagtaggtttaat

SEQ ID NO: 190986 - DNA, 76 bp, Homo sapiens
agagagaacagaactgaagcctgatttctttgatccagcttcaattatggatgaatcagtaggtttaatttaaatg

SEQ ID NO: 190987 - DNA, 74 bp, Homo sapiens
ctgaagcctgatttctttgatccagcttcaattatggatgaatcagtaggtttaatttaaatgtaccctaggat

SEQ ID NO: 190988 - DNA, 75 bp, Homo sapiens
gcctgatttctttgatccagcttcaattatggatgaatcagtaggtttaatttaaatgtaccctaggattgcaaa

SEQ ID NO: 190989 - DNA, 75 bp, Homo sapiens
ctctctctctcattaggttcttggagtgtcaatgttttaataccagtacacaattaaatctgtggtgaagtcatt

SEQ ID NO: 190990 - DNA, 75 bp, Homo sapiens
tctctcattaggttcttggagtgtcaatgttttaataccagtacacaattaaatctgtggtgaagtcattttcta

SEQ ID NO: 190991 - DNA, 72 bp, Homo sapiens
ggttcttggagtgtcaatgttttaataccagtacacaattaaatctgtggtgaagtcattttctaagtggaa

SEQ ID NO: 190992 - DNA, 71 bp, Homo sapiens
gtgtcaatgttttaataccagtacacaattaaatctgtggtgaagtcattttctaagtggaagaggaaatt

SEQ ID NO: 190993 - DNA, 71 bp, Homo sapiens
taccagtacacaattaaatctgtggtgaagtcattttctaagtggaagaggaaattttaaagtgtggtaga

SEQ ID NO: 190994 - DNA, 71 bp, Homo sapiens
gtacacaattaaatctgtggtgaagtcattttctaagtggaagaggaaattttaaagtgtggtagatacag

SEQ ID NO: 190995 - DNA, 74 bp, Homo sapiens
tctgtggtgaagtcattttctaagtggaagaggaaattttaaagtgtggtagatacagtgaaattctgtacaga

SEQ ID NO: 190996 - DNA, 71 bp, Homo sapiens
gtcattttctaagtggaagaggaaattttaaagtgtggtagatacagtgaaattctgtacagatttttctc

SEQ ID NO: 190997 - DNA, 71 bp, Homo sapiens
ctaagtggaagaggaaattttaaagtgtggtagatacagtgaaattctgtacagatttttctctaaggaga

SEQ ID NO: 190998 - DNA, 76 bp, Homo sapiens
ggaaattttaaagtgtggtagatacagtgaaattctgtacagatttttctctaaggagaatatgacatgcttatgc

SEQ ID NO: 190999 - DNA, 78 bp, Homo sapiens
ttaaagtgtggtagatacagtgaaattctgtacagatttttctctaaggagaatatgacatgcttatgcttaccaaga

SEQ ID NO: 191000 - DNA, 82 bp, Homo sapiens
tagatacagtgaaattctgtacagatttttctctaaggagaatatgacatgcttatgcttaccaagatcaagtgcattgagg

SEQ ID NO: 191001 - DNA, 78 bp, Homo sapiens
aaattctgtacagatttttctctaaggagaatatgacatgcttatgcttaccaagatcaagtgcattgaggggcagtt

SEQ ID NO: 191002 - DNA, 79 bp, Homo sapiens
gatttttctctaaggagaatatgacatgcttatgcttaccaagatcaagtgcattgaggggcagttttgtttgcctgaa

SEQ ID NO: 191003 - DNA, 78 bp, Homo sapiens
taaggagaatatgacatgcttatgcttaccaagatcaagtgcattgaggggcagttttgtttgcctgaataaacgtaa

SEQ ID NO: 191004 - DNA, 77 bp, Homo sapiens
atatgacatgcttatgcttaccaagatcaagtgcattgaggggcagttttgtttgcctgaataaacgtaaaggacaa

SEQ ID NO: 191005 - DNA, 72 bp, Homo sapiens
cttatgcttaccaagatcaagtgcattgaggggcagttttgtttgcctgaataaacgtaaaggacaagtaaa

SEQ ID NO: 191006 - DNA, 70 bp, Homo sapiens
ttaccaagatcaagtgcattgaggggcagttttgtttgcctgaataaacgtaaaggacaagtaaacaatt

SEQ ID NO: 191007 - DNA, 72 bp, Homo sapiens
aagtgcattgaggggcagttttgtttgcctgaataaacgtaaaggacaagtaaacaatttgatgataagcta

SEQ ID NO: 191008 - DNA, 69 bp, Homo sapiens
gggcagttttgtttgcctgaataaacgtaaaggacaagtaaacaatttgatgataagctacagtttttc

SEQ ID NO: 191009 - DNA, 69 bp, Homo sapiens
ttgtttgcctgaataaacgtaaaggacaagtaaacaatttgatgataagctacagtttttcttagaaag

SEQ ID NO: 191010 - DNA, 68 bp, Homo sapiens
tgaataaacgtaaaggacaagtaaacaatttgatgataagctacagtttttcttagaaagtaaatatt

SEQ ID NO: 191011 - DNA, 72 bp, Homo sapiens
caatttgatgataagctacagtttttcttagaaagtaaatattttatttatgcgctgttagttggcttttga

SEQ ID NO: 191012 - DNA, 73 bp, Homo sapiens
tgatgataagctacagtttttcttagaaagtaaatattttatttatgcgctgttagttggcttttgaatcgat

SEQ ID NO: 191013 - DNA, 72 bp, Homo sapiens
tacagtttttcttagaaagtaaatattttatttatgcgctgttagttggcttttgaatcgattatttcatgc

SEQ ID NO: 191014 - DNA, 70 bp, Homo sapiens
tcttagaaagtaaatattttatttatgcgctgttagttggcttttgaatcgattatttcatgcttttttt

SEQ ID NO: 191015 - DNA, 71 bp, Homo sapiens
aaaaaacaaaataacaatctgaagaggcatttggtacagatatgaattctcttacatttatttactggttg

SEQ ID NO: 191016 - DNA, 77 bp, Homo sapiens
ataacaatctgaagaggcatttggtacagatatgaattctcttacatttatttactggttgtactaaataatgatga

SEQ ID NO: 191017 - DNA, 78 bp, Homo sapiens
atctgaagaggcatttggtacagatatgaattctcttacatttatttactggttgtactaaataatgatgacctctgc

SEQ ID NO: 191018 - DNA, 77 bp, Homo sapiens
ggcatttggtacagatatgaattctcttacatttatttactggttgtactaaataatgatgacctctgctggatttc

SEQ ID NO: 191019 - DNA, 76 bp, Homo sapiens
ttggtacagatatgaattctcttacatttatttactggttgtactaaataatgatgacctctgctggatttctgtt

SEQ ID NO: 191020 - DNA, 75 bp, Homo sapiens
gaattctcttacatttatttactggttgtactaaataatgatgacctctgctggatttctgtttacatccagaaa

SEQ ID NO: 191021 - DNA, 74 bp, Homo sapiens
cttacatttatttactggttgtactaaataatgatgacctctgctggatttctgtttacatccagaaaacaatg

SEQ ID NO: 191022 - DNA, 74 bp, Homo sapiens
actggttgtactaaataatgatgacctctgctggatttctgtttacatccagaaaacaatgttaaggatgtatt

SEQ ID NO: 191023 - DNA, 75 bp, Homo sapiens
tgtactaaataatgatgacctctgctggatttctgtttacatccagaaaacaatgttaaggatgtatttattccc

SEQ ID NO: 191024 - DNA, 74 bp, Homo sapiens
gtactaaataatgatgacctctgctggatttctgtttacatccagaaaacaatgttaaggatgtatttattccc

SEQ ID NO: 191025 - DNA, 70 bp, Homo sapiens
ctgtttacatccagaaaacaatgttaaggatgtatttattcccctaccctgaagaaagtgtaggatagaa

SEQ ID NO: 191026 - DNA, 69 bp, Homo sapiens
gaaaacaatgttaaggatgtatttattcccctaccctgaagaaagtgtaggatagaattgtttttagca

SEQ ID NO: 191027 - DNA, 69 bp, Homo sapiens
aatgttaaggatgtatttattcccctaccctgaagaaagtgtaggatagaattgtttttagcattctaa

SEQ ID NO: 191028 - DNA, 68 bp, Homo sapiens
ccctaccctgaagaaagtgtaggatagaattgtttttagcattctaaatttaaatgcttaaaacgtca

SEQ ID NO: 191029 - DNA, 70 bp, Homo sapiens
tgaagaaagtgtaggatagaattgtttttagcattctaaatttaaatgcttaaaacgtcaatcaacaaaa

SEQ ID NO: 191030 - DNA, 67 bp, Homo sapiens
gtaggatagaattgtttttagcattctaaatttaaatgcttaaaacgtcaatcaacaaaactttgtt

SEQ ID NO: 191031 - DNA, 66 bp, Homo sapiens
ttgtttttagcattctaaatttaaatgcttaaaacgtcaatcaacaaaactttgttttaaatattg

SEQ ID NO: 191032 - DNA, 69 bp, Homo sapiens
gcattctaaatttaaatgcttaaaacgtcaatcaacaaaactttgttttaaatattgtaattgtggaga

SEQ ID NO: 191033 - DNA, 65 bp, Homo sapiens
aaatgcttaaaacgtcaatcaacaaaactttgttttaaatattgtaattgtggagaaaagtaaac

SEQ ID NO: 191034 - DNA, 67 bp, Homo sapiens
acgtcaatcaacaaaactttgttttaaatattgtaattgtggagaaaagtaaacttataagcagaac

SEQ ID NO: 191035 - DNA, 67 bp, Homo sapiens
tcaacaaaactttgttttaaatattgtaattgtggagaaaagtaaacttataagcagaacttttaca

SEQ ID NO: 191036 - DNA, 64 bp, Homo sapiens
ctttgttttaaatattgtaattgtggagaaaagtaaacttataagcagaacttttacaattttt

SEQ ID NO: 191037 - DNA, 67 bp, Homo sapiens
atattgtaattgtggagaaaagtaaacttataagcagaacttttacaattttttcatctaaaagtat

SEQ ID NO: 191038 - DNA, 67 bp, Homo sapiens
ttgtggagaaaagtaaacttataagcagaacttttacaattttttcatctaaaagtattttaagata

SEQ ID NO: 191039 - DNA, 69 bp, Homo sapiens
tacaattttttcatctaaaagtattttaagatatttttaaaatccaagagcttctctatacttttcaga

SEQ ID NO: 191040 - DNA, 74 bp, Homo sapiens
tcatctaaaagtattttaagatatttttaaaatccaagagcttctctatacttttcagaaatatccagatgcag

SEQ ID NO: 191041 - DNA, 76 bp, Homo sapiens
gtattttaagatatttttaaaatccaagagcttctctatacttttcagaaatatccagatgcagtgaactgccaga

SEQ ID NO: 191042 - DNA, 75 bp, Homo sapiens
atatttttaaaatccaagagcttctctatacttttcagaaatatccagatgcagtgaactgccagaaggtaacca

SEQ ID NO: 191043 - DNA, 77 bp, Homo sapiens
ttaaaatccaagagcttctctatacttttcagaaatatccagatgcagtgaactgccagaaggtaaccagtctcaaa

SEQ ID NO: 191044 - DNA, 81 bp, Homo sapiens
ttctctatacttttcagaaatatccagatgcagtgaactgccagaaggtaaccagtctcaaacatgcttatcccattatca

SEQ ID NO: 191045 - DNA, 79 bp, Homo sapiens
ttttcagaaatatccagatgcagtgaactgccagaaggtaaccagtctcaaacatgcttatcccattatcaaccctgaa

SEQ ID NO: 191046 - DNA, 76 bp, Homo sapiens
aaatatccagatgcagtgaactgccagaaggtaaccagtctcaaacatgcttatcccattatcaaccctgaaagtt

SEQ ID NO: 191047 - DNA, 74 bp, Homo sapiens
cagtgaactgccagaaggtaaccagtctcaaacatgcttatcccattatcaaccctgaaagtttgcttgtcctt

SEQ ID NO: 191048 - DNA, 72 bp, Homo sapiens
ccagaaggtaaccagtctcaaacatgcttatcccattatcaaccctgaaagtttgcttgtcctttaagataa

SEQ ID NO: 191049 - DNA, 70 bp, Homo sapiens
aggtaaccagtctcaaacatgcttatcccattatcaaccctgaaagtttgcttgtcctttaagataaaaa

SEQ ID NO: 191050 - DNA, 71 bp, Homo sapiens
atcccattatcaaccctgaaagtttgcttgtcctttaagataaaaatgtaatgttgtgatattccttccag

SEQ ID NO: 191051 - DNA, 71 bp, Homo sapiens
aaccctgaaagtttgcttgtcctttaagataaaaatgtaatgttgtgatattccttccagtaatgccactg

SEQ ID NO: 191052 - DNA, 74 bp, Homo sapiens
gtttgcttgtcctttaagataaaaatgtaatgttgtgatattccttccagtaatgccactgtattttgtctcca

SEQ ID NO: 191053 - DNA, 73 bp, Homo sapiens
cttgtcctttaagataaaaatgtaatgttgtgatattccttccagtaatgccactgtattttgtctccaaata

SEQ ID NO: 191054 - DNA, 72 bp, Homo sapiens
aaaaatgtaatgttgtgatattccttccagtaatgccactgtattttgtctccaaataaaagaagcttattg

SEQ ID NO: 191055 - DNA, 77 bp, Homo sapiens
tgttgtgatattccttccagtaatgccactgtattttgtctccaaataaaagaagcttattgtagtatgtttgcaga

SEQ ID NO: 191056 - DNA, 74 bp, Homo sapiens
gatattccttccagtaatgccactgtattttgtctccaaataaaagaagcttattgtagtatgtttgcagaaaa

SEQ ID NO: 191057 - DNA, 72 bp, Homo sapiens
ccagtaatgccactgtattttgtctccaaataaaagaagcttattgtagtatgtttgcagaaaaattctaaa

SEQ ID NO: 191058 - DNA, 69 bp, Homo sapiens
ccactgtattttgtctccaaataaaagaagcttattgtagtatgtttgcagaaaaattctaaacaaaaa

SEQ ID NO: 191059 - DNA, 70 bp, Homo sapiens
gtctccaaataaaagaagcttattgtagtatgtttgcagaaaaattctaaacaaaaattatacagcttat

SEQ ID NO: 191060 - DNA, 72 bp, Homo sapiens
agaagcttattgtagtatgtttgcagaaaaattctaaacaaaaattatacagcttattagagtgtgggaata

SEQ ID NO: 191061 - DNA, 70 bp, Homo sapiens
tgtttgcagaaaaattctaaacaaaaattatacagcttattagagtgtgggaatagggatctaaatttta

SEQ ID NO: 191062 - DNA, 67 bp, Homo sapiens
gaaaaattctaaacaaaaattatacagcttattagagtgtgggaatagggatctaaattttaaataa

SEQ ID NO: 191063 - DNA, 66 bp, Homo sapiens
ataaattggtgctgattttataattgcgcagtttgtttagttttttcttacttttaaattccaact

SEQ ID NO: 191064 - DNA, 68 bp, Homo sapiens
tgctgattttataattgcgcagtttgtttagttttttcttacttttaaattccaacttaaaattatga

SEQ ID NO: 191065 - DNA, 66 bp, Homo sapiens
taattgcgcagtttgtttagttttttcttacttttaaattccaacttaaaattatgaggtttcaga

SEQ ID NO: 191066 - DNA, 65 bp, Homo sapiens
ttgtttagttttttcttacttttaaattccaacttaaaattatgaggtttcagaaatatattgaa

SEQ ID NO: 191067 - DNA, 66 bp, Homo sapiens
ttcttacttttaaattccaacttaaaattatgaggtttcagaaatatattgaaagtttaacaatgt

SEQ ID NO: 191068 - DNA, 65 bp, Homo sapiens
acttttaaattccaacttaaaattatgaggtttcagaaatatattgaaagtttaacaatgtttaa

SEQ ID NO: 191069 - DNA, 69 bp, Homo sapiens
cttaaaattatgaggtttcagaaatatattgaaagtttaacaatgtttaaaaatagaaaagcatgagtg

SEQ ID NO: 191070 - DNA, 73 bp, Homo sapiens
ttatgaggtttcagaaatatattgaaagtttaacaatgtttaaaaatagaaaagcatgagtgttcatgcttta

SEQ ID NO: 191071 - DNA, 72 bp, Homo sapiens
ttcagaaatatattgaaagtttaacaatgtttaaaaatagaaaagcatgagtgttcatgctttaaaatgatt

SEQ ID NO: 191072 - DNA, 71 bp, Homo sapiens
gatttttaaatttgtattttatattgttttatctatctgtctttgcaagcagtcttcaggttaaagatact

SEQ ID NO: 191073 - DNA, 74 bp, Homo sapiens
ttgtattttatattgttttatctatctgtctttgcaagcagtcttcaggttaaagatacttctaacaggttaca

SEQ ID NO: 191074 - DNA, 74 bp, Homo sapiens
tattgttttatctatctgtctttgcaagcagtcttcaggttaaagatacttctaacaggttacagtacatttcc

SEQ ID NO: 191075 - DNA, 75 bp, Homo sapiens
ttttatctatctgtctttgcaagcagtcttcaggttaaagatacttctaacaggttacagtacatttcctctgta

SEQ ID NO: 191076 - DNA, 74 bp, Homo sapiens
ctgtctttgcaagcagtcttcaggttaaagatacttctaacaggttacagtacatttcctctgtatgtaaatta

SEQ ID NO: 191077 - DNA, 73 bp, Homo sapiens
agcagtcttcaggttaaagatacttctaacaggttacagtacatttcctctgtatgtaaattagatgggataa

SEQ ID NO: 191078 - DNA, 73 bp, Homo sapiens
caggttaaagatacttctaacaggttacagtacatttcctctgtatgtaaattagatgggataatagaattca

SEQ ID NO: 191079 - DNA, 74 bp, Homo sapiens
tacttctaacaggttacagtacatttcctctgtatgtaaattagatgggataatagaattcataacccataata

SEQ ID NO: 191080 - DNA, 74 bp, Homo sapiens
caggttacagtacatttcctctgtatgtaaattagatgggataatagaattcataacccataatattctttgaa

SEQ ID NO: 191081 - DNA, 75 bp, Homo sapiens
cagtacatttcctctgtatgtaaattagatgggataatagaattcataacccataatattctttgaaagctaagc

SEQ ID NO: 191082 - DNA, 72 bp, Homo sapiens
cctctgtatgtaaattagatgggataatagaattcataacccataatattctttgaaagctaagctttaaac

SEQ ID NO: 191083 - DNA, 73 bp, Homo sapiens
ctgtatgtaaattagatgggataatagaattcataacccataatattctttgaaagctaagctttaaacttca

SEQ ID NO: 191084 - DNA, 70 bp, Homo sapiens
gtaaattagatgggataatagaattcataacccataatattctttgaaagctaagctttaaacttcattt

SEQ ID NO: 191085 - DNA, 72 bp, Homo sapiens
ttagatgggataatagaattcataacccataatattctttgaaagctaagctttaaacttcattttatgtcc

SEQ ID NO: 191086 - DNA, 70 bp, Homo sapiens
aatagaattcataacccataatattctttgaaagctaagctttaaacttcattttatgtcctttcacaaa

SEQ ID NO: 191087 - DNA, 70 bp, Homo sapiens
agaattcataacccataatattctttgaaagctaagctttaaacttcattttatgtcctttcacaaataa

SEQ ID NO: 191088 - DNA, 70 bp, Homo sapiens
tcataacccataatattctttgaaagctaagctttaaacttcattttatgtcctttcacaaataaattag

SEQ ID NO: 191089 - DNA, 67 bp, Homo sapiens
acccataatattctttgaaagctaagctttaaacttcattttatgtcctttcacaaataaattagtt

SEQ ID NO: 191090 - DNA, 68 bp, Homo sapiens
gctttaaacttcattttatgtcctttcacaaataaattagtttaaaacagaaagtggctacttgccat

SEQ ID NO: 191091 - DNA, 73 bp, Homo sapiens
tcattttatgtcctttcacaaataaattagtttaaaacagaaagtggctacttgccattttgacatcaactca

SEQ ID NO: 191092 - DNA, 72 bp, Homo sapiens
aaataaattagtttaaaacagaaagtggctacttgccattttgacatcaactcattttgcgaggcttaggca

SEQ ID NO: 191093 - DNA, 76 bp, Homo sapiens
tttaaaacagaaagtggctacttgccattttgacatcaactcattttgcgaggcttaggcagctagacatcgttta

SEQ ID NO: 191094 - DNA, 74 bp, Homo sapiens
aaagtggctacttgccattttgacatcaactcattttgcgaggcttaggcagctagacatcgtttaaaacaaaa

SEQ ID NO: 191095 - DNA, 74 bp, Homo sapiens
tacttgccattttgacatcaactcattttgcgaggcttaggcagctagacatcgtttaaaacaaaatattaact

SEQ ID NO: 191096 - DNA, 76 bp, Homo sapiens
ttgacatcaactcattttgcgaggcttaggcagctagacatcgtttaaaacaaaatattaacttatattacatgtg

SEQ ID NO: 191097 - DNA, 75 bp, Homo sapiens
caactcattttgcgaggcttaggcagctagacatcgtttaaaacaaaatattaacttatattacatgtgtatcta

SEQ ID NO: 191098 - DNA, 78 bp, Homo sapiens
tgcgaggcttaggcagctagacatcgtttaaaacaaaatattaacttatattacatgtgtatctatctattgtcagtc

SEQ ID NO: 191099 - DNA, 77 bp, Homo sapiens
aggcagctagacatcgtttaaaacaaaatattaacttatattacatgtgtatctatctattgtcagtcgtctctcag

SEQ ID NO: 191100 - DNA, 75 bp, Homo sapiens
catcgtttaaaacaaaatattaacttatattacatgtgtatctatctattgtcagtcgtctctcagttcttgagg

SEQ ID NO: 191101 - DNA, 76 bp, Homo sapiens
caaaatattaacttatattacatgtgtatctatctattgtcagtcgtctctcagttcttgaggtatattattttaa

SEQ ID NO: 191102 - DNA, 79 bp, Homo sapiens
acttatattacatgtgtatctatctattgtcagtcgtctctcagttcttgaggtatattattttaatcattccatgcct

SEQ ID NO: 191103 - DNA, 82 bp, Homo sapiens
atgtgtatctatctattgtcagtcgtctctcagttcttgaggtatattattttaatcattccatgccttaatatgcttgcaa

SEQ ID NO: 191104 - DNA, 82 bp, Homo sapiens
tctatctattgtcagtcgtctctcagttcttgaggtatattattttaatcattccatgccttaatatgcttgcaatacaaga

SEQ ID NO: 191105 - DNA, 82 bp, Homo sapiens
tgtcagtcgtctctcagttcttgaggtatattattttaatcattccatgccttaatatgcttgcaatacaagaatatcttca

SEQ ID NO: 191106 - DNA, 82 bp, Homo sapiens
tctctcagttcttgaggtatattattttaatcattccatgccttaatatgcttgcaatacaagaatatcttcagatgggtga

SEQ ID NO: 191107 - DNA, 77 bp, Homo sapiens
ttttaatcattccatgccttaatatgcttgcaatacaagaatatcttcagatgggtgaataccaaaaggctttcagt

SEQ ID NO: 191108 - DNA, 78 bp, Homo sapiens
taatatgcttgcaatacaagaatatcttcagatgggtgaataccaaaaggctttcagtttttagtcagaaatcaagca

SEQ ID NO: 191109 - DNA, 75 bp, Homo sapiens
cttgcaatacaagaatatcttcagatgggtgaataccaaaaggctttcagtttttagtcagaaatcaagcattgg

SEQ ID NO: 191110 - DNA, 74 bp, Homo sapiens
aagaatatcttcagatgggtgaataccaaaaggctttcagtttttagtcagaaatcaagcattgggctgtggta

SEQ ID NO: 191111 - DNA, 72 bp, Homo sapiens
tgggtgaataccaaaaggctttcagtttttagtcagaaatcaagcattgggctgtggtagccaaaaaccata

SEQ ID NO: 191112 - DNA, 70 bp, Homo sapiens
ataccaaaaggctttcagtttttagtcagaaatcaagcattgggctgtggtagccaaaaaccataggtta

SEQ ID NO: 191113 - DNA, 74 bp, Homo sapiens
tttcagtttttagtcagaaatcaagcattgggctgtggtagccaaaaaccataggttagctaaaaagatcatga

SEQ ID NO: 191114 - DNA, 75 bp, Homo sapiens
ttttagtcagaaatcaagcattgggctgtggtagccaaaaaccataggttagctaaaaagatcatgatacaatta

SEQ ID NO: 191115 - DNA, 73 bp, Homo sapiens
tgggctgtggtagccaaaaaccataggttagctaaaaagatcatgatacaattattttattaagtcatggtta

SEQ ID NO: 191116 - DNA, 71 bp, Homo sapiens
ggtagccaaaaaccataggttagctaaaaagatcatgatacaattattttattaagtcatggttaataaca

SEQ ID NO: 191117 - DNA, 73 bp, Homo sapiens
accataggttagctaaaaagatcatgatacaattattttattaagtcatggttaataacaaatgaatccagac

SEQ ID NO: 191118 - DNA, 76 bp, Homo sapiens
tagctaaaaagatcatgatacaattattttattaagtcatggttaataacaaatgaatccagacttgtctaacaga

SEQ ID NO: 191119 - DNA, 77 bp, Homo sapiens
tcatgatacaattattttattaagtcatggttaataacaaatgaatccagacttgtctaacagattttccatcaaca

SEQ ID NO: 191120 - DNA, 72 bp, Homo sapiens
attttattaagtcatggttaataacaaatgaatccagacttgtctaacagattttccatcaacaaatattgt

SEQ ID NO: 191121 - DNA, 75 bp, Homo sapiens
agtcatggttaataacaaatgaatccagacttgtctaacagattttccatcaacaaatattgttatgtgcaaaag

SEQ ID NO: 191122 - DNA, 76 bp, Homo sapiens
ataacaaatgaatccagacttgtctaacagattttccatcaacaaatattgttatgtgcaaaagtattgcctatgt

SEQ ID NO: 191123 - DNA, 77 bp, Homo sapiens
tgaatccagacttgtctaacagattttccatcaacaaatattgttatgtgcaaaagtattgcctatgttgttttaca

SEQ ID NO: 191124 - DNA, 77 bp, Homo sapiens
cttgtctaacagattttccatcaacaaatattgttatgtgcaaaagtattgcctatgttgttttacacaccactgca

SEQ ID NO: 191125 - DNA, 77 bp, Homo sapiens
cagattttccatcaacaaatattgttatgtgcaaaagtattgcctatgttgttttacacaccactgcattaactaga

SEQ ID NO: 191126 - DNA, 77 bp, Homo sapiens
aacaaatattgttatgtgcaaaagtattgcctatgttgttttacacaccactgcattaactagaactgctgagagga

SEQ ID NO: 191127 - DNA, 77 bp, Homo sapiens
caaaagtattgcctatgttgttttacacaccactgcattaactagaactgctgagaggactgtatatatgattttaa

SEQ ID NO: 191128 - DNA, 76 bp, Homo sapiens
attgcctatgttgttttacacaccactgcattaactagaactgctgagaggactgtatatatgattttaaacctaa

SEQ ID NO: 191129 - DNA, 73 bp, Homo sapiens
gttttacacaccactgcattaactagaactgctgagaggactgtatatatgattttaaacctaagttgatttt

SEQ ID NO: 191130 - DNA, 74 bp, Homo sapiens
caccactgcattaactagaactgctgagaggactgtatatatgattttaaacctaagttgattttttttctcac

SEQ ID NO: 191131 - DNA, 72 bp, Homo sapiens
ctagaactgctgagaggactgtatatatgattttaaacctaagttgattttttttctcactcttgaaaggag

SEQ ID NO: 191132 - DNA, 72 bp, Homo sapiens
ctgctgagaggactgtatatatgattttaaacctaagttgattttttttctcactcttgaaaggagtacttc

SEQ ID NO: 191133 - DNA, 69 bp, Homo sapiens
cctaagttgattttttttctcactcttgaaaggagtacttctttgtgaaagcagttcttacagctttgt

SEQ ID NO: 191134 - DNA, 71 bp, Homo sapiens
ttttctcactcttgaaaggagtacttctttgtgaaagcagttcttacagctttgttttcaaccagctaaaa

SEQ ID NO: 191135 - DNA, 70 bp, Homo sapiens
cactcttgaaaggagtacttctttgtgaaagcagttcttacagctttgttttcaaccagctaaaaatgtt

SEQ ID NO: 191136 - DNA, 69 bp, Homo sapiens
aaggagtacttctttgtgaaagcagttcttacagctttgttttcaaccagctaaaaatgttttatatat

SEQ ID NO: 191137 - DNA, 72 bp, Homo sapiens
tgtgaaagcagttcttacagctttgttttcaaccagctaaaaatgttttatatattactctaacctgttgtc

SEQ ID NO: 191138 - DNA, 72 bp, Homo sapiens
gcagttcttacagctttgttttcaaccagctaaaaatgttttatatattactctaacctgttgtcctccaca

SEQ ID NO: 191139 - DNA, 71 bp, Homo sapiens
gctttgttttcaaccagctaaaaatgttttatatattactctaacctgttgtcctccacattctattgtcc

SEQ ID NO: 191140 - DNA, 73 bp, Homo sapiens
tcaaccagctaaaaatgttttatatattactctaacctgttgtcctccacattctattgtcctaattgtactg

SEQ ID NO: 191141 - DNA, 72 bp, Homo sapiens
aatgttttatatattactctaacctgttgtcctccacattctattgtcctaattgtactgttttctgatttg

SEQ ID NO: 191142 - DNA, 74 bp, Homo sapiens
atatattactctaacctgttgtcctccacattctattgtcctaattgtactgttttctgatttgtatttatgtc

SEQ ID NO: 191143 - DNA, 76 bp, Homo sapiens
tctaacctgttgtcctccacattctattgtcctaattgtactgttttctgatttgtatttatgtcttgagacagta

SEQ ID NO: 191144 - DNA, 73 bp, Homo sapiens
gttgtcctccacattctattgtcctaattgtactgttttctgatttgtatttatgtcttgagacagtaacttt

SEQ ID NO: 191145 - DNA, 69 bp, Homo sapiens
gtcctaattgtactgttttctgatttgtatttatgtcttgagacagtaactttttgaataaaaataaac

SEQ ID NO: 191146 - DNA, 70 bp, Homo sapiens
ctgttttctgatttgtatttatgtcttgagacagtaactttttgaataaaaataaacctacagtatgttg

SEQ ID NO: 191147 - DNA, 71 bp, Homo sapiens
tgtatttatgtcttgagacagtaactttttgaataaaaataaacctacagtatgttgtatgttttctcttg

SEQ ID NO: 191148 - DNA, 72 bp, Homo sapiens
ttatgtcttgagacagtaactttttgaataaaaataaacctacagtatgttgtatgttttctcttgtactca

SEQ ID NO: 191149 - DNA, 67 bp, Homo sapiens
agacagtaactttttgaataaaaataaacctacagtatgttgtatgttttctcttgtactcaaaggg

SEQ ID NO: 191150 - DNA, 67 bp, Homo sapiens
aaataaacctacagtatgttgtatgttttctcttgtactcaaagggggagggtggctataaatggtt

SEQ ID NO: 191151 - DNA, 71 bp, Homo sapiens
agtatgttgtatgttttctcttgtactcaaagggggagggtggctataaatggtttgcaaatttatatcta

SEQ ID NO: 191152 - DNA, 71 bp, Homo sapiens
gttttctcttgtactcaaagggggagggtggctataaatggtttgcaaatttatatctattatcacatctt

SEQ ID NO: 191153 - DNA, 72 bp, Homo sapiens
ctcttgtactcaaagggggagggtggctataaatggtttgcaaatttatatctattatcacatcttttaatg

SEQ ID NO: 191154 - DNA, 70 bp, Homo sapiens
caaagggggagggtggctataaatggtttgcaaatttatatctattatcacatcttttaatgtgtttggg

SEQ ID NO: 191155 - DNA, 72 bp, Homo sapiens
gggtggctataaatggtttgcaaatttatatctattatcacatcttttaatgtgtttggggaataatttata

SEQ ID NO: 191156 - DNA, 72 bp, Homo sapiens
tctattatcacatcttttaatgtgtttggggaataatttatagagaataccatcagtttatatttttaataa

SEQ ID NO: 191157 - DNA, 72 bp, Homo sapiens
catcttttaatgtgtttggggaataatttatagagaataccatcagtttatatttttaataaatcatatgta

SEQ ID NO: 191158 - DNA, 72 bp, Homo sapiens
ttggggaataatttatagagaataccatcagtttatatttttaataaatcatatgtatttacaatgaaacca

SEQ ID NO: 191159 - DNA, 72 bp, Homo sapiens
taatttatagagaataccatcagtttatatttttaataaatcatatgtatttacaatgaaaccaaatcccta

SEQ ID NO: 191160 - DNA, 73 bp, Homo sapiens
acgtatcaacgctctgtgggtcgtgtgcgtgcgaggggggcgacgtaagggcgctccgcgagcccgtctctcc

SEQ ID NO: 191161 - DNA, 76 bp, Homo sapiens
tcaacgctctgtgggtcgtgtgcgtgcgaggggggcgacgtaagggcgctccgcgagcccgtctctcctcgaatga

SEQ ID NO: 191162 - DNA, 72 bp, Homo sapiens
tgggtcgtgtgcgtgcgaggggggcgacgtaagggcgctccgcgagcccgtctctcctcgaatgaaaggaaa

SEQ ID NO: 191163 - DNA, 69 bp, Homo sapiens
cgtgcgaggggggcgacgtaagggcgctccgcgagcccgtctctcctcgaatgaaaggaaacaacctcc

SEQ ID NO: 191164 - DNA, 71 bp, Homo sapiens
gggcgacgtaagggcgctccgcgagcccgtctctcctcgaatgaaaggaaacaacctccggcgacagagcc

SEQ ID NO: 191165 - DNA, 73 bp, Homo sapiens
taagggcgctccgcgagcccgtctctcctcgaatgaaaggaaacaacctccggcgacagagccccgctctcag

SEQ ID NO: 191166 - DNA, 74 bp, Homo sapiens
agcccgtctctcctcgaatgaaaggaaacaacctccggcgacagagccccgctctcaggcactgctggagaacc

SEQ ID NO: 191167 - DNA, 74 bp, Homo sapiens
tcctcgaatgaaaggaaacaacctccggcgacagagccccgctctcaggcactgctggagaaccgagaccgact

SEQ ID NO: 191168 - DNA, 72 bp, Homo sapiens
aaaggaaacaacctccggcgacagagccccgctctcaggcactgctggagaaccgagaccgacttctttctc

SEQ ID NO: 191169 - DNA, 72 bp, Homo sapiens
aaacaacctccggcgacagagccccgctctcaggcactgctggagaaccgagaccgacttctttctctttac

SEQ ID NO: 191170 - DNA, 76 bp, Homo sapiens
acagagccccgctctcaggcactgctggagaaccgagaccgacttctttctctttaccctcattggcgcttctctc

SEQ ID NO: 191171 - DNA, 77 bp, Homo sapiens
cccgctctcaggcactgctggagaaccgagaccgacttctttctctttaccctcattggcgcttctctcctgcagtc

SEQ ID NO: 191172 - DNA, 76 bp, Homo sapiens
aggcactgctggagaaccgagaccgacttctttctctttaccctcattggcgcttctctcctgcagtccgcctctg

SEQ ID NO: 191173 - DNA, 75 bp, Homo sapiens
tggagaaccgagaccgacttctttctctttaccctcattggcgcttctctcctgcagtccgcctctgggccctgc

SEQ ID NO: 191174 - DNA, 74 bp, Homo sapiens
agaccgacttctttctctttaccctcattggcgcttctctcctgcagtccgcctctgggccctgccggtgagtc

SEQ ID NO: 191175 - DNA, 73 bp, Homo sapiens
tttctctttaccctcattggcgcttctctcctgcagtccgcctctgggccctgccggtgagtccccacggaac

SEQ ID NO: 191176 - DNA, 72 bp, Homo sapiens
accctcattggcgcttctctcctgcagtccgcctctgggccctgccggtgagtccccacggaaccctggggc

SEQ ID NO: 191177 - DNA, 71 bp, Homo sapiens
gattttaaaataaaattaacattgtcgcccttcttattctctgtagcatttcttgagacttaaagtggcat

SEQ ID NO: 191178 - DNA, 73 bp, Homo sapiens
taaaattaacattgtcgcccttcttattctctgtagcatttcttgagacttaaagtggcattctaaaggcaat

SEQ ID NO: 191179 - DNA, 73 bp, Homo sapiens
ttaacattgtcgcccttcttattctctgtagcatttcttgagacttaaagtggcattctaaaggcaatttaaa

SEQ ID NO: 191180 - DNA, 76 bp, Homo sapiens
cttcttattctctgtagcatttcttgagacttaaagtggcattctaaaggcaatttaaaaatcatgtcaagctcag

SEQ ID NO: 191181 - DNA, 76 bp, Homo sapiens
ctgtagcatttcttgagacttaaagtggcattctaaaggcaatttaaaaatcatgtcaagctcagttgaacagaaa

SEQ ID NO: 191182 - DNA, 73 bp, Homo sapiens
tcttgagacttaaagtggcattctaaaggcaatttaaaaatcatgtcaagctcagttgaacagaaaaaagggc

SEQ ID NO: 191183 - DNA, 71 bp, Homo sapiens
cttaaagtggcattctaaaggcaatttaaaaatcatgtcaagctcagttgaacagaaaaaagggcctacaa

SEQ ID NO: 191184 - DNA, 73 bp, Homo sapiens
attctaaaggcaatttaaaaatcatgtcaagctcagttgaacagaaaaaagggcctacaagacagcgcaaatg

SEQ ID NO: 191185 - DNA, 73 bp, Homo sapiens
aatttaaaaatcatgtcaagctcagttgaacagaaaaaagggcctacaagacagcgcaaatgtggcttttgta

SEQ ID NO: 191186 - DNA, 74 bp, Homo sapiens
aaaaatcatgtcaagctcagttgaacagaaaaaagggcctacaagacagcgcaaatgtggcttttgtaagtcaa

SEQ ID NO: 191187 - DNA, 73 bp, Homo sapiens
aagctcagttgaacagaaaaaagggcctacaagacagcgcaaatgtggcttttgtaagtcaaatagagacaag

SEQ ID NO: 191188 - DNA, 73 bp, Homo sapiens
aacagaaaaaagggcctacaagacagcgcaaatgtggcttttgtaagtcaaatagagacaaggaatgtggaca

SEQ ID NO: 191189 - DNA, 74 bp, Homo sapiens
aagggcctacaagacagcgcaaatgtggcttttgtaagtcaaatagagacaaggaatgtggacagttactaata

SEQ ID NO: 191190 - DNA, 75 bp, Homo sapiens
acaagacagcgcaaatgtggcttttgtaagtcaaatagagacaaggaatgtggacagttactaatatctgaaaac

SEQ ID NO: 191191 - DNA, 72 bp, Homo sapiens
aaatgtggcttttgtaagtcaaatagagacaaggaatgtggacagttactaatatctgaaaaccagaaggtg

SEQ ID NO: 191192 - DNA, 76 bp, Homo sapiens
tttgtaagtcaaatagagacaaggaatgtggacagttactaatatctgaaaaccagaaggtggcagcgcaccataa

SEQ ID NO: 191193 - DNA, 75 bp, Homo sapiens
aaggaatgtggacagttactaatatctgaaaaccagaaggtggcagcgcaccataagtgcatggtaagtataccg

SEQ ID NO: 191194 - DNA, 78 bp, Homo sapiens
acagttactaatatctgaaaaccagaaggtggcagcgcaccataagtgcatggtaagtataccggcagcaacagagac

SEQ ID NO: 191195 - DNA, 78 bp, Homo sapiens
taatatctgaaaaccagaaggtggcagcgcaccataagtgcatggtaagtataccggcagcaacagagaccttgaaac

SEQ ID NO: 191196 - DNA, 75 bp, Homo sapiens
taattttttttaaatgtaatttatagctcttttcatctgctttggtatcatcacactctgataatgaaagtcttg

SEQ ID NO: 191197 - DNA, 78 bp, Homo sapiens
taaatgtaatttatagctcttttcatctgctttggtatcatcacactctgataatgaaagtcttggtggattttctat

SEQ ID NO: 191198 - DNA, 80 bp, Homo sapiens
atttatagctcttttcatctgctttggtatcatcacactctgataatgaaagtcttggtggattttctattgaagatgtc

SEQ ID NO: 191199 - DNA, 78 bp, Homo sapiens
tttcatctgctttggtatcatcacactctgataatgaaagtcttggtggattttctattgaagatgtccaaaaggaaa

SEQ ID NO: 191200 - DNA, 76 bp, Homo sapiens
ctgctttggtatcatcacactctgataatgaaagtcttggtggattttctattgaagatgtccaaaaggaaattaa

SEQ ID NO: 191201 - DNA, 76 bp, Homo sapiens
tatcatcacactctgataatgaaagtcttggtggattttctattgaagatgtccaaaaggaaattaaaagaggcac

SEQ ID NO: 191202 - DNA, 71 bp, Homo sapiens
ataatgaaagtcttggtggattttctattgaagatgtccaaaaggaaattaaaagaggcacgaagctggta

SEQ ID NO: 191203 - DNA, 68 bp, Homo sapiens
aaagtcttggtggattttctattgaagatgtccaaaaggaaattaaaagaggcacgaagctggtaagt

SEQ ID NO: 191204 - DNA, 71 bp, Homo sapiens
gtggattttctattgaagatgtccaaaaggaaattaaaagaggcacgaagctggtaagttggtatttctgc

SEQ ID NO: 191205 - DNA, 70 bp, Homo sapiens
aagatgtccaaaaggaaattaaaagaggcacgaagctggtaagttggtatttctgcctcttgagaataaa

SEQ ID NO: 191206 - DNA, 77 bp, Homo sapiens
ttagaaagtcacatactaataatattattttgtcgttttgctgtagatgtgttctttgtgccattgtcctggagcaa

SEQ ID NO: 191207 - DNA, 76 bp, Homo sapiens
aagtcacatactaataatattattttgtcgttttgctgtagatgtgttctttgtgccattgtcctggagcaacaat

SEQ ID NO: 191208 - DNA, 77 bp, Homo sapiens
aatattattttgtcgttttgctgtagatgtgttctttgtgccattgtcctggagcaacaattggttgtgatgtgaaa

SEQ ID NO: 191209 - DNA, 80 bp, Homo sapiens
tattttgtcgttttgctgtagatgtgttctttgtgccattgtcctggagcaacaattggttgtgatgtgaaaacatgtca

SEQ ID NO: 191210 - DNA, 82 bp, Homo sapiens
ttttgctgtagatgtgttctttgtgccattgtcctggagcaacaattggttgtgatgtgaaaacatgtcacaggacatacca

SEQ ID NO: 191211 - DNA, 80 bp, Homo sapiens
atgtgttctttgtgccattgtcctggagcaacaattggttgtgatgtgaaaacatgtcacaggacataccactaccactg

SEQ ID NO: 191212 - DNA, 86 bp, Homo sapiens
tgtgccattgtcctggagcaacaattggttgtgatgtgaaaacatgtcacaggacataccactaccactgtgcattgcatgataaa

SEQ ID NO: 191213 - DNA, 85 bp, Homo sapiens
tcctggagcaacaattggttgtgatgtgaaaacatgtcacaggacataccactaccactgtgcattgcatgataaagctcaaata

SEQ ID NO: 191214 - DNA, 82 bp, Homo sapiens
aattggttgtgatgtgaaaacatgtcacaggacataccactaccactgtgcattgcatgataaagctcaaatacgagagaaa

SEQ ID NO: 191215 - DNA, 81 bp, Homo sapiens
atgtgaaaacatgtcacaggacataccactaccactgtgcattgcatgataaagctcaaatacgagagaaaccttcacaag

SEQ ID NO: 191216 - DNA, 79 bp, Homo sapiens
aacatgtcacaggacataccactaccactgtgcattgcatgataaagctcaaatacgagagaaaccttcacaaggaatt

SEQ ID NO: 191217 - DNA, 78 bp, Homo sapiens
acataccactaccactgtgcattgcatgataaagctcaaatacgagagaaaccttcacaaggaatttacatgtaatta

SEQ ID NO: 191218 - DNA, 77 bp, Homo sapiens
cactaccactgtgcattgcatgataaagctcaaatacgagagaaaccttcacaaggaatttacatgtaattatttaa

SEQ ID NO: 191219 - DNA, 75 bp, Homo sapiens
gtgcattgcatgataaagctcaaatacgagagaaaccttcacaaggaatttacatgtaattatttaacttctctt

SEQ ID NO: 191220 - DNA, 69 bp, Homo sapiens
gataaagctcaaatacgagagaaaccttcacaaggaatttacatgtaattatttaacttctctttaagt

SEQ ID NO: 191221 - DNA, 65 bp, Homo sapiens
caaatacgagagaaaccttcacaaggaatttacatgtaattatttaacttctctttaagtttttt

SEQ ID NO: 191222 - DNA, 66 bp, Homo sapiens
gtactgctcgttttcttaatttgaaaagtgagtttaatttagtttgcttactaatttttgatttct

SEQ ID NO: 191223 - DNA, 64 bp, Homo sapiens
ttttcttaatttgaaaagtgagtttaatttagtttgcttactaatttttgatttcttcattttt

SEQ ID NO: 191224 - DNA, 67 bp, Homo sapiens
aagtgagtttaatttagtttgcttactaatttttgatttcttcattttttatagggtctattgccga

SEQ ID NO: 191225 - DNA, 67 bp, Homo sapiens
aatttagtttgcttactaatttttgatttcttcattttttatagggtctattgccgaaaacacaaga

SEQ ID NO: 191226 - DNA, 69 bp, Homo sapiens
gtttgcttactaatttttgatttcttcattttttatagggtctattgccgaaaacacaagaaaactgca

SEQ ID NO: 191227 - DNA, 69 bp, Homo sapiens
ttttgatttcttcattttttatagggtctattgccgaaaacacaagaaaactgcacataactccgaagg

SEQ ID NO: 191228 - DNA, 71 bp, Homo sapiens
cttcattttttatagggtctattgccgaaaacacaagaaaactgcacataactccgaaggtacatcattta

SEQ ID NO: 191229 - DNA, 71 bp, Homo sapiens
tttatagggtctattgccgaaaacacaagaaaactgcacataactccgaaggtacatcatttagccacgtt

SEQ ID NO: 191230 - DNA, 73 bp, Homo sapiens
tctattgccgaaaacacaagaaaactgcacataactccgaaggtacatcatttagccacgtttcagccacttt

SEQ ID NO: 191231 - DNA, 72 bp, Homo sapiens
aaacacaagaaaactgcacataactccgaaggtacatcatttagccacgtttcagccacttttcagtttcaa

SEQ ID NO: 191232 - DNA, 71 bp, Homo sapiens
aaaactgcacataactccgaaggtacatcatttagccacgtttcagccacttttcagtttcaagaagaaat

SEQ ID NO: 191233 - DNA, 72 bp, Homo sapiens
ataactccgaaggtacatcatttagccacgtttcagccacttttcagtttcaagaagaaatttgagtacaga

SEQ ID NO: 191234 - DNA, 67 bp, Homo sapiens
acttattttgagattggtccataaaaagtttttgttcatttttaagcagctgatttagaagaaagtt

SEQ ID NO: 191235 - DNA, 72 bp, Homo sapiens
tgagattggtccataaaaagtttttgttcatttttaagcagctgatttagaagaaagttttaatgaacatga

SEQ ID NO: 191236 - DNA, 71 bp, Homo sapiens
tccataaaaagtttttgttcatttttaagcagctgatttagaagaaagttttaatgaacatgaactggagc

SEQ ID NO: 191237 - DNA, 73 bp, Homo sapiens
tttgttcatttttaagcagctgatttagaagaaagttttaatgaacatgaactggagccctcatcacctaaaa

SEQ ID NO: 191238 - DNA, 73 bp, Homo sapiens
tcatttttaagcagctgatttagaagaaagttttaatgaacatgaactggagccctcatcacctaaaagtaaa

SEQ ID NO: 191239 - DNA, 71 bp, Homo sapiens
gcagctgatttagaagaaagttttaatgaacatgaactggagccctcatcacctaaaagtaaaaagaaaag

SEQ ID NO: 191240 - DNA, 68 bp, Homo sapiens
gaaagttttaatgaacatgaactggagccctcatcacctaaaagtaaaaagaaaagtcgcaaaggaag

SEQ ID NO: 191241 - DNA, 70 bp, Homo sapiens
tttaatgaacatgaactggagccctcatcacctaaaagtaaaaagaaaagtcgcaaaggaaggccaagaa

SEQ ID NO: 191242 - DNA, 65 bp, Homo sapiens
actggagccctcatcacctaaaagtaaaaagaaaagtcgcaaaggaaggccaagaaaaactaatt

SEQ ID NO: 191243 - DNA, 64 bp, Homo sapiens
agccctcatcacctaaaagtaaaaagaaaagtcgcaaaggaaggccaagaaaaactaattttaa

SEQ ID NO: 191244 - DNA, 64 bp, Homo sapiens
aaagtaaaaagaaaagtcgcaaaggaaggccaagaaaaactaattttaaagggctgtcagaaga

SEQ ID NO: 191245 - DNA, 65 bp, Homo sapiens
aaaaagaaaagtcgcaaaggaaggccaagaaaaactaattttaaagggctgtcagaagataccag

SEQ ID NO: 191246 - DNA, 69 bp, Homo sapiens
aaaggaaggccaagaaaaactaattttaaagggctgtcagaagataccaggtccacatcctcccatgga

SEQ ID NO: 191247 - DNA, 73 bp, Homo sapiens
caagaaaaactaattttaaagggctgtcagaagataccaggtccacatcctcccatggaacagatgaaatgga

SEQ ID NO: 191248 - DNA, 72 bp, Homo sapiens
aaactaattttaaagggctgtcagaagataccaggtccacatcctcccatggaacagatgaaatggaaagta

SEQ ID NO: 191249 - DNA, 75 bp, Homo sapiens
ttaaagggctgtcagaagataccaggtccacatcctcccatggaacagatgaaatggaaagtagttcctatgtaa

SEQ ID NO: 191250 - DNA, 73 bp, Homo sapiens
gtcagaagataccaggtccacatcctcccatggaacagatgaaatggaaagtagttcctatgtaagtaaaaaa

SEQ ID NO: 191251 - DNA, 69 bp, Homo sapiens
accaggtccacatcctcccatggaacagatgaaatggaaagtagttcctatgtaagtaaaaaaaactgt

SEQ ID NO: 191252 - DNA, 70 bp, Homo sapiens
catcctcccatggaacagatgaaatggaaagtagttcctatgtaagtaaaaaaaactgttggattcttac

SEQ ID NO: 191253 - DNA, 80 bp, Homo sapiens
tcttttacatttgcagagagataggtctccacacagaagcagccctagtgacaccaggcctaaatgtggattttgccatg

SEQ ID NO: 191254 - DNA, 80 bp, Homo sapiens
tacatttgcagagagataggtctccacacagaagcagccctagtgacaccaggcctaaatgtggattttgccatgtaggg

SEQ ID NO: 191255 - DNA, 75 bp, Homo sapiens
ataggtctccacacagaagcagccctagtgacaccaggcctaaatgtggattttgccatgtaggggaggaagaaa

SEQ ID NO: 191256 - DNA, 76 bp, Homo sapiens
acacagaagcagccctagtgacaccaggcctaaatgtggattttgccatgtaggggaggaagaaaatgaagcacga

SEQ ID NO: 191257 - DNA, 72 bp, Homo sapiens
agccctagtgacaccaggcctaaatgtggattttgccatgtaggggaggaagaaaatgaagcacgaggaaaa

SEQ ID NO: 191258 - DNA, 73 bp, Homo sapiens
acaccaggcctaaatgtggattttgccatgtaggggaggaagaaaatgaagcacgaggaaaactgcatatatt

SEQ ID NO: 191259 - DNA, 75 bp, Homo sapiens
taaatgtggattttgccatgtaggggaggaagaaaatgaagcacgaggaaaactgcatatatttaatgccaagaa

SEQ ID NO: 191260 - DNA, 76 bp, Homo sapiens
attttgccatgtaggggaggaagaaaatgaagcacgaggaaaactgcatatatttaatgccaagaaggcagctgcc

SEQ ID NO: 191261 - DNA, 76 bp, Homo sapiens
atgtaggggaggaagaaaatgaagcacgaggaaaactgcatatatttaatgccaagaaggcagctgcccattataa

SEQ ID NO: 191262 - DNA, 80 bp, Homo sapiens
aagaaaatgaagcacgaggaaaactgcatatatttaatgccaagaaggcagctgcccattataagtgcatggtaagcatg

SEQ ID NO: 191263 - DNA, 79 bp, Homo sapiens
agcacgaggaaaactgcatatatttaatgccaagaaggcagctgcccattataagtgcatggtaagcatggttctttta

SEQ ID NO: 191264 - DNA, 77 bp, Homo sapiens
aactgcatatatttaatgccaagaaggcagctgcccattataagtgcatggtaagcatggttcttttaagcccaatt

SEQ ID NO: 191265 - DNA, 75 bp, Homo sapiens
tatatttaatgccaagaaggcagctgcccattataagtgcatggtaagcatggttcttttaagcccaattttgtt

SEQ ID NO: 191266 - DNA, 77 bp, Homo sapiens
tcataaggattctgaatgttaattttcctgcatttttcttctctagttgttttcttctggcacagtccagctcacaa

SEQ ID NO: 191267 - DNA, 77 bp, Homo sapiens
ttctgaatgttaattttcctgcatttttcttctctagttgttttcttctggcacagtccagctcacaacaacatcaa

SEQ ID NO: 191268 - DNA, 77 bp, Homo sapiens
taattttcctgcatttttcttctctagttgttttcttctggcacagtccagctcacaacaacatcaagagcagaatt

SEQ ID NO: 191269 - DNA, 78 bp, Homo sapiens
catttttcttctctagttgttttcttctggcacagtccagctcacaacaacatcaagagcagaatttggagactttga

SEQ ID NO: 191270 - DNA, 78 bp, Homo sapiens
ttctctagttgttttcttctggcacagtccagctcacaacaacatcaagagcagaatttggagactttgatattaaaa

SEQ ID NO: 191271 - DNA, 77 bp, Homo sapiens
ttgttttcttctggcacagtccagctcacaacaacatcaagagcagaatttggagactttgatattaaaactgtact

SEQ ID NO: 191272 - DNA, 77 bp, Homo sapiens
cacagtccagctcacaacaacatcaagagcagaatttggagactttgatattaaaactgtacttcaggagattaaac

SEQ ID NO: 191273 - DNA, 74 bp, Homo sapiens
ctcacaacaacatcaagagcagaatttggagactttgatattaaaactgtacttcaggagattaaacgaggaaa

SEQ ID NO: 191274 - DNA, 72 bp, Homo sapiens
catcaagagcagaatttggagactttgatattaaaactgtacttcaggagattaaacgaggaaaaagaatgg

SEQ ID NO: 191275 - DNA, 71 bp, Homo sapiens
gcagaatttggagactttgatattaaaactgtacttcaggagattaaacgaggaaaaagaatggtctgtag

SEQ ID NO: 191276 - DNA, 68 bp, Homo sapiens
ttggagactttgatattaaaactgtacttcaggagattaaacgaggaaaaagaatggtctgtagtttt

SEQ ID NO: 191277 - DNA, 69 bp, Homo sapiens
ttaaaactgtacttcaggagattaaacgaggaaaaagaatggtctgtagtttttatatttgttatgcaa

SEQ ID NO: 191278 - DNA, 71 bp, Homo sapiens
ctgtacttcaggagattaaacgaggaaaaagaatggtctgtagtttttatatttgttatgcaacattacac

SEQ ID NO: 191279 - DNA, 73 bp, Homo sapiens
ggagattaaacgaggaaaaagaatggtctgtagtttttatatttgttatgcaacattacacttgatttgctgc

SEQ ID NO: 191280 - DNA, 71 bp, Homo sapiens
acgaggaaaaagaatggtctgtagtttttatatttgttatgcaacattacacttgatttgctgctttaaat

SEQ ID NO: 191281 - DNA, 75 bp, Homo sapiens
gaatggtctgtagtttttatatttgttatgcaacattacacttgatttgctgctttaaatttagagtacatccca

SEQ ID NO: 191282 - DNA, 75 bp, Homo sapiens
ttttatatttgttatgcaacattacacttgatttgctgctttaaatttagagtacatcccaaatttatccagtca

SEQ ID NO: 191283 - DNA, 75 bp, Homo sapiens
gttatgcaacattacacttgatttgctgctttaaatttagagtacatcccaaatttatccagtcatcagaaaatt

SEQ ID NO: 191284 - DNA, 74 bp, Homo sapiens
gcaacattacacttgatttgctgctttaaatttagagtacatcccaaatttatccagtcatcagaaaatttaaa

SEQ ID NO: 191285 - DNA, 72 bp, Homo sapiens
gatttgctgctttaaatttagagtacatcccaaatttatccagtcatcagaaaatttaaagtagttcgtatg

SEQ ID NO: 191286 - DNA, 70 bp, Homo sapiens
ctgctttaaatttagagtacatcccaaatttatccagtcatcagaaaatttaaagtagttcgtatgttaa

SEQ ID NO: 191287 - DNA, 72 bp, Homo sapiens
ttagagtacatcccaaatttatccagtcatcagaaaatttaaagtagttcgtatgttaaagcaaagtatata

SEQ ID NO: 191288 - DNA, 70 bp, Homo sapiens
atcccaaatttatccagtcatcagaaaatttaaagtagttcgtatgttaaagcaaagtatatatttgact

SEQ ID NO: 191289 - DNA, 73 bp, Homo sapiens
tatccagtcatcagaaaatttaaagtagttcgtatgttaaagcaaagtatatatttgacttatttgtaatata

SEQ ID NO: 191290 - DNA, 69 bp, Homo sapiens
aaatttaaagtagttcgtatgttaaagcaaagtatatatttgacttatttgtaatataataaaggatgc

SEQ ID NO: 191291 - DNA, 74 bp, Homo sapiens
aagtagttcgtatgttaaagcaaagtatatatttgacttatttgtaatataataaaggatgctgatgttactga

SEQ ID NO: 191292 - DNA, 73 bp, Homo sapiens
cgtatgttaaagcaaagtatatatttgacttatttgtaatataataaaggatgctgatgttactgaaacttat

SEQ ID NO: 191293 - DNA, 75 bp, Homo sapiens
gcaaagtatatatttgacttatttgtaatataataaaggatgctgatgttactgaaacttatttctctatgtaac

SEQ ID NO: 191294 - DNA, 74 bp, Homo sapiens
tgacttatttgtaatataataaaggatgctgatgttactgaaacttatttctctatgtaacttcattactttaa

SEQ ID NO: 191295 - DNA, 72 bp, Homo sapiens
gttttcttgaaatacggcttacgattatttctctttccttatacagaaatgtacactttgcagtcagcctgg

SEQ ID NO: 191296 - DNA, 75 bp, Homo sapiens
ttgaaatacggcttacgattatttctctttccttatacagaaatgtacactttgcagtcagcctggtgctactat

SEQ ID NO: 191297 - DNA, 77 bp, Homo sapiens
ttacgattatttctctttccttatacagaaatgtacactttgcagtcagcctggtgctactattggatgtgaaataa

SEQ ID NO: 191298 - DNA, 78 bp, Homo sapiens
tctctttccttatacagaaatgtacactttgcagtcagcctggtgctactattggatgtgaaataaaagcctgtgtta

SEQ ID NO: 191299 - DNA, 77 bp, Homo sapiens
ttatacagaaatgtacactttgcagtcagcctggtgctactattggatgtgaaataaaagcctgtgttaagacttac

SEQ ID NO: 191300 - DNA, 75 bp, Homo sapiens
aaatgtacactttgcagtcagcctggtgctactattggatgtgaaataaaagcctgtgttaagacttaccattac

SEQ ID NO: 191301 - DNA, 77 bp, Homo sapiens
tttgcagtcagcctggtgctactattggatgtgaaataaaagcctgtgttaagacttaccattaccactgtggagta

SEQ ID NO: 191302 - DNA, 74 bp, Homo sapiens
ctggtgctactattggatgtgaaataaaagcctgtgttaagacttaccattaccactgtggagtacaagacaaa

SEQ ID NO: 191303 - DNA, 73 bp, Homo sapiens
tactattggatgtgaaataaaagcctgtgttaagacttaccattaccactgtggagtacaagacaaagctaaa

SEQ ID NO: 191304 - DNA, 72 bp, Homo sapiens
gtgaaataaaagcctgtgttaagacttaccattaccactgtggagtacaagacaaagctaaatacattgaaa

SEQ ID NO: 191305 - DNA, 74 bp, Homo sapiens
tgtgttaagacttaccattaccactgtggagtacaagacaaagctaaatacattgaaaatatgtcacgaggaat

SEQ ID NO: 191306 - DNA, 72 bp, Homo sapiens
acttaccattaccactgtggagtacaagacaaagctaaatacattgaaaatatgtcacgaggaatttacaag

SEQ ID NO: 191307 - DNA, 73 bp, Homo sapiens
cattaccactgtggagtacaagacaaagctaaatacattgaaaatatgtcacgaggaatttacaagtaagaaa

SEQ ID NO: 191308 - DNA, 71 bp, Homo sapiens
gtggagtacaagacaaagctaaatacattgaaaatatgtcacgaggaatttacaagtaagaaaacaacagt

SEQ ID NO: 191309 - DNA, 71 bp, Homo sapiens
gacaaagctaaatacattgaaaatatgtcacgaggaatttacaagtaagaaaacaacagttgtctatttcc

SEQ ID NO: 191310 - DNA, 70 bp, Homo sapiens
cattgaaaatatgtcacgaggaatttacaagtaagaaaacaacagttgtctatttccctaaacatgttag

SEQ ID NO: 191311 - DNA, 65 bp, Homo sapiens
acgaggaatttacaagtaagaaaacaacagttgtctatttccctaaacatgttagtaaccgtcct

SEQ ID NO: 191312 - DNA, 68 bp, Homo sapiens
gtaagaaaacaacagttgtctatttccctaaacatgttagtaaccgtccttaaatagatgacattagt

SEQ ID NO: 191313 - DNA, 71 bp, Homo sapiens
caacagttgtctatttccctaaacatgttagtaaccgtccttaaatagatgacattagtttactcagtctc

SEQ ID NO: 191314 - DNA, 71 bp, Homo sapiens
ttgtctatttccctaaacatgttagtaaccgtccttaaatagatgacattagtttactcagtctctgttct

SEQ ID NO: 191315 - DNA, 70 bp, Homo sapiens
ccctaaacatgttagtaaccgtccttaaatagatgacattagtttactcagtctctgttcttaaatggtg

SEQ ID NO: 191316 - DNA, 69 bp, Homo sapiens
gttagtaaccgtccttaaatagatgacattagtttactcagtctctgttcttaaatggtgtttagttaa

SEQ ID NO: 191317 - DNA, 75 bp, Homo sapiens
cttaaatagatgacattagtttactcagtctctgttcttaaatggtgtttagttaagtatagaatactgagcaca

SEQ ID NO: 191318 - DNA, 75 bp, Homo sapiens
gacattagtttactcagtctctgttcttaaatggtgtttagttaagtatagaatactgagcacattatgtaagga

SEQ ID NO: 191319 - DNA, 76 bp, Homo sapiens
actcagtctctgttcttaaatggtgtttagttaagtatagaatactgagcacattatgtaaggaatgagtactaca

SEQ ID NO: 191320 - DNA, 76 bp, Homo sapiens
ctctgttcttaaatggtgtttagttaagtatagaatactgagcacattatgtaaggaatgagtactacaattggca

SEQ ID NO: 191321 - DNA, 76 bp, Homo sapiens
atggtgtttagttaagtatagaatactgagcacattatgtaaggaatgagtactacaattggcattttcctctgac

SEQ ID NO: 191322 - DNA, 78 bp, Homo sapiens
ttagttaagtatagaatactgagcacattatgtaaggaatgagtactacaattggcattttcctctgactacatatcc

SEQ ID NO: 191323 - DNA, 81 bp, Homo sapiens
tatagaatactgagcacattatgtaaggaatgagtactacaattggcattttcctctgactacatatccctggattagcat

SEQ ID NO: 191324 - DNA, 80 bp, Homo sapiens
acattatgtaaggaatgagtactacaattggcattttcctctgactacatatccctggattagcattcatccatccaata

SEQ ID NO: 191325 - DNA, 79 bp, Homo sapiens
taaggaatgagtactacaattggcattttcctctgactacatatccctggattagcattcatccatccaatattagtta

SEQ ID NO: 191326 - DNA, 79 bp, Homo sapiens
tactacaattggcattttcctctgactacatatccctggattagcattcatccatccaatattagttaggcttcctatg

SEQ ID NO: 191327 - DNA, 80 bp, Homo sapiens
aattggcattttcctctgactacatatccctggattagcattcatccatccaatattagttaggcttcctatgtgccagc

SEQ ID NO: 191328 - DNA, 83 bp, Homo sapiens
ttcctctgactacatatccctggattagcattcatccatccaatattagttaggcttcctatgtgccagccattgtgcttgaa

SEQ ID NO: 191329 - DNA, 86 bp, Homo sapiens
tacatatccctggattagcattcatccatccaatattagttaggcttcctatgtgccagccattgtgcttgaagctgggcatatgc

SEQ ID NO: 191330 - DNA, 85 bp, Homo sapiens
attagcattcatccatccaatattagttaggcttcctatgtgccagccattgtgcttgaagctgggcatatgccagtgatcaaaa

SEQ ID NO: 191331 - DNA, 84 bp, Homo sapiens
atccatccaatattagttaggcttcctatgtgccagccattgtgcttgaagctgggcatatgccagtgatcaaaactacataca

SEQ ID NO: 191332 - DNA, 82 bp, Homo sapiens
aatattagttaggcttcctatgtgccagccattgtgcttgaagctgggcatatgccagtgatcaaaactacatacactgggc

SEQ ID NO: 191333 - DNA, 82 bp, Homo sapiens
taggcttcctatgtgccagccattgtgcttgaagctgggcatatgccagtgatcaaaactacatacactgggccgggtgcgg

SEQ ID NO: 191334 - DNA, 72 bp, Homo sapiens
caaaaaaaaaacactacatatactctcctcatgaagcttacagtctattgggagagacctattatttaagtg

SEQ ID NO: 191335 - DNA, 74 bp, Homo sapiens
aaaaacactacatatactctcctcatgaagcttacagtctattgggagagacctattatttaagtggccaaata

SEQ ID NO: 191336 - DNA, 78 bp, Homo sapiens
atatactctcctcatgaagcttacagtctattgggagagacctattatttaagtggccaaatatgcaattacaacata

SEQ ID NO: 191337 - DNA, 77 bp, Homo sapiens
tgaagcttacagtctattgggagagacctattatttaagtggccaaatatgcaattacaacatagcagcgtaagtgt

SEQ ID NO: 191338 - DNA, 76 bp, Homo sapiens
tacagtctattgggagagacctattatttaagtggccaaatatgcaattacaacatagcagcgtaagtgttctaaa

SEQ ID NO: 191339 - DNA, 74 bp, Homo sapiens
ttgggagagacctattatttaagtggccaaatatgcaattacaacatagcagcgtaagtgttctaaagaagtta

SEQ ID NO: 191340 - DNA, 74 bp, Homo sapiens
gagagacctattatttaagtggccaaatatgcaattacaacatagcagcgtaagtgttctaaagaagttacaaa

SEQ ID NO: 191341 - DNA, 72 bp, Homo sapiens
acctattatttaagtggccaaatatgcaattacaacatagcagcgtaagtgttctaaagaagttacaaagtg

SEQ ID NO: 191342 - DNA, 76 bp, Homo sapiens
tatttaagtggccaaatatgcaattacaacatagcagcgtaagtgttctaaagaagttacaaagtgttatgagagc

SEQ ID NO: 191343 - DNA, 77 bp, Homo sapiens
tggccaaatatgcaattacaacatagcagcgtaagtgttctaaagaagttacaaagtgttatgagagcgtataagaa

SEQ ID NO: 191344 - DNA, 76 bp, Homo sapiens
atatgcaattacaacatagcagcgtaagtgttctaaagaagttacaaagtgttatgagagcgtataagaaggaaga

SEQ ID NO: 191345 - DNA, 74 bp, Homo sapiens
aattacaacatagcagcgtaagtgttctaaagaagttacaaagtgttatgagagcgtataagaaggaagagcta

SEQ ID NO: 191346 - DNA, 73 bp, Homo sapiens
aacatagcagcgtaagtgttctaaagaagttacaaagtgttatgagagcgtataagaaggaagagctaaccta

SEQ ID NO: 191347 - DNA, 72 bp, Homo sapiens
agcgtaagtgttctaaagaagttacaaagtgttatgagagcgtataagaaggaagagctaacctagtctgta

SEQ ID NO: 191348 - DNA, 72 bp, Homo sapiens
taagtgttctaaagaagttacaaagtgttatgagagcgtataagaaggaagagctaacctagtctgtagtgg

SEQ ID NO: 191349 - DNA, 70 bp, Homo sapiens
agttacaaagtgttatgagagcgtataagaaggaagagctaacctagtctgtagtggggagtatttaaaa

SEQ ID NO: 191350 - DNA, 70 bp, Homo sapiens
agagcgtataagaaggaagagctaacctagtctgtagtggggagtatttaaaatgttctgaaggaaatag

SEQ ID NO: 191351 - DNA, 74 bp, Homo sapiens
agtctgtagtggggagtatttaaaatgttctgaaggaaatagtgctcagctttaagctgagatattaaggacaa

SEQ ID NO: 191352 - DNA, 73 bp, Homo sapiens
gtatttaaaatgttctgaaggaaatagtgctcagctttaagctgagatattaaggacaaaggtgagccttggt

SEQ ID NO: 191353 - DNA, 72 bp, Homo sapiens
aaggaaatagtgctcagctttaagctgagatattaaggacaaaggtgagccttggttgggggaggtattctg

SEQ ID NO: 191354 - DNA, 75 bp, Homo sapiens
agtgctcagctttaagctgagatattaaggacaaaggtgagccttggttgggggaggtattctgggcagagagaa

SEQ ID NO: 191355 - DNA, 77 bp, Homo sapiens
tttaagctgagatattaaggacaaaggtgagccttggttgggggaggtattctgggcagagagaagagcatatgcaa

SEQ ID NO: 191356 - DNA, 74 bp, Homo sapiens
atattaaggacaaaggtgagccttggttgggggaggtattctgggcagagagaagagcatatgcaagagccccg

SEQ ID NO: 191357 - DNA, 75 bp, Homo sapiens
aaaggtgagccttggttgggggaggtattctgggcagagagaagagcatatgcaagagccccgggtgagacagaa

SEQ ID NO: 191358 - DNA, 77 bp, Homo sapiens
ttggttgggggaggtattctgggcagagagaagagcatatgcaagagccccgggtgagacagaagcagaggtggaaa

SEQ ID NO: 191359 - DNA, 80 bp, Homo sapiens
ggtattctgggcagagagaagagcatatgcaagagccccgggtgagacagaagcagaggtggaaatggggagatgtgtta

SEQ ID NO: 191360 - DNA, 82 bp, Homo sapiens
gcagagagaagagcatatgcaagagccccgggtgagacagaagcagaggtggaaatggggagatgtgttaggaggctagtgc

SEQ ID NO: 191361 - DNA, 79 bp, Homo sapiens
aagagcatatgcaagagccccgggtgagacagaagcagaggtggaaatggggagatgtgttaggaggctagtgctggtg

SEQ ID NO: 191362 - DNA, 78 bp, Homo sapiens
tatgcaagagccccgggtgagacagaagcagaggtggaaatggggagatgtgttaggaggctagtgctggtggtccag

SEQ ID NO: 191363 - DNA, 77 bp, Homo sapiens
ggtgagacagaagcagaggtggaaatggggagatgtgttaggaggctagtgctggtggtccaggtgagaattattgg

SEQ ID NO: 191364 - DNA, 76 bp, Homo sapiens
aagcagaggtggaaatggggagatgtgttaggaggctagtgctggtggtccaggtgagaattattggtagcttaga

SEQ ID NO: 191365 - DNA, 77 bp, Homo sapiens
tggaaatggggagatgtgttaggaggctagtgctggtggtccaggtgagaattattggtagcttagaataggatatg

SEQ ID NO: 191366 - DNA, 76 bp, Homo sapiens
ttaggaggctagtgctggtggtccaggtgagaattattggtagcttagaataggatatggtagacagaaggcaaaa

SEQ ID NO: 191367 - DNA, 78 bp, Homo sapiens
tagtgctggtggtccaggtgagaattattggtagcttagaataggatatggtagacagaaggcaaaagattctcttga

SEQ ID NO: 191368 - DNA, 75 bp, Homo sapiens
gaattattggtagcttagaataggatatggtagacagaaggcaaaagattctcttgagaagatggtgaaaaagta

SEQ ID NO: 191369 - DNA, 68 bp, Homo sapiens
aaagattctcttgagaagatggtgaaaaagtaaagtatgaagatttgggattgggggtcaccctcttt

SEQ ID NO: 191370 - DNA, 69 bp, Homo sapiens
ttctcttgagaagatggtgaaaaagtaaagtatgaagatttgggattgggggtcaccctcttttttatg

SEQ ID NO: 191371 - DNA, 64 bp, Homo sapiens
aaaagtaaagtatgaagatttgggattgggggtcaccctcttttttatgggtcttccacttacc

SEQ ID NO: 191372 - DNA, 72 bp, Homo sapiens
tatgaagatttgggattgggggtcaccctcttttttatgggtcttccacttacctgtgctgccttgtgctag

SEQ ID NO: 191373 - DNA, 71 bp, Homo sapiens
ttgggggtcaccctcttttttatgggtcttccacttacctgtgctgccttgtgctaggtggtgttaatgta

SEQ ID NO: 191374 - DNA, 73 bp, Homo sapiens
accctcttttttatgggtcttccacttacctgtgctgccttgtgctaggtggtgttaatgtatatctgtaatg

SEQ ID NO: 191375 - DNA, 74 bp, Homo sapiens
tttttatgggtcttccacttacctgtgctgccttgtgctaggtggtgttaatgtatatctgtaatggttccatt

SEQ ID NO: 191376 - DNA, 76 bp, Homo sapiens
ttccacttacctgtgctgccttgtgctaggtggtgttaatgtatatctgtaatggttccatttgtttaatcgactg

SEQ ID NO: 191377 - DNA, 77 bp, Homo sapiens
tgtgctgccttgtgctaggtggtgttaatgtatatctgtaatggttccatttgtttaatcgactggagtataagttg

SEQ ID NO: 191378 - DNA, 73 bp, Homo sapiens
ttgtgctaggtggtgttaatgtatatctgtaatggttccatttgtttaatcgactggagtataagttggtagg

SEQ ID NO: 191379 - DNA, 71 bp, Homo sapiens
gtatatctgtaatggttccatttgtttaatcgactggagtataagttggtagggactcttgaagttttgat

SEQ ID NO: 191380 - DNA, 72 bp, Homo sapiens
taatggttccatttgtttaatcgactggagtataagttggtagggactcttgaagttttgatttgccatcca

SEQ ID NO: 191381 - DNA, 71 bp, Homo sapiens
actggagtataagttggtagggactcttgaagttttgatttgccatccagagttgtaaagcacttccttac

SEQ ID NO: 191382 - DNA, 73 bp, Homo sapiens
agtataagttggtagggactcttgaagttttgatttgccatccagagttgtaaagcacttccttactctcaca

SEQ ID NO: 191383 - DNA, 78 bp, Homo sapiens
tagggactcttgaagttttgatttgccatccagagttgtaaagcacttccttactctcacatgcctagaatgcaataa

SEQ ID NO: 191384 - DNA, 77 bp, Homo sapiens
tttgccatccagagttgtaaagcacttccttactctcacatgcctagaatgcaataaaccaatgacttccgggtcta

SEQ ID NO: 191385 - DNA, 75 bp, Homo sapiens
agagttgtaaagcacttccttactctcacatgcctagaatgcaataaaccaatgacttccgggtctagtattctg

SEQ ID NO: 191386 - DNA, 75 bp, Homo sapiens
taaagcacttccttactctcacatgcctagaatgcaataaaccaatgacttccgggtctagtattctgtgtaaaa

SEQ ID NO: 191387 - DNA, 77 bp, Homo sapiens
ttactctcacatgcctagaatgcaataaaccaatgacttccgggtctagtattctgtgtaaaagacaatgtacacaa

SEQ ID NO: 191388 - DNA, 75 bp, Homo sapiens
cctagaatgcaataaaccaatgacttccgggtctagtattctgtgtaaaagacaatgtacacaagcagtcaccaa

SEQ ID NO: 191389 - DNA, 73 bp, Homo sapiens
aataaaccaatgacttccgggtctagtattctgtgtaaaagacaatgtacacaagcagtcaccaagtcatttg

SEQ ID NO: 191390 - DNA, 76 bp, Homo sapiens
atgacttccgggtctagtattctgtgtaaaagacaatgtacacaagcagtcaccaagtcatttgggtgcctacata

SEQ ID NO: 191391 - DNA, 80 bp, Homo sapiens
gtctagtattctgtgtaaaagacaatgtacacaagcagtcaccaagtcatttgggtgcctacataaggcgctatgctgta

SEQ ID NO: 191392 - DNA, 80 bp, Homo sapiens
tattctgtgtaaaagacaatgtacacaagcagtcaccaagtcatttgggtgcctacataaggcgctatgctgtataataa

SEQ ID NO: 191393 - DNA, 78 bp, Homo sapiens
taaaagacaatgtacacaagcagtcaccaagtcatttgggtgcctacataaggcgctatgctgtataataaaatttgc

SEQ ID NO: 191394 - DNA, 76 bp, Homo sapiens
acaagcagtcaccaagtcatttgggtgcctacataaggcgctatgctgtataataaaatttgccaaattctgttta

SEQ ID NO: 191395 - DNA, 74 bp, Homo sapiens
agtcaccaagtcatttgggtgcctacataaggcgctatgctgtataataaaatttgccaaattctgtttaataa

SEQ ID NO: 191396 - DNA, 75 bp, Homo sapiens
gtcatttgggtgcctacataaggcgctatgctgtataataaaatttgccaaattctgtttaataataaaggcaca

SEQ ID NO: 191397 - DNA, 73 bp, Homo sapiens
ggcgctatgctgtataataaaatttgccaaattctgtttaataataaaggcacaaatgttttcaagtgagttc

SEQ ID NO: 191398 - DNA, 69 bp, Homo sapiens
taataaaatttgccaaattctgtttaataataaaggcacaaatgttttcaagtgagttctataaagcct

SEQ ID NO: 191399 - DNA, 70 bp, Homo sapiens
tgccaaattctgtttaataataaaggcacaaatgttttcaagtgagttctataaagcctttaaggaacaa

SEQ ID NO: 191400 - DNA, 69 bp, Homo sapiens
tgtttaataataaaggcacaaatgttttcaagtgagttctataaagcctttaaggaacaaataatccca

SEQ ID NO: 191401 - DNA, 69 bp, Homo sapiens
taaaggcacaaatgttttcaagtgagttctataaagcctttaaggaacaaataatcccaatgttattta

SEQ ID NO: 191402 - DNA, 73 bp, Homo sapiens
gttctataaagcctttaaggaacaaataatcccaatgttatttaagaggtccagcacatagcaagagatggaa

SEQ ID NO: 191403 - DNA, 75 bp, Homo sapiens
taaggaacaaataatcccaatgttatttaagaggtccagcacatagcaagagatggaaaacttattgattcattc

SEQ ID NO: 191404 - DNA, 76 bp, Homo sapiens
caaataatcccaatgttatttaagaggtccagcacatagcaagagatggaaaacttattgattcattctgtaaagc

SEQ ID NO: 191405 - DNA, 76 bp, Homo sapiens
ccaatgttatttaagaggtccagcacatagcaagagatggaaaacttattgattcattctgtaaagcttacataac

SEQ ID NO: 191406 - DNA, 77 bp, Homo sapiens
ttaagaggtccagcacatagcaagagatggaaaacttattgattcattctgtaaagcttacataactgtggtaccaa

SEQ ID NO: 191407 - DNA, 75 bp, Homo sapiens
gcacatagcaagagatggaaaacttattgattcattctgtaaagcttacataactgtggtaccaaacctaacaaa

SEQ ID NO: 191408 - DNA, 71 bp, Homo sapiens
gagatggaaaacttattgattcattctgtaaagcttacataactgtggtaccaaacctaacaaagatacgt

SEQ ID NO: 191409 - DNA, 69 bp, Homo sapiens
cttattgattcattctgtaaagcttacataactgtggtaccaaacctaacaaagatacgttaaaagaaa

SEQ ID NO: 191410 - DNA, 69 bp, Homo sapiens
tgattcattctgtaaagcttacataactgtggtaccaaacctaacaaagatacgttaaaagaaaaacaa

SEQ ID NO: 191411 - DNA, 71 bp, Homo sapiens
atatacaaaaattctaaataaaatattagtaaatcaaatccagctctgtattctaagaattgaaagactgt

SEQ ID NO: 191412 - DNA, 73 bp, Homo sapiens
tatacaaaaattctaaataaaatattagtaaatcaaatccagctctgtattctaagaattgaaagactgttca

SEQ ID NO: 191413 - DNA, 75 bp, Homo sapiens
ttctaaataaaatattagtaaatcaaatccagctctgtattctaagaattgaaagactgttcaggctgggcacag

SEQ ID NO: 191414 - DNA, 67 bp, Homo sapiens
gaaagaaaaaagactgttcaaaattaggaaatatattaatataatttattagaattagtagagtaaa

SEQ ID NO: 191415 - DNA, 70 bp, Homo sapiens
agactgttcaaaattaggaaatatattaatataatttattagaattagtagagtaaataatcttatcacc

SEQ ID NO: 191416 - DNA, 71 bp, Homo sapiens
attaggaaatatattaatataatttattagaattagtagagtaaataatcttatcaccttccttatagatg

SEQ ID NO: 191417 - DNA, 72 bp, Homo sapiens
atattaatataatttattagaattagtagagtaaataatcttatcaccttccttatagatggtgaaaagaca

SEQ ID NO: 191418 - DNA, 72 bp, Homo sapiens
aatttattagaattagtagagtaaataatcttatcaccttccttatagatggtgaaaagacatttgataaca

SEQ ID NO: 191419 - DNA, 75 bp, Homo sapiens
agaattagtagagtaaataatcttatcaccttccttatagatggtgaaaagacatttgataacattcaacatcaa

SEQ ID NO: 191420 - DNA, 76 bp, Homo sapiens
gtagagtaaataatcttatcaccttccttatagatggtgaaaagacatttgataacattcaacatcaatttctgaa

SEQ ID NO: 191421 - DNA, 74 bp, Homo sapiens
taatcttatcaccttccttatagatggtgaaaagacatttgataacattcaacatcaatttctgaattttaaag

SEQ ID NO: 191422 - DNA, 75 bp, Homo sapiens
tccttatagatggtgaaaagacatttgataacattcaacatcaatttctgaattttaaagtaacgagtgctcttg

SEQ ID NO: 191423 - DNA, 73 bp, Homo sapiens
ggtgaaaagacatttgataacattcaacatcaatttctgaattttaaagtaacgagtgctcttggtaagctag

SEQ ID NO: 191424 - DNA, 73 bp, Homo sapiens
aagacatttgataacattcaacatcaatttctgaattttaaagtaacgagtgctcttggtaagctaggaatct

SEQ ID NO: 191425 - DNA, 73 bp, Homo sapiens
gataacattcaacatcaatttctgaattttaaagtaacgagtgctcttggtaagctaggaatcttaataggtg

SEQ ID NO: 191426 - DNA, 72 bp, Homo sapiens
catcaatttctgaattttaaagtaacgagtgctcttggtaagctaggaatcttaataggtgtttatgagaaa

SEQ ID NO: 191427 - DNA, 71 bp, Homo sapiens
gaattttaaagtaacgagtgctcttggtaagctaggaatcttaataggtgtttatgagaaaaacaacagca

SEQ ID NO: 191428 - DNA, 71 bp, Homo sapiens
gtgctcttggtaagctaggaatcttaataggtgtttatgagaaaaacaacagcaaataacttatttattat

SEQ ID NO: 191429 - DNA, 69 bp, Homo sapiens
cttggtaagctaggaatcttaataggtgtttatgagaaaaacaacagcaaataacttatttattattaa

SEQ ID NO: 191430 - DNA, 70 bp, Homo sapiens
aggaatcttaataggtgtttatgagaaaaacaacagcaaataacttatttattattaaagtgaaggagca

SEQ ID NO: 191431 - DNA, 70 bp, Homo sapiens
taataggtgtttatgagaaaaacaacagcaaataacttatttattattaaagtgaaggagcaatggttct

SEQ ID NO: 191432 - DNA, 69 bp, Homo sapiens
ggtgtttatgagaaaaacaacagcaaataacttatttattattaaagtgaaggagcaatggttcttaac

SEQ ID NO: 191433 - DNA, 72 bp, Homo sapiens
tatgagaaaaacaacagcaaataacttatttattattaaagtgaaggagcaatggttcttaaccaggagtga

SEQ ID NO: 191434 - DNA, 70 bp, Homo sapiens
gaaaaacaacagcaaataacttatttattattaaagtgaaggagcaatggttcttaaccaggagtgagcc

SEQ ID NO: 191435 - DNA, 74 bp, Homo sapiens
acaacagcaaataacttatttattattaaagtgaaggagcaatggttcttaaccaggagtgagcctcagaatca

SEQ ID NO: 191436 - DNA, 74 bp, Homo sapiens
ttatttattattaaagtgaaggagcaatggttcttaaccaggagtgagcctcagaatcactgtggggtggataa

SEQ ID NO: 191437 - DNA, 74 bp, Homo sapiens
tattattaaagtgaaggagcaatggttcttaaccaggagtgagcctcagaatcactgtggggtggataaggccc

SEQ ID NO: 191438 - DNA, 71 bp, Homo sapiens
aaggagcaatggttcttaaccaggagtgagcctcagaatcactgtggggtggataaggccctcttttaaaa

SEQ ID NO: 191439 - DNA, 73 bp, Homo sapiens
gttcttaaccaggagtgagcctcagaatcactgtggggtggataaggccctcttttaaaatgttcatgtctaa

SEQ ID NO: 191440 - DNA, 73 bp, Homo sapiens
aaccaggagtgagcctcagaatcactgtggggtggataaggccctcttttaaaatgttcatgtctaagcccta

SEQ ID NO: 191441 - DNA, 73 bp, Homo sapiens
tcagaatcactgtggggtggataaggccctcttttaaaatgttcatgtctaagccctacctgtagagatttaa

SEQ ID NO: 191442 - DNA, 68 bp, Homo sapiens
actgtggggtggataaggccctcttttaaaatgttcatgtctaagccctacctgtagagatttaaatt

SEQ ID NO: 191443 - DNA, 68 bp, Homo sapiens
ataaggccctcttttaaaatgttcatgtctaagccctacctgtagagatttaaatttagtaggtctgg

SEQ ID NO: 191444 - DNA, 69 bp, Homo sapiens
aaaatgttcatgtctaagccctacctgtagagatttaaatttagtaggtctgggttggtgcccaaacca

SEQ ID NO: 191445 - DNA, 71 bp, Homo sapiens
ctgtagagatttaaatttagtaggtctgggttggtgcccaaaccatgcacttttctgactccccaggtgat

SEQ ID NO: 191446 - DNA, 70 bp, Homo sapiens
agatttaaatttagtaggtctgggttggtgcccaaaccatgcacttttctgactccccaggtgattctta

SEQ ID NO: 191447 - DNA, 73 bp, Homo sapiens
taggtctgggttggtgcccaaaccatgcacttttctgactccccaggtgattcttatgttcccctctaattga

SEQ ID NO: 191448 - DNA, 74 bp, Homo sapiens
ttggtgcccaaaccatgcacttttctgactccccaggtgattcttatgttcccctctaattgagaaccattaga

SEQ ID NO: 191449 - DNA, 73 bp, Homo sapiens
accatgcacttttctgactccccaggtgattcttatgttcccctctaattgagaaccattagactatacttta

SEQ ID NO: 191450 - DNA, 73 bp, Homo sapiens
tttctgactccccaggtgattcttatgttcccctctaattgagaaccattagactatactttaattcagatta

SEQ ID NO: 191451 - DNA, 72 bp, Homo sapiens
cccaggtgattcttatgttcccctctaattgagaaccattagactatactttaattcagattaggaagaaga

SEQ ID NO: 191452 - DNA, 73 bp, Homo sapiens
gtgattcttatgttcccctctaattgagaaccattagactatactttaattcagattaggaagaagacaagga

SEQ ID NO: 191453 - DNA, 76 bp, Homo sapiens
ccctctaattgagaaccattagactatactttaattcagattaggaagaagacaaggatgccaactactagcatga

SEQ ID NO: 191454 - DNA, 76 bp, Homo sapiens
tgagaaccattagactatactttaattcagattaggaagaagacaaggatgccaactactagcatgacttttaaca

SEQ ID NO: 191455 - DNA, 74 bp, Homo sapiens
ccattagactatactttaattcagattaggaagaagacaaggatgccaactactagcatgacttttaacattct

SEQ ID NO: 191456 - DNA, 73 bp, Homo sapiens
tttaattcagattaggaagaagacaaggatgccaactactagcatgacttttaacattcttctagagggttaa

SEQ ID NO: 191457 - DNA, 77 bp, Homo sapiens
ttaggaagaagacaaggatgccaactactagcatgacttttaacattcttctagagggttaagctgatgcaagacaa

SEQ ID NO: 191458 - DNA, 75 bp, Homo sapiens
agacaaggatgccaactactagcatgacttttaacattcttctagagggttaagctgatgcaagacaaaaagaaa

SEQ ID NO: 191459 - DNA, 75 bp, Homo sapiens
atgccaactactagcatgacttttaacattcttctagagggttaagctgatgcaagacaaaaagaaagaggccca

SEQ ID NO: 191460 - DNA, 77 bp, Homo sapiens
tactagcatgacttttaacattcttctagagggttaagctgatgcaagacaaaaagaaagaggcccagtgcattgac

SEQ ID NO: 191461 - DNA, 76 bp, Homo sapiens
tttaacattcttctagagggttaagctgatgcaagacaaaaagaaagaggcccagtgcattgactcacgtctataa

SEQ ID NO: 191462 - DNA, 77 bp, Homo sapiens
ttcttctagagggttaagctgatgcaagacaaaaagaaagaggcccagtgcattgactcacgtctataatcccacac

SEQ ID NO: 191463 - DNA, 77 bp, Homo sapiens
ttaagctgatgcaagacaaaaagaaagaggcccagtgcattgactcacgtctataatcccacacttgggaggccaaa

SEQ ID NO: 191464 - DNA, 81 bp, Homo sapiens
cagcagtgacaaagcattttgagatttttgtctttcatcattgtagactatactgtaaaaatcatagtggaaatgatgaga

SEQ ID NO: 191465 - DNA, 80 bp, Homo sapiens
gtgacaaagcattttgagatttttgtctttcatcattgtagactatactgtaaaaatcatagtggaaatgatgagagaga

SEQ ID NO: 191466 - DNA, 81 bp, Homo sapiens
gagatttttgtctttcatcattgtagactatactgtaaaaatcatagtggaaatgatgagagagatgaagaagatgaggaa

SEQ ID NO: 191467 - DNA, 80 bp, Homo sapiens
atcattgtagactatactgtaaaaatcatagtggaaatgatgagagagatgaagaagatgaggaacgagagagtaaaagc

SEQ ID NO: 191468 - DNA, 77 bp, Homo sapiens
tatactgtaaaaatcatagtggaaatgatgagagagatgaagaagatgaggaacgagagagtaaaagccgaggaaaa

SEQ ID NO: 191469 - DNA, 76 bp, Homo sapiens
taaaaatcatagtggaaatgatgagagagatgaagaagatgaggaacgagagagtaaaagccgaggaaaagtagaa

SEQ ID NO: 191470 - DNA, 77 bp, Homo sapiens
aaatgatgagagagatgaagaagatgaggaacgagagagtaaaagccgaggaaaagtagaaattgatcagcaacaac

SEQ ID NO: 191471 - DNA, 76 bp, Homo sapiens
agagagatgaagaagatgaggaacgagagagtaaaagccgaggaaaagtagaaattgatcagcaacaactaactca

SEQ ID NO: 191472 - DNA, 75 bp, Homo sapiens
aagatgaggaacgagagagtaaaagccgaggaaaagtagaaattgatcagcaacaactaactcagcagcaactta

SEQ ID NO: 191473 - DNA, 73 bp, Homo sapiens
aacgagagagtaaaagccgaggaaaagtagaaattgatcagcaacaactaactcagcagcaacttaatggaaa

SEQ ID NO: 191474 - DNA, 74 bp, Homo sapiens
taaaagccgaggaaaagtagaaattgatcagcaacaactaactcagcagcaacttaatggaaactaggtatgaa

SEQ ID NO: 191475 - DNA, 73 bp, Homo sapiens
cgaggaaaagtagaaattgatcagcaacaactaactcagcagcaacttaatggaaactaggtatgaaagttaa

SEQ ID NO: 191476 - DNA, 76 bp, Homo sapiens
aattgatcagcaacaactaactcagcagcaacttaatggaaactaggtatgaaagttaattatatgggatctgttg

SEQ ID NO: 191477 - DNA, 76 bp, Homo sapiens
agcaacaactaactcagcagcaacttaatggaaactaggtatgaaagttaattatatgggatctgttgtcaggata

SEQ ID NO: 191478 - DNA, 78 bp, Homo sapiens
cagcaacttaatggaaactaggtatgaaagttaattatatgggatctgttgtcaggatacaatacacactgatatata

SEQ ID NO: 191479 - DNA, 78 bp, Homo sapiens
atggaaactaggtatgaaagttaattatatgggatctgttgtcaggatacaatacacactgatatatacatgttgaag

SEQ ID NO: 191480 - DNA, 81 bp, Homo sapiens
gaaagttaattatatgggatctgttgtcaggatacaatacacactgatatatacatgttgaagtaatggtatgcagtaaga

SEQ ID NO: 191481 - DNA, 79 bp, Homo sapiens
aattatatgggatctgttgtcaggatacaatacacactgatatatacatgttgaagtaatggtatgcagtaagattttt

SEQ ID NO: 191482 - DNA, 78 bp, Homo sapiens
gggatctgttgtcaggatacaatacacactgatatatacatgttgaagtaatggtatgcagtaagattttttttaatc

SEQ ID NO: 191483 - DNA, 77 bp, Homo sapiens
gtcaggatacaatacacactgatatatacatgttgaagtaatggtatgcagtaagattttttttaatcctattatgt

SEQ ID NO: 191484 - DNA, 76 bp, Homo sapiens
cacactgatatatacatgttgaagtaatggtatgcagtaagattttttttaatcctattatgtttagttaagagca

SEQ ID NO: 191485 - DNA, 74 bp, Homo sapiens
tatacatgttgaagtaatggtatgcagtaagattttttttaatcctattatgtttagttaagagcatgttacta

SEQ ID NO: 191486 - DNA, 74 bp, Homo sapiens
tgaagtaatggtatgcagtaagattttttttaatcctattatgtttagttaagagcatgttactaaaatgctga

SEQ ID NO: 191487 - DNA, 73 bp, Homo sapiens
gattttttttaatcctattatgtttagttaagagcatgttactaaaatgctgaggattttgtaggcttgcata

SEQ ID NO: 191488 - DNA, 73 bp, Homo sapiens
aatcctattatgtttagttaagagcatgttactaaaatgctgaggattttgtaggcttgcatagtagttgttt

SEQ ID NO: 191489 - DNA, 73 bp, Homo sapiens
tgtttagttaagagcatgttactaaaatgctgaggattttgtaggcttgcatagtagttgttttttaactagc

SEQ ID NO: 191490 - DNA, 74 bp, Homo sapiens
gagcatgttactaaaatgctgaggattttgtaggcttgcatagtagttgttttttaactagctgattttgtaac

SEQ ID NO: 191491 - DNA, 72 bp, Homo sapiens
gctgaggattttgtaggcttgcatagtagttgttttttaactagctgattttgtaaccataaaaacaagcta

SEQ ID NO: 191492 - DNA, 73 bp, Homo sapiens
gtaggcttgcatagtagttgttttttaactagctgattttgtaaccataaaaacaagctatctgctttatcaa

SEQ ID NO: 191493 - DNA, 76 bp, Homo sapiens
ctagctgattttgtaaccataaaaacaagctatctgctttatcaataagtgtagttgtaatgtcaaatcaataaga

SEQ ID NO: 191494 - DNA, 76 bp, Homo sapiens
gtaaccataaaaacaagctatctgctttatcaataagtgtagttgtaatgtcaaatcaataagatattcacactcc

SEQ ID NO: 191495 - DNA, 78 bp, Homo sapiens
aaacaagctatctgctttatcaataagtgtagttgtaatgtcaaatcaataagatattcacactcctcaataacatta

SEQ ID NO: 191496 - DNA, 81 bp, Homo sapiens
gctatctgctttatcaataagtgtagttgtaatgtcaaatcaataagatattcacactcctcaataacattatattgattg

SEQ ID NO: 191497 - DNA, 78 bp, Homo sapiens
ttatcaataagtgtagttgtaatgtcaaatcaataagatattcacactcctcaataacattatattgattgtgttccc

SEQ ID NO: 191498 - DNA, 81 bp, Homo sapiens
gtgtagttgtaatgtcaaatcaataagatattcacactcctcaataacattatattgattgtgttcccctcaagcatcata

SEQ ID NO: 191499 - DNA, 79 bp, Homo sapiens
aatgtcaaatcaataagatattcacactcctcaataacattatattgattgtgttcccctcaagcatcatattttacat

SEQ ID NO: 191500 - DNA, 78 bp, Homo sapiens
taagatattcacactcctcaataacattatattgattgtgttcccctcaagcatcatattttacatttttttatcatc

SEQ ID NO: 191501 - DNA, 76 bp, Homo sapiens
ttcacactcctcaataacattatattgattgtgttcccctcaagcatcatattttacatttttttatcatctttta

SEQ ID NO: 191502 - DNA, 74 bp, Homo sapiens
taacattatattgattgtgttcccctcaagcatcatattttacatttttttatcatcttttaaacaggttcatg

SEQ ID NO: 191503 - DNA, 72 bp, Homo sapiens
gtgttcccctcaagcatcatattttacatttttttatcatcttttaaacaggttcatgggacagagttagaa

SEQ ID NO: 191504 - DNA, 71 bp, Homo sapiens
caagcatcatattttacatttttttatcatcttttaaacaggttcatgggacagagttagaaaactgggaa

SEQ ID NO: 191505 - DNA, 71 bp, Homo sapiens
acatttttttatcatcttttaaacaggttcatgggacagagttagaaaactgggaatgaataagacatcca

SEQ ID NO: 191506 - DNA, 73 bp, Homo sapiens
atcatcttttaaacaggttcatgggacagagttagaaaactgggaatgaataagacatccataactactattc

SEQ ID NO: 191507 - DNA, 71 bp, Homo sapiens
ggttcatgggacagagttagaaaactgggaatgaataagacatccataactactattcttttttcactgtt

SEQ ID NO: 191508 - DNA, 67 bp, Homo sapiens
aactgggaatgaataagacatccataactactattcttttttcactgttttctaaaatcaaaaaggg

SEQ ID NO: 191509 - DNA, 64 bp, Homo sapiens
ttcttttttcactgttttctaaaatcaaaaagggtttgtaactttttactgcccaactcttaga

SEQ ID NO: 191510 - DNA, 67 bp, Homo sapiens
cactgttttctaaaatcaaaaagggtttgtaactttttactgcccaactcttagatccttcattgaa

SEQ ID NO: 191511 - DNA, 67 bp, Homo sapiens
ctaaaatcaaaaagggtttgtaactttttactgcccaactcttagatccttcattgaactgcctaaa

SEQ ID NO: 191512 - DNA, 67 bp, Homo sapiens
caaaaagggtttgtaactttttactgcccaactcttagatccttcattgaactgcctaaaaatgtct

SEQ ID NO: 191513 - DNA, 70 bp, Homo sapiens
aactttttactgcccaactcttagatccttcattgaactgcctaaaaatgtcttgtttgttttatgagcc

SEQ ID NO: 191514 - DNA, 74 bp, Homo sapiens
ttactgcccaactcttagatccttcattgaactgcctaaaaatgtcttgtttgttttatgagccctcactagaa

SEQ ID NO: 191515 - DNA, 73 bp, Homo sapiens
actcttagatccttcattgaactgcctaaaaatgtcttgtttgttttatgagccctcactagaaggctgagtt

SEQ ID NO: 191516 - DNA, 77 bp, Homo sapiens
ttcattgaactgcctaaaaatgtcttgtttgttttatgagccctcactagaaggctgagtttgacatgttgatatta

SEQ ID NO: 191517 - DNA, 75 bp, Homo sapiens
ctaaaaatgtcttgtttgttttatgagccctcactagaaggctgagtttgacatgttgatattacgtagctatag

SEQ ID NO: 191518 - DNA, 76 bp, Homo sapiens
cttgtttgttttatgagccctcactagaaggctgagtttgacatgttgatattacgtagctatagtttgcagtttc

SEQ ID NO: 191519 - DNA, 78 bp, Homo sapiens
tcactagaaggctgagtttgacatgttgatattacgtagctatagtttgcagtttctgggaagcaattgaaacactat

SEQ ID NO: 191520 - DNA, 76 bp, Homo sapiens
agaaggctgagtttgacatgttgatattacgtagctatagtttgcagtttctgggaagcaattgaaacactattaa

SEQ ID NO: 191521 - DNA, 76 bp, Homo sapiens
tttgacatgttgatattacgtagctatagtttgcagtttctgggaagcaattgaaacactattaaccctgtgtata

SEQ ID NO: 191522 - DNA, 76 bp, Homo sapiens
ttgatattacgtagctatagtttgcagtttctgggaagcaattgaaacactattaaccctgtgtatagtgtcaaca

SEQ ID NO: 191523 - DNA, 71 bp, Homo sapiens
agtttctgggaagcaattgaaacactattaaccctgtgtatagtgtcaacagttaaagcagacgaaacgaa

SEQ ID NO: 191524 - DNA, 72 bp, Homo sapiens
aagcaattgaaacactattaaccctgtgtatagtgtcaacagttaaagcagacgaaacgaagtaagctatat

SEQ ID NO: 191525 - DNA, 73 bp, Homo sapiens
tattaaccctgtgtatagtgtcaacagttaaagcagacgaaacgaagtaagctatatttctggactgaacaaa

SEQ ID NO: 191526 - DNA, 76 bp, Homo sapiens
gtgtatagtgtcaacagttaaagcagacgaaacgaagtaagctatatttctggactgaacaaagctctgctgttta

SEQ ID NO: 191527 - DNA, 74 bp, Homo sapiens
aacagttaaagcagacgaaacgaagtaagctatatttctggactgaacaaagctctgctgtttagagcatttaa

SEQ ID NO: 191528 - DNA, 73 bp, Homo sapiens
aagcagacgaaacgaagtaagctatatttctggactgaacaaagctctgctgtttagagcatttaagtttgtt

SEQ ID NO: 191529 - DNA, 76 bp, Homo sapiens
agtaagctatatttctggactgaacaaagctctgctgtttagagcatttaagtttgtttagtggatccatactcaa

SEQ ID NO: 191530 - DNA, 75 bp, Homo sapiens
tatatttctggactgaacaaagctctgctgtttagagcatttaagtttgtttagtggatccatactcaaaggaaa

SEQ ID NO: 191531 - DNA, 75 bp, Homo sapiens
tgaacaaagctctgctgtttagagcatttaagtttgtttagtggatccatactcaaaggaaagcataagcaaatt

SEQ ID NO: 191532 - DNA, 73 bp, Homo sapiens
aagctctgctgtttagagcatttaagtttgtttagtggatccatactcaaaggaaagcataagcaaattttcc

SEQ ID NO: 191533 - DNA, 72 bp, Homo sapiens
agagcatttaagtttgtttagtggatccatactcaaaggaaagcataagcaaattttcctttacaatgcaaa

SEQ ID NO: 191534 - DNA, 74 bp, Homo sapiens
taagtttgtttagtggatccatactcaaaggaaagcataagcaaattttcctttacaatgcaaacatgccactg

SEQ ID NO: 191535 - DNA, 79 bp, Homo sapiens
tttagtggatccatactcaaaggaaagcataagcaaattttcctttacaatgcaaacatgccactggtggcagcacatg

SEQ ID NO: 191536 - DNA, 77 bp, Homo sapiens
atactcaaaggaaagcataagcaaattttcctttacaatgcaaacatgccactggtggcagcacatggtaatttgtg

SEQ ID NO: 191537 - DNA, 75 bp, Homo sapiens
aaggaaagcataagcaaattttcctttacaatgcaaacatgccactggtggcagcacatggtaatttgtggattt

SEQ ID NO: 191538 - DNA, 76 bp, Homo sapiens
ttcctttacaatgcaaacatgccactggtggcagcacatggtaatttgtggatttttttttcatactcaagtaatg

SEQ ID NO: 191539 - DNA, 72 bp, Homo sapiens
cagcacatggtaatttgtggatttttttttcatactcaagtaatggaggctagaaatgaagagaaccttctt

SEQ ID NO: 191540 - DNA, 70 bp, Homo sapiens
ttgtggatttttttttcatactcaagtaatggaggctagaaatgaagagaaccttctttttctcttgact

SEQ ID NO: 191541 - DNA, 76 bp, Homo sapiens
ttttttcatactcaagtaatggaggctagaaatgaagagaaccttctttttctcttgactttgacagcacatgcta

SEQ ID NO: 191542 - DNA, 75 bp, Homo sapiens
atactcaagtaatggaggctagaaatgaagagaaccttctttttctcttgactttgacagcacatgctaaaaatc

SEQ ID NO: 191543 - DNA, 76 bp, Homo sapiens
taatggaggctagaaatgaagagaaccttctttttctcttgactttgacagcacatgctaaaaatctcttccaaga

SEQ ID NO: 191544 - DNA, 75 bp, Homo sapiens
gaaatgaagagaaccttctttttctcttgactttgacagcacatgctaaaaatctcttccaagaagtatgctaaa

SEQ ID NO: 191545 - DNA, 74 bp, Homo sapiens
gaaccttctttttctcttgactttgacagcacatgctaaaaatctcttccaagaagtatgctaaagcttttcat

SEQ ID NO: 191546 - DNA, 74 bp, Homo sapiens
tttttctcttgactttgacagcacatgctaaaaatctcttccaagaagtatgctaaagcttttcatttggttcc

SEQ ID NO: 191547 - DNA, 74 bp, Homo sapiens
ttgacagcacatgctaaaaatctcttccaagaagtatgctaaagcttttcatttggttcctgttaaagttgttc

SEQ ID NO: 191548 - DNA, 72 bp, Homo sapiens
atgctaaaaatctcttccaagaagtatgctaaagcttttcatttggttcctgttaaagttgttctcactgac

SEQ ID NO: 191549 - DNA, 72 bp, Homo sapiens
aaaaatctcttccaagaagtatgctaaagcttttcatttggttcctgttaaagttgttctcactgaccagca

SEQ ID NO: 191550 - DNA, 75 bp, Homo sapiens
aagaagtatgctaaagcttttcatttggttcctgttaaagttgttctcactgaccagcatggactcaggcaactg

SEQ ID NO: 191551 - DNA, 79 bp, Homo sapiens
ttttcatttggttcctgttaaagttgttctcactgaccagcatggactcaggcaactggtaatgataagctatgagctc

SEQ ID NO: 191552 - DNA, 81 bp, Homo sapiens
tgttaaagttgttctcactgaccagcatggactcaggcaactggtaatgataagctatgagctccagtgcttttgccaaaa

SEQ ID NO: 191553 - DNA, 81 bp, Homo sapiens
aagttgttctcactgaccagcatggactcaggcaactggtaatgataagctatgagctccagtgcttttgccaaaattctc

SEQ ID NO: 191554 - DNA, 83 bp, Homo sapiens
actgaccagcatggactcaggcaactggtaatgataagctatgagctccagtgcttttgccaaaattctcttgacagcacacc

SEQ ID NO: 191555 - DNA, 80 bp, Homo sapiens
actcaggcaactggtaatgataagctatgagctccagtgcttttgccaaaattctcttgacagcacacctcctctctttc

SEQ ID NO: 191556 - DNA, 80 bp, Homo sapiens
actggtaatgataagctatgagctccagtgcttttgccaaaattctcttgacagcacacctcctctctttccatgttata

SEQ ID NO: 191557 - DNA, 79 bp, Homo sapiens
aatgataagctatgagctccagtgcttttgccaaaattctcttgacagcacacctcctctctttccatgttatacaaag

SEQ ID NO: 191558 - DNA, 75 bp, Homo sapiens
ttgacagcacacctcctctctttccatgttatacaaaggacttctggcaaaatgattgagtccttcaagtttaaa

SEQ ID NO: 191559 - DNA, 71 bp, Homo sapiens
cctctctttccatgttatacaaaggacttctggcaaaatgattgagtccttcaagtttaaactaacatttg

SEQ ID NO: 191560 - DNA, 72 bp, Homo sapiens
ctttccatgttatacaaaggacttctggcaaaatgattgagtccttcaagtttaaactaacatttggcaaca

SEQ ID NO: 191561 - DNA, 70 bp, Homo sapiens
caaaggacttctggcaaaatgattgagtccttcaagtttaaactaacatttggcaacagcaaattaaacg

SEQ ID NO: 191562 - DNA, 69 bp, Homo sapiens
ctggcaaaatgattgagtccttcaagtttaaactaacatttggcaacagcaaattaaacgtttttaaga

SEQ ID NO: 191563 - DNA, 69 bp, Homo sapiens
atgattgagtccttcaagtttaaactaacatttggcaacagcaaattaaacgtttttaagatgtaaaga

SEQ ID NO: 191564 - DNA, 65 bp, Homo sapiens
gtccttcaagtttaaactaacatttggcaacagcaaattaaacgtttttaagatgtaaagaaagg

SEQ ID NO: 191565 - DNA, 68 bp, Homo sapiens
tttggcaacagcaaattaaacgtttttaagatgtaaagaaagggttaccgcttgctaaggacttcaga

SEQ ID NO: 191566 - DNA, 66 bp, Homo sapiens
aaattaaacgtttttaagatgtaaagaaagggttaccgcttgctaaggacttcagacaccatgtcc

SEQ ID NO: 191567 - DNA, 69 bp, Homo sapiens
ttttaagatgtaaagaaagggttaccgcttgctaaggacttcagacaccatgtccgaaacctgttcctc

SEQ ID NO: 191568 - DNA, 71 bp, Homo sapiens
atgtaaagaaagggttaccgcttgctaaggacttcagacaccatgtccgaaacctgttcctctcaagtgcc

SEQ ID NO: 191569 - DNA, 71 bp, Homo sapiens
aaagggttaccgcttgctaaggacttcagacaccatgtccgaaacctgttcctctcaagtgccctgttgtg

SEQ ID NO: 191570 - DNA, 76 bp, Homo sapiens
cttgctaaggacttcagacaccatgtccgaaacctgttcctctcaagtgccctgttgtgtggaacacttcacatat

SEQ ID NO: 191571 - DNA, 79 bp, Homo sapiens
tcagacaccatgtccgaaacctgttcctctcaagtgccctgttgtgtggaacacttcacatattggcgcacagtacgta

SEQ ID NO: 191572 - DNA, 75 bp, Homo sapiens
accatgtccgaaacctgttcctctcaagtgccctgttgtgtggaacacttcacatattggcgcacagtacgtaag

SEQ ID NO: 191573 - DNA, 76 bp, Homo sapiens
aaacctgttcctctcaagtgccctgttgtgtggaacacttcacatattggcgcacagtacgtaaggaggtctcatg

SEQ ID NO: 191574 - DNA, 79 bp, Homo sapiens
tcaagtgccctgttgtgtggaacacttcacatattggcgcacagtacgtaaggaggtctcatgtgctgtaggagtaaaa

SEQ ID NO: 191575 - DNA, 76 bp, Homo sapiens
tgttgtgtggaacacttcacatattggcgcacagtacgtaaggaggtctcatgtgctgtaggagtaaaaaagtctt

SEQ ID NO: 191576 - DNA, 75 bp, Homo sapiens
aacacttcacatattggcgcacagtacgtaaggaggtctcatgtgctgtaggagtaaaaaagtctttgcataaaa

SEQ ID NO: 191577 - DNA, 74 bp, Homo sapiens
atattggcgcacagtacgtaaggaggtctcatgtgctgtaggagtaaaaaagtctttgcataaaacagtattta

SEQ ID NO: 191578 - DNA, 68 bp, Homo sapiens
cgtaaggaggtctcatgtgctgtaggagtaaaaaagtctttgcataaaacagtatttatttttacttt

SEQ ID NO: 191579 - DNA, 67 bp, Homo sapiens
tttacttttgtgaccactattttagaaactttatttaatattttaatgttttcagtcattgctttgg

SEQ ID NO: 191580 - DNA, 70 bp, Homo sapiens
tttgtgaccactattttagaaactttatttaatattttaatgttttcagtcattgctttggttatctata

SEQ ID NO: 191581 - DNA, 68 bp, Homo sapiens
ctattttagaaactttatttaatattttaatgttttcagtcattgctttggttatctataaaataggc

SEQ ID NO: 191582 - DNA, 69 bp, Homo sapiens
ctttatttaatattttaatgttttcagtcattgctttggttatctataaaataggcttttgtgccctac

SEQ ID NO: 191583 - DNA, 70 bp, Homo sapiens
ttttaatgttttcagtcattgctttggttatctataaaataggcttttgtgccctacttttcttcttgta

SEQ ID NO: 191584 - DNA, 70 bp, Homo sapiens
atgttttcagtcattgctttggttatctataaaataggcttttgtgccctacttttcttcttgtagggct

SEQ ID NO: 191585 - DNA, 69 bp, Homo sapiens
tgctttggttatctataaaataggcttttgtgccctacttttcttcttgtagggcttggtggtgtttta

SEQ ID NO: 191586 - DNA, 69 bp, Homo sapiens
aataggcttttgtgccctacttttcttcttgtagggcttggtggtgttttatcgattgtcagaattgtt

SEQ ID NO: 191587 - DNA, 70 bp, Homo sapiens
tttgtgccctacttttcttcttgtagggcttggtggtgttttatcgattgtcagaattgtttttgaaagc

SEQ ID NO: 191588 - DNA, 68 bp, Homo sapiens
acttttcttcttgtagggcttggtggtgttttatcgattgtcagaattgtttttgaaagcctaagaac

SEQ ID NO: 191589 - DNA, 67 bp, Homo sapiens
ggtggtgttttatcgattgtcagaattgtttttgaaagcctaagaacccagctttttagaaaggatt

SEQ ID NO: 191590 - DNA, 69 bp, Homo sapiens
attgtttttgaaagcctaagaacccagctttttagaaaggattttcacactggcatttctaggtagtga

SEQ ID NO: 191591 - DNA, 70 bp, Homo sapiens
ttgaaagcctaagaacccagctttttagaaaggattttcacactggcatttctaggtagtgatattttct

SEQ ID NO: 191592 - DNA, 70 bp, Homo sapiens
ctaagaacccagctttttagaaaggattttcacactggcatttctaggtagtgatattttcttccactta

SEQ ID NO: 191593 - DNA, 74 bp, Homo sapiens
ttttagaaaggattttcacactggcatttctaggtagtgatattttcttccacttacctgctgaagcacattta

SEQ ID NO: 191594 - DNA, 77 bp, Homo sapiens
tagaaaggattttcacactggcatttctaggtagtgatattttcttccacttacctgctgaagcacatttatgcatt

SEQ ID NO: 191595 - DNA, 76 bp, Homo sapiens
aaaggattttcacactggcatttctaggtagtgatattttcttccacttacctgctgaagcacatttatgcatttc

SEQ ID NO: 191596 - DNA, 77 bp, Homo sapiens
attttcacactggcatttctaggtagtgatattttcttccacttacctgctgaagcacatttatgcatttctttatg

SEQ ID NO: 191597 - DNA, 77 bp, Homo sapiens
acactggcatttctaggtagtgatattttcttccacttacctgctgaagcacatttatgcatttctttatggcaaaa

SEQ ID NO: 191598 - DNA, 75 bp, Homo sapiens
catttctaggtagtgatattttcttccacttacctgctgaagcacatttatgcatttctttatggcaaaaccaaa

SEQ ID NO: 191599 - DNA, 75 bp, Homo sapiens
tctaggtagtgatattttcttccacttacctgctgaagcacatttatgcatttctttatggcaaaaccaaataac

SEQ ID NO: 191600 - DNA, 73 bp, Homo sapiens
aggtagtgatattttcttccacttacctgctgaagcacatttatgcatttctttatggcaaaaccaaataact

SEQ ID NO: 191601 - DNA, 73 bp, Homo sapiens
tttcttccacttacctgctgaagcacatttatgcatttctttatggcaaaaccaaataactttagttgtggtc

SEQ ID NO: 191602 - DNA, 77 bp, Homo sapiens
tccacttacctgctgaagcacatttatgcatttctttatggcaaaaccaaataactttagttgtggtctgcctgata

SEQ ID NO: 191603 - DNA, 76 bp, Homo sapiens
cttacctgctgaagcacatttatgcatttctttatggcaaaaccaaataactttagttgtggtctgcctgatacta

SEQ ID NO: 191604 - DNA, 75 bp, Homo sapiens
aagcacatttatgcatttctttatggcaaaaccaaataactttagttgtggtctgcctgatactaccatagcacc

SEQ ID NO: 191605 - DNA, 72 bp, Homo sapiens
ctttatggcaaaaccaaataactttagttgtggtctgcctgatactaccatagcacctcagtaccaagggga

SEQ ID NO: 191606 - DNA, 71 bp, Homo sapiens
aaataactttagttgtggtctgcctgatactaccatagcacctcagtaccaaggggagggattttgactag

SEQ ID NO: 191607 - DNA, 73 bp, Homo sapiens
tttagttgtggtctgcctgatactaccatagcacctcagtaccaaggggagggattttgactagttgaattat

SEQ ID NO: 191608 - DNA, 75 bp, Homo sapiens
tgcctgatactaccatagcacctcagtaccaaggggagggattttgactagttgaattattaagccaccacaata

SEQ ID NO: 191609 - DNA, 71 bp, Homo sapiens
atactaccatagcacctcagtaccaaggggagggattttgactagttgaattattaagccaccacaataaa

SEQ ID NO: 191610 - DNA, 68 bp, Homo sapiens
gtaccaaggggagggattttgactagttgaattattaagccaccacaataaagcagatttttaaataa

SEQ ID NO: 191611 - DNA, 70 bp, Homo sapiens
gactagttgaattattaagccaccacaataaagcagatttttaaataagaaataataatgttaacttgac

SEQ ID NO: 191612 - DNA, 76 bp, Homo sapiens
taagccaccacaataaagcagatttttaaataagaaataataatgttaacttgactgtacattgagatattctgca

SEQ ID NO: 191613 - DNA, 81 bp, Homo sapiens
caataaagcagatttttaaataagaaataataatgttaacttgactgtacattgagatattctgcagctgatagagcagca

SEQ ID NO: 191614 - DNA, 80 bp, Homo sapiens
gcagatttttaaataagaaataataatgttaacttgactgtacattgagatattctgcagctgatagagcagcattttaa

SEQ ID NO: 191615 - DNA, 79 bp, Homo sapiens
taagaaataataatgttaacttgactgtacattgagatattctgcagctgatagagcagcattttaaaaatgtaacagg

SEQ ID NO: 191616 - DNA, 79 bp, Homo sapiens
taatgttaacttgactgtacattgagatattctgcagctgatagagcagcattttaaaaatgtaacaggtggaaaatta

SEQ ID NO: 191617 - DNA, 79 bp, Homo sapiens
ttaacttgactgtacattgagatattctgcagctgatagagcagcattttaaaaatgtaacaggtggaaaattacactg

SEQ ID NO: 191618 - DNA, 80 bp, Homo sapiens
attgagatattctgcagctgatagagcagcattttaaaaatgtaacaggtggaaaattacactgtgcttaatgactgatt

SEQ ID NO: 191619 - DNA, 78 bp, Homo sapiens
gatattctgcagctgatagagcagcattttaaaaatgtaacaggtggaaaattacactgtgcttaatgactgattttt

SEQ ID NO: 191620 - DNA, 73 bp, Homo sapiens
agctgatagagcagcattttaaaaatgtaacaggtggaaaattacactgtgcttaatgactgattttttttta

SEQ ID NO: 191621 - DNA, 67 bp, Homo sapiens
aaaaatgtaacaggtggaaaattacactgtgcttaatgactgatttttttttaaactgcgagtccct

SEQ ID NO: 191622 - DNA, 70 bp, Homo sapiens
taacaggtggaaaattacactgtgcttaatgactgatttttttttaaactgcgagtcccttaagatcacg

SEQ ID NO: 191623 - DNA, 71 bp, Homo sapiens
aattacactgtgcttaatgactgatttttttttaaactgcgagtcccttaagatcacgtttgtcaagtgtg

SEQ ID NO: 191624 - DNA, 74 bp, Homo sapiens
tgtgcttaatgactgatttttttttaaactgcgagtcccttaagatcacgtttgtcaagtgtgtattcacacat

SEQ ID NO: 191625 - DNA, 71 bp, Homo sapiens
tttttaaactgcgagtcccttaagatcacgtttgtcaagtgtgtattcacacatttacttaaatcaaggga

SEQ ID NO: 191626 - DNA, 73 bp, Homo sapiens
agtcccttaagatcacgtttgtcaagtgtgtattcacacatttacttaaatcaagggactcaatgcttgcttt

SEQ ID NO: 191627 - DNA, 73 bp, Homo sapiens
cttaagatcacgtttgtcaagtgtgtattcacacatttacttaaatcaagggactcaatgcttgcttttattt

SEQ ID NO: 191628 - DNA, 71 bp, Homo sapiens
gtgtgtattcacacatttacttaaatcaagggactcaatgcttgcttttattttaaccatcttttactatt

SEQ ID NO: 191629 - DNA, 68 bp, Homo sapiens
catttacttaaatcaagggactcaatgcttgcttttattttaaccatcttttactatttttagaagga

SEQ ID NO: 191630 - DNA, 68 bp, Homo sapiens
tcaagggactcaatgcttgcttttattttaaccatcttttactatttttagaaggaaactagctttag

SEQ ID NO: 191631 - DNA, 67 bp, Homo sapiens
ctcaatgcttgcttttattttaaccatcttttactatttttagaaggaaactagctttagtagtggg

SEQ ID NO: 191632 - DNA, 65 bp, Homo sapiens
gcttttattttaaccatcttttactatttttagaaggaaactagctttagtagtgggttgccctg

SEQ ID NO: 191633 - DNA, 65 bp, Homo sapiens
ttttaaccatcttttactatttttagaaggaaactagctttagtagtgggttgccctgtatgttt

SEQ ID NO: 191634 - DNA, 67 bp, Homo sapiens
ttaaccatcttttactatttttagaaggaaactagctttagtagtgggttgccctgtatgttttctc

SEQ ID NO: 191635 - DNA, 66 bp, Homo sapiens
accatcttttactatttttagaaggaaactagctttagtagtgggttgccctgtatgttttctctt

SEQ ID NO: 191636 - DNA, 66 bp, Homo sapiens
cttttactatttttagaaggaaactagctttagtagtgggttgccctgtatgttttctctttttgc

SEQ ID NO: 191637 - DNA, 70 bp, Homo sapiens
ttttagaaggaaactagctttagtagtgggttgccctgtatgttttctctttttgctcttaatatgccat

SEQ ID NO: 191638 - DNA, 73 bp, Homo sapiens
tagtagtgggttgccctgtatgttttctctttttgctcttaatatgccattgggtttttgtgtgtatgtgatt

SEQ ID NO: 191639 - DNA, 73 bp, Homo sapiens
tgggttgccctgtatgttttctctttttgctcttaatatgccattgggtttttgtgtgtatgtgattttcaaa

SEQ ID NO: 191640 - DNA, 76 bp, Homo sapiens
ctttttgctcttaatatgccattgggtttttgtgtgtatgtgattttcaaaattcatgacttgaagtgcaaggaca

SEQ ID NO: 191641 - DNA, 78 bp, Homo sapiens
ttaatatgccattgggtttttgtgtgtatgtgattttcaaaattcatgacttgaagtgcaaggacagatctagatgtt

SEQ ID NO: 191642 - DNA, 80 bp, Homo sapiens
ttgtgtgtatgtgattttcaaaattcatgacttgaagtgcaaggacagatctagatgtttgtttaccaagctatgtgact

SEQ ID NO: 191643 - DNA, 78 bp, Homo sapiens
aaattcatgacttgaagtgcaaggacagatctagatgtttgtttaccaagctatgtgacttctcccaaaggatctgta

SEQ ID NO: 191644 - DNA, 75 bp, Homo sapiens
acttgaagtgcaaggacagatctagatgtttgtttaccaagctatgtgacttctcccaaaggatctgtactttct

SEQ ID NO: 191645 - DNA, 73 bp, Homo sapiens
aaggacagatctagatgtttgtttaccaagctatgtgacttctcccaaaggatctgtactttctttccttaca

SEQ ID NO: 191646 - DNA, 73 bp, Homo sapiens
tagatgtttgtttaccaagctatgtgacttctcccaaaggatctgtactttctttccttacaacagcttgaaa

SEQ ID NO: 191647 - DNA, 71 bp, Homo sapiens
agctatgtgacttctcccaaaggatctgtactttctttccttacaacagcttgaaaatcattattttaaaa

SEQ ID NO: 191648 - DNA, 68 bp, Homo sapiens
cttctcccaaaggatctgtactttctttccttacaacagcttgaaaatcattattttaaaatccttaa

SEQ ID NO: 191649 - DNA, 76 bp, Homo sapiens
caacagcttgaaaatcattattttaaaatccttaaatcactgtgtctagatcattttttacattgtgtgccataga

SEQ ID NO: 191650 - DNA, 74 bp, Homo sapiens
aatcattattttaaaatccttaaatcactgtgtctagatcattttttacattgtgtgccatagacttacccatg

SEQ ID NO: 191651 - DNA, 75 bp, Homo sapiens
tttaaaatccttaaatcactgtgtctagatcattttttacattgtgtgccatagacttacccatgggacaacaga

SEQ ID NO: 191652 - DNA, 77 bp, Homo sapiens
taaatcactgtgtctagatcattttttacattgtgtgccatagacttacccatgggacaacagagctccttcatttt

SEQ ID NO: 191653 - DNA, 73 bp, Homo sapiens
attttttacattgtgtgccatagacttacccatgggacaacagagctccttcatttttggacaactactgtaa

SEQ ID NO: 191654 - DNA, 75 bp, Homo sapiens
ttacattgtgtgccatagacttacccatgggacaacagagctccttcatttttggacaactactgtaatcatttt

SEQ ID NO: 191655 - DNA, 70 bp, Homo sapiens
ccatagacttacccatgggacaacagagctccttcatttttggacaactactgtaatcatttttttttta

SEQ ID NO: 191656 - DNA, 64 bp, Homo sapiens
ctccttcatttttggacaactactgtaatcattttttttttaggaaaaatggaaggtgccgggg

SEQ ID NO: 191657 - DNA, 67 bp, Homo sapiens
tttggacaactactgtaatcattttttttttaggaaaaatggaaggtgccgggggtaatcatggcca

SEQ ID NO: 191658 - DNA, 67 bp, Homo sapiens
actgtaatcattttttttttaggaaaaatggaaggtgccgggggtaatcatggccagtcaataatta

SEQ ID NO: 191659 - DNA, 68 bp, Homo sapiens
ttttttaggaaaaatggaaggtgccgggggtaatcatggccagtcaataattatataaaggagttcaa

SEQ ID NO: 191660 - DNA, 75 bp, Homo sapiens
aaggtgccgggggtaatcatggccagtcaataattatataaaggagttcaaatactatagctgtcagttgatgaa

SEQ ID NO: 191661 - DNA, 77 bp, Homo sapiens
gggtaatcatggccagtcaataattatataaaggagttcaaatactatagctgtcagttgatgaatttgttatgtag

SEQ ID NO: 191662 - DNA, 76 bp, Homo sapiens
atggccagtcaataattatataaaggagttcaaatactatagctgtcagttgatgaatttgttatgtagtaaaatg

SEQ ID NO: 191663 - DNA, 76 bp, Homo sapiens
ttatataaaggagttcaaatactatagctgtcagttgatgaatttgttatgtagtaaaatgtatgactttgtatgg

SEQ ID NO: 191664 - DNA, 77 bp, Homo sapiens
gagttcaaatactatagctgtcagttgatgaatttgttatgtagtaaaatgtatgactttgtatgggtttcttcagc

SEQ ID NO: 191665 - DNA, 75 bp, Homo sapiens
caaatactatagctgtcagttgatgaatttgttatgtagtaaaatgtatgactttgtatgggtttcttcagccct

SEQ ID NO: 191666 - DNA, 75 bp, Homo sapiens
tgtcagttgatgaatttgttatgtagtaaaatgtatgactttgtatgggtttcttcagccctttttctgccacta

SEQ ID NO: 191667 - DNA, 73 bp, Homo sapiens
atgaatttgttatgtagtaaaatgtatgactttgtatgggtttcttcagccctttttctgccactagcaacca

SEQ ID NO: 191668 - DNA, 74 bp, Homo sapiens
tgtagtaaaatgtatgactttgtatgggtttcttcagccctttttctgccactagcaaccagaatagcacttta

SEQ ID NO: 191669 - DNA, 71 bp, Homo sapiens
aatgtatgactttgtatgggtttcttcagccctttttctgccactagcaaccagaatagcactttaccttt

SEQ ID NO: 191670 - DNA, 69 bp, Homo sapiens
actttgtatgggtttcttcagccctttttctgccactagcaaccagaatagcactttaccttttggttg

SEQ ID NO: 191671 - DNA, 72 bp, Homo sapiens
ttttctgccactagcaaccagaatagcactttaccttttggttggctagataagtggctgactacctgtttt

SEQ ID NO: 191672 - DNA, 73 bp, Homo sapiens
actagcaaccagaatagcactttaccttttggttggctagataagtggctgactacctgtttttctcactgtg

SEQ ID NO: 191673 - DNA, 73 bp, Homo sapiens
aaccagaatagcactttaccttttggttggctagataagtggctgactacctgtttttctcactgtggtgtga

SEQ ID NO: 191674 - DNA, 73 bp, Homo sapiens
tttaccttttggttggctagataagtggctgactacctgtttttctcactgtggtgtgattggctaaacaatc

SEQ ID NO: 191675 - DNA, 75 bp, Homo sapiens
gttggctagataagtggctgactacctgtttttctcactgtggtgtgattggctaaacaatctcgcattaaaaat

SEQ ID NO: 191676 - DNA, 75 bp, Homo sapiens
ctagataagtggctgactacctgtttttctcactgtggtgtgattggctaaacaatctcgcattaaaaattcaaa

SEQ ID NO: 191677 - DNA, 75 bp, Homo sapiens
gctgactacctgtttttctcactgtggtgtgattggctaaacaatctcgcattaaaaattcaaatgtaaattgaa

SEQ ID NO: 191678 - DNA, 76 bp, Homo sapiens
ctgtttttctcactgtggtgtgattggctaaacaatctcgcattaaaaattcaaatgtaaattgaattcacatgaa

SEQ ID NO: 191679 - DNA, 76 bp, Homo sapiens
cactgtggtgtgattggctaaacaatctcgcattaaaaattcaaatgtaaattgaattcacatgaaaaatcatgtt

SEQ ID NO: 191680 - DNA, 74 bp, Homo sapiens
gattggctaaacaatctcgcattaaaaattcaaatgtaaattgaattcacatgaaaaatcatgtttggttgtaa

SEQ ID NO: 191681 - DNA, 71 bp, Homo sapiens
aaaattcaaatgtaaattgaattcacatgaaaaatcatgtttggttgtaaacctccaatgttttgattctc

SEQ ID NO: 191682 - DNA, 74 bp, Homo sapiens
tgtaaattgaattcacatgaaaaatcatgtttggttgtaaacctccaatgttttgattctctaatcatgttttc

SEQ ID NO: 191683 - DNA, 77 bp, Homo sapiens
attcacatgaaaaatcatgtttggttgtaaacctccaatgttttgattctctaatcatgttttcgtcacatgctgag

SEQ ID NO: 191684 - DNA, 73 bp, Homo sapiens
aaaatcatgtttggttgtaaacctccaatgttttgattctctaatcatgttttcgtcacatgctgagtaaaag

SEQ ID NO: 191685 - DNA, 74 bp, Homo sapiens
atgtttggttgtaaacctccaatgttttgattctctaatcatgttttcgtcacatgctgagtaaaagtgcctta

SEQ ID NO: 191686 - DNA, 74 bp, Homo sapiens
gttttgattctctaatcatgttttcgtcacatgctgagtaaaagtgccttacaatgtaaaaattgtacagtact

SEQ ID NO: 191687 - DNA, 74 bp, Homo sapiens
atgttttcgtcacatgctgagtaaaagtgccttacaatgtaaaaattgtacagtacttatgttcccaagtagca

SEQ ID NO: 191688 - DNA, 77 bp, Homo sapiens
tgctgagtaaaagtgccttacaatgtaaaaattgtacagtacttatgttcccaagtagcatcatcatcttctgggta

SEQ ID NO: 191689 - DNA, 74 bp, Homo sapiens
gtaaaagtgccttacaatgtaaaaattgtacagtacttatgttcccaagtagcatcatcatcttctgggtagta

SEQ ID NO: 191690 - DNA, 75 bp, Homo sapiens
caatgtaaaaattgtacagtacttatgttcccaagtagcatcatcatcttctgggtagtaattacattgtggtat

SEQ ID NO: 191691 - DNA, 74 bp, Homo sapiens
acagtacttatgttcccaagtagcatcatcatcttctgggtagtaattacattgtggtattaatatttagaaaa

SEQ ID NO: 191692 - DNA, 77 bp, Homo sapiens
gcatcatcatcttctgggtagtaattacattgtggtattaatatttagaaaaatggacctcagcagtgtatttactg

SEQ ID NO: 191693 - DNA, 73 bp, Homo sapiens
cttctgggtagtaattacattgtggtattaatatttagaaaaatggacctcagcagtgtatttactgtacatc

SEQ ID NO: 191694 - DNA, 73 bp, Homo sapiens
gtaattacattgtggtattaatatttagaaaaatggacctcagcagtgtatttactgtacatctcttaagtcc

SEQ ID NO: 191695 - DNA, 72 bp, Homo sapiens
tttagaaaaatggacctcagcagtgtatttactgtacatctcttaagtccttaactgtagttttaataagca

SEQ ID NO: 191696 - DNA, 76 bp, Homo sapiens
atggacctcagcagtgtatttactgtacatctcttaagtccttaactgtagttttaataagcatgacattatttga

SEQ ID NO: 191697 - DNA, 76 bp, Homo sapiens
ctcagcagtgtatttactgtacatctcttaagtccttaactgtagttttaataagcatgacattatttgataagta

SEQ ID NO: 191698 - DNA, 73 bp, Homo sapiens
atttactgtacatctcttaagtccttaactgtagttttaataagcatgacattatttgataagtatataacat

SEQ ID NO: 191699 - DNA, 76 bp, Homo sapiens
catctcttaagtccttaactgtagttttaataagcatgacattatttgataagtatataacatttacatcatttca

SEQ ID NO: 191700 - DNA, 72 bp, Homo sapiens
agtccttaactgtagttttaataagcatgacattatttgataagtatataacatttacatcatttcaaaaaa

SEQ ID NO: 191701 - DNA, 74 bp, Homo sapiens
gttttaataagcatgacattatttgataagtatataacatttacatcatttcaaaaaatactgccgttactgtc

SEQ ID NO: 191702 - DNA, 77 bp, Homo sapiens
ataagcatgacattatttgataagtatataacatttacatcatttcaaaaaatactgccgttactgtcttttatgca

SEQ ID NO: 191703 - DNA, 75 bp, Homo sapiens
tttgataagtatataacatttacatcatttcaaaaaatactgccgttactgtcttttatgcatattttagcctga

SEQ ID NO: 191704 - DNA, 72 bp, Homo sapiens
gtatataacatttacatcatttcaaaaaatactgccgttactgtcttttatgcatattttagcctgaaattt

SEQ ID NO: 191705 - DNA, 69 bp, Homo sapiens
catttcaaaaaatactgccgttactgtcttttatgcatattttagcctgaaattttgaagcgtcttttt

SEQ ID NO: 191706 - DNA, 74 bp, Homo sapiens
ttttgttttttgttattgatattaaacagtgtaatctttgcaagcgtatattgaagattattctggagcattta

SEQ ID NO: 191707 - DNA, 78 bp, Homo sapiens
tgttattgatattaaacagtgtaatctttgcaagcgtatattgaagattattctggagcatttattgccttaccagaa

SEQ ID NO: 191708 - DNA, 75 bp, Homo sapiens
attaaacagtgtaatctttgcaagcgtatattgaagattattctggagcatttattgccttaccagaaatgttag

SEQ ID NO: 191709 - DNA, 76 bp, Homo sapiens
aacagtgtaatctttgcaagcgtatattgaagattattctggagcatttattgccttaccagaaatgttagtagga

SEQ ID NO: 191710 - DNA, 76 bp, Homo sapiens
gtgtaatctttgcaagcgtatattgaagattattctggagcatttattgccttaccagaaatgttagtaggaaatg

SEQ ID NO: 191711 - DNA, 75 bp, Homo sapiens
gtaatctttgcaagcgtatattgaagattattctggagcatttattgccttaccagaaatgttagtaggaaatgt

SEQ ID NO: 191712 - DNA, 74 bp, Homo sapiens
ctttgcaagcgtatattgaagattattctggagcatttattgccttaccagaaatgttagtaggaaatgttctt

SEQ ID NO: 191713 - DNA, 74 bp, Homo sapiens
caagcgtatattgaagattattctggagcatttattgccttaccagaaatgttagtaggaaatgttctttagag

SEQ ID NO: 191714 - DNA, 73 bp, Homo sapiens
attgaagattattctggagcatttattgccttaccagaaatgttagtaggaaatgttctttagagtagaaaga

SEQ ID NO: 191715 - DNA, 73 bp, Homo sapiens
gattattctggagcatttattgccttaccagaaatgttagtaggaaatgttctttagagtagaaagatagact

SEQ ID NO: 191716 - DNA, 72 bp, Homo sapiens
ggagcatttattgccttaccagaaatgttagtaggaaatgttctttagagtagaaagatagacttgagtttc

SEQ ID NO: 191717 - DNA, 73 bp, Homo sapiens
gagcatttattgccttaccagaaatgttagtaggaaatgttctttagagtagaaagatagacttgagtttcta

SEQ ID NO: 191718 - DNA, 71 bp, Homo sapiens
tttattgccttaccagaaatgttagtaggaaatgttctttagagtagaaagatagacttgagtttctatac

SEQ ID NO: 191719 - DNA, 71 bp, Homo sapiens
cagaaatgttagtaggaaatgttctttagagtagaaagatagacttgagtttctatacttttaagaagagc

SEQ ID NO: 191720 - DNA, 70 bp, Homo sapiens
gtaggaaatgttctttagagtagaaagatagacttgagtttctatacttttaagaagagctctttgttcc

SEQ ID NO: 191721 - DNA, 69 bp, Homo sapiens
aatgttctttagagtagaaagatagacttgagtttctatacttttaagaagagctctttgttcctgggg

SEQ ID NO: 191722 - DNA, 65 bp, Homo sapiens
acttgagtttctatacttttaagaagagctctttgttcctgggggaggggggcagggggtgaatt

SEQ ID NO: 191723 - DNA, 64 bp, Homo sapiens
tttctatacttttaagaagagctctttgttcctgggggaggggggcagggggtgaattttactt

SEQ ID NO: 191724 - DNA, 65 bp, Homo sapiens
agctctttgttcctgggggaggggggcagggggtgaattttactttcatctcaagttattaaaaa

SEQ ID NO: 191725 - DNA, 64 bp, Homo sapiens
gggggaggggggcagggggtgaattttactttcatctcaagttattaaaaacccacaactgaag

SEQ ID NO: 191726 - DNA, 65 bp, Homo sapiens
gggcagggggtgaattttactttcatctcaagttattaaaaacccacaactgaagtaaattttat

SEQ ID NO: 191727 - DNA, 70 bp, Homo sapiens
tactttcatctcaagttattaaaaacccacaactgaagtaaattttatttcaagaatcagcagttttaga

SEQ ID NO: 191728 - DNA, 69 bp, Homo sapiens
ctcaagttattaaaaacccacaactgaagtaaattttatttcaagaatcagcagttttagaatttcaga

SEQ ID NO: 191729 - DNA, 72 bp, Homo sapiens
aacccacaactgaagtaaattttatttcaagaatcagcagttttagaatttcagatagtacttgctcagaag

SEQ ID NO: 191730 - DNA, 77 bp, Homo sapiens
gaagtaaattttatttcaagaatcagcagttttagaatttcagatagtacttgctcagaagtacatgctactcaaga

SEQ ID NO: 191731 - DNA, 80 bp, Homo sapiens
ttatttcaagaatcagcagttttagaatttcagatagtacttgctcagaagtacatgctactcaagatattaagagataa

SEQ ID NO: 191732 - DNA, 82 bp, Homo sapiens
gaatcagcagttttagaatttcagatagtacttgctcagaagtacatgctactcaagatattaagagataacaagatctgta

SEQ ID NO: 191733 - DNA, 84 bp, Homo sapiens
tttagaatttcagatagtacttgctcagaagtacatgctactcaagatattaagagataacaagatctgtagatctgctattga

SEQ ID NO: 191734 - DNA, 85 bp, Homo sapiens
aatttcagatagtacttgctcagaagtacatgctactcaagatattaagagataacaagatctgtagatctgctattgaatcaga

SEQ ID NO: 191735 - DNA, 83 bp, Homo sapiens
agaagtacatgctactcaagatattaagagataacaagatctgtagatctgctattgaatcagaatctgtgtacttgaacaaa

SEQ ID NO: 191736 - DNA, 85 bp, Homo sapiens
tactcaagatattaagagataacaagatctgtagatctgctattgaatcagaatctgtgtacttgaacaaatgtgtgaatctcaa

SEQ ID NO: 191737 - DNA, 86 bp, Homo sapiens
gatattaagagataacaagatctgtagatctgctattgaatcagaatctgtgtacttgaacaaatgtgtgaatctcaaatatctca

SEQ ID NO: 191738 - DNA, 84 bp, Homo sapiens
gataacaagatctgtagatctgctattgaatcagaatctgtgtacttgaacaaatgtgtgaatctcaaatatctcaaagcaaaa

SEQ ID NO: 191739 - DNA, 81 bp, Homo sapiens
tctgtagatctgctattgaatcagaatctgtgtacttgaacaaatgtgtgaatctcaaatatctcaaagcaaaagaaaaag

SEQ ID NO: 191740 - DNA, 78 bp, Homo sapiens
ttgaatcagaatctgtgtacttgaacaaatgtgtgaatctcaaatatctcaaagcaaaagaaaaagtgttctagagtg

SEQ ID NO: 191741 - DNA, 77 bp, Homo sapiens
gaatctgtgtacttgaacaaatgtgtgaatctcaaatatctcaaagcaaaagaaaaagtgttctagagtgttgttgc

SEQ ID NO: 191742 - DNA, 73 bp, Homo sapiens
gtacttgaacaaatgtgtgaatctcaaatatctcaaagcaaaagaaaaagtgttctagagtgttgttgctttt

SEQ ID NO: 191743 - DNA, 71 bp, Homo sapiens
caaatgtgtgaatctcaaatatctcaaagcaaaagaaaaagtgttctagagtgttgttgcttttttaaaaa

SEQ ID NO: 191744 - DNA, 66 bp, Homo sapiens
ttttttaaaaaaagcgctgaagttagaccaaggtatacagttttgttctaacagacatttaggtta

SEQ ID NO: 191745 - DNA, 68 bp, Homo sapiens
aaaaagcgctgaagttagaccaaggtatacagttttgttctaacagacatttaggttaattgtaaaga

SEQ ID NO: 191746 - DNA, 72 bp, Homo sapiens
gctgaagttagaccaaggtatacagttttgttctaacagacatttaggttaattgtaaagataaggaatgca

SEQ ID NO: 191747 - DNA, 72 bp, Homo sapiens
gaccaaggtatacagttttgttctaacagacatttaggttaattgtaaagataaggaatgcattatgggtca

SEQ ID NO: 191748 - DNA, 71 bp, Homo sapiens
cagttttgttctaacagacatttaggttaattgtaaagataaggaatgcattatgggtcaaaaatcaaaca

SEQ ID NO: 191749 - DNA, 74 bp, Homo sapiens
acagacatttaggttaattgtaaagataaggaatgcattatgggtcaaaaatcaaacattcctctcatgttatg

SEQ ID NO: 191750 - DNA, 74 bp, Homo sapiens
catttaggttaattgtaaagataaggaatgcattatgggtcaaaaatcaaacattcctctcatgttatgtatat

SEQ ID NO: 191751 - DNA, 74 bp, Homo sapiens
aattgtaaagataaggaatgcattatgggtcaaaaatcaaacattcctctcatgttatgtatattttgttcctg

SEQ ID NO: 191752 - DNA, 75 bp, Homo sapiens
taaggaatgcattatgggtcaaaaatcaaacattcctctcatgttatgtatattttgttcctgttatattggctt

SEQ ID NO: 191753 - DNA, 74 bp, Homo sapiens
cattatgggtcaaaaatcaaacattcctctcatgttatgtatattttgttcctgttatattggctttattttca

SEQ ID NO: 191754 - DNA, 72 bp, Homo sapiens
atcaaacattcctctcatgttatgtatattttgttcctgttatattggctttattttcaaaattgtagtttg

SEQ ID NO: 191755 - DNA, 72 bp, Homo sapiens
acattcctctcatgttatgtatattttgttcctgttatattggctttattttcaaaattgtagtttgtagta

SEQ ID NO: 191756 - DNA, 68 bp, Homo sapiens
gttatgtatattttgttcctgttatattggctttattttcaaaattgtagtttgtagtattagtttcc

SEQ ID NO: 191757 - DNA, 66 bp, Homo sapiens
tttgttcctgttatattggctttattttcaaaattgtagtttgtagtattagtttccttttattgg

SEQ ID NO: 191758 - DNA, 69 bp, Homo sapiens
ctgttatattggctttattttcaaaattgtagtttgtagtattagtttccttttattggtattcttgca

SEQ ID NO: 191759 - DNA, 70 bp, Homo sapiens
ggctttattttcaaaattgtagtttgtagtattagtttccttttattggtattcttgcatatactattca

SEQ ID NO: 191760 - DNA, 73 bp, Homo sapiens
tcaaaattgtagtttgtagtattagtttccttttattggtattcttgcatatactattcattcaataaatgac

SEQ ID NO: 191761 - DNA, 74 bp, Homo sapiens
gtttccttttattggtattcttgcatatactattcattcaataaatgacttatgactttcatatttgtttgtct

SEQ ID NO: 191762 - DNA, 73 bp, Homo sapiens
cttttattggtattcttgcatatactattcattcaataaatgacttatgactttcatatttgtttgtcttttt

SEQ ID NO: 191763 - DNA, 77 bp, Homo sapiens
cttgcatatactattcattcaataaatgacttatgactttcatatttgtttgtcttttttgtgaaagtgtatactga

SEQ ID NO: 191764 - DNA, 66 bp, Homo sapiens
ccctaatttctaagtaaagaagagccccttgccacaaaaaaagatgccatgttaaagttttattaa

SEQ ID NO: 191765 - DNA, 69 bp, Homo sapiens
tctaagtaaagaagagccccttgccacaaaaaaagatgccatgttaaagttttattaagtttcaataca

SEQ ID NO: 191766 - DNA, 67 bp, Homo sapiens
aaagaagagccccttgccacaaaaaaagatgccatgttaaagttttattaagtttcaatacaaaaca

SEQ ID NO: 191767 - DNA, 66 bp, Homo sapiens
cccttgccacaaaaaaagatgccatgttaaagttttattaagtttcaatacaaaacattccaaaaa

SEQ ID NO: 191768 - DNA, 69 bp, Homo sapiens
aaagatgccatgttaaagttttattaagtttcaatacaaaacattccaaaaagtgaaaagtgatctata

SEQ ID NO: 191769 - DNA, 68 bp, Homo sapiens
gccatgttaaagttttattaagtttcaatacaaaacattccaaaaagtgaaaagtgatctataatacc

SEQ ID NO: 191770 - DNA, 70 bp, Homo sapiens
tattaagtttcaatacaaaacattccaaaaagtgaaaagtgatctataatacccaagttctatgttcaac

SEQ ID NO: 191771 - DNA, 70 bp, Homo sapiens
gtttcaatacaaaacattccaaaaagtgaaaagtgatctataatacccaagttctatgttcaactaccag

SEQ ID NO: 191772 - DNA, 69 bp, Homo sapiens
cattccaaaaagtgaaaagtgatctataatacccaagttctatgttcaactaccagttaaacaaggaaa

SEQ ID NO: 191773 - DNA, 68 bp, Homo sapiens
caaaaagtgaaaagtgatctataatacccaagttctatgttcaactaccagttaaacaaggaaaacat

SEQ ID NO: 191774 - DNA, 72 bp, Homo sapiens
agtgatctataatacccaagttctatgttcaactaccagttaaacaaggaaaacattttctgtatcattctg

SEQ ID NO: 191775 - DNA, 69 bp, Homo sapiens
tacccaagttctatgttcaactaccagttaaacaaggaaaacattttctgtatcattctgttttacaac

SEQ ID NO: 191776 - DNA, 69 bp, Homo sapiens
tcaactaccagttaaacaaggaaaacattttctgtatcattctgttttacaaccagtataaacccagaa

SEQ ID NO: 191777 - DNA, 72 bp, Homo sapiens
acaaggaaaacattttctgtatcattctgttttacaaccagtataaacccagaagaatcaagatctgattcc

SEQ ID NO: 191778 - DNA, 75 bp, Homo sapiens
cattttctgtatcattctgttttacaaccagtataaacccagaagaatcaagatctgattccttttccacacatc

SEQ ID NO: 191779 - DNA, 76 bp, Homo sapiens
atcattctgttttacaaccagtataaacccagaagaatcaagatctgattccttttccacacatctgctaggtcag

SEQ ID NO: 191780 - DNA, 74 bp, Homo sapiens
ttttacaaccagtataaacccagaagaatcaagatctgattccttttccacacatctgctaggtcagtaaacta

SEQ ID NO: 191781 - DNA, 77 bp, Homo sapiens
ccagaagaatcaagatctgattccttttccacacatctgctaggtcagtaaactatcaaacaggtatctggtcattt

SEQ ID NO: 191782 - DNA, 77 bp, Homo sapiens
aatcaagatctgattccttttccacacatctgctaggtcagtaaactatcaaacaggtatctggtcattttaacata

SEQ ID NO: 191783 - DNA, 74 bp, Homo sapiens
attccttttccacacatctgctaggtcagtaaactatcaaacaggtatctggtcattttaacatactccttata

SEQ ID NO: 191784 - DNA, 75 bp, Homo sapiens
cacatctgctaggtcagtaaactatcaaacaggtatctggtcattttaacatactccttatattcctatttggta

SEQ ID NO: 191785 - DNA, 73 bp, Homo sapiens
gctaggtcagtaaactatcaaacaggtatctggtcattttaacatactccttatattcctatttggtacaatc

SEQ ID NO: 191786 - DNA, 73 bp, Homo sapiens
gtaaactatcaaacaggtatctggtcattttaacatactccttatattcctatttggtacaatctctatatcc

SEQ ID NO: 191787 - DNA, 76 bp, Homo sapiens
caggtatctggtcattttaacatactccttatattcctatttggtacaatctctatatcctatactatcttcaaga

SEQ ID NO: 191788 - DNA, 76 bp, Homo sapiens
ctggtcattttaacatactccttatattcctatttggtacaatctctatatcctatactatcttcaagatatctaa

SEQ ID NO: 191789 - DNA, 76 bp, Homo sapiens
taacatactccttatattcctatttggtacaatctctatatcctatactatcttcaagatatctaaatatcttaaa

SEQ ID NO: 191790 - DNA, 75 bp, Homo sapiens
tattcctatttggtacaatctctatatcctatactatcttcaagatatctaaatatcttaaatatttagggtatc

SEQ ID NO: 191791 - DNA, 77 bp, Homo sapiens
ctctatatcctatactatcttcaagatatctaaatatcttaaatatttagggtatctcaagagccagaaggtcctca

SEQ ID NO: 191792 - DNA, 76 bp, Homo sapiens
tactatcttcaagatatctaaatatcttaaatatttagggtatctcaagagccagaaggtcctcacagaagcgtta

SEQ ID NO: 191793 - DNA, 72 bp, Homo sapiens
aagatatctaaatatcttaaatatttagggtatctcaagagccagaaggtcctcacagaagcgttaacccaa

SEQ ID NO: 191794 - DNA, 71 bp, Homo sapiens
aatatcttaaatatttagggtatctcaagagccagaaggtcctcacagaagcgttaacccaagtaatcgta

SEQ ID NO: 191795 - DNA, 74 bp, Homo sapiens
tatctcaagagccagaaggtcctcacagaagcgttaacccaagtaatcgtaagagtatagaaagattgggctaa

SEQ ID NO: 191796 - DNA, 74 bp, Homo sapiens
tcctcacagaagcgttaacccaagtaatcgtaagagtatagaaagattgggctaagacaactatggagtgcaaa

SEQ ID NO: 191797 - DNA, 70 bp, Homo sapiens
agaagcgttaacccaagtaatcgtaagagtatagaaagattgggctaagacaactatggagtgcaaaaac

SEQ ID NO: 191798 - DNA, 70 bp, Homo sapiens
aacccaagtaatcgtaagagtatagaaagattgggctaagacaactatggagtgcaaaaaccacataaat

SEQ ID NO: 191799 - DNA, 72 bp, Homo sapiens
atcgtaagagtatagaaagattgggctaagacaactatggagtgcaaaaaccacataaatttggtcattacc

SEQ ID NO: 191800 - DNA, 73 bp, Homo sapiens
tatagaaagattgggctaagacaactatggagtgcaaaaaccacataaatttggtcattacccttgtggtctg

SEQ ID NO: 191801 - DNA, 72 bp, Homo sapiens
ctaagacaactatggagtgcaaaaaccacataaatttggtcattacccttgtggtctgtgattagtagtagg

SEQ ID NO: 191802 - DNA, 72 bp, Homo sapiens
aactatggagtgcaaaaaccacataaatttggtcattacccttgtggtctgtgattagtagtaggttgtcaa

SEQ ID NO: 191803 - DNA, 71 bp, Homo sapiens
caaaaaccacataaatttggtcattacccttgtggtctgtgattagtagtaggttgtcaaatgagagttaa

SEQ ID NO: 191804 - DNA, 71 bp, Homo sapiens
ataaatttggtcattacccttgtggtctgtgattagtagtaggttgtcaaatgagagttaaaaatgttgta

SEQ ID NO: 191805 - DNA, 75 bp, Homo sapiens
tgtggtctgtgattagtagtaggttgtcaaatgagagttaaaaatgttgtattatccctagttgcaaatgttcca

SEQ ID NO: 191806 - DNA, 73 bp, Homo sapiens
ctgtgattagtagtaggttgtcaaatgagagttaaaaatgttgtattatccctagttgcaaatgttccaaata

SEQ ID NO: 191807 - DNA, 74 bp, Homo sapiens
tgagagttaaaaatgttgtattatccctagttgcaaatgttccaaataagacagtgccataactacacgacaaa

SEQ ID NO: 191808 - DNA, 71 bp, Homo sapiens
aaatgttgtattatccctagttgcaaatgttccaaataagacagtgccataactacacgacaaaaacaaaa

SEQ ID NO: 191809 - DNA, 70 bp, Homo sapiens
aaaatcatataagttgggttagttcctctaatccaacaactcaagtctgtttcctttgagaacattatac

SEQ ID NO: 191810 - DNA, 73 bp, Homo sapiens
gttagttcctctaatccaacaactcaagtctgtttcctttgagaacattatactattggctctagtctccaaa

SEQ ID NO: 191811 - DNA, 74 bp, Homo sapiens
ttcctctaatccaacaactcaagtctgtttcctttgagaacattatactattggctctagtctccaaaccaata

SEQ ID NO: 191812 - DNA, 72 bp, Homo sapiens
ctaatccaacaactcaagtctgtttcctttgagaacattatactattggctctagtctccaaaccaataaaa

SEQ ID NO: 191813 - DNA, 69 bp, Homo sapiens
aactcaagtctgtttcctttgagaacattatactattggctctagtctccaaaccaataaaaaactaaa

SEQ ID NO: 191814 - DNA, 68 bp, Homo sapiens
gtctgtttcctttgagaacattatactattggctctagtctccaaaccaataaaaaactaaaacttgt

SEQ ID NO: 191815 - DNA, 68 bp, Homo sapiens
cctttgagaacattatactattggctctagtctccaaaccaataaaaaactaaaacttgtttccaaga

SEQ ID NO: 191816 - DNA, 69 bp, Homo sapiens
gagaacattatactattggctctagtctccaaaccaataaaaaactaaaacttgtttccaagactggga

SEQ ID NO: 191817 - DNA, 67 bp, Homo sapiens
acattatactattggctctagtctccaaaccaataaaaaactaaaacttgtttccaagactgggagg

SEQ ID NO: 191818 - DNA, 66 bp, Homo sapiens
tactattggctctagtctccaaaccaataaaaaactaaaacttgtttccaagactgggaggtaaag

SEQ ID NO: 191819 - DNA, 64 bp, Homo sapiens
tctccaaaccaataaaaaactaaaacttgtttccaagactgggaggtaaagtaggcttataaaa

SEQ ID NO: 191820 - DNA, 65 bp, Homo sapiens
aaaaactaaaacttgtttccaagactgggaggtaaagtaggcttataaaacaatacagcaaaaga

SEQ ID NO: 191821 - DNA, 66 bp, Homo sapiens
aaaacttgtttccaagactgggaggtaaagtaggcttataaaacaatacagcaaaagaaagccaag

SEQ ID NO: 191822 - DNA, 68 bp, Homo sapiens
aagactgggaggtaaagtaggcttataaaacaatacagcaaaagaaagccaagtggcctaattgtttc

SEQ ID NO: 191823 - DNA, 71 bp, Homo sapiens
aggtaaagtaggcttataaaacaatacagcaaaagaaagccaagtggcctaattgtttccagtgtgcttgc

SEQ ID NO: 191824 - DNA, 75 bp, Homo sapiens
cttataaaacaatacagcaaaagaaagccaagtggcctaattgtttccagtgtgcttgccatcttagcatggtta

SEQ ID NO: 191825 - DNA, 73 bp, Homo sapiens
aaaacaatacagcaaaagaaagccaagtggcctaattgtttccagtgtgcttgccatcttagcatggttactt

SEQ ID NO: 191826 - DNA, 77 bp, Homo sapiens
aaagaaagccaagtggcctaattgtttccagtgtgcttgccatcttagcatggttactttccagatgtcactcataa

SEQ ID NO: 191827 - DNA, 76 bp, Homo sapiens
aagtggcctaattgtttccagtgtgcttgccatcttagcatggttactttccagatgtcactcataagttttattc

SEQ ID NO: 191828 - DNA, 77 bp, Homo sapiens
taattgtttccagtgtgcttgccatcttagcatggttactttccagatgtcactcataagttttattctacaactaa

SEQ ID NO: 191829 - DNA, 78 bp, Homo sapiens
tgtgcttgccatcttagcatggttactttccagatgtcactcataagttttattctacaactaaactgtttgtggata

SEQ ID NO: 191830 - DNA, 74 bp, Homo sapiens
atcttagcatggttactttccagatgtcactcataagttttattctacaactaaactgtttgtggataagccac

SEQ ID NO: 191831 - DNA, 72 bp, Homo sapiens
atggttactttccagatgtcactcataagttttattctacaactaaactgtttgtggataagccaccaccaa

SEQ ID NO: 191832 - DNA, 71 bp, Homo sapiens
ctttccagatgtcactcataagttttattctacaactaaactgtttgtggataagccaccaccaaaaaatg

SEQ ID NO: 191833 - DNA, 69 bp, Homo sapiens
cactcataagttttattctacaactaaactgtttgtggataagccaccaccaaaaaatgtttcacttac

SEQ ID NO: 191834 - DNA, 70 bp, Homo sapiens
gttttattctacaactaaactgtttgtggataagccaccaccaaaaaatgtttcacttactgacagacac

SEQ ID NO: 191835 - DNA, 76 bp, Homo sapiens
tgtttgtggataagccaccaccaaaaaatgtttcacttactgacagacacttcactagatacagctaccacttata

SEQ ID NO: 191836 - DNA, 75 bp, Homo sapiens
ccaccaccaaaaaatgtttcacttactgacagacacttcactagatacagctaccacttatatccatcattttta

SEQ ID NO: 191837 - DNA, 75 bp, Homo sapiens
aaaatgtttcacttactgacagacacttcactagatacagctaccacttatatccatcatttttataattcaact

SEQ ID NO: 191838 - DNA, 75 bp, Homo sapiens
gtttcacttactgacagacacttcactagatacagctaccacttatatccatcatttttataattcaacttaagt

SEQ ID NO: 191839 - DNA, 75 bp, Homo sapiens
cagacacttcactagatacagctaccacttatatccatcatttttataattcaacttaagttctaaattgaagag

SEQ ID NO: 191840 - DNA, 73 bp, Homo sapiens
cactagatacagctaccacttatatccatcatttttataattcaacttaagttctaaattgaagagttgtccc

SEQ ID NO: 191841 - DNA, 72 bp, Homo sapiens
cagctaccacttatatccatcatttttataattcaacttaagttctaaattgaagagttgtccccatgactt

SEQ ID NO: 191842 - DNA, 71 bp, Homo sapiens
tatccatcatttttataattcaacttaagttctaaattgaagagttgtccccatgactttagctaaacaaa

SEQ ID NO: 191843 - DNA, 69 bp, Homo sapiens
ttttataattcaacttaagttctaaattgaagagttgtccccatgactttagctaaacaaaatgaaagc

SEQ ID NO: 191844 - DNA, 73 bp, Homo sapiens
gttctaaattgaagagttgtccccatgactttagctaaacaaaatgaaagccaaagctgtaaaatctatgtga

SEQ ID NO: 191845 - DNA, 73 bp, Homo sapiens
cccatgactttagctaaacaaaatgaaagccaaagctgtaaaatctatgtgaagaaccacaagaacttcctga

SEQ ID NO: 191846 - DNA, 72 bp, Homo sapiens
tttagctaaacaaaatgaaagccaaagctgtaaaatctatgtgaagaaccacaagaacttcctgactacctc

SEQ ID NO: 191847 - DNA, 69 bp, Homo sapiens
aaagctgtaaaatctatgtgaagaaccacaagaacttcctgactacctccacttaccaatttccttaat

SEQ ID NO: 191848 - DNA, 70 bp, Homo sapiens
tgtaaaatctatgtgaagaaccacaagaacttcctgactacctccacttaccaatttccttaattacttc

SEQ ID NO: 191849 - DNA, 66 bp, Homo sapiens
atgtgaagaaccacaagaacttcctgactacctccacttaccaatttccttaattacttccccttt

SEQ ID NO: 191850 - DNA, 65 bp, Homo sapiens
agaacttcctgactacctccacttaccaatttccttaattacttccccttttccatttggtcaat

SEQ ID NO: 191851 - DNA, 66 bp, Homo sapiens
ctgactacctccacttaccaatttccttaattacttccccttttccatttggtcaattacttgctt

SEQ ID NO: 191852 - DNA, 65 bp, Homo sapiens
cctccacttaccaatttccttaattacttccccttttccatttggtcaattacttgctttaagta

SEQ ID NO: 191853 - DNA, 68 bp, Homo sapiens
attacttccccttttccatttggtcaattacttgctttaagtaactaccagtcactccctagttatga

SEQ ID NO: 191854 - DNA, 71 bp, Homo sapiens
ttttccatttggtcaattacttgctttaagtaactaccagtcactccctagttatgagtgttaatcaacac

SEQ ID NO: 191855 - DNA, 74 bp, Homo sapiens
tttggtcaattacttgctttaagtaactaccagtcactccctagttatgagtgttaatcaacactgatgccttc

SEQ ID NO: 191856 - DNA, 74 bp, Homo sapiens
aagtaactaccagtcactccctagttatgagtgttaatcaacactgatgccttcctcagatccacaggaacccc

SEQ ID NO: 191857 - DNA, 79 bp, Homo sapiens
ttatgagtgttaatcaacactgatgccttcctcagatccacaggaacccctgaaggcaaaatctattgcctgcaccaaa

SEQ ID NO: 191858 - DNA, 77 bp, Homo sapiens
ttaatcaacactgatgccttcctcagatccacaggaacccctgaaggcaaaatctattgcctgcaccaaaccaattc

SEQ ID NO: 191859 - DNA, 81 bp, Homo sapiens
tcagatccacaggaacccctgaaggcaaaatctattgcctgcaccaaaccaattctgacagcactgcttatgcaactgtag

SEQ ID NO: 191860 - DNA, 82 bp, Homo sapiens
ccctgaaggcaaaatctattgcctgcaccaaaccaattctgacagcactgcttatgcaactgtagtgacttattgacaatca

SEQ ID NO: 191861 - DNA, 81 bp, Homo sapiens
aaaatctattgcctgcaccaaaccaattctgacagcactgcttatgcaactgtagtgacttattgacaatcagccgccttc

SEQ ID NO: 191862 - DNA, 84 bp, Homo sapiens
tgcaccaaaccaattctgacagcactgcttatgcaactgtagtgacttattgacaatcagccgccttctgcttcaacaactctg

SEQ ID NO: 191863 - DNA, 81 bp, Homo sapiens
aaaccaattctgacagcactgcttatgcaactgtagtgacttattgacaatcagccgccttctgcttcaacaactctgtaa

SEQ ID NO: 191864 - DNA, 80 bp, Homo sapiens
acagcactgcttatgcaactgtagtgacttattgacaatcagccgccttctgcttcaacaactctgtaaaatgaaaaaca

SEQ ID NO: 191865 - DNA, 78 bp, Homo sapiens
cttatgcaactgtagtgacttattgacaatcagccgccttctgcttcaacaactctgtaaaatgaaaaacatgggatc

SEQ ID NO: 191866 - DNA, 72 bp, Homo sapiens
ttacacaacatttaaaccttcaaaggccattgctttcaacacttaccttagcatttcttactgccagcttta

SEQ ID NO: 191867 - DNA, 71 bp, Homo sapiens
aacatttaaaccttcaaaggccattgctttcaacacttaccttagcatttcttactgccagctttatctac

SEQ ID NO: 191868 - DNA, 78 bp, Homo sapiens
accttcaaaggccattgctttcaacacttaccttagcatttcttactgccagctttatctactgtgaatcaatcagca

SEQ ID NO: 191869 - DNA, 79 bp, Homo sapiens
attgctttcaacacttaccttagcatttcttactgccagctttatctactgtgaatcaatcagcactccacgaccataa

SEQ ID NO: 191870 - DNA, 79 bp, Homo sapiens
aacacttaccttagcatttcttactgccagctttatctactgtgaatcaatcagcactccacgaccataatgagcaaaa

SEQ ID NO: 191871 - DNA, 83 bp, Homo sapiens
tagcatttcttactgccagctttatctactgtgaatcaatcagcactccacgaccataatgagcaaaatcaccaacctgcaaa

SEQ ID NO: 191872 - DNA, 80 bp, Homo sapiens
ttactgccagctttatctactgtgaatcaatcagcactccacgaccataatgagcaaaatcaccaacctgcaaaagttaa

SEQ ID NO: 191873 - DNA, 78 bp, Homo sapiens
tttatctactgtgaatcaatcagcactccacgaccataatgagcaaaatcaccaacctgcaaaagttaaataaatgaa

SEQ ID NO: 191874 - DNA, 76 bp, Homo sapiens
tgaatcaatcagcactccacgaccataatgagcaaaatcaccaacctgcaaaagttaaataaatgaaaactagtta

SEQ ID NO: 191875 - DNA, 74 bp, Homo sapiens
aatcagcactccacgaccataatgagcaaaatcaccaacctgcaaaagttaaataaatgaaaactagttatctc

SEQ ID NO: 191876 - DNA, 71 bp, Homo sapiens
ccacgaccataatgagcaaaatcaccaacctgcaaaagttaaataaatgaaaactagttatctctcttaag

SEQ ID NO: 191877 - DNA, 68 bp, Homo sapiens
gagcaaaatcaccaacctgcaaaagttaaataaatgaaaactagttatctctcttaaggaaattcttt

SEQ ID NO: 191878 - DNA, 66 bp, Homo sapiens
tcaccaacctgcaaaagttaaataaatgaaaactagttatctctcttaaggaaattcttttaaaac

SEQ ID NO: 191879 - DNA, 66 bp, Homo sapiens
aagttaaataaatgaaaactagttatctctcttaaggaaattcttttaaaacttgcctattactgc

SEQ ID NO: 191880 - DNA, 67 bp, Homo sapiens
aatgaaaactagttatctctcttaaggaaattcttttaaaacttgcctattactgccctcttttcca

SEQ ID NO: 191881 - DNA, 67 bp, Homo sapiens
aactagttatctctcttaaggaaattcttttaaaacttgcctattactgccctcttttccagaaaga

SEQ ID NO: 191882 - DNA, 66 bp, Homo sapiens
ctctcttaaggaaattcttttaaaacttgcctattactgccctcttttccagaaagaaaaggcaag

SEQ ID NO: 191883 - DNA, 70 bp, Homo sapiens
ttcttttaaaacttgcctattactgccctcttttccagaaagaaaaggcaagttcagacttgcagcttaa

SEQ ID NO: 191884 - DNA, 71 bp, Homo sapiens
ttaaaacttgcctattactgccctcttttccagaaagaaaaggcaagttcagacttgcagcttaatatatt

SEQ ID NO: 191885 - DNA, 74 bp, Homo sapiens
ttactgccctcttttccagaaagaaaaggcaagttcagacttgcagcttaatatatttcatgttctactatttg

SEQ ID NO: 191886 - DNA, 73 bp, Homo sapiens
ccctcttttccagaaagaaaaggcaagttcagacttgcagcttaatatatttcatgttctactatttgtctta

SEQ ID NO: 191887 - DNA, 75 bp, Homo sapiens
agaaaaggcaagttcagacttgcagcttaatatatttcatgttctactatttgtcttaagtggtggaagattcac

SEQ ID NO: 191888 - DNA, 76 bp, Homo sapiens
aagttcagacttgcagcttaatatatttcatgttctactatttgtcttaagtggtggaagattcactggctcggga

SEQ ID NO: 191889 - DNA, 78 bp, Homo sapiens
ttgcagcttaatatatttcatgttctactatttgtcttaagtggtggaagattcactggctcgggatggactggaatg

SEQ ID NO: 191890 - DNA, 75 bp, Homo sapiens
tatatttcatgttctactatttgtcttaagtggtggaagattcactggctcgggatggactggaatggcttaaat

SEQ ID NO: 191891 - DNA, 73 bp, Homo sapiens
atgttctactatttgtcttaagtggtggaagattcactggctcgggatggactggaatggcttaaattgttaa

SEQ ID NO: 191892 - DNA, 74 bp, Homo sapiens
actatttgtcttaagtggtggaagattcactggctcgggatggactggaatggcttaaattgttaagttgcatg

SEQ ID NO: 191893 - DNA, 80 bp, Homo sapiens
ctcgggatggactggaatggcttaaattgttaagttgcatggcttatggattgtcattctgttccaatggtgcactgcca

SEQ ID NO: 191894 - DNA, 77 bp, Homo sapiens
actggaatggcttaaattgttaagttgcatggcttatggattgtcattctgttccaatggtgcactgccacgttaaa

SEQ ID NO: 191895 - DNA, 78 bp, Homo sapiens
taaattgttaagttgcatggcttatggattgtcattctgttccaatggtgcactgccacgttaaatccataagttgaa

SEQ ID NO: 191896 - DNA, 78 bp, Homo sapiens
taagttgcatggcttatggattgtcattctgttccaatggtgcactgccacgttaaatccataagttgaacgaacaaa

SEQ ID NO: 191897 - DNA, 73 bp, Homo sapiens
attgtcattctgttccaatggtgcactgccacgttaaatccataagttgaacgaacaaaacttatttgaagga

SEQ ID NO: 191898 - DNA, 74 bp, Homo sapiens
tccaatggtgcactgccacgttaaatccataagttgaacgaacaaaacttatttgaaggaataagtgcagtata

SEQ ID NO: 191899 - DNA, 67 bp, Homo sapiens
ccacgttaaatccataagttgaacgaacaaaacttatttgaaggaataagtgcagtataaggatttt

SEQ ID NO: 191900 - DNA, 69 bp, Homo sapiens
tccataagttgaacgaacaaaacttatttgaaggaataagtgcagtataaggatttttagttggaggtc

SEQ ID NO: 191901 - DNA, 72 bp, Homo sapiens
atttgaaggaataagtgcagtataaggatttttagttggaggtcttcaagtttactatattcaagagcatct

SEQ ID NO: 191902 - DNA, 72 bp, Homo sapiens
aggaataagtgcagtataaggatttttagttggaggtcttcaagtttactatattcaagagcatctttttca

SEQ ID NO: 191903 - DNA, 75 bp, Homo sapiens
tgcagtataaggatttttagttggaggtcttcaagtttactatattcaagagcatctttttcaacttcatggctg

SEQ ID NO: 191904 - DNA, 71 bp, Homo sapiens
atttttagttggaggtcttcaagtttactatattcaagagcatctttttcaacttcatggctggacctggg

SEQ ID NO: 191905 - DNA, 76 bp, Homo sapiens
aggtcttcaagtttactatattcaagagcatctttttcaacttcatggctggacctgggtcatgctgcctcaggtt

SEQ ID NO: 191906 - DNA, 75 bp, Homo sapiens
aagtttactatattcaagagcatctttttcaacttcatggctggacctgggtcatgctgcctcaggttttgcttt

SEQ ID NO: 191907 - DNA, 77 bp, Homo sapiens
tatattcaagagcatctttttcaacttcatggctggacctgggtcatgctgcctcaggttttgctttttaaagacca

SEQ ID NO: 191908 - DNA, 75 bp, Homo sapiens
tctttttcaacttcatggctggacctgggtcatgctgcctcaggttttgctttttaaagaccacttgcaatagat

SEQ ID NO: 191909 - DNA, 76 bp, Homo sapiens
acttcatggctggacctgggtcatgctgcctcaggttttgctttttaaagaccacttgcaatagattttctccata

SEQ ID NO: 191910 - DNA, 74 bp, Homo sapiens
gacctgggtcatgctgcctcaggttttgctttttaaagaccacttgcaatagattttctccatacagtgtagtt

SEQ ID NO: 191911 - DNA, 75 bp, Homo sapiens
atgctgcctcaggttttgctttttaaagaccacttgcaatagattttctccatacagtgtagtttcatagaacta

SEQ ID NO: 191912 - DNA, 72 bp, Homo sapiens
gcctcaggttttgctttttaaagaccacttgcaatagattttctccatacagtgtagtttcatagaactaaa

SEQ ID NO: 191913 - DNA, 74 bp, Homo sapiens
ttttaaagaccacttgcaatagattttctccatacagtgtagtttcatagaactaaaaacaagtcaggcatcca

SEQ ID NO: 191914 - DNA, 76 bp, Homo sapiens
cacttgcaatagattttctccatacagtgtagtttcatagaactaaaaacaagtcaggcatccaactaaatgtcaa

SEQ ID NO: 191915 - DNA, 75 bp, Homo sapiens
tagattttctccatacagtgtagtttcatagaactaaaaacaagtcaggcatccaactaaatgtcaagtttgcaa

SEQ ID NO: 191916 - DNA, 76 bp, Homo sapiens
ttctccatacagtgtagtttcatagaactaaaaacaagtcaggcatccaactaaatgtcaagtttgcaatggctta

SEQ ID NO: 191917 - DNA, 72 bp, Homo sapiens
tagtttcatagaactaaaaacaagtcaggcatccaactaaatgtcaagtttgcaatggcttacaggggtaaa

SEQ ID NO: 191918 - DNA, 68 bp, Homo sapiens
agaactaaaaacaagtcaggcatccaactaaatgtcaagtttgcaatggcttacaggggtaaaaaggg

SEQ ID NO: 191919 - DNA, 67 bp, Homo sapiens
aaaacaagtcaggcatccaactaaatgtcaagtttgcaatggcttacaggggtaaaaagggggaccc

SEQ ID NO: 191920 - DNA, 66 bp, Homo sapiens
aggcatccaactaaatgtcaagtttgcaatggcttacaggggtaaaaagggggaccccaaacttaa

SEQ ID NO: 191921 - DNA, 66 bp, Homo sapiens
taaatgtcaagtttgcaatggcttacaggggtaaaaagggggaccccaaacttaagccatttccta

SEQ ID NO: 191922 - DNA, 66 bp, Homo sapiens
tttgcaatggcttacaggggtaaaaagggggaccccaaacttaagccatttcctatattgactaaa

SEQ ID NO: 191923 - DNA, 63 bp, Homo sapiens
tacaggggtaaaaagggggaccccaaacttaagccatttcctatattgactaaaagactaatt

SEQ ID NO: 191924 - DNA, 63 bp, Homo sapiens
ggtaaaaagggggaccccaaacttaagccatttcctatattgactaaaagactaatttgaaaa

SEQ ID NO: 191925 - DNA, 65 bp, Homo sapiens
cccaaacttaagccatttcctatattgactaaaagactaatttgaaaaaaatgttaaaaacatac

SEQ ID NO: 191926 - DNA, 68 bp, Homo sapiens
cttaagccatttcctatattgactaaaagactaatttgaaaaaaatgttaaaaacatacgaagcatgt

SEQ ID NO: 191927 - DNA, 70 bp, Homo sapiens
tatattgactaaaagactaatttgaaaaaaatgttaaaaacatacgaagcatgtttaaaggtcttcatca

SEQ ID NO: 191928 - DNA, 68 bp, Homo sapiens
tgactaaaagactaatttgaaaaaaatgttaaaaacatacgaagcatgtttaaaggtcttcatcaaaa

SEQ ID NO: 191929 - DNA, 68 bp, Homo sapiens
ctaatttgaaaaaaatgttaaaaacatacgaagcatgtttaaaggtcttcatcaaaaatggactttga

SEQ ID NO: 191930 - DNA, 67 bp, Homo sapiens
aacatacgaagcatgtttaaaggtcttcatcaaaaatggactttgaaaaaaataccccctcccaagc

SEQ ID NO: 191931 - DNA, 68 bp, Homo sapiens
gtcttcatcaaaaatggactttgaaaaaaataccccctcccaagccccagatcgccattggtaaacaa

SEQ ID NO: 191932 - DNA, 67 bp, Homo sapiens
aaaaataccccctcccaagccccagatcgccattggtaaacaacagctctattaataaagcctttaa

SEQ ID NO: 191933 - DNA, 73 bp, Homo sapiens
caagccccagatcgccattggtaaacaacagctctattaataaagcctttaagtgtcacacatgctttaaaaa

SEQ ID NO: 191934 - DNA, 71 bp, Homo sapiens
cccagatcgccattggtaaacaacagctctattaataaagcctttaagtgtcacacatgctttaaaaaaaa

SEQ ID NO: 191935 - DNA, 66 bp, Homo sapiens
aaaaaatccaagtgttgaatttggaggacttctaatacgctattgaatatttcttttttccaaaag

SEQ ID NO: 191936 - DNA, 67 bp, Homo sapiens
ttggaggacttctaatacgctattgaatatttcttttttccaaaagttttttttaatctagaaggca

SEQ ID NO: 191937 - DNA, 68 bp, Homo sapiens
tctaatacgctattgaatatttcttttttccaaaagttttttttaatctagaaggcatttccattgcc

SEQ ID NO: 191938 - DNA, 67 bp, Homo sapiens
cgctattgaatatttcttttttccaaaagttttttttaatctagaaggcatttccattgccttgagg

SEQ ID NO: 191939 - DNA, 68 bp, Homo sapiens
ttcttttttccaaaagttttttttaatctagaaggcatttccattgccttgaggtacagtatgtttca

SEQ ID NO: 191940 - DNA, 72 bp, Homo sapiens
caaaagttttttttaatctagaaggcatttccattgccttgaggtacagtatgtttcactgtactatgagga

SEQ ID NO: 191941 - DNA, 73 bp, Homo sapiens
tttttaatctagaaggcatttccattgccttgaggtacagtatgtttcactgtactatgaggaaggtaagtgt

SEQ ID NO: 191942 - DNA, 75 bp, Homo sapiens
atctagaaggcatttccattgccttgaggtacagtatgtttcactgtactatgaggaaggtaagtgttcaatttc

SEQ ID NO: 191943 - DNA, 73 bp, Homo sapiens
atttccattgccttgaggtacagtatgtttcactgtactatgaggaaggtaagtgttcaatttcgacttagac

SEQ ID NO: 191944 - DNA, 69 bp, Homo sapiens
agtatgtttcactgtactatgaggaaggtaagtgttcaatttcgacttagacggaaaaactagtttgct

SEQ ID NO: 191945 - DNA, 70 bp, Homo sapiens
tgtactatgaggaaggtaagtgttcaatttcgacttagacggaaaaactagtttgctttgcttaccatct

SEQ ID NO: 191946 - DNA, 68 bp, Homo sapiens
aggaaggtaagtgttcaatttcgacttagacggaaaaactagtttgctttgcttaccatctttgctgt

SEQ ID NO: 191947 - DNA, 72 bp, Homo sapiens
taagtgttcaatttcgacttagacggaaaaactagtttgctttgcttaccatctttgctgtttcacaggcat

SEQ ID NO: 191948 - DNA, 73 bp, Homo sapiens
atttcgacttagacggaaaaactagtttgctttgcttaccatctttgctgtttcacaggcatttgatgcttta

SEQ ID NO: 191949 - DNA, 80 bp, Homo sapiens
gaaaaactagtttgctttgcttaccatctttgctgtttcacaggcatttgatgctttaaatctgatgtggaatgctgata

SEQ ID NO: 191950 - DNA, 81 bp, Homo sapiens
tttgctttgcttaccatctttgctgtttcacaggcatttgatgctttaaatctgatgtggaatgctgatagattcactttt

SEQ ID NO: 191951 - DNA, 82 bp, Homo sapiens
ttaccatctttgctgtttcacaggcatttgatgctttaaatctgatgtggaatgctgatagattcactttttagaagtcata

SEQ ID NO: 191952 - DNA, 79 bp, Homo sapiens
tttcacaggcatttgatgctttaaatctgatgtggaatgctgatagattcactttttagaagtcataagcctttaggaa

SEQ ID NO: 191953 - DNA, 76 bp, Homo sapiens
atgctttaaatctgatgtggaatgctgatagattcactttttagaagtcataagcctttaggaagttggagataac

SEQ ID NO: 191954 - DNA, 78 bp, Homo sapiens
taaatctgatgtggaatgctgatagattcactttttagaagtcataagcctttaggaagttggagataacttcattgc

SEQ ID NO: 191955 - DNA, 76 bp, Homo sapiens
gtggaatgctgatagattcactttttagaagtcataagcctttaggaagttggagataacttcattgcttatctat

SEQ ID NO: 191956 - DNA, 73 bp, Homo sapiens
gatagattcactttttagaagtcataagcctttaggaagttggagataacttcattgcttatctattttctcc

SEQ ID NO: 191957 - DNA, 75 bp, Homo sapiens
ttagaagtcataagcctttaggaagttggagataacttcattgcttatctattttctcctttgcaatcaagctgt

SEQ ID NO: 191958 - DNA, 75 bp, Homo sapiens
tcataagcctttaggaagttggagataacttcattgcttatctattttctcctttgcaatcaagctgttccttta

SEQ ID NO: 191959 - DNA, 75 bp, Homo sapiens
taggaagttggagataacttcattgcttatctattttctcctttgcaatcaagctgttcctttaaaagtgagaca

SEQ ID NO: 191960 - DNA, 75 bp, Homo sapiens
cttcattgcttatctattttctcctttgcaatcaagctgttcctttaaaagtgagacactacagagttgcaaaaa

SEQ ID NO: 191961 - DNA, 72 bp, Homo sapiens
ctattttctcctttgcaatcaagctgttcctttaaaagtgagacactacagagttgcaaaaatttgaaacag

SEQ ID NO: 191962 - DNA, 74 bp, Homo sapiens
ctcctttgcaatcaagctgttcctttaaaagtgagacactacagagttgcaaaaatttgaaacagtaagagcaa

SEQ ID NO: 191963 - DNA, 75 bp, Homo sapiens
atcaagctgttcctttaaaagtgagacactacagagttgcaaaaatttgaaacagtaagagcaagcacctttgca

SEQ ID NO: 191964 - DNA, 75 bp, Homo sapiens
taaaagtgagacactacagagttgcaaaaatttgaaacagtaagagcaagcacctttgcagcttcatggttggtt

SEQ ID NO: 191965 - DNA, 74 bp, Homo sapiens
acactacagagttgcaaaaatttgaaacagtaagagcaagcacctttgcagcttcatggttggttttggccaaa

SEQ ID NO: 191966 - DNA, 71 bp, Homo sapiens
gttgcaaaaatttgaaacagtaagagcaagcacctttgcagcttcatggttggttttggccaaacttttta

SEQ ID NO: 191967 - DNA, 68 bp, Homo sapiens
aaaaatttgaaacagtaagagcaagcacctttgcagcttcatggttggttttggccaaactttttatt

SEQ ID NO: 191968 - DNA, 71 bp, Homo sapiens
aacagtaagagcaagcacctttgcagcttcatggttggttttggccaaactttttatttagtattctgtag

SEQ ID NO: 191969 - DNA, 66 bp, Homo sapiens
tggttggttttggccaaactttttatttagtattctgtagttgtttaacacacacttaaatggtct

SEQ ID NO: 191970 - DNA, 66 bp, Homo sapiens
gccaaactttttatttagtattctgtagttgtttaacacacacttaaatggtcttattgggggaag

SEQ ID NO: 191971 - DNA, 65 bp, Homo sapiens
tttatttagtattctgtagttgtttaacacacacttaaatggtcttattgggggaagggaaaggg

SEQ ID NO: 191972 - DNA, 67 bp, Homo sapiens
attctgtagttgtttaacacacacttaaatggtcttattgggggaagggaaaggggaggttcttgca

SEQ ID NO: 191973 - DNA, 67 bp, Homo sapiens
ttgtttaacacacacttaaatggtcttattgggggaagggaaaggggaggttcttgcagattcccaa

SEQ ID NO: 191974 - DNA, 68 bp, Homo sapiens
acacacttaaatggtcttattgggggaagggaaaggggaggttcttgcagattcccaaggaaatgtca

SEQ ID NO: 191975 - DNA, 79 bp, Homo sapiens
ttgtttgtataggtagaatgattcatctctccattttagatggctagatgttttgtggaagatcttagaattgcctgcc

SEQ ID NO: 191976 - DNA, 82 bp, Homo sapiens
tgtataggtagaatgattcatctctccattttagatggctagatgttttgtggaagatcttagaattgcctgcctcatttgc

SEQ ID NO: 191977 - DNA, 79 bp, Homo sapiens
aatgattcatctctccattttagatggctagatgttttgtggaagatcttagaattgcctgcctcatttgctgggaaaa

SEQ ID NO: 191978 - DNA, 78 bp, Homo sapiens
tccattttagatggctagatgttttgtggaagatcttagaattgcctgcctcatttgctgggaaaaatcagataggaa

SEQ ID NO: 191979 - DNA, 77 bp, Homo sapiens
tggctagatgttttgtggaagatcttagaattgcctgcctcatttgctgggaaaaatcagataggaagtggccttta

SEQ ID NO: 191980 - DNA, 74 bp, Homo sapiens
agatgttttgtggaagatcttagaattgcctgcctcatttgctgggaaaaatcagataggaagtggcctttagg

SEQ ID NO: 191981 - DNA, 72 bp, Homo sapiens
aagatcttagaattgcctgcctcatttgctgggaaaaatcagataggaagtggcctttaggggatactttta

SEQ ID NO: 191982 - DNA, 70 bp, Homo sapiens
aattgcctgcctcatttgctgggaaaaatcagataggaagtggcctttaggggatacttttacttggaaa

SEQ ID NO: 191983 - DNA, 69 bp, Homo sapiens
tcatttgctgggaaaaatcagataggaagtggcctttaggggatacttttacttggaaagttacaacac

SEQ ID NO: 191984 - DNA, 67 bp, Homo sapiens
gaaaaatcagataggaagtggcctttaggggatacttttacttggaaagttacaacactagtacaag

SEQ ID NO: 191985 - DNA, 67 bp, Homo sapiens
agataggaagtggcctttaggggatacttttacttggaaagttacaacactagtacaagtcttaaca

SEQ ID NO: 191986 - DNA, 71 bp, Homo sapiens
cactagtacaagtcttaacacatttaacatttgcttgttgaaaagcaatgcgaaagtcaaataaaattaaa

SEQ ID NO: 191987 - DNA, 71 bp, Homo sapiens
gtacaagtcttaacacatttaacatttgcttgttgaaaagcaatgcgaaagtcaaataaaattaaacatgt

SEQ ID NO: 191988 - DNA, 69 bp, Homo sapiens
taacacatttaacatttgcttgttgaaaagcaatgcgaaagtcaaataaaattaaacatgttttacttt

SEQ ID NO: 191989 - DNA, 70 bp, Homo sapiens
catttgcttgttgaaaagcaatgcgaaagtcaaataaaattaaacatgttttacttttttcctcacaaga

SEQ ID NO: 191990 - DNA, 61 bp, Homo sapiens
acataaaaattatggaggggaacttaacagggaatttaaaaaaagtaacacaatttttcct

SEQ ID NO: 191991 - DNA, 60 bp, Homo sapiens
ggaggggaacttaacagggaatttaaaaaaagtaacacaatttttccttttagtagtcct

SEQ ID NO: 191992 - DNA, 61 bp, Homo sapiens
ggaacttaacagggaatttaaaaaaagtaacacaatttttccttttagtagtccttgggta

SEQ ID NO: 191993 - DNA, 65 bp, Homo sapiens
cacaatttttccttttagtagtccttgggtagttatgatagaatagtttccactttttgtttctt

SEQ ID NO: 191994 - DNA, 66 bp, Homo sapiens
ccttttagtagtccttgggtagttatgatagaatagtttccactttttgtttctttgaactgggat

SEQ ID NO: 191995 - DNA, 66 bp, Homo sapiens
tgggtagttatgatagaatagtttccactttttgtttctttgaactgggattttggtccaaagttt

SEQ ID NO: 191996 - DNA, 79 bp, Homo sapiens
tatctgcttctgcctccccctctatcagatcggcttcctccacggccaccacctcttggtgctccgcggcttgaactgc

SEQ ID NO: 191997 - DNA, 77 bp, Homo sapiens
ttctgcctccccctctatcagatcggcttcctccacggccaccacctcttggtgctccgcggcttgaactgctgtag

SEQ ID NO: 191998 - DNA, 76 bp, Homo sapiens
cccctctatcagatcggcttcctccacggccaccacctcttggtgctccgcggcttgaactgctgtaggaatcacg

SEQ ID NO: 191999 - DNA, 75 bp, Homo sapiens
tcggcttcctccacggccaccacctcttggtgctccgcggcttgaactgctgtaggaatcacgtggaggagggta

SEQ ID NO: 192000 - DNA, 72 bp, Homo sapiens
cctccacggccaccacctcttggtgctccgcggcttgaactgctgtaggaatcacgtggaggagggtacccc

SEQ ID NO: 192001 - DNA, 71 bp, Homo sapiens
acctcttggtgctccgcggcttgaactgctgtaggaatcacgtggaggagggtaccccctttccatagaag

SEQ ID NO: 192002 - DNA, 71 bp, Homo sapiens
tggtgctccgcggcttgaactgctgtaggaatcacgtggaggagggtaccccctttccatagaagggggaa

SEQ ID NO: 192003 - DNA, 68 bp, Homo sapiens
ttgaactgctgtaggaatcacgtggaggagggtaccccctttccatagaagggggaagccctctttct

SEQ ID NO: 192004 - DNA, 67 bp, Homo sapiens
aactgctgtaggaatcacgtggaggagggtaccccctttccatagaagggggaagccctctttcttg

SEQ ID NO: 192005 - DNA, 69 bp, Homo sapiens
ctgtaggaatcacgtggaggagggtaccccctttccatagaagggggaagccctctttcttgtctgcca

SEQ ID NO: 192006 - DNA, 72 bp, Homo sapiens
ccctttccatagaagggggaagccctctttcttgtctgccaacccgatcacgaccacttgagtagagatcac

SEQ ID NO: 192007 - DNA, 74 bp, Homo sapiens
atagaagggggaagccctctttcttgtctgccaacccgatcacgaccacttgagtagagatcacttcggctgct

SEQ ID NO: 192008 - DNA, 76 bp, Homo sapiens
gggaagccctctttcttgtctgccaacccgatcacgaccacttgagtagagatcacttcggctgcttgagtaactg

SEQ ID NO: 192009 - DNA, 81 bp, Homo sapiens
acgtgagctgctgtaatcatcatagcgactgcttccaccataagatggcgggggccctcgtgtaggtggagcactacgtga

SEQ ID NO: 192010 - DNA, 77 bp, Homo sapiens
ctgtaatcatcatagcgactgcttccaccataagatggcgggggccctcgtgtaggtggagcactacgtgagttacc

SEQ ID NO: 192011 - DNA, 78 bp, Homo sapiens
atcatcatagcgactgcttccaccataagatggcgggggccctcgtgtaggtggagcactacgtgagttacctgcagg

SEQ ID NO: 192012 - DNA, 75 bp, Homo sapiens
gcttccaccataagatggcgggggccctcgtgtaggtggagcactacgtgagttacctgcagggtcaatggtcag

SEQ ID NO: 192013 - DNA, 74 bp, Homo sapiens
ataagatggcgggggccctcgtgtaggtggagcactacgtgagttacctgcagggtcaatggtcaggtaatatg

SEQ ID NO: 192014 - DNA, 75 bp, Homo sapiens
ggggccctcgtgtaggtggagcactacgtgagttacctgcagggtcaatggtcaggtaatatggcaacactataa

SEQ ID NO: 192015 - DNA, 76 bp, Homo sapiens
cctcgtgtaggtggagcactacgtgagttacctgcagggtcaatggtcaggtaatatggcaacactataaattgta

SEQ ID NO: 192016 - DNA, 77 bp, Homo sapiens
ctcgtgtaggtggagcactacgtgagttacctgcagggtcaatggtcaggtaatatggcaacactataaattgtata

SEQ ID NO: 192017 - DNA, 76 bp, Homo sapiens
agcactacgtgagttacctgcagggtcaatggtcaggtaatatggcaacactataaattgtatatatacaacattt

SEQ ID NO: 192018 - DNA, 75 bp, Homo sapiens
actacgtgagttacctgcagggtcaatggtcaggtaatatggcaacactataaattgtatatatacaacatttta

SEQ ID NO: 192019 - DNA, 75 bp, Homo sapiens
cgtgagttacctgcagggtcaatggtcaggtaatatggcaacactataaattgtatatatacaacattttaaatc

SEQ ID NO: 192020 - DNA, 76 bp, Homo sapiens
cctgcagggtcaatggtcaggtaatatggcaacactataaattgtatatatacaacattttaaatctgaatttaca

SEQ ID NO: 192021 - DNA, 74 bp, Homo sapiens
agggtcaatggtcaggtaatatggcaacactataaattgtatatatacaacattttaaatctgaatttacagaa

SEQ ID NO: 192022 - DNA, 75 bp, Homo sapiens
caatggtcaggtaatatggcaacactataaattgtatatatacaacattttaaatctgaatttacagaattcttg

SEQ ID NO: 192023 - DNA, 75 bp, Homo sapiens
gtcaggtaatatggcaacactataaattgtatatatacaacattttaaatctgaatttacagaattcttgtatta

SEQ ID NO: 192024 - DNA, 70 bp, Homo sapiens
attgtatatatacaacattttaaatctgaatttacagaattcttgtattaaaagtttactttctcaactg

SEQ ID NO: 192025 - DNA, 68 bp, Homo sapiens
tacaacattttaaatctgaatttacagaattcttgtattaaaagtttactttctcaactgggtgggag

SEQ ID NO: 192026 - DNA, 66 bp, Homo sapiens
taaatctgaatttacagaattcttgtattaaaagtttactttctcaactgggtgggaggttttaaa

SEQ ID NO: 192027 - DNA, 69 bp, Homo sapiens
attcttgtattaaaagtttactttctcaactgggtgggaggttttaaactctgccattgctggccataa

SEQ ID NO: 192028 - DNA, 68 bp, Homo sapiens
ttaaaagtttactttctcaactgggtgggaggttttaaactctgccattgctggccataacagggatt

SEQ ID NO: 192029 - DNA, 78 bp, Homo sapiens
ttactttctcaactgggtgggaggttttaaactctgccattgctggccataacagggatttgctcatctgctgagata

SEQ ID NO: 192030 - DNA, 79 bp, Homo sapiens
ggtgggaggttttaaactctgccattgctggccataacagggatttgctcatctgctgagatatggaattggattcatt

SEQ ID NO: 192031 - DNA, 79 bp, Homo sapiens
gttttaaactctgccattgctggccataacagggatttgctcatctgctgagatatggaattggattcattttaatgtt

SEQ ID NO: 192032 - DNA, 81 bp, Homo sapiens
actctgccattgctggccataacagggatttgctcatctgctgagatatggaattggattcattttaatgtttgtttgaaa

SEQ ID NO: 192033 - DNA, 79 bp, Homo sapiens
ctggccataacagggatttgctcatctgctgagatatggaattggattcattttaatgtttgtttgaaaagactgaaga

SEQ ID NO: 192034 - DNA, 77 bp, Homo sapiens
ggatttgctcatctgctgagatatggaattggattcattttaatgtttgtttgaaaagactgaagacggtgtgtatt

SEQ ID NO: 192035 - DNA, 74 bp, Homo sapiens
ctgagatatggaattggattcattttaatgtttgtttgaaaagactgaagacggtgtgtatttcaagaggatat

SEQ ID NO: 192036 - DNA, 74 bp, Homo sapiens
tggattcattttaatgtttgtttgaaaagactgaagacggtgtgtatttcaagaggatattccagagagcttgt

SEQ ID NO: 192037 - DNA, 73 bp, Homo sapiens
taatgtttgtttgaaaagactgaagacggtgtgtatttcaagaggatattccagagagcttgttattttatag

SEQ ID NO: 192038 - DNA, 74 bp, Homo sapiens
ttgtttgaaaagactgaagacggtgtgtatttcaagaggatattccagagagcttgttattttatagtagacac

SEQ ID NO: 192039 - DNA, 75 bp, Homo sapiens
aagactgaagacggtgtgtatttcaagaggatattccagagagcttgttattttatagtagacactcagccactt

SEQ ID NO: 192040 - DNA, 78 bp, Homo sapiens
gtgtatttcaagaggatattccagagagcttgttattttatagtagacactcagccactttccagtgataagttgcaa

SEQ ID NO: 192041 - DNA, 76 bp, Homo sapiens
tttcaagaggatattccagagagcttgttattttatagtagacactcagccactttccagtgataagttgcaattt

SEQ ID NO: 192042 - DNA, 77 bp, Homo sapiens
atattccagagagcttgttattttatagtagacactcagccactttccagtgataagttgcaattttgaactgtaga

SEQ ID NO: 192043 - DNA, 76 bp, Homo sapiens
tgttattttatagtagacactcagccactttccagtgataagttgcaattttgaactgtagaacttgccttcatat

SEQ ID NO: 192044 - DNA, 78 bp, Homo sapiens
tagtagacactcagccactttccagtgataagttgcaattttgaactgtagaacttgccttcatattgcaatggtaaa

SEQ ID NO: 192045 - DNA, 76 bp, Homo sapiens
acactcagccactttccagtgataagttgcaattttgaactgtagaacttgccttcatattgcaatggtaaatatt

SEQ ID NO: 192046 - DNA, 76 bp, Homo sapiens
cactttccagtgataagttgcaattttgaactgtagaacttgccttcatattgcaatggtaaatatttgatcttgt

SEQ ID NO: 192047 - DNA, 74 bp, Homo sapiens
gataagttgcaattttgaactgtagaacttgccttcatattgcaatggtaaatatttgatcttgttaataaaat

SEQ ID NO: 192048 - DNA, 71 bp, Homo sapiens
caattttgaactgtagaacttgccttcatattgcaatggtaaatatttgatcttgttaataaaatttttaa

SEQ ID NO: 192049 - DNA, 67 bp, Homo sapiens
aaaatttttaaattgtattttcactgttgggggaaaacacataaggctgccaatttaagcaagcaaa

SEQ ID NO: 192050 - DNA, 69 bp, Homo sapiens
aattgtattttcactgttgggggaaaacacataaggctgccaatttaagcaagcaaaatcccctccaaa

SEQ ID NO: 192051 - DNA, 72 bp, Homo sapiens
tattttcactgttgggggaaaacacataaggctgccaatttaagcaagcaaaatcccctccaaagcaagcaa

SEQ ID NO: 192052 - DNA, 72 bp, Homo sapiens
aacacataaggctgccaatttaagcaagcaaaatcccctccaaagcaagcaaacagcctcaaaagaaactta

SEQ ID NO: 192053 - DNA, 71 bp, Homo sapiens
ataaggctgccaatttaagcaagcaaaatcccctccaaagcaagcaaacagcctcaaaagaaacttagaaa

SEQ ID NO: 192054 - DNA, 68 bp, Homo sapiens
caatttaagcaagcaaaatcccctccaaagcaagcaaacagcctcaaaagaaacttagaaaaacaaaa

SEQ ID NO: 192055 - DNA, 68 bp, Homo sapiens
taagcaagcaaaatcccctccaaagcaagcaaacagcctcaaaagaaacttagaaaaacaaaaaaagc

SEQ ID NO: 192056 - DNA, 65 bp, Homo sapiens
aagcaaaatcccctccaaagcaagcaaacagcctcaaaagaaacttagaaaaacaaaaaaagccc

SEQ ID NO: 192057 - DNA, 67 bp, Homo sapiens
tccaaagcaagcaaacagcctcaaaagaaacttagaaaaacaaaaaaagcccctcacaaaactagga

SEQ ID NO: 192058 - DNA, 64 bp, Homo sapiens
agcaaacagcctcaaaagaaacttagaaaaacaaaaaaagcccctcacaaaactaggaaaagcc

SEQ ID NO: 192059 - DNA, 65 bp, Homo sapiens
cctcaaaagaaacttagaaaaacaaaaaaagcccctcacaaaactaggaaaagcccagctgataa

SEQ ID NO: 192060 - DNA, 63 bp, Homo sapiens
aacttagaaaaacaaaaaaagcccctcacaaaactaggaaaagcccagctgataaagttaccc

SEQ ID NO: 192061 - DNA, 65 bp, Homo sapiens
aaaaaagcccctcacaaaactaggaaaagcccagctgataaagttacccctttaaaagcaagcaa

SEQ ID NO: 192062 - DNA, 67 bp, Homo sapiens
ctcacaaaactaggaaaagcccagctgataaagttacccctttaaaagcaagcaaacatccctttaa

SEQ ID NO: 192063 - DNA, 66 bp, Homo sapiens
aaactaggaaaagcccagctgataaagttacccctttaaaagcaagcaaacatccctttaaaagca

SEQ ID NO: 192064 - DNA, 71 bp, Homo sapiens
ccagctgataaagttacccctttaaaagcaagcaaacatccctttaaaagcaagcaccacacagcctaata

SEQ ID NO: 192065 - DNA, 67 bp, Homo sapiens
ataaagttacccctttaaaagcaagcaaacatccctttaaaagcaagcaccacacagcctaataaac

SEQ ID NO: 192066 - DNA, 71 bp, Homo sapiens
tttaaaagcaagcaaacatccctttaaaagcaagcaccacacagcctaataaactggctcacgaacctaaa

SEQ ID NO: 192067 - DNA, 72 bp, Homo sapiens
aagcaagcaaacatccctttaaaagcaagcaccacacagcctaataaactggctcacgaacctaaaaactca

SEQ ID NO: 192068 - DNA, 72 bp, Homo sapiens
cctttaaaagcaagcaccacacagcctaataaactggctcacgaacctaaaaactcaagctggtgatactaa

SEQ ID NO: 192069 - DNA, 72 bp, Homo sapiens
caagcaccacacagcctaataaactggctcacgaacctaaaaactcaagctggtgatactaaagacccttaa

SEQ ID NO: 192070 - DNA, 70 bp, Homo sapiens
acagcctaataaactggctcacgaacctaaaaactcaagctggtgatactaaagacccttaaccagtatc

SEQ ID NO: 192071 - DNA, 70 bp, Homo sapiens
ataaactggctcacgaacctaaaaactcaagctggtgatactaaagacccttaaccagtatcttaccata

SEQ ID NO: 192072 - DNA, 71 bp, Homo sapiens
acgaacctaaaaactcaagctggtgatactaaagacccttaaccagtatcttaccataactctcatatgaa

SEQ ID NO: 192073 - DNA, 74 bp, Homo sapiens
aaaactcaagctggtgatactaaagacccttaaccagtatcttaccataactctcatatgaatctctgtaggaa

SEQ ID NO: 192074 - DNA, 74 bp, Homo sapiens
agctggtgatactaaagacccttaaccagtatcttaccataactctcatatgaatctctgtaggaacctccact

SEQ ID NO: 192075 - DNA, 77 bp, Homo sapiens
taaagacccttaaccagtatcttaccataactctcatatgaatctctgtaggaacctccacttggatgatctgaata

SEQ ID NO: 192076 - DNA, 84 bp, Homo sapiens
ttaccataactctcatatgaatctctgtaggaacctccacttggatgatctgaatagtcacgatcacgaccatatccatctcta

SEQ ID NO: 192077 - DNA, 85 bp, Homo sapiens
tctcatatgaatctctgtaggaacctccacttggatgatctgaatagtcacgatcacgaccatatccatctctatcgctaaatta

SEQ ID NO: 192078 - DNA, 77 bp, Homo sapiens
gaacctccacttggatgatctgaatagtcacgatcacgaccatatccatctctatcgctaaattaaagagaaacctt

SEQ ID NO: 192079 - DNA, 76 bp, Homo sapiens
ctgaatagtcacgatcacgaccatatccatctctatcgctaaattaaagagaaacctttaagtcccagagaatcaa

SEQ ID NO: 192080 - DNA, 79 bp, Homo sapiens
attgcaacttttcttacatgtaagccacagaagcaaagtcacttacctatatcctcttgatggatagtcatcacgtgaa

SEQ ID NO: 192081 - DNA, 80 bp, Homo sapiens
ttttcttacatgtaagccacagaagcaaagtcacttacctatatcctcttgatggatagtcatcacgtgaactggaatga

SEQ ID NO: 192082 - DNA, 82 bp, Homo sapiens
acatgtaagccacagaagcaaagtcacttacctatatcctcttgatggatagtcatcacgtgaactggaatgaccataatca

SEQ ID NO: 192083 - DNA, 78 bp, Homo sapiens
aagcaaagtcacttacctatatcctcttgatggatagtcatcacgtgaactggaatgaccataatcacggtaagtata

SEQ ID NO: 192084 - DNA, 79 bp, Homo sapiens
atcacgtgaactggaatgaccataatcacggtaagtataatctcgtggtggtggtgcataatctctagtatcacgagaa

SEQ ID NO: 192085 - DNA, 77 bp, Homo sapiens
tggaatgaccataatcacggtaagtataatctcgtggtggtggtgcataatctctagtatcacgagaacttgggtaa

SEQ ID NO: 192086 - DNA, 78 bp, Homo sapiens
ataatcacggtaagtataatctcgtggtggtggtgcataatctctagtatcacgagaacttgggtaatctctgcttga

SEQ ID NO: 192087 - DNA, 79 bp, Homo sapiens
taagtataatctcgtggtggtggtgcataatctctagtatcacgagaacttgggtaatctctgcttgaatagctacaaa

SEQ ID NO: 192088 - DNA, 79 bp, Homo sapiens
ataatctcgtggtggtggtgcataatctctagtatcacgagaacttgggtaatctctgcttgaatagctacaaagcaaa

SEQ ID NO: 192089 - DNA, 76 bp, Homo sapiens
tggtgcataatctctagtatcacgagaacttgggtaatctctgcttgaatagctacaaagcaaaagttttggttta

SEQ ID NO: 192090 - DNA, 74 bp, Homo sapiens
ataatctctagtatcacgagaacttgggtaatctctgcttgaatagctacaaagcaaaagttttggtttatgct

SEQ ID NO: 192091 - DNA, 67 bp, Homo sapiens
ccttcaaccttaattattaatttaaaaagctgcacttttctattacctgtctttagtagaataccca

SEQ ID NO: 192092 - DNA, 70 bp, Homo sapiens
ttaattattaatttaaaaagctgcacttttctattacctgtctttagtagaatacccatcatctcttggg

SEQ ID NO: 192093 - DNA, 70 bp, Homo sapiens
aatttaaaaagctgcacttttctattacctgtctttagtagaatacccatcatctcttggggacaaataa

SEQ ID NO: 192094 - DNA, 73 bp, Homo sapiens
aaagctgcacttttctattacctgtctttagtagaatacccatcatctcttggggacaaataaacatctctac

SEQ ID NO: 192095 - DNA, 74 bp, Homo sapiens
ttttctattacctgtctttagtagaatacccatcatctcttggggacaaataaacatctctacgagagggcagc

SEQ ID NO: 192096 - DNA, 74 bp, Homo sapiens
tgtctttagtagaatacccatcatctcttggggacaaataaacatctctacgagagggcagcggttcccttcga

SEQ ID NO: 192097 - DNA, 73 bp, Homo sapiens
tagaatacccatcatctcttggggacaaataaacatctctacgagagggcagcggttcccttcgaggtggacc

SEQ ID NO: 192098 - DNA, 73 bp, Homo sapiens
atcatctcttggggacaaataaacatctctacgagagggcagcggttcccttcgaggtggacctccataacta

SEQ ID NO: 192099 - DNA, 72 bp, Homo sapiens
ggacaaataaacatctctacgagagggcagcggttcccttcgaggtggacctccataactatctcttccacg

SEQ ID NO: 192100 - DNA, 75 bp, Homo sapiens
tctctacgagagggcagcggttcccttcgaggtggacctccataactatctcttccacgtgatacaggagcttaa

SEQ ID NO: 192101 - DNA, 71 bp, Homo sapiens
agggcagcggttcccttcgaggtggacctccataactatctcttccacgtgatacaggagcttaaggaaaa

SEQ ID NO: 192102 - DNA, 71 bp, Homo sapiens
ttcccttcgaggtggacctccataactatctcttccacgtgatacaggagcttaaggaaaaatatcatttt

SEQ ID NO: 192103 - DNA, 75 bp, Homo sapiens
aattctttgtgttacggtagtagcataaatcatcatacatggaacatttacctcttcctcccattccactgctac

SEQ ID NO: 192104 - DNA, 77 bp, Homo sapiens
gttacggtagtagcataaatcatcatacatggaacatttacctcttcctcccattccactgctactgcgaactggtc

SEQ ID NO: 192105 - DNA, 80 bp, Homo sapiens
taaatcatcatacatggaacatttacctcttcctcccattccactgctactgcgaactggtcctgaaggtgcagatctct

SEQ ID NO: 192106 - DNA, 79 bp, Homo sapiens
atcatacatggaacatttacctcttcctcccattccactgctactgcgaactggtcctgaaggtgcagatctcttagga

SEQ ID NO: 192107 - DNA, 75 bp, Homo sapiens
aacatttacctcttcctcccattccactgctactgcgaactggtcctgaaggtgcagatctcttaggaggaggac

SEQ ID NO: 192108 - DNA, 72 bp, Homo sapiens
ctactgcgaactggtcctgaaggtgcagatctcttaggaggaggacccccacttcttggtggtggtcctctt

SEQ ID NO: 192109 - DNA, 71 bp, Homo sapiens
tggtcctgaaggtgcagatctcttaggaggaggacccccacttcttggtggtggtcctctttttactggga

SEQ ID NO: 192110 - DNA, 69 bp, Homo sapiens
aaggtgcagatctcttaggaggaggacccccacttcttggtggtggtcctctttttactgggagtggtc

SEQ ID NO: 192111 - DNA, 66 bp, Homo sapiens
ttaggaggaggacccccacttcttggtggtggtcctctttttactgggagtggtcccctggaagaa

SEQ ID NO: 192112 - DNA, 74 bp, Homo sapiens
gtggtcccctggaagaactcatgttaaaattcatggaatatccaccgtcatctgcatcaaaaatagaaaagaaa

SEQ ID NO: 192113 - DNA, 67 bp, Homo sapiens
agtccctaacttatacaccaaacccgaggtccacgcaagttattacccatgtgtcctccccgtgagg

SEQ ID NO: 192114 - DNA, 68 bp, Homo sapiens
taacttatacaccaaacccgaggtccacgcaagttattacccatgtgtcctccccgtgagggaggtcc

SEQ ID NO: 192115 - DNA, 66 bp, Homo sapiens
accaaacccgaggtccacgcaagttattacccatgtgtcctccccgtgagggaggtcccctggttc

SEQ ID NO: 192116 - DNA, 68 bp, Homo sapiens
aggtccacgcaagttattacccatgtgtcctccccgtgagggaggtcccctggttcctccacttcctc

SEQ ID NO: 192117 - DNA, 67 bp, Homo sapiens
aagttattacccatgtgtcctccccgtgagggaggtcccctggttcctccacttcctcctcttccac

SEQ ID NO: 192118 - DNA, 68 bp, Homo sapiens
atgtgtcctccccgtgagggaggtcccctggttcctccacttcctcctcttccacctctaagacctct

SEQ ID NO: 192119 - DNA, 69 bp, Homo sapiens
cgtgagggaggtcccctggttcctccacttcctcctcttccacctctaagacctcttggagggcctcta

SEQ ID NO: 192120 - DNA, 68 bp, Homo sapiens
aggtcccctggttcctccacttcctcctcttccacctctaagacctcttggagggcctctacttcttg

SEQ ID NO: 192121 - DNA, 70 bp, Homo sapiens
ctggttcctccacttcctcctcttccacctctaagacctcttggagggcctctacttcttggaggtggag

SEQ ID NO: 192122 - DNA, 71 bp, Homo sapiens
ttcctcctcttccacctctaagacctcttggagggcctctacttcttggaggtggaggcggtccacgtcta

SEQ ID NO: 192123 - DNA, 71 bp, Homo sapiens
ttccacctctaagacctcttggagggcctctacttcttggaggtggaggcggtccacgtctaccactttca

SEQ ID NO: 192124 - DNA, 69 bp, Homo sapiens
tggtttggtggcttgttccaccttgatggcttttccatctaatgactaaaaaaaaagatacgattaaat

SEQ ID NO: 192125 - DNA, 70 bp, Homo sapiens
gcttgttccaccttgatggcttttccatctaatgactaaaaaaaaagatacgattaaattaaatcaagat

SEQ ID NO: 192126 - DNA, 82 bp, Homo sapiens
ttattttatgcactagtaacaggttatcatccatcgtgtagacaatctcacctttccattcatgtctctggctgcatcctta

SEQ ID NO: 192127 - DNA, 82 bp, Homo sapiens
actagtaacaggttatcatccatcgtgtagacaatctcacctttccattcatgtctctggctgcatccttagcgtctgctgg

SEQ ID NO: 192128 - DNA, 69 bp, Homo sapiens
gtgacaaaagcaaatcctcttgatttgttggtttcacggtctttcatcaagagtactaaaaagtagttt

SEQ ID NO: 192129 - DNA, 69 bp, Homo sapiens
aagcaaatcctcttgatttgttggtttcacggtctttcatcaagagtactaaaaagtagttttcagaaa

SEQ ID NO: 192130 - DNA, 67 bp, Homo sapiens
ttgatttgttggtttcacggtctttcatcaagagtactaaaaagtagttttcagaaaaataaagtgt

SEQ ID NO: 192131 - DNA, 66 bp, Homo sapiens
tggtttcacggtctttcatcaagagtactaaaaagtagttttcagaaaaataaagtgttaccctag

SEQ ID NO: 192132 - DNA, 67 bp, Homo sapiens
ggtctttcatcaagagtactaaaaagtagttttcagaaaaataaagtgttaccctaggtcaaatgaa

SEQ ID NO: 192133 - DNA, 65 bp, Homo sapiens
caagagtactaaaaagtagttttcagaaaaataaagtgttaccctaggtcaaatgaaataaccaa

SEQ ID NO: 192134 - DNA, 76 bp, Homo sapiens
tatattttaattataatagcccagcctgtactgccagacaactcaccttccactattcgtccatatttgccaaata

SEQ ID NO: 192135 - DNA, 76 bp, Homo sapiens
tttaattataatagcccagcctgtactgccagacaactcaccttccactattcgtccatatttgccaaatactgct

SEQ ID NO: 192136 - DNA, 78 bp, Homo sapiens
ccagcctgtactgccagacaactcaccttccactattcgtccatatttgccaaatactgcttcaagagctttctcatt

SEQ ID NO: 192137 - DNA, 77 bp, Homo sapiens
ctgtactgccagacaactcaccttccactattcgtccatatttgccaaatactgcttcaagagctttctcatttgtt

SEQ ID NO: 192138 - DNA, 75 bp, Homo sapiens
tccatatttgccaaatactgcttcaagagctttctcatttgtttccgtattaagcccaccaatgaagagctttcc

SEQ ID NO: 192139 - DNA, 74 bp, Homo sapiens
gagctttctcatttgtttccgtattaagcccaccaatgaagagctttcctgggcgatctgcttcaaccatgttt

SEQ ID NO: 192140 - DNA, 72 bp, Homo sapiens
ttctcatttgtttccgtattaagcccaccaatgaagagctttcctgggcgatctgcttcaaccatgtttttt

SEQ ID NO: 192141 - DNA, 68 bp, Homo sapiens
taacacggggagagtgtcacgaaaaacggactgaggaaaggagacacgtaccggaggggtgacaatgg

SEQ ID NO: 192142 - DNA, 69 bp, Homo sapiens
agtgtcacgaaaaacggactgaggaaaggagacacgtaccggaggggtgacaatgggttcaagctccaa

SEQ ID NO: 192143 - DNA, 68 bp, Homo sapiens
aaaaacggactgaggaaaggagacacgtaccggaggggtgacaatgggttcaagctccaacgagctcg

SEQ ID NO: 192144 - DNA, 71 bp, Homo sapiens
gaaaggagacacgtaccggaggggtgacaatgggttcaagctccaacgagctcggcgataggggcttccta

SEQ ID NO: 192145 - DNA, 76 bp, Homo sapiens
agacacgtaccggaggggtgacaatgggttcaagctccaacgagctcggcgataggggcttcctagcagctcagca

SEQ ID NO: 192146 - DNA, 76 bp, Homo sapiens
ccggaggggtgacaatgggttcaagctccaacgagctcggcgataggggcttcctagcagctcagcaccagtggcg

SEQ ID NO: 192147 - DNA, 79 bp, Homo sapiens
acaatgggttcaagctccaacgagctcggcgataggggcttcctagcagctcagcaccagtggcggctgccgggtgcga

SEQ ID NO: 192148 - DNA, 79 bp, Homo sapiens
tcaagctccaacgagctcggcgataggggcttcctagcagctcagcaccagtggcggctgccgggtgcgaggaccgaac

SEQ ID NO: 192149 - DNA, 77 bp, Homo sapiens
acgagctcggcgataggggcttcctagcagctcagcaccagtggcggctgccgggtgcgaggaccgaaccgcgaagc

SEQ ID NO: 192150 - DNA, 77 bp, Homo sapiens
ataggggcttcctagcagctcagcaccagtggcggctgccgggtgcgaggaccgaaccgcgaagccgctagcactac

SEQ ID NO: 192151 - DNA, 80 bp, Homo sapiens
ttcctagcagctcagcaccagtggcggctgccgggtgcgaggaccgaaccgcgaagccgctagcactactgcgcaacgag

SEQ ID NO: 192152 - DNA, 75 bp, Homo sapiens
caccagtggcggctgccgggtgcgaggaccgaaccgcgaagccgctagcactactgcgcaacgagggcgaacaaa

SEQ ID NO: 192153 - DNA, 76 bp, Homo sapiens
ggctgccgggtgcgaggaccgaaccgcgaagccgctagcactactgcgcaacgagggcgaacaaaggagacagcaa

SEQ ID NO: 192154 - DNA, 75 bp, Homo sapiens
gtgcgaggaccgaaccgcgaagccgctagcactactgcgcaacgagggcgaacaaaggagacagcaaactttata

SEQ ID NO: 192155 - DNA, 73 bp, Homo sapiens
accgaaccgcgaagccgctagcactactgcgcaacgagggcgaacaaaggagacagcaaactttatactgccc

SEQ ID NO: 192156 - DNA, 73 bp, Homo sapiens
aagccgctagcactactgcgcaacgagggcgaacaaaggagacagcaaactttatactgcccgggaacgaggc

SEQ ID NO: 192157 - DNA, 74 bp, Homo sapiens
tagcactactgcgcaacgagggcgaacaaaggagacagcaaactttatactgcccgggaacgaggctgaaggac

SEQ ID NO: 192158 - DNA, 69 bp, Homo sapiens
aacgagggcgaacaaaggagacagcaaactttatactgcccgggaacgaggctgaaggacccggatgga

SEQ ID NO: 192159 - DNA, 69 bp, Homo sapiens
acaaaggagacagcaaactttatactgcccgggaacgaggctgaaggacccggatggaaacggagctta

SEQ ID NO: 192160 - DNA, 69 bp, Homo sapiens
acagcaaactttatactgcccgggaacgaggctgaaggacccggatggaaacggagcttagaatttgaa

SEQ ID NO: 192161 - DNA, 68 bp, Homo sapiens
actttatactgcccgggaacgaggctgaaggacccggatggaaacggagcttagaatttgaaacgcaa

SEQ ID NO: 192162 - DNA, 76 bp, Homo sapiens
ctttaatgtaatgcagttaatgataaataaaatcacatctgaggctttgaatgaatcgttgcgattaactttatta

SEQ ID NO: 192163 - DNA, 75 bp, Homo sapiens
atgcagttaatgataaataaaatcacatctgaggctttgaatgaatcgttgcgattaactttattaatattttaa

SEQ ID NO: 192164 - DNA, 72 bp, Homo sapiens
tttaaaatatgaaaactgtaaaacatagtatttatgtaaacacctgaggactgttcaagtgggtacagcatc

SEQ ID NO: 192165 - DNA, 74 bp, Homo sapiens
gaaaactgtaaaacatagtatttatgtaaacacctgaggactgttcaagtgggtacagcatcttcatacaaaca

SEQ ID NO: 192166 - DNA, 74 bp, Homo sapiens
aaacatagtatttatgtaaacacctgaggactgttcaagtgggtacagcatcttcatacaaacaacttgaaaga

SEQ ID NO: 192167 - DNA, 74 bp, Homo sapiens
tatttatgtaaacacctgaggactgttcaagtgggtacagcatcttcatacaaacaacttgaaagaagaccaag

SEQ ID NO: 192168 - DNA, 72 bp, Homo sapiens
gtaaacacctgaggactgttcaagtgggtacagcatcttcatacaaacaacttgaaagaagaccaagtttaa

SEQ ID NO: 192169 - DNA, 74 bp, Homo sapiens
gactgttcaagtgggtacagcatcttcatacaaacaacttgaaagaagaccaagtttaagtaagaatcttatga

SEQ ID NO: 192170 - DNA, 74 bp, Homo sapiens
gtgggtacagcatcttcatacaaacaacttgaaagaagaccaagtttaagtaagaatcttatgacatgtaagga

SEQ ID NO: 192171 - DNA, 75 bp, Homo sapiens
cagcatcttcatacaaacaacttgaaagaagaccaagtttaagtaagaatcttatgacatgtaaggaataacata

SEQ ID NO: 192172 - DNA, 71 bp, Homo sapiens
acaaacaacttgaaagaagaccaagtttaagtaagaatcttatgacatgtaaggaataacataaatgaagc

SEQ ID NO: 192173 - DNA, 72 bp, Homo sapiens
cttgaaagaagaccaagtttaagtaagaatcttatgacatgtaaggaataacataaatgaagctattcttta

SEQ ID NO: 192174 - DNA, 73 bp, Homo sapiens
gaccaagtttaagtaagaatcttatgacatgtaaggaataacataaatgaagctattctttaaatagttgcat

SEQ ID NO: 192175 - DNA, 77 bp, Homo sapiens
gtaagaatcttatgacatgtaaggaataacataaatgaagctattctttaaatagttgcattcatgtctaaagtaca

SEQ ID NO: 192176 - DNA, 75 bp, Homo sapiens
cttatgacatgtaaggaataacataaatgaagctattctttaaatagttgcattcatgtctaaagtacatttggt

SEQ ID NO: 192177 - DNA, 74 bp, Homo sapiens
gacatgtaaggaataacataaatgaagctattctttaaatagttgcattcatgtctaaagtacatttggttttc

SEQ ID NO: 192178 - DNA, 72 bp, Homo sapiens
gtaaggaataacataaatgaagctattctttaaatagttgcattcatgtctaaagtacatttggttttctaa

SEQ ID NO: 192179 - DNA, 72 bp, Homo sapiens
gaataacataaatgaagctattctttaaatagttgcattcatgtctaaagtacatttggttttctaaaaaga

SEQ ID NO: 192180 - DNA, 71 bp, Homo sapiens
cataaatgaagctattctttaaatagttgcattcatgtctaaagtacatttggttttctaaaaagaaaatg

SEQ ID NO: 192181 - DNA, 72 bp, Homo sapiens
tgaagctattctttaaatagttgcattcatgtctaaagtacatttggttttctaaaaagaaaatgtacattc

SEQ ID NO: 192182 - DNA, 72 bp, Homo sapiens
gctattctttaaatagttgcattcatgtctaaagtacatttggttttctaaaaagaaaatgtacattcttgc

SEQ ID NO: 192183 - DNA, 70 bp, Homo sapiens
ttctttaaatagttgcattcatgtctaaagtacatttggttttctaaaaagaaaatgtacattcttgccc

SEQ ID NO: 192184 - DNA, 70 bp, Homo sapiens
cattcatgtctaaagtacatttggttttctaaaaagaaaatgtacattcttgcccctggtgaatatttta

SEQ ID NO: 192185 - DNA, 69 bp, Homo sapiens
gtctaaagtacatttggttttctaaaaagaaaatgtacattcttgcccctggtgaatattttattggca

SEQ ID NO: 192186 - DNA, 69 bp, Homo sapiens
ttggttttctaaaaagaaaatgtacattcttgcccctggtgaatattttattggcatttacaacaaatg

SEQ ID NO: 192187 - DNA, 70 bp, Homo sapiens
ctaaaaagaaaatgtacattcttgcccctggtgaatattttattggcatttacaacaaatggctaatact

SEQ ID NO: 192188 - DNA, 75 bp, Homo sapiens
tgtacattcttgcccctggtgaatattttattggcatttacaacaaatggctaatacttttataactgattctca

SEQ ID NO: 192189 - DNA, 74 bp, Homo sapiens
ctggtgaatattttattggcatttacaacaaatggctaatacttttataactgattctcatagcttataaacat

SEQ ID NO: 192190 - DNA, 76 bp, Homo sapiens
ttggcatttacaacaaatggctaatacttttataactgattctcatagcttataaacattacatcaaagttacaca

SEQ ID NO: 192191 - DNA, 73 bp, Homo sapiens
tttacaacaaatggctaatacttttataactgattctcatagcttataaacattacatcaaagttacacaaag

SEQ ID NO: 192192 - DNA, 73 bp, Homo sapiens
aatggctaatacttttataactgattctcatagcttataaacattacatcaaagttacacaaagtaataacaa

SEQ ID NO: 192193 - DNA, 76 bp, Homo sapiens
tataactgattctcatagcttataaacattacatcaaagttacacaaagtaataacaataaacatatagcaccatt

SEQ ID NO: 192194 - DNA, 76 bp, Homo sapiens
ctgattctcatagcttataaacattacatcaaagttacacaaagtaataacaataaacatatagcaccatttcctc

SEQ ID NO: 192195 - DNA, 72 bp, Homo sapiens
agcttataaacattacatcaaagttacacaaagtaataacaataaacatatagcaccatttcctcttcaaag

SEQ ID NO: 192196 - DNA, 72 bp, Homo sapiens
cattacatcaaagttacacaaagtaataacaataaacatatagcaccatttcctcttcaaagttctaactta

SEQ ID NO: 192197 - DNA, 70 bp, Homo sapiens
tacacaaagtaataacaataaacatatagcaccatttcctcttcaaagttctaacttataaaataaagcc

SEQ ID NO: 192198 - DNA, 69 bp, Homo sapiens
aataacaataaacatatagcaccatttcctcttcaaagttctaacttataaaataaagccccaaacatg

SEQ ID NO: 192199 - DNA, 71 bp, Homo sapiens
aataaacatatagcaccatttcctcttcaaagttctaacttataaaataaagccccaaacatggctgggca

SEQ ID NO: 192200 - DNA, 72 bp, Homo sapiens
aaataaaataaagccccaaacaataagtcagaactaatatatctttcaaagtgtagcagaataaatggctca

SEQ ID NO: 192201 - DNA, 75 bp, Homo sapiens
taaagccccaaacaataagtcagaactaatatatctttcaaagtgtagcagaataaatggctcagaactaagcaa

SEQ ID NO: 192202 - DNA, 74 bp, Homo sapiens
ccaaacaataagtcagaactaatatatctttcaaagtgtagcagaataaatggctcagaactaagcaaattaat

SEQ ID NO: 192203 - DNA, 77 bp, Homo sapiens
agtcagaactaatatatctttcaaagtgtagcagaataaatggctcagaactaagcaaattaattagaaacattgca

SEQ ID NO: 192204 - DNA, 76 bp, Homo sapiens
atctttcaaagtgtagcagaataaatggctcagaactaagcaaattaattagaaacattgcataggacagagaact

SEQ ID NO: 192205 - DNA, 76 bp, Homo sapiens
aagtgtagcagaataaatggctcagaactaagcaaattaattagaaacattgcataggacagagaacttccctgta

SEQ ID NO: 192206 - DNA, 74 bp, Homo sapiens
ataaatggctcagaactaagcaaattaattagaaacattgcataggacagagaacttccctgtatggaaaccaa

SEQ ID NO: 192207 - DNA, 76 bp, Homo sapiens
tcagaactaagcaaattaattagaaacattgcataggacagagaacttccctgtatggaaaccaatctacagattg

SEQ ID NO: 192208 - DNA, 75 bp, Homo sapiens
ctaagcaaattaattagaaacattgcataggacagagaacttccctgtatggaaaccaatctacagattgtttca

SEQ ID NO: 192209 - DNA, 75 bp, Homo sapiens
caaattaattagaaacattgcataggacagagaacttccctgtatggaaaccaatctacagattgtttcatatcc

SEQ ID NO: 192210 - DNA, 74 bp, Homo sapiens
aattaattagaaacattgcataggacagagaacttccctgtatggaaaccaatctacagattgtttcatatccc

SEQ ID NO: 192211 - DNA, 76 bp, Homo sapiens
taggacagagaacttccctgtatggaaaccaatctacagattgtttcatatcccctgaagagtaagctgagaggta

SEQ ID NO: 192212 - DNA, 77 bp, Homo sapiens
ttccctgtatggaaaccaatctacagattgtttcatatcccctgaagagtaagctgagaggtactggtgatagcaaa

SEQ ID NO: 192213 - DNA, 79 bp, Homo sapiens
tggaaaccaatctacagattgtttcatatcccctgaagagtaagctgagaggtactggtgatagcaaacgatggacata

SEQ ID NO: 192214 - DNA, 77 bp, Homo sapiens
aatctacagattgtttcatatcccctgaagagtaagctgagaggtactggtgatagcaaacgatggacatatatttt

SEQ ID NO: 192215 - DNA, 76 bp, Homo sapiens
tttcatatcccctgaagagtaagctgagaggtactggtgatagcaaacgatggacatatattttttacgaaatcaa

SEQ ID NO: 192216 - DNA, 75 bp, Homo sapiens
cctgaagagtaagctgagaggtactggtgatagcaaacgatggacatatattttttacgaaatcaaaacatctaa

SEQ ID NO: 192217 - DNA, 75 bp, Homo sapiens
agagtaagctgagaggtactggtgatagcaaacgatggacatatattttttacgaaatcaaaacatctaactata

SEQ ID NO: 192218 - DNA, 77 bp, Homo sapiens
gtactggtgatagcaaacgatggacatatattttttacgaaatcaaaacatctaactatatacatagttcatcgtca

SEQ ID NO: 192219 - DNA, 77 bp, Homo sapiens
atggacatatattttttacgaaatcaaaacatctaactatatacatagttcatcgtcacctctgtggcagtgcaaag

SEQ ID NO: 192220 - DNA, 78 bp, Homo sapiens
atatattttttacgaaatcaaaacatctaactatatacatagttcatcgtcacctctgtggcagtgcaaagtgccaga

SEQ ID NO: 192221 - DNA, 78 bp, Homo sapiens
aaatcaaaacatctaactatatacatagttcatcgtcacctctgtggcagtgcaaagtgccagattaaattcaagaaa

SEQ ID NO: 192222 - DNA, 76 bp, Homo sapiens
aaacatctaactatatacatagttcatcgtcacctctgtggcagtgcaaagtgccagattaaattcaagaaaaaaa

SEQ ID NO: 192223 - DNA, 76 bp, Homo sapiens
tatatacatagttcatcgtcacctctgtggcagtgcaaagtgccagattaaattcaagaaaaaaaagatttacttg

SEQ ID NO: 192224 - DNA, 74 bp, Homo sapiens
agttcatcgtcacctctgtggcagtgcaaagtgccagattaaattcaagaaaaaaaagatttacttgtgtgtaa

SEQ ID NO: 192225 - DNA, 72 bp, Homo sapiens
ctgtggcagtgcaaagtgccagattaaattcaagaaaaaaaagatttacttgtgtgtaaacctacaggtata

SEQ ID NO: 192226 - DNA, 70 bp, Homo sapiens
gcagtgcaaagtgccagattaaattcaagaaaaaaaagatttacttgtgtgtaaacctacaggtataaaa

SEQ ID NO: 192227 - DNA, 69 bp, Homo sapiens
gtgccagattaaattcaagaaaaaaaagatttacttgtgtgtaaacctacaggtataaaacaatatata

SEQ ID NO: 192228 - DNA, 66 bp, Homo sapiens
caagaaaaaaaagatttacttgtgtgtaaacctacaggtataaaacaatatataaatatggtaaag

SEQ ID NO: 192229 - DNA, 70 bp, Homo sapiens
aagatttacttgtgtgtaaacctacaggtataaaacaatatataaatatggtaaagtaccatatgaagaa

SEQ ID NO: 192230 - DNA, 72 bp, Homo sapiens
tacttgtgtgtaaacctacaggtataaaacaatatataaatatggtaaagtaccatatgaagaataaacaca

SEQ ID NO: 192231 - DNA, 75 bp, Homo sapiens
cctacaggtataaaacaatatataaatatggtaaagtaccatatgaagaataaacacatacaatatatatcttca

SEQ ID NO: 192232 - DNA, 79 bp, Homo sapiens
taccatatgaagaataaacacatacaatatatatcttcaaaaattttggacacaggtatcttcatatagagatgtaaga

SEQ ID NO: 192233 - DNA, 77 bp, Homo sapiens
taaacacatacaatatatatcttcaaaaattttggacacaggtatcttcatatagagatgtaagaaaagaatgccta

SEQ ID NO: 192234 - DNA, 75 bp, Homo sapiens
caatatatatcttcaaaaattttggacacaggtatcttcatatagagatgtaagaaaagaatgcctagttaaatg

SEQ ID NO: 192235 - DNA, 73 bp, Homo sapiens
cttcaaaaattttggacacaggtatcttcatatagagatgtaagaaaagaatgcctagttaaatgtccaagcg

SEQ ID NO: 192236 - DNA, 76 bp, Homo sapiens
tttggacacaggtatcttcatatagagatgtaagaaaagaatgcctagttaaatgtccaagcgtagtgaaaatatg

SEQ ID NO: 192237 - DNA, 72 bp, Homo sapiens
cttcatatagagatgtaagaaaagaatgcctagttaaatgtccaagcgtagtgaaaatatggaaagttttaa

SEQ ID NO: 192238 - DNA, 69 bp, Homo sapiens
gatgtaagaaaagaatgcctagttaaatgtccaagcgtagtgaaaatatggaaagttttaaaataatag

SEQ ID NO: 192239 - DNA, 66 bp, Homo sapiens
agttaaatgtccaagcgtagtgaaaatatggaaagttttaaaataataggaatttcactgaaaaaa

SEQ ID NO: 192240 - DNA, 69 bp, Homo sapiens
gcgtagtgaaaatatggaaagttttaaaataataggaatttcactgaaaaaatttaatctgactccatc

SEQ ID NO: 192241 - DNA, 67 bp, Homo sapiens
aatatggaaagttttaaaataataggaatttcactgaaaaaatttaatctgactccatccaaacaac

SEQ ID NO: 192242 - DNA, 67 bp, Homo sapiens
gttttaaaataataggaatttcactgaaaaaatttaatctgactccatccaaacaaccctcgtagta

SEQ ID NO: 192243 - DNA, 74 bp, Homo sapiens
tcactgaaaaaatttaatctgactccatccaaacaaccctcgtagtataaatatctcctgcataaaatgacaat

SEQ ID NO: 192244 - DNA, 75 bp, Homo sapiens
aatttaatctgactccatccaaacaaccctcgtagtataaatatctcctgcataaaatgacaattctatcctata

SEQ ID NO: 192245 - DNA, 75 bp, Homo sapiens
aatctgactccatccaaacaaccctcgtagtataaatatctcctgcataaaatgacaattctatcctataattta

SEQ ID NO: 192246 - DNA, 71 bp, Homo sapiens
catccaaacaaccctcgtagtataaatatctcctgcataaaatgacaattctatcctataatttaaaaaat

SEQ ID NO: 192247 - DNA, 70 bp, Homo sapiens
gacaattctatcctataatttaaaaaatttatcaaaaactggtaagaacacttcatgaaagcttataagc

SEQ ID NO: 192248 - DNA, 66 bp, Homo sapiens
aaaaatttatcaaaaactggtaagaacacttcatgaaagcttataagcttgcttttttcctttaaa

SEQ ID NO: 192249 - DNA, 72 bp, Homo sapiens
tcaaaaactggtaagaacacttcatgaaagcttataagcttgcttttttcctttaaatatgatcaaatacaa

SEQ ID NO: 192250 - DNA, 74 bp, Homo sapiens
acacttcatgaaagcttataagcttgcttttttcctttaaatatgatcaaatacaacatacagagaaataataa

SEQ ID NO: 192251 - DNA, 70 bp, Homo sapiens
aaagcttataagcttgcttttttcctttaaatatgatcaaatacaacatacagagaaataataaaaggaa

SEQ ID NO: 192252 - DNA, 70 bp, Homo sapiens
tttttcctttaaatatgatcaaatacaacatacagagaaataataaaaggaaaataatttatatggctat

SEQ ID NO: 192253 - DNA, 74 bp, Homo sapiens
atatgatcaaatacaacatacagagaaataataaaaggaaaataatttatatggctattccctttctagatata

SEQ ID NO: 192254 - DNA, 74 bp, Homo sapiens
tcaaatacaacatacagagaaataataaaaggaaaataatttatatggctattccctttctagatatactgata

SEQ ID NO: 192255 - DNA, 73 bp, Homo sapiens
gaaataataaaaggaaaataatttatatggctattccctttctagatatactgatagaacatgaacagaacac

SEQ ID NO: 192256 - DNA, 74 bp, Homo sapiens
ataaaaggaaaataatttatatggctattccctttctagatatactgatagaacatgaacagaacaccacagag

SEQ ID NO: 192257 - DNA, 78 bp, Homo sapiens
aggaaaataatttatatggctattccctttctagatatactgatagaacatgaacagaacaccacagagtatcacaca

SEQ ID NO: 192258 - DNA, 77 bp, Homo sapiens
aaataatttatatggctattccctttctagatatactgatagaacatgaacagaacaccacagagtatcacacaaaa

SEQ ID NO: 192259 - DNA, 80 bp, Homo sapiens
aatttatatggctattccctttctagatatactgatagaacatgaacagaacaccacagagtatcacacaaaatatctga

SEQ ID NO: 192260 - DNA, 82 bp, Homo sapiens
tattccctttctagatatactgatagaacatgaacagaacaccacagagtatcacacaaaatatctgagaaaagatgatatc

SEQ ID NO: 192261 - DNA, 82 bp, Homo sapiens
atatactgatagaacatgaacagaacaccacagagtatcacacaaaatatctgagaaaagatgatatctacaggtgcacctt

SEQ ID NO: 192262 - DNA, 81 bp, Homo sapiens
tgatagaacatgaacagaacaccacagagtatcacacaaaatatctgagaaaagatgatatctacaggtgcacctttaaat

SEQ ID NO: 192263 - DNA, 80 bp, Homo sapiens
acatgaacagaacaccacagagtatcacacaaaatatctgagaaaagatgatatctacaggtgcacctttaaattctcta

SEQ ID NO: 192264 - DNA, 77 bp, Homo sapiens
accacagagtatcacacaaaatatctgagaaaagatgatatctacaggtgcacctttaaattctctagtgaggaaaa

SEQ ID NO: 192265 - DNA, 78 bp, Homo sapiens
atcacacaaaatatctgagaaaagatgatatctacaggtgcacctttaaattctctagtgaggaaaaattctcatgga

SEQ ID NO: 192266 - DNA, 75 bp, Homo sapiens
aatatctgagaaaagatgatatctacaggtgcacctttaaattctctagtgaggaaaaattctcatggatttaat

SEQ ID NO: 192267 - DNA, 74 bp, Homo sapiens
gaaaagatgatatctacaggtgcacctttaaattctctagtgaggaaaaattctcatggatttaattatagaag

SEQ ID NO: 192268 - DNA, 73 bp, Homo sapiens
tctacaggtgcacctttaaattctctagtgaggaaaaattctcatggatttaattatagaagttgtcaatccc

SEQ ID NO: 192269 - DNA, 70 bp, Homo sapiens
gaggaaaaattctcatggatttaattatagaagttgtcaatccctgatattttcccctttgggatttagc

SEQ ID NO: 192270 - DNA, 70 bp, Homo sapiens
ctcatggatttaattatagaagttgtcaatccctgatattttcccctttgggatttagctgttttggttc

SEQ ID NO: 192271 - DNA, 69 bp, Homo sapiens
ggatttaattatagaagttgtcaatccctgatattttcccctttgggatttagctgttttggttctaga

SEQ ID NO: 192272 - DNA, 68 bp, Homo sapiens
atagaagttgtcaatccctgatattttcccctttgggatttagctgttttggttctagatataaaggt

SEQ ID NO: 192273 - DNA, 63 bp, Homo sapiens
ttttcccctttgggatttagctgttttggttctagatataaaggttaaccaaaatcaaaggtt

SEQ ID NO: 192274 - DNA, 65 bp, Homo sapiens
ctttgggatttagctgttttggttctagatataaaggttaaccaaaatcaaaggtttttctctgt

SEQ ID NO: 192275 - DNA, 66 bp, Homo sapiens
gctgttttggttctagatataaaggttaaccaaaatcaaaggtttttctctgttaactacattaag

SEQ ID NO: 192276 - DNA, 66 bp, Homo sapiens
ggttctagatataaaggttaaccaaaatcaaaggtttttctctgttaactacattaagtatatttg

SEQ ID NO: 192277 - DNA, 66 bp, Homo sapiens
accaaaatcaaaggtttttctctgttaactacattaagtatatttgtaaactgtacaatgaaaatt

SEQ ID NO: 192278 - DNA, 66 bp, Homo sapiens
aaggtttttctctgttaactacattaagtatatttgtaaactgtacaatgaaaatttaaaaagaca

SEQ ID NO: 192279 - DNA, 70 bp, Homo sapiens
tctgttaactacattaagtatatttgtaaactgtacaatgaaaatttaaaaagacataaagaactgccaa

SEQ ID NO: 192280 - DNA, 72 bp, Homo sapiens
cattaagtatatttgtaaactgtacaatgaaaatttaaaaagacataaagaactgccaatttgaatatgcca

SEQ ID NO: 192281 - DNA, 72 bp, Homo sapiens
ctgtacaatgaaaatttaaaaagacataaagaactgccaatttgaatatgccaatactaacctgttaaatgc

SEQ ID NO: 192282 - DNA, 69 bp, Homo sapiens
ttaaaaagacataaagaactgccaatttgaatatgccaatactaacctgttaaatgctttttaaagaag

SEQ ID NO: 192283 - DNA, 71 bp, Homo sapiens
gacataaagaactgccaatttgaatatgccaatactaacctgttaaatgctttttaaagaagtagactggg

SEQ ID NO: 192284 - DNA, 70 bp, Homo sapiens
aactgccaatttgaatatgccaatactaacctgttaaatgctttttaaagaagtagactgggggagtggc

SEQ ID NO: 192285 - DNA, 72 bp, Homo sapiens
tttgaatatgccaatactaacctgttaaatgctttttaaagaagtagactgggggagtggcggctgtgtctc

SEQ ID NO: 192286 - DNA, 69 bp, Homo sapiens
aatactaacctgttaaatgctttttaaagaagtagactgggggagtggcggctgtgtctcccaaagctg

SEQ ID NO: 192287 - DNA, 71 bp, Homo sapiens
ttaaatgctttttaaagaagtagactgggggagtggcggctgtgtctcccaaagctggttggtgactccag

SEQ ID NO: 192288 - DNA, 69 bp, Homo sapiens
tttttaaagaagtagactgggggagtggcggctgtgtctcccaaagctggttggtgactccaggaaaaa

SEQ ID NO: 192289 - DNA, 68 bp, Homo sapiens
aagtagactgggggagtggcggctgtgtctcccaaagctggttggtgactccaggaaaaaaacaaagt

SEQ ID NO: 192290 - DNA, 71 bp, Homo sapiens
agtggcggctgtgtctcccaaagctggttggtgactccaggaaaaaaacaaagttgactgaactgttacta

SEQ ID NO: 192291 - DNA, 73 bp, Homo sapiens
tgtgtctcccaaagctggttggtgactccaggaaaaaaacaaagttgactgaactgttactacagttctgcaa

SEQ ID NO: 192292 - DNA, 72 bp, Homo sapiens
aaagctggttggtgactccaggaaaaaaacaaagttgactgaactgttactacagttctgcaattctgataa

SEQ ID NO: 192293 - DNA, 71 bp, Homo sapiens
ggttggtgactccaggaaaaaaacaaagttgactgaactgttactacagttctgcaattctgataaaatat

SEQ ID NO: 192294 - DNA, 70 bp, Homo sapiens
gaaaaaaacaaagttgactgaactgttactacagttctgcaattctgataaaatatttttatgggaactg

SEQ ID NO: 192295 - DNA, 73 bp, Homo sapiens
caaagttgactgaactgttactacagttctgcaattctgataaaatatttttatgggaactgtctacaaaaca

SEQ ID NO: 192296 - DNA, 72 bp, Homo sapiens
ctgaactgttactacagttctgcaattctgataaaatatttttatgggaactgtctacaaaacaaaaactgc

SEQ ID NO: 192297 - DNA, 71 bp, Homo sapiens
actacagttctgcaattctgataaaatatttttatgggaactgtctacaaaacaaaaactgctaagagaaa

SEQ ID NO: 192298 - DNA, 70 bp, Homo sapiens
ctgcaattctgataaaatatttttatgggaactgtctacaaaacaaaaactgctaagagaaatactttta

SEQ ID NO: 192299 - DNA, 64 bp, Homo sapiens
aaaatatttttatgggaactgtctacaaaacaaaaactgctaagagaaatacttttaaattaaa

SEQ ID NO: 192300 - DNA, 67 bp, Homo sapiens
atgggaactgtctacaaaacaaaaactgctaagagaaatacttttaaattaaaatgttaacagtaca

SEQ ID NO: 192301 - DNA, 68 bp, Homo sapiens
ctgtctacaaaacaaaaactgctaagagaaatacttttaaattaaaatgttaacagtacacctgagaa

SEQ ID NO: 192302 - DNA, 70 bp, Homo sapiens
caaaaactgctaagagaaatacttttaaattaaaatgttaacagtacacctgagaattatgtccaatcta

SEQ ID NO: 192303 - DNA, 70 bp, Homo sapiens
gctaagagaaatacttttaaattaaaatgttaacagtacacctgagaattatgtccaatctaaacttaca

SEQ ID NO: 192304 - DNA, 67 bp, Homo sapiens
atacttttaaattaaaatgttaacagtacacctgagaattatgtccaatctaaacttacacattttt

SEQ ID NO: 192305 - DNA, 68 bp, Homo sapiens
aaaatgttaacagtacacctgagaattatgtccaatctaaacttacacatttttttaactgtattttc

SEQ ID NO: 192306 - DNA, 68 bp, Homo sapiens
gttaacagtacacctgagaattatgtccaatctaaacttacacatttttttaactgtattttccttct

SEQ ID NO: 192307 - DNA, 67 bp, Homo sapiens
cacctgagaattatgtccaatctaaacttacacatttttttaactgtattttccttctttaagcttt

SEQ ID NO: 192308 - DNA, 67 bp, Homo sapiens
gtccaatctaaacttacacatttttttaactgtattttccttctttaagcttttcaatgtagtaaca

SEQ ID NO: 192309 - DNA, 68 bp, Homo sapiens
acttacacatttttttaactgtattttccttctttaagcttttcaatgtagtaacacagctttaatgc

SEQ ID NO: 192310 - DNA, 69 bp, Homo sapiens
cacatttttttaactgtattttccttctttaagcttttcaatgtagtaacacagctttaatgctggccc

SEQ ID NO: 192311 - DNA, 82 bp, Homo sapiens
tttcaatgtagtaacacagctttaatgctggccccagcttcagccccatatacttcatcatcacatcactcttgagtaggaa

SEQ ID NO: 192312 - DNA, 83 bp, Homo sapiens
atgtagtaacacagctttaatgctggccccagcttcagccccatatacttcatcatcacatcactcttgagtaggaacagagc

SEQ ID NO: 192313 - DNA, 82 bp, Homo sapiens
gccccagcttcagccccatatacttcatcatcacatcactcttgagtaggaacagagccttcccatcaatttcctacagaga

SEQ ID NO: 192314 - DNA, 81 bp, Homo sapiens
ttcagccccatatacttcatcatcacatcactcttgagtaggaacagagccttcccatcaatttcctacagagagaaggaa

SEQ ID NO: 192315 - DNA, 82 bp, Homo sapiens
atatacttcatcatcacatcactcttgagtaggaacagagccttcccatcaatttcctacagagagaaggaaatcataatca
